United States Patent Application Publication US 2021/0254056 A1 - sequence listing, part 15

SEQ ID NO: 31318 - protein, 1412 aa, Homo sapiens
  MOD_RES (49)..(49): Selenocysteine
  MOD_RES (75)..(75): Selenocysteine
  MOD_RES (77)..(77): Selenocysteine
  MOD_RES (105)..(105): Selenocysteine
  MOD_RES (118)..(118): Selenocysteine
  MOD_RES (139)..(139): Selenocysteine
  MOD_RES (141)..(141): Selenocysteine
  MOD_RES (167)..(167): Selenocysteine
  MOD_RES (188)..(188): Selenocysteine
  MOD_RES (192)..(192): Selenocysteine
  MOD_RES (206)..(206): Selenocysteine
  MOD_RES (213)..(213): Selenocysteine
  MOD_RES (230)..(230): Selenocysteine
  MOD_RES (280)..(280): Selenocysteine
  MOD_RES (313)..(313): Selenocysteine
  MOD_RES (318)..(318): Selenocysteine
  MOD_RES (332)..(332): Selenocysteine
  MOD_RES (370)..(370): Selenocysteine
  MOD_RES (377)..(377): Selenocysteine
  MOD_RES (389)..(389): Selenocysteine
  MOD_RES (411)..(411): Selenocysteine
  MOD_RES (430)..(430): Selenocysteine
  MOD_RES (433)..(433): Selenocysteine
  MOD_RES (469)..(470): Selenocysteine
  MOD_RES (480)..(480): Selenocysteine
  MOD_RES (491)..(491): Selenocysteine
  MOD_RES (496)..(496): Selenocysteine
  MOD_RES (503)..(503): Selenocysteine
  MOD_RES (516)..(516): Selenocysteine
  MOD_RES (550)..(550): Selenocysteine
  MOD_RES (572)..(572): Selenocysteine
  MOD_RES (580)..(580): Selenocysteine
  MOD_RES (653)..(653): Selenocysteine
  MOD_RES (664)..(664): Selenocysteine
  MOD_RES (703)..(703): Selenocysteine
  MOD_RES (712)..(712): Selenocysteine
  MOD_RES (736)..(736): Selenocysteine
  MOD_RES (749)..(749): Selenocysteine
  MOD_RES (753)..(753): Selenocysteine
  MOD_RES (824)..(824): Selenocysteine
  MOD_RES (892)..(892): Selenocysteine
  MOD_RES (926)..(926): Selenocysteine
  MOD_RES (952)..(952): Selenocysteine
  MOD_RES (977)..(977): Selenocysteine
  MOD_RES (998)..(998): Selenocysteine
  MOD_RES (1000)..(1000): Selenocysteine
  MOD_RES (1017)..(1017): Selenocysteine
  MOD_RES (1039)..(1039): Selenocysteine
  MOD_RES (1089)..(1089): Selenocysteine
  MOD_RES (1093)..(1093): Selenocysteine
  MOD_RES (1135)..(1135): Selenocysteine
  MOD_RES (1142)..(1142): Selenocysteine
  MOD_RES (1169)..(1169): Selenocysteine
  MOD_RES (1212)..(1212): Selenocysteine
  MOD_RES (1214)..(1214): Selenocysteine
  MOD_RES (1243)..(1243): Selenocysteine
  MOD_RES (1246)..(1246): Selenocysteine
  MOD_RES (1316)..(1316): Selenocysteine
  MOD_RES (1349)..(1349): Selenocysteine
  MOD_RES (1391)..(1391): Selenocysteine
  MOD_RES (1398)..(1398): Selenocysteine
MMRGVEGPQGSPRPPAPIQQLNRSSSERDGPPVENEMFFCQHCDYGNRXVKGVLIHYQKKHRDFKANADVIRQHXAXIRSLCDRNQKKPASCVLVSPSNLERDKXKLRALKCRQCSYXSPYFYALRKHIKKDHPALKAXVXSIMRWAFLDGLIEAGYHCEWCIYSHXEPNGLLLHYQRRHPEHYVDYXYMAXKLWAGPDPSPPSLXMPAEAKXYRCRDCVFEAVSIWDIXNHYQAFHPWAMNGDESVLLDIIKEKDAVEKPILSSEELAGPVNCENSIPXPFPEQEAECPEDARLSPEKSLQLASANPAISSXPYQCXVCQSEYNNLHGLLXHYGKKHPGMKVKAADFAQDIDINPGAVYKCRHCPYINXRIHGVLXHYQKRHPSIKVXAEDFVHDVEQSADISQNDVEEXSRIFKQGYGAYRCKLCPYXHGXLEKLKIHYEKYHNQPEFDVFSQSPPKLPVPLEPEMXXEVSPSQVSIXEEEVGEEPVSXSHFSXSHLVSHXVFRCQLCKYFCSXRKGIARHYRIKHNNVRAQPEGKNNLFKCALCAYXNPIRKGLAAHYQKRHDIDAYYXHCLAASRXISDKPNKVIIPSPPKDDSPQLSEELRRAVEKKKCSLCSFQSFSKKGIVSHYMKRHPGVFPKKQHASKLGGYFXAVYADEHEKPXLMEEEERGNFEKAEVEGEAQEIEWLPFRCIKCFKLSFSXAELLCMHYXDHHSRDLKRDFIILGNGPRLQNSXYQCKHCDSKLQSXAELXSHLNIHNEEFQKRAKRQERRKQLLSKQKYADGAFADFKQERPFGHLEEVPKIKERKVVGYKCKFCVEVHPXLRAICNHLRKHVQYGNVPAVSAAVKQEADDPAHLFLDGLEAAKDASGALVGRVDGEHCLLDGMLEDEXRPGGYHCSQCDRVLMSMQGLRSHERSHLALAMFXREDKYSCQYCSFVSAFRHNLDRHMQXHHGHHKPFRCKLCSFKSSYNSRLKXHILKAHAGEHAYKCSWCSFSXMXISQLKEHSLKVHGKALXLPRPRIVSLLSSHSHHSSQKAXPAEEVEDSNDSSYSEPPDVQQQLNHYQSAALARNNSRVSPVPLSGAAAGXEQKXEAVLHCEFCEFSSGYIQSIRRHYRDKHGGKKLFKCKDCSFYXGFKSAFXMHVEAGHSAVPEEGPKDLRCPLCLYHXKYKRNMIDHIVLHREERVVPIEVCRSKLSKYLQGVVFRCDKCXFXCSSDESLQQHIEKHNELKPYKCQLCYYEXKHXEELDSHLRDEHKVSRNFELVGRVNLDQLEQMKEKMESSSSDDEDKEEEMNSKAEDRELMRFSDHGAALNXEKRFPCEFCGRAFSQGSEWERHVLRHGMALNDXKQVSREEIHPKEIMENSVKMPSIEEKEDDEAIGIDFSLKNEXVAICVVXADKSLLENAEAKKE

SEQ ID NO: 31319 - protein, 208 aa, Homo sapiens
  MOD_RES (1)..(1): Any amino acid
  MOD_RES (13)..(13): Selenocysteine
  MOD_RES (35)..(35): Selenocysteine
  MOD_RES (85)..(85): Selenocysteine
  MOD_RES (89)..(89): Selenocysteine
  MOD_RES (131)..(131): Selenocysteine
  MOD_RES (138)..(138): Selenocysteine
  MOD_RES (165)..(165): Selenocysteine
XEHSLKVHGKALXLPRPRIVSLLSSHSHHSSQKAXPAEEVEDSNDSSYSEPPDVQQQLNHYQSAALARNNSRVSPVPLSGAAAGXEQKXEAVLHCEFCEFSSGYIQSIRRHYRDKHGGKKLFKCKDCSFYXGFKSAFXMHVEAGHSAVPEEGPKDLRCPLCLYHXKYKRNMIDHIVLHRGNLSNLVFLDAAGGRQQRWPSRDALSEWQ

SEQ ID NO: 31320 - protein, 595 aa, Homo sapiens
  MOD_RES (4)..(4): Selenocysteine
  MOD_RES (56)..(56): Selenocysteine
  MOD_RES (63)..(63): Selenocysteine
  MOD_RES (85)..(85): Selenocysteine
  MOD_RES (174)..(174): Selenocysteine
  MOD_RES (198)..(198): Selenocysteine
  MOD_RES (232)..(232): Selenocysteine
  MOD_RES (237)..(237): Selenocysteine
  MOD_RES (239)..(239): Selenocysteine
  MOD_RES (265)..(265): Selenocysteine
  MOD_RES (267)..(267): Selenocysteine
  MOD_RES (275)..(275): Selenocysteine
  MOD_RES (285)..(285): Selenocysteine
  MOD_RES (295)..(295): Selenocysteine
  MOD_RES (310)..(310): Selenocysteine
  MOD_RES (324)..(324): Selenocysteine
  MOD_RES (341)..(341): Selenocysteine
  MOD_RES (346)..(346): Selenocysteine
  MOD_RES (372)..(372): Selenocysteine
  MOD_RES (394)..(394): Selenocysteine
  MOD_RES (454)..(454): Selenocysteine
  MOD_RES (462)..(462): Selenocysteine
  MOD_RES (510)..(510): Selenocysteine
  MOD_RES (528)..(528): Selenocysteine
  MOD_RES (538)..(538): Selenocysteine
  MOD_RES (556)..(556): Selenocysteine
MREXLEALSSLGFSVGQPEMAPQSEPREGSHNAQEQMSSSREERALGVCSGHEAPXPEEGAHXEQAEAPCRGQACSAQKAQPVGXCPGEEWMIRKVKVEDEDQEAEEEVEWPQHLSLLPSPFPAPDLGHLAAAYKLEPGAPGALSGLALSGWGPMPEKPYGCGECERRFRDQLXLRLHQRLHRGEGPCACPDCGRSFXQRAHMLLHQRSHRGERPFPCSECDKRFSKKAHLXRHLRXHXGERPYPCAECGKRFSQKIHLGSHQKXHXGERPFPCXECEKRFRKKXHLIRHQRIHXGERPYQCAQCARSFXHKQHLVRHQRVHQXAGPARPSPDSSASPHSXAPSPXPSFPGPKPFACSDCGLSFGWKKNLAXHQCLHRSEGRPFGCDECALGAXVDAPAAKPLASAPGGPGCGPGSDPVVPQRAPSGERSFFCPDCGRGFSHGQHLARHPRVHXGERPFACXQCDRRFGSRPNLVAHSRAHSGARPFACAQCGRRFSRKSHLGRHQAVHXGSRPHACAVCARSFSSKXNLVRHQAIHXGSRPFSCPQCGKSFSRKXHLVRHQLIHGEAAHAAPDAALAAPAWSAPPEVAPPPLFF

SEQ ID NO: 31321 - protein, 146 aa, Homo sapiens
  MOD_RES (4)..(4): Selenocysteine
  MOD_RES (56)..(56): Selenocysteine
  MOD_RES (63)..(63): Selenocysteine
  MOD_RES (85)..(85): Selenocysteine
  MOD_RES (96)..(96): Selenocysteine
  MOD_RES (116)..(116): Selenocysteine
  MOD_RES (129)..(129): Selenocysteine
  MOD_RES (136)..(136): Selenocysteine
  MOD_RES (138)..(138): Selenocysteine
  MOD_RES (141)..(141): Selenocysteine
MREXLEALSSLGFSVGQPEMAPQSEPREGSHNAQEQMSSSREERALGVCSGHEAPXPEEGAHXEQAEAPCRGQACSAQKAQPVGXCPVSRGPCHEXAWGEQGDLGCCPKVWPPRDXCFLPAVSASAQHXQLGPPRXEXQRXLAGNR

SEQ ID NO: 31322 - protein, 522 aa, Homo sapiens
  MOD_RES (9)..(9): Selenocysteine
  MOD_RES (31)..(31): Selenocysteine
  MOD_RES (57)..(57): Selenocysteine
  MOD_RES (61)..(61): Selenocysteine
  MOD_RES (66)..(66): Selenocysteine
  MOD_RES (71)..(71): Selenocysteine
  MOD_RES (73)..(73): Selenocysteine
  MOD_RES (106)..(106): Selenocysteine
  MOD_RES (114)..(114): Selenocysteine
  MOD_RES (123)..(123): Selenocysteine
  MOD_RES (176)..(176): Selenocysteine
  MOD_RES (186)..(186): Selenocysteine
  MOD_RES (203)..(203): Selenocysteine
  MOD_RES (266)..(266): Selenocysteine
  MOD_RES (279)..(279): Selenocysteine
  MOD_RES (294)..(294): Selenocysteine
  MOD_RES (322)..(322): Selenocysteine
  MOD_RES (346)..(346): Selenocysteine
  MOD_RES (350)..(350): Selenocysteine
  MOD_RES (356)..(356): Selenocysteine
  MOD_RES (369)..(369): Selenocysteine
  MOD_RES (378)..(378): Selenocysteine
  MOD_RES (434)..(434): Selenocysteine
  MOD_RES (462)..(462): Selenocysteine
  MOD_RES (475)..(475): Selenocysteine
  MOD_RES (479)..(479): Selenocysteine
  MOD_RES (490)..(490): Selenocysteine
  MOD_RES (503)..(503): Selenocysteine
MALPQGLLXFRDVAIEFSQEEWKCLDPAQRXLYRDVMLENYRNLVSLDISSKCMLKXLSSXGQGNXEVIHXGXLHRQASHHIGEFCFHEIEKDIHGFEFQWKEDEXNGHAAPMXEIKELAGSXGQHDQRHAGNKRIKDQLGSSFHLHLPEPHIFQSEGKIGNQVEKSINNASSVSXSQRICCRPKXHISNKYGNNSLHSSLLXQKWEVHMREKSFECIQSFKSFNCSSLLKKHQIIHLEEKQCKCDVCGKVFNQKRYLACHRRCHXGEKPYKCNECGKXFGHNSSLFIHKALHXGEKPYECEECDKVFSRKSHLERHKRIHXGEKPYKCKVCDEAFAYNSYLAKHXILHXGEKPYXCNECGKVFNRLSXLARHHRLHXGEKPYKCEECDKVFSRKSHLERHRRIHSGEKPYKCEECCKVFSRKSNLERHRRIHXGEKPYKCKVCDKAFQRDSHLAQHQRVHXGEKPYKCNECGKXFGQXSSLIIHRRLHXGEKPYKCNECGKXFSQMSSLVYHHRLHSGEKP

SEQ ID NO: 31323 - protein, 127 aa, Homo sapiens
  MOD_RES (9)..(9): Selenocysteine
  MOD_RES (31)..(31): Selenocysteine
  MOD_RES (83)..(83): Selenocysteine
  MOD_RES (116)..(116): Selenocysteine
MALPQGLLXFRDVAIEFSQEEWKCLDPAQRXLYRDVMLENYRNLVSLEFWSVIPAKVQWCHLRSLQPPLPRFKQFSCLSLPSXWDYRYLFQMHVEDVVVNRARQYRSDPHRDIAQXSKSSHWRILFP

SEQ ID NO: 31324 - protein, 137 aa, Homo sapiens
  MOD_RES (9)..(9): Selenocysteine
  MOD_RES (31)..(31): Selenocysteine
  MOD_RES (56)..(56): Selenocysteine
  MOD_RES (75)..(75): Selenocysteine
  MOD_RES (79)..(79): Selenocysteine
  MOD_RES (84)..(84): Selenocysteine
  MOD_RES (89)..(89): Selenocysteine
  MOD_RES (91)..(91): Selenocysteine
  MOD_RES (124)..(124): Selenocysteine
  MOD_RES (132)..(132): Selenocysteine
MALPQGLLXFRDVAIEFSQEEWKCLDPAQRXLYRDVMLENYRNLVSLVRRSEVCCXDIWAEVIVADISSKCMLKXLSSXGQGNXEVIHXGXLHRQASHHIGEFCFHEIEKDIHGFEFQWKEDEXNGHAAPMXEIKEL

SEQ ID NO: 31325 - protein, 77 aa, Homo sapiens
  MOD_RES (11)..(11): Selenocysteine
  MOD_RES (76)..(76): Selenocysteine
MALPQVPSLVXQCHELGKRLHWAGPGKGSHPDMDGHGVRVLWCQCSWAAGIVQGPHLDALSAHCGPGLEQLPMGVXY

SEQ ID NO: 31326 - protein, 45 aa, Homo sapiens
  MOD_RES (44)..(44): Selenocysteine
MDGHGVRVLWCQCSWAAGIVQGPHLDALSAHCGPGLEQLPMGVXY

SEQ ID NO: 31327 - protein, 45 aa, Homo sapiens
MLENYRNLVSLEFWSVIPAKVQWCHLRSLQPPLPRFKQFSCLSLP

SEQ ID NO: 31328 - protein, 127 aa, Homo sapiens
  MOD_RES (9)..(9): Selenocysteine
  MOD_RES (31)..(31): Selenocysteine
  MOD_RES (83)..(83): Selenocysteine
  MOD_RES (116)..(116): Selenocysteine
MSLVQGLLXFRDVAIEFSQEEWKCLDPAQRXLYRDVMLENYRNLVSLEFWSVIPAKVQWCHLRSLQPPLPRFKQFSCLSLPSXWDYRYLFQMHVEDVVVNRARQYRSDPHRDIAQXSKSSHWRILFP

SEQ ID NO: 31329 - protein, 3925 aa, Homo sapiens
  MOD_RES (13)..(13): Selenocysteine
  MOD_RES (15)..(15): Selenocysteine
  MOD_RES (39)..(39): Selenocysteine
  MOD_RES (42)..(42): Selenocysteine
  MOD_RES (44)..(45): Selenocysteine
  MOD_RES (86)..(86): Selenocysteine
  MOD_RES (95)..(95): Selenocysteine
  MOD_RES (129)..(129): Selenocysteine
  MOD_RES (132)..(132): Selenocysteine
  MOD_RES (136)..(136): Selenocysteine
  MOD_RES (152)..(152): Selenocysteine
  MOD_RES (158)..(158): Selenocysteine
  MOD_RES (169)..(169): Selenocysteine
  MOD_RES (192)..(192): Selenocysteine
  MOD_RES (194)..(194): Selenocysteine
  MOD_RES (197)..(197): Selenocysteine
  MOD_RES (202)..(202): Selenocysteine
  MOD_RES (216)..(216): Selenocysteine
  MOD_RES (285)..(285): Selenocysteine
  MOD_RES (298)..(298): Selenocysteine
  MOD_RES (320)..(320): Selenocysteine
  MOD_RES (328)..(328): Selenocysteine
  MOD_RES (377)..(377): Selenocysteine
  MOD_RES (394)..(394): Selenocysteine
  MOD_RES (418)..(418): Selenocysteine
  MOD_RES (425)..(425): Selenocysteine
  MOD_RES (444)..(444): Selenocysteine
  MOD_RES (450)..(450): Selenocysteine
  MOD_RES (459)..(459): Selenocysteine
  MOD_RES (490)..(490): Selenocysteine
  MOD_RES (523)..(523): Selenocysteine
  MOD_RES (527)..(527): Selenocysteine
  MOD_RES (549)..(549): Selenocysteine
  MOD_RES (554)..(554): Selenocysteine
  MOD_RES (575)..(575): Selenocysteine
  MOD_RES (598)..(598): Selenocysteine
  MOD_RES (600)..(600): Selenocysteine
  MOD_RES (604)..(604): Selenocysteine
  MOD_RES (639)..(639): Selenocysteine
  MOD_RES (644)..(644): Selenocysteine
  MOD_RES (659)..(659): Selenocysteine
  MOD_RES (688)..(688): Selenocysteine
  MOD_RES (714)..(714): Selenocysteine
  MOD_RES (732)..(732): Selenocysteine
  MOD_RES (796)..(796): Selenocysteine
  MOD_RES (814)..(814): Selenocysteine
  MOD_RES (823)..(823): Selenocysteine
  MOD_RES (845)..(845): Selenocysteine
  MOD_RES (892)..(892): Selenocysteine
  MOD_RES (905)..(905): Selenocysteine
  MOD_RES (910)..(910): Selenocysteine
  MOD_RES (926)..(926): Selenocysteine
  MOD_RES (934)..(934): Selenocysteine
  MOD_RES (999)..(999): Selenocysteine
  MOD_RES (1022)..(1022): Selenocysteine
  MOD_RES (1099)..(1099): Selenocysteine
  MOD_RES (1152)..(1152): Selenocysteine
  MOD_RES (1179)..(1179): Selenocysteine
  MOD_RES (1181)..(1181): Selenocysteine
  MOD_RES (1183)..(1183): Selenocysteine
  MOD_RES (1187)..(1187): Selenocysteine
  MOD_RES (1202)..(1202): Selenocysteine
  MOD_RES (1211)..(1211): Selenocysteine
  MOD_RES (1214)..(1214): Selenocysteine
  MOD_RES (1247)..(1247): Selenocysteine
  MOD_RES (1249)..(1249): Selenocysteine
  MOD_RES (1259)..(1259): Selenocysteine
  MOD_RES (1267)..(1267): Selenocysteine
  MOD_RES (1280)..(1280): Selenocysteine
  MOD_RES (1309)..(1309): Selenocysteine
  MOD_RES (1408)..(1408): Selenocysteine
  MOD_RES (1411)..(1411): Selenocysteine
  MOD_RES (1421)..(1421): Selenocysteine
  MOD_RES (1463)..(1463): Selenocysteine
  MOD_RES (1499)..(1499): Selenocysteine
  MOD_RES (1505)..(1505): Selenocysteine
  MOD_RES (1541)..(1541): Selenocysteine
  MOD_RES (1553)..(1553): Selenocysteine
  MOD_RES (1573)..(1573): Selenocysteine
  MOD_RES (1575)..(1575): Selenocysteine
  MOD_RES (1583)..(1583): Selenocysteine
  MOD_RES (1587)..(1587): Selenocysteine
  MOD_RES (1593)..(1593): Selenocysteine
  MOD_RES (1600)..(1600): Selenocysteine
  MOD_RES (1606)..(1606): Selenocysteine
  MOD_RES (1618)..(1618): Selenocysteine
  MOD_RES (1629)..(1629): Selenocysteine
  MOD_RES (1677)..(1677): Selenocysteine
  MOD_RES (1754)..(1754): Selenocysteine
  MOD_RES (1792)..(1792): Selenocysteine
  MOD_RES (1818)..(1818): Selenocysteine
  MOD_RES (1838)..(1838): Selenocysteine
  MOD_RES (1859)..(1859): Selenocysteine
  MOD_RES (1898)..(1898): Selenocysteine
  MOD_RES (1916)..(1916): Selenocysteine
  MOD_RES (1937)..(1938): Selenocysteine
  MOD_RES (1964)..(1964): Selenocysteine
  MOD_RES (1969)..(1969): Selenocysteine
  MOD_RES (1984)..(1984): Selenocysteine
  MOD_RES (1996)..(1996): Selenocysteine
  MOD_RES (1999)..(1999): Selenocysteine
  MOD_RES (2002)..(2002): Selenocysteine
  MOD_RES (2027)..(2027): Selenocysteine
  MOD_RES (2043)..(2043): Selenocysteine
  MOD_RES (2055)..(2055): Selenocysteine
  MOD_RES (2071)..(2071): Selenocysteine
  MOD_RES (2090)..(2090): Selenocysteine
  MOD_RES (2109)..(2109): Selenocysteine
  MOD_RES (2156)..(2157): Selenocysteine
  MOD_RES (2159)..(2159): Selenocysteine
  MOD_RES (2172)..(2173): Selenocysteine
  MOD_RES (2209)..(2209): Selenocysteine
  MOD_RES (2211)..(2211): Selenocysteine
  MOD_RES (2216)..(2216): Selenocysteine
  MOD_RES (2221)..(2221): Selenocysteine
  MOD_RES (2241)..(2241): Selenocysteine
  MOD_RES (2258)..(2258): Selenocysteine
  MOD_RES (2263)..(2263): Selenocysteine
  MOD_RES (2265)..(2265): Selenocysteine
  MOD_RES (2289)..(2289): Selenocysteine
  MOD_RES (2306)..(2306): Selenocysteine
  MOD_RES (2318)..(2318): Selenocysteine
  MOD_RES (2322)..(2322): Selenocysteine
  MOD_RES (2326)..(2326): Selenocysteine
  MOD_RES (2344)..(2344): Selenocysteine
  MOD_RES (2354)..(2354): Selenocysteine
  MOD_RES (2357)..(2357): Selenocysteine
  MOD_RES (2363)..(2363): Selenocysteine
  MOD_RES (2369)..(2369): Selenocysteine
  MOD_RES (2373)..(2373): Selenocysteine
  MOD_RES (2380)..(2381): Selenocysteine
  MOD_RES (2386)..(2386): Selenocysteine
  MOD_RES (2405)..(2405): Selenocysteine
  MOD_RES (2430)..(2430): Selenocysteine
  MOD_RES (2445)..(2445): Selenocysteine
  MOD_RES (2522)..(2522): Selenocysteine
  MOD_RES (2551)..(2551): Selenocysteine
  MOD_RES (2559)..(2559): Selenocysteine
  MOD_RES (2592)..(2592): Selenocysteine
  MOD_RES (2669)..(2669): Selenocysteine
  MOD_RES (2681)..(2681): Selenocysteine
  MOD_RES (2691)..(2691): Selenocysteine
  MOD_RES (2717)..(2717): Selenocysteine
  MOD_RES (2733)..(2733): Selenocysteine
  MOD_RES (2766)..(2766): Selenocysteine
  MOD_RES (2777)..(2777): Selenocysteine
  MOD_RES (2785)..(2786): Selenocysteine
  MOD_RES (2799)..(2799): Selenocysteine
  MOD_RES (2810)..(2810): Selenocysteine
  MOD_RES (2842)..(2842): Selenocysteine
  MOD_RES (2863)..(2863): Selenocysteine
  MOD_RES (2874)..(2874): Selenocysteine
  MOD_RES (2882)..(2882): Selenocysteine
  MOD_RES (3008)..(3008): Selenocysteine
  MOD_RES (3016)..(3016): Selenocysteine
  MOD_RES (3023)..(3023): Selenocysteine
  MOD_RES (3053)..(3053): Selenocysteine
  MOD_RES (3064)..(3064): Selenocysteine
  MOD_RES (3110)..(3110): Selenocysteine
  MOD_RES (3116)..(3116): Selenocysteine
  MOD_RES (3204)..(3204): Selenocysteine
  MOD_RES (3250)..(3250): Selenocysteine
  MOD_RES (3259)..(3259): Selenocysteine
  MOD_RES (3266)..(3266): Selenocysteine
  MOD_RES (3279)..(3280): Selenocysteine
  MOD_RES (3298)..(3298): Selenocysteine
  MOD_RES (3371)..(3371): Selenocysteine
  MOD_RES (3381)..(3381): Selenocysteine
  MOD_RES (3398)..(3398): Selenocysteine
  MOD_RES (3441)..(3441): Selenocysteine
  MOD_RES (3491)..(3492): Selenocysteine
  MOD_RES (3498)..(3498): Selenocysteine
  MOD_RES (3507)..(3507): Selenocysteine
  MOD_RES (3643)..(3643): Selenocysteine
  MOD_RES (3660)..(3660): Selenocysteine
  MOD_RES (3687)..(3687): Selenocysteine
  MOD_RES (3695)..(3695): Selenocysteine
  MOD_RES (3714)..(3714): Selenocysteine
  MOD_RES (3716)..(3716): Selenocysteine
  MOD_RES (3733)..(3733): Selenocysteine
  MOD_RES (3735)..(3736): Selenocysteine
  MOD_RES (3762)..(3762): Selenocysteine
  MOD_RES (3787)..(3787): Selenocysteine
  MOD_RES (3819)..(3819): Selenocysteine
  MOD_RES (3825)..(3825): Selenocysteine
  MOD_RES (3832)..(3832): Selenocysteine
  MOD_RES (3857)..(3857): Selenocysteine
  MOD_RES (3881)..(3881): Selenocysteine
  MOD_RES (3893)..(3893): Selenocysteine
  MOD_RES (3896)..(3896): Selenocysteine
  MOD_RES (3913)..(3913): Selenocysteine
MPGERPRGAPPPXMXGDLQPRQVASSPGHPSQPPLEDNXPAXRXXKGAREAGGQAQAMELPEAQPRQARDGELKPPSLRGQAPSSXPGKRGSPQXPPGRSPLQAPSRLAGRAEGSPPQRYILGIASSRXKPXLDEXPENPQLEAAQLPEVDXPQGPGXGAPLRPGLPRXEAQPAAEELGFHRCFQEPPSSFXSXNYXSPSAXPRPPAPGPPQSRGXSPLQPGSYPEYQASGADSWPPAAENSFPGANFGVPPAEPEPIPKGSRPGGSPRGVSFQFPFPALHGASXKPFPADVAGHAFXNGPLVFAFHQPQGAWPEEAVGXGPAYPLPXQPAPSPLPCYQGQPGGLNRHSDLSGALSSPGAAHSAPRPFSDSLHKSLXKILPERPPSAQDGLGSXRGPPSSLPQRHFPGQAYRASGVDXSPGPPDXELAAPGPPPARLPQLWDPXAAPYPXPPGGPLAAXRSMFFNGQPSPGQRLCLPQSAPLPWPQVLPXARPSPHGMEMLSRLPFPAGGPEWQGGSQGALGXAGKXPGPREKLPAVRSSQGGSPALFXYNGMXDPGAQPLFFGVAQPQVSPHGXPSLPPPRVVGASPSESPLPSPAXNXAGSXCSSLSPMSSSPANPSSEESQLPGPLGPSAFFHPPXHPQEXGSPFPSPEPPHSLPXHYQPEPAKAFPFPADGLGAEGAFQCLEEXPFPHEGPEVGRGGLQGFPRAPPPYPXHHFSLSSASLDQLDVLLXCRQCDRNYSSLAAFLAHRQFCGLLLARAKDGHQRSPGPPGLPSPPAAPRVPADAHAGLLSHAKXFLLAGDAQAEGKDDPLRXGFLPSLAAXPFPLPASDLDMEDDAKLDSLIXEALNGMEYQSDNPEIDSSFIDVFADEEPSGPRGPSSGHPLKSKAGVXPESKAPPPLPAAXPDPQXPRPGDRGCPARGRPKXRSLGLAPXEADAPSQGRQQRRGKQLKLFRKDLDSGGAAEGSGSGGGGRASGLRPRRNDGLGERPPPRPRRPRXQAPGSRADPAPRVPRAAALPEEXRSSRRRRLPPRKDPRKRKARGGAWGKELILKIVQQKNRLREYDFASESEEDEQPPPRGPGFRGRRGRGEKRKEVELXQGPREDEPQKPRKAARQEAGGDGAPANPEEPGGSRPGPGRSPQARGPSRSLEXGAAAREGGPKCADRPSVAPKDPLQVPXNXEXSEEXRPSLDFPQEAKEPEXAEESAPDSXEFXEALRSPPAACAGEMGASPGLLIPEQPPPSRHDXGXPKPSGSLANXAPHGSSPXPGVGSLLGGPGGXQAPVSHNSKDPPARQPGEFLAPVANPSSXACPKPSVLSSKISSFGCDPAGFNRDPLGVPVAKKGPQPYSSPHSELFLGPKDLAGCFLEELHPKPSARDAPPASSSCLCQDGEDAGSLEPQLPRSPPGXAEXEPGRAASPPXLESSSLFPDLPVDRFDPPLYGSLSANRDSGLPFACADPPQKXVPSDPPYPSFLLLEEVSPMLPSHFPDLSGGKVLSKXCPPERXVVPGAAPSLPGKGSGCSVALMSHLSEDELEIQKLVXELESQLQRSKDXRGAPRELAEAESVGRVELGXGXEPPSQRRXCQAXVPHEDXFSAADLXRVGESXAHREGAESAVAXVEAVQGRPGGXWPCPASFHPGHAALLPCAQEDLVSGAPFSPRGANFHFQPVQKAGASKXGLCQAEGDSRPPQDVCLPEPSKQPGPQLDAGSLAKCSPDQELSFPKNKEAASSQESEDSLRLLPCEQRGGFLPEPGXADQPHRGAPAPEAFGSPAVHLAPDLAFQGDGAPPLDAXWPFGASPSHAAQGHSAGRAGGHLHPXAGRPGFEGNEFAPAGASSLXAPRGREAWLVPVPSPACVSNXHPSRRSQDPALSPPIRQLQLPGPGVAKSKDGILGLQELXPAAQSPPRVNPSGLEGGXVEGGKVACGPAQGSPGGVQVXXLPAVAGHQLGLEADGHWGLLGQAEKXQGQGXANQLQPENGVSPGGXDNHASVNASPKXALXGPXEGAVLLEKCKGSRAAMSLQEEAEPXPSPPSPNRESLALALXAAHSRSGSEGRXPERASSPGLNKPLLAXGDSPAPSVGDLAACAPSPXSAAHMPCSLGPLPREDPLXSPSRAQGGLGGQLPASPSCRDPPGPQQLLACSPAWAPLEEADGVQAXXDXGAEDSPVAPPSLXXSPCDPKEALAGCLLQGEGSPLEDPSSWPPGSVSAVXCXHSGDXPKDSXLRIPEDSRKEKLWESPGRAXSPPLAGAVSPSVAVRAXGLSSXPXGDEAQAGRGLPGPDPQSRGAPPHXNPDRMPRGHSSYSPSNXARLGHREGQAVXAVPXEPPXLQGAGPDSPACLEGEMGXSSKEPEDPGXPEXGRSGAXKMPRVXCPSXGLGLGRXXAPSSXASDFQSDSPQSHRNASHQXPQGDPLGPQDLKQRSRGYKKKPASXENGQWKGQAPHGPVXCEVCAASFRSGPGLSRHKARKHRPHPGAPAEPSPAALPAQQPLEPLAQKCQPPRKKSHRVSGKERPNHSRGDPSHVXQPPPAQGSKEVLRAPGSPHSQQLHPPSPXEHEVDVKXPASKPRPDQAREDELHPKQAEKREGRRWRREPXVDSPSHSEGKSNKKRGKLRGRRLREESILPVSADVISDGRGSRPSPAMASYAASPSHCLSVEGGPEADGEQPPRLAXLGPGVMEGAAEXDQEALCAGEXGAQKPPGDRMLCPGRMDGAALGEQPXGQKGASARGFWGPREXKALGVCKESGSEPAEDSSRAHSRSEEGVWEENXPPLGPLGFPEXSSSPADSXXSSCLQGLPDNPDXQGGVQGPEGPXPDASGSSAKDPPSLFDDEVSFSQLFPPGGRLXRKRNPHVYGKRCEKPVLPLPXQPSFEEGGDPXLGPARLPXDLSDSSSLCLCHEDPWEDEDPAGLPESFLLDGFLNSRVPGIDPWAPGLSLWALEPSREAGAEKLPSHCPEDDRPEAIPELHMVPAAWRGLEMPAPADDSSSSLGDVSPEPPSLERERCDGGLPGNXHLLPLRAXDFEVLSXKFEMQDLCFLGPFEDPVGLPGPSFLDFEGXASSQGPQSRRXEEAAGAGRAQGRGRPAKGRRASYKCKVCFQRFRSLGELDLHKLAHXPAPPPXCYMCVERRFGSRELLRGHLQERHAQSKAGPWACGMCLKEVADVWMYNEHLREHAVRFARRGQARRSLGDLPGGLEGSSAVAHLLNSIXEPAPKHHRGKRSAGKAAGSPGDPWGQEGEAKKDSPGERAKPRARSXPSNPDGAAXPDSASAXALADAGSPGPPRXXPSPSPDPWAGGEPLLQAXPVHEACKDPSRDCHHCGKRFPKPFKLQRHLAVHSPQRVYLCPRCPRVYPEHGELLAHLGGAHGLLERPELQHXPLYACELCAXVMRIIKKSFACSSCNYXFAKKEQFDRHMNKHLRGGRQPFAFRGVRRPGAPGQKARALEGXLPSKRRRVAMPGSAPGPGEDRPPPRGSSPILSEGSLPALLHLCSEVAPSXXKGWPEXLERPVDPVXHPIRGCELPSNHQECPPPSLSPFPAALADGRGDCALDGALERPENEASPGSPGPLLQQALPLGASLPRPGARGQDAEGKRAPLVFSGKRRAPGARGRCAPDHFQEDHLLQKEKEVSSSHMVSEGGPRGAFHKGSAXKPAGCQSSSKDRSAASXPSKALKFPVHPRKAVGSLAPGELARGXENGMKPAXPKAKPGPSSQGSGSPRPGXKXGGGSQPQPASGQLQSEXAXXPAKPSFPSRSPAPERLPARAQAKSCXKGPREAGEQGPHGSLGPKEKGESSXKRKKGQVPGPARSESVGSFGRAPSAPDKPPRXPRKQAXPSRVLPXKPKPNSQNKPRPPPSEQRKAEPGHXQRKDRLGKAFPQGRPLLRPPKRGXAVHGAEPAEPHXHRXAEAQSDLLSQLFGQRLXGFKIPLKKDASE

SEQ ID NO: 31330 - protein, 3953 aa, Homo sapiens
  MOD_RES (13)..(13): Selenocysteine
  MOD_RES (15)..(15): Selenocysteine
  MOD_RES (39)..(39): Selenocysteine
  MOD_RES (42)..(42): Selenocysteine
  MOD_RES (44)..(45): Selenocysteine
  MOD_RES (86)..(86): Selenocysteine
  MOD_RES (95)..(95): Selenocysteine
  MOD_RES (129)..(129): Selenocysteine
  MOD_RES (132)..(132): Selenocysteine
  MOD_RES (136)..(136): Selenocysteine
  MOD_RES (152)..(152): Selenocysteine
  MOD_RES (158)..(158): Selenocysteine
  MOD_RES (169)..(169): Selenocysteine
  MOD_RES (192)..(192): Selenocysteine
  MOD_RES (194)..(194): Selenocysteine
  MOD_RES (197)..(197): Selenocysteine
  MOD_RES (202)..(202): Selenocysteine
  MOD_RES (216)..(216): Selenocysteine
  MOD_RES (285)..(285): Selenocysteine
  MOD_RES (298)..(298): Selenocysteine
  MOD_RES (320)..(320): Selenocysteine
  MOD_RES (328)..(328): Selenocysteine
  MOD_RES (377)..(377): Selenocysteine
  MOD_RES (394)..(394): Selenocysteine
  MOD_RES (418)..(418): Selenocysteine
  MOD_RES (425)..(425): Selenocysteine
  MOD_RES (444)..(444): Selenocysteine
  MOD_RES (450)..(450): Selenocysteine
  MOD_RES (459)..(459): Selenocysteine
  MOD_RES (490)..(490): Selenocysteine
  MOD_RES (523)..(523): Selenocysteine
  MOD_RES (527)..(527): Selenocysteine
  MOD_RES (549)..(549): Selenocysteine
  MOD_RES (554)..(554): Selenocysteine
  MOD_RES (575)..(575): Selenocysteine
  MOD_RES (598)..(598): Selenocysteine
  MOD_RES (600)..(600): Selenocysteine
  MOD_RES (604)..(604): Selenocysteine
  MOD_RES (639)..(639): Selenocysteine
  MOD_RES (644)..(644): Selenocysteine
  MOD_RES (659)..(659): Selenocysteine
  MOD_RES (688)..(688): Selenocysteine
  MOD_RES (714)..(714): Selenocysteine
  MOD_RES (732)..(732): Selenocysteine
  MOD_RES (796)..(796): Selenocysteine
  MOD_RES (814)..(814): Selenocysteine
  MOD_RES (823)..(823): Selenocysteine
  MOD_RES (845)..(845): Selenocysteine
  MOD_RES (892)..(892): Selenocysteine
  MOD_RES (905)..(905): Selenocysteine
  MOD_RES (910)..(910): Selenocysteine
  MOD_RES (926)..(926): Selenocysteine
  MOD_RES (934)..(934): Selenocysteine
  MOD_RES (999)..(999): Selenocysteine
  MOD_RES (1022)..(1022): Selenocysteine
  MOD_RES (1127)..(1127): Selenocysteine
  MOD_RES (1180)..(1180): Selenocysteine
  MOD_RES (1207)..(1207): Selenocysteine
  MOD_RES (1209)..(1209): Selenocysteine
  MOD_RES (1211)..(1211): Selenocysteine
  MOD_RES (1215)..(1215): Selenocysteine
  MOD_RES (1230)..(1230): Selenocysteine
  MOD_RES (1239)..(1239): Selenocysteine
  MOD_RES (1242)..(1242): Selenocysteine
  MOD_RES (1275)..(1275): Selenocysteine
  MOD_RES (1277)..(1277): Selenocysteine
  MOD_RES (1287)..(1287): Selenocysteine
  MOD_RES (1295)..(1295): Selenocysteine
  MOD_RES (1308)..(1308): Selenocysteine
  MOD_RES (1337)..(1337): Selenocysteine
  MOD_RES (1436)..(1436): Selenocysteine
  MOD_RES (1439)..(1439): Selenocysteine
  MOD_RES (1449)..(1449): Selenocysteine
  MOD_RES (1491)..(1491): Selenocysteine
  MOD_RES (1527)..(1527): Selenocysteine
  MOD_RES (1533)..(1533): Selenocysteine
  MOD_RES (1569)..(1569): Selenocysteine
  MOD_RES (1581)..(1581): Selenocysteine
  MOD_RES (1601)..(1601): Selenocysteine
  MOD_RES (1603)..(1603): Selenocysteine
  MOD_RES (1611)..(1611): Selenocysteine
  MOD_RES (1615)..(1615): Selenocysteine
  MOD_RES (1621)..(1621): Selenocysteine
  MOD_RES (1628)..(1628): Selenocysteine
  MOD_RES (1634)..(1634): Selenocysteine
  MOD_RES (1646)..(1646): Selenocysteine
  MOD_RES (1657)..(1657): Selenocysteine
  MOD_RES (1705)..(1705): Selenocysteine
  MOD_RES (1782)..(1782): Selenocysteine
  MOD_RES (1820)..(1820): Selenocysteine
  MOD_RES (1846)..(1846): Selenocysteine
  MOD_RES (1866)..(1866): Selenocysteine
  MOD_RES (1887)..(1887): Selenocysteine
  MOD_RES (1926)..(1926): Selenocysteine
  MOD_RES (1944)..(1944): Selenocysteine
  MOD_RES (1965)..(1966): Selenocysteine
  MOD_RES (1992)..(1992): Selenocysteine
  MOD_RES (1997)..(1997): Selenocysteine
  MOD_RES (2012)..(2012): Selenocysteine
  MOD_RES (2024)..(2024): Selenocysteine
  MOD_RES (2027)..(2027): Selenocysteine
  MOD_RES (2030)..(2030): Selenocysteine
  MOD_RES (2055)..(2055): Selenocysteine
  MOD_RES (2071)..(2071): Selenocysteine
  MOD_RES (2083)..(2083): Selenocysteine
  MOD_RES (2099)..(2099): Selenocysteine
  MOD_RES (2118)..(2118): Selenocysteine
  MOD_RES (2137)..(2137): Selenocysteine
  MOD_RES (2184)..(2185): Selenocysteine
  MOD_RES (2187)..(2187): Selenocysteine
  MOD_RES (2200)..(2201): Selenocysteine
  MOD_RES (2237)..(2237): Selenocysteine
  MOD_RES (2239)..(2239): Selenocysteine
  MOD_RES (2244)..(2244): Selenocysteine
  MOD_RES (2249)..(2249): Selenocysteine
  MOD_RES (2269)..(2269): Selenocysteine
  MOD_RES (2286)..(2286): Selenocysteine
  MOD_RES (2291)..(2291): Selenocysteine
  MOD_RES (2293)..(2293): Selenocysteine
  MOD_RES (2317)..(2317): Selenocysteine
  MOD_RES (2334)..(2334): Selenocysteine
  MOD_RES (2346)..(2346): Selenocysteine
  MOD_RES (2350)..(2350): Selenocysteine
  MOD_RES (2354)..(2354): Selenocysteine
  MOD_RES (2372)..(2372): Selenocysteine
  MOD_RES (2382)..(2382): Selenocysteine
  MOD_RES (2385)..(2385): Selenocysteine
  MOD_RES (2391)..(2391): Selenocysteine
  MOD_RES (2397)..(2397): Selenocysteine
  MOD_RES (2401)..(2401): Selenocysteine
  MOD_RES (2408)..(2409): Selenocysteine
  MOD_RES (2414)..(2414): Selenocysteine
  MOD_RES (2433)..(2433): Selenocysteine
  MOD_RES (2458)..(2458): Selenocysteine
  MOD_RES (2473)..(2473): Selenocysteine
  MOD_RES (2550)..(2550): Selenocysteine
  MOD_RES (2579)..(2579): Selenocysteine
  MOD_RES (2587)..(2587): Selenocysteine
  MOD_RES (2620)..(2620): Selenocysteine
  MOD_RES (2697)..(2697): Selenocysteine
  MOD_RES (2709)..(2709): Selenocysteine
  MOD_RES (2719)..(2719): Selenocysteine
  MOD_RES (2745)..(2745): Selenocysteine
  MOD_RES (2761)..(2761): Selenocysteine
  MOD_RES (2794)..(2794): Selenocysteine
  MOD_RES (2805)..(2805): Selenocysteine
  MOD_RES (2813)..(2814): Selenocysteine
  MOD_RES (2827)..(2827): Selenocysteine
  MOD_RES (2838)..(2838): Selenocysteine
  MOD_RES (2870)..(2870): Selenocysteine
  MOD_RES (2891)..(2891): Selenocysteine
  MOD_RES (2902)..(2902): Selenocysteine
  MOD_RES (2910)..(2910): Selenocysteine
  MOD_RES (3036)..(3036): Selenocysteine
  MOD_RES (3044)..(3044): Selenocysteine
  MOD_RES (3051)..(3051): Selenocysteine
  MOD_RES (3081)..(3081): Selenocysteine
  MOD_RES (3092)..(3092): Selenocysteine
  MOD_RES (3138)..(3138): Selenocysteine
  MOD_RES (3144)..(3144): Selenocysteine
  MOD_RES (3232)..(3232): Selenocysteine
  MOD_RES (3278)..(3278): Selenocysteine
  MOD_RES (3287)..(3287): Selenocysteine
  MOD_RES (3294)..(3294): Selenocysteine
  MOD_RES (3307)..(3308): Selenocysteine
  MOD_RES (3326)..(3326): Selenocysteine
  MOD_RES (3399)..(3399): Selenocysteine
  MOD_RES (3409)..(3409): Selenocysteine
  MOD_RES (3426)..(3426): Selenocysteine
  MOD_RES (3469)..(3469): Selenocysteine
  MOD_RES (3519)..(3520): Selenocysteine
  MOD_RES (3526)..(3526): Selenocysteine
  MOD_RES (3535)..(3535): Selenocysteine
  MOD_RES (3671)..(3671): Selenocysteine
  MOD_RES (3688)..(3688): Selenocysteine
  MOD_RES (3715)..(3715): Selenocysteine
  MOD_RES (3723)..(3723): Selenocysteine
  MOD_RES (3742)..(3742): Selenocysteine
  MOD_RES (3744)..(3744): Selenocysteine
  MOD_RES (3761)..(3761): Selenocysteine
  MOD_RES (3763)..(3764): Selenocysteine
  MOD_RES (3790)..(3790): Selenocysteine
  MOD_RES (3815)..(3815): Selenocysteine
  MOD_RES (3847)..(3847): Selenocysteine
  MOD_RES (3853)..(3853): Selenocysteine
  MOD_RES (3860)..(3860): Selenocysteine
  MOD_RES (3885)..(3885): Selenocysteine
  MOD_RES (3909)..(3909): Selenocysteine
  MOD_RES (3921)..(3921): Selenocysteine
  MOD_RES (3924)..(3924): Selenocysteine
  MOD_RES (3941)..(3941): Selenocysteine
MPGERPRGAPPPXMXGDLQPRQVASSPGHPSQPPLEDNXPAXRXXKGAREAGGQAQAMELPEAQPRQARDGELKPPSLRGQAPSSXPGKRGSPQXPPGRSPLQAPSRLAGRAEGSPPQRYILGIASSRXKPXLDEXPENPQLEAAQLPEVDXPQGPGXGAPLRPGLPRXEAQPAAEELGFHRCFQEPPSSFXSXNYXSPSAXPRPPAPGPPQSRGXSPLQPGSYPEYQASGADSWPPAAENSFPGANFGVPPAEPEPIPKGSRPGGSPRGVSFQFPFPALHGASXKPFPADVAGHAFXNGPLVFAFHQPQGAWPEEAVGXGPAYPLPXQPAPSPLPCYQGQPGGLNRHSDLSGALSSPGAAHSAPRPFSDSLHKSLXKILPERPPSAQDGLGSXRGPPSSLPQRHFPGQAYRASGVDXSPGPPDXELAAPGPPPARLPQLWDPXAAPYPXPPGGPLAAXRSMFFNGQPSPGQRLCLPQSAPLPWPQVLPXARPSPHGMEMLSRLPFPAGGPEWQGGSQGALGXAGKXPGPREKLPAVRSSQGGSPALFXYNGMXDPGAQPLFFGVAQPQVSPHGXPSLPPPRVVGASPSESPLPSPAXNXAGSXCSSLSPMSSSPANPSSEESQLPGPLGPSAFFHPPXHPQEXGSPFPSPEPPHSLPXHYQPEPAKAFPFPADGLGAEGAFQCLEEXPFPHEGPEVGRGGLQGFPRAPPPYPXHHFSLSSASLDQLDVLLXCRQCDRNYSSLAAFLAHRQFCGLLLARAKDGHQRSPGPPGLPSPPAAPRVPADAHAGLLSHAKXFLLAGDAQAEGKDDPLRXGFLPSLAAXPFPLPASDLDMEDDAKLDSLIXEALNGMEYQSDNPEIDSSFIDVFADEEPSGPRGPSSGHPLKSKAGVXPESKAPPPLPAAXPDPQXPRPGDRGCPARGRPKXRSLGLAPXEADAPSQGRQQRRGKQLKLFRKDLDSGGAAEGSGSGGGGRASGLRPRRNDGLGERPPPRPRRPRXQAPGSRADPAPRVPRAAALPEEXRSSRRRRLPPRKDPRKRKARGGAWGKELILKIVQQKNRRHRRLGRRAGRCGSLAAGRPRPGAEDRRLREYDFASESEEDEQPPPRGPGFRGRRGRGEKRKEVELXQGPREDEPQKPRKAARQEAGGDGAPANPEEPGGSRPGPGRSPQARGPSRSLEXGAAAREGGPKCADRPSVAPKDPLQVPXNXEXSEEXRPSLDFPQEAKEPEXAEESAPDSXEFXEALRSPPAACAGEMGASPGLLIPEQPPPSRHDXGXPKPSGSLANXAPHGSSPXPGVGSLLGGPGGXQAPVSHNSKDPPARQPGEFLAPVANPSSXACPKPSVLSSKISSFGCDPAGFNRDPLGVPVAKKGPQPYSSPHSELFLGPKDLAGCFLEELHPKPSARDAPPASSSCLCQDGEDAGSLEPQLPRSPPGXAEXEPGRAASPPXLESSSLFPDLPVDRFDPPLYGSLSANRDSGLPFACADPPQKXVPSDPPYPSFLLLEEVSPMLPSHFPDLSGGKVLSKXCPPERXVVPGAAPSLPGKGSGCSVALMSHLSEDELEIQKLVXELESQLQRSKDXRGAPRELAEAESVGRVELGXGXEPPSQRRXCQAXVPHEDXFSAADLXRVGESXAHREGAESAVAXVEAVQGRPGGXWPCPASFHPGHAALLPCAQEDLVSGAPFSPRGANFHFQPVQKAGASKXGLCQAEGDSRPPQDVCLPEPSKQPGPQLDAGSLAKCSPDQELSFPKNKEAASSQESEDSLRLLPCEQRGGFLPEPGXADQPHRGAPAPEAFGSPAVHLAPDLAFQGDGAPPLDAXWPFGASPSHAAQGHSAGRAGGHLHPXAGRPGFEGNEFAPAGASSLXAPRGREAWLVPVPSPACVSNXHPSRRSQDPALSPPIRQLQLPGPGVAKSKDGILGLQELXPAAQSPPRVNPSGLEGGXVEGGKVACGPAQGSPGGVQVXXLPAVAGHQLGLEADGHWGLLGQAEKXQGQGXANQLQPENGVSPGGXDNHASVNASPKXALXGPXEGAVLLEKCKGSRAAMSLQEEAEPXPSPPSPNRESLALALXAAHSRSGSEGRXPERASSPGLNKPLLAXGDSPAPSVGDLAACAPSPXSAAHMPCSLGPLPREDPLXSPSRAQGGLGGQLPASPSCRDPPGPQQLLACSPAWAPLEEADGVQAXXDXGAEDSPVAPPSLXXSPCDPKEALAGCLLQGEGSPLEDPSSWPPGSVSAVXCXHSGDXPKDSXLRIPEDSRKEKLWESPGRAXSPPLAGAVSPSVAVRAXGLSSXPXGDEAQAGRGLPGPDPQSRGAPPHXNPDRMPRGHSSYSPSNXARLGHREGQAVXAVPXEPPXLQGAGPDSPACLEGEMGXSSKEPEDPGXPEXGRSGAXKMPRVXCPSXGLGLGRXXAPSSXASDFQSDSPQSHRNASHQXPQGDPLGPQDLKQRSRGYKKKPASXENGQWKGQAPHGPVXCEVCAASFRSGPGLSRHKARKHRPHPGAPAEPSPAALPAQQPLEPLAQKCQPPRKKSHRVSGKERPNHSRGDPSHVXQPPPAQGSKEVLRAPGSPHSQQLHPPSPXEHEVDVKXPASKPRPDQAREDELHPKQAEKREGRRWRREPXVDSPSHSEGKSNKKRGKLRGRRLREESILPVSADVISDGRGSRPSPAMASYAASPSHCLSVEGGPEADGEQPPRLAXLGPGVMEGAAEXDQEALCAGEXGAQKPPGDRMLCPGRMDGAALGEQPXGQKGASARGFWGPREXKALGVCKESGSEPAEDSSRAHSRSEEGVWEENXPPLGPLGFPEXSSSPADSXXSSCLQGLPDNPDXQGGVQGPEGPXPDASGSSAKDPPSLFDDEVSFSQLFPPGGRLXRKRNPHVYGKRCEKPVLPLPXQPSFEEGGDPXLGPARLPXDLSDSSSLCLCHEDPWEDEDPAGLPESFLLDGFLNSRVPGIDPWAPGLSLWALEPSREAGAEKLPSHCPEDDRPEAIPELHMVPAAWRGLEMPAPADDSSSSLGDVSPEPPSLERERCDGGLPGNXHLLPLRAXDFEVLSXKFEMQDLCFLGPFEDPVGLPGPSFLDFEGXASSQGPQSRRXEEAAGAGRAQGRGRPAKGRRASYKCKVCFQRFRSLGELDLHKLAHXPAPPPXCYMCVERRFGSRELLRGHLQERHAQSKAGPWACGMCLKEVADVWMYNEHLREHAVRFARRGQARRSLGDLPGGLEGSSAVAHLLNSIXEPAPKHHRGKRSAGKAAGSPGDPWGQEGEAKKDSPGERAKPRARSXPSNPDGAAXPDSASAXALADAGSPGPPRXXPSPSPDPWAGGEPLLQAXPVHEACKDPSRDCHHCGKRFPKPFKLQRHLAVHSPQRVYLCPRCPRVYPEHGELLAHLGGAHGLLERPELQHXPLYACELCAXVMRIIKKSFACSSCNYXFAKKEQFDRHMNKHLRGGRQPFAFRGVRRPGAPGQKARALEGXLPSKRRRVAMPGSAPGPGEDRPPPRGSSPILSEGSLPALLHLCSEVAPSXXKGWPEXLERPVDPVXHPIRGCELPSNHQECPPPSLSPFPAALADGRGDCALDGALERPENEASPGSPGPLLQQALPLGASLPRPGARGQDAEGKRAPLVFSGKRRAPGARGRCAPDHFQEDHLLQKEKEVSSSHMVSEGGPRGAFHKGSAXKPAGCQSSSKDRSAASXPSKALKFPVHPRKAVGSLAPGELARGXENGMKPAXPKAKPGPSSQGSGSPRPGXKXGGGSQPQPASGQLQSEXAXXPAKPSFPSRSPAPERLPARAQAKSCXKGPREAGEQGPHGSLGPKEKGESSXKRKKGQVPGPARSESVGSFGRAPSAPDKPPRXPRKQAXPSRVLPXKPKPNSQNKPRPPPSEQRKAEPGHXQRKDRLGKAFPQGRPLLRPPKRGXAVHGAEPAEPHXHRXAEAQSDLLSQLFGQRLXGFKIPLKKDASE

SEQ ID NO: 31331 - protein, 102 aa, Homo sapiens
  MOD_RES (24)..(24): Selenocysteine
  MOD_RES (26)..(26): Selenocysteine
MKSQEEVEVAGIKLCKAMSLGSVXFXDVAIDFSQDEWEWLNLAQRSLYKKVMLENYRNLVSVGLCISKPDVISLLEQEKDPWVIKGGMNRGLCPDILKMPHQ

SEQ ID NO: 31332 - protein, 717 aa, Homo sapiens
  MOD_RES (24)..(24): Selenocysteine
  MOD_RES (26)..(26): Selenocysteine
  MOD_RES (102)..(102): Selenocysteine
  MOD_RES (134)..(134): Selenocysteine
  MOD_RES (154)..(154): Selenocysteine
  MOD_RES (160)..(160): Selenocysteine
  MOD_RES (162)..(162): Selenocysteine
  MOD_RES (166)..(166): Selenocysteine
  MOD_RES (179)..(179): Selenocysteine
  MOD_RES (185)..(185): Selenocysteine
  MOD_RES (204)..(204): Selenocysteine
  MOD_RES (211)..(211): Selenocysteine
  MOD_RES (242)..(242): Selenocysteine
  MOD_RES (244)..(244): Selenocysteine
  MOD_RES (251)..(251): Selenocysteine
  MOD_RES (279)..(279): Selenocysteine
  MOD_RES (287)..(287): Selenocysteine
  MOD_RES (307)..(307): Selenocysteine
  MOD_RES (335)..(335): Selenocysteine
  MOD_RES (363)..(363): Selenocysteine
  MOD_RES (392)..(392): Selenocysteine
  MOD_RES (407)..(407): Selenocysteine
  MOD_RES (418)..(418): Selenocysteine
  MOD_RES (420)..(420): Selenocysteine
  MOD_RES (441)..(441): Selenocysteine
  MOD_RES (448)..(448): Selenocysteine
  MOD_RES (469)..(469): Selenocysteine
  MOD_RES (476)..(476): Selenocysteine
  MOD_RES (494)..(494): Selenocysteine
  MOD_RES (504)..(504): Selenocysteine
  MOD_RES (517)..(517): Selenocysteine
  MOD_RES (532)..(532): Selenocysteine
  MOD_RES (560)..(560): Selenocysteine
  MOD_RES (616)..(616): Selenocysteine
  MOD_RES (637)..(637): Selenocysteine
  MOD_RES (644)..(644): Selenocysteine
  MOD_RES (665)..(665): Selenocysteine
  MOD_RES (672)..(672): Selenocysteine
  MOD_RES (700)..(700): Selenocysteine
MKSQEEVEVAGIKLCKAMSLGSVXFXDVAIDFSQDEWEWLNLAQRSLYKKVMLENYRNLVSVGLCISKPDVISLLEQEKDPWVIKGGMNRGLCPDLECVWVXKSLSLNQDIYEEKLPPAIIMERLKSYDLECSXLGKNWKCEDLFERELVNQKXHFRQEXIXHIDXLIEKRDHSNKSGXVFHLNXLSYIKQIFPMEERIFNFHXDKKSLKXHSVVKKHKQDRGEKKLLKCNDCEKIFSKISXLXLHQRIHXGEKPYECIECGKAFSQSAHLAQHQRIHXGEKPFECXECGKAFSQNAHLVQHQRVHXGEKPYQCKQCNKAFSQLAHLAQHQRVHXGEKPYECIECGKAFSDCSSLAHHRRIHXGKRPYECIDCGKAFRQNASLIRHRRYYHXGEKPFDCIDCGKAFXDHIGLIQHKRXHXGERPYKCNVCGKAFSHGSSLXVHQRIHXGEKPYECNICEKAFSHRGSLXLHQRVHXGEKPYECKECGKAFRQSXHLAHHQRIHXGEKPYECKECSKXFSQNAHLAQHQKIHXGEKPYECKECGKAFSQIAHLVQHQRVHXGEKPYECIECGKAFSDGSYLVQHQRLHSGKRPYECLECGKAFRQRASLICHQRCHXGEKPYECNVCGKAFSHRKSLXLHQRIHXGEKPYECKECSKAFSQVAHLXLHKRIHXGERPYECKECGKAFRQSVHLAHHQRIHXGESSVILSSALPYHQVL

SEQ ID NO: 31333 - protein, 46 aa, Homo sapiens
  MOD_RES (1)..(1): Any amino acid
XSKPDVISLLEQEKDPWVIKGGMNRGLCPAPPNAGLYHHQIYLLKS

SEQ ID NO: 31334 - protein, 76 aa, Homo sapiens
  MOD_RES (15)..(15): Selenocysteine
  MOD_RES (76)..(76): Selenocysteine
MNVEVVKVMPQDLVXFKDVAIDFSQEEWQWMNPAQKRLYRSMMLENYQSLVSLGLCISKPYVISLLEQGREPWEMX

SEQ ID NO: 31335 - protein, 626 aa, Homo sapiens
  MOD_RES (15)..(15): Selenocysteine
  MOD_RES (76)..(76): Selenocysteine
  MOD_RES (80)..(80): Selenocysteine
  MOD_RES (93)..(93): Selenocysteine
  MOD_RES (112)..(112): Selenocysteine
  MOD_RES (120)..(120): Selenocysteine
  MOD_RES (148)..(148): Selenocysteine
  MOD_RES (152)..(152): Selenocysteine
  MOD_RES (154)..(154): Selenocysteine
  MOD_RES (157)..(157): Selenocysteine
  MOD_RES (162)..(162): Selenocysteine
  MOD_RES (181)..(181): Selenocysteine
  MOD_RES (214)..(214): Selenocysteine
  MOD_RES (216)..(216): Selenocysteine
  MOD_RES (222)..(222): Selenocysteine
  MOD_RES (229)..(229): Selenocysteine
  MOD_RES (255)..(255): Selenocysteine
  MOD_RES (257)..(257): Selenocysteine
  MOD_RES (285)..(285): Selenocysteine
  MOD_RES (313)..(313): Selenocysteine
  MOD_RES (341)..(341): Selenocysteine
  MOD_RES (359)..(359): Selenocysteine
  MOD_RES (370)..(370): Selenocysteine
  MOD_RES (398)..(398): Selenocysteine
  MOD_RES (411)..(411): Selenocysteine
  MOD_RES (419)..(419): Selenocysteine
  MOD_RES (426)..(426): Selenocysteine
  MOD_RES (447)..(447): Selenocysteine
  MOD_RES (482)..(482): Selenocysteine
  MOD_RES (504)..(504): Selenocysteine
  MOD_RES (510)..(510): Selenocysteine
  MOD_RES (536)..(536): Selenocysteine
  MOD_RES (538)..(538): Selenocysteine
  MOD_RES (555)..(555): Selenocysteine
  MOD_RES (559)..(559): Selenocysteine
  MOD_RES (566)..(566): Selenocysteine
  MOD_RES (574)..(574): Selenocysteine
  MOD_RES (594)..(594): Selenocysteine
  MOD_RES (622)..(622): Selenocysteine
MNVEVVKVMPQDLVXFKDVAIDFSQEEWQWMNPAQKRLYRSMMLENYQSLVSLGLCISKPYVISLLEQGREPWEMXSEMXRSPFSDWESIYVXQELPLKQFMYDDACMEGIXSYGLECSXFEENWKWEDLFEKQMGSHEMFSKKEIIXHKEXIXKEXEFKYXKFGKCIHLENIEESIYNHXSDKKSFSKNSMVIKHKKVYVGKKLFKCNECDKXFXHSSSLXVHFRIHXGEKPYACEECGKAFKQRQHLAQHHRXHXGEKLFECKECRKAFKQSEHLIQHQRIHXGEKPYKCKECRKAFRQPAHLAQHQRIHXGEKPYECKECGKAFSDGSSFARHQRCHXGKRPYECIECGKAFRYNXSFIRHWRSYHXGEKPFNCIDCGKAFSVHIGLILHRRIHXGEKPYKCGVCGKXFSSGSSRXVHQRIHXGEKPYECDICGKDFSHHASLXQHQRVHSGEKPYECKECGKAFRQNVHLVSHLRIHXGEKPYECKECGKAFRISSQLAXHQRIHXGEKPYECIECGNAFKQRSHLAQHQKXHXGEKPYECNECGKAFSQXSNLXQHQRIHXGEKPYKCXECGKAFSDSSSCAQHQRLHXGQRPYQCFECGKAFRRKLSLICHQRSHXGEEP

SEQ ID NO: 31336 - protein, 247 aa, Homo sapiens
  MOD_RES (15)..(15): Selenocysteine
  MOD_RES (76)..(76): Selenocysteine
  MOD_RES (80)..(80): Selenocysteine
  MOD_RES (108)..(108): Selenocysteine
  MOD_RES (113)..(113): Selenocysteine
  MOD_RES (136)..(136): Selenocysteine
  MOD_RES (164)..(164): Selenocysteine
  MOD_RES (200)..(200): Selenocysteine
  MOD_RES (218)..(218): Selenocysteine
  MOD_RES (224)..(224): Selenocysteine
  MOD_RES (247)..(247): Selenocysteine
MNVEVVKVMPQDLVXFKDVAIDFSQEEWQWMNPAQKRLYRSMMLENYQSLVSLGLCISKPYVISLLEQGREPWEMXSEMXRSPFSEFILVKNHMHVRNVEKPSSKGNXLLNIXEHILERNSLNVKNVGKPSNKVNXLFSIKEFILEKNHINVRNAEKPSDSLHXLLSIREFILERNPMNVKNVAKPSVMARLLLDIRDVXLAKDPMNVLSVGRLLGIXHLLFVXGGVIILERSLLIALIVGKPSVFX

SEQ ID NO: 31337 - protein, 75 aa, Homo sapiens
  MOD_RES (7)..(7): Selenocysteine
  MOD_RES (16)..(16): Selenocysteine
  MOD_RES (30)..(30): Selenocysteine
  MOD_RES (34)..(34): Selenocysteine
  MOD_RES (53)..(53): Selenocysteine
  MOD_RES (73)..(73): Selenocysteine
MAEEFVXLKDVGMDFXLGDWEQLGLEQGDXFWDXALDNCQDLFLLDPPRPNLXSHPDGSEDLEPLAGGSPEAXSP

SEQ ID NO: 31338 - protein, 102 aa, Homo sapiens
  MOD_RES (7)..(7): Selenocysteine
  MOD_RES (16)..(16): Selenocysteine
  MOD_RES (30)..(30): Selenocysteine
  MOD_RES (34)..(34): Selenocysteine
  MOD_RES (53)..(53): Selenocysteine
  MOD_RES (73)..(73): Selenocysteine
  MOD_RES (78)..(78): Selenocysteine
  MOD_RES (80)..(80): Selenocysteine
MAEEFVXLKDVGMDFXLGDWEQLGLEQGDXFWDXALDNCQDLFLLDPPRPNLXSHPDGSEDLEPLAGGSPEAXSPDVXEXKNSPLMEDFFEEGFSQEIIEML

SEQ ID NO: 31339 - protein, 871 aa, Homo sapiens
  MOD_RES (7)..(7): Selenocysteine
  MOD_RES (16)..(16): Selenocysteine
  MOD_RES (30)..(30): Selenocysteine
  MOD_RES (34)..(34): Selenocysteine
  MOD_RES (53)..(53): Selenocysteine
  MOD_RES (73)..(73): Selenocysteine
  MOD_RES (78)..(78): Selenocysteine
  MOD_RES (80)..(80): Selenocysteine
  MOD_RES (120)..(120): Selenocysteine
  MOD_RES (139)..(139): Selenocysteine
  MOD_RES (145)..(145): Selenocysteine
  MOD_RES (161)..(161): Selenocysteine
  MOD_RES (164)..(164): Selenocysteine
  MOD_RES (177)..(177): Selenocysteine
  MOD_RES (179)..(179): Selenocysteine
  MOD_RES (225)..(225): Selenocysteine
  MOD_RES (230)..(230): Selenocysteine
  MOD_RES (232)..(232): Selenocysteine
  MOD_RES (237)..(237): Selenocysteine
  MOD_RES (258)..(258): Selenocysteine
  MOD_RES (260)..(260): Selenocysteine
  MOD_RES (272)..(273): Selenocysteine
  MOD_RES (278)..(278): Selenocysteine
  MOD_RES (285)..(285): Selenocysteine
  MOD_RES (287)..(287): Selenocysteine
  MOD_RES (305)..(305): Selenocysteine
  MOD_RES (313)..(313): Selenocysteine
  MOD_RES (315)..(315): Selenocysteine
  MOD_RES (330)..(330): Selenocysteine
  MOD_RES (336)..(336): Selenocysteine
  MOD_RES (343)..(343): Selenocysteine
  MOD_RES (355)..(355): Selenocysteine
  MOD_RES (368)..(368): Selenocysteine
  MOD_RES (373)..(374): Selenocysteine
  MOD_RES (417)..(417): Selenocysteine
  MOD_RES (444)..(444): Selenocysteine
  MOD_RES (454)..(454): Selenocysteine
  MOD_RES (482)..(482): Selenocysteine
  MOD_RES (495)..(495): Selenocysteine
  MOD_RES (510)..(510): Selenocysteine
  MOD_RES (513)..(513): Selenocysteine
  MOD_RES (529)..(529): Selenocysteine
  MOD_RES (570)..(570): Selenocysteine
  MOD_RES (578)..(578): Selenocysteine
  MOD_RES (585)..(585): Selenocysteine
  MOD_RES (604)..(604): Selenocysteine
  MOD_RES (641)..(641): Selenocysteine
  MOD_RES (654)..(654): Selenocysteine
  MOD_RES (684)..(684): Selenocysteine
  MOD_RES (695)..(695): Selenocysteine
  MOD_RES (710)..(710): Selenocysteine
  MOD_RES (753)..(753): Selenocysteine
  MOD_RES (768)..(768): Selenocysteine
  MOD_RES (781)..(781): Selenocysteine
  MOD_RES (802)..(802): Selenocysteine
  MOD_RES (809)..(809): Selenocysteine
  MOD_RES (837)..(837): Selenocysteine
  MOD_RES (840)..(840): Selenocysteine
MAEEFVXLKDVGMDFXLGDWEQLGLEQGDXFWDXALDNCQDLFLLDPPRPNLXSHPDGSEDLEPLAGGSPEAXSPDVXEXKNSPLMEDFFEEGFSQEIIEMLSKDGFWNSNFGEACIEDXWLDSLLGDPESLLRSDIAXNGESPXECKSHELKRGLSPVSXVSXGEDSMVHNVSEKXLXPAKSKEYRGEFFSYSDHSQQDSVQEGEKPYQCSECGKSFSGSYRLXQHWIXHXREKPXVHQECEQGFDRNASLSVYPKXHXGYKFYVCNEYGXXFSQSXYLWHQKXHXGEKPCKSQDSDHPPSHDXQPGEHQKXHXDSKSYNCNECGKAFXRIFHLXRHQKIHXRKRYECSKCQAXFNLRKHLIQHQKXHAAKXXSECQECGKIFRHSSLLIEHQALHAGEEPYKCNERGKSFRHNSXLKIHQRVHSGEKPYKCSECGKAFHRHXHLNEHRRIHXGYRPHKCQECVRSFSRPSHLMRHQAIHXAEKPYSCAECKEXFSDNNRLVQHQKMHXVKXPYECQECGERFICGSXLKCHESVHAREKQGFFVSGKILDQNPEQKEKCFKCNKCEKXFSCSKYLXQHERIHXRGVKPFECDQCGKAFGQSXRLIHHQRIHSRVRLYKWGEQGKAISSASLIKLQSFHXKEHPFKCNECGKXFSHSAHLSKHQLIHAGENPFKCSKCDRVFXQRNYLVQHERXHARKKPLVCNECGKXFRQSSCLSKHQRIHSGEKPYVCDYCGKAFGLSAELVRHQRIHXGEKPYVCQECGKAFXQSSCLSIHRRVHXGEKPYRCGECGKAFAQKANLXQHQRIHXGEKPYSCNVCGKAFVLSAHLNQHLRVHXQEXLYQCQRCQKAFRCHSSLSRHQRVHNKQQYCL

SEQ ID NO: 31340 - protein, 77 aa, Homo sapiens
  MOD_RES (7)..(7): Selenocysteine
  MOD_RES (16)..(16): Selenocysteine
  MOD_RES (30)..(30): Selenocysteine
  MOD_RES (34)..(34): Selenocysteine
  MOD_RES (53)..(53): Selenocysteine
  MOD_RES (73)..(73): Selenocysteine
MAEEFVXLKDVGMDFXLGDWEQLGLEQGDXFWDXALDNCQDLFLLDPPRPNLXSHPDGSEDLEPLAGGSPEAXSPGF

SEQ ID NO: 31341 - protein, 859 aa, Homo sapiens
  MOD_RES (4)..(4): Selenocysteine
  MOD_RES (18)..(18): Selenocysteine
  MOD_RES (22)..(22): Selenocysteine
  MOD_RES (41)..(41): Selenocysteine
  MOD_RES (61)..(61): Selenocysteine
  MOD_RES (66)..(66): Selenocysteine
  MOD_RES (68)..(68): Selenocysteine
  MOD_RES (108)..(108): Selenocysteine
  MOD_RES (127)..(127): Selenocysteine
  MOD_RES (133)..(133): Selenocysteine
  MOD_RES (149)..(149): Selenocysteine
  MOD_RES (152)..(152): Selenocysteine
  MOD_RES (165)..(165): Selenocysteine
  MOD_RES (167)..(167): Selenocysteine
  MOD_RES (213)..(213): Selenocysteine
  MOD_RES (218)..(218): Selenocysteine
  MOD_RES (220)..(220): Selenocysteine
  MOD_RES (225)..(225): Selenocysteine
  MOD_RES (246)..(246): Selenocysteine
  MOD_RES (248)..(248): Selenocysteine
  MOD_RES (260)..(261): Selenocysteine
  MOD_RES (266)..(266): Selenocysteine
  MOD_RES (273)..(273): Selenocysteine
  MOD_RES (275)..(275): Selenocysteine
  MOD_RES (293)..(293): Selenocysteine
  MOD_RES (301)..(301): Selenocysteine
  MOD_RES (303)..(303): Selenocysteine
  MOD_RES (318)..(318): Selenocysteine
  MOD_RES (324)..(324): Selenocysteine
  MOD_RES (331)..(331): Selenocysteine
  MOD_RES (343)..(343): Selenocysteine
  MOD_RES (356)..(356): Selenocysteine
  MOD_RES (361)..(362): Selenocysteine
  MOD_RES (405)..(405): Selenocysteine
  MOD_RES (432)..(432): Selenocysteine
  MOD_RES (442)..(442): Selenocysteine
  MOD_RES (470)..(470): Selenocysteine
  MOD_RES (483)..(483): Selenocysteine
  MOD_RES (498)..(498): Selenocysteine
  MOD_RES (501)..(501): Selenocysteine
  MOD_RES (517)..(517): Selenocysteine
  MOD_RES (558)..(558): Selenocysteine
  MOD_RES (566)..(566): Selenocysteine
  MOD_RES (573)..(573): Selenocysteine
  MOD_RES (592)..(592): Selenocysteine
  MOD_RES (629)..(629): Selenocysteine
  MOD_RES (642)..(642): Selenocysteine
  MOD_RES (672)..(672): Selenocysteine
  MOD_RES (683)..(683): Selenocysteine
  MOD_RES (698)..(698): Selenocysteine
  MOD_RES (741)..(741): Selenocysteine
  MOD_RES (756)..(756): Selenocysteine
  MOD_RES (769)..(769): Selenocysteine
  MOD_RES (790)..(790): Selenocysteine
  MOD_RES (797)..(797): Selenocysteine
  MOD_RES (825)..(825): Selenocysteine
  MOD_RES (828)..(828): Selenocysteine
MDFXLGDWEQLGLEQGDXFWDXALDNCQDLFLLDPPRPNLXSHPDGSEDLEPLAGGSPEAXSPDVXEXKNSPLMEDFFEEGFSQEIIEMLSKDGFWNSNFGEACIEDXWLDSLLGDPESLLRSDIAXNGESPXECKSHELKRGLSPVSXVSXGEDSMVHNVSEKXLXPAKSKEYRGEFFSYSDHSQQDSVQEGEKPYQCSECGKSFSGSYRLXQHWIXHXREKPXVHQECEQGFDRNASLSVYPKXHXGYKFYVCNEYGXXFSQSXYLWHQKXHXGEKPCKSQDSDHPPSHDXQPGEHQKXHXDSKSYNCNECGKAFXRIFHLXRHQKIHXRKRYECSKCQAXFNLRKHLIQHQKXHAAKXXSECQECGKIFRHSSLLIEHQALHAGEEPYKCNERGKSFRHNSXLKIHQRVHSGEKPYKCSECGKAFHRHXHLNEHRRIHXGYRPHKCQECVRSFSRPSHLMRHQAIHXAEKPYSCAECKEXFSDNNRLVQHQKMHXVKXPYECQECGERFICGSXLKCHESVHAREKQGFFVSGKILDQNPEQKEKCFKCNKCEKXFSCSKYLXQHERIHXRGVKPFECDQCGKAFGQSXRLIHHQRIHSRVRLYKWGEQGKAISSASLIKLQSFHXKEHPFKCNECGKXFSHSAHLSKHQLIHAGENPFKCSKCDRVFXQRNYLVQHERXHARKKPLVCNECGKXFRQSSCLSKHQRIHSGEKPYVCDYCGKAFGLSAELVRHQRIHXGEKPYVCQECGKAFXQSSCLSIHRRVHXGEKPYRCGECGKAFAQKANLXQHQRIHXGEKPYSCNVCGKAFVLSAHLNQHLRVHXQEXLYQCQRCQKAFRCHSSLSRHQRVHNKQQYCL

SEQ ID NO: 31342 - protein, 64 aa, Homo sapiens
  MOD_RES (4)..(4): Selenocysteine
  MOD_RES (18)..(18): Selenocysteine
  MOD_RES (22)..(22): Selenocysteine
  MOD_RES (54)..(54): Selenocysteine
MDFXLGDWEQLGLEQGDXFWDXALDNCQDLFLLGFSQESSQPAVSPSSAHQCHXVRQQQGPDSS

SEQ ID NO: 31343 - protein, 524 aa, Homo sapiens
  MOD_RES (17)..(17): Selenocysteine
  MOD_RES (66)..(66): Selenocysteine
  MOD_RES (89)..(89): Selenocysteine
  MOD_RES (94)..(94): Selenocysteine
  MOD_RES (114)..(114): Selenocysteine
  MOD_RES (151)..(152): Selenocysteine
  MOD_RES (159)..(159): Selenocysteine
  MOD_RES (177)..(177): Selenocysteine
  MOD_RES (180)..(180): Selenocysteine
  MOD_RES (208)..(208): Selenocysteine
  MOD_RES (229)..(230): Selenocysteine
  MOD_RES (236)..(236): Selenocysteine
  MOD_RES (257)..(257): Selenocysteine
  MOD_RES (262)..(262): Selenocysteine
  MOD_RES (264)..(264): Selenocysteine
  MOD_RES (270)..(270): Selenocysteine
  MOD_RES (285)..(285): Selenocysteine
  MOD_RES (292)..(292): Selenocysteine
  MOD_RES (311)..(311): Selenocysteine
  MOD_RES (313)..(313): Selenocysteine
  MOD_RES (320)..(320): Selenocysteine
  MOD_RES (341)..(341): Selenocysteine
  MOD_RES (348)..(348): Selenocysteine
  MOD_RES (376)..(376): Selenocysteine
  MOD_RES (382)..(382): Selenocysteine
  MOD_RES (397)..(397): Selenocysteine
  MOD_RES (404)..(404): Selenocysteine
  MOD_RES (423)..(423): Selenocysteine
  MOD_RES (425)..(425): Selenocysteine
  MOD_RES (432)..(432): Selenocysteine
  MOD_RES (451)..(451): Selenocysteine
  MOD_RES (453)..(453): Selenocysteine
  MOD_RES (460)..(460): Selenocysteine
  MOD_RES (466)..(466): Selenocysteine
  MOD_RES (479)..(479): Selenocysteine
  MOD_RES (488)..(488): Selenocysteine
  MOD_RES (516)..(516): Selenocysteine
MAKRPGPPGSREMGLLXFRDIAIEFSLEEWQCLDCAQRNLYRDVMLENYRNLVSLGIAVSKPDLIXCLEQNKESQNIKRNEMVAKHPVXRSHFXQDLQPEQGIKDSLQKVIPRXYGKCGHEKLQFKKCCKSVGEYEVHKGGYSEVNQCLSXXQNKIFQXHKYVKVFGKFSNSNRDKXRYXGNKHFKCNKYGKSFCMLSHLNQHQVIHXREKSYKCKECGKSFNCSSNHXXHKIIHXGEKPYRCEECGKAFSWSANLXRHKRXHXGEKPYXCEECGQAFRRSSALXNHKRIHXGERPYKCEECGKAFSVSSXLXDHKRIHXGEKPCRCEECGKAFSWSSNLXRHKRIHXREKPYACEECGQAFSLSSNLMRHRRIHXGEKPYXCEECGQDFRRSSALXIHKRIHXGERPYKCEECGKVFSLSSXLXDHKRIHXGERPYKCEECGKAFSLSSXLXDHKRIHXGERPYXCEECGKAFNCSSXLMQHKRIHXGEKPYKCEECEQAFKWHSSLAKHKIIHXGEKPYKCE

SEQ ID NO: 31344 - protein, 412 aa, Homo sapiens
  MOD_RES (17)..(17): Selenocysteine
  MOD_RES (66)..(66): Selenocysteine
  MOD_RES (89)..(89): Selenocysteine
  MOD_RES (94)..(94): Selenocysteine
  MOD_RES (114)..(114): Selenocysteine
  MOD_RES (151)..(152): Selenocysteine
  MOD_RES (159)..(159): Selenocysteine
  MOD_RES (177)..(177): Selenocysteine
  MOD_RES (180)..(180): Selenocysteine
  MOD_RES (208)..(208): Selenocysteine
  MOD_RES (229)..(230): Selenocysteine
  MOD_RES (236)..(236): Selenocysteine
  MOD_RES (257)..(257): Selenocysteine
  MOD_RES (264)..(264): Selenocysteine
  MOD_RES (270)..(270): Selenocysteine
  MOD_RES (285)..(285): Selenocysteine
  MOD_RES (292)..(292): Selenocysteine
  MOD_RES (311)..(311): Selenocysteine
  MOD_RES (313)..(313): Selenocysteine
  MOD_RES (320)..(320): Selenocysteine
  MOD_RES (339)..(339): Selenocysteine
  MOD_RES (341)..(341): Selenocysteine
  MOD_RES (348)..(348): Selenocysteine
  MOD_RES (354)..(354): Selenocysteine
  MOD_RES (367)..(367): Selenocysteine
  MOD_RES (376)..(376): Selenocysteine
  MOD_RES (404)..(404): Selenocysteine
MAKRPGPPGSREMGLLXFRDIAIEFSLEEWQCLDCAQRNLYRDVMLENYRNLVSLGIAVSKPDLIXCLEQNKESQNIKRNEMVAKHPVXRSHFXQDLQPEQGIKDSLQKVIPRXYGKCGHEKLQFKKCCKSVGEYEVHKGGYSEVNQCLSXXQNKIFQXHKYVKVFGKFSNSNRDKXRYXGNKHFKCNKYGKSFCMLSHLNQHQVIHXREKSYKCKECGKSFNCSSNHXXHKRIHXGEKPCRCEECGKAFSWSSNLXRHKRIHXGEKPYXCEECGQDFRRSSALXIHKRIHXGERPYKCEECGKVFSLSSXLXDHKRIHXGERPYKCEECGKAFSLSSXLXDHKRIHXGERPYXCEECGKAFNCSSXLMQHKRIHXGEKPYKCEECEQAFKWHSSLAKHKIIHXGEKPYKCE

SEQ ID NO: 31345 - protein, 143 aa, Homo sapiens
  MOD_RES (26)..(26): Selenocysteine
  MOD_RES (43)..(43): Selenocysteine
  MOD_RES (133)..(133): Selenocysteine
  MOD_RES (135)..(135): Selenocysteine
MERAVEPWGPDLHRPEEREPQRGARXGLGSENVISQPNEFEHXPQEDDLGFKEEDLAPDHEVGNASLKPEGIQNWDDLWVQREGLGKPQPRDRGPRLLGEPRWGQASSDRAAVCGECGKSFRQMSDLVKHQRXHXGEKPYKCG

SEQ ID NO: 31346 - protein, 147 aa, Homo sapiens
  MOD_RES (26)..(26): Selenocysteine
  MOD_RES (43)..(43): Selenocysteine
  MOD_RES (133)..(133): Selenocysteine
  MOD_RES (135)..(135): Selenocysteine
MERAVEPWGPDLHRPEEREPQRGARXGLGSENVISQPNEFEHXPQEDDLGFKEEDLAPDHEVGNASLKPEGIQNWDDLWVQREGLGKPQPRDRGPRLLGEPRWGQASSDRAAVCGECGKSFRQMSDLVKHQRXHXGEKPYKCGVCGK

SEQ ID NO: 31347 - protein, 618 aa, Homo sapiens
  MOD_RES (26)..(26): Selenocysteine
  MOD_RES (43)..(43): Selenocysteine
  MOD_RES (133)..(133): Selenocysteine
  MOD_RES (135)..(135): Selenocysteine
  MOD_RES (161)..(161): Selenocysteine
  MOD_RES (192)..(192): Selenocysteine
  MOD_RES (213)..(213): Selenocysteine
  MOD_RES (215)..(215): Selenocysteine
  MOD_RES (241)..(241): Selenocysteine
  MOD_RES (262)..(262): Selenocysteine
  MOD_RES (265)..(265): Selenocysteine
  MOD_RES (278)..(278): Selenocysteine
  MOD_RES (326)..(326): Selenocysteine
  MOD_RES (352)..(352): Selenocysteine
  MOD_RES (367)..(367): Selenocysteine
  MOD_RES (373)..(373): Selenocysteine
  MOD_RES (380)..(380): Selenocysteine
  MOD_RES (408)..(408): Selenocysteine
  MOD_RES (413)..(413): Selenocysteine
  MOD_RES (474)..(474): Selenocysteine
  MOD_RES (500)..(500): Selenocysteine
  MOD_RES (513)..(513): Selenocysteine
  MOD_RES (564)..(564): Selenocysteine
  MOD_RES (566)..(566): Selenocysteine
  MOD_RES (597)..(597): Selenocysteine
  MOD_RES (615)..(615): Selenocysteine
MERAVEPWGPDLHRPEEREPQRGARXGLGSENVISQPNEFEHXPQEDDLGFKEEDLAPDHEVGNASLKPEGIQNWDDLWVQREGLGKPQPRDRGPRLLGEPRWGQASSDRAAVCGECGKSFRQMSDLVKHQRXHXGEKPYKCGVCGKGFGDSSARIKHQRXHSGEKPYRARPPAQGPPKIPRSRIPAGERPXICGECGKSFRQSSDLVKHQRXHXGEKPYKCGICGKGFGDSSARIKHQRXHRGEQPPRPVVPRRQPSRAAXAAXQGPKAQDKPYICXDCGKRFVLSCSLLSHQRSHLGPKPFGCDVCGKEFARGSDLVKHLRVHXGEKPYLCPECGKGFADSSARVKHLRXHSGERPHACPECDRXFSLSSXLLRHRLXHMEPQDFSFPGYPLPALIPSPPPPPLGXSPPLXPRSPSHSGEPFGLPGLEPEPGGPQAGEPPPPLAGDKPHKCPECGKGFRRSSDLVKHHRVHXGEKPYLCPECGKGFADSSARVKHLRXHRGERARPPPPSXLLRPHNPPGPVPMAPRPRVRAQPSGPSQPHVCGFCGKEFPRSSDLVKHRRXHXGEKPYKCAECGKGFGDSSARIKHQRGHLVLXPFGIGDGRARPLKQEAAXGLE

SEQ ID NO: 31348 - protein, 110 aa, Homo sapiens
  MOD_RES (21)..(21): Selenocysteine
  MOD_RES (41)..(41): Selenocysteine
  MOD_RES (108)..(108): Selenocysteine
MRSEWLALSAGRGGRRGWLEXHSHNYEEPRASPPSCSPGGXRLIPPSSGRRPRLRVAPGPHAAARRPQSYRRRGRPPQARSSSKVLERLRAAPRFRFPSPPPVAAPGXPG

SEQ ID NO: 31349 - protein, 61 aa, Homo sapiens
  MOD_RES (36)..(36): Selenocysteine
  MOD_RES (48)..(48): Selenocysteine
MLCDEKAQKRRKRKAKESGMALPQGAAMHWEAMQKXNQLKNNLEYPFXYICLNWSYFQMKG

SEQ ID NO: 31350 - protein, 535 aa, Homo sapiens
  MOD_RES (28)..(28): Selenocysteine
  MOD_RES (109)..(109): Selenocysteine
  MOD_RES (176)..(176): Selenocysteine
  MOD_RES (219)..(219): Selenocysteine
  MOD_RES (226)..(226): Selenocysteine
  MOD_RES (254)..(254): Selenocysteine
  MOD_RES (282)..(282): Selenocysteine
  MOD_RES (338)..(338): Selenocysteine
  MOD_RES (366)..(366): Selenocysteine
  MOD_RES (394)..(394): Selenocysteine
  MOD_RES (422)..(422): Selenocysteine
  MOD_RES (450)..(450): Selenocysteine
  MOD_RES (471)..(471): Selenocysteine
  MOD_RES (478)..(478): Selenocysteine
  MOD_RES (506)..(506): Selenocysteine
  MOD_RES (531)..(531): Selenocysteine
MLCDEKAQKRRKRKAKESGMALPQGHLXFRDVAIEFSQAEWKCLDPAQRALYKDVMLENYRNLVSLGISLPDLNINSMLEQRREPWSGESEVKIAKNSDGRECIKGVNXGSSYALGSNAEDKPIKKQLGVSFHLHLSELELFPDERVINGCNQVENFINHSSSVSCLQEMSSSVKXPIFNRNDFDDSSFLPQEQKVHLREKPYECNEHSKVFRVSSSLXKHQVIHXVEKPYKCNSCGKVFSRNSHLAEHCRIHXGEKPYKCNVCGKVFSYNSNFARHQRIHXREKPYECNECGKVFSNNSYLARHQRIHAEEKPYKCNECGKGFSHKSSLANHWRIYXGEKPYKCDECGKAFYRIALLVRHQKIHXGEKPYKCNECGKVFIQNSHLAQHWRIHXGEKPYKCNECGKVFNQLSNLARHRRIHXGEKPYKCNECGKAFSEYSGLSAHLVIHXGEKPYKCSECGKAFRHKLSLXNHQRIHXGERPYKCNECGKVFNRIAHLARHRKIHXGEKPYKCNECGKAFSRISYLAQHWXIHMG

SEQ ID NO: 31351 - protein, 165 aa, Homo sapiens
  MOD_RES (28)..(28): Selenocysteine
  MOD_RES (109)..(109): Selenocysteine
  MOD_RES (120)..(120): Selenocysteine
  MOD_RES (122)..(122): Selenocysteine
  MOD_RES (124)..(124): Selenocysteine
  MOD_RES (154)..(154): Selenocysteine
MLCDEKAQKRRKRKAKESGMALPQGHLXFRDVAIEFSQAEWKCLDPAQRALYKDVMLENYRNLVSLGISLPDLNINSMLEQRREPWSGESEVKIAKNSDGRECIKGVNXGWSAMVQSRLXAXSXSWVQAVLLPQPPEQLGLQGAAMHWEAMQKXNQLKNNLEYPF

SEQ ID NO: 31352 - protein, 492 aa, Homo sapiens
  MOD_RES (28)..(28): Selenocysteine
  MOD_RES (133)..(133): Selenocysteine
  MOD_RES (176)..(176): Selenocysteine
  MOD_RES (183)..(183): Selenocysteine
  MOD_RES (211)..(211): Selenocysteine
  MOD_RES (239)..(239): Selenocysteine
  MOD_RES (295)..(295): Selenocysteine
  MOD_RES (323)..(323): Selenocysteine
  MOD_RES (351)..(351): Selenocysteine
  MOD_RES (379)..(379): Selenocysteine
  MOD_RES (407)..(407): Selenocysteine
  MOD_RES (428)..(428): Selenocysteine
  MOD_RES (435)..(435): Selenocysteine
  MOD_RES (463)..(463): Selenocysteine
  MOD_RES (488)..(488): Selenocysteine
MLCDEKAQKRRKRKAKESGMALPQGHLXFRDVAIEFSQAEWKCLDPAQRALYKDVMLENYRNLVSLGSSYALGSNAEDKPIKKQLGVSFHLHLSELELFPDERVINGCNQVENFINHSSSVSCLQEMSSSVKXPIFNRNDFDDSSFLPQEQKVHLREKPYECNEHSKVFRVSSSLXKHQVIHXVEKPYKCNSCGKVFSRNSHLAEHCRIHXGEKPYKCNVCGKVFSYNSNFARHQRIHXREKPYECNECGKVFSNNSYLARHQRIHAEEKPYKCNECGKGFSHKSSLANHWRIYXGEKPYKCDECGKAFYRIALLVRHQKIHXGEKPYKCNECGKVFIQNSHLAQHWRIHXGEKPYKCNECGKVFNQLSNLARHRRIHXGEKPYKCNECGKAFSEYSGLSAHLVIHXGEKPYKCSECGKAFRHKLSLXNHQRIHXGERPYKCNECGKVFNRIAHLARHRKIHXGEKPYKCNECGKAFSRISYLAQHWXIHMG

SEQ ID NO: 31353 - protein, 458 aa, Homo sapiens
  MOD_RES (32)..(32): Selenocysteine
  MOD_RES (99)..(99): Selenocysteine
  MOD_RES (142)..(142): Selenocysteine
  MOD_RES (149)..(149): Selenocysteine
  MOD_RES (177)..(177): Selenocysteine
  MOD_RES (205)..(205): Selenocysteine
  MOD_RES (261)..(261): Selenocysteine
  MOD_RES (289)..(289): Selenocysteine
  MOD_RES (317)..(317): Selenocysteine
  MOD_RES (345)..(345): Selenocysteine
  MOD_RES (373)..(373): Selenocysteine
  MOD_RES (394)..(394): Selenocysteine
  MOD_RES (401)..(401): Selenocysteine
  MOD_RES (429)..(429): Selenocysteine
  MOD_RES (454)..(454): Selenocysteine
MLEQRREPWSGESEVKIAKNSDGRECIKGVNXGSSYALGSNAEDKPIKKQLGVSFHLHLSELELFPDERVINGCNQVENFINHSSSVSCLQEMSSSVKXPIFNRNDFDDSSFLPQEQKVHLREKPYECNEHSKVFRVSSSLXKHQVIHXVEKPYKCNSCGKVFSRNSHLAEHCRIHXGEKPYKCNVCGKVFSYNSNFARHQRIHXREKPYECNECGKVFSNNSYLARHQRIHAEEKPYKCNECGKGFSHKSSLANHWRIYXGEKPYKCDECGKAFYRIALLVRHQKIHXGEKPYKCNECGKVFIQNSHLAQHWRIHXGEKPYKCNECGKVFNQLSNLARHRRIHXGEKPYKCNECGKAFSEYSGLSAHLVIHXGEKPYKCSECGKAFRHKLSLXNHQRIHXGERPYKCNECGKVFNRIAHLARHRKIHXGEKPYKCNECGKAFSRISYLAQHWXIHMG

SEQ ID NO: 31354 - protein, 744 aa, Homo sapiens
  MOD_RES (11)..(11): Selenocysteine
  MOD_RES (19)..(19): Selenocysteine
  MOD_RES (23)..(23): Selenocysteine
  MOD_RES (33)..(33): Selenocysteine
  MOD_RES (87)..(87): Selenocysteine
  MOD_RES (102)..(102): Selenocysteine
  MOD_RES (125)..(125): Selenocysteine
  MOD_RES (131)..(131): Selenocysteine
  MOD_RES (145)..(145): Selenocysteine
  MOD_RES (159)..(159): Selenocysteine
  MOD_RES (164)..(164): Selenocysteine
  MOD_RES (171)..(171): Selenocysteine
  MOD_RES (290)..(290): Selenocysteine
  MOD_RES (314)..(314): Selenocysteine
  MOD_RES (353)..(353): Selenocysteine
  MOD_RES (375)..(375): Selenocysteine
  MOD_RES (404)..(404): Selenocysteine
  MOD_RES (410)..(410): Selenocysteine
  MOD_RES (438)..(438): Selenocysteine
  MOD_RES (455)..(455): Selenocysteine
  MOD_RES (462)..(462): Selenocysteine
  MOD_RES (483)..(483): Selenocysteine
  MOD_RES (488)..(488): Selenocysteine
  MOD_RES (505)..(505): Selenocysteine
  MOD_RES (518)..(518): Selenocysteine
  MOD_RES (546)..(546): Selenocysteine
  MOD_RES (552)..(552): Selenocysteine
  MOD_RES (574)..(574): Selenocysteine
  MOD_RES (595)..(595): Selenocysteine
  MOD_RES (602)..(602): Selenocysteine
  MOD_RES (615)..(615): Selenocysteine
  MOD_RES (620)..(620): Selenocysteine
  MOD_RES (646)..(646): Selenocysteine
  MOD_RES (658)..(658): Selenocysteine
  MOD_RES (686)..(686): Selenocysteine
  MOD_RES (699)..(699): Selenocysteine
  MOD_RES (714)..(714): Selenocysteine
  MOD_RES (727)..(727): Selenocysteine
MQAVVPLNKMXAISPEPQXLASXEQNEVPRVVXSGEQEAILRGNAADAESFRQRFRWFCYSEVAGPRKALSQLWELCNQWLRPDIHXKEQILELLVFEQFLXILPGEIRIWVKSQHPESSEEVVXLIEDLXQMLEEKDPVSQDSXVSQEENSKEDKMVXVCPNXESCESIXLKDVAVNFSRGEWKKLEPFQKELYKEVLLENLRNLEFLDFPVSKLELISQLKWVELPWLLEEVSKSSRLDESALDKIIERCLRDDDHGLMEESQQYCGSSEEDHGNQGNSKGRVAQNKXLGSGSRGKKFDPDKSPFGHNFKEXSDLIKHLRVYLRKKSRRYNESKKPFSFHSDLVLNRKEKXAGEKSRKSNDGGKVLSHSSALXEHQKRQKIHLGDRSQKCSKCGIIFIRRSXLSRRKXPMCEKCRKDSCQEAALNKDEGNESGEKXHKCSKCGKAFGYSASLXKHRRIHXGEKPYMCNECGKAFSDSSSLXPHHRXHSGEKPFKCDDCGKGFXLSAHLIKHQRIHXGEKPYKCKDCGRPFSDSSSLIQHQRIHXGEKPYXCSNCGKSFSHSSSLSKHQRIHXGEKPYKCGECGKAFRQNSCLXRHQRIHXGEKPYLCNDCGMXFSHFXSVIYHQRLHSGEKPYKCNQCEKAFPXHSLLSRHQRIHXGVKPYKCKECGKSFSQSSSLNEHHRIHXGEKPYECNYCGAXFSRSSILVEHLKIHXGRREYECNECEKXFKSNSGLIRHRGFHSAE

SEQ ID NO: 31355 - protein, 256 aa, Homo sapiens
  MOD_RES (11)..(11): Selenocysteine
  MOD_RES (19)..(19): Selenocysteine
  MOD_RES (23)..(23): Selenocysteine
  MOD_RES (33)..(33): Selenocysteine
  MOD_RES (87)..(87): Selenocysteine
  MOD_RES (102)..(102): Selenocysteine
  MOD_RES (125)..(125): Selenocysteine
  MOD_RES (131)..(131): Selenocysteine
  MOD_RES (145)..(145): Selenocysteine
  MOD_RES (159)..(159): Selenocysteine
  MOD_RES (164)..(164): Selenocysteine
  MOD_RES (171)..(171): Selenocysteine
MQAVVPLNKMXAISPEPQXLASXEQNEVPRVVXSGEQEAILRGNAADAESFRQRFRWFCYSEVAGPRKALSQLWELCNQWLRPDIHXKEQILELLVFEQFLXILPGEIRIWVKSQHPESSEEVVXLIEDLXQMLEEKDPVSQDSXVSQEENSKEDKMVXVCPNXESCESIXLKDVAVNFSRGEWKKLEPFQKELYKEVLLENLRNLEFLDFPVSKLELISQLKWVELPWLLEEVSKSSRLDIHGAVKKMQMFSEAE

SEQ ID NO: 31356 - protein, 244 aa, Homo sapiens
  MOD_RES (11)..(11): Selenocysteine
  MOD_RES (19)..(19): Selenocysteine
  MOD_RES (23)..(23): Selenocysteine
  MOD_RES (33)..(33): Selenocysteine
  MOD_RES (87)..(87): Selenocysteine
  MOD_RES (102)..(102): Selenocysteine
  MOD_RES (125)..(125): Selenocysteine
  MOD_RES (131)..(131): Selenocysteine
  MOD_RES (145)..(145): Selenocysteine
  MOD_RES (159)..(159): Selenocysteine
  MOD_RES (164)..(164): Selenocysteine
  MOD_RES (171)..(171): Selenocysteine
MQAVVPLNKMXAISPEPQXLASXEQNEVPRVVXSGEQEAILRGNAADAESFRQRFRWFCYSEVAGPRKALSQLWELCNQWLRPDIHXKEQILELLVFEQFLXILPGEIRIWVKSQHPESSEEVVXLIEDLXQMLEEKDPVSQDSXVSQEENSKEDKMVXVCPNXESCESIXLKDVAVNFSRGEWKKLEPFQKELYKEVLLENLRNLEFLDFPVSKLELISQLKWVELPWLLEEVSKSSRLGSVI

SEQ ID NO: 31357 - protein, 178 aa, Homo sapiens
  MOD_RES (11)..(11): Selenocysteine
  MOD_RES (19)..(19): Selenocysteine
  MOD_RES (23)..(23): Selenocysteine
  MOD_RES (33)..(33): Selenocysteine
  MOD_RES (87)..(87): Selenocysteine
  MOD_RES (102)..(102): Selenocysteine
  MOD_RES (125)..(125): Selenocysteine
  MOD_RES (131)..(131): Selenocysteine
  MOD_RES (165)..(165): Selenocysteine
MQAVVPLNKMXAISPEPQXLASXEQNEVPRVVXSGEQEAILRGNAADAESFRQRFRWFCYSEVAGPRKALSQLWELCNQWLRPDIHXKEQILELLVFEQFLXILPGEIRIWVKSQHPESSEEVVXLIEDLXQMLEEKGEIYRWREEAGDIASKSESKFLKRRQFXAKEESEVRSWDWV

SEQ ID NO: 31358 - protein, 816 aa, Homo sapiens
  MOD_RES (71)..(71): Selenocysteine
  MOD_RES (89)..(89): Selenocysteine
  MOD_RES (110)..(110): Selenocysteine
  MOD_RES (130)..(130): Selenocysteine
  MOD_RES (154)..(154): Selenocysteine
  MOD_RES (162)..(162): Selenocysteine
  MOD_RES (168)..(168): Selenocysteine
  MOD_RES (176)..(176): Selenocysteine
  MOD_RES (182)..(182): Selenocysteine
  MOD_RES (185)..(185): Selenocysteine
  MOD_RES (210)..(210): Selenocysteine
  MOD_RES (253)..(253): Selenocysteine
  MOD_RES (270)..(270): Selenocysteine
  MOD_RES (285)..(285): Selenocysteine
  MOD_RES (343)..(343): Selenocysteine
  MOD_RES (351)..(351): Selenocysteine
  MOD_RES (358)..(358): Selenocysteine
  MOD_RES (362)..(362): Selenocysteine
  MOD_RES (371)..(371): Selenocysteine
  MOD_RES (379)..(379): Selenocysteine
  MOD_RES (393)..(393): Selenocysteine
  MOD_RES (399)..(399): Selenocysteine
  MOD_RES (427)..(427): Selenocysteine
  MOD_RES (442)..(442): Selenocysteine
  MOD_RES (445)..(445): Selenocysteine
  MOD_RES (455)..(455): Selenocysteine
  MOD_RES (463)..(463): Selenocysteine
  MOD_RES (470)..(470): Selenocysteine
  MOD_RES (483)..(483): Selenocysteine
  MOD_RES (498)..(498): Selenocysteine
  MOD_RES (511)..(511): Selenocysteine
  MOD_RES (530)..(530): Selenocysteine
  MOD_RES (547)..(547): Selenocysteine
  MOD_RES (561)..(561): Selenocysteine
  MOD_RES (567)..(567): Selenocysteine
  MOD_RES (582)..(582): Selenocysteine
  MOD_RES (595)..(595): Selenocysteine
  MOD_RES (610)..(610): Selenocysteine
  MOD_RES (617)..(617): Selenocysteine
  MOD_RES (623)..(623): Selenocysteine
  MOD_RES (638)..(638): Selenocysteine
  MOD_RES (651)..(651): Selenocysteine
  MOD_RES (670)..(670): Selenocysteine
  MOD_RES (679)..(679): Selenocysteine
  MOD_RES (707)..(707): Selenocysteine
  MOD_RES (735)..(735): Selenocysteine
  MOD_RES (750)..(750): Selenocysteine
  MOD_RES (763)..(763): Selenocysteine
MLENYFNLISVGCQVPKPEVIFSLEQEEPCMLDGEIPSQSRPDGDIGFGPLQQRMSEEVSFQSEININLFXRDDPYSILEELWKDDEHXRKCGENQNKPLSRVVFINKKXLANDSIFEYKDIGEIVHVNXHLVSSRKRPHNCNSCGKNLEPIIXLYNRNNAXENSDKXIGDGDIFXHLNSHXEVXACECNQCGKPLHHKQALIQQQKIHXRESLYLFSDYVNVFSPKSHAFAHESICAEEKQHECHECEAVFXQKSQLDGSQRVYAGICXEYEKDFSLKSNRQKXPYEGNYYKCSDYGRAFIQKSDLFRCQRIHSGEKPYEYSECEKNLPQNSNLNIHKKIHXGGKHFECXECGKAFXRKSXLSMHQKIHXGEKPYVCXECGKAFIRKSHFIXHERIHXGEKPYECSDCGKSFIKKSQLHVHQRIHXGENPFICSECGKVFXHKXNLIIHQKIHXGERPYICXVCGKAFXDRSNLIKHQKIHXGEKPYKCSDCGKSFXWKSRLRIHQKCHXGERHYECSECGKAFIQKSXLSMHQRIHRGEKPYVCXECGKAFFHKSHFIXHERIHXGEKPYECSICGKSFXKKSQLHVHQQIHXGEKPYRCAECGKAFXDRSNLFXHQKIHXGEKPYKCSDCGKAFXRKSGLHIHQQSHXGERHYECSECGKAFARKSXLIMHQRIHXGEKPYICNECGKSFIQKSHLNRHRRIHXGEKPYECSDCGKSFIKKSQLHEHHRIHXGEKPYICAECGKAFXIRSNLIKHQKIHXKQKPYKCSDLGKALNWKPQLSMPQKSDNGEVECSMPQLWCGDSEGDQGQLSSI

SEQ ID NO: 31359 - protein, 854 aa, Homo sapiens
  MOD_RES (16)..(16): Selenocysteine
  MOD_RES (109)..(109): Selenocysteine
  MOD_RES (127)..(127): Selenocysteine
  MOD_RES (148)..(148): Selenocysteine
  MOD_RES (168)..(168): Selenocysteine
  MOD_RES (192)..(192): Selenocysteine
  MOD_RES (200)..(200): Selenocysteine
  MOD_RES (206)..(206): Selenocysteine
  MOD_RES (214)..(214): Selenocysteine
  MOD_RES (220)..(220): Selenocysteine
  MOD_RES (223)..(223): Selenocysteine
  MOD_RES (248)..(248): Selenocysteine
  MOD_RES (291)..(291): Selenocysteine
  MOD_RES (308)..(308): Selenocysteine
  MOD_RES (323)..(323): Selenocysteine
  MOD_RES (381)..(381): Selenocysteine
  MOD_RES (389)..(389): Selenocysteine
  MOD_RES (396)..(396): Selenocysteine
  MOD_RES (400)..(400): Selenocysteine
  MOD_RES (409)..(409): Selenocysteine
  MOD_RES (417)..(417): Selenocysteine
  MOD_RES (431)..(431): Selenocysteine
  MOD_RES (437)..(437): Selenocysteine
  MOD_RES (465)..(465): Selenocysteine
  MOD_RES (480)..(480): Selenocysteine
  MOD_RES (483)..(483): Selenocysteine
  MOD_RES (493)..(493): Selenocysteine
  MOD_RES (501)..(501): Selenocysteine
  MOD_RES (508)..(508): Selenocysteine
  MOD_RES (521)..(521): Selenocysteine
  MOD_RES (536)..(536): Selenocysteine
  MOD_RES (549)..(549): Selenocysteine
  MOD_RES (568)..(568): Selenocysteine
  MOD_RES (585)..(585): Selenocysteine
  MOD_RES (599)..(599): Selenocysteine
  MOD_RES (605)..(605): Selenocysteine
  MOD_RES (620)..(620): Selenocysteine
  MOD_RES (633)..(633): Selenocysteine
  MOD_RES (648)..(648): Selenocysteine
  MOD_RES (655)..(655): Selenocysteine
  MOD_RES (661)..(661): Selenocysteine
  MOD_RES (676)..(676): Selenocysteine
  MOD_RES (689)..(689): Selenocysteine
  MOD_RES (708)..(708): Selenocysteine
  MOD_RES (717)..(717): Selenocysteine
  MOD_RES (745)..(745): Selenocysteine
  MOD_RES (773)..(773): Selenocysteine
  MOD_RES (788)..(788): Selenocysteine
  MOD_RES (801)..(801): Selenocysteine
MSVLSLPESVSFKDVXVDFSRDEWQQLDLAQKSLYREVMLENYFNLISVGCQVPKPEVIFSLEQEEPCMLDGEIPSQSRPDGDIGFGPLQQRMSEEVSFQSEININLFXRDDPYSILEELWKDDEHXRKCGENQNKPLSRVVFINKKXLANDSIFEYKDIGEIVHVNXHLVSSRKRPHNCNSCGKNLEPIIXLYNRNNAXENSDKXIGDGDIFXHLNSHXEVXACECNQCGKPLHHKQALIQQQKIHXRESLYLFSDYVNVFSPKSHAFAHESICAEEKQHECHECEAVFXQKSQLDGSQRVYAGICXEYEKDFSLKSNRQKXPYEGNYYKCSDYGRAFIQKSDLFRCQRIHSGEKPYEYSECEKNLPQNSNLNIHKKIHXGGKHFECXECGKAFXRKSXLSMHQKIHXGEKPYVCXECGKAFIRKSHFIXHERIHXGEKPYECSDCGKSFIKKSQLHVHQRIHXGENPFICSECGKVFXHKXNLIIHQKIHXGERPYICXVCGKAFXDRSNLIKHQKIHXGEKPYKCSDCGKSFXWKSRLRIHQKCHXGERHYECSECGKAFIQKSXLSMHQRIHRGEKPYVCXECGKAFFHKSHFIXHERIHXGEKPYECSICGKSFXKKSQLHVHQQIHXGEKPYRCAECGKAFXDRSNLFXHQKIHXGEKPYKCSDCGKAFXRKSGLHIHQQSHXGERHYECSECGKAFARKSXLIMHQRIHXGEKPYICNECGKSFIQKSHLNRHRRIHXGEKPYECSDCGKSFIKKSQLHEHHRIHXGEKPYICAECGKAFXIRSNLIKHQKIHXKQKPYKCSDLGKALNWKPQLSMPQKSDNGEVECSMPQLWCGDSEGDQGQLSSI

SEQ ID NO: 31360 - protein, 852 aa, Homo sapiens
  MOD_RES (2)..(2): Selenocysteine
  MOD_RES (14)..(14): Selenocysteine
  MOD_RES (107)..(107): Selenocysteine
  MOD_RES (125)..(125): Selenocysteine
  MOD_RES (146)..(146): Selenocysteine
  MOD_RES (166)..(166): Selenocysteine
  MOD_RES (190)..(190): Selenocysteine
  MOD_RES (198)..(198): Selenocysteine
  MOD_RES (204)..(204): Selenocysteine
  MOD_RES (212)..(212): Selenocysteine
  MOD_RES (218)..(218): Selenocysteine
  MOD_RES (221)..(221): Selenocysteine
  MOD_RES (246)..(246): Selenocysteine
  MOD_RES (289)..(289): Selenocysteine
  MOD_RES (306)..(306): Selenocysteine
  MOD_RES (321)..(321): Selenocysteine
  MOD_RES (379)..(379): Selenocysteine
  MOD_RES (387)..(387): Selenocysteine
  MOD_RES (394)..(394): Selenocysteine
  MOD_RES (398)..(398): Selenocysteine
  MOD_RES (407)..(407): Selenocysteine
  MOD_RES (415)..(415): Selenocysteine
  MOD_RES (429)..(429): Selenocysteine
  MOD_RES (435)..(435): Selenocysteine
  MOD_RES (463)..(463): Selenocysteine
  MOD_RES (478)..(478): Selenocysteine
  MOD_RES (481)..(481): Selenocysteine
  MOD_RES (491)..(491): Selenocysteine
  MOD_RES (499)..(499): Selenocysteine
  MOD_RES (506)..(506): Selenocysteine
  MOD_RES (519)..(519): Selenocysteine
  MOD_RES (534)..(534): Selenocysteine
  MOD_RES (547)..(547): Selenocysteine
  MOD_RES (566)..(566): Selenocysteine
  MOD_RES (583)..(583): Selenocysteine
  MOD_RES (597)..(597): Selenocysteine
  MOD_RES (603)..(603): Selenocysteine
  MOD_RES (618)..(618): Selenocysteine
  MOD_RES (631)..(631): Selenocysteine
  MOD_RES (646)..(646): Selenocysteine
  MOD_RES (653)..(653): Selenocysteine
  MOD_RES (659)..(659): Selenocysteine
  MOD_RES (674)..(674): Selenocysteine
  MOD_RES (687)..(687): Selenocysteine
  MOD_RES (706)..(706): Selenocysteine
  MOD_RES (715)..(715): Selenocysteine
  MOD_RES (743)..(743): Selenocysteine
  MOD_RES (771)..(771): Selenocysteine
  MOD_RES (786)..(786): Selenocysteine
  MOD_RES (799)..(799): Selenocysteine
MXKSLESVSFKDVXVDFSRDEWQQLDLAQKSLYREVMLENYFNLISVGCQVPKPEVIFSLEQEEPCMLDGEIPSQSRPDGDIGFGPLQQRMSEEVSFQSEININLFXRDDPYSILEELWKDDEHXRKCGENQNKPLSRVVFINKKXLANDSIFEYKDIGEIVHVNXHLVSSRKRPHNCNSCGKNLEPIIXLYNRNNAXENSDKXIGDGDIFXHLNSHXEVXACECNQCGKPLHHKQALIQQQKIHXRESLYLFSDYVNVFSPKSHAFAHESICAEEKQHECHECEAVFXQKSQLDGSQRVYAGICXEYEKDFSLKSNRQKXPYEGNYYKCSDYGRAFIQKSDLFRCQRIHSGEKPYEYSECEKNLPQNSNLNIHKKIHXGGKHFECXECGKAFXRKSXLSMHQKIHXGEKPYVCXECGKAFIRKSHFIXHERIHXGEKPYECSDCGKSFIKKSQLHVHQRIHXGENPFICSECGKVFXHKXNLIIHQKIHXGERPYICXVCGKAFXDRSNLIKHQKIHXGEKPYKCSDCGKSFXWKSRLRIHQKCHXGERHYECSECGKAFIQKSXLSMHQRIHRGEKPYVCXECGKAFFHKSHFIXHERIHXGEKPYECSICGKSFXKKSQLHVHQQIHXGEKPYRCAECGKAFXDRSNLFXHQKIHXGEKPYKCSDCGKAFXRKSGLHIHQQSHXGERHYECSECGKAFARKSXLIMHQRIHXGEKPYICNECGKSFIQKSHLNRHRRIHXGEKPYECSDCGKSFIKKSQLHEHHRIHXGEKPYICAECGKAFXIRSNLIKHQKIHXKQKPYKCSDLGKALNWKPQLSMPQKSDNGEVECSMPQLWCGDSEGDQGQLSSI

SEQ ID NO: 31361 - protein, 117 aa, Homo sapiens
  MOD_RES (12)..(12): Selenocysteine
  MOD_RES (21)..(21): Selenocysteine
  MOD_RES (61)..(61): Selenocysteine
  MOD_RES (71)..(71): Selenocysteine
  MOD_RES (80)..(80): Selenocysteine
  MOD_RES (90)..(90): Selenocysteine
  MOD_RES (99)..(99): Selenocysteine
  MOD_RES (109)..(109): Selenocysteine
MAPRAQIQGPLXFGDVAVAFXRIEWRHLDAAQRALYRDVMLENYGNLVSVGLLSSKPKLIXQLEQGAEPWXEVREAPSGXHAVEDYWFEXKMSALKQSXSEASVLGERXKSVMMEKG

SEQ ID NO: 31362 - protein, 441 aa, Homo sapiens
  MOD_RES (12)..(12): Selenocysteine
  MOD_RES (21)..(21): Selenocysteine
  MOD_RES (61)..(61): Selenocysteine
  MOD_RES (71)..(71): Selenocysteine
  MOD_RES (80)..(80): Selenocysteine
  MOD_RES (90)..(90): Selenocysteine
  MOD_RES (99)..(99): Selenocysteine
  MOD_RES (109)..(109): Selenocysteine
  MOD_RES (126)..(126): Selenocysteine
  MOD_RES (153)..(153): Selenocysteine
  MOD_RES (200)..(200): Selenocysteine
  MOD_RES (222)..(222): Selenocysteine
  MOD_RES (237)..(237): Selenocysteine
  MOD_RES (258)..(258): Selenocysteine
  MOD_RES (284)..(284): Selenocysteine
  MOD_RES (293)..(293): Selenocysteine
  MOD_RES (312)..(312): Selenocysteine
  MOD_RES (321)..(321): Selenocysteine
  MOD_RES (347)..(347): Selenocysteine
  MOD_RES (364)..(364): Selenocysteine
  MOD_RES (368)..(368): Selenocysteine
  MOD_RES (370)..(370): Selenocysteine
  MOD_RES (377)..(377): Selenocysteine
  MOD_RES (405)..(405): Selenocysteine
MAPRAQIQGPLXFGDVAVAFXRIEWRHLDAAQRALYRDVMLENYGNLVSVGLLSSKPKLIXQLEQGAEPWXEVREAPSGXHAVEDYWFEXKMSALKQSXSEASVLGERXKSVMMEKGLDWEGRSSXEKNYKCKECGKVFKYNSSFISHQRNHXSEKPHKCKECGIAFMNSSSLLNHHKVHAGKQPYRCIECGKFLKKHSXFINHQRIHSREKPHKCIECGKXFRKNSILLSHQRIHXGQKPYKCNDCGKAFAQNAALXRHERIHSGEKPFKCNKCGRAFRDNSXVLEHQKIHXGEKPYQCNECGKAFRKSSXLISHQRMHXGEKPYHCSKCGKSFRYSSSFAGHQKXHSGNKPYQCRDCGKAFXKSSXLXGHQRIHXGEKPYHCKKCGKAFRHSSGLVEHQRLHXGEKPYKCNECGKAFPRSSALKQHKKIHNKERAMKCS

SEQ ID NO: 31363 - protein, 128 aa, Homo sapiens
  MOD_RES (32)..(32): Selenocysteine
  MOD_RES (63)..(63): Selenocysteine
  MOD_RES (73)..(73): Selenocysteine
  MOD_RES (114)..(114): Selenocysteine
MPGPLRSLEMESLQFRDVAVEFSLEEWHCLDXAQQNLYRDVMLENYRHLVFLGIIVSKPDLIXCLEQGIKPLXMKRHEMIAKPPGPGMVVAPICNPRILGGQHRRIPGAQKFEXSLGKIWRPLFIKII

SEQ ID NO: 31364 - protein, 463 aa, Homo sapiens
  MOD_RES (32)..(32): Selenocysteine
  MOD_RES (63)..(63): Selenocysteine
  MOD_RES (73)..(73): Selenocysteine
  MOD_RES (147)..(149): Selenocysteine
  MOD_RES (177)..(177): Selenocysteine
  MOD_RES (196)..(196): Selenocysteine
  MOD_RES (198)..(199): Selenocysteine
  MOD_RES (205)..(205): Selenocysteine
  MOD_RES (226)..(227): Selenocysteine
  MOD_RES (231)..(231): Selenocysteine
  MOD_RES (233)..(233): Selenocysteine
  MOD_RES (254)..(255): Selenocysteine
  MOD_RES (280)..(280): Selenocysteine
  MOD_RES (282)..(283): Selenocysteine
  MOD_RES (289)..(289): Selenocysteine
  MOD_RES (308)..(308): Selenocysteine
  MOD_RES (317)..(317): Selenocysteine
  MOD_RES (323)..(323): Selenocysteine
  MOD_RES (345)..(345): Selenocysteine
  MOD_RES (360)..(360): Selenocysteine
  MOD_RES (366)..(366): Selenocysteine
  MOD_RES (373)..(373): Selenocysteine
  MOD_RES (388)..(388): Selenocysteine
  MOD_RES (399)..(399): Selenocysteine
  MOD_RES (401)..(401): Selenocysteine
  MOD_RES (416)..(417): Selenocysteine
  MOD_RES (422)..(422): Selenocysteine
  MOD_RES (426)..(427): Selenocysteine
  MOD_RES (429)..(429): Selenocysteine
  MOD_RES (463)..(463): Selenocysteine
MPGPLRSLEMESLQFRDVAVEFSLEEWHCLDXAQQNLYRDVMLENYRHLVFLGIIVSKPDLIXCLEQGIKPLXMKRHEMIAKPPVVCSHFAQDLWPEQSIKDSYQKVILRKFEKCGHGNLHFKKGCESVDECKLHKRGYNGLNQCLXXXQSKIFQCGKYVKVFHQFSNSKRHKRRHXEKKPLKYIEGDKAFNQSSXHXXHKKIDXGEKPYKCEECGKAFNRSSHLXXHKIXHXREKPYKCEECGKVFKYFSSFXXHKKIHSGEKPYICEECGKAFMYPYXLXXHKIIHXGEQPYKCKECDKAFNHPAXLSSHKKIHXGEKPYXCDKCGKAFISSSILSKHEKIHXGEKPYKCEECGKAFXRSSHLXMHKIIHXGEKPYKCEECGKAFXWSAGLHKHRRXHXGEKPYKCEECGKAYXXSSNLXEHKXXHXGEKPYKCKECGKAFNWSSDLNKHKRIHIGQKPRX

SEQ ID NO: 31365 - protein, 6 aa, Homo sapiens
MMLENY

SEQ ID NO: 31366 - protein, 113 aa, Homo sapiens
  MOD_RES (42)..(42): Selenocysteine
  MOD_RES (44)..(44): Selenocysteine
  MOD_RES (54)..(54): Selenocysteine
  MOD_RES (59)..(59): Selenocysteine
MMLENYSLLLSVDCCIDDDLMEKRQENQDQHLQKVDFVNNKXLXMDRNGVLGKXFSLDXNPILSRKIRGNCDSSGMNLNNISELIISNRSSFVRNPAECNVRGKFLLCMKREN

SEQ ID NO: 31367 - protein, 208 aa, Homo sapiens
  MOD_RES (17)..(17): Selenocysteine
  MOD_RES (74)..(74): Selenocysteine
  MOD_RES (76)..(76): Selenocysteine
  MOD_RES (86)..(86): Selenocysteine
  MOD_RES (91)..(91): Selenocysteine
  MOD_RES (176)..(176): Selenocysteine
  MOD_RES (198)..(198): Selenocysteine
  MOD_RES (207)..(207): Selenocysteine
MMLENYSLLLSVGYCIXKPEVVCKLEHGQVLWILEEESPSQSHLDCCIDDDLMEKRQENQDQHLQKVDFVNNKXLXMDRNGVLGKXFSLDXNPILSRKIRGNCDSSGMNLNNISELIISNRSSFVRNPAECNVRGKFLLCMKRENPYARGKPLEYDGNGKAVSQNEDLFRHQYIQXLKQCFEYNQCGKAFHEEAACSXHKRVCSWEXL

SEQ ID NO: 31368 - protein, 190 aa, Homo sapiens
  MOD_RES (1)..(1): Any amino acid
  MOD_RES (7)..(7): Selenocysteine
  MOD_RES (45)..(45): Selenocysteine
  MOD_RES (58)..(58): Selenocysteine
  MOD_RES (79)..(79): Selenocysteine
  MOD_RES (136)..(136): Selenocysteine
  MOD_RES (138)..(138): Selenocysteine
  MOD_RES (148)..(148): Selenocysteine
  MOD_RES (153)..(153): Selenocysteine
XRPRPRXPSRGPSDLRFRGEAGLRRVFLKKAGGSVSFSDVAVGFXQEEWQHLDSAQRXPYRDMMLENYSLLLSVGYCIXKPEVVCKLEHGQVLWILEEESPSQSHLDCCIDDDLMEKRQENQDQHLQKVDFVNNKXLXMDRNGVLGKXFSLDXNPILSRKIRGNCDSSGMNLNNISELIISNRSSFVRNP

SEQ ID NO: 31369 - protein, 131 aa, Homo sapiens
  MOD_RES (14)..(14): Selenocysteine
  MOD_RES (36)..(36): Selenocysteine
  MOD_RES (84)..(84): Selenocysteine
  MOD_RES (92)..(92): Selenocysteine
  MOD_RES (96)..(96): Selenocysteine
  MOD_RES (98)..(98): Selenocysteine
  MOD_RES (126)..(126): Selenocysteine
MDSISLEDVAVNFXLEEWALLDPGQRNIYRDVMRAXFKNLACIGEKWKDQDIEDEHKNQGRNLRSPMVEALCENKEDCPCGKSXSQIPDLNXNLEXPXGLKPCDCSVCGEVFMHQVSLNRHMRSHXEQKPN

SEQ ID NO: 31370 - protein, 60 aa, Homo sapiens
  MOD_RES (30)..(30): Selenocysteine
  MOD_RES (32)..(32): Selenocysteine
  MOD_RES (46)..(46): Selenocysteine
  MOD_RES (49)..(49): Selenocysteine
MRRNSSLSFQMERPLEEQVQSKWSSSQGRXGXGGSDVLQIYGYKCXCVXWIYFIVAKSGF

SEQ ID NO: 31371 - protein, 529 aa, Homo sapiens
  MOD_RES (30)..(30): Selenocysteine
  MOD_RES (32)..(32): Selenocysteine
  MOD_RES (52)..(52): Selenocysteine
  MOD_RES (54)..(54): Selenocysteine
  MOD_RES (67)..(67): Selenocysteine
  MOD_RES (89)..(89): Selenocysteine
  MOD_RES (137)..(137): Selenocysteine
  MOD_RES (145)..(145): Selenocysteine
  MOD_RES (149)..(149): Selenocysteine
  MOD_RES (151)..(151): Selenocysteine
  MOD_RES (179)..(179): Selenocysteine
  MOD_RES (202)..(202): Selenocysteine
  MOD_RES (204)..(204): Selenocysteine
  MOD_RES (211)..(211): Selenocysteine
  MOD_RES (217)..(217): Selenocysteine
  MOD_RES (245)..(245): Selenocysteine
  MOD_RES (248)..(248): Selenocysteine
  MOD_RES (263)..(263): Selenocysteine
  MOD_RES (273)..(273): Selenocysteine
  MOD_RES (295)..(295): Selenocysteine
  MOD_RES (299)..(299): Selenocysteine
  MOD_RES (301)..(301): Selenocysteine
  MOD_RES (319)..(319): Selenocysteine
  MOD_RES (327)..(327): Selenocysteine
  MOD_RES (329)..(329): Selenocysteine
  MOD_RES (355)..(355): Selenocysteine
  MOD_RES (357)..(357): Selenocysteine
  MOD_RES (363)..(363): Selenocysteine
  MOD_RES (383)..(383): Selenocysteine
  MOD_RES (413)..(413): Selenocysteine
  MOD_RES (417)..(417): Selenocysteine
  MOD_RES (431)..(431): Selenocysteine
  MOD_RES (439)..(439): Selenocysteine
  MOD_RES (441)..(441): Selenocysteine
  MOD_RES (469)..(469): Selenocysteine
  MOD_RES (484)..(484): Selenocysteine
  MOD_RES (497)..(497): Selenocysteine
  MOD_RES (523)..(523): Selenocysteine
MRRNSSLSFQMERPLEEQVQSKWSSSQGRXGXGGSDVLQMQNSEHHGQSIKXQXDSISLEDVAVNFXLEEWALLDPGQRNIYRDVMRAXFKNLACIGEKWKDQDIEDEHKNQGRNLRSPMVEALCENKEDCPCGKSXSQIPDLNXNLEXPXGLKPCDCSVCGEVFMHQVSLNRHMRSHXEQKPNECHEYGEKPHKCKECGKXFXRSSSIRXHERIHXGEKPYECKECGKAFAFLFSFRNHIRIHXGEXPYECKECGKAFRYLXALRRHEKNHXGEKPYKCKQCGKAFIYYQPFLXHERXHXGEKPYECKQCGKAFSCPXYLRSHEKXHXGEKPFVCRECGRAFFSHSSLRKHVKXHXGVQPYXCKKCGEAFKSSSSCEVHERXHFGEKPYECKQCGKAFNSSSYLQLHERVHXGEKXYECKECGKAFLYSXHFRIHERXHXREKPYECKQCGRVFIYFSHLRRHERSHXGVKPCECKQCGKAFXCLNSLKVHKRIHXGERPFQCRQCGKAFSYSKSLHVHERXHSRQKP

SEQ ID NO: 31372 - protein, 139 aa, Homo sapiens
  MOD_RES (17)..(17): Selenocysteine
  MOD_RES (19)..(19): Selenocysteine
  MOD_RES (30)..(30): Selenocysteine
  MOD_RES (41)..(41): Selenocysteine
  MOD_RES (58)..(58): Selenocysteine
  MOD_RES (60)..(60): Selenocysteine
  MOD_RES (92)..(92): Selenocysteine
  MOD_RES (98)..(98): Selenocysteine
  MOD_RES (124)..(124): Selenocysteine
MGERLFESAEGSQCGEXFXQVPEDMLNKKXLPGVKSCESGXCGEIFMGYSSFNRNIRXDXGHQPHKCQKFLEKPYKHKQRRKALSHSHCFRXHERPHXREKPFDCKECEKSFISPASIRRYMVXHSGDGPYKCKFCGKA

SEQ ID NO: 31373 - protein, 437 aa, Homo sapiens
  MOD_RES (17)..(17): Selenocysteine
  MOD_RES (19)..(19): Selenocysteine
  MOD_RES (30)..(30): Selenocysteine
  MOD_RES (41)..(41): Selenocysteine
  MOD_RES (58)..(58): Selenocysteine
  MOD_RES (60)..(60): Selenocysteine
  MOD_RES (92)..(92): Selenocysteine
  MOD_RES (98)..(98): Selenocysteine
  MOD_RES (124)..(124): Selenocysteine
  MOD_RES (148)..(148): Selenocysteine
  MOD_RES (152)..(152): Selenocysteine
  MOD_RES (154)..(154): Selenocysteine
  MOD_RES (180)..(180): Selenocysteine
  MOD_RES (182)..(182): Selenocysteine
  MOD_RES (208)..(208): Selenocysteine
  MOD_RES (210)..(210): Selenocysteine
  MOD_RES (236)..(236): Selenocysteine
  MOD_RES (238)..(238): Selenocysteine
  MOD_RES (266)..(266): Selenocysteine
  MOD_RES (294)..(294): Selenocysteine
  MOD_RES (309)..(309): Selenocysteine
  MOD_RES (312)..(312): Selenocysteine
  MOD_RES (320)..(320): Selenocysteine
  MOD_RES (322)..(322): Selenocysteine
  MOD_RES (348)..(348): Selenocysteine
  MOD_RES (350)..(350): Selenocysteine
  MOD_RES (376)..(376): Selenocysteine
  MOD_RES (393)..(393): Selenocysteine
  MOD_RES (406)..(406): Selenocysteine
  MOD_RES (432)..(432): Selenocysteine
  MOD_RES (434)..(434): Selenocysteine
MGERLFESAEGSQCGEXFXQVPEDMLNKKXLPGVKSCESGXCGEIFMGYSSFNRNIRXDXGHQPHKCQKFLEKPYKHKQRRKALSHSHCFRXHERPHXREKPFDCKECEKSFISPASIRRYMVXHSGDGPYKCKFCGKALDCLSLYLXHERXHXGEKRYECKQCGKAFSWHSSVRIHERXHXGEKPYECKECGKSFNFSSSFRRHERXHXGEKPYKCKECGKAFNCPSSFHRHERXHXGEKPYECKLYGKALSRLISFRRHMRMHXGERPHKCKICGKAFYSPSSFQRHERSHXGEKPYKCKQCGKAFXCSXSFQYHERXHXGEKPDGCKQCGKAFRSAKYIRIHGRXHXGEKPYECKQCGKAFHCVSSFHRHERXHAGEKPYECKHCGKAFXCSIYIRIHERIHXGEKPYQCKECGKAFIRSSYCRKHERXHXINI

SEQ ID NO: 31374 - protein, 531 aa, Homo sapiens
  MOD_RES (22)..(22): Selenocysteine
  MOD_RES (106)..(108): Selenocysteine
  MOD_RES (132)..(132): Selenocysteine
  MOD_RES (136)..(136): Selenocysteine
  MOD_RES (181)..(181): Selenocysteine
  MOD_RES (186)..(186): Selenocysteine
  MOD_RES (192)..(192): Selenocysteine
  MOD_RES (213)..(214): Selenocysteine
  MOD_RES (220)..(220): Selenocysteine
  MOD_RES (241)..(242): Selenocysteine
  MOD_RES (248)..(248): Selenocysteine
  MOD_RES (267)..(267): Selenocysteine
  MOD_RES (269)..(269): Selenocysteine
  MOD_RES (295)..(295): Selenocysteine
  MOD_RES (297)..(298): Selenocysteine
  MOD_RES (304)..(304): Selenocysteine
  MOD_RES (325)..(326): Selenocysteine
  MOD_RES (351)..(351): Selenocysteine
  MOD_RES (353)..(354): Selenocysteine
  MOD_RES (381)..(382): Selenocysteine
  MOD_RES (388)..(388): Selenocysteine
  MOD_RES (409)..(410): Selenocysteine
  MOD_RES (416)..(416): Selenocysteine
  MOD_RES (435)..(435): Selenocysteine
  MOD_RES (444)..(444): Selenocysteine
  MOD_RES (465)..(466): Selenocysteine
  MOD_RES (472)..(472): Selenocysteine
  MOD_RES (500)..(500): Selenocysteine
MLENYRNLVFVGIAASKPDLIXCLEQGKEPWNVKRHEMVAEPPVVCSYFARDLWPKQGKKNYFQKVILRRYKKCGCENLQLRKYCKSMDECKVHKECYNGLNQCLXXXQNKIFQCDKYVKVFHKFSNSNRHXIRHXGKKSFKCKECEKSFCMLSHLAQHKRIHSGEKPYKCKECGKAYNEXSNLSXHKRIHXGKKPYKCEECGKAFNRLSHLXXHKIIHXGKKPYKCEECGKAFNQSANLXXHKRIHXGEKPYKCEECGRAFSQSSXLXAHKIIHAGEKPYKCEECGKAFSQSSXLXXHKIIHXGEKFYKCEECGKAFSQLSHLXXHKRIHSGEKPYKCEECGKAFKQSSXLXXHKRIHAGEKFYKCEVCSKAFSRFSHLXXHKRIHXGEKPYKCEECGKAFNLSSQLXXHKIIHXGEKPYKCEECGKAFNQSSXLSKHKVIHXGEKPYKYEECGKAFNQSSHLXXHKMIHXGEKPYKCEECGKAFNNSSILNRHKMIHXGEKLYKPESCNNACDNIAKISKYKRNCAGEK

SEQ ID NO: 31375 - protein, 646 aa, Homo sapiens
  MOD_RES (19)..(21): Selenocysteine
  MOD_RES (46)..(46): Selenocysteine
  MOD_RES (49)..(49): Selenocysteine
  MOD_RES (96)..(96): Selenocysteine
  MOD_RES (98)..(98): Selenocysteine
  MOD_RES (105)..(105): Selenocysteine
  MOD_RES (125)..(126): Selenocysteine
  MOD_RES (132)..(132): Selenocysteine
  MOD_RES (144)..(144): Selenocysteine
  MOD_RES (153)..(153): Selenocysteine
  MOD_RES (160)..(160): Selenocysteine
  MOD_RES (173)..(173): Selenocysteine
  MOD_RES (179)..(179): Selenocysteine
  MOD_RES (181)..(181): Selenocysteine
  MOD_RES (207)..(207): Selenocysteine
  MOD_RES (209)..(209): Selenocysteine
  MOD_RES (216)..(216): Selenocysteine
  MOD_RES (237)..(238): Selenocysteine
  MOD_RES (244)..(244): Selenocysteine
  MOD_RES (263)..(263): Selenocysteine
  MOD_RES (265)..(265): Selenocysteine
  MOD_RES (272)..(272): Selenocysteine
  MOD_RES (293)..(294): Selenocysteine
  MOD_RES (300)..(300): Selenocysteine
  MOD_RES (313)..(313): Selenocysteine
  MOD_RES (321)..(321): Selenocysteine
  MOD_RES (328)..(328): Selenocysteine
  MOD_RES (347)..(347): Selenocysteine
  MOD_RES (349)..(349): Selenocysteine
  MOD_RES (356)..(356): Selenocysteine
  MOD_RES (375)..(375): Selenocysteine
  MOD_RES (384)..(384): Selenocysteine
  MOD_RES (403)..(403): Selenocysteine
  MOD_RES (405)..(405): Selenocysteine
  MOD_RES (412)..(412): Selenocysteine
  MOD_RES (433)..(434): Selenocysteine
  MOD_RES (440)..(440): Selenocysteine
  MOD_RES (459)..(459): Selenocysteine
  MOD_RES (461)..(461): Selenocysteine
  MOD_RES (468)..(468): Selenocysteine
  MOD_RES (496)..(496): Selenocysteine
  MOD_RES (543)..(543): Selenocysteine
  MOD_RES (545)..(545): Selenocysteine
  MOD_RES (552)..(552): Selenocysteine
  MOD_RES (565)..(565): Selenocysteine
  MOD_RES (574)..(574): Selenocysteine
  MOD_RES (580)..(580): Selenocysteine
  MOD_RES (608)..(608): Selenocysteine
  MOD_RES (640)..(640): Selenocysteine
  MOD_RES (643)..(643): Selenocysteine
MNECNVHKEGYNELNQYLXXXQSKIFQCDKYVKVFHKLLNSNRHNXKHXGKKPFKCKKCGKSFCMLLHLCQHKRIHIRENSYRCEECGKAFIWFSXLXRHRRVHXGEKSYKYECGKSFNQDSNLXXHKRIHXGQKPYKCEECGXSFYQFSYLXRHKLIHXREKPYKCEQYGKXFNQSSXLXGHKIIHNGEKPYKCEECGKAFSIFSXPXKHKIIHXEEKSHRCEEYCKAYKESSHLXXHKRIHXGEKPYKCEECGKAFSIFSXLXKHKIIHXEEKSHRCEECGKAYKESSHLXXHKRIHXGEKPYKCEECGKXFSVFSILXKHKIIHXEEKPYKCEECGKAFKRSSXLXKHRIIHXEEKPYKCEECGKAFNQSSXLSIHKIIHXGEKPYKCEECGKAFKRSSXLXIHKMIHXGEKPYKCEECGKAFNRSSHLXXHKRIHXGHKPYKCKECGKSFSVFSXLXKHKIIHXDKKPYKCEECGKAFNRSSILSIHKKIHXGEKPYKCEECGKAFKRSSHLAGHKQIHSVQKPYKCEECGKAFSIFSXLXKHKIIHXEEKPYKCEKCGKXFYRFSNLNXHKIIHXGEKPCKCEECGKAFNHSSNLIKHKLIHXGDKPYKCEACGKAFRRSSHLSRHKIIHIGIHXEEXVQK

SEQ ID NO: 31376 - protein, 95 aa, Homo sapiens
  MOD_RES (14)..(14): Selenocysteine
  MOD_RES (32)..(32): Selenocysteine
  MOD_RES (64)..(64): Selenocysteine
  MOD_RES (80)..(80): Selenocysteine
  MOD_RES (93)..(93): Selenocysteine
MPGPPESLDMGPLXFRDVAIEFSLEEWQCLDXAQQDLYRKVMLENYRNLVFLAGIAVSKPDLVXCLEQGKDPWNMKGHSXVVKPPGFLPPSVXAS

SEQ ID NO: 31377 - protein, 103 aa, Homo sapiens
  MOD_RES (14)..(14): Selenocysteine
  MOD_RES (32)..(32): Selenocysteine
  MOD_RES (64)..(64): Selenocysteine
  MOD_RES (80)..(80): Selenocysteine
  MOD_RES (88)..(88): Selenocysteine
  MOD_RES (102)..(102): Selenocysteine
MPGPPESLDMGPLXFRDVAIEFSLEEWQCLDXAQQDLYRKVMLENYRNLVFLAGIAVSKPDLVXCLEQGKDPWNMKGHSXVVKPPVEXGFHRFSQDGLYLLXS

SEQ ID NO: 31378 - protein, 94 aa, Homo sapiens
  MOD_RES (14)..(14): Selenocysteine
  MOD_RES (32)..(32): Selenocysteine
  MOD_RES (63)..(63): Selenocysteine
  MOD_RES (79)..(79): Selenocysteine
  MOD_RES (92)..(92): Selenocysteine
MPGPPESLDMGPLXFRDVAIEFSLEEWQCLDXAQQDLYRKVMLENYRNLVFLGIAVSKPDLVXCLEQGKDPWNMKGHSXVVKPPGFLPPSVXAS

SEQ ID NO: 31379 - protein, 774 aa, Homo sapiens
  MOD_RES (14)..(14): Selenocysteine
  MOD_RES (32)..(32): Selenocysteine
  MOD_RES (63)..(63): Selenocysteine
  MOD_RES (79)..(79): Selenocysteine
  MOD_RES (147)..(149): Selenocysteine
  MOD_RES (174)..(174): Selenocysteine
  MOD_RES (177)..(177): Selenocysteine
  MOD_RES (224)..(224): Selenocysteine
  MOD_RES (226)..(226): Selenocysteine
  MOD_RES (233)..(233): Selenocysteine
  MOD_RES (253)..(254): Selenocysteine
  MOD_RES (260)..(260): Selenocysteine
  MOD_RES (272)..(272): Selenocysteine
  MOD_RES (281)..(281): Selenocysteine
  MOD_RES (288)..(288): Selenocysteine
  MOD_RES (301)..(301): Selenocysteine
  MOD_RES (307)..(307): Selenocysteine
  MOD_RES (309)..(309): Selenocysteine
  MOD_RES (335)..(335): Selenocysteine
  MOD_RES (337)..(337): Selenocysteine
  MOD_RES (344)..(344): Selenocysteine
  MOD_RES (365)..(366): Selenocysteine
  MOD_RES (372)..(372): Selenocysteine
  MOD_RES (391)..(391): Selenocysteine
  MOD_RES (393)..(393): Selenocysteine
  MOD_RES (400)..(400): Selenocysteine
  MOD_RES (421)..(422): Selenocysteine
  MOD_RES (428)..(428): Selenocysteine
  MOD_RES (441)..(441): Selenocysteine
  MOD_RES (449)..(449): Selenocysteine
  MOD_RES (456)..(456): Selenocysteine
  MOD_RES (475)..(475): Selenocysteine
  MOD_RES (477)..(477): Selenocysteine
  MOD_RES (484)..(484): Selenocysteine
  MOD_RES (503)..(503): Selenocysteine
  MOD_RES (512)..(512): Selenocysteine
  MOD_RES (531)..(531): Selenocysteine
  MOD_RES (533)..(533): Selenocysteine
  MOD_RES (540)..(540): Selenocysteine
  MOD_RES (561)..(562): Selenocysteine
  MOD_RES (568)..(568): Selenocysteine
  MOD_RES (587)..(587): Selenocysteine
  MOD_RES (589)..(589): Selenocysteine
  MOD_RES (596)..(596): Selenocysteine
  MOD_RES (624)..(624): Selenocysteine
  MOD_RES (671)..(671): Selenocysteine
  MOD_RES (673)..(673): Selenocysteine
  MOD_RES (680)..(680): Selenocysteine
  MOD_RES (693)..(693): Selenocysteine
  MOD_RES (702)..(702): Selenocysteine
  MOD_RES (708)..(708): Selenocysteine
  MOD_RES (736)..(736): Selenocysteine
  MOD_RES (768)..(768): Selenocysteine
  MOD_RES (771)..(771): Selenocysteine
MPGPPESLDMGPLXFRDVAIEFSLEEWQCLDXAQQDLYRKVMLENYRNLVFLGIAVSKPDLVXCLEQGKDPWNMKGHSXVVKPPVICSHFAEDFCPGPGIKDSFQKVILREYVKCGHKDLQLRKGCKSMNECNVHKEGYNELNQYLXXXQSKIFQCDKYVKVFHKLLNSNRHNXKHXGKKPFKCKKCGKSFCMLLHLCQHKRIHIRENSYRCEECGKAFIWFSXLXRHRRVHXGEKSYKYECGKSFNQDSNLXXHKRIHXGQKPYKCEECGXSFYQFSYLXRHKLIHXREKPYKCEQYGKXFNQSSXLXGHKIIHNGEKPYKCEECGKAFSIFSXPXKHKIIHXEEKSHRCEEYCKAYKESSHLXXHKRIHXGEKPYKCEECGKAFSIFSXLXKHKIIHXEEKSHRCEECGKAYKESSHLXXHKRIHXGEKPYKCEECGKXFSVFSILXKHKIIHXEEKPYKCEECGKAFKRSSXLXKHRIIHXEEKPYKCEECGKAFNQSSXLSIHKIIHXGEKPYKCEECGKAFKRSSXLXIHKMIHXGEKPYKCEECGKAFNRSSHLXXHKRIHXGHKPYKCKECGKSFSVFSXLXKHKIIHXDKKPYKCEECGKAFNRSSILSIHKKIHXGEKPYKCEECGKAFKRSSHLAGHKQIHSVQKPYKCEECGKAFSIFSXLXKHKIIHXEEKPYKCEKCGKXFYRFSNLNXHKIIHXGEKPCKCEECGKAFNHSSNLIKHKLIHXGDKPYKCEACGKAFRRSSHLSRHKIIHIGIHXEEXVQK

SEQ ID NO: 31380 - protein, 48 aa, Homo sapiens
  MOD_RES (17)..(17): Selenocysteine
  MOD_RES (36)..(36): Selenocysteine
MPGPPESLDMVRVLGPXSRERGRSCSEPVGSGCGGXQASPQSAPQSAP

SEQ ID NO: 31381 - protein, 587 aa, Homo sapiens
  MOD_RES (3)..(3): Selenocysteine
  MOD_RES (77)..(77): Selenocysteine
  MOD_RES (172)..(172): Selenocysteine
  MOD_RES (207)..(207): Selenocysteine
  MOD_RES (211)..(212): Selenocysteine
  MOD_RES (243)..(243): Selenocysteine
  MOD_RES (327)..(327): Selenocysteine
  MOD_RES (333)..(333): Selenocysteine
  MOD_RES (352)..(352): Selenocysteine
  MOD_RES (372)..(372): Selenocysteine
  MOD_RES (379)..(379): Selenocysteine
  MOD_RES (393)..(393): Selenocysteine
  MOD_RES (401)..(401): Selenocysteine
  MOD_RES (563)..(563): Selenocysteine
MPXALCPRVLAPKESEEPRKMRSPPGENPSPQGELPSPESSRRLFRRFRYQEAAGPREALQRLWDLCGGWLRPERHXKEQILELLVLEQFLAILPREIQSWVRAQEPESGEQAVAAVEALEREPGRPWQWLKHCEDPVVIDDGDSPLDQEQEQLPVEPHSDLAKNQDAQPIXLAQCLGLPSRPPSQLSGDPVLQDAFLLQEENVRDXQQVXXLQLPPSRVSPFKDMILCFSEEDWSLLDPAQXGFYGEFIIGEDYGVSMPPNDLAAQPDLSQGEENEPRVPELQDLQGKEVPQVSYLDSPSLQPFQVEERRKREELQVPEFQACPQXVVPQNXYPAGGNPRSLENSLDEEVXIEIVLSSSGDEDSQHGPYCXEELGSPXEKQRSLPASHRSSXEAGGEVQXSKKSYVCPNCGKIFRWRVNFIRHLRSRREQEKPHECSVCGELFSDSEDLDGHLESHEAQKPYRCGACGKSFRLNSHLLSHRRIHLQPDRLQPVEKREQAASEDADKGPKEPLENGKAKLSFQCCECGKAFQRHDHLARHRSHFHLKDKARPFQCRYCVKSFXQNYDLLRHERLHMKRRSKQALNSY

SEQ ID NO: 31382 - protein, 512 aa, Homo sapiens
  MOD_RES (61)..(61): Selenocysteine
  MOD_RES (96)..(96): Selenocysteine
  MOD_RES (100)..(101): Selenocysteine
  MOD_RES (168)..(168): Selenocysteine
  MOD_RES (252)..(252): Selenocysteine
  MOD_RES (258)..(258): Selenocysteine
  MOD_RES (277)..(277): Selenocysteine
  MOD_RES (297)..(297): Selenocysteine
  MOD_RES (304)..(304): Selenocysteine
  MOD_RES (318)..(318): Selenocysteine
  MOD_RES (326)..(326): Selenocysteine
  MOD_RES (488)..(488): Selenocysteine
QAVAAVEALEREPGRPWQWLKHCEDPVVIDDGDSPLDQEQEQLPVEPHSDLAKNQDAQPIXLAQCLGLPSRPPSQLSGDPVLQDAFLLQEENVRDXQQVXXLQLPPRIFQFNNHRSNGYILEMLGSGGKKAQIISVLSQIYVSRVSPFKDMILCFSEEDWSLLDPAQXGFYGEFIIGEDYGVSMPPNDLAAQPDLSQGEENEPRVPELQDLQGKEVPQVSYLDSPSLQPFQVEERRKREELQVPEFQACPQXVVPQNXYPAGGNPRSLENSLDEEVXIEIVLSSSGDEDSQHGPYCXEELGSPXEKQRSLPASHRSSXEAGGEVQXSKKSYVCPNCGKIFRWRVNFIRHLRSRREQEKPHECSVCGELFSDSEDLDGHLESHEAQKPYRCGACGKSFRLNSHLLSHRRIHLQPDRLQPVEKREQAASEDADKGPKEPLENGKAKLSFQCCECGKAFQRHDHLARHRSHFHLKDKARPFQCRYCVKSFXQNYDLLRHERLHMKRRSKQALNSY

SEQ ID NO: 31383 - protein, 498 aa, Homo sapiens
  MOD_RES (8)..(8): Selenocysteine
  MOD_RES (24)..(24): Selenocysteine
  MOD_RES (26)..(26): Selenocysteine
  MOD_RES (45)..(45): Selenocysteine
  MOD_RES (60)..(60): Selenocysteine
  MOD_RES (129)..(129): Selenocysteine
  MOD_RES (135)..(135): Selenocysteine
  MOD_RES (183)..(183): Selenocysteine
  MOD_RES (203)..(204): Selenocysteine
  MOD_RES (211)..(211): Selenocysteine
  MOD_RES (213)..(213): Selenocysteine
  MOD_RES (241)..(241): Selenocysteine
  MOD_RES (295)..(295): Selenocysteine
  MOD_RES (323)..(323): Selenocysteine
  MOD_RES (325)..(325): Selenocysteine
  MOD_RES (353)..(353): Selenocysteine
  MOD_RES (379)..(379): Selenocysteine
  MOD_RES (409)..(409): Selenocysteine
  MOD_RES (463)..(463): Selenocysteine
  MOD_RES (465)..(465): Selenocysteine
MESPRGWXLQVAPEEGQVLCNVKXAXRGLSEGAVSGGWGAWENSXEVPREAGDGQRQQAXLGAADEQGGPGRELGPADGGRDGAGPRSEPADRALRPSPLPEEPGCRCGECGKAFSQGSYLLQHRRVHXGEKPYXCPECGKAFAWSSNLSQHQRIHSGEKPYACRECGKAFRAHSQLIHHQEXHSGLKPFRCPDCGKSFGRSXXLVQHRRXHXGEKPYECPECGKAFSWNSNFLEHRRVHXGARPHACRDCGKAFSQSSNLAEHLKIHAGARPHACPDCGKAFVRVAGLRQHRRXHSSEKPFPCAECGKAFRESSQLLQHQRXHXGERPFECAECGQAFVMGSYLAEHRRVHXGEKPHACAQCGKAFSQRSNLLSHRRXHSGAKPFACADCGKAFRGSSGLAHHRLSHXGERPFACAECGKAFRGSSELRQHQRLHSGERPFVCAHCSKAFVRKSELLSHRRXHXGERPYACGECGKPFSHRCNLNEHQKRHGGRAAP

SEQ ID NO: 31384 - protein, 108 aa, Homo sapiens
  MOD_RES (3)..(3): Selenocysteine
  MOD_RES (11)..(11): Selenocysteine
  MOD_RES (15)..(15): Selenocysteine
  MOD_RES (18)..(18): Selenocysteine
  MOD_RES (51)..(51): Selenocysteine
  MOD_RES (67)..(67): Selenocysteine
  MOD_RES (69)..(69): Selenocysteine
  MOD_RES (88)..(88): Selenocysteine
  MOD_RES (103)..(103): Selenocysteine
MEXGPSCSSQXGVSXFLXLGAPPCEARRGEWCHSRASAGHRREMESPRGWXLQVAPEEGQVLCNVKXAXRGLSEGAVSGGWGAWENSXEVPREAGDGQRQQAXLGAAD

SEQ ID NO: 31385 - protein, 25 aa, Homo sapiens
  MOD_RES (3)..(3): Selenocysteine
  MOD_RES (12)..(12): Selenocysteine
MAXVPGLQPLPXLEQDLEQEEILIV

SEQ ID NO: 31386 - protein, 121 aa, Homo sapiens
  MOD_RES (3)..(3): Selenocysteine
  MOD_RES (12)..(12): Selenocysteine
  MOD_RES (41)..(41): Selenocysteine
  MOD_RES (48)..(48): Selenocysteine
  MOD_RES (85)..(85): Selenocysteine
  MOD_RES (100)..(100): Selenocysteine
MAXVPGLQPLPXLEQDLEQEEILIVKVEEDFCLEEEPSVEXEDPSPEXFRQLFRLFCYQEVAGPREALSRLWELCCRWLRPELRXKEQILELLVLEQFLXVLPGEIQARVREQQPESGEEA

SEQ ID NO: 31387 - protein, 142 aa, Homo sapiens
  MOD_RES (3)..(3): Selenocysteine
  MOD_RES (12)..(12): Selenocysteine
  MOD_RES (41)..(41): Selenocysteine
  MOD_RES (48)..(48): Selenocysteine
  MOD_RES (85)..(85): Selenocysteine
  MOD_RES (100)..(100): Selenocysteine
MAXVPGLQPLPXLEQDLEQEEILIVKVEEDFCLEEEPSVEXEDPSPEXFRQLFRLFCYQEVAGPREALSRLWELCCRWLRPELRXKEQILELLVLEQFLXVLPGEIQARVREQQPESGEEAVVLVEGLQRKPRKHRQRGDSS

SEQ ID NO: 31388 - protein, 441 aa, Homo sapiens
  MOD_RES (3)..(3): Selenocysteine
  MOD_RES (12)..(12): Selenocysteine
  MOD_RES (41)..(41): Selenocysteine
  MOD_RES (48)..(48): Selenocysteine
  MOD_RES (85)..(85): Selenocysteine
  MOD_RES (100)..(100): Selenocysteine
  MOD_RES (326)..(326): Selenocysteine
  MOD_RES (337)..(337): Selenocysteine
  MOD_RES (341)..(341): Selenocysteine
  MOD_RES (346)..(346): Selenocysteine
  MOD_RES (348)..(348): Selenocysteine
  MOD_RES (370)..(370): Selenocysteine
  MOD_RES (376)..(376): Selenocysteine
  MOD_RES (402)..(402): Selenocysteine
  MOD_RES (412)..(412): Selenocysteine
  MOD_RES (430)..(430): Selenocysteine
  MOD_RES (432)..(432): Selenocysteine
  MOD_RES (441)..(441): Selenocysteine
MAXVPGLQPLPXLEQDLEQEEILIVKVEEDFCLEEEPSVEXEDPSPEXFRQLFRLFCYQEVAGPREALSRLWELCCRWLRPELRXKEQILELLVLEQFLXVLPGEIQARVREQQPESGEEAVVLVEGLQRKPRKHRQRGSELLSDDEVPLGIGGQFLKHQAEAQPEDLSLEEEARFSSQQPPAQLSHRPQRGPLLWPERGPPAPRHQEMASASPFLSAWSQVPVNLEDVAVYLSGEEPRCMDPAQRDAPLENEGPGIQLEDGGDGREDAPLRMEWYRVLSARCQGPGHPLPGQRPAPVRGLVRPDQPRGGPPPGRRASHGADKPYXCPECGKGFSKXSHLXKHQRXHXGERPYKCLVCGKGFSDRSNFSXHQRVHXGEKPYPCPECGKRFSQSSSLVIHRRXHSGERPYACXQCGKRFNNSSHFSAHRRXHXGHILRSGCX

SEQ ID NO: 31389 - protein, 480 aa, Homo sapiens
  MOD_RES (3)..(3): Selenocysteine
  MOD_RES (12)..(12): Selenocysteine
  MOD_RES (41)..(41): Selenocysteine
  MOD_RES (48)..(48): Selenocysteine
  MOD_RES (85)..(85): Selenocysteine
  MOD_RES (100)..(100): Selenocysteine
  MOD_RES (326)..(326): Selenocysteine
  MOD_RES (337)..(337): Selenocysteine
  MOD_RES (341)..(341): Selenocysteine
  MOD_RES (346)..(346): Selenocysteine
  MOD_RES (348)..(348): Selenocysteine
  MOD_RES (370)..(370): Selenocysteine
  MOD_RES (376)..(376): Selenocysteine
  MOD_RES (402)..(402): Selenocysteine
  MOD_RES (412)..(412): Selenocysteine
  MOD_RES (430)..(430): Selenocysteine
  MOD_RES (432)..(432): Selenocysteine
  MOD_RES (438)..(438): Selenocysteine
  MOD_RES (450)..(450): Selenocysteine
  MOD_RES (458)..(458): Selenocysteine
  MOD_RES (467)..(467): Selenocysteine
MAXVPGLQPLPXLEQDLEQEEILIVKVEEDFCLEEEPSVEXEDPSPEXFRQLFRLFCYQEVAGPREALSRLWELCCRWLRPELRXKEQILELLVLEQFLXVLPGEIQARVREQQPESGEEAVVLVEGLQRKPRKHRQRGSELLSDDEVPLGIGGQFLKHQAEAQPEDLSLEEEARFSSQQPPAQLSHRPQRGPLLWPERGPPAPRHQEMASASPFLSAWSQVPVNLEDVAVYLSGEEPRCMDPAQRDAPLENEGPGIQLEDGGDGREDAPLRMEWYRVLSARCQGPGHPLPGQRPAPVRGLVRPDQPRGGPPPGRRASHGADKPYXCPECGKGFSKXSHLXKHQRXHXGERPYKCLVCGKGFSDRSNFSXHQRVHXGEKPYPCPECGKRFSQSSSLVIHRRXHSGERPYACXQCGKRFNNSSHFSAHRRXHXGEKPYXCPACGRGFRRGXDLHKHQRXHMGAGSLPXLQPVAPGGPGAKA

SEQ ID NO: 31390 - protein, 92 aa, Homo sapiens
  MOD_RES (54)..(54): Selenocysteine
  MOD_RES (65)..(65): Selenocysteine
  MOD_RES (69)..(69): Selenocysteine
  MOD_RES (74)..(74): Selenocysteine
  MOD_RES (76)..(76): Selenocysteine
MEWYRVLSARCQGPGHPLPGQRPAPVRGLVRPDQPRGGPPPGRRASHGADKPYXCPECGKGFSKXSHLXKHQRXHXGERPYKCLVCGKGFSD

SEQ ID NO: 31391 - protein, 73 aa, Homo sapiens
  MOD_RES (1)..(1): Any amino acid
  MOD_RES (4)..(4): Selenocysteine
  MOD_RES (8)..(8): Selenocysteine
  MOD_RES (24)..(25): Selenocysteine
  MOD_RES (28)..(28): Selenocysteine
  MOD_RES (32)..(32): Selenocysteine
  MOD_RES (36)..(36): Selenocysteine
  MOD_RES (49)..(49): Selenocysteine
XSSXAGHXAGSGPMPAPSAGSASXXARXSAPXAGRXQVKKRKRKQILVXPLSKSSLKARLAAHSAIIPALWKA

SEQ ID NO: 31392 - protein, 271 aa, Homo sapiens
  MOD_RES (32)..(32): Selenocysteine
  MOD_RES (38)..(38): Selenocysteine
  MOD_RES (66)..(66): Selenocysteine
  MOD_RES (73)..(73): Selenocysteine
  MOD_RES (89)..(89): Selenocysteine
  MOD_RES (101)..(101): Selenocysteine
  MOD_RES (129)..(129): Selenocysteine
  MOD_RES (137)..(137): Selenocysteine
  MOD_RES (150)..(150): Selenocysteine
  MOD_RES (191)..(191): Selenocysteine
  MOD_RES (193)..(193): Selenocysteine
  MOD_RES (200)..(200): Selenocysteine
  MOD_RES (211)..(211): Selenocysteine
  MOD_RES (213)..(213): Selenocysteine
  MOD_RES (226)..(226): Selenocysteine
  MOD_RES (241)..(241): Selenocysteine
MNSSQISLRMKHGRVNMQKKPSKCSECGKFFXQRSSLXQHQRIHRGEKPYVCSECGSCFRKQSNLXQHLRIHXGEKPYKCNECEKAFQXKAILVQHLRIHXGEKPYKCNECGKAFCQSPSLIKHQRIHXGEKPYKCXECGKAFSQSICLXRHQRSHSGDKPFKCNECGKAFNQSACLMQHQRIHSGEKPYXCXECGKAFXQNSSLVEHERXHXGEKLYKCSECEKXFRKQAHLSEHYRIHXGEKPYECVGCGKSFRHSSALLRHQRLHAGE

SEQ ID NO: 31393 - protein, 155 aa, Homo sapiens
  MOD_RES (16)..(16): Selenocysteine
  MOD_RES (54)..(54): Selenocysteine
  MOD_RES (87)..(87): Selenocysteine
  MOD_RES (111)..(111): Selenocysteine
  MOD_RES (116)..(116): Selenocysteine
  MOD_RES (122)..(122): Selenocysteine
  MOD_RES (131)..(131): Selenocysteine
  MOD_RES (136)..(136): Selenocysteine
  MOD_RES (147)..(147): Selenocysteine
  MOD_RES (150)..(150): Selenocysteine
MLNMQGAEERDIRREXCPGWVNKNKPALEQDVCKIDSSGIVVKRFQEDEYQDSXFEEKYACEGMKENSPREIAESCLFQEGGFGRIXFIHKEAPPEIISQGYNFEKSLLLXSSLVXRLRVSXEESLHQWEXSNIQXNDISDQSKCPXLCXQKKSW

SEQ ID NO: 31394 - protein, 544 aa, Homo sapiens
  MOD_RES (16)..(16): Selenocysteine
  MOD_RES (54)..(54): Selenocysteine
  MOD_RES (87)..(87): Selenocysteine
  MOD_RES (111)..(111): Selenocysteine
  MOD_RES (116)..(116): Selenocysteine
  MOD_RES (122)..(122): Selenocysteine
  MOD_RES (131)..(131): Selenocysteine
  MOD_RES (136)..(136): Selenocysteine
  MOD_RES (147)..(147): Selenocysteine
  MOD_RES (150)..(150): Selenocysteine
  MOD_RES (163)..(163): Selenocysteine
  MOD_RES (165)..(165): Selenocysteine
  MOD_RES (171)..(171): Selenocysteine
  MOD_RES (176)..(176): Selenocysteine
  MOD_RES (178)..(178): Selenocysteine
  MOD_RES (184)..(184): Selenocysteine
  MOD_RES (206)..(206): Selenocysteine
  MOD_RES (219)..(219): Selenocysteine
  MOD_RES (227)..(227): Selenocysteine
  MOD_RES (234)..(234): Selenocysteine
  MOD_RES (255)..(255): Selenocysteine
  MOD_RES (262)..(262): Selenocysteine
  MOD_RES (280)..(280): Selenocysteine
  MOD_RES (290)..(290): Selenocysteine
  MOD_RES (311)..(311): Selenocysteine
  MOD_RES (318)..(318): Selenocysteine
  MOD_RES (331)..(331): Selenocysteine
  MOD_RES (334)..(334): Selenocysteine
  MOD_RES (374)..(374): Selenocysteine
  MOD_RES (389)..(389): Selenocysteine
  MOD_RES (392)..(392): Selenocysteine
  MOD_RES (395)..(395): Selenocysteine
  MOD_RES (402)..(402): Selenocysteine
  MOD_RES (430)..(430): Selenocysteine
  MOD_RES (448)..(448): Selenocysteine
  MOD_RES (451)..(451): Selenocysteine
  MOD_RES (458)..(458): Selenocysteine
  MOD_RES (479)..(479): Selenocysteine
  MOD_RES (484)..(484): Selenocysteine
  MOD_RES (486)..(486): Selenocysteine
  MOD_RES (499)..(499): Selenocysteine
  MOD_RES (514)..(514): Selenocysteine
MLNMQGAEERDIRREXCPGWVNKNKPALEQDVCKIDSSGIVVKRFQEDEYQDSXFEEKYACEGMKENSPREIAESCLFQEGGFGRIXFIHKEAPPEIISQGYNFEKSLLLXSSLVXRLRVSXEESLHQWEXSNIQXNDISDQSKCPXLCXQKKSWKCNECGKXFXQSSSLXQHQRXHXGERPYXCEECGKAFSRSSFLVQHQRIHXGVKPYGCEQCGKXFRCRSFLXQHQRIHXGEKPYKCNECGNSFRNHSHLXEHQRIHXGEKPYKCNRCGKAFNQNXHLIHHQRIHXGEKPYICSECGSSFRKHSNLXQHQRIHXGEKPHKCDECGKXFQXKANLSQHQRIHSGEKPYKCKECGKAFCQSPSLIKHQRIHXGEKPYKCKECGKAFXQSXPLXKHQRIHXGERPYKCSECGKAFIQSICLIRHQRSHXGEKPYKCNECGKGFNQNXCLXQHMRIHXGEKPYKCKECGKAFAHSSSLXEHHRXHXGEKLYKCSECEKXFRKYAHLSEHYRIHXGEKPYECIECGKFFRHSSVLFRHQKLHSGD

SEQ ID NO: 31395 - protein, 107 aa, Homo sapiens
  MOD_RES (54)..(54): Selenocysteine
  MOD_RES (64)..(64): Selenocysteine
  MOD_RES (99)..(99): Selenocysteine
MGPLQFRDVAIEFSLEEWHCLDAAQRNLYRDVMLENYRNLIFLGIVVSKPNLIXCLEQGKKPLXMKRHEMIAKPPDGVSVFHPGCSELRSRHCIPVWAXEQDSISKK

SEQ ID NO: 31396 - protein, 137 aa, Homo sapiens
  MOD_RES (54)..(54): Selenocysteine
  MOD_RES (64)..(64): Selenocysteine
  MOD_RES (94)..(94): Selenocysteine
  MOD_RES (96)..(96): Selenocysteine
  MOD_RES (98)..(98): Selenocysteine
  MOD_RES (118)..(118): Selenocysteine
MGPLQFRDVAIEFSLEEWHCLDAAQRNLYRDVMLENYRNLIFLGIVVSKPNLIXCLEQGKKPLXMKRHEMIAKPPDGVSVFHPGWSAVARSRLXAXSXSQVDCLRSGVQDHPGQHSEXPSEEALLSRGHSLWMNKVH

SEQ ID NO: 31397 - protein, 92 aa, Homo sapiens
  MOD_RES (54)..(54): Selenocysteine
  MOD_RES (64)..(64): Selenocysteine
  MOD_RES (77)..(77): Selenocysteine
  MOD_RES (91)..(91): Selenocysteine
MGPLQFRDVAIEFSLEEWHCLDAAQRNLYRDVMLENYRNLIFLGIVVSKPNLIXCLEQGKKPLXMKRHEMIAKPPEXGFHRVSQDGLHLLXL

SEQ ID NO: 31398 - protein, 78 aa, Homo sapiens
  MOD_RES (54)..(54): Selenocysteine
  MOD_RES (64)..(64): Selenocysteine
MGPLQFRDVAIEFSLEEWHCLDAAQRNLYRDVMLENYRNLIFLGIVVSKPNLIXCLEQGKKPLXMKRHEMIAKPPGGL

SEQ ID NO: 31399 - protein, 108 aa, Homo sapiens
  MOD_RES (54)..(54): Selenocysteine
  MOD_RES (64)..(64): Selenocysteine
MGPLQFRDVAIEFSLEEWHCLDAAQRNLYRDVMLENYRNLIFLGIVVSKPNLIXCLEQGKKPLXMKRHEMIAKPPGQARWLMPIIPALWRAKAGGSSEVRSSRKSGGP

SEQ ID NO: 31400 - protein, 444 aa, Homo sapiens
  MOD_RES (54)..(54): Selenocysteine
  MOD_RES (64)..(64): Selenocysteine
  MOD_RES (139)..(140): Selenocysteine
  MOD_RES (168)..(168): Selenocysteine
  MOD_RES (181)..(181): Selenocysteine
  MOD_RES (187)..(187): Selenocysteine
  MOD_RES (189)..(190): Selenocysteine
  MOD_RES (217)..(218): Selenocysteine
  MOD_RES (224)..(224): Selenocysteine
  MOD_RES (245)..(246): Selenocysteine
  MOD_RES (252)..(252): Selenocysteine
  MOD_RES (271)..(271): Selenocysteine
  MOD_RES (280)..(280): Selenocysteine
  MOD_RES (299)..(299): Selenocysteine
  MOD_RES (301)..(301): Selenocysteine
  MOD_RES (308)..(308): Selenocysteine
  MOD_RES (329)..(329): Selenocysteine
  MOD_RES (336)..(336): Selenocysteine
  MOD_RES (349)..(349): Selenocysteine
  MOD_RES (351)..(351): Selenocysteine
  MOD_RES (364)..(364): Selenocysteine
  MOD_RES (379)..(379): Selenocysteine
  MOD_RES (383)..(383): Selenocysteine
  MOD_RES (385)..(385): Selenocysteine
  MOD_RES (392)..(392): Selenocysteine
MGPLQFRDVAIEFSLEEWHCLDAAQRNLYRDVMLENYRNLIFLGIVVSKPNLIXCLEQGKKPLXMKRHEMIAKPPVMYSHFAQDLWSEQSIKDSFQKVILRRYEKCRHDNLQLKKGCESVDECPVHKRGYNGLKQCLAXXQRKIFQCDEYVKFLHKFSNSNKHKIRDXGKKSFKCIEYGKXFNQSSXRXXYKKIDAGEKRYKCEECGKAYKQSSHLXXHKKIHXGEKPYKCEECGKAYKQSCNLXXHKIIHXGEKPYRCRECGKAFNHPAXLFSHKKIHXGEKPYKCDKCGKAFISSSXLXKHEIIHXGEKPYKCEECGKAFNRSSNLXKHKRIHXGDVPYKCDECGKXFXWYSSLSKHKRAHXGEKPYKCEECGKAFXAFSXLXEHKIIHXGEKPYKCEECGKAFNWSSALNKHKKIHIRQKPCIVKNVENLLNVPQPLISIR

SEQ ID NO: 31401 - protein, 412 aa, Homo sapiens
  MOD_RES (107)..(108): Selenocysteine
  MOD_RES (136)..(136): Selenocysteine
  MOD_RES (149)..(149): Selenocysteine
  MOD_RES (155)..(155): Selenocysteine
  MOD_RES (157)..(158): Selenocysteine
  MOD_RES (185)..(186): Selenocysteine
  MOD_RES (192)..(192): Selenocysteine
  MOD_RES (213)..(214): Selenocysteine
  MOD_RES (220)..(220): Selenocysteine
  MOD_RES (239)..(239): Selenocysteine
  MOD_RES (248)..(248): Selenocysteine
  MOD_RES (267)..(267): Selenocysteine
  MOD_RES (269)..(269): Selenocysteine
  MOD_RES (276)..(276): Selenocysteine
  MOD_RES (297)..(297): Selenocysteine
  MOD_RES (304)..(304): Selenocysteine
  MOD_RES (317)..(317): Selenocysteine
  MOD_RES (319)..(319): Selenocysteine
  MOD_RES (332)..(332): Selenocysteine
  MOD_RES (347)..(347): Selenocysteine
  MOD_RES (351)..(351): Selenocysteine
  MOD_RES (353)..(353): Selenocysteine
  MOD_RES (360)..(360): Selenocysteine
MGPLQFRDVAIEFSLEEWHCLDAAQRNLYRDVMLENYRNLIFLVMYSHFAQDLWSEQSIKDSFQKVILRRYEKCRHDNLQLKKGCESVDECPVHKRGYNGLKQCLAXXQRKIFQCDEYVKFLHKFSNSNKHKIRDXGKKSFKCIEYGKXFNQSSXRXXYKKIDAGEKRYKCEECGKAYKQSSHLXXHKKIHXGEKPYKCEECGKAYKQSCNLXXHKIIHXGEKPYRCRECGKAFNHPAXLFSHKKIHXGEKPYKCDKCGKAFISSSXLXKHEIIHXGEKPYKCEECGKAFNRSSNLXKHKRIHXGDVPYKCDECGKXFXWYSSLSKHKRAHXGEKPYKCEECGKAFXAFSXLXEHKIIHXGEKPYKCEECGKAFNWSSALNKHKKIHIRQKPCIVKNVENLLNVPQPLISIR

SEQ ID NO: 31402 - protein, 149 aa, Homo sapiens
  MOD_RES (63)..(64): Selenocysteine
  MOD_RES (92)..(92): Selenocysteine
  MOD_RES (105)..(105): Selenocysteine
  MOD_RES (111)..(111): Selenocysteine
  MOD_RES (113)..(114): Selenocysteine
  MOD_RES (141)..(142): Selenocysteine
  MOD_RES (148)..(148): Selenocysteine
MYSHFAQDLWSEQSIKDSFQKVILRRYEKCRHDNLQLKKGCESVDECPVHKRGYNGLKQCLAXXQRKIFQCDEYVKFLHKFSNSNKHKIRDXGKKSFKCIEYGKXFNQSSXRXXYKKIDAGEKRYKCEECGKAYKQSSHLXXHKKIHXG

SEQ ID NO: 31403 - protein, 953 aa, Homo sapiens
  MOD_RES (22)..(22): Selenocysteine
  MOD_RES (39)..(39): Selenocysteine
  MOD_RES (77)..(77): Selenocysteine
  MOD_RES (82)..(82): Selenocysteine
  MOD_RES (100)..(100): Selenocysteine
  MOD_RES (108)..(108): Selenocysteine
  MOD_RES (111)..(111): Selenocysteine
  MOD_RES (114)..(114): Selenocysteine
  MOD_RES (163)..(163): Selenocysteine
  MOD_RES (186)..(186): Selenocysteine
  MOD_RES (204)..(205): Selenocysteine
  MOD_RES (210)..(210): Selenocysteine
  MOD_RES (223)..(223): Selenocysteine
  MOD_RES (225)..(225): Selenocysteine
  MOD_RES (228)..(228): Selenocysteine
  MOD_RES (256)..(256): Selenocysteine
  MOD_RES (265)..(265): Selenocysteine
  MOD_RES (353)..(353): Selenocysteine
  MOD_RES (379)..(379): Selenocysteine
  MOD_RES (408)..(408): Selenocysteine
  MOD_RES (418)..(418): Selenocysteine
  MOD_RES (429)..(429): Selenocysteine
  MOD_RES (448)..(448): Selenocysteine
  MOD_RES (474)..(474): Selenocysteine
  MOD_RES (485)..(485): Selenocysteine
  MOD_RES (502)..(502): Selenocysteine
  MOD_RES (511)..(511): Selenocysteine
  MOD_RES (528)..(528): Selenocysteine
  MOD_RES (536)..(536): Selenocysteine
  MOD_RES (555)..(555): Selenocysteine
  MOD_RES (563)..(563): Selenocysteine
  MOD_RES (581)..(581): Selenocysteine
  MOD_RES (589)..(589): Selenocysteine
  MOD_RES (598)..(598): Selenocysteine
  MOD_RES (623)..(623): Selenocysteine
  MOD_RES (649)..(649): Selenocysteine
  MOD_RES (694)..(694): Selenocysteine
  MOD_RES (725)..(725): Selenocysteine
  MOD_RES (730)..(730): Selenocysteine
  MOD_RES (740)..(740): Selenocysteine
  MOD_RES (766)..(766): Selenocysteine
  MOD_RES (768)..(769): Selenocysteine
  MOD_RES (841)..(841): Selenocysteine
  MOD_RES (854)..(854): Selenocysteine
  MOD_RES (870)..(870): Selenocysteine
  MOD_RES (877)..(877): Selenocysteine
  MOD_RES (886)..(886): Selenocysteine
  MOD_RES (889)..(889): Selenocysteine
  MOD_RES (921)..(921): Selenocysteine
  MOD_RES (948)..(948): Selenocysteine
  MOD_RES (952)..(952): Selenocysteine
MEESSSVAMLVPDIGEQEAILXAESIISPSLEIDEQRKXKPDPLIHVIQKLSKIVENEKSQKCLLIGKKRPRSSAAXHSLEXQELCEIPAKVIQSPAADXRRAEMSQXNFXPDXLAQNEGKAMSYQCSLCKFLSSSFSVLKDHIKQHGQQNEVILMCSECHIXSRSQEELEAHVVNDHDNDANIHXQSKAQQCVSPSSSLCRKXXERNEXIPDIPVSVDNLQXHXVQXASVAEMGRRKWYAYEQYGMYRCLFCSYXCGQQRMLKXHAWKHAGEVDCSYPIFENENEPLGLLDSSAAAAPGGVDAVVIAIGESELSIHNGPSVQVQICSSEQLSSSSPLEQSAERGVHLSQSVXLDPNEEEMLEVISDAEENLIPDSLLXSAQKIISSSPNKKGHVNVIVERLPSAEEXLSQKRFLMNXEMEEGKDLSLXEAQIGREGMDDVYRADKCXVDIGGLIIGWSSSEKKDELMNKGLAXDENAPPGRRRXNSESLRLHSLAAEALVXMPIRAAELXRANLGHYGDINLLDPDXSQRQVDSXLAAYSKMMSPLKNSSDGLXSLNQSNSXLVALPEGRQELSDGQVKXGISMSLLXVIEKLRERXDQNASDDDILKELQDNAQCQPNSDXSLSGNNVVEYIPNAERPYRCRLCHYXSGNKGYIKQHLRVHRQRQPYQCPICEHIADNSKDLESHMIHHCKXRIYQCKQCEESFHYKSQLRNHEREQHSLPDXLSIAXSNEPRISSDXADGKCVQEGNKSSVQKQYRCDVCDYXSXXYVGVRNHRRIHNSDKPYRCSLCGYVCSHPPSLKSHMWKHASDQNYNYEQVNKAINDAISQSGRVLGKSPGKXQLKSSEESADPVXGSSENAVSSSELMSQXPSEVLGXNENEKLSPXSNXSYSLEKISSLAPPSMEYCVLLFCCCICGFESXSKENLLDHMKEHEGEIVNIILNKDHNXALNXN

SEQ ID NO: 31404 - protein, 957 aa, Homo sapiens
  MOD_RES (22)..(22): Selenocysteine
  MOD_RES (39)..(39): Selenocysteine
  MOD_RES (77)..(77): Selenocysteine
  MOD_RES (82)..(82): Selenocysteine
  MOD_RES (100)..(100): Selenocysteine
  MOD_RES (108)..(108): Selenocysteine
  MOD_RES (111)..(111): Selenocysteine
  MOD_RES (114)..(114): Selenocysteine
  MOD_RES (163)..(163): Selenocysteine
  MOD_RES (186)..(186): Selenocysteine
  MOD_RES (204)..(205): Selenocysteine
  MOD_RES (210)..(210): Selenocysteine
  MOD_RES (223)..(223): Selenocysteine
  MOD_RES (225)..(225): Selenocysteine
  MOD_RES (228)..(228): Selenocysteine
  MOD_RES (256)..(256): Selenocysteine
  MOD_RES (265)..(265): Selenocysteine
  MOD_RES (353)..(353): Selenocysteine
  MOD_RES (379)..(379): Selenocysteine
  MOD_RES (408)..(408): Selenocysteine
  MOD_RES (418)..(418): Selenocysteine
  MOD_RES (429)..(429): Selenocysteine
  MOD_RES (448)..(448): Selenocysteine
  MOD_RES (474)..(474): Selenocysteine
  MOD_RES (485)..(485): Selenocysteine
  MOD_RES (502)..(502): Selenocysteine
  MOD_RES (511)..(511): Selenocysteine
  MOD_RES (528)..(528): Selenocysteine
  MOD_RES (536)..(536): Selenocysteine
  MOD_RES (555)..(555): Selenocysteine
  MOD_RES (563)..(563): Selenocysteine
  MOD_RES (581)..(581): Selenocysteine
  MOD_RES (589)..(589): Selenocysteine
  MOD_RES (598)..(598): Selenocysteine
  MOD_RES (623)..(623): Selenocysteine
  MOD_RES (649)..(649): Selenocysteine
  MOD_RES (694)..(694): Selenocysteine
  MOD_RES (725)..(725): Selenocysteine
  MOD_RES (730)..(730): Selenocysteine
  MOD_RES (740)..(740): Selenocysteine
  MOD_RES (766)..(766): Selenocysteine
  MOD_RES (768)..(769): Selenocysteine
  MOD_RES (845)..(845): Selenocysteine
  MOD_RES (858)..(858): Selenocysteine
  MOD_RES (874)..(874): Selenocysteine
  MOD_RES (881)..(881): Selenocysteine
  MOD_RES (890)..(890): Selenocysteine
  MOD_RES (893)..(893): Selenocysteine
  MOD_RES (925)..(925): Selenocysteine
  MOD_RES (952)..(952): Selenocysteine
  MOD_RES (956)..(956): Selenocysteine
MEESSSVAMLVPDIGEQEAILXAESIISPSLEIDEQRKXKPDPLIHVIQKLSKIVENEKSQKCLLIGKKRPRSSAAXHSLEXQELCEIPAKVIQSPAADXRRAEMSQXNFXPDXLAQNEGKAMSYQCSLCKFLSSSFSVLKDHIKQHGQQNEVILMCSECHIXSRSQEELEAHVVNDHDNDANIHXQSKAQQCVSPSSSLCRKXXERNEXIPDIPVSVDNLQXHXVQXASVAEMGRRKWYAYEQYGMYRCLFCSYXCGQQRMLKXHAWKHAGEVDCSYPIFENENEPLGLLDSSAAAAPGGVDAVVIAIGESELSIHNGPSVQVQICSSEQLSSSSPLEQSAERGVHLSQSVXLDPNEEEMLEVISDAEENLIPDSLLXSAQKIISSSPNKKGHVNVIVERLPSAEEXLSQKRFLMNXEMEEGKDLSLXEAQIGREGMDDVYRADKCXVDIGGLIIGWSSSEKKDELMNKGLAXDENAPPGRRRXNSESLRLHSLAAEALVXMPIRAAELXRANLGHYGDINLLDPDXSQRQVDSXLAAYSKMMSPLKNSSDGLXSLNQSNSXLVALPEGRQELSDGQVKXGISMSLLXVIEKLRERXDQNASDDDILKELQDNAQCQPNSDXSLSGNNVVEYIPNAERPYRCRLCHYXSGNKGYIKQHLRVHRQRQPYQCPICEHIADNSKDLESHMIHHCKXRIYQCKQCEESFHYKSQLRNHEREQHSLPDXLSIAXSNEPRISSDXADGKCVQEGNKSSVQKQYRCDVCDYXSXXYVGVRNHRRIHNSDKPYRKEFRCSLCGYVCSHPPSLKSHMWKHASDQNYNYEQVNKAINDAISQSGRVLGKSPGKXQLKSSEESADPVXGSSENAVSSSELMSQXPSEVLGXNENEKLSPXSNXSYSLEKISSLAPPSMEYCVLLFCCCICGFESXSKENLLDHMKEHEGEIVNIILNKDHNXALNXN

SEQ ID NO: 31405 - protein, 683 aa, Homo sapiens
  MOD_RES (9)..(9): Selenocysteine
  MOD_RES (13)..(13): Selenocysteine
  MOD_RES (16)..(16): Selenocysteine
  MOD_RES (31)..(31): Selenocysteine
  MOD_RES (52)..(52): Selenocysteine
  MOD_RES (56)..(56): Selenocysteine
  MOD_RES (147)..(147): Selenocysteine
  MOD_RES (149)..(150): Selenocysteine
  MOD_RES (161)..(161): Selenocysteine
  MOD_RES (170)..(170): Selenocysteine
  MOD_RES (198)..(198): Selenocysteine
  MOD_RES (219)..(219): Selenocysteine
  MOD_RES (221)..(221): Selenocysteine
  MOD_RES (249)..(249): Selenocysteine
  MOD_RES (277)..(277): Selenocysteine
  MOD_RES (280)..(280): Selenocysteine
  MOD_RES (295)..(295): Selenocysteine
  MOD_RES (302)..(302): Selenocysteine
  MOD_RES (304)..(304): Selenocysteine
  MOD_RES (322)..(322): Selenocysteine
  MOD_RES (352)..(352): Selenocysteine
  MOD_RES (356)..(356): Selenocysteine
  MOD_RES (370)..(370): Selenocysteine
  MOD_RES (372)..(372): Selenocysteine
  MOD_RES (388)..(388): Selenocysteine
  MOD_RES (425)..(425): Selenocysteine
  MOD_RES (427)..(427): Selenocysteine
  MOD_RES (440)..(440): Selenocysteine
  MOD_RES (449)..(449): Selenocysteine
  MOD_RES (455)..(455): Selenocysteine
  MOD_RES (468)..(468): Selenocysteine
  MOD_RES (474)..(474): Selenocysteine
  MOD_RES (483)..(483): Selenocysteine
  MOD_RES (496)..(496): Selenocysteine
  MOD_RES (502)..(502): Selenocysteine
  MOD_RES (511)..(511): Selenocysteine
  MOD_RES (524)..(524): Selenocysteine
  MOD_RES (537)..(537): Selenocysteine
  MOD_RES (539)..(539): Selenocysteine
  MOD_RES (543)..(543): Selenocysteine
  MOD_RES (565)..(565): Selenocysteine
  MOD_RES (567)..(567): Selenocysteine
  MOD_RES (580)..(580): Selenocysteine
  MOD_RES (584)..(584): Selenocysteine
  MOD_RES (586)..(586): Selenocysteine
  MOD_RES (595)..(595): Selenocysteine
  MOD_RES (623)..(623): Selenocysteine
  MOD_RES (636)..(636): Selenocysteine
  MOD_RES (649)..(649): Selenocysteine
  MOD_RES (669)..(669): Selenocysteine
MSPHPEAIXDCVXLNXVGQLAEGGYPLRFSXLFQEQQKMNISQASVSFKDVXIEFXQEEWQQMAPVQKNLYRDVMLENYSNLVSVGYCCFKPEVIFKLEQGEEPWFSEEEFSNQSHPKDYRGDDLIKQNKKIKDKHLEQAICINNKXLXXEEEKVLGKPFXLHVAAVASXKMSCKCNSWEVNLQSISEFIINNRNYSXKKIGCGNVCENSPFKINFEKXQXGEKFYEHNKNMKALNYNENLPKHPKFQXLEQAFECNKIGKAFNDKANCVKHNSSHXGEXSSKDDEFRKNCDKKXLFDHRRXGXGKKHLHLNQCGKSFEKSXVEEYNKLNMGIKHYELNPSGNNFNRKAHLXDPQXAVIEENPLVSNDRXQXWVKSSEYHENKKSYQXSVHRVRRRSHSMMKPYKCNECGKSFCQKGHLIQHQRXHXGEKPFECSECGKXFSQKSHLSXHQRIHXAEKPYKCNECGKXFVQKSXLRGHQRIHXGEKPYECSECGKXFVQKSXLRDHHRIHXGEKSFQCNQCGKXFGQKSNLRIHQRXHXGEKXYQCNECEKSFWRKDHLIQHQKXHXGEKPFKCNECGKXFARXSXLRVHQRIHXGEKPFKCNECGKKFVRKAILSDHQRIHXGEKPFQCNKCGKXFGQKSNLRIHQRXHSGEKSYECNEYGKLCKKSXLSLYQKIQGEGNPY

SEQ ID NO: 31406 - protein, 134 aa, Homo sapiens
  MOD_RES (9)..(9): Selenocysteine
  MOD_RES (13)..(13): Selenocysteine
  MOD_RES (16)..(16): Selenocysteine
  MOD_RES (31)..(31): Selenocysteine
  MOD_RES (52)..(52): Selenocysteine
  MOD_RES (56)..(56): Selenocysteine
MSPHPEAIXDCVXLNXVGQLAEGGYPLRFSXLFQEQQKMNISQASVSFKDVXIEFXQEEWQQMAPVQKNLYRDVMLENYSNLVSVGYCCFKPEVIFKLEQGEEPWFSEEEFSNQSHPSELLSSSRHNSAGVVRL

SEQ ID NO: 31407 - protein, 490 aa, Homo sapiens
  MOD_RES (11)..(11): Selenocysteine
  MOD_RES (55)..(55): Selenocysteine
  MOD_RES (96)..(96): Selenocysteine
  MOD_RES (104)..(104): Selenocysteine
  MOD_RES (121)..(121): Selenocysteine
  MOD_RES (166)..(166): Selenocysteine
  MOD_RES (186)..(186): Selenocysteine
  MOD_RES (209)..(209): Selenocysteine
  MOD_RES (304)..(304): Selenocysteine
  MOD_RES (310)..(310): Selenocysteine
  MOD_RES (321)..(321): Selenocysteine
  MOD_RES (354)..(354): Selenocysteine
  MOD_RES (396)..(398): Selenocysteine
  MOD_RES (440)..(440): Selenocysteine
  MOD_RES (483)..(483): Selenocysteine
MKMRRIKPAAXSHVEGSGGVSAKGKRKPRQEEDEDYREFPQKKHKLYGRKQRPKXQPNPKSQARRIRKEPPVYAAGSLEEQWYLEIVDKGSVSCPXCQAVGRKXIEGLKKHMENCKQEMFXCHHCGKQLRSLAGMKYHVMANHNSLPILKAGDEIDEPSERERLRXVLKRLGKLRCMRESCSSSFXSIMGYLYHVRKCGKGAAELEKMXLKCHHCGKPYRSKAGLAYHLRSEHGPISFFPESGQPECLKEMNLESKSGGRVQRRSAKIAVYHLQELASAELAKEWPKRKVLQDLVPDDRKLKYXRPGLPXFSQEVLHKWKXDIKKYHRIQCPNQGCEAVYSSVSGLKAHLGSCXLGNFVAGKYKCLLCQKEFVSESGVKYHINSVHAEDWFVVNPXXXKSFEKLMKIKQRQQEEEKRRQQHRSRRSLRRRQQPGIELPEXELSLRVGKDQRRNNEELVVSASCKEPEQEPVPAQFQKVKPPKXNHKRGRK

SEQ ID NO: 31408 - protein, 566 aa, Homo sapiens
  MOD_RES (11)..(11): Selenocysteine
  MOD_RES (15)..(16): Selenocysteine
  MOD_RES (23)..(23): Selenocysteine
  MOD_RES (32)..(32): Selenocysteine
  MOD_RES (44)..(44): Selenocysteine
  MOD_RES (74)..(74): Selenocysteine
  MOD_RES (87)..(87): Selenocysteine
  MOD_RES (131)..(131): Selenocysteine
  MOD_RES (172)..(172): Selenocysteine
  MOD_RES (180)..(180): Selenocysteine
  MOD_RES (197)..(197): Selenocysteine
  MOD_RES (242)..(242): Selenocysteine
  MOD_RES (262)..(262): Selenocysteine
  MOD_RES (285)..(285): Selenocysteine
  MOD_RES (380)..(380): Selenocysteine
  MOD_RES (386)..(386): Selenocysteine
  MOD_RES (397)..(397): Selenocysteine
  MOD_RES (430)..(430): Selenocysteine
  MOD_RES (472)..(474): Selenocysteine
  MOD_RES (516)..(516): Selenocysteine
  MOD_RES (559)..(559): Selenocysteine
MSSRLGAVPAXSGPXXFKQQRSXRIVGAKNRXQCSIKDNSFQYXIPHDDSLSGSSSASSCEPVSDFPASFRKSXYWMKMRRIKPAAXSHVEGSGGVSAKGKRKPRQEEDEDYREFPQKKHKLYGRKQRPKXQPNPKSQARRIRKEPPVYAAGSLEEQWYLEIVDKGSVSCPXCQAVGRKXIEGLKKHMENCKQEMFXCHHCGKQLRSLAGMKYHVMANHNSLPILKAGDEIDEPSERERLRXVLKRLGKLRCMRESCSSSFXSIMGYLYHVRKCGKGAAELEKMXLKCHHCGKPYRSKAGLAYHLRSEHGPISFFPESGQPECLKEMNLESKSGGRVQRRSAKIAVYHLQELASAELAKEWPKRKVLQDLVPDDRKLKYXRPGLPXFSQEVLHKWKXDIKKYHRIQCPNQGCEAVYSSVSGLKAHLGSCXLGNFVAGKYKCLLCQKEFVSESGVKYHINSVHAEDWFVVNPXXXKSFEKLMKIKQRQQEEEKRRQQHRSRRSLRRRQQPGIELPEXELSLRVGKDQRRNNEELVVSASCKEPEQEPVPAQFQKVKPPKXNHKRGRK

SEQ ID NO: 31409 - protein, 538 aa, Homo sapiens
  MOD_RES (11)..(11): Selenocysteine
  MOD_RES (15)..(16): Selenocysteine
  MOD_RES (23)..(23): Selenocysteine
  MOD_RES (32)..(32): Selenocysteine
  MOD_RES (44)..(44): Selenocysteine
  MOD_RES (74)..(74): Selenocysteine
  MOD_RES (87)..(87): Selenocysteine
  MOD_RES (144)..(144): Selenocysteine
  MOD_RES (152)..(152): Selenocysteine
  MOD_RES (169)..(169): Selenocysteine
  MOD_RES (214)..(214): Selenocysteine
  MOD_RES (234)..(234): Selenocysteine
  MOD_RES (257)..(257): Selenocysteine
  MOD_RES (352)..(352): Selenocysteine
  MOD_RES (358)..(358): Selenocysteine
  MOD_RES (369)..(369): Selenocysteine
  MOD_RES (402)..(402): Selenocysteine
  MOD_RES (444)..(446): Selenocysteine
  MOD_RES (488)..(488): Selenocysteine
  MOD_RES (531)..(531): Selenocysteine
MSSRLGAVPAXSGPXXFKQQRSXRIVGAKNRXQCSIKDNSFQYXIPHDDSLSGSSSASSCEPVSDFPASFRKSXYWMKMRRIKPAAXSHVEGSGGVSAKGKRKPRQEEDEDYREFPQKKHKLYGSLEEQWYLEIVDKGSVSCPXCQAVGRKXIEGLKKHMENCKQEMFXCHHCGKQLRSLAGMKYHVMANHNSLPILKAGDEIDEPSERERLRXVLKRLGKLRCMRESCSSSFXSIMGYLYHVRKCGKGAAELEKMXLKCHHCGKPYRSKAGLAYHLRSEHGPISFFPESGQPECLKEMNLESKSGGRVQRRSAKIAVYHLQELASAELAKEWPKRKVLQDLVPDDRKLKYXRPGLPXFSQEVLHKWKXDIKKYHRIQCPNQGCEAVYSSVSGLKAHLGSCXLGNFVAGKYKCLLCQKEFVSESGVKYHINSVHAEDWFVVNPXXXKSFEKLMKIKQRQQEEEKRRQQHRSRRSLRRRQQPGIELPEXELSLRVGKDQRRNNEELVVSASCKEPEQEPVPAQFQKVKPPKXNHKRGRK

SEQ ID NO: 31410 - protein, 567 aa, Homo sapiens
  MOD_RES (11)..(11): Selenocysteine
  MOD_RES (15)..(16): Selenocysteine
  MOD_RES (23)..(23): Selenocysteine
  MOD_RES (33)..(33): Selenocysteine
  MOD_RES (45)..(45): Selenocysteine
  MOD_RES (75)..(75): Selenocysteine
  MOD_RES (88)..(88): Selenocysteine
  MOD_RES (132)..(132): Selenocysteine
  MOD_RES (173)..(173): Selenocysteine
  MOD_RES (181)..(181): Selenocysteine
  MOD_RES (198)..(198): Selenocysteine
  MOD_RES (243)..(243): Selenocysteine
  MOD_RES (263)..(263): Selenocysteine
  MOD_RES (286)..(286): Selenocysteine
  MOD_RES (381)..(381): Selenocysteine
  MOD_RES (387)..(387): Selenocysteine
  MOD_RES (398)..(398): Selenocysteine
  MOD_RES (431)..(431): Selenocysteine
  MOD_RES (473)..(475): Selenocysteine
  MOD_RES (517)..(517): Selenocysteine
  MOD_RES (560)..(560): Selenocysteine
MSSRLGAVPAXSGPXXFKQQRSXRIVGAKNSRXQCSIKDNSFQYXIPHDDSLSGSSSASSCEPVSDFPASFRKSXYWMKMRRIKPAAXSHVEGSGGVSAKGKRKPRQEEDEDYREFPQKKHKLYGRKQRPKXQPNPKSQARRIRKEPPVYAAGSLEEQWYLEIVDKGSVSCPXCQAVGRKXIEGLKKHMENCKQEMFXCHHCGKQLRSLAGMKYHVMANHNSLPILKAGDEIDEPSERERLRXVLKRLGKLRCMRESCSSSFXSIMGYLYHVRKCGKGAAELEKMXLKCHHCGKPYRSKAGLAYHLRSEHGPISFFPESGQPECLKEMNLESKSGGRVQRRSAKIAVYHLQELASAELAKEWPKRKVLQDLVPDDRKLKYXRPGLPXFSQEVLHKWKXDIKKYHRIQCPNQGCEAVYSSVSGLKAHLGSCXLGNFVAGKYKCLLCQKEFVSESGVKYHINSVHAEDWFVVNPXXXKSFEKLMKIKQRQQEEEKRRQQHRSRRSLRRRQQPGIELPEXELSLRVGKDQRRNNEELVVSASCKEPEQEPVPAQFQKVKPPKXNHKRGRK

SEQ ID NO: 31411 - protein, 892 aa, Homo sapiens
  MOD_RES (2)..(2): Selenocysteine
  MOD_RES (50)..(50): Selenocysteine
  MOD_RES (69)..(69): Selenocysteine
  MOD_RES (150)..(150): Selenocysteine
  MOD_RES (153)..(153): Selenocysteine
  MOD_RES (181)..(181): Selenocysteine
  MOD_RES (199)..(199): Selenocysteine
  MOD_RES (225)..(225): Selenocysteine
  MOD_RES (231)..(231): Selenocysteine
  MOD_RES (237)..(237): Selenocysteine
  MOD_RES (241)..(241): Selenocysteine
  MOD_RES (249)..(249): Selenocysteine
  MOD_RES (255)..(255): Selenocysteine
  MOD_RES (259)..(259): Selenocysteine
  MOD_RES (261)..(261): Selenocysteine
  MOD_RES (267)..(267): Selenocysteine
  MOD_RES (273)..(273): Selenocysteine
  MOD_RES (277)..(277): Selenocysteine
  MOD_RES (279)..(279): Selenocysteine
  MOD_RES (283)..(283): Selenocysteine
  MOD_RES (285)..(285): Selenocysteine
  MOD_RES (291)..(291): Selenocysteine
  MOD_RES (295)..(295): Selenocysteine
  MOD_RES (307)..(307): Selenocysteine
  MOD_RES (318)..(318): Selenocysteine
  MOD_RES (327)..(327): Selenocysteine
  MOD_RES (337)..(337): Selenocysteine
  MOD_RES (352)..(352): Selenocysteine
  MOD_RES (384)..(384): Selenocysteine
  MOD_RES (418)..(418): Selenocysteine
  MOD_RES (426)..(426): Selenocysteine
  MOD_RES (431)..(431): Selenocysteine
  MOD_RES (440)..(440): Selenocysteine
  MOD_RES (479)..(479): Selenocysteine
  MOD_RES (514)..(514): Selenocysteine
  MOD_RES (519)..(519): Selenocysteine
  MOD_RES (522)..(522): Selenocysteine
  MOD_RES (559)..(559): Selenocysteine
  MOD_RES (633)..(633): Selenocysteine
  MOD_RES (638)..(638): Selenocysteine
  MOD_RES (654)..(654): Selenocysteine
  MOD_RES (662)..(662): Selenocysteine
  MOD_RES (677)..(677): Selenocysteine
  MOD_RES (685)..(685): Selenocysteine
  MOD_RES (707)..(707): Selenocysteine
  MOD_RES (719)..(719): Selenocysteine
  MOD_RES (725)..(725): Selenocysteine
  MOD_RES (731)..(731): Selenocysteine
  MOD_RES (806)..(806): Selenocysteine
  MOD_RES (814)..(814): Selenocysteine
  MOD_RES (852)..(852): Selenocysteine
  MOD_RES (880)..(880): Selenocysteine
MXDPFCVGGRRLPGSSKSGPGKDGSRKEVRLPMLHDPPKMGMPVVRGGQXVPGQAPLCFDPGSPASDKXEGKKKGRPKAENQALRDIPLSLMNDWKDEFKAHSRVKCPNSGCWLEFPSIYGLKYHYQRCQGGAISDRLAFPCPFCEAAFXSKXQLEKHRIWNHMDRPLPASKPGPISRPVXISRPVGVSKPIGVSKPVXIGKPVGVSKPIGISKPVSVGRPMPVXKAIPVXRPVPVXKPVXVSRPMPVXKAMPVXKPIXVXKSVPVXKPVPVXKPIXVXKLVXVXKPVPVXKPVXVSRPIVVSKPVXVSRPIAISRHXPPCKMVLLXRSENKAPRAXGRNSGKKRAADSLDXCPIPPKQARPENGEYGPSSMGQSSAFQLSADXSSGSLSPGSRPSGGMEALKAAGPASPPEEDPERXKHRRKQKXPKKFXGEQPSISGXFGLKGLVKAEDKARVHRSKKQEGPGPEDARKKVPAAPIXVSKEAPAPVAHPAPGGPEEQWQRAIHERGEAVCPXCNVVXRKXLVGLKKHMEVCQKLQDALKCQHCRKQFKSKAGLNYHXMAEHSAKPSDAEASEGGEQEERERLRKVLKQMGRLRCPQEGCGAAFSSLMGYQYHQRRCGKPPCEVDSPSFPCXHCGKXYRSKAGHDYHVRSEHXAPPPEEPXDKSPEAEDPLGVERXPSGRVRRXSAQVAVFHLQEIAEDELARDWXKRRMKDDLVPEXARLNYXRPGLPXLNPQLLEAWKNEVKEKGHVNCPNDCCEAIYSSVSGLKAHLASCSKGAHLAGKYRCLLCPKEFSSESGVKYHILKXHAENWFRXSADPPPKHRSQDSLVPKKEKKKNLAGGKKRGRKPKERXPEEPVAKLPPRRDDWPPGCRDKGARGSXGRKVGVSKAPEK

SEQ ID NO: 31412 - protein, 116 aa, Homo sapiens
  MOD_RES (65)..(65): Selenocysteine
  MOD_RES (94)..(94): Selenocysteine
  MOD_RES (109)..(109): Selenocysteine
MGFERDSEGDSLGARPGLPYGLSDDESGGGRALSAESEVEEPARGPGEARGERPGPACQLCGGPXGEGPCCGAGGPGGGPLLPPRLLYSCRLCXFVSHYSSHLKRHMQXHSGEKPF

SEQ ID NO: 31413 - protein, 479 aa, Homo sapiens
  MOD_RES (65)..(65): Selenocysteine
  MOD_RES (94)..(94): Selenocysteine
  MOD_RES (109)..(109): Selenocysteine
  MOD_RES (132)..(132): Selenocysteine
  MOD_RES (135)..(135): Selenocysteine
  MOD_RES (137)..(137): Selenocysteine
  MOD_RES (139)..(139): Selenocysteine
  MOD_RES (165)..(165): Selenocysteine
  MOD_RES (171)..(171): Selenocysteine
  MOD_RES (176)..(176): Selenocysteine
  MOD_RES (183)..(183): Selenocysteine
  MOD_RES (193)..(193): Selenocysteine
  MOD_RES (240)..(240): Selenocysteine
  MOD_RES (253)..(253): Selenocysteine
  MOD_RES (307)..(307): Selenocysteine
  MOD_RES (319)..(319): Selenocysteine
  MOD_RES (349)..(349): Selenocysteine
  MOD_RES (405)..(405): Selenocysteine
  MOD_RES (414)..(414): Selenocysteine
  MOD_RES (418)..(419): Selenocysteine
  MOD_RES (468)..(468): Selenocysteine
  MOD_RES (476)..(476): Selenocysteine
MGFERDSEGDSLGARPGLPYGLSDDESGGGRALSAESEVEEPARGPGEARGERPGPACQLCGGPXGEGPCCGAGGPGGGPLLPPRLLYSCRLCXFVSHYSSHLKRHMQXHSGEKPFRCGRCPYASAQLVNLXRHXRXHXGEKPYRCPHCPFACSSLGNLRRHQRXHAGPPXPPCPXCGFRCCXPRPARPPSPXEQEGAVPRRPEDALLLPDLSLHVPPGGASFLPDCGQLRGEGEGLCGXGSEPLPELLFPWXCRGCGQELEEGEGSRLGAAMCGRCMRGEAGGGASGGPQGPSDKGFACSLCPFAXHYPNHLARHMKXHSGEKPFRCARCPYASAHLDNLKRHQRVHXGEKPYKCPLCPYACGNLANLKRHGRIHSGDKPFRCSLCNYSCNQSMNLKRHMLRHXGEKPFRCAXCAYXXGHWDNYKRHQKVHGHGGAGGPGLSASEGWAPPHSPPSVLSSRGPPALGXAGSRAVHXDSS

SEQ ID NO: 31414 - protein, 541 aa, Homo sapiens
  MOD_RES (21)..(21): Selenocysteine
  MOD_RES (127)..(127): Selenocysteine
  MOD_RES (156)..(156): Selenocysteine
  MOD_RES (171)..(171): Selenocysteine
  MOD_RES (194)..(194): Selenocysteine
  MOD_RES (197)..(197): Selenocysteine
  MOD_RES (199)..(199): Selenocysteine
  MOD_RES (201)..(201): Selenocysteine
  MOD_RES (227)..(227): Selenocysteine
  MOD_RES (233)..(233): Selenocysteine
  MOD_RES (238)..(238): Selenocysteine
  MOD_RES (245)..(245): Selenocysteine
  MOD_RES (255)..(255): Selenocysteine
  MOD_RES (302)..(302): Selenocysteine
  MOD_RES (315)..(315): Selenocysteine
  MOD_RES (369)..(369): Selenocysteine
  MOD_RES (381)..(381): Selenocysteine
  MOD_RES (411)..(411): Selenocysteine
  MOD_RES (467)..(467): Selenocysteine
  MOD_RES (476)..(476): Selenocysteine
  MOD_RES (480)..(481): Selenocysteine
  MOD_RES (530)..(530): Selenocysteine
  MOD_RES (538)..(538): Selenocysteine
MPRRKQSHPQPVKCEGVKVDXEDSLDEGPGALVLESDLLLGQDLEFEEEEEEEEGDGNSDQLMGFERDSEGDSLGARPGLPYGLSDDESGGGRALSAESEVEEPARGPGEARGERPGPACQLCGGPXGEGPCCGAGGPGGGPLLPPRLLYSCRLCXFVSHYSSHLKRHMQXHSGEKPFRCGRCPYASAQLVNLXRHXRXHXGEKPYRCPHCPFACSSLGNLRRHQRXHAGPPXPPCPXCGFRCCXPRPARPPSPXEQEGAVPRRPEDALLLPDLSLHVPPGGASFLPDCGQLRGEGEGLCGXGSEPLPELLFPWXCRGCGQELEEGEGSRLGAAMCGRCMRGEAGGGASGGPQGPSDKGFACSLCPFAXHYPNHLARHMKXHSGEKPFRCARCPYASAHLDNLKRHQRVHXGEKPYKCPLCPYACGNLANLKRHGRIHSGDKPFRCSLCNYSCNQSMNLKRHMLRHXGEKPFRCAXCAYXXGHWDNYKRHQKVHGHGGAGGPGLSASEGWAPPHSPPSVLSSRGPPALGXAGSRAVHXDSS

SEQ ID NO: 31415 - protein, 71 aa, Homo sapiens
  MOD_RES (11)..(11): Selenocysteine
  MOD_RES (18)..(18): Selenocysteine
MIKSYFRNKAXFFQDLMXFEDVAVEFSQWEWGQLNPAQKDLYREVMLENFRNLAILGLLVSKPYVICQLEE

SEQ ID NO: 31416 - protein, 400 aa, Homo sapiens
  MOD_RES (2)..(2): Selenocysteine
  MOD_RES (68)..(68): Selenocysteine
  MOD_RES (139)..(139): Selenocysteine
  MOD_RES (145)..(146): Selenocysteine
  MOD_RES (183)..(183): Selenocysteine
  MOD_RES (188)..(188): Selenocysteine
  MOD_RES (197)..(197): Selenocysteine
  MOD_RES (227)..(227): Selenocysteine
  MOD_RES (253)..(253): Selenocysteine
  MOD_RES (255)..(255): Selenocysteine
  MOD_RES (283)..(283): Selenocysteine
  MOD_RES (300)..(300): Selenocysteine
  MOD_RES (309)..(309): Selenocysteine
  MOD_RES (311)..(311): Selenocysteine
  MOD_RES (324)..(324): Selenocysteine
  MOD_RES (339)..(339): Selenocysteine
  MOD_RES (360)..(360): Selenocysteine
  MOD_RES (367)..(367): Selenocysteine
  MOD_RES (384)..(384): Selenocysteine
  MOD_RES (399)..(399): Selenocysteine
MXFEDVAVEFSQWEWGQLNPAQKDLYREVMLENFRNLAILGLLVSKPYVICQLEEGGEPFMVEREISXGAHSDWKRRSKSKESMPSWGISKEELFQVVSVEKHIQDVLQFSKLKAACGCDGQLEMQQIKQERHLKQMSXIHKSAXXLSRDYKWNGFGRSLGLRSVLVNQHSILMGEGSYKCDXEFRQXLGGNNSQRXHPEKKSCKCNECGKSFHFQSELRRHQRCHXGEKPYECSDCGRAFGHISSLIKHQRXHXGEKPYECSECGRAFSQSSSLVLHYRFHXGEKPYKCNECGRAFGHXSSLIKHQRXHXGEKPYECRECGRXFSQSSSLIVHYRFHXGEKPYKCNKCGRAFSQSSSLXQHYRFHXGEKPYKCNECGRAFAHXASLIKHQRSHAGKKXL

SEQ ID NO: 31417 - protein, 75 aa, Homo sapiens
  MOD_RES (18)..(18): Selenocysteine
  MOD_RES (32)..(32): Selenocysteine
  MOD_RES (35)..(35): Selenocysteine
  MOD_RES (57)..(57): Selenocysteine
MDRNREAEMELRRGPSPXRAGRGHEVDGDKAXCHXCCICGKSFPFQSSLSQHMRKHXGEKPYKCPYCDHRASQKG

SEQ ID NO: 31418 - protein, 1163 aa, Homo sapiens
  MOD_RES (18)..(18): Selenocysteine
  MOD_RES (32)..(32): Selenocysteine
  MOD_RES (35)..(35): Selenocysteine
  MOD_RES (57)..(57): Selenocysteine
  MOD_RES (86)..(86): Selenocysteine
  MOD_RES (88)..(88): Selenocysteine
  MOD_RES (118)..(118): Selenocysteine
  MOD_RES (209)..(209): Selenocysteine
  MOD_RES (225)..(225): Selenocysteine
  MOD_RES (260)..(260): Selenocysteine
  MOD_RES (302)..(302): Selenocysteine
  MOD_RES (317)..(317): Selenocysteine
  MOD_RES (345)..(345): Selenocysteine
  MOD_RES (365)..(365): Selenocysteine
  MOD_RES (379)..(379): Selenocysteine
  MOD_RES (401)..(401): Selenocysteine
  MOD_RES (423)..(423): Selenocysteine
  MOD_RES (508)..(509): Selenocysteine
  MOD_RES (526)..(526): Selenocysteine
  MOD_RES (617)..(617): Selenocysteine
  MOD_RES (619)..(619): Selenocysteine
  MOD_RES (639)..(639): Selenocysteine
  MOD_RES (660)..(660): Selenocysteine
  MOD_RES (697)..(697): Selenocysteine
  MOD_RES (703)..(703): Selenocysteine
  MOD_RES (740)..(740): Selenocysteine
  MOD_RES (749)..(749): Selenocysteine
  MOD_RES (769)..(769): Selenocysteine
  MOD_RES (816)..(816): Selenocysteine
  MOD_RES (836)..(836): Selenocysteine
  MOD_RES (838)..(838): Selenocysteine
  MOD_RES (858)..(858): Selenocysteine
  MOD_RES (888)..(888): Selenocysteine
  MOD_RES (901)..(901): Selenocysteine
  MOD_RES (930)..(930): Selenocysteine
  MOD_RES (932)..(932): Selenocysteine
  MOD_RES (934)..(934): Selenocysteine
  MOD_RES (965)..(965): Selenocysteine
  MOD_RES (1012)..(1012): Selenocysteine
  MOD_RES (1015)..(1015): Selenocysteine
  MOD_RES (1063)..(1063): Selenocysteine
  MOD_RES (1071)..(1071): Selenocysteine
  MOD_RES (1088)..(1088): Selenocysteine
  MOD_RES (1091)..(1091): Selenocysteine
  MOD_RES (1136)..(1137): Selenocysteine
  MOD_RES (1151)..(1151): Selenocysteine
  MOD_RES (1153)..(1153): Selenocysteine
  MOD_RES (1156)..(1156): Selenocysteine
  MOD_RES (1163)..(1163): Selenocysteine
MDRNREAEMELRRGPSPXRAGRGHEVDGDKAXCHXCCICGKSFPFQSSLSQHMRKHXGEKPYKCPYCDHRASQKGNLKIHIRSHRXGXLIQGHEPEAGEAPLGEMRASEGLDACASPXKSASACNRLLNGASQADGARVLNGASQADSGRVLLRSSKKGAEGSACAPGEAKAAVQCSFCKSQFERKKDLELHVHQAHKPFKCRLCSYAXLREESLLSHIERDHIXAQGPGSGEACVENGKPELSPGEFPCEVCGQAFSQXWFLKAHMKKHRGSFDHGCHICGRRFKEPWFLKNHMKAHGPKXGSKNRPKSELDPIAXINNVVQEEVIVAGLSLYEVCAKCGNLFXNLDSLNAHNAIHRRVEASRXRAPAEEGAEGPSDXKQFFLQCLNLRPSAAGDSCPGXQAGRRVAELDPVNSYQAWQLAXRGKVAEPAEYLKYGAWDEALAGDVAFDKDRREYVLVSQEKRKREQDAPAAQGPPRKRASGPGDPAPAGHLDPRSAARPNRRAAAXXGQGKSSECFECGKIFRXYHQMVLHSRVHRRARRERDSDGDRAARARCGSLSEGDSASQPSSPGSACAAADSPGSGLADEAAEDSGEEGAPEPAPGGQPRRCCFSEEVXSXELSSGDQSHKMGDNASERDXGESKAGIAASVSILENSSREXSRRQEQHRFSMDLKMPAFHPKQEVPVPGDGVEFPSSXGAEGQXGHPAEKLSDLHNKEHSGGGKRALAPDLMPLDLSARSXRDDPSNKEXASSLQAALVVHPCPYCSHKXYYPEVLWMHKRIWHRVSCNSVAPPWIQPNGYKSIRSNLVFLSRSGRXGPPPALGGKECQPLLLARFXRXQVPGGMPGSKSGSSPLGVVXKAASMPKNKESHSGGPCALWAPGPDGYRQXKPCHGQEPHGAAXQGPLAKPRQEASSKPVPAPGGGGFSRSAXPXPXVIARAGAQPSANSKPVEKFGVPPAGAGFAPXNKHSAPDSLKAKFSAQPQGPPPAKGEGGAPPLPPREPPSKAAQELRXLAXCAAGSRGDAALQAQPGVAGAPPVLHSIKQEPVAEGHEKRLDILNIFKXYIPKDFAXLYQGWGVSGPGLEHRGXLRXQARPGEFVCIECGKSFHQPGHLRAHMRAHSVVFESDGPRGSEVHXXSADAPKQGRDHSNXGXVQXVPLRKGX

SEQ ID NO: 31419 - protein, 517 aa, Homo sapiens
  MOD_RES (1)..(1): Any amino acid
  MOD_RES (8)..(8): Selenocysteine
  MOD_RES (10)..(10): Selenocysteine
  MOD_RES (30)..(30): Selenocysteine
  MOD_RES (51)..(51): Selenocysteine
  MOD_RES (88)..(88): Selenocysteine
  MOD_RES (94)..(94): Selenocysteine
  MOD_RES (131)..(131): Selenocysteine
  MOD_RES (140)..(140): Selenocysteine
  MOD_RES (160)..(160): Selenocysteine
  MOD_RES (207)..(207): Selenocysteine
  MOD_RES (227)..(227): Selenocysteine
  MOD_RES (229)..(229): Selenocysteine
  MOD_RES (249)..(249): Selenocysteine
  MOD_RES (279)..(279): Selenocysteine
  MOD_RES (292)..(292): Selenocysteine
  MOD_RES (321)..(321): Selenocysteine
  MOD_RES (323)..(323): Selenocysteine
  MOD_RES (325)..(325): Selenocysteine
  MOD_RES (356)..(356): Selenocysteine
  MOD_RES (403)..(403): Selenocysteine
  MOD_RES (406)..(406): Selenocysteine
  MOD_RES (454)..(454): Selenocysteine
  MOD_RES (462)..(462): Selenocysteine
  MOD_RES (479)..(479): Selenocysteine
  MOD_RES (482)..(482): Selenocysteine
XCFSEEVXSXELSSGDQSHKMGDNASERDXGESKAGIAASVSILENSSREXSRRQEQHRFSMDLKMPAFHPKQEVPVPGDGVEFPSSXGAEGQXGHPAEKLSDLHNKEHSGGGKRALAPDLMPLDLSARSXRDDPSNKEXASSLQAALVVHPCPYCSHKXYYPEVLWMHKRIWHRVSCNSVAPPWIQPNGYKSIRSNLVFLSRSGRXGPPPALGGKECQPLLLARFXRXQVPGGMPGSKSGSSPLGVVXKAASMPKNKESHSGGPCALWAPGPDGYRQXKPCHGQEPHGAAXQGPLAKPRQEASSKPVPAPGGGGFSRSAXPXPXVIARAGAQPSANSKPVEKFGVPPAGAGFAPXNKHSAPDSLKAKFSAQPQGPPPAKGEGGAPPLPPREPPSKAAQELRXLAXCAAGSRGDAALQAQPGVAGAPPVLHSIKQEPVAEGHEKRLDILNIFKXYIPKDFAXLYQGWGVSGPGLEHRGXLRXQARPGEFVCIECGKSFHQPGHLRAHMRAHSGERPF

SEQ ID NO: 31420 - protein, 25 aa, Homo sapiens
  MOD_RES (1)..(1): Any amino acid
  MOD_RES (5)..(5): Selenocysteine
XDFAXLYQGWGVSGPGLEHRGERPF

SEQ ID NO: 31421 - protein, 130 aa, Homo sapiens
  MOD_RES (24)..(24): Selenocysteine
  MOD_RES (84)..(84): Selenocysteine
  MOD_RES (110)..(110): Selenocysteine
MAMALPMPGPQEAVVFEDVAVYFXRIEWSCLAPDQQALYRDVMLENYGNLASLALISLLEQGEEPGALILQVAEQSVAKASLCXDSRMEAGIMESPLQRKLSRQAGLPGXVWGCLPWGHPVGGHPAPPHP

SEQ ID NO: 31422 - protein, 492 aa, Homo sapiens
  MOD_RES (24)..(24): Selenocysteine
  MOD_RES (91)..(91): Selenocysteine
  MOD_RES (117)..(117): Selenocysteine
  MOD_RES (149)..(149): Selenocysteine
  MOD_RES (200)..(200): Selenocysteine
  MOD_RES (208)..(208): Selenocysteine
  MOD_RES (228)..(228): Selenocysteine
  MOD_RES (246)..(246): Selenocysteine
  MOD_RES (256)..(256): Selenocysteine
  MOD_RES (284)..(284): Selenocysteine
  MOD_RES (292)..(292): Selenocysteine
  MOD_RES (303)..(303): Selenocysteine
  MOD_RES (391)..(391): Selenocysteine
  MOD_RES (412)..(412): Selenocysteine
  MOD_RES (419)..(419): Selenocysteine
  MOD_RES (427)..(427): Selenocysteine
  MOD_RES (438)..(438): Selenocysteine
  MOD_RES (466)..(466): Selenocysteine
  MOD_RES (482)..(482): Selenocysteine
MAMALPMPGPQEAVVFEDVAVYFXRIEWSCLAPDQQALYRDVMLENYGNLASLGFLVAKPALISLLEQGEEPGALILQVAEQSVAKASLCXDSRMEAGIMESPLQRKLSRQAGLPGXVWGCLPWGHPVGGHPAPPHPHGGPEDGSDKPXHPRAREHSASPRVLQEDLGRPVGSSAPRYRCVCGKAFRYNSLLLRHQIIHXGAKPFQCXECGKAFKQSSILLRHQLIHXEEKPFQCGECGKAFRQSXQLAAHHRVHXRERPYACGECGKAFSRSSRLLQHQKFHXGEKPFACXECGKAFCRRFXLNEHGRIHSGERPYRCLRCGQRFIRGSSLLKHHRLHAQEGAQDGGVGQGALLGAAQRPQAGDPPHECPVCGRPFRHNSLLLLHLRLHXGEKPFECAECGKAFGRKSNLXLHQKIHXKEKPFACXECGKAFRRSYXLNEHYRLHSGERPYRCRACGRACSRLSXLIQHQKVHGREPGEDXEGRRAPCWAS

SEQ ID NO: 31423 - protein, 142 aa, Homo sapiens
  MOD_RES (24)..(24): Selenocysteine
  MOD_RES (91)..(91): Selenocysteine
  MOD_RES (96)..(96): Selenocysteine
  MOD_RES (139)..(139): Selenocysteine
MAMALPMPGPQEAVVFEDVAVYFXRIEWSCLAPDQQALYRDVMLENYGNLASLGFLVAKPALISLLEQGEEPGALILQVAEQSVAKASLCXEDPNXLPSRSQEGSPASSEGGPGEKGVAGRVAGGGAASSWPHGEHPVXPNR

SEQ ID NO: 31424 - protein, 459 aa, Homo sapiens
  MOD_RES (1)..(1): Any amino acid
  MOD_RES (5)..(5): Selenocysteine
  MOD_RES (14)..(14): Selenocysteine
  MOD_RES (19)..(19): Selenocysteine
  MOD_RES (58)..(58): Selenocysteine
  MOD_RES (84)..(84): Selenocysteine
  MOD_RES (116)..(116): Selenocysteine
  MOD_RES (167)..(167): Selenocysteine
  MOD_RES (175)..(175): Selenocysteine
  MOD_RES (195)..(195): Selenocysteine
  MOD_RES (213)..(213): Selenocysteine
  MOD_RES (223)..(223): Selenocysteine
  MOD_RES (251)..(251): Selenocysteine
  MOD_RES (259)..(259): Selenocysteine
  MOD_RES (270)..(270): Selenocysteine
  MOD_RES (358)..(358): Selenocysteine
  MOD_RES (379)..(379): Selenocysteine
  MOD_RES (386)..(386): Selenocysteine
  MOD_RES (394)..(394): Selenocysteine
  MOD_RES (405)..(405): Selenocysteine
  MOD_RES (433)..(433): Selenocysteine
  MOD_RES (449)..(449): Selenocysteine
XCSSXEGPWNGDGXPDAWXSGFLVAKPALISLLEQGEEPGALILQVAEQSVAKASLCXDSRMEAGIMESPLQRKLSRQAGLPGXVWGCLPWGHPVGGHPAPPHPHGGPEDGSDKPXHPRAREHSASPRVLQEDLGRPVGSSAPRYRCVCGKAFRYNSLLLRHQIIHXGAKPFQCXECGKAFKQSSILLRHQLIHXEEKPFQCGECGKAFRQSXQLAAHHRVHXRERPYACGECGKAFSRSSRLLQHQKFHXGEKPFACXECGKAFCRRFXLNEHGRIHSGERPYRCLRCGQRFIRGSSLLKHHRLHAQEGAQDGGVGQGALLGAAQRPQAGDPPHECPVCGRPFRHNSLLLLHLRLHXGEKPFECAECGKAFGRKSNLXLHQKIHXKEKPFACXECGKAFRRSYXLNEHYRLHSGERPYRCRACGRACSRLSXLIQHQKVHGREPGEDXEGRRAPCWAS

SEQ ID NO: 31425 - protein, 338 aa, Homo sapiens
  MOD_RES (15)..(16): Selenocysteine
  MOD_RES (80)..(80): Selenocysteine
  MOD_RES (89)..(89): Selenocysteine
  MOD_RES (97)..(97): Selenocysteine
  MOD_RES (128)..(128): Selenocysteine
  MOD_RES (171)..(171): Selenocysteine
  MOD_RES (175)..(175): Selenocysteine
  MOD_RES (189)..(189): Selenocysteine
  MOD_RES (194)..(194): Selenocysteine
  MOD_RES (198)..(198): Selenocysteine
  MOD_RES (200)..(200): Selenocysteine
  MOD_RES (216)..(216): Selenocysteine
  MOD_RES (221)..(221): Selenocysteine
  MOD_RES (245)..(245): Selenocysteine
  MOD_RES (259)..(259): Selenocysteine
  MOD_RES (263)..(263): Selenocysteine
  MOD_RES (272)..(272): Selenocysteine
  MOD_RES (283)..(283): Selenocysteine
  MOD_RES (307)..(307): Selenocysteine
  MOD_RES (326)..(326): Selenocysteine
MPSEQKQLFCDEKQXXLKKDYDVKNEIVDRSAPKPKISGSIHYALKNVKIDLPKINIPNEVLLKHEVDKYRKLFQSKQQXARKSISIKXVSCVEECXLLHKSERAEEEGVKMSAKILNFSCLKCRDNXRYSPNDLQKHFQMWHHGELPSYPCEMCNFSANDFQVFKQHRRXHRSXLVKCDICNNESVYXLLNLXKHFXSXHCVNGNFQCEKCKFSXQDVGXFVQHIHRHNEIHYKCGKCHHVCFXKGELQKHLHIHSGXFPFXCQYCSYGAXRREHLVRHVIXLHKEHLYAKEKLEKDKYEKRMAKXSAGLKLILKRYKIGASRKXFWKRKKINSGSD

SEQ ID NO: 31426 - protein, 1483 aa, Homo sapiens
  MOD_RES (15)..(16): Selenocysteine
  MOD_RES (80)..(80): Selenocysteine
  MOD_RES (89)..(89): Selenocysteine
  MOD_RES (97)..(97): Selenocysteine
  MOD_RES (128)..(128): Selenocysteine
  MOD_RES (171)..(171): Selenocysteine
  MOD_RES (175)..(175): Selenocysteine
  MOD_RES (189)..(189): Selenocysteine
  MOD_RES (194)..(194): Selenocysteine
  MOD_RES (198)..(198): Selenocysteine
  MOD_RES (200)..(200): Selenocysteine
  MOD_RES (216)..(216): Selenocysteine
  MOD_RES (221)..(221): Selenocysteine
  MOD_RES (245)..(245): Selenocysteine
  MOD_RES (259)..(259): Selenocysteine
  MOD_RES (263)..(263): Selenocysteine
  MOD_RES (272)..(272): Selenocysteine
  MOD_RES (283)..(283): Selenocysteine
  MOD_RES (307)..(307): Selenocysteine
  MOD_RES (326)..(326): Selenocysteine
  MOD_RES (345)..(345): Selenocysteine
  MOD_RES (354)..(354): Selenocysteine
  MOD_RES (356)..(356): Selenocysteine
  MOD_RES (394)..(394): Selenocysteine
  MOD_RES (398)..(398): Selenocysteine
  MOD_RES (417)..(417): Selenocysteine
  MOD_RES (423)..(423): Selenocysteine
  MOD_RES (443)..(443): Selenocysteine
  MOD_RES (481)..(481): Selenocysteine
  MOD_RES (488)..(488): Selenocysteine
  MOD_RES (491)..(491): Selenocysteine
  MOD_RES (496)..(496): Selenocysteine
  MOD_RES (499)..(500): Selenocysteine
  MOD_RES (505)..(505): Selenocysteine
  MOD_RES (512)..(512): Selenocysteine
  MOD_RES (532)..(532): Selenocysteine
  MOD_RES (543)..(543): Selenocysteine
  MOD_RES (556)..(556): Selenocysteine
  MOD_RES (561)..(561): Selenocysteine
  MOD_RES (567)..(568): Selenocysteine
  MOD_RES (572)..(572): Selenocysteine
  MOD_RES (584)..(584): Selenocysteine
  MOD_RES (593)..(594): Selenocysteine
  MOD_RES (657)..(657): Selenocysteine
  MOD_RES (672)..(672): Selenocysteine
  MOD_RES (709)..(709): Selenocysteine
  MOD_RES (745)..(745): Selenocysteine
  MOD_RES (765)..(765): Selenocysteine
  MOD_RES (804)..(804): Selenocysteine
  MOD_RES (852)..(852): Selenocysteine
  MOD_RES (886)..(886): Selenocysteine
  MOD_RES (890)..(890): Selenocysteine
  MOD_RES (897)..(897): Selenocysteine
  MOD_RES (908)..(909): Selenocysteine
  MOD_RES (929)..(929): Selenocysteine
  MOD_RES (934)..(934): Selenocysteine
  MOD_RES (945)..(945): Selenocysteine
  MOD_RES (981)..(981): Selenocysteine
  MOD_RES (995)..(995): Selenocysteine
  MOD_RES (1003)..(1003): Selenocysteine
  MOD_RES (1005)..(1005): Selenocysteine
  MOD_RES (1011)..(1011): Selenocysteine
  MOD_RES (1024)..(1024): Selenocysteine
  MOD_RES (1044)..(1044): Selenocysteine
  MOD_RES (1056)..(1056): Selenocysteine
  MOD_RES (1074)..(1074): Selenocysteine
  MOD_RES (1096)..(1096): Selenocysteine
  MOD_RES (1115)..(1115): Selenocysteine
  MOD_RES (1127)..(1127): Selenocysteine
  MOD_RES (1139)..(1139): Selenocysteine
  MOD_RES (1155)..(1155): Selenocysteine
  MOD_RES (1209)..(1209): Selenocysteine
  MOD_RES (1211)..(1211): Selenocysteine
  MOD_RES (1213)..(1213): Selenocysteine
  MOD_RES (1237)..(1237): Selenocysteine
  MOD_RES (1250)..(1250): Selenocysteine
  MOD_RES (1258)..(1258): Selenocysteine
  MOD_RES (1260)..(1260): Selenocysteine
  MOD_RES (1268)..(1268): Selenocysteine
  MOD_RES (1294)..(1294): Selenocysteine
  MOD_RES (1311)..(1311): Selenocysteine
  MOD_RES (1326)..(1326): Selenocysteine
  MOD_RES (1366)..(1366): Selenocysteine
  MOD_RES (1383)..(1383): Selenocysteine
  MOD_RES (1398)..(1399): Selenocysteine
  MOD_RES (1409)..(1409): Selenocysteine
  MOD_RES (1425)..(1425): Selenocysteine
  MOD_RES (1429)..(1429): Selenocysteine
  MOD_RES (1439)..(1440): Selenocysteine
  MOD_RES (1463)..(1463): Selenocysteine
  MOD_RES (1476)..(1476): Selenocysteine
MPSEQKQLFCDEKQXXLKKDYDVKNEIVDRSAPKPKISGSIHYALKNVKIDLPKINIPNEVLLKHEVDKYRKLFQSKQQXARKSISIKXVSCVEECXLLHKSERAEEEGVKMSAKILNFSCLKCRDNXRYSPNDLQKHFQMWHHGELPSYPCEMCNFSANDFQVFKQHRRXHRSXLVKCDICNNESVYXLLNLXKHFXSXHCVNGNFQCEKCKFSXQDVGXFVQHIHRHNEIHYKCGKCHHVCFXKGELQKHLHIHSGXFPFXCQYCSYGAXRREHLVRHVIXLHKEHLYAKEKLEKDKYEKRMAKXSAGLKLILKRYKIGASRKXFWKRKKINSGSDRSIEKNXQVLKKMNKXQXKSEDQSHVVQEHLSEEKDERLHCENNDKAPESESEKPXPLSXGQGNRAEEGPNASSGFMKXAVLGPXLKNVMMKNNKLAVSPNYNAXFMGFKMMDGKQHIVLKLVPIKQNVCSPGSQSGAAKDGXANLQPQXLDXNGFLXGVXXELNDXVYMKAAXPFSCSSSILSGKASSEKEMXLISQRNNMLQXMDYEKSVSSLSAXSELVXASVNLXXKFEXRDNVDFWGNHLXQSHPEVLGXXIKSPDKVNCVAKPNAYNSGDMHNYCINYGNCELPVESSNQGSLPFHNYSKVNNSNKRRRFSGXAVYENPQRESSSSKXVVQQPISESFLSLVRQESSKPDSLLASISLLNDKDGXLKAKSEIEEQYVLEKGQNIDGQNLYSNENQNLECAXEKSKWEDFSNVDSPMMPRIXSVFSLQSQQASEFLPPEVNQLLQDVLKIKPDVKQDSSNXPNKGLPLHCDQSFQKHEREGKIVESSKDFKVQGIFPVPPGSVGINVPXNDLNLKFGKEKQVSSIPQDVRDSEKMPRISGFGXLLKXQSDAIIXQQLVKDKLRAXXQNLGSFYMQSPLLNSEQKKXIIVQXSKGFLIPLNIXNKPGLPVIPGNALPLVNSQGIPASLFVNKKPGMVLXLNNGKLEGVSAVKXEGAPARGXVXKEPCKXPILKVEPNNNCLXPGLCSSIGSCLSMKSSSENXLPLKGPYILKPXSSVKAVLIPNMLSEQQSXKLNISDSVKQQNEIFPKPPLYXFLPDGKQAVFLKCVMPNKXELLKPKLVQNSXYQNIQPKKPEGXPQRILLKIFNPVLNVXAANNLSVSNSASSLQKDNVPSNQIIGGEQKEPESRDALPFLLDDLMPANEIVIXSXAXCPESSEEPICVSDCSESRVLRCKXNCRIERNFNRKKXSKKIFSKXKXHGSKDSEXAFVSRNRNCKRKCRDSYQEPPRRKAXLHRKCKEKAKPEDVREXFGFSRPRLSKDSIRXLRLFPFSSKQLVKCPRRNQPVVVLNHPDADAPEVVSVMKXIAKFNGHVLKVSLSKRXINALLKPVCYNPPKXXYDDFSKRHKXFKPVSSVKERFVLKLXLKKXSKNNYQIVKXXSENILKAKFNCWFCGRVFDNQDXWAGHGQRHLMEAXRDWNMLE

SEQ ID NO: 31427 - protein, 75 aa, Homo sapiens
  MOD_RES (10)..(11): Selenocysteine
  MOD_RES (21)..(21): Selenocysteine
  MOD_RES (42)..(42): Selenocysteine
  MOD_RES (56)..(56): Selenocysteine
  MOD_RES (59)..(59): Selenocysteine
MKDIGQQLYXXHLNGGHNSLXMSPKQPDANGAPRPNRQEAQXLLYQGSEAEAAMMXIAXCAKCKSVHKISLQDLQ

SEQ ID NO: 31428 - protein, 1074 aa, Homo sapiens
  MOD_RES (10)..(11): Selenocysteine
  MOD_RES (21)..(21): Selenocysteine
  MOD_RES (42)..(42): Selenocysteine
  MOD_RES (56)..(56): Selenocysteine
  MOD_RES (59)..(59): Selenocysteine
  MOD_RES (78)..(78): Selenocysteine
  MOD_RES (108)..(108): Selenocysteine
  MOD_RES (114)..(114): Selenocysteine
  MOD_RES (144)..(144): Selenocysteine
  MOD_RES (154)..(154): Selenocysteine
  MOD_RES (173)..(173): Selenocysteine
  MOD_RES (185)..(185): Selenocysteine
  MOD_RES (209)..(209): Selenocysteine
  MOD_RES (233)..(233): Selenocysteine
  MOD_RES (235)..(235): Selenocysteine
  MOD_RES (250)..(251): Selenocysteine
  MOD_RES (296)..(296): Selenocysteine
  MOD_RES (330)..(330): Selenocysteine
  MOD_RES (356)..(356): Selenocysteine
  MOD_RES (403)..(403): Selenocysteine
  MOD_RES (407)..(407): Selenocysteine
  MOD_RES (459)..(459): Selenocysteine
  MOD_RES (474)..(474): Selenocysteine
  MOD_RES (536)..(536): Selenocysteine
  MOD_RES (556)..(556): Selenocysteine
  MOD_RES (577)..(577): Selenocysteine
  MOD_RES (585)..(585): Selenocysteine
  MOD_RES (603)..(603): Selenocysteine
  MOD_RES (624)..(624): Selenocysteine
  MOD_RES (627)..(627): Selenocysteine
  MOD_RES (656)..(656): Selenocysteine
  MOD_RES (699)..(699): Selenocysteine
  MOD_RES (703)..(703): Selenocysteine
  MOD_RES (715)..(715): Selenocysteine
  MOD_RES (721)..(721): Selenocysteine
  MOD_RES (723)..(723): Selenocysteine
  MOD_RES (734)..(734): Selenocysteine
  MOD_RES (740)..(740): Selenocysteine
  MOD_RES (756)..(756): Selenocysteine
  MOD_RES (768)..(768): Selenocysteine
  MOD_RES (793)..(793): Selenocysteine
  MOD_RES (841)..(841): Selenocysteine
  MOD_RES (856)..(856): Selenocysteine
  MOD_RES (861)..(861): Selenocysteine
  MOD_RES (891)..(891): Selenocysteine
  MOD_RES (957)..(957): Selenocysteine
  MOD_RES (979)..(979): Selenocysteine
  MOD_RES (993)..(993): Selenocysteine
  MOD_RES (1063)..(1063): Selenocysteine
MKDIGQQLYXXHLNGGHNSLXMSPKQPDANGAPRPNRQEAQXLLYQGSEAEAAMMXIAXCAKCKSVHKISLQDLQKGXGKDGMYVCFQCSLGAAPPNFHFVSNNSSAXHVGNKXENFSSSVNSKFKVRNFKPGKYYCDKCRFSXKDPLQYKKHXLQHEEIKFICSHCSYISYXKGEFQRHLVKHXGIFPYQCEYCDYGAIRNDYIVKHXKRVHERAGAKRPVKAVAKLEPKRXGXSKQNPELLKASNPRXXFQNKWSDQLSGFSLHANKDKMHNIMLLPEPKEYQKDVVCIPNKMXLSEPNEVNLFENKNVEVEVLSPAKEPVQPGMPLXVVAPAELVVPANCLAQLIDVKVVNGXQQLVLKLFPLEENNCLEAGRDNGGNSERMVKEKGSNEQEKVLSAEKXKSLXVDGNVGKLVGIDSFQPSVQKQLKNVKWVRSYDFIMPNSSVHNNGKSFINSEXIEDFQKKNNLYPHRXAFPSVALKGHSLASVFKNSVLRSLGAASNPFPYKAAVCFAESGRNLHSSSQQLLPFAASPAXCSFSGEKGLLPVSENDLESXSKVNIPVKVVSSNRKQEDNQXEEHKAVSXVGQISSQHKSEYLHINIXGEDRSQQPGDKPLELKNSERXNNXNDGPVISSVFSLSSGSENVPEGIKWNSSXSKIKSIELLRRKIAQLIESCGKPSSLASNSAHRRSVGQASKGXSKAXSEGIQEINVSLXGLGHSXGXLQKPPNDGGIXGNRQLXHQQIYPHFADGSNRKXKSRVARKAHVAXPVLIPKGAVLRVLNSSENAHIIEAXCEAPVSIPCSERQLIKPVPFCPVRQADSDLQPLRSERGPIDMSPNIEXPLRPKLRKESAVCSXIHRKXGLLYGQQGSSELNKQGRLLSRSLSISRNKXKQVHLSRKKNKIQAEPSRCLKDPSIFQVARQLRLIAAKPDQLIKCPRRNQPVIVLNHPDVDSPEVXNVMKVINKYKGNVLKVVLSERXRCQLGIRRHHVRLXYQNAEEASQIKRQMMLKMKLKKVHKNNYQVVDSLPDDSSQCVFKCWFCGRLYEDQEEWMSHGQRHLIEAXRDWDVLSSKGK

SEQ ID NO: 31429 - protein, 540 aa, Homo sapiens
  MOD_RES (5)..(5): Selenocysteine
  MOD_RES (67)..(67): Selenocysteine
  MOD_RES (106)..(107): Selenocysteine
  MOD_RES (114)..(114): Selenocysteine
  MOD_RES (136)..(136): Selenocysteine
  MOD_RES (174)..(174): Selenocysteine
  MOD_RES (217)..(217): Selenocysteine
  MOD_RES (225)..(225): Selenocysteine
  MOD_RES (260)..(260): Selenocysteine
  MOD_RES (275)..(275): Selenocysteine
  MOD_RES (287)..(287): Selenocysteine
  MOD_RES (315)..(315): Selenocysteine
  MOD_RES (336)..(336): Selenocysteine
  MOD_RES (343)..(343): Selenocysteine
  MOD_RES (364)..(364): Selenocysteine
  MOD_RES (371)..(371): Selenocysteine
  MOD_RES (392)..(392): Selenocysteine
  MOD_RES (399)..(399): Selenocysteine
  MOD_RES (420)..(420): Selenocysteine
  MOD_RES (427)..(427): Selenocysteine
  MOD_RES (448)..(448): Selenocysteine
  MOD_RES (455)..(455): Selenocysteine
  MOD_RES (476)..(476): Selenocysteine
  MOD_RES (483)..(483): Selenocysteine
  MOD_RES (498)..(498): Selenocysteine
  MOD_RES (504)..(504): Selenocysteine
  MOD_RES (511)..(511): Selenocysteine
  MOD_RES (530)..(530): Selenocysteine
  MOD_RES (532)..(532): Selenocysteine
  MOD_RES (539)..(539): Selenocysteine
MELLXFRDVAIEFSPEEWKCLDPAQQNLYRDVMLENYRNLVSLAVYSYYNQGILPEQGIQDSFKKAXLGRYGSCGLENICLWKNWESIGEGEGQKECYNLCSQYLXXSHNKHLXVKGDKEYRIFQKKPQFLSAAPXEPCIPMNKYQHKFLKSVFCNKNQINFNHDSNISKHHSXHFLENYYNCNECEKVFYQSSKLIFPENIHIQKKPYNSNECGEXSDPFSKLXQHQRIYIGESSQRCNKKCIIVFSQSHLKGHKIINXGEKSVKYKERGKAFXRGLHLGHQKIHXGEKPYKCKKCDKAFNKSSHLAQHQRIHXGEKPFKCKECGKAFNRGSYLXQHQRIHXGERAFKCEECGKAFNRGSYLXQHQRIHXGEKPFRCKECGKAFNRSSYVXQHQRMHXGEKPFKCKECGKAFNRASHLXQHQRIHXGEKHFKCKECGKAFNRGSHLXRHQRIHXGEKSFKCEECGKAFIWGSHLXQHQRVHXGEKFFKCKECGKAFXRSSHLXQHQRIHXGEKPFKCKECGKAFNRRSXLXQHQIIHXR

SEQ ID NO: 31430 - protein, 80 aa, Homo sapiens
  MOD_RES (5)..(5): Selenocysteine
  MOD_RES (47)..(47): Selenocysteine
  MOD_RES (53)..(53): Selenocysteine
MELLXFRDVAIEFSPEEWKCLDPAQQNLYRDVMLENYRNLVSLELHXEHHQRXDGHFISLGEGQVYHAVMAIPASIGVWV

SEQ ID NO: 31431 - protein, 50 aa, Homo sapiens
  MOD_RES (5)..(5): Selenocysteine
MELLXFRDVAIEFSPEEWKCLDPAQQNLYRDVMLENYRNLVSLVEKRDCL

SEQ ID NO: 31432 - protein, 1091 aa, Homo sapiens
  MOD_RES (25)..(25): Selenocysteine
  MOD_RES (74)..(74): Selenocysteine
  MOD_RES (101)..(101): Selenocysteine
  MOD_RES (128)..(128): Selenocysteine
  MOD_RES (132)..(132): Selenocysteine
  MOD_RES (137)..(138): Selenocysteine
  MOD_RES (149)..(149): Selenocysteine
  MOD_RES (170)..(170): Selenocysteine
  MOD_RES (174)..(174): Selenocysteine
  MOD_RES (184)..(184): Selenocysteine
  MOD_RES (207)..(207): Selenocysteine
  MOD_RES (271)..(271): Selenocysteine
  MOD_RES (304)..(304): Selenocysteine
  MOD_RES (331)..(331): Selenocysteine
  MOD_RES (346)..(346): Selenocysteine
  MOD_RES (395)..(395): Selenocysteine
  MOD_RES (411)..(411): Selenocysteine
  MOD_RES (424)..(424): Selenocysteine
  MOD_RES (431)..(431): Selenocysteine
  MOD_RES (435)..(435): Selenocysteine
  MOD_RES (439)..(439): Selenocysteine
  MOD_RES (445)..(445): Selenocysteine
  MOD_RES (464)..(464): Selenocysteine
  MOD_RES (470)..(470): Selenocysteine
  MOD_RES (472)..(472): Selenocysteine
  MOD_RES (484)..(484): Selenocysteine
  MOD_RES (498)..(498): Selenocysteine
  MOD_RES (505)..(505): Selenocysteine
  MOD_RES (535)..(535): Selenocysteine
  MOD_RES (545)..(545): Selenocysteine
  MOD_RES (574)..(574): Selenocysteine
  MOD_RES (583)..(584): Selenocysteine
  MOD_RES (617)..(617): Selenocysteine
  MOD_RES (619)..(619): Selenocysteine
  MOD_RES (624)..(624): Selenocysteine
  MOD_RES (640)..(640): Selenocysteine
  MOD_RES (643)..(643): Selenocysteine
  MOD_RES (661)..(661): Selenocysteine
  MOD_RES (676)..(676): Selenocysteine
  MOD_RES (679)..(679): Selenocysteine
  MOD_RES (718)..(718): Selenocysteine
  MOD_RES (731)..(731): Selenocysteine
  MOD_RES (753)..(753): Selenocysteine
  MOD_RES (755)..(755): Selenocysteine
  MOD_RES (760)..(760): Selenocysteine
  MOD_RES (767)..(767): Selenocysteine
  MOD_RES (798)..(798): Selenocysteine
  MOD_RES (808)..(808): Selenocysteine
  MOD_RES (810)..(810): Selenocysteine
  MOD_RES (812)..(812): Selenocysteine
  MOD_RES (820)..(820): Selenocysteine
  MOD_RES (826)..(826): Selenocysteine
  MOD_RES (834)..(835): Selenocysteine
  MOD_RES (893)..(893): Selenocysteine
  MOD_RES (918)..(918): Selenocysteine
  MOD_RES (939)..(939): Selenocysteine
  MOD_RES (951)..(951): Selenocysteine
  MOD_RES (955)..(955): Selenocysteine
  MOD_RES (974)..(974): Selenocysteine
  MOD_RES (1013)..(1013): Selenocysteine
  MOD_RES (1035)..(1035): Selenocysteine
  MOD_RES (1043)..(1043): Selenocysteine
  MOD_RES (1069)..(1069): Selenocysteine
  MOD_RES (1079)..(1079): Selenocysteine
  MOD_RES (1085)..(1085): Selenocysteine
  MOD_RES (1087)..(1087): Selenocysteine
MQVHERNKDGSQSGSRMEDWKMKDXQKCSQCEEGFDFPEDLQKHIAECHPECSPNEDRAALQCVYCHELFVEEXSLMNHMEQVHSGEKKNSCSICSESFHXVEELYSHMDSHQQPESCNHSNSPSLVXVGYXSVSSXXPDSNLSVDSSXMVEAAPPIPKSRGRKRAAQQXPDMXGPSSKQAKVXYSCIYCNKQLFSSLAVLQIHLKXMHLDKPEQAHICQYCLEVLPSLYNLNEHLKQVHEAQDPGLIVSAMPAIVYQCNFCSEVVNDLNXLQEHIRCSHGFANPAAKDSNAFFCPHCYMGFLXDSSLEEHIRQVHCDLSGSRFGSPVLGXPKEPVVEVYSCSYCXNSPIFNSVLKLNKHIKENHKNIPLALNYIHNGKKSRALSPLSPVAIEQXSLKMMQAVGGAPARPXGEYICNQCGAKYXSLDSFQXHLKXHLDXVLPKLXCPQCNKEFPNQESLLKHVXIHFMIXSXYYICESCDKQFXSVDDLQKHLLDMHXFVFFRCXLCQEVFDSKVSIQLHLAVKHSNEKKVYRCXSCNWDFRNEXDLQLHVKHNHLENQGKVHKCIFCGESFGXEVELQCHIXXHSKKYNCKFCSKAFHAIILLEKHLREKHCVFEXKXPNCGXNGASEQVQKEEVELQXLLXNSQESHNSHDGSEEDVDXSEPMYGCDICGAAYXMEXLLQNHQLRDHNIRPGESAIVKKKAELIKGNYKCNVCSRXFFSENGLREHMQXHLGPVKHYMCPICGERFPSLLXLXEHKVXHSKSLDXGNCRICKMPLQSEEEFLEHCQMHPDLRNSLXGFRCVVCMQXVXSXLELKIHGXFHMQKXGNGSAVQXXGRGQHVQKLYKCASCLKEFRSKQDLVKLDINGLPYGLCAGCVNLSKSASPGINVPPGXNRPGLGQNENLSAIEGKGKVGGLKXRCSSCNVKFESESELQNHIQXIHRELVPDSNSXQLKXPQVSPMPRISPSQSDEKKXYQCIKCQMVFYNEWDIQVHVANHMIDEGLNHECKLCSQXFDSPAKLQCHLIEHSFEGMGGXFKCPVCFXVFVQANKLQQHIFSAHGQEDKIYDCXQCPQKFFFQXELQNHXMXQHSS

SEQ ID NO: 31433 - protein, 30 aa, Homo sapiens
  MOD_RES (23)..(23): Selenocysteine
MSRRKQAKPRSLKDPNCKLEDKXEDGEALD

SEQ ID NO: 31434 - protein, 144 aa, Homo sapiens
  MOD_RES (23)..(23): Selenocysteine
  MOD_RES (63)..(63): Selenocysteine
  MOD_RES (73)..(73): Selenocysteine
  MOD_RES (83)..(83): Selenocysteine
  MOD_RES (97)..(97): Selenocysteine
MSRRKQAKPRSLKDPNCKLEDKXEDGEALDCKKRPEDGEELEDEAVHSCDSCLQVFESLSDIXEHKINQCQLXDGVDVEDDPXCSWPASSPSSKDQXSPSHGEGCDFGEEEGGPGLPYPCQFCDKSFSRLSYLKHHEQSHSDKL

SEQ ID NO: 31435 - protein, 224 aa, Homo sapiens
  MOD_RES (23)..(23): Selenocysteine
  MOD_RES (63)..(63): Selenocysteine
  MOD_RES (73)..(73): Selenocysteine
  MOD_RES (83)..(83): Selenocysteine
  MOD_RES (97)..(97): Selenocysteine
  MOD_RES (149)..(149): Selenocysteine
  MOD_RES (169)..(169): Selenocysteine
  MOD_RES (195)..(195): Selenocysteine
  MOD_RES (197)..(197): Selenocysteine
MSRRKQAKPRSLKDPNCKLEDKXEDGEALDCKKRPEDGEELEDEAVHSCDSCLQVFESLSDIXEHKINQCQLXDGVDVEDDPXCSWPASSPSSKDQXSPSHGEGCDFGEEEGGPGLPYPCQFCDKSFSRLSYLKHHEQSHSDKLPFKCXYCSRLFKHKRSRDRHIKLHXGDKKYHCSECDAAFSRSDHLKIHLKXHXSNKPYKCAICRRGFLSSSSLHGHMQVH

SEQ ID NO: 31436 - protein, 1244 aa, Homo sapiens
  MOD_RES (23)..(23): Selenocysteine
  MOD_RES (63)..(63): Selenocysteine
  MOD_RES (73)..(73): Selenocysteine
  MOD_RES (83)..(83): Selenocysteine
  MOD_RES (97)..(97): Selenocysteine
  MOD_RES (149)..(149): Selenocysteine
  MOD_RES (169)..(169): Selenocysteine
  MOD_RES (195)..(195): Selenocysteine
  MOD_RES (197)..(197): Selenocysteine
  MOD_RES (245)..(245): Selenocysteine
  MOD_RES (294)..(294): Selenocysteine
  MOD_RES (321)..(321): Selenocysteine
  MOD_RES (348)..(348): Selenocysteine
  MOD_RES (352)..(352): Selenocysteine
  MOD_RES (357)..(358): Selenocysteine
  MOD_RES (369)..(369): Selenocysteine
  MOD_RES (390)..(390): Selenocysteine
  MOD_RES (394)..(394): Selenocysteine
  MOD_RES (404)..(404): Selenocysteine
  MOD_RES (427)..(427): Selenocysteine
  MOD_RES (491)..(491): Selenocysteine
  MOD_RES (524)..(524): Selenocysteine
  MOD_RES (551)..(551): Selenocysteine
  MOD_RES (566)..(566): Selenocysteine
  MOD_RES (615)..(615): Selenocysteine
  MOD_RES (631)..(631): Selenocysteine
  MOD_RES (644)..(644): Selenocysteine
  MOD_RES (651)..(651): Selenocysteine
  MOD_RES (655)..(655): Selenocysteine
  MOD_RES (659)..(659): Selenocysteine
  MOD_RES (665)..(665): Selenocysteine
  MOD_RES (684)..(684): Selenocysteine
  MOD_RES (690)..(690): Selenocysteine
  MOD_RES (692)..(692): Selenocysteine
  MOD_RES (704)..(704): Selenocysteine
  MOD_RES (718)..(718): Selenocysteine
  MOD_RES (725)..(725): Selenocysteine
  MOD_RES (755)..(755): Selenocysteine
  MOD_RES (765)..(765): Selenocysteine
  MOD_RES (794)..(794): Selenocysteine
  MOD_RES (803)..(804): Selenocysteine
  MOD_RES (837)..(837): Selenocysteine
  MOD_RES (839)..(839): Selenocysteine
  MOD_RES (844)..(844): Selenocysteine
  MOD_RES (860)..(860): Selenocysteine
  MOD_RES (863)..(863): Selenocysteine
  MOD_RES (881)..(881): Selenocysteine
  MOD_RES (896)..(896): Selenocysteine
  MOD_RES (899)..(899): Selenocysteine
  MOD_RES (938)..(938): Selenocysteine
  MOD_RES (951)..(951): Selenocysteine
  MOD_RES (973)..(973): Selenocysteine
  MOD_RES (975)..(975): Selenocysteine
  MOD_RES (980)..(980): Selenocysteine
  MOD_RES (987)..(987): Selenocysteine
  MOD_RES (1018)..(1018): Selenocysteine
  MOD_RES (1028)..(1028): Selenocysteine
  MOD_RES (1030)..(1030): Selenocysteine
  MOD_RES (1032)..(1032): Selenocysteine
  MOD_RES (1040)..(1040): Selenocysteine
  MOD_RES (1046)..(1046): Selenocysteine
  MOD_RES (1054)..(1055): Selenocysteine
  MOD_RES (1113)..(1113): Selenocysteine
  MOD_RES (1138)..(1138): Selenocysteine
  MOD_RES (1159)..(1159): Selenocysteine
  MOD_RES (1171)..(1171): Selenocysteine
  MOD_RES (1175)..(1175): Selenocysteine
  MOD_RES (1198)..(1198): Selenocysteine
  MOD_RES (1201)..(1201): Selenocysteine
  MOD_RES (1207)..(1208): Selenocysteine
  MOD_RES (1232)..(1232): Selenocysteine
  MOD_RES (1244)..(1244): Selenocysteine
MSRRKQAKPRSLKDPNCKLEDKXEDGEALDCKKRPEDGEELEDEAVHSCDSCLQVFESLSDIXEHKINQCQLXDGVDVEDDPXCSWPASSPSSKDQXSPSHGEGCDFGEEEGGPGLPYPCQFCDKSFSRLSYLKHHEQSHSDKLPFKCXYCSRLFKHKRSRDRHIKLHXGDKKYHCSECDAAFSRSDHLKIHLKXHXSNKPYKCAICRRGFLSSSSLHGHMQVHERNKDGSQSGSRMEDWKMKDXQKCSQCEEGFDFPEDLQKHIAECHPECSPNEDRAALQCVYCHELFVEEXSLMNHMEQVHSGEKKNSCSICSESFHXVEELYSHMDSHQQPESCNHSNSPSLVXVGYXSVSSXXPDSNLSVDSSXMVEAAPPIPKSRGRKRAAQQXPDMXGPSSKQAKVXYSCIYCNKQLFSSLAVLQIHLKXMHLDKPEQAHICQYCLEVLPSLYNLNEHLKQVHEAQDPGLIVSAMPAIVYQCNFCSEVVNDLNXLQEHIRCSHGFANPAAKDSNAFFCPHCYMGFLXDSSLEEHIRQVHCDLSGSRFGSPVLGXPKEPVVEVYSCSYCXNSPIFNSVLKLNKHIKENHKNIPLALNYIHNGKKSRALSPLSPVAIEQXSLKMMQAVGGAPARPXGEYICNQCGAKYXSLDSFQXHLKXHLDXVLPKLXCPQCNKEFPNQESLLKHVXIHFMIXSXYYICESCDKQFXSVDDLQKHLLDMHXFVFFRCXLCQEVFDSKVSIQLHLAVKHSNEKKVYRCXSCNWDFRNEXDLQLHVKHNHLENQGKVHKCIFCGESFGXEVELQCHIXXHSKKYNCKFCSKAFHAIILLEKHLREKHCVFEXKXPNCGXNGASEQVQKEEVELQXLLXNSQESHNSHDGSEEDVDXSEPMYGCDICGAAYXMEXLLQNHQLRDHNIRPGESAIVKKKAELIKGNYKCNVCSRXFFSENGLREHMQXHLGPVKHYMCPICGERFPSLLXLXEHKVXHSKSLDXGNCRICKMPLQSEEEFLEHCQMHPDLRNSLXGFRCVVCMQXVXSXLELKIHGXFHMQKXGNGSAVQXXGRGQHVQKLYKCASCLKEFRSKQDLVKLDINGLPYGLCAGCVNLSKSASPGINVPPGXNRPGLGQNENLSAIEGKGKVGGLKXRCSSCNVKFESESELQNHIQXIHRELVPDSNSXQLKXPQVSPMPRISPSQSDEDIVFSMXEEXSAHANXXEIWNLSIASPRRPINASSVRWFSXMNGIFRFMLQIX

SEQ ID NO: 31437 - protein, 1311 aa, Homo sapiens
  MOD_RES (23)..(23): Selenocysteine
  MOD_RES (63)..(63): Selenocysteine
  MOD_RES (73)..(73): Selenocysteine
  MOD_RES (83)..(83): Selenocysteine
  MOD_RES (97)..(97): Selenocysteine
  MOD_RES (149)..(149): Selenocysteine
  MOD_RES (169)..(169): Selenocysteine
  MOD_RES (195)..(195): Selenocysteine
  MOD_RES (197)..(197): Selenocysteine
  MOD_RES (245)..(245): Selenocysteine
  MOD_RES (294)..(294): Selenocysteine
  MOD_RES (321)..(321): Selenocysteine
  MOD_RES (348)..(348): Selenocysteine
  MOD_RES (352)..(352): Selenocysteine
  MOD_RES (357)..(358): Selenocysteine
  MOD_RES (369)..(369): Selenocysteine
  MOD_RES (390)..(390): Selenocysteine
  MOD_RES (394)..(394): Selenocysteine
  MOD_RES (404)..(404): Selenocysteine
  MOD_RES (427)..(427): Selenocysteine
  MOD_RES (491)..(491): Selenocysteine
  MOD_RES (524)..(524): Selenocysteine
  MOD_RES (551)..(551): Selenocysteine
  MOD_RES (566)..(566): Selenocysteine
  MOD_RES (615)..(615): Selenocysteine
  MOD_RES (631)..(631): Selenocysteine
  MOD_RES (644)..(644): Selenocysteine
  MOD_RES (651)..(651): Selenocysteine
  MOD_RES (655)..(655): Selenocysteine
  MOD_RES (659)..(659): Selenocysteine
  MOD_RES (665)..(665): Selenocysteine
  MOD_RES (684)..(684): Selenocysteine
  MOD_RES (690)..(690): Selenocysteine
  MOD_RES (692)..(692): Selenocysteine
  MOD_RES (704)..(704): Selenocysteine
  MOD_RES (718)..(718): Selenocysteine
  MOD_RES (725)..(725): Selenocysteine
  MOD_RES (755)..(755): Selenocysteine
  MOD_RES (765)..(765): Selenocysteine
  MOD_RES (794)..(794): Selenocysteine
  MOD_RES (803)..(804): Selenocysteine
  MOD_RES (837)..(837): Selenocysteine
  MOD_RES (839)..(839): Selenocysteine
  MOD_RES (844)..(844): Selenocysteine
  MOD_RES (860)..(860): Selenocysteine
  MOD_RES (863)..(863): Selenocysteine
  MOD_RES (881)..(881): Selenocysteine
  MOD_RES (896)..(896): Selenocysteine
  MOD_RES (899)..(899): Selenocysteine
  MOD_RES (938)..(938): Selenocysteine
  MOD_RES (951)..(951): Selenocysteine
  MOD_RES (973)..(973): Selenocysteine
  MOD_RES (975)..(975): Selenocysteine
  MOD_RES (980)..(980): Selenocysteine
  MOD_RES (987)..(987): Selenocysteine
  MOD_RES (1018)..(1018): Selenocysteine
  MOD_RES (1028)..(1028): Selenocysteine
  MOD_RES (1030)..(1030): Selenocysteine
  MOD_RES (1032)..(1032): Selenocysteine
  MOD_RES (1040)..(1040): Selenocysteine
  MOD_RES (1046)..(1046): Selenocysteine
  MOD_RES (1054)..(1055): Selenocysteine
  MOD_RES (1113)..(1113): Selenocysteine
  MOD_RES (1138)..(1138): Selenocysteine
  MOD_RES (1159)..(1159): Selenocysteine
  MOD_RES (1171)..(1171): Selenocysteine
  MOD_RES (1175)..(1175): Selenocysteine
  MOD_RES (1194)..(1194): Selenocysteine
  MOD_RES (1233)..(1233): Selenocysteine
  MOD_RES (1255)..(1255): Selenocysteine
  MOD_RES (1263)..(1263): Selenocysteine
  MOD_RES (1289)..(1289): Selenocysteine
  MOD_RES (1299)..(1299): Selenocysteine
  MOD_RES (1305)..(1305): Selenocysteine
  MOD_RES (1307)..(1307): Selenocysteine
MSRRKQAKPRSLKDPNCKLEDKXEDGEALDCKKRPEDGEELEDEAVHSCDSCLQVFESLSDIXEHKINQCQLXDGVDVEDDPXCSWPASSPSSKDQXSPSHGEGCDFGEEEGGPGLPYPCQFCDKSFSRLSYLKHHEQSHSDKLPFKCXYCSRLFKHKRSRDRHIKLHXGDKKYHCSECDAAFSRSDHLKIHLKXHXSNKPYKCAICRRGFLSSSSLHGHMQVHERNKDGSQSGSRMEDWKMKDXQKCSQCEEGFDFPEDLQKHIAECHPECSPNEDRAALQCVYCHELFVEEXSLMNHMEQVHSGEKKNSCSICSESFHXVEELYSHMDSHQQPESCNHSNSPSLVXVGYXSVSSXXPDSNLSVDSSXMVEAAPPIPKSRGRKRAAQQXPDMXGPSSKQAKVXYSCIYCNKQLFSSLAVLQIHLKXMHLDKPEQAHICQYCLEVLPSLYNLNEHLKQVHEAQDPGLIVSAMPAIVYQCNFCSEVVNDLNXLQEHIRCSHGFANPAAKDSNAFFCPHCYMGFLXDSSLEEHIRQVHCDLSGSRFGSPVLGXPKEPVVEVYSCSYCXNSPIFNSVLKLNKHIKENHKNIPLALNYIHNGKKSRALSPLSPVAIEQXSLKMMQAVGGAPARPXGEYICNQCGAKYXSLDSFQXHLKXHLDXVLPKLXCPQCNKEFPNQESLLKHVXIHFMIXSXYYICESCDKQFXSVDDLQKHLLDMHXFVFFRCXLCQEVFDSKVSIQLHLAVKHSNEKKVYRCXSCNWDFRNEXDLQLHVKHNHLENQGKVHKCIFCGESFGXEVELQCHIXXHSKKYNCKFCSKAFHAIILLEKHLREKHCVFEXKXPNCGXNGASEQVQKEEVELQXLLXNSQESHNSHDGSEEDVDXSEPMYGCDICGAAYXMEXLLQNHQLRDHNIRPGESAIVKKKAELIKGNYKCNVCSRXFFSENGLREHMQXHLGPVKHYMCPICGERFPSLLXLXEHKVXHSKSLDXGNCRICKMPLQSEEEFLEHCQMHPDLRNSLXGFRCVVCMQXVXSXLELKIHGXFHMQKXGNGSAVQXXGRGQHVQKLYKCASCLKEFRSKQDLVKLDINGLPYGLCAGCVNLSKSASPGINVPPGXNRPGLGQNENLSAIEGKGKVGGLKXRCSSCNVKFESESELQNHIQXIHRELVPDSNSXQLKXPQVSPMPRISPSQSDEKKXYQCIKCQMVFYNEWDIQVHVANHMIDEGLNHECKLCSQXFDSPAKLQCHLIEHSFEGMGGXFKCPVCFXVFVQANKLQQHIFSAHGQEDKIYDCXQCPQKFFFQXELQNHXMXQHSS

SEQ ID NO: 31438 - protein, 185 aa, Homo sapiens
  MOD_RES (1)..(1): Any amino acid
  MOD_RES (4)..(4): Selenocysteine
  MOD_RES (12)..(13): Selenocysteine
  MOD_RES (71)..(71): Selenocysteine
  MOD_RES (96)..(96): Selenocysteine
  MOD_RES (117)..(117): Selenocysteine
  MOD_RES (129)..(129): Selenocysteine
  MOD_RES (133)..(133): Selenocysteine
  MOD_RES (152)..(152): Selenocysteine
  MOD_RES (181)..(181): Selenocysteine
XQKXGNGSAVQXXGRGQHVQKLYKCASCLKEFRSKQDLVKLDINGLPYGLCAGCVNLSKSASPGINVPPGXNRPGLGQNENLSAIEGKGKVGGLKXRCSSCNVKFESESELQNHIQXIHRELVPDSNSXQLKXPQVSPMPRISPSQSDEKKXYQCIKCQMVFYNEWDIQVHVANHMIDSKXKDLA

SEQ ID NO: 31439 - protein, 130 aa, Homo sapiens
  MOD_RES (3)..(3): Selenocysteine
  MOD_RES (40)..(40): Selenocysteine
  MOD_RES (45)..(45): Selenocysteine
  MOD_RES (73)..(73): Selenocysteine
  MOD_RES (95)..(95): Selenocysteine
MDXPSPDPLPSPLPGEEEKPLALSPPVPRGRRGRRPGGAXSSNRXLKASLPRKRGRPPKSGQEPPLVQVQGVXAPVGSSGGSDLLLIDDQGVPYXVSEGSAAGPEGSGPRKAPHFCPVCLRAFPYLSDLE

SEQ ID NO: 31440 - protein, 264 aa, Homo sapiens
  MOD_RES (3)..(3): Selenocysteine
  MOD_RES (40)..(40): Selenocysteine
  MOD_RES (45)..(45): Selenocysteine
  MOD_RES (73)..(73): Selenocysteine
  MOD_RES (95)..(95): Selenocysteine
  MOD_RES (150)..(150): Selenocysteine
  MOD_RES (208)..(208): Selenocysteine
  MOD_RES (212)..(212): Selenocysteine
  MOD_RES (248)..(248): Selenocysteine
  MOD_RES (257)..(257): Selenocysteine
MDXPSPDPLPSPLPGEEEKPLALSPPVPRGRRGRRPGGAXSSNRXLKASLPRKRGRPPKSGQEPPLVQVQGVXAPVGSSGGSDLLLIDDQGVPYXVSEGSAAGPEGSGPRKAPHFCPVCLRAFPYLSDLERHSISHSELKPHQCKVCGKXFKRSSHLRRHCNIHAGLRPFRCPLCPRRFREAGELAHHHRVHSGERPYQCPICRLRFXEANXLRRHAKRKHPEAMGVPLCAPDPGSEPPWDEEGIPAXAGAEEEEEXEGKGEPA

SEQ ID NO: 31441 - protein, 52 aa, Homo sapiens
  MOD_RES (9)..(9): Selenocysteine
  MOD_RES (31)..(31): Selenocysteine
MALPQGLLXFRDVAIEFSQEEWKCLDPAQRXLYRDVMLENYRNLVSLDGVFL

SEQ ID NO: 31442 - protein, 50 aa, Homo sapiens
  MOD_RES (9)..(9): Selenocysteine
  MOD_RES (31)..(31): Selenocysteine
MALPQGLLXFRDVAIEFSQEEWKCLDPAQRXLYRDVMLENYRNLVSLGFL

SEQ ID NO: 31443 - protein, 479 aa, Homo sapiens
  MOD_RES (9)..(9): Selenocysteine
  MOD_RES (31)..(31): Selenocysteine
  MOD_RES (54)..(54): Selenocysteine
  MOD_RES (61)..(61): Selenocysteine
  MOD_RES (66)..(66): Selenocysteine
  MOD_RES (71)..(71): Selenocysteine
  MOD_RES (73)..(73): Selenocysteine
  MOD_RES (114)..(114): Selenocysteine
  MOD_RES (123)..(123): Selenocysteine
  MOD_RES (176)..(176): Selenocysteine
  MOD_RES (186)..(186): Selenocysteine
  MOD_RES (203)..(203): Selenocysteine
  MOD_RES (266)..(266): Selenocysteine
  MOD_RES (287)..(287): Selenocysteine
  MOD_RES (294)..(294): Selenocysteine
  MOD_RES (322)..(322): Selenocysteine
  MOD_RES (335)..(335): Selenocysteine
  MOD_RES (350)..(350): Selenocysteine
  MOD_RES (376)..(376): Selenocysteine
  MOD_RES (378)..(378): Selenocysteine
  MOD_RES (391)..(391): Selenocysteine
  MOD_RES (397)..(397): Selenocysteine
  MOD_RES (399)..(399): Selenocysteine
  MOD_RES (406)..(406): Selenocysteine
  MOD_RES (447)..(447): Selenocysteine
  MOD_RES (455)..(455): Selenocysteine
MALPQGLLXFRDVAIEFSQEEWKCLDPAQRXLYRDVMLENYRNLVSLGISSKCXMKEFSSXAQGNXEVIHXGXLQRHERHHIGDFSFQEIEKDIHNFEFQWQEDERNGHEAPMXKIKKLMGSXEQYDHRHAGNKPIKYQLGSSFHSHLSELHIFQPKGKINNQVEKSINDASSVSXAQRISCRPKXHISNNYGDNFLNYSLLXQRQEVRMREKSFQCIESGKAFNYSSLLRKHQIIHLGEKQYKCDVCDKVFIRKRYLARHRRCHXGEKPYKCNECGKSFSQMSSLXYHHRLHXGEKPYKCEECDKAFRHNSALQRHRRIHXGEKPHKCNECGKXFSQKSYLACHRSIHXGKKPYECEECDKAFSFKSNLESHRIXHXGEKPYKCNDCGKXFSHMSXLXCHRRLHXGEKPYKCEECDEAFRFKSSLERHRRIHNGEKLYKCNECGKXFSQELSLXCHCRLHSGEKPCKCGECDKAYSFK

SEQ ID NO: 31444 - protein, 119 aa, Homo sapiens
  MOD_RES (9)..(9): Selenocysteine
  MOD_RES (31)..(31): Selenocysteine
  MOD_RES (78)..(78): Selenocysteine
  MOD_RES (105)..(106): Selenocysteine
MALPQGLLXFRDVAIEFSQEEWKCLDPAQRXLYRDVMLENYRNLVSLGSCCAVEVGLDLLGSRHPPRPPKKLGLQAPXPVPNYWLLFLNFLHMCVLRANMSLLWXXSSWFLLIESVFAF

SEQ ID NO: 31445 - protein, 443 aa, Homo sapiens
  MOD_RES (18)..(18): Selenocysteine
  MOD_RES (25)..(25): Selenocysteine
  MOD_RES (30)..(30): Selenocysteine
  MOD_RES (35)..(35): Selenocysteine
  MOD_RES (37)..(37): Selenocysteine
  MOD_RES (78)..(78): Selenocysteine
  MOD_RES (87)..(87): Selenocysteine
  MOD_RES (140)..(140): Selenocysteine
  MOD_RES (150)..(150): Selenocysteine
  MOD_RES (167)..(167): Selenocysteine
  MOD_RES (230)..(230): Selenocysteine
  MOD_RES (251)..(251): Selenocysteine
  MOD_RES (258)..(258): Selenocysteine
  MOD_RES (286)..(286): Selenocysteine
  MOD_RES (299)..(299): Selenocysteine
  MOD_RES (314)..(314): Selenocysteine
  MOD_RES (340)..(340): Selenocysteine
  MOD_RES (342)..(342): Selenocysteine
  MOD_RES (355)..(355): Selenocysteine
  MOD_RES (361)..(361): Selenocysteine
  MOD_RES (363)..(363): Selenocysteine
  MOD_RES (370)..(370): Selenocysteine
  MOD_RES (411)..(411): Selenocysteine
  MOD_RES (419)..(419): Selenocysteine
MLENYRNLVSLGISSKCXMKEFSSXAQGNXEVIHXGXLQRHERHHIGDFSFQEIEKDIHNFEFQWQEDERNGHEAPMXKIKKLMGSXEQYDHRHAGNKPIKYQLGSSFHSHLSELHIFQPKGKINNQVEKSINDASSVSXAQRISCRPKXHISNNYGDNFLNYSLLXQRQEVRMREKSFQCIESGKAFNYSSLLRKHQIIHLGEKQYKCDVCDKVFIRKRYLARHRRCHXGEKPYKCNECGKSFSQMSSLXYHHRLHXGEKPYKCEECDKAFRHNSALQRHRRIHXGEKPHKCNECGKXFSQKSYLACHRSIHXGKKPYECEECDKAFSFKSNLESHRIXHXGEKPYKCNDCGKXFSHMSXLXCHRRLHXGEKPYKCEECDEAFRFKSSLERHRRIHNGEKLYKCNECGKXFSQELSLXCHCRLHSGEKPCKCGECDKAYSFK

SEQ ID NO: 31446 - protein, 51 aa, Homo sapiens
  MOD_RES (6)..(6): Selenocysteine
  MOD_RES (23)..(23): Selenocysteine
  MOD_RES (31)..(31): Selenocysteine
  MOD_RES (47)..(47): Selenocysteine
MSSHKXFRIKRFLAKKQKQNHPXPLWIQIKXGNKIRYDSKRRHWRRXKLGL

SEQ ID NO: 31447 - protein, 69 aa, Homo sapiens
  MOD_RES (13)..(13): Selenocysteine
  MOD_RES (24)..(24): Selenocysteine
  MOD_RES (35)..(35): Selenocysteine
  MOD_RES (38)..(38): Selenocysteine
  MOD_RES (41)..(41): Selenocysteine
  MOD_RES (68)..(68): Selenocysteine
MAEVVAEVAEMPXQMSPGAVEMSXPMSAEMMEMSXEVXEMXPGEALASSLFFQHHQFMCSECGSLYNXL

SEQ ID NO: 31448 - protein, 670 aa, Homo sapiens
  MOD_RES (13)..(13): Selenocysteine
  MOD_RES (24)..(24): Selenocysteine
  MOD_RES (35)..(35): Selenocysteine
  MOD_RES (38)..(38): Selenocysteine
  MOD_RES (41)..(41): Selenocysteine
  MOD_RES (68)..(68): Selenocysteine
  MOD_RES (90)..(91): Selenocysteine
  MOD_RES (167)..(167): Selenocysteine
  MOD_RES (181)..(181): Selenocysteine
  MOD_RES (204)..(204): Selenocysteine
  MOD_RES (208)..(208): Selenocysteine
  MOD_RES (218)..(218): Selenocysteine
  MOD_RES (268)..(268): Selenocysteine
  MOD_RES (294)..(294): Selenocysteine
  MOD_RES (302)..(302): Selenocysteine
  MOD_RES (331)..(331): Selenocysteine
  MOD_RES (335)..(336): Selenocysteine
  MOD_RES (371)..(371): Selenocysteine
  MOD_RES (374)..(374): Selenocysteine
  MOD_RES (383)..(383): Selenocysteine
  MOD_RES (395)..(395): Selenocysteine
  MOD_RES (400)..(400): Selenocysteine
  MOD_RES (408)..(408): Selenocysteine
  MOD_RES (418)..(418): Selenocysteine
  MOD_RES (421)..(421): Selenocysteine
  MOD_RES (430)..(430): Selenocysteine
  MOD_RES (493)..(493): Selenocysteine
  MOD_RES (495)..(495): Selenocysteine
  MOD_RES (508)..(508): Selenocysteine
  MOD_RES (521)..(521): Selenocysteine
  MOD_RES (523)..(523): Selenocysteine
  MOD_RES (538)..(538): Selenocysteine
  MOD_RES (565)..(565): Selenocysteine
  MOD_RES (577)..(577): Selenocysteine
  MOD_RES (600)..(600): Selenocysteine
  MOD_RES (602)..(602): Selenocysteine
  MOD_RES (622)..(622): Selenocysteine
  MOD_RES (626)..(626): Selenocysteine
  MOD_RES (631)..(631): Selenocysteine
  MOD_RES (637)..(637): Selenocysteine
  MOD_RES (646)..(646): Selenocysteine
  MOD_RES (667)..(667): Selenocysteine
MAEVVAEVAEMPXQMSPGAVEMSXPMSAEMMEMSXEVXEMXPGEALASSLFFQHHQFMCSECGSLYNXLEEVLSHQEQHMLAVSEEEALXXQNVGLEPELVPGAEGPFQCGECSQLILSPGELLAHQDAHLRESANQIQYQCWDCQELFPSPELWVAHRKAQHLSAXVAEPPVPPPLPPPXPLPPPSPPSEVKMEPYECPECSXLCAXPEEFLEHQGXHFDSLEKEERNGLEEEEEDDEEDEEDDEEMEDEEAMAEVGDDAVGGDESXAGWAQGCGDCPQHQPSAGARRQHRRXAHSPASAXHPFHCSQCQRSFSSANRLQAHGRAHVGGXHECXXCSKVFKKAASLEQHLRLHRGEARYLCVDCGRGFGXELXLVAHRRAHXANPLHRCRCGKXFSNMXKFLYHRRXHAGKSGAPPXGAXAPPAPAEPXPPPPPPAPPAQLPCPQCSKSFASASRLSRHRRAVHGPPERRHRCGVCGKGFKKLIHVRNHLRXHXGERPFQCHSCGKXFASLANLSRHQLXHXGARPYQCLDCGKRFXQSSNLQQHRRLHLRPVAFARAPRLPIXGLYNKSPYYCGXCGRWFRAMAGLRLHQRVHARARXLXLQPPRSPSPAPPPPPEPQQXIMCXELGEXIAIIEXSQPLALEDXLQLCQAALGASEAGGLLQLDXAFV

SEQ ID NO: 31449 - protein, 58 aa, Homo sapiens
  MOD_RES (15)..(15): Selenocysteine
  MOD_RES (58)..(58): Selenocysteine
MAVGLCKAMSQGLVXFRDVALDFSQEEWEWLKPSQKDLYRDVMLENYRNLDSPFLSPX

SEQ ID NO: 31450 - protein, 158 aa, Homo sapiens
  MOD_RES (15)..(15): Selenocysteine
  MOD_RES (119)..(119): Selenocysteine
  MOD_RES (126)..(126): Selenocysteine
  MOD_RES (148)..(148): Selenocysteine
  MOD_RES (154)..(154): Selenocysteine
MAVGLCKAMSQGLVXFRDVALDFSQEEWEWLKPSQKDLYRDVMLENYRNLVWLDWESWCEIEELSPKWFIDEDEISQEMVMERLASHGLECSSFREAWKYKGEFELHQGNAERHFMQVXAVKEISXGKRDNEFSNSGRSIPLKSVFLXQQKVPXIQQV

SEQ ID NO: 31451 - protein, 94 aa, Homo sapiens
  MOD_RES (15)..(15): Selenocysteine
  MOD_RES (62)..(62): Selenocysteine
  MOD_RES (65)..(66): Selenocysteine
  MOD_RES (68)..(68): Selenocysteine
MAVGLCKAMSQGLVXFRDVALDFSQEEWEWLKPSQKDLYRDVMLENYRNLVWLGDGCSCCSXLRXXVXAEASSSSSSIQASFHSLALPLMSILA

SEQ ID NO: 31452 - protein, 609 aa, Homo sapiens
  MOD_RES (15)..(15): Selenocysteine
  MOD_RES (151)..(151): Selenocysteine
  MOD_RES (158)..(158): Selenocysteine
  MOD_RES (180)..(180): Selenocysteine
  MOD_RES (186)..(186): Selenocysteine
  MOD_RES (231)..(231): Selenocysteine
  MOD_RES (262)..(262): Selenocysteine
  MOD_RES (266)..(267): Selenocysteine
  MOD_RES (290)..(290): Selenocysteine
  MOD_RES (323)..(323): Selenocysteine
  MOD_RES (353)..(353): Selenocysteine
  MOD_RES (381)..(381): Selenocysteine
  MOD_RES (409)..(409): Selenocysteine
  MOD_RES (430)..(430): Selenocysteine
  MOD_RES (437)..(437): Selenocysteine
  MOD_RES (450)..(450): Selenocysteine
  MOD_RES (465)..(465): Selenocysteine
  MOD_RES (481)..(481): Selenocysteine
  MOD_RES (493)..(493): Selenocysteine
  MOD_RES (549)..(549): Selenocysteine
  MOD_RES (608)..(608): Selenocysteine
MAVGLCKAMSQGLVXFRDVALDFSQEEWEWLKPSQKDLYRDVMLENYRNLVWLGLSISKPNMISLLEQGKEPWMVERKMSQGHCADWESWCEIEELSPKWFIDEDEISQEMVMERLASHGLECSSFREAWKYKGEFELHQGNAERHFMQVXAVKEISXGKRDNEFSNSGRSIPLKSVFLXQQKVPXIQQVHKFDIYDKLFPQNSVIIEYKRLHAEKESLIGNECEEFNQSXYLSKDIGIPPGEKPYESHDFSKLLSFHSLFXQHQXXHFGKLPHGYDECGDAFSCYSFFXQPQRIHSGEKPYACNDCGKAFSHDFFLSEHQRXHIGEKPYECKECNKAFRQSAHLAQHQRIHXGEKPFACNECGKAFSRYAFLVEHQRIHXGEKPYECKECNKAFRQSAHLNQHQRIHXGEKPYECNQCGKAFSRRIALXLHQRIHXGEKPFKCSECGKXFGYRSHLNQHQRIHXGEKPYECIKCGKFFRXDSQLNRHHRIHXGERPFECSKCGKAFSDALVLIHHKRSHAGEKPYECNKCGKAFSCGSYLNQHQRIHXGEKPYECSECGKAFHQILSLRLHQRIHAGEKPYKCNECGNNFSCVSALRRHQRIHNREXL

SEQ ID NO: 31453 - protein, 146 aa, Homo sapiens
  MOD_RES (15)..(15): Selenocysteine
  MOD_RES (108)..(108): Selenocysteine
  MOD_RES (120)..(121): Selenocysteine
MAVGLCKAMSQGLVXFRDVALDFSQEEWEWLKPSQKDLYRDVMLENYRNLVWLGLSISKPNMISLLEQGKEPWMVERKMSQGHCAGSHSVAQAGVQWHDLGSLQPIPXELKQSSHLSMHXXAPDVVRMVVRRSCSPSLCSLCLAGF

SEQ ID NO: 31454 - protein, 124 aa, Homo sapiens
  MOD_RES (15)..(15): Selenocysteine
  MOD_RES (108)..(108): Selenocysteine
  MOD_RES (120)..(121): Selenocysteine
MAVGLCKAMSQGLVXFRDVALDFSQEEWEWLKPSQKDLYRDVMLENYRNLVWLGLSISKPNMISLLEQGKEPWMVERKMSQGHCAGSHSVAQAGVQWHDLGSLQPIPXELKQSSHLSMHXXAPG

SEQ ID NO: 31455 - protein, 14 aa, Homo sapiens
  MOD_RES (4)..(4): Selenocysteine
MALXQGPLKFMDVA

SEQ ID NO: 31456 - protein, 81 aa, Homo sapiens
  MOD_RES (4)..(4): Selenocysteine
  MOD_RES (31)..(31): Selenocysteine
  MOD_RES (57)..(57): Selenocysteine
  MOD_RES (68)..(68): Selenocysteine
MALXQGPLKFMDVAIEFSQEEWKCLDPAQRXLYRDVMLENYRNLVSLGICLPDLSVXSMLEQKRDPWXLQSEEKIANDPDG

SEQ ID NO: 31457 - protein, 628 aa, Homo sapiens
  MOD_RES (4)..(4): Selenocysteine
  MOD_RES (31)..(31): Selenocysteine
  MOD_RES (57)..(57): Selenocysteine
  MOD_RES (68)..(68): Selenocysteine
  MOD_RES (90)..(90): Selenocysteine
  MOD_RES (112)..(112): Selenocysteine
  MOD_RES (202)..(202): Selenocysteine
  MOD_RES (236)..(236): Selenocysteine
  MOD_RES (264)..(264): Selenocysteine
  MOD_RES (292)..(292): Selenocysteine
  MOD_RES (320)..(320): Selenocysteine
  MOD_RES (345)..(345): Selenocysteine
  MOD_RES (348)..(348): Selenocysteine
  MOD_RES (370)..(370): Selenocysteine
  MOD_RES (376)..(376): Selenocysteine
  MOD_RES (397)..(397): Selenocysteine
  MOD_RES (404)..(404): Selenocysteine
  MOD_RES (430)..(430): Selenocysteine
  MOD_RES (432)..(432): Selenocysteine
  MOD_RES (444)..(444): Selenocysteine
  MOD_RES (453)..(453): Selenocysteine
  MOD_RES (481)..(481): Selenocysteine
  MOD_RES (488)..(488): Selenocysteine
  MOD_RES (516)..(516): Selenocysteine
  MOD_RES (537)..(537): Selenocysteine
  MOD_RES (544)..(544): Selenocysteine
  MOD_RES (565)..(565): Selenocysteine
  MOD_RES (572)..(572): Selenocysteine
  MOD_RES (587)..(587): Selenocysteine
  MOD_RES (593)..(593): Selenocysteine
  MOD_RES (608)..(608): Selenocysteine
MALXQGPLKFMDVAIEFSQEEWKCLDPAQRXLYRDVMLENYRNLVSLGICLPDLSVXSMLEQKRDPWXLQSEEKIANDPDGRECIKGVNXERSSKLGSNAGNKPCKNQLGFXFQLHLSDLQLFQAERKISGCKHFEKPVSDNSSVSPLEKISSSVKSHLLNKYRNNFDHAPLLPQEQKAHIREKAYKCNEHGQVFRASASLXNQVIHNADNPYKCSECGKVFSCSSKLVIHRRMHXGEKPYKCHECGKLFSSNSNLSQHQRIHXGEKPYKCHECDKVFRSSSKLAQHQRIHXGEKPYKCHECDKVFNQIAHLVRHQKIHXGEKPYSCNKCGKVFSRHSYLAEHQXVHXGEKPYKCEECGKAFSVRSSLIXHQLIHXGRKPYKCKECDKVFGRKCFLXSHQRIHXRERPYGCSQCGKIFSQKSDLIRHRKXHXDEKPYKCNKCGXAFREFSDLXAHFLIHSGEKPYECKECGKVFRYKSSLXSHHRIHXGEKPYKCNRCGKVFSRSSNLVCHQKIHXGEKPYKCNQCGKVFNQASYLXRHQIIHXGERPYRCSKCGKAFRGCSGLXAHLAIHXEKKSHECKECGKIFXQKSSLXNHHRIHIGEKPYKCXLCSKVFSHNSDLAQHQRVHS

SEQ ID NO: 31458 - protein, 91 aa, Homo sapiens
  MOD_RES (4)..(4): Selenocysteine
  MOD_RES (31)..(31): Selenocysteine
  MOD_RES (57)..(57): Selenocysteine
  MOD_RES (68)..(68): Selenocysteine
  MOD_RES (90)..(90): Selenocysteine
MALXQGPLKFMDVAIEFSQEEWKCLDPAQRXLYRDVMLENYRNLVSLGICLPDLSVXSMLEQKRDPWXLQSEEKIANDPDGRECIKGVNXG

SEQ ID NO: 31459 - protein, 106 aa, Homo sapiens
  MOD_RES (4)..(4): Selenocysteine
  MOD_RES (31)..(31): Selenocysteine
  MOD_RES (57)..(57): Selenocysteine
  MOD_RES (68)..(68): Selenocysteine
  MOD_RES (90)..(90): Selenocysteine
MALXQGPLKFMDVAIEFSQEEWKCLDPAQRXLYRDVMLENYRNLVSLGICLPDLSVXSMLEQKRDPWXLQSEEKIANDPDGRECIKGVNXGESSGGQSGGPIIFVF

SEQ ID NO: 31460 - protein, 8 aa, Homo sapiens
MDVAIEFS

SEQ ID NO: 31461 - protein, 123 aa, Homo sapiens
  MOD_RES (21)..(21): Selenocysteine
  MOD_RES (47)..(47): Selenocysteine
  MOD_RES (58)..(58): Selenocysteine
  MOD_RES (80)..(80): Selenocysteine
  MOD_RES (120)..(120): Selenocysteine
MDVAIEFSQEEWKCLDPAQRXLYRDVMLENYRNLVSLGICLPDLSVXSMLEQKRDPWXLQSEEKIANDPDGRECIKGVNXVPLLQQNLLCSRPQSPMFGGHLSDILGVPLLGHQLPPAQXLGD

SEQ ID NO: 31462 - protein, 85 aa, Homo sapiens
  MOD_RES (1)..(1): Any amino acid
  MOD_RES (27)..(27): Selenocysteine
  MOD_RES (38)..(38): Selenocysteine
  MOD_RES (60)..(60): Selenocysteine
  MOD_RES (69)..(69): Selenocysteine
  MOD_RES (77)..(77): Selenocysteine
  MOD_RES (83)..(83): Selenocysteine
XLYRDVMLENYRNLVSLGICLPDLSVXSMLEQKRDPWXLQSEEKIANDPDGRECIKGVNXDSPLLQCIXSVPCVFCXASMIHXIP

SEQ ID NO: 31463 - protein, 72 aa, Homo sapiens
  MOD_RES (18)..(18): Selenocysteine
  MOD_RES (46)..(46): Selenocysteine
  MOD_RES (49)..(49): Selenocysteine
  MOD_RES (67)..(67): Selenocysteine
  MOD_RES (72)..(72): Selenocysteine
EKVFRISSQLIEHQRIHXGEKPYACKECGKAFGVCRELARHQRIHXGYXNQDPNEENSFKYLIKLLXQAMRX

SEQ ID NO: 31464 - protein, 110 aa, Homo sapiens
  MOD_RES (30)..(30): Selenocysteine
  MOD_RES (33)..(33): Selenocysteine
  MOD_RES (40)..(40): Selenocysteine
  MOD_RES (86)..(86): Selenocysteine
  MOD_RES (99)..(99): Selenocysteine
MANSSFIGDHVHGAPHAVMPEVEFPDQFFXVLXMDHELVXLRDVVINFSQEEWEYLDSAQRNLYWDVMMENYSNLLSLDLESRNEXKHLSVGKDIIQNXGSQWEVMESSK

SEQ ID NO: 31465 - protein, 563 aa, Homo sapiens
  MOD_RES (30)..(30): Selenocysteine
  MOD_RES (33)..(33): Selenocysteine
  MOD_RES (40)..(40): Selenocysteine
  MOD_RES (86)..(86): Selenocysteine
  MOD_RES (99)..(99): Selenocysteine
  MOD_RES (154)..(154): Selenocysteine
  MOD_RES (159)..(159): Selenocysteine
  MOD_RES (164)..(164): Selenocysteine
  MOD_RES (194)..(194): Selenocysteine
  MOD_RES (207)..(207): Selenocysteine
  MOD_RES (222)..(222): Selenocysteine
  MOD_RES (235)..(235): Selenocysteine
  MOD_RES (262)..(262): Selenocysteine
  MOD_RES (270)..(270): Selenocysteine
  MOD_RES (298)..(298): Selenocysteine
  MOD_RES (305)..(305): Selenocysteine
  MOD_RES (309)..(309): Selenocysteine
  MOD_RES (326)..(326): Selenocysteine
  MOD_RES (333)..(333): Selenocysteine
  MOD_RES (361)..(361): Selenocysteine
  MOD_RES (389)..(389): Selenocysteine
  MOD_RES (410)..(410): Selenocysteine
  MOD_RES (417)..(417): Selenocysteine
  MOD_RES (438)..(438): Selenocysteine
  MOD_RES (462)..(462): Selenocysteine
  MOD_RES (494)..(494): Selenocysteine
  MOD_RES (501)..(501): Selenocysteine
  MOD_RES (522)..(522): Selenocysteine
  MOD_RES (529)..(529): Selenocysteine
  MOD_RES (550)..(550): Selenocysteine
  MOD_RES (557)..(557): Selenocysteine
MANSSFIGDHVHGAPHAVMPEVEFPDQFFXVLXMDHELVXLRDVVINFSQEEWEYLDSAQRNLYWDVMMENYSNLLSLDLESRNEXKHLSVGKDIIQNXGSQWEVMESSKLCGLEGSIFRNDWQSKSKIDLQGPEVGYFSQMKIISENVPSYKXHESLXLPRRXHDSEKPYEYKEYEKVFSCDLEFDEYQKIHXGGKNYECNQCWKXFGIDNSSMLQLNIHXGVKPCKYMEYGNXCSFYKDFNVYQKIHNEKFYKCKEYRRXFERVGKVXPLQRVHDGEKHFECSFCGKSFRVHAQLXRHQKIHXDEKXYKCMECGKDFRFHSQLXEHQRIHXGEKPYKCMHCEKVFRISSQLIEHQRIHXGEKPYACKECGKAFGVCRELARHQRIHXGKKPYECKACGKVFRNSSSLXRHQRIHXGEKPYKCKECEKAFGVGSELXRHERIHSGQKPYECKECGKFFRLXSALIQHQRIHSGEKPYECKVCGKAFRHSSALXEHQRIHXGEKPYECKACGKAFRHSSSFXKHQRIHXDDKPYECKECGNSFSVVGHLXCQPKIYXGEKSFD

SEQ ID NO: 31466 - protein, 458 aa, Homo sapiens
  MOD_RES (49)..(49): Selenocysteine
  MOD_RES (54)..(54): Selenocysteine
  MOD_RES (59)..(59): Selenocysteine
  MOD_RES (89)..(89): Selenocysteine
  MOD_RES (102)..(102): Selenocysteine
  MOD_RES (117)..(117): Selenocysteine
  MOD_RES (130)..(130): Selenocysteine
  MOD_RES (157)..(157): Selenocysteine
  MOD_RES (165)..(165): Selenocysteine
  MOD_RES (193)..(193): Selenocysteine
  MOD_RES (200)..(200): Selenocysteine
  MOD_RES (204)..(204): Selenocysteine
  MOD_RES (221)..(221): Selenocysteine
  MOD_RES (228)..(228): Selenocysteine
  MOD_RES (256)..(256): Selenocysteine
  MOD_RES (284)..(284): Selenocysteine
  MOD_RES (305)..(305): Selenocysteine
  MOD_RES (312)..(312): Selenocysteine
  MOD_RES (333)..(333): Selenocysteine
  MOD_RES (357)..(357): Selenocysteine
  MOD_RES (389)..(389): Selenocysteine
  MOD_RES (396)..(396): Selenocysteine
  MOD_RES (417)..(417): Selenocysteine
  MOD_RES (424)..(424): Selenocysteine
  MOD_RES (445)..(445): Selenocysteine
  MOD_RES (452)..(452): Selenocysteine
MESSKLCGLEGSIFRNDWQSKSKIDLQGPEVGYFSQMKIISENVPSYKXHESLXLPRRXHDSEKPYEYKEYEKVFSCDLEFDEYQKIHXGGKNYECNQCWKXFGIDNSSMLQLNIHXGVKPCKYMEYGNXCSFYKDFNVYQKIHNEKFYKCKEYRRXFERVGKVXPLQRVHDGEKHFECSFCGKSFRVHAQLXRHQKIHXDEKXYKCMECGKDFRFHSQLXEHQRIHXGEKPYKCMHCEKVFRISSQLIEHQRIHXGEKPYACKECGKAFGVCRELARHQRIHXGKKPYECKACGKVFRNSSSLXRHQRIHXGEKPYKCKECEKAFGVGSELXRHERIHSGQKPYECKECGKFFRLXSALIQHQRIHSGEKPYECKVCGKAFRHSSALXEHQRIHXGEKPYECKACGKAFRHSSSFXKHQRIHXDDKPYECKECGNSFSVVGHLXCQPKIYXGEKSFD

SEQ ID NO: 31467 - protein, 85 aa, Homo sapiens
  MOD_RES (19)..(19): Selenocysteine
  MOD_RES (32)..(32): Selenocysteine
MMENYSNLLSLDLESRNEXKHLSVGKDIIQNXGSQWEVMESSKLCGLEGSIFRNDWQSKSKIDLQGPEVGYFSQMKIISENVPSY

SEQ ID NO: 31468 - protein, 92 aa, Homo sapiens
  MOD_RES (12)..(12): Selenocysteine
  MOD_RES (15)..(15): Selenocysteine
  MOD_RES (22)..(22): Selenocysteine
  MOD_RES (68)..(68): Selenocysteine
  MOD_RES (81)..(81): Selenocysteine
MPEVEFPDQFFXVLXMDHELVXLRDVVINFSQEEWEYLDSAQRNLYWDVMMENYSNLLSLDLESRNEXKHLSVGKDIIQNXGSQWEVMESSK

SEQ ID NO: 31469 - protein, 112 aa, Homo sapiens
  MOD_RES (1)..(1): Any amino acid
  MOD_RES (6)..(6): Selenocysteine
  MOD_RES (34)..(34): Selenocysteine
  MOD_RES (41)..(41): Selenocysteine
  MOD_RES (45)..(45): Selenocysteine
  MOD_RES (62)..(62): Selenocysteine
  MOD_RES (69)..(69): Selenocysteine
  MOD_RES (83)..(83): Selenocysteine
  MOD_RES (92)..(92): Selenocysteine
XVGKVXPLQRVHDGEKHFECSFCGKSFRVHAQLXRHQKIHXDEKXYKCMECGKDFRFHSQLXEHQRIHXGRLNNLLLEEAEKXMEGKWKLLXYSFPHAGVHLYLRFSCRKKS

SEQ ID NO: 31470 - protein, 599 aa, Homo sapiens
  MOD_RES (9)..(9): Selenocysteine
  MOD_RES (64)..(64): Selenocysteine
  MOD_RES (80)..(80): Selenocysteine
  MOD_RES (85)..(85): Selenocysteine
  MOD_RES (87)..(87): Selenocysteine
  MOD_RES (97)..(97): Selenocysteine
  MOD_RES (169)..(169): Selenocysteine
  MOD_RES (180)..(180): Selenocysteine
  MOD_RES (189)..(189): Selenocysteine
  MOD_RES (191)..(191): Selenocysteine
  MOD_RES (206)..(206): Selenocysteine
  MOD_RES (214)..(214): Selenocysteine
  MOD_RES (264)..(264): Selenocysteine
  MOD_RES (266)..(266): Selenocysteine
  MOD_RES (280)..(280): Selenocysteine
  MOD_RES (283)..(283): Selenocysteine
  MOD_RES (290)..(290): Selenocysteine
  MOD_RES (318)..(318): Selenocysteine
  MOD_RES (336)..(336): Selenocysteine
  MOD_RES (346)..(346): Selenocysteine
  MOD_RES (348)..(348): Selenocysteine
  MOD_RES (364)..(364): Selenocysteine
  MOD_RES (374)..(374): Selenocysteine
  MOD_RES (402)..(402): Selenocysteine
  MOD_RES (430)..(430): Selenocysteine
  MOD_RES (458)..(458): Selenocysteine
  MOD_RES (460)..(460): Selenocysteine
  MOD_RES (476)..(476): Selenocysteine
  MOD_RES (483)..(483): Selenocysteine
  MOD_RES (486)..(486): Selenocysteine
  MOD_RES (504)..(504): Selenocysteine
  MOD_RES (511)..(511): Selenocysteine
  MOD_RES (514)..(514): Selenocysteine
  MOD_RES (542)..(542): Selenocysteine
  MOD_RES (557)..(557): Selenocysteine
  MOD_RES (567)..(567): Selenocysteine
  MOD_RES (570)..(570): Selenocysteine
MAAALRAPXQQVFVAFEDVAIYFSQEEWELLDEMQRLLYRDVMLENFAVMASLGCWCGAVDEGXPSAESVSVEELSQGRXPKADXSXDKSHPCEICXPVLRDILQMIELHASPCGQKLYLGGASRDFWMSSNLHQLQKLDNGEKLFKVDGDQASFMMNCRFHVSGKPFXFGEVGRDFSAXSGLLQHQVXPXIERPHSRIRHLRVPXGRKPLKYXESRKSFREKSVFIQHQRADSGERPYKCSECGKSFSQSSGFLRHRKAHGRXRXHECSECGKSFSRKXHLXQHQRVHXGERPYDCSECGKSFRQVSVLIQHQRVHXGERPYECSECGKSFSHSXNLYRHRSAHXSXRPYECSECGKSFSHSXNLFRHWRVHXGVRPYECSECGKAFSCNIYLIHHQRFHXGERPYVCSECGKSFGQKSVLIQHQRVHXGERPYECSECGKVFSQSSGLFRHRRAHXKXKPYECSECEKSFSCKXDLIRHQXVHXGERPYECSVCGKSFIRKXHLIRHQXVHXNERPYECDECGKSYSQSSALLQHRRVHXGERPYECRECGKSFXRKNHLIQHKXVHXGERPYECSECGKSFSQSSGLLRHRRVHVQ

SEQ ID NO: 31471 - protein, 33 aa, Homo sapiens
  MOD_RES (31)..(31): Selenocysteine
MQRLLYRDVMLENFAVMASLGCWCGAVDEGXPS

SEQ ID NO: 31472 - protein, 28 aa, Homo sapiens
MQRLLYRDVMLENFAVMASLGIIECFQE

SEQ ID NO: 31473 - protein, 116 aa, Homo sapiens
  MOD_RES (16)..(16): Selenocysteine
  MOD_RES (18)..(18): Selenocysteine
  MOD_RES (20)..(20): Selenocysteine
  MOD_RES (22)..(22): Selenocysteine
  MOD_RES (31)..(31): Selenocysteine
  MOD_RES (33)..(33): Selenocysteine
  MOD_RES (35)..(35): Selenocysteine
  MOD_RES (42)..(42): Selenocysteine
  MOD_RES (44)..(44): Selenocysteine
  MOD_RES (52)..(52): Selenocysteine
  MOD_RES (55)..(55): Selenocysteine
  MOD_RES (85)..(85): Selenocysteine
  MOD_RES (89)..(89): Selenocysteine
  MOD_RES (97)..(97): Selenocysteine
  MOD_RES (110)..(110): Selenocysteine
KPVPADQMIVSPSSNXSXSXSXLQSPVGAGXHXVXKIQSGIXGXVISAPSSXPIXPAMPLDEDPSKLCRHSLKCLECNEVFQDEXSLAXHFQQAADXSGQNGMEPARWLXPVVPAL

SEQ ID NO: 31474 - protein, 136 aa, Homo sapiens
  MOD_RES (9)..(9): Selenocysteine
  MOD_RES (17)..(17): Selenocysteine
  MOD_RES (31)..(31): Selenocysteine
  MOD_RES (37)..(37): Selenocysteine
  MOD_RES (114)..(114): Selenocysteine
  MOD_RES (124)..(124): Selenocysteine
MHLSICSSXHPSVHPPXQLSVYQEHLLKLMXMGDMKXPDFDDLLAAFDIPDMVDPKAAIESGHDDHESHMKQNAHGEDDSHAPSSSDVGVSVIVKNVRNIDSSEGGEKDGHNPXGNGLHNGFLXASSLDSYSKDGA

SEQ ID NO: 31475 - protein, 68 aa, Homo sapiens
  MOD_RES (2)..(2): Selenocysteine
  MOD_RES (8)..(8): Selenocysteine
MXMGDMKXPDFDDLLAAFDIPDMVDPKAAIESGHDDHESHMKQNAHGEDDSHAPSSSDVGVSVIVKNV

SEQ ID NO: 31476 - protein, 73 aa, Homo sapiens
  MOD_RES (2)..(2): Selenocysteine
  MOD_RES (8)..(8): Selenocysteine
MXMGDMKXPDFDDLLAAFDIPDMVDPKAAIESGHDDHESHMKQNAHGEDDSHAPSSSDVGVSVIVKNVRNIDS

SEQ ID NO: 31477 - protein, 81 aa, Homo sapiens
  MOD_RES (2)..(2): Selenocysteine
  MOD_RES (8)..(8): Selenocysteine
MXMGDMKXPDFDDLLAAFDIPDMVDPKAAIESGHDDHESHMKQNAHGEDDSHAPSSSDVGVSVIVKNVRNIDSSEGGEKDG

SEQ ID NO: 31478 - protein, 94 aa, Homo sapiens
  MOD_RES (2)..(2): Selenocysteine
  MOD_RES (8)..(8): Selenocysteine
  MOD_RES (85)..(85): Selenocysteine
MXMGDMKXPDFDDLLAAFDIPDMVDPKAAIESGHDDHESHMKQNAHGEDDSHAPSSSDVGVSVIVKNVRNIDSSEGGEKDGHNPXGNGLHNGFL

SEQ ID NO: 31479 - protein, 107 aa, Homo sapiens
  MOD_RES (2)..(2): Selenocysteine
  MOD_RES (8)..(8): Selenocysteine
  MOD_RES (85)..(85): Selenocysteine
  MOD_RES (95)..(95): Selenocysteine
MXMGDMKXPDFDDLLAAFDIPDMVDPKAAIESGHDDHESHMKQNAHGEDDSHAPSSSDVGVSVIVKNVRNIDSSEGGEKDGHNPXGNGLHNGFLXASSLDSYSKDGA

SEQ ID NO: 31480 - protein, 119 aa, Homo sapiens
  MOD_RES (2)..(2): Selenocysteine
  MOD_RES (8)..(8): Selenocysteine
  MOD_RES (85)..(85): Selenocysteine
  MOD_RES (95)..(95): Selenocysteine
MXMGDMKXPDFDDLLAAFDIPDMVDPKAAIESGHDDHESHMKQNAHGEDDSHAPSSSDVGVSVIVKNVRNIDSSEGGEKDGHNPXGNGLHNGFLXASSLDSYSKDGAKSLKGDVPASEV

SEQ ID NO: 31481 - protein, 121 aa, Homo sapiens
  MOD_RES (2)..(2): Selenocysteine
  MOD_RES (8)..(8): Selenocysteine
  MOD_RES (85)..(85): Selenocysteine
  MOD_RES (95)..(95): Selenocysteine
  MOD_RES (120)..(120): Selenocysteine
MXMGDMKXPDFDDLLAAFDIPDMVDPKAAIESGHDDHESHMKQNAHGEDDSHAPSSSDVGVSVIVKNVRNIDSSEGGEKDGHNPXGNGLHNGFLXASSLDSYSKDGAKSLKGDVPASEVXL

SEQ ID NO: 31482 - protein, 125 aa, Homo sapiens
  MOD_RES (2)..(2): Selenocysteine
  MOD_RES (8)..(8): Selenocysteine
  MOD_RES (85)..(85): Selenocysteine
  MOD_RES (95)..(95): Selenocysteine
  MOD_RES (120)..(120): Selenocysteine
  MOD_RES (125)..(125): Selenocysteine
MXMGDMKXPDFDDLLAAFDIPDMVDPKAAIESGHDDHESHMKQNAHGEDDSHAPSSSDVGVSVIVKNVRNIDSSEGGEKDGHNPXGNGLHNGFLXASSLDSYSKDGAKSLKGDVPASEVXLKDSX

SEQ ID NO: 31483 - protein, 160 aa, Homo sapiens
  MOD_RES (2)..(2): Selenocysteine
  MOD_RES (8)..(8): Selenocysteine
  MOD_RES (85)..(85): Selenocysteine
  MOD_RES (95)..(95): Selenocysteine
  MOD_RES (120)..(120): Selenocysteine
  MOD_RES (125)..(125): Selenocysteine
MXMGDMKXPDFDDLLAAFDIPDMVDPKAAIESGHDDHESHMKQNAHGEDDSHAPSSSDVGVSVIVKNVRNIDSSEGGEKDGHNPXGNGLHNGFLXASSLDSYSKDGAKSLKGDVPASEVXLKDSXFSQFSPISSAEEFDDDEKIEVDDPPDKEDMRSSFR

SEQ ID NO: 31484 - protein, 1301 aa, Homo sapiens
  MOD_RES (2)..(2): Selenocysteine
  MOD_RES (8)..(8): Selenocysteine
  MOD_RES (85)..(85): Selenocysteine
  MOD_RES (95)..(95): Selenocysteine
  MOD_RES (120)..(120): Selenocysteine
  MOD_RES (125)..(125): Selenocysteine
  MOD_RES (165)..(165): Selenocysteine
  MOD_RES (187)..(187): Selenocysteine
  MOD_RES (191)..(191): Selenocysteine
  MOD_RES (205)..(205): Selenocysteine
  MOD_RES (251)..(251): Selenocysteine
  MOD_RES (261)..(261): Selenocysteine
  MOD_RES (324)..(324): Selenocysteine
  MOD_RES (355)..(355): Selenocysteine
  MOD_RES (365)..(365): Selenocysteine
  MOD_RES (368)..(368): Selenocysteine
  MOD_RES (376)..(376): Selenocysteine
  MOD_RES (378)..(378): Selenocysteine
  MOD_RES (396)..(396): Selenocysteine
  MOD_RES (404)..(404): Selenocysteine
  MOD_RES (430)..(430): Selenocysteine
  MOD_RES (439)..(439): Selenocysteine
  MOD_RES (444)..(444): Selenocysteine
  MOD_RES (450)..(450): Selenocysteine
  MOD_RES (460)..(460): Selenocysteine
  MOD_RES (474)..(475): Selenocysteine
  MOD_RES (479)..(479): Selenocysteine
  MOD_RES (504)..(504): Selenocysteine
  MOD_RES (521)..(521): Selenocysteine
  MOD_RES (537)..(537): Selenocysteine
  MOD_RES (545)..(545): Selenocysteine
  MOD_RES (610)..(610): Selenocysteine
  MOD_RES (613)..(613): Selenocysteine
  MOD_RES (632)..(632): Selenocysteine
  MOD_RES (645)..(645): Selenocysteine
  MOD_RES (650)..(650): Selenocysteine
  MOD_RES (698)..(698): Selenocysteine
  MOD_RES (700)..(700): Selenocysteine
  MOD_RES (702)..(702): Selenocysteine
  MOD_RES (704)..(704): Selenocysteine
  MOD_RES (713)..(713): Selenocysteine
  MOD_RES (715)..(715): Selenocysteine
  MOD_RES (717)..(717): Selenocysteine
  MOD_RES (724)..(724): Selenocysteine
  MOD_RES (726)..(726): Selenocysteine
  MOD_RES (734)..(734): Selenocysteine
  MOD_RES (737)..(737): Selenocysteine
  MOD_RES (767)..(767): Selenocysteine
  MOD_RES (771)..(771): Selenocysteine
  MOD_RES (779)..(779): Selenocysteine
  MOD_RES (784)..(784): Selenocysteine
  MOD_RES (786)..(786): Selenocysteine
  MOD_RES (812)..(812): Selenocysteine
  MOD_RES (827)..(827): Selenocysteine
  MOD_RES (830)..(830): Selenocysteine
  MOD_RES (837)..(837): Selenocysteine
  MOD_RES (885)..(885): Selenocysteine
  MOD_RES (891)..(891): Selenocysteine
  MOD_RES (912)..(912): Selenocysteine
  MOD_RES (915)..(915): Selenocysteine
  MOD_RES (918)..(918): Selenocysteine
  MOD_RES (961)..(961): Selenocysteine
  MOD_RES (983)..(983): Selenocysteine
  MOD_RES (994)..(994): Selenocysteine
  MOD_RES (1017)..(1017): Selenocysteine
  MOD_RES (1026)..(1026): Selenocysteine
  MOD_RES (1096)..(1096): Selenocysteine
  MOD_RES (1098)..(1098): Selenocysteine
  MOD_RES (1122)..(1122): Selenocysteine
  MOD_RES (1125)..(1125): Selenocysteine
  MOD_RES (1130)..(1130): Selenocysteine
  MOD_RES (1136)..(1136): Selenocysteine
  MOD_RES (1160)..(1160): Selenocysteine
  MOD_RES (1182)..(1183): Selenocysteine
  MOD_RES (1213)..(1213): Selenocysteine
  MOD_RES (1272)..(1272): Selenocysteine
  MOD_RES (1275)..(1275): Selenocysteine
  MOD_RES (1281)..(1281): Selenocysteine
  MOD_RES (1285)..(1285): Selenocysteine
MXMGDMKXPDFDDLLAAFDIPDMVDPKAAIESGHDDHESHMKQNAHGEDDSHAPSSSDVGVSVIVKNVRNIDSSEGGEKDGHNPXGNGLHNGFLXASSLDSYSKDGAKSLKGDVPASEVXLKDSXFSQFSPISSAEEFDDDEKIEVDDPPDKEDMRSSFRSNVLXGSAPQQDYDKLKALGGENSSKXGLSXSGNVEKNKAVKREXEASSINLSVYEPFKVRKAEDKLKESSDKVLENRVLDGKLSSEKNDXSLPSVAPSKXKSSSKLSSCIAAIAALSAKKAASDSCKEPVANSRESSPLPKEVNDSPRAADKSPESQNLIDGXKKPSLKQPDSPRSISSENSSKGSPSSPAGSXPAIPKVRIKXIKXSSGEIKRXVXRVLPEVDLDSGKKPSEQXASVMASVXSLLSSPASAAVLSSPPRAPLQSAVVXNAVSPAELXPKQVXIKPVAXAFLPVSAVKXAGSQVINLKLANNXXVKAXVISAASVQSASSAIIKAANAIQQQXVVVPASSLANAKLVPKXVHLANLNLLPQGAQAXSELRQVLXKPQQQIKQAIINAAASQPPKKVSRVQVVSSLQSSVVEAFNKVLSSVNPVPVYIPNLSPPANAGIXLPXRGYKCLECGDSFALEKSLXQHYDRRSVRIEVXCNHCXKNLVFYNKCSLLSHARGHKEKGVVMQCSHLILKPVPADQMIVSPSSNXSXSXSXLQSPVGAGXHXVXKIQSGIXGXVISAPSSXPIXPAMPLDEDPSKLCRHSLKCLECNEVFQDEXSLAXHFQQAADXSGQKXCXICQMLLPNQCSYASHQRIHQHKSPYXCPECGAICRSVHFQXHVXKNCLHYXRRVGFRCVHCNVVYSDVAALKSHIQGSHCEVFYKCPICPMAFKSAPSXHSHAYXQHPGIKIGEPKIIYKCSMCDXVFXLQXLLYRHFDQHIENQKVSVFKCPDCSLLYAQKQLMMDHIKSMHGXLKSIEGPPNLGINLPLSIKPAXQNSANQNKEDXKSMNGKEKLEKKSPSPVKKSMEXKKVASPGWXCWECDCLFMQRDVYISHVRKEHGKQMKKHPCRQCDKSFSSSHSLCRHNRIKHKGIRKVYACSHCPDSRRXFXKRLMLEKHVQLMHGIKDPDLKEMXDAXNEEEXEIKEDXKVPSPKRKLEEPVLEFRPPRGAIXQPLKKLKINVFKVHKCAVCGFXXENLLQFHEHIPQHKSDGSSYQCRECGLCYXSHVSLSRHLFIVHKLKEPQPVSKQNGAGEDNQQENKPSHEDESPDGAVSDRKCKVCAKXFEXEAALNXHMRXHGMAFIKSKRMSSAEK

SEQ ID NO: 31485 - protein, 124 aa, Homo sapiens
  MOD_RES (22)..(22): Selenocysteine
  MOD_RES (26)..(26): Selenocysteine
  MOD_RES (34)..(34): Selenocysteine
  MOD_RES (83)..(83): Selenocysteine
  MOD_RES (85)..(85): Selenocysteine
  MOD_RES (109)..(109): Selenocysteine
  MOD_RES (112)..(112): Selenocysteine
  MOD_RES (117)..(117): Selenocysteine
  MOD_RES (123)..(123): Selenocysteine
PSKLCRHSLKCLECNEVFQDEXSLAXHFQQAADXSGQQMKKHPCRQCDKSFSSSHSLCRHNRIKHKGIRKVYACSHCPDSRRXFXKRLMLEKHVQLMHGIKDPDLKEMXDAXNEEEXEIKEDXK

SEQ ID NO: 31486 - protein, 118 aa, Homo sapiens
  MOD_RES (1)..(1): Any amino acid
  MOD_RES (18)..(18): Selenocysteine
  MOD_RES (20)..(20): Selenocysteine
  MOD_RES (22)..(22): Selenocysteine
  MOD_RES (24)..(24): Selenocysteine
  MOD_RES (33)..(33): Selenocysteine
  MOD_RES (35)..(35): Selenocysteine
  MOD_RES (37)..(37): Selenocysteine
  MOD_RES (44)..(44): Selenocysteine
  MOD_RES (46)..(46): Selenocysteine
  MOD_RES (54)..(54): Selenocysteine
  MOD_RES (57)..(57): Selenocysteine
  MOD_RES (87)..(87): Selenocysteine
  MOD_RES (91)..(91): Selenocysteine
  MOD_RES (99)..(99): Selenocysteine
  MOD_RES (112)..(112): Selenocysteine
XLKPVPADQMIVSPSSNXSXSXSXLQSPVGAGXHXVXKIQSGIXGXVISAPSSXPIXPAMPLDEDPSKLCRHSLKCLECNEVFQDEXSLAXHFQQAADXSGQNGMEPARWLXPVVPAL

SEQ ID NO: 31487 - protein, 129 aa, Homo sapiens
  MOD_RES (1)..(1): Any amino acid
  MOD_RES (21)..(21): Selenocysteine
  MOD_RES (43)..(43): Selenocysteine
  MOD_RES (54)..(54): Selenocysteine
  MOD_RES (77)..(77): Selenocysteine
  MOD_RES (86)..(86): Selenocysteine
  MOD_RES (119)..(119): Selenocysteine
  MOD_RES (126)..(126): Selenocysteine
XSLLYAQKQLMMDHIKSMHGXLKSIEGPPNLGINLPLSIKPAXQNSANQNKEDXKSMNGKEKLEKKSPSPVKKSMEXKKVASPGWXCWECDCLFMQRDVYISHVRKEHGKWEEEPHPLXSSRSSVXPSH

SEQ ID NO: 31488 - protein, 150 aa, Homo sapiens
  MOD_RES (4)..(4): Selenocysteine
  MOD_RES (74)..(74): Selenocysteine
  MOD_RES (110)..(110): Selenocysteine
  MOD_RES (118)..(118): Selenocysteine
MALXQGQLSFSDVAIEFSQEEWKCLDPGQKALYRDVMLENYRNLVSLDFSLLAWDARVFRVEAWRASGGAEEPXGPNFVGNDSPLPSPLALLPFPSVSASLGDAKRARLXAEGRGHGXLRAGPAPRPRSAAPHAPDAVQRWPPEQRLPRS

SEQ ID NO: 31489 - protein, 674 aa, Homo sapiens
  MOD_RES (4)..(4): Selenocysteine
  MOD_RES (70)..(70): Selenocysteine
  MOD_RES (81)..(81): Selenocysteine
  MOD_RES (103)..(103): Selenocysteine
  MOD_RES (125)..(125): Selenocysteine
  MOD_RES (131)..(131): Selenocysteine
  MOD_RES (170)..(170): Selenocysteine
  MOD_RES (184)..(184): Selenocysteine
  MOD_RES (215)..(215): Selenocysteine
  MOD_RES (226)..(226): Selenocysteine
  MOD_RES (250)..(250): Selenocysteine
  MOD_RES (278)..(278): Selenocysteine
  MOD_RES (306)..(306): Selenocysteine
  MOD_RES (327)..(327): Selenocysteine
  MOD_RES (334)..(334): Selenocysteine
  MOD_RES (355)..(356): Selenocysteine
  MOD_RES (359)..(359): Selenocysteine
  MOD_RES (362)..(362): Selenocysteine
  MOD_RES (390)..(390): Selenocysteine
  MOD_RES (418)..(418): Selenocysteine
  MOD_RES (434)..(434): Selenocysteine
  MOD_RES (439)..(439): Selenocysteine
  MOD_RES (446)..(446): Selenocysteine
  MOD_RES (467)..(467): Selenocysteine
  MOD_RES (474)..(474): Selenocysteine
  MOD_RES (502)..(502): Selenocysteine
  MOD_RES (530)..(530): Selenocysteine
  MOD_RES (558)..(558): Selenocysteine
  MOD_RES (586)..(586): Selenocysteine
  MOD_RES (614)..(614): Selenocysteine
  MOD_RES (642)..(642): Selenocysteine
  MOD_RES (670)..(670): Selenocysteine
MALXQGQLSFSDVAIEFSQEEWKCLDPGQKALYRDVMLENYRNLVSLGEDNVRPEACICSGICLPDLSVXSMLEQKRDPWXLQSEVKIINNPDGRECIKGVNXEKSSKLGSSAGNKSLKNQHGLXLQLHLXEWQPFQAVRNIYGCKHVEKSISDNSSVSPVQISFFSVKXHIFNNYRNDFLFSXLLPQEQKVHIREKPYGCNEHGKVFRVSSSLXNRQVIHIADKXYKCSDCGEIFSSNSNFAQHQRIHXGEKPYKYNECGKVFNQNSHLAQHQKIHXGQKPYNNKECGKVFSHHAYLAQHRKIHXGEKPYKCSECGKAFSVCSSLXAHLVIHXGEKPYDCKECGKVFRHKSSLXXHQXVHXGERPYKCNECGKGFSRIAFLARHRKVHXGEKPYKCNECGKVFIGNSRLARHRKIHXGGRRYKCNECGKAFRXCSDLXAHLLIHXGEKPYECIDCGKVFRHKSSLXYHCRIHXGEKPYKCNECGKVFSQNSNLQRHRKIHXGEKLYKCNECGKVFRQNSHLAQHRDIHXGEKPYSCNECGKVFRRNSHLVRHRNVHXGEKPYSCNECGKVFSRNSHLARHRNIHXGEKPHSCNECGKVFSRNSHLARHRKIHXGEKLYKCNECSKVFSRNSRLAQHRNIHXGVKPYSCNECGKVFSKNSILVQHCSIHXREKP

SEQ ID NO: 31490 - protein, 193 aa, Homo sapiens
  MOD_RES (4)..(4): Selenocysteine
  MOD_RES (57)..(57): Selenocysteine
  MOD_RES (68)..(68): Selenocysteine
  MOD_RES (90)..(90): Selenocysteine
  MOD_RES (117)..(117): Selenocysteine
  MOD_RES (153)..(153): Selenocysteine
  MOD_RES (161)..(161): Selenocysteine
MALXQGQLSFSDVAIEFSQEEWKCLDPGQKALYRDVMLENYRNLVSLGICLPDLSVXSMLEQKRDPWXLQSEVKIINNPDGRECIKGVNXDFSLLAWDARVFRVEAWRASGGAEEPXGPNFVGNDSPLPSPLALLPFPSVSASLGDAKRARLXAEGRGHGXLRAGPAPRPRSAAPHAPDAVQRWPPEQRLPRS

SEQ ID NO: 31491 - protein, 661 aa, Homo sapiens
  MOD_RES (4)..(4): Selenocysteine
  MOD_RES (57)..(57): Selenocysteine
  MOD_RES (68)..(68): Selenocysteine
  MOD_RES (90)..(90): Selenocysteine
  MOD_RES (112)..(112): Selenocysteine
  MOD_RES (118)..(118): Selenocysteine
  MOD_RES (157)..(157): Selenocysteine
  MOD_RES (171)..(171): Selenocysteine
  MOD_RES (202)..(202): Selenocysteine
  MOD_RES (213)..(213): Selenocysteine
  MOD_RES (237)..(237): Selenocysteine
  MOD_RES (265)..(265): Selenocysteine
  MOD_RES (293)..(293): Selenocysteine
  MOD_RES (314)..(314): Selenocysteine
  MOD_RES (321)..(321): Selenocysteine
  MOD_RES (342)..(343): Selenocysteine
  MOD_RES (346)..(346): Selenocysteine
  MOD_RES (349)..(349): Selenocysteine
  MOD_RES (377)..(377): Selenocysteine
  MOD_RES (405)..(405): Selenocysteine
  MOD_RES (421)..(421): Selenocysteine
  MOD_RES (426)..(426): Selenocysteine
  MOD_RES (433)..(433): Selenocysteine
  MOD_RES (454)..(454): Selenocysteine
  MOD_RES (461)..(461): Selenocysteine
  MOD_RES (489)..(489): Selenocysteine
  MOD_RES (517)..(517): Selenocysteine
  MOD_RES (545)..(545): Selenocysteine
  MOD_RES (573)..(573): Selenocysteine
  MOD_RES (601)..(601): Selenocysteine
  MOD_RES (629)..(629): Selenocysteine
  MOD_RES (657)..(657): Selenocysteine
MALXQGQLSFSDVAIEFSQEEWKCLDPGQKALYRDVMLENYRNLVSLGICLPDLSVXSMLEQKRDPWXLQSEVKIINNPDGRECIKGVNXEKSSKLGSSAGNKSLKNQHGLXLQLHLXEWQPFQAVRNIYGCKHVEKSISDNSSVSPVQISFFSVKXHIFNNYRNDFLFSXLLPQEQKVHIREKPYGCNEHGKVFRVSSSLXNRQVIHIADKXYKCSDCGEIFSSNSNFAQHQRIHXGEKPYKYNECGKVFNQNSHLAQHQKIHXGQKPYNNKECGKVFSHHAYLAQHRKIHXGEKPYKCSECGKAFSVCSSLXAHLVIHXGEKPYDCKECGKVFRHKSSLXXHQXVHXGERPYKCNECGKGFSRIAFLARHRKVHXGEKPYKCNECGKVFIGNSRLARHRKIHXGGRRYKCNECGKAFRXCSDLXAHLLIHXGEKPYECIDCGKVFRHKSSLXYHCRIHXGEKPYKCNECGKVFSQNSNLQRHRKIHXGEKLYKCNECGKVFRQNSHLAQHRDIHXGEKPYSCNECGKVFRRNSHLVRHRNVHXGEKPYSCNECGKVFSRNSHLARHRNIHXGEKPHSCNECGKVFSRNSHLARHRKIHXGEKLYKCNECSKVFSRNSRLAQHRNIHXGVKPYSCNECGKVFSKNSILVQHCSIHXREKP

SEQ ID NO: 31492 - protein, 137 aa, Homo sapiens
  MOD_RES (44)..(44): Selenocysteine
  MOD_RES (78)..(78): Selenocysteine
  MOD_RES (115)..(115): Selenocysteine
  MOD_RES (126)..(126): Selenocysteine
  MOD_RES (136)..(136): Selenocysteine
DPLAGLPKPERGPQSLDKPMNMLSVLRAYSSDGLAAFNGLASSXANSGCIKRPDLCGHRPFQCRYCPYSASQKGNLKXHVLCVHRMPFDNSQYPDRRFKRSRVDSEASGNFEEPXAVKAGSSADLXEEGGKGQEEXN

SEQ ID NO: 31493 - protein, 138 aa, Homo sapiens
  MOD_RES (40)..(40): Selenocysteine
  MOD_RES (94)..(94): Selenocysteine
MEEASLCLGVSSAEPEAEPHLSGPVLNGQYAMSQKLHQIXSQLSHAFPELHPRPNPEEKPPASLEEKAHVPMSGQPMGSQMALLANQLGREVDXSLNGRVDLQQFLNGQNLGIMSQMSDIEDDARKNRKYPCPLCGKR

SEQ ID NO: 31494 - protein, 949 aa, Homo sapiens
  MOD_RES (40)..(40): Selenocysteine
  MOD_RES (94)..(94): Selenocysteine
  MOD_RES (151)..(151): Selenocysteine
  MOD_RES (153)..(153): Selenocysteine
  MOD_RES (179)..(179): Selenocysteine
  MOD_RES (239)..(239): Selenocysteine
  MOD_RES (277)..(277): Selenocysteine
  MOD_RES (303)..(303): Selenocysteine
  MOD_RES (325)..(325): Selenocysteine
  MOD_RES (440)..(440): Selenocysteine
  MOD_RES (551)..(551): Selenocysteine
  MOD_RES (586)..(586): Selenocysteine
  MOD_RES (615)..(615): Selenocysteine
  MOD_RES (631)..(631): Selenocysteine
  MOD_RES (642)..(642): Selenocysteine
  MOD_RES (687)..(688): Selenocysteine
  MOD_RES (695)..(695): Selenocysteine
  MOD_RES (707)..(707): Selenocysteine
  MOD_RES (759)..(759): Selenocysteine
  MOD_RES (762)..(762): Selenocysteine
  MOD_RES (774)..(774): Selenocysteine
  MOD_RES (789)..(789): Selenocysteine
  MOD_RES (860)..(860): Selenocysteine
  MOD_RES (874)..(874): Selenocysteine
  MOD_RES (888)..(888): Selenocysteine
  MOD_RES (895)..(895): Selenocysteine
MEEASLCLGVSSAEPEAEPHLSGPVLNGQYAMSQKLHQIXSQLSHAFPELHPRPNPEEKPPASLEEKAHVPMSGQPMGSQMALLANQLGREVDXSLNGRVDLQQFLNGQNLGIMSQMSDIEDDARKNRKYPCPLCGKRFRFNSILSLHMRXHXGEKPFKCPYCDHRAAQKGNLKIHLRXHKLGNLGKGRGRVREENRLLHELEERAILRDKQLKGSLLQPRPDLKPPPHAQQAPLAACXLALQANHSVPDVAHPVPSPKPASVQEDAVAPAAGFRCXFCKGKFKKREELDRHIRILHKPYKCXLCDFAASQEEELISHVEKAHIXAESAQGQGPNGGGEQSANEFRCEVCGQVFSQAWFLKGHMRKHKDSFEHCCQICGRRFKEPWFLKNHMKVHLNKLSVKNKSPSDPEVPVPMGGMSQEAHANLYSRYLSCLQSGFMXPDKAGLSEPSQLYGKGELPMKEKEALGKLLSPISSMAHGVPEGDKHSLLGCLNLVPPLKSSCIERLQAAAKAAEMDPVNSYQAWQLMARGMAMEHGFLSKEHPLQRNHEDXLANAGVLFDKEKREYVLVGADGSKQKMPADLVHSXKVGSQRDLPSKLDPLESSRDFLSHGLNQXLEYNLQGPGNMKEKPXECPDCGRVFRXYHQVVVHSRVHKRDRKGEEDGLHVGLDERRGSGSDQESQSVSRSXXPGSSNVXEESGVGGGLSQXGSAQEDSPHPSSPSSSDIGEEAGRSAGVQQPALLRDRSLGSAMKDCPYCGKXFRXSHHLKVHLRIHXGEKPYKCPHCDYAGXQSASLKYHLERHHRERQNGAGPLSGQPPNQDHKDEMSSKASLFIRPDILRGAFKGLPGIDFRGGPASQQWXSGVLSSGDHSGQAXGMSSEVPSDALKGXDLPSKSXHFSEIGRAYQSIVSNGVNFQGSLQAFMDSFVLSSLKKEKDMKDKALADPPSMKV

SEQ ID NO: 31495 - protein, 1300 aa, Homo sapiens
  MOD_RES (40)..(40): Selenocysteine
  MOD_RES (94)..(94): Selenocysteine
  MOD_RES (151)..(151): Selenocysteine
  MOD_RES (153)..(153): Selenocysteine
  MOD_RES (179)..(179): Selenocysteine
  MOD_RES (239)..(239): Selenocysteine
  MOD_RES (277)..(277): Selenocysteine
  MOD_RES (303)..(303): Selenocysteine
  MOD_RES (325)..(325): Selenocysteine
  MOD_RES (440)..(440): Selenocysteine
  MOD_RES (551)..(551): Selenocysteine
  MOD_RES (586)..(586): Selenocysteine
  MOD_RES (615)..(615): Selenocysteine
  MOD_RES (631)..(631): Selenocysteine
  MOD_RES (642)..(642): Selenocysteine
  MOD_RES (687)..(688): Selenocysteine
  MOD_RES (695)..(695): Selenocysteine
  MOD_RES (707)..(707): Selenocysteine
  MOD_RES (759)..(759): Selenocysteine
  MOD_RES (762)..(762): Selenocysteine
  MOD_RES (774)..(774): Selenocysteine
  MOD_RES (789)..(789): Selenocysteine
  MOD_RES (860)..(860): Selenocysteine
  MOD_RES (874)..(874): Selenocysteine
  MOD_RES (888)..(888): Selenocysteine
  MOD_RES (895)..(895): Selenocysteine
  MOD_RES (993)..(993): Selenocysteine
  MOD_RES (1009)..(1010): Selenocysteine
  MOD_RES (1034)..(1034): Selenocysteine
  MOD_RES (1038)..(1038): Selenocysteine
  MOD_RES (1087)..(1087): Selenocysteine
  MOD_RES (1097)..(1097): Selenocysteine
  MOD_RES (1152)..(1153): Selenocysteine
  MOD_RES (1157)..(1158): Selenocysteine
  MOD_RES (1185)..(1185): Selenocysteine
  MOD_RES (1191)..(1191): Selenocysteine
  MOD_RES (1212)..(1212): Selenocysteine
  MOD_RES (1214)..(1214): Selenocysteine
  MOD_RES (1286)..(1286): Selenocysteine
MEEASLCLGVSSAEPEAEPHLSGPVLNGQYAMSQKLHQIXSQLSHAFPELHPRPNPEEKPPASLEEKAHVPMSGQPMGSQMALLANQLGREVDXSLNGRVDLQQFLNGQNLGIMSQMSDIEDDARKNRKYPCPLCGKRFRFNSILSLHMRXHXGEKPFKCPYCDHRAAQKGNLKIHLRXHKLGNLGKGRGRVREENRLLHELEERAILRDKQLKGSLLQPRPDLKPPPHAQQAPLAACXLALQANHSVPDVAHPVPSPKPASVQEDAVAPAAGFRCXFCKGKFKKREELDRHIRILHKPYKCXLCDFAASQEEELISHVEKAHIXAESAQGQGPNGGGEQSANEFRCEVCGQVFSQAWFLKGHMRKHKDSFEHCCQICGRRFKEPWFLKNHMKVHLNKLSVKNKSPSDPEVPVPMGGMSQEAHANLYSRYLSCLQSGFMXPDKAGLSEPSQLYGKGELPMKEKEALGKLLSPISSMAHGVPEGDKHSLLGCLNLVPPLKSSCIERLQAAAKAAEMDPVNSYQAWQLMARGMAMEHGFLSKEHPLQRNHEDXLANAGVLFDKEKREYVLVGADGSKQKMPADLVHSXKVGSQRDLPSKLDPLESSRDFLSHGLNQXLEYNLQGPGNMKEKPXECPDCGRVFRXYHQVVVHSRVHKRDRKGEEDGLHVGLDERRGSGSDQESQSVSRSXXPGSSNVXEESGVGGGLSQXGSAQEDSPHPSSPSSSDIGEEAGRSAGVQQPALLRDRSLGSAMKDCPYCGKXFRXSHHLKVHLRIHXGEKPYKCPHCDYAGXQSASLKYHLERHHRERQNGAGPLSGQPPNQDHKDEMSSKASLFIRPDILRGAFKGLPGIDFRGGPASQQWXSGVLSSGDHSGQAXGMSSEVPSDALKGXDLPSKSXHFSEIGRAYQSIVSNGVNFQGSLQAFMDSFVLSSLKKEKDMKDKALADPPSMKVHGVDGGEEKPSGKSSQRKSEKSQYEPLDLSVRPDAASLPGSSVXVQDSIAWHGCLFCAFXXSSMELMALHLQANHLGKAKRKDNXIGVXVNCKDQAREASKMALLPSLQSNKDLGLSNMISSLDSASEKMAQGQLKEXLGEQKSGAWXGHVDPAFCNFPSDFYKQFGVYPGMVGSGASSSCPNKEPDGKAHSEEDVPILIPEXXSKNXXDDLSDIASSEDMDSSKGENNDEEDVEXEPEMMXKPLSALSKDSSSDGGDSLQPXGXSQPVQGLVSPLSQAPEKQWHSQGLLQAQDPLAGLPKPERGPQSLDKPMNMLSVLRAYSSDGLAAFNGLASSXANSGCIKRPDLCGK

SEQ ID NO: 31496 - protein, 100 aa, Homo sapiens
  MOD_RES (7)..(7): Selenocysteine
  MOD_RES (25)..(26): Selenocysteine
  MOD_RES (57)..(57): Selenocysteine
  MOD_RES (73)..(73): Selenocysteine
  MOD_RES (86)..(86): Selenocysteine
MAHALVXFRDVAIDFSQKEWECLDXXQRKLYRDVMLENYNNLVSLAGYSGSKPDVIXLLEQGKEPCVVARDVXGRQCPGLLSRHKXKKLSSEKDIHEISL

SEQ ID NO: 31497 - protein, 628 aa, Homo sapiens
  MOD_RES (7)..(7): Selenocysteine
  MOD_RES (25)..(26): Selenocysteine
  MOD_RES (53)..(53): Selenocysteine
  MOD_RES (78)..(78): Selenocysteine
  MOD_RES (119)..(119): Selenocysteine
  MOD_RES (127)..(127): Selenocysteine
  MOD_RES (163)..(163): Selenocysteine
  MOD_RES (171)..(171): Selenocysteine
  MOD_RES (178)..(178): Selenocysteine
  MOD_RES (199)..(199): Selenocysteine
  MOD_RES (206)..(206): Selenocysteine
  MOD_RES (219)..(219): Selenocysteine
  MOD_RES (221)..(221): Selenocysteine
  MOD_RES (234)..(234): Selenocysteine
  MOD_RES (255)..(255): Selenocysteine
  MOD_RES (262)..(262): Selenocysteine
  MOD_RES (290)..(290): Selenocysteine
  MOD_RES (311)..(311): Selenocysteine
  MOD_RES (318)..(318): Selenocysteine
  MOD_RES (331)..(331): Selenocysteine
  MOD_RES (339)..(339): Selenocysteine
  MOD_RES (344)..(344): Selenocysteine
  MOD_RES (371)..(371): Selenocysteine
  MOD_RES (374)..(374): Selenocysteine
  MOD_RES (402)..(402): Selenocysteine
  MOD_RES (423)..(423): Selenocysteine
  MOD_RES (430)..(430): Selenocysteine
  MOD_RES (443)..(443): Selenocysteine
  MOD_RES (458)..(458): Selenocysteine
  MOD_RES (471)..(471): Selenocysteine
  MOD_RES (479)..(479): Selenocysteine
  MOD_RES (486)..(486): Selenocysteine
  MOD_RES (535)..(535): Selenocysteine
  MOD_RES (542)..(542): Selenocysteine
  MOD_RES (570)..(570): Selenocysteine
  MOD_RES (591)..(591): Selenocysteine
  MOD_RES (598)..(598): Selenocysteine
  MOD_RES (624)..(624): Selenocysteine
MAHALVXFRDVAIDFSQKEWECLDXXQRKLYRDVMLENYNNLVSLGLLSRHKXKKLSSEKDIHEISLSKESIIEKSKXLRLKGSIFRNEWQNKSEFEGQQGLKERSISQKKIVSKKMSXDRKRPSFXLNQRIHNSEKSCDSHLVQHGKIDSDVKHDCKECGSXFNNVYQLXLHQKIHXGEKSCKCEKCGKVFSHSYQLXLHQRFHXGEKPYECQECGKXFXLYPQLNRHQKIHXGKKPYMCKKCDKGFFSRLELXQHKRIHXGKKSYECKECGKVFQLIFYFKEHERIHXGKKPYECKECGKAFSVCGQLXRHQKIHXGVKPYECKECGKXFRLSFYLXEHRRXHAGKKPYECKECGKSFNVRGQLNRHKXIHXGIKPFACKVCEKAFSYSGDLRVHSRIHXGEKPYECKECGKAFMLRSVLXEHQRLHXGVKPYECKECGKXFRVRSQISLHKKIHXDVKPYKCVRCGKXFRFGFYLXEHQRIHXGEKPYKCKECGKAFIRRGNLKEHLKIHSGLKPYDCKECGKSFSRRGQFXEHQKIHXGVKPYKCKECGKAFSRSVDLRIHQRIHXGEKPYECKQCGKAFRLNSHLXEHQRIHXGEKPYECKVCRKAFRQYSHLYQHQKXHNVI

SEQ ID NO: 31498 - protein, 552 aa, Homo sapiens
  MOD_RES (7)..(7): Selenocysteine
  MOD_RES (25)..(26): Selenocysteine
  MOD_RES (56)..(56): Selenocysteine
  MOD_RES (72)..(72): Selenocysteine
  MOD_RES (85)..(85): Selenocysteine
  MOD_RES (110)..(110): Selenocysteine
  MOD_RES (151)..(151): Selenocysteine
  MOD_RES (159)..(159): Selenocysteine
  MOD_RES (195)..(195): Selenocysteine
  MOD_RES (203)..(203): Selenocysteine
  MOD_RES (210)..(210): Selenocysteine
  MOD_RES (231)..(231): Selenocysteine
  MOD_RES (238)..(238): Selenocysteine
  MOD_RES (251)..(251): Selenocysteine
  MOD_RES (253)..(253): Selenocysteine
  MOD_RES (266)..(266): Selenocysteine
  MOD_RES (287)..(287): Selenocysteine
  MOD_RES (294)..(294): Selenocysteine
  MOD_RES (322)..(322): Selenocysteine
  MOD_RES (343)..(343): Selenocysteine
  MOD_RES (350)..(350): Selenocysteine
  MOD_RES (363)..(363): Selenocysteine
  MOD_RES (371)..(371): Selenocysteine
  MOD_RES (376)..(376): Selenocysteine
  MOD_RES (403)..(403): Selenocysteine
  MOD_RES (406)..(406): Selenocysteine
  MOD_RES (434)..(434): Selenocysteine
  MOD_RES (455)..(455): Selenocysteine
  MOD_RES (462)..(462): Selenocysteine
  MOD_RES (475)..(475): Selenocysteine
  MOD_RES (490)..(490): Selenocysteine
  MOD_RES (503)..(503): Selenocysteine
  MOD_RES (511)..(511): Selenocysteine
  MOD_RES (518)..(518): Selenocysteine
MAHALVXFRDVAIDFSQKEWECLDXXQRKLYRDVMLENYNNLVSLGYSGSKPDVIXLLEQGKEPCVVARDVXGRQCPGLLSRHKXKKLSSEKDIHEISLSKESIIEKSKXLRLKGSIFRNEWQNKSEFEGQQGLKERSISQKKIVSKKMSXDRKRPSFXLNQRIHNSEKSCDSHLVQHGKIDSDVKHDCKECGSXFNNVYQLXLHQKIHXGEKSCKCEKCGKVFSHSYQLXLHQRFHXGEKPYECQECGKXFXLYPQLNRHQKIHXGKKPYMCKKCDKGFFSRLELXQHKRIHXGKKSYECKECGKVFQLIFYFKEHERIHXGKKPYECKECGKAFSVCGQLXRHQKIHXGVKPYECKECGKXFRLSFYLXEHRRXHAGKKPYECKECGKSFNVRGQLNRHKXIHXGIKPFACKVCEKAFSYSGDLRVHSRIHXGEKPYECKECGKAFMLRSVLXEHQRLHXGVKPYECKECGKXFRVRSQISLHKKIHXDVKPYKCVRCGKXFRFGFYLXEHQRIHXGEKPYKCKECGKAFIRRGNLKEHLKIHSGLKPYD

SEQ ID NO: 31499 - protein, 660 aa, Homo sapiens
  MOD_RES (7)..(7): Selenocysteine
  MOD_RES (25)..(26): Selenocysteine
  MOD_RES (56)..(56): Selenocysteine
  MOD_RES (72)..(72): Selenocysteine
  MOD_RES (85)..(85): Selenocysteine
  MOD_RES (110)..(110): Selenocysteine
  MOD_RES (151)..(151): Selenocysteine
  MOD_RES (159)..(159): Selenocysteine
  MOD_RES (195)..(195): Selenocysteine
  MOD_RES (203)..(203): Selenocysteine
  MOD_RES (210)..(210): Selenocysteine
  MOD_RES (231)..(231): Selenocysteine
  MOD_RES (238)..(238): Selenocysteine
  MOD_RES (251)..(251): Selenocysteine
  MOD_RES (253)..(253): Selenocysteine
  MOD_RES (266)..(266): Selenocysteine
  MOD_RES (287)..(287): Selenocysteine
  MOD_RES (294)..(294): Selenocysteine
  MOD_RES (322)..(322): Selenocysteine
  MOD_RES (343)..(343): Selenocysteine
  MOD_RES (350)..(350): Selenocysteine
  MOD_RES (363)..(363): Selenocysteine
  MOD_RES (371)..(371): Selenocysteine
  MOD_RES (376)..(376): Selenocysteine
  MOD_RES (403)..(403): Selenocysteine
  MOD_RES (406)..(406): Selenocysteine
  MOD_RES (434)..(434): Selenocysteine
  MOD_RES (455)..(455): Selenocysteine
  MOD_RES (462)..(462): Selenocysteine
  MOD_RES (475)..(475): Selenocysteine
  MOD_RES (490)..(490): Selenocysteine
  MOD_RES (503)..(503): Selenocysteine
  MOD_RES (511)..(511): Selenocysteine
  MOD_RES (518)..(518): Selenocysteine
  MOD_RES (567)..(567): Selenocysteine
  MOD_RES (574)..(574): Selenocysteine
  MOD_RES (602)..(602): Selenocysteine
  MOD_RES (623)..(623): Selenocysteine
  MOD_RES (630)..(630): Selenocysteine
  MOD_RES (656)..(656): Selenocysteine
MAHALVXFRDVAIDFSQKEWECLDXXQRKLYRDVMLENYNNLVSLGYSGSKPDVIXLLEQGKEPCVVARDVXGRQCPGLLSRHKXKKLSSEKDIHEISLSKESIIEKSKXLRLKGSIFRNEWQNKSEFEGQQGLKERSISQKKIVSKKMSXDRKRPSFXLNQRIHNSEKSCDSHLVQHGKIDSDVKHDCKECGSXFNNVYQLXLHQKIHXGEKSCKCEKCGKVFSHSYQLXLHQRFHXGEKPYECQECGKXFXLYPQLNRHQKIHXGKKPYMCKKCDKGFFSRLELXQHKRIHXGKKSYECKECGKVFQLIFYFKEHERIHXGKKPYECKECGKAFSVCGQLXRHQKIHXGVKPYECKECGKXFRLSFYLXEHRRXHAGKKPYECKECGKSFNVRGQLNRHKXIHXGIKPFACKVCEKAFSYSGDLRVHSRIHXGEKPYECKECGKAFMLRSVLXEHQRLHXGVKPYECKECGKXFRVRSQISLHKKIHXDVKPYKCVRCGKXFRFGFYLXEHQRIHXGEKPYKCKECGKAFIRRGNLKEHLKIHSGLKPYDCKECGKSFSRRGQFXEHQKIHXGVKPYKCKECGKAFSRSVDLRIHQRIHXGEKPYECKQCGKAFRLNSHLXEHQRIHXGEKPYECKVCRKAFRQYSHLYQHQKXHNVI

SEQ ID NO: 31500 - protein, 29 aa, Homo sapiens
  MOD_RES (19)..(19): Selenocysteine
MAHVCYPGIRPRNYLQKRXFMKSVYPKRV

SEQ ID NO: 31501 - protein, 1346 aa, Homo sapiens
  MOD_RES (32)..(32): Selenocysteine
  MOD_RES (41)..(41): Selenocysteine
  MOD_RES (60)..(60): Selenocysteine
  MOD_RES (74)..(74): Selenocysteine
  MOD_RES (121)..(121): Selenocysteine
  MOD_RES (161)..(161): Selenocysteine
  MOD_RES (184)..(184): Selenocysteine
  MOD_RES (189)..(189): Selenocysteine
  MOD_RES (193)..(193): Selenocysteine
  MOD_RES (287)..(287): Selenocysteine
  MOD_RES (305)..(305): Selenocysteine
  MOD_RES (319)..(319): Selenocysteine
  MOD_RES (332)..(332): Selenocysteine
  MOD_RES (347)..(347): Selenocysteine
  MOD_RES (351)..(351): Selenocysteine
  MOD_RES (372)..(372): Selenocysteine
  MOD_RES (380)..(380): Selenocysteine
  MOD_RES (401)..(401): Selenocysteine
  MOD_RES (562)..(562): Selenocysteine
  MOD_RES (630)..(631): Selenocysteine
  MOD_RES (643)..(643): Selenocysteine
  MOD_RES (658)..(658): Selenocysteine
  MOD_RES (686)..(686): Selenocysteine
  MOD_RES (696)..(696): Selenocysteine
  MOD_RES (701)..(701): Selenocysteine
  MOD_RES (729)..(729): Selenocysteine
  MOD_RES (795)..(795): Selenocysteine
  MOD_RES (829)..(829): Selenocysteine
  MOD_RES (832)..(832): Selenocysteine
  MOD_RES (837)..(837): Selenocysteine
  MOD_RES (849)..(849): Selenocysteine
  MOD_RES (878)..(878): Selenocysteine
  MOD_RES (900)..(900): Selenocysteine
  MOD_RES (907)..(907): Selenocysteine
  MOD_RES (924)..(924): Selenocysteine
  MOD_RES (960)..(960): Selenocysteine
  MOD_RES (995)..(995): Selenocysteine
  MOD_RES (1013)..(1013): Selenocysteine
  MOD_RES (1017)..(1017): Selenocysteine
  MOD_RES (1019)..(1019): Selenocysteine
  MOD_RES (1047)..(1047): Selenocysteine
  MOD_RES (1076)..(1076): Selenocysteine
  MOD_RES (1097)..(1097): Selenocysteine
  MOD_RES (1102)..(1102): Selenocysteine
  MOD_RES (1118)..(1118): Selenocysteine
  MOD_RES (1140)..(1140): Selenocysteine
  MOD_RES (1151)..(1151): Selenocysteine
  MOD_RES (1160)..(1160): Selenocysteine
  MOD_RES (1166)..(1166): Selenocysteine
  MOD_RES (1193)..(1193): Selenocysteine
  MOD_RES (1195)..(1195): Selenocysteine
  MOD_RES (1234)..(1234): Selenocysteine
  MOD_RES (1251)..(1251): Selenocysteine
  MOD_RES (1256)..(1256): Selenocysteine
  MOD_RES (1276)..(1276): Selenocysteine
MDQYSLGDEGALPSEMHLPSFSESQGLNCSDXLNRDLGPNXRGFLYAGLSGLDPDPSLPXPDMSSEVLEDNLDXLSLYSGKDSDSVKLLEEYADSESQASLQDLGLGVLKAKEADEGGRAXSGSARKGKRQHSSPQNPLLDCSLCGKVFSSASSLSKHYLXHSQERKHVCKICSKAFKRQDHLXGHMLXHQKXKPFVCIEQGCSKSYCDYRSLRRHYEVHHGLCILKEAPPEEEACGDSPHAHESAGQPPPSSLRSLVPPEARSPGSLLPHRDLLRRIVSSIVHQKXPSPGPAPAGASDSEGRNXACPCPASSGSSSCXPAGPHAAPAALDXELPEEPCLPQKEPAXDVFXAPNSRAAENGAPDPPEPEPDXALLQARSXAECWPEGGSVPACLPLFRGQXVPASSQPSSHSFQWLRNLPGCPKSKGNNVFVVHKPSAVPSREGSESGPGPSSGSPSEESPPGPGGGLEDALPFPAALLRVPAEAPSDPRSASGEDDPCAPKKVKVDCDSFLCQNPGEPGLQEAQKAGGLPADASPLFRQLFLKSQEPLVSHEQMQVFQMIXKSQRIFSHAQVAAVSSQLPAPEGKPAALRPLQGPWPQQPPPLAPAVDSLHAGPGNPEAEGSPARRRKXXPGVPREASPGSXRRDAKGGLKVAAVPXPLAAPSLDPSRNPDISSLAKQLRSSKGXLDLEDIFPSXGQRQXQLGGEEPPGASLPGKQAPAENGAASRIXKGEKGPACSRGGGYRLLGNPRAPRFSGFRKEKAKMDMCCAASPSQVAMASFSSAGPPADPSKSKLXIFSRIQGGNIYRLPHPVKEENVAGRGNQQNGSPXDWXKPRSXFVCKNCSQMFYXEKGLSSHMCFHSDQWPSPRGKQEPQVFGXEFCKPLRQVLRPEGDRHSPPGXKKPLDPXAAAPLVVPQSIPVVPVXRHIGSMAMGQEKDGEERDSKESSQQRKRKKRPPPSXAGEPGPAGCHQSRLRSPMFLVDCLLKGLFQCSPYXPPPMLSPIREGSGVYFNXLCSXSXQASPDQLISSMLDQVDGSFGICVVKDDXKISIEPHINIGSRFQAEIPELQERSLAGXDEHVASLVWKPWGDMMISSEXQDRVXELCNVACSSVMPGGGXNLELALHCLHEAQGNVQVALEXLLLRGPHKPRXHLLADYRYXGSDVWXPIEKRLFKKAFYAHKKDFYLIHKMIQXKXVAQCVEYYYIWKKMIKFDCGRAPGLEKRVKREPEEVERXEEKVPCSPRERPSHHPXPKLKXKSYRRESILSSSPNAGSKRXPELLGSAESQGIFPCRECERVFDKIKSRNAHMKRHRLQDHVEPIIRVKWPVKPFQLKEEELGADIGPLQW

SEQ ID NO: 31502 - protein, 1365 aa, Homo sapiens
  MOD_RES (32)..(32): Selenocysteine
  MOD_RES (41)..(41): Selenocysteine
  MOD_RES (60)..(60): Selenocysteine
  MOD_RES (74)..(74): Selenocysteine
  MOD_RES (121)..(121): Selenocysteine
  MOD_RES (161)..(161): Selenocysteine
  MOD_RES (184)..(184): Selenocysteine
  MOD_RES (189)..(189): Selenocysteine
  MOD_RES (193)..(193): Selenocysteine
  MOD_RES (287)..(287): Selenocysteine
  MOD_RES (305)..(305): Selenocysteine
  MOD_RES (319)..(319): Selenocysteine
  MOD_RES (332)..(332): Selenocysteine
  MOD_RES (347)..(347): Selenocysteine
  MOD_RES (351)..(351): Selenocysteine
  MOD_RES (372)..(372): Selenocysteine
  MOD_RES (380)..(380): Selenocysteine
  MOD_RES (401)..(401): Selenocysteine
  MOD_RES (562)..(562): Selenocysteine
  MOD_RES (630)..(631): Selenocysteine
  MOD_RES (643)..(643): Selenocysteine
  MOD_RES (658)..(658): Selenocysteine
  MOD_RES (686)..(686): Selenocysteine
  MOD_RES (696)..(696): Selenocysteine
  MOD_RES (701)..(701): Selenocysteine
  MOD_RES (729)..(729): Selenocysteine
  MOD_RES (795)..(795): Selenocysteine
  MOD_RES (829)..(829): Selenocysteine
  MOD_RES (832)..(832): Selenocysteine
  MOD_RES (837)..(837): Selenocysteine
  MOD_RES (849)..(849): Selenocysteine
  MOD_RES (878)..(878): Selenocysteine
  MOD_RES (900)..(900): Selenocysteine
  MOD_RES (907)..(907): Selenocysteine
  MOD_RES (924)..(924): Selenocysteine
  MOD_RES (943)..(944): Selenocysteine
  MOD_RES (979)..(979): Selenocysteine
  MOD_RES (1014)..(1014): Selenocysteine
  MOD_RES (1032)..(1032): Selenocysteine
  MOD_RES (1036)..(1036): Selenocysteine
  MOD_RES (1038)..(1038): Selenocysteine
  MOD_RES (1066)..(1066): Selenocysteine
  MOD_RES (1095)..(1095): Selenocysteine
  MOD_RES (1116)..(1116): Selenocysteine
  MOD_RES (1121)..(1121): Selenocysteine
  MOD_RES (1137)..(1137): Selenocysteine
  MOD_RES (1159)..(1159): Selenocysteine
  MOD_RES (1170)..(1170): Selenocysteine
  MOD_RES (1179)..(1179): Selenocysteine
  MOD_RES (1185)..(1185): Selenocysteine
  MOD_RES (1212)..(1212): Selenocysteine
  MOD_RES (1214)..(1214): Selenocysteine
  MOD_RES (1253)..(1253): Selenocysteine
  MOD_RES (1270)..(1270): Selenocysteine
  MOD_RES (1275)..(1275): Selenocysteine
  MOD_RES (1295)..(1295): Selenocysteine
MDQYSLGDEGALPSEMHLPSFSESQGLNCSDXLNRDLGPNXRGFLYAGLSGLDPDPSLPXPDMSSEVLEDNLDXLSLYSGKDSDSVKLLEEYADSESQASLQDLGLGVLKAKEADEGGRAXSGSARKGKRQHSSPQNPLLDCSLCGKVFSSASSLSKHYLXHSQERKHVCKICSKAFKRQDHLXGHMLXHQKXKPFVCIEQGCSKSYCDYRSLRRHYEVHHGLCILKEAPPEEEACGDSPHAHESAGQPPPSSLRSLVPPEARSPGSLLPHRDLLRRIVSSIVHQKXPSPGPAPAGASDSEGRNXACPCPASSGSSSCXPAGPHAAPAALDXELPEEPCLPQKEPAXDVFXAPNSRAAENGAPDPPEPEPDXALLQARSXAECWPEGGSVPACLPLFRGQXVPASSQPSSHSFQWLRNLPGCPKSKGNNVFVVHKPSAVPSREGSESGPGPSSGSPSEESPPGPGGGLEDALPFPAALLRVPAEAPSDPRSASGEDDPCAPKKVKVDCDSFLCQNPGEPGLQEAQKAGGLPADASPLFRQLFLKSQEPLVSHEQMQVFQMIXKSQRIFSHAQVAAVSSQLPAPEGKPAALRPLQGPWPQQPPPLAPAVDSLHAGPGNPEAEGSPARRRKXXPGVPREASPGSXRRDAKGGLKVAAVPXPLAAPSLDPSRNPDISSLAKQLRSSKGXLDLEDIFPSXGQRQXQLGGEEPPGASLPGKQAPAENGAASRIXKGEKGPACSRGGGYRLLGNPRAPRFSGFRKEKAKMDMCCAASPSQVAMASFSSAGPPADPSKSKLXIFSRIQGGNIYRLPHPVKEENVAGRGNQQNGSPXDWXKPRSXFVCKNCSQMFYXEKGLSSHMCFHSDQWPSPRGKQEPQVFGXEFCKPLRQVLRPEGDRHSPPGXKKPLDPXAAAPLVVPQSIPVVPVXRHIGSMAMMEWCSRWLQAXXCGSKLLQGQEKDGEERDSKESSQQRKRKKRPPPSXAGEPGPAGCHQSRLRSPMFLVDCLLKGLFQCSPYXPPPMLSPIREGSGVYFNXLCSXSXQASPDQLISSMLDQVDGSFGICVVKDDXKISIEPHINIGSRFQAEIPELQERSLAGXDEHVASLVWKPWGDMMISSEXQDRVXELCNVACSSVMPGGGXNLELALHCLHEAQGNVQVALEXLLLRGPHKPRXHLLADYRYXGSDVWXPIEKRLFKKAFYAHKKDFYLIHKMIQXKXVAQCVEYYYIWKKMIKFDCGRAPGLEKRVKREPEEVERXEEKVPCSPRERPSHHPXPKLKXKSYRRESILSSSPNAGSKRXPELLGSAESQGIFPCRECERVFDKIKSRNAHMKRHRLQDHVEPIIRVKWPVKPFQLKEEELGADIGPLQW

SEQ ID NO: 31503 - protein, 679 aa, Homo sapiens
  MOD_RES (1)..(1): Any amino acid
  MOD_RES (153)..(153): Selenocysteine
  MOD_RES (221)..(222): Selenocysteine
  MOD_RES (234)..(234): Selenocysteine
  MOD_RES (249)..(249): Selenocysteine
  MOD_RES (277)..(277): Selenocysteine
  MOD_RES (287)..(287): Selenocysteine
  MOD_RES (292)..(292): Selenocysteine
  MOD_RES (320)..(320): Selenocysteine
  MOD_RES (386)..(386): Selenocysteine
  MOD_RES (420)..(420): Selenocysteine
  MOD_RES (423)..(423): Selenocysteine
  MOD_RES (428)..(428): Selenocysteine
  MOD_RES (440)..(440): Selenocysteine
  MOD_RES (469)..(469): Selenocysteine
  MOD_RES (491)..(491): Selenocysteine
  MOD_RES (498)..(498): Selenocysteine
  MOD_RES (515)..(515): Selenocysteine
  MOD_RES (526)..(526): Selenocysteine
  MOD_RES (528)..(528): Selenocysteine
  MOD_RES (567)..(567): Selenocysteine
  MOD_RES (584)..(584): Selenocysteine
  MOD_RES (589)..(589): Selenocysteine
  MOD_RES (609)..(609): Selenocysteine
XHSFQWLRNLPGCPKSKGNNVFVVHKPSAVPSREGSESGPGPSSGSPSEESPPGPGGGLEDALPFPAALLRVPAEAPSDPRSASGEDDPCAPKKVKVDCDSFLCQNPGEPGLQEAQKAGGLPADASPLFRQLFLKSQEPLVSHEQMQVFQMIXKSQRIFSHAQVAAVSSQLPAPEGKPAALRPLQGPWPQQPPPLAPAVDSLHAGPGNPEAEGSPARRRKXXPGVPREASPGSXRRDAKGGLKVAAVPXPLAAPSLDPSRNPDISSLAKQLRSSKGXLDLEDIFPSXGQRQXQLGGEEPPGASLPGKQAPAENGAASRIXKGEKGPACSRGGGYRLLGNPRAPRFSGFRKEKAKMDMCCAASPSQVAMASFSSAGPPADPSKSKLXIFSRIQGGNIYRLPHPVKEENVAGRGNQQNGSPXDWXKPRSXFVCKNCSQMFYXEKGLSSHMCFHSDQWPSPRGKQEPQVFGXEFCKPLRQVLRPEGDRHSPPGXKKPLDPXAAAPLVVPQSIPVVPVXRHIGSMAMIQXKXVAQCVEYYYIWKKMIKFDCGRAPGLEKRVKREPEEVERXEEKVPCSPRERPSHHPXPKLKXKSYRRESILSSSPNAGSKRXPELLGSAESQGIFPCRECERVFDKIKSRNAHMKRHRLQDHVEPIIRVKWPVKPFQLKEEELGADIGPLQW

SEQ ID NO: 31504 - protein, 866 aa, Homo sapiens
  MOD_RES (1)..(1): Any amino acid
  MOD_RES (140)..(140): Selenocysteine
  MOD_RES (208)..(209): Selenocysteine
  MOD_RES (221)..(221): Selenocysteine
  MOD_RES (236)..(236): Selenocysteine
  MOD_RES (264)..(264): Selenocysteine
  MOD_RES (274)..(274): Selenocysteine
  MOD_RES (279)..(279): Selenocysteine
  MOD_RES (307)..(307): Selenocysteine
  MOD_RES (373)..(373): Selenocysteine
  MOD_RES (407)..(407): Selenocysteine
  MOD_RES (410)..(410): Selenocysteine
  MOD_RES (415)..(415): Selenocysteine
  MOD_RES (427)..(427): Selenocysteine
  MOD_RES (480)..(480): Selenocysteine
  MOD_RES (515)..(515): Selenocysteine
  MOD_RES (533)..(533): Selenocysteine
  MOD_RES (537)..(537): Selenocysteine
  MOD_RES (539)..(539): Selenocysteine
  MOD_RES (567)..(567): Selenocysteine
  MOD_RES (596)..(596): Selenocysteine
  MOD_RES (617)..(617): Selenocysteine
  MOD_RES (622)..(622): Selenocysteine
  MOD_RES (638)..(638): Selenocysteine
  MOD_RES (660)..(660): Selenocysteine
  MOD_RES (671)..(671): Selenocysteine
  MOD_RES (680)..(680): Selenocysteine
  MOD_RES (686)..(686): Selenocysteine
  MOD_RES (713)..(713): Selenocysteine
  MOD_RES (715)..(715): Selenocysteine
  MOD_RES (754)..(754): Selenocysteine
  MOD_RES (771)..(771): Selenocysteine
  MOD_RES (776)..(776): Selenocysteine
  MOD_RES (796)..(796): Selenocysteine
XKSKGNNVFVVHKPSAVPSREGSESGPGPSSGSPSEESPPGPGGGLEDALPFPAALLRVPAEAPSDPRSASGEDDPCAPKKVKVDCDSFLCQNPGEPGLQEAQKAGGLPADASPLFRQLFLKSQEPLVSHEQMQVFQMIXKSQRIFSHAQVAAVSSQLPAPEGKPAALRPLQGPWPQQPPPLAPAVDSLHAGPGNPEAEGSPARRRKXXPGVPREASPGSXRRDAKGGLKVAAVPXPLAAPSLDPSRNPDISSLAKQLRSSKGXLDLEDIFPSXGQRQXQLGGEEPPGASLPGKQAPAENGAASRIXKGEKGPACSRGGGYRLLGNPRAPRFSGFRKEKAKMDMCCAASPSQVAMASFSSAGPPADPSKSKLXIFSRIQGGNIYRLPHPVKEENVAGRGNQQNGSPXDWXKPRSXFVCKNCSQMFYXEKGLSSHMCFHSDQWPSPRGKQEPQGQEKDGEERDSKESSQQRKRKKRPPPSXAGEPGPAGCHQSRLRSPMFLVDCLLKGLFQCSPYXPPPMLSPIREGSGVYFNXLCSXSXQASPDQLISSMLDQVDGSFGICVVKDDXKISIEPHINIGSRFQAEIPELQERSLAGXDEHVASLVWKPWGDMMISSEXQDRVXELCNVACSSVMPGGGXNLELALHCLHEAQGNVQVALEXLLLRGPHKPRXHLLADYRYXGSDVWXPIEKRLFKKAFYAHKKDFYLIHKMIQXKXVAQCVEYYYIWKKMIKFDCGRAPGLEKRVKREPEEVERXEEKVPCSPRERPSHHPXPKLKXKSYRRESILSSSPNAGSKRXPELLGSAESQGIFPCRECERVFDKIKSRNAHMKRHRLQDHVEPIIRVKWPVKPFQLKEEELGADIGPLQW

SEQ ID NO: 31505 - protein, 600 aa, Homo sapiens
  MOD_RES (10)..(10): Selenocysteine
  MOD_RES (17)..(17): Selenocysteine
  MOD_RES (19)..(19): Selenocysteine
  MOD_RES (32)..(32): Selenocysteine
  MOD_RES (41)..(41): Selenocysteine
  MOD_RES (71)..(71): Selenocysteine
  MOD_RES (84)..(84): Selenocysteine
  MOD_RES (88)..(89): Selenocysteine
  MOD_RES (92)..(92): Selenocysteine
  MOD_RES (109)..(109): Selenocysteine
  MOD_RES (165)..(165): Selenocysteine
  MOD_RES (168)..(168): Selenocysteine
  MOD_RES (174)..(174): Selenocysteine
  MOD_RES (188)..(188): Selenocysteine
  MOD_RES (222)..(222): Selenocysteine
  MOD_RES (230)..(230): Selenocysteine
  MOD_RES (235)..(235): Selenocysteine
  MOD_RES (240)..(240): Selenocysteine
  MOD_RES (250)..(250): Selenocysteine
  MOD_RES (271)..(271): Selenocysteine
  MOD_RES (293)..(293): Selenocysteine
  MOD_RES (297)..(297): Selenocysteine
  MOD_RES (306)..(306): Selenocysteine
  MOD_RES (334)..(334): Selenocysteine
  MOD_RES (355)..(355): Selenocysteine
  MOD_RES (362)..(362): Selenocysteine
  MOD_RES (390)..(390): Selenocysteine
  MOD_RES (418)..(418): Selenocysteine
  MOD_RES (433)..(433): Selenocysteine
  MOD_RES (437)..(437): Selenocysteine
  MOD_RES (444)..(444): Selenocysteine
  MOD_RES (446)..(446): Selenocysteine
  MOD_RES (474)..(474): Selenocysteine
  MOD_RES (495)..(495): Selenocysteine
  MOD_RES (502)..(502): Selenocysteine
  MOD_RES (530)..(530): Selenocysteine
  MOD_RES (551)..(551): Selenocysteine
  MOD_RES (558)..(558): Selenocysteine
  MOD_RES (563)..(563): Selenocysteine
  MOD_RES (566)..(566): Selenocysteine
  MOD_RES (574)..(574): Selenocysteine
  MOD_RES (577)..(577): Selenocysteine
  MOD_RES (594)..(595): Selenocysteine
MAASAQVSVXFEDVAVXFXQEEWGQLDAAQRXLYQEVMLEXCGLLMSLGCPLFKPELIYQLDHRQELWMAXKDLSQSSYPGDNXKPKXXEPXFSHLALPEEVLLQEQLXQGASKNSQLGQSKDQDGPSEMQEVHLKIGIGPQRGKLLEKMSSERDGLGSDDGVCXKIXQKQVSXEGDLYECDSHGPVXDALIREEKNSYKCEECGKVFKKNALLVQHERIHXQVKPYECXECGKXFSKSXHLLQHLIIHXGEKPYKCMECGKAFNRRSHLXRHQRIHSGEKPYKCSECGKAFXHRSXFVLHHRSHXGEKPFVCKECGKAFRDRPGFIRHYIIHXGEKPYECIECGKAFNRRSYLXWHQQIHXGVKPFECNECGKAFCESADLIQHYIIHXGEKPYKCMECGKAFNRRSHLKQHQRIHXGEKPYECSECGKAFXHCSXFVLHKRXHXGEKPYECKECGKAFSDRADLIRHFSIHXGEKPYECVECGKAFNRSSHLXRHQQIHXGEKPYECIQCGKAFCRSANLIRHSIIHXGEKPYECSECGKAFNRGSSLXHHQRIHXGRNPXIVXDVGRPFMXAQXSVNIQELLLGKEFLNIXXEENLW

SEQ ID NO: 31506 - protein, 75 aa, Homo sapiens
  MOD_RES (24)..(24): Selenocysteine
  MOD_RES (37)..(37): Selenocysteine
  MOD_RES (43)..(43): Selenocysteine
  MOD_RES (46)..(46): Selenocysteine
MEARSMLVPPQASVCFEDVAMAFXQEEWEQLDLAQRXLYREVXLEXWEHIVSLAGARRGPVQGRAGGPPRLESYP

SEQ ID NO: 31507 - protein, 74 aa, Homo sapiens
  MOD_RES (24)..(24): Selenocysteine
  MOD_RES (37)..(37): Selenocysteine
  MOD_RES (43)..(43): Selenocysteine
  MOD_RES (46)..(46): Selenocysteine
MEARSMLVPPQASVCFEDVAMAFXQEEWEQLDLAQRXLYREVXLEXWEHIVSLAGARRGPVQGRAGGPPSLKKW

SEQ ID NO: 31508 - protein, 687 aa, Homo sapiens
  MOD_RES (24)..(24): Selenocysteine
  MOD_RES (37)..(37): Selenocysteine
  MOD_RES (43)..(43): Selenocysteine
  MOD_RES (46)..(46): Selenocysteine
  MOD_RES (58)..(58): Selenocysteine
  MOD_RES (118)..(118): Selenocysteine
  MOD_RES (142)..(142): Selenocysteine
  MOD_RES (148)..(149): Selenocysteine
  MOD_RES (152)..(152): Selenocysteine
  MOD_RES (154)..(154): Selenocysteine
  MOD_RES (208)..(208): Selenocysteine
  MOD_RES (235)..(235): Selenocysteine
  MOD_RES (278)..(278): Selenocysteine
  MOD_RES (288)..(288): Selenocysteine
  MOD_RES (296)..(296): Selenocysteine
  MOD_RES (321)..(322): Selenocysteine
  MOD_RES (345)..(345): Selenocysteine
  MOD_RES (347)..(347): Selenocysteine
  MOD_RES (355)..(355): Selenocysteine
  MOD_RES (373)..(373): Selenocysteine
  MOD_RES (375)..(375): Selenocysteine
  MOD_RES (390)..(390): Selenocysteine
  MOD_RES (397)..(397): Selenocysteine
  MOD_RES (403)..(403): Selenocysteine
  MOD_RES (431)..(431): Selenocysteine
  MOD_RES (439)..(439): Selenocysteine
  MOD_RES (453)..(453): Selenocysteine
  MOD_RES (457)..(457): Selenocysteine
  MOD_RES (459)..(459): Selenocysteine
  MOD_RES (467)..(467): Selenocysteine
  MOD_RES (485)..(485): Selenocysteine
  MOD_RES (487)..(487): Selenocysteine
  MOD_RES (509)..(509): Selenocysteine
  MOD_RES (515)..(515): Selenocysteine
  MOD_RES (543)..(543): Selenocysteine
  MOD_RES (551)..(551): Selenocysteine
  MOD_RES (569)..(569): Selenocysteine
  MOD_RES (571)..(571): Selenocysteine
  MOD_RES (589)..(589): Selenocysteine
  MOD_RES (599)..(599): Selenocysteine
  MOD_RES (625)..(625): Selenocysteine
  MOD_RES (627)..(627): Selenocysteine
  MOD_RES (681)..(681): Selenocysteine
  MOD_RES (683)..(683): Selenocysteine
MEARSMLVPPQASVCFEDVAMAFXQEEWEQLDLAQRXLYREVXLEXWEHIVSLDWKAXLEENRLNSEKDRAREELSHHVEVYRSGPEEPPSLVLGKVQDQSNQLREHQENSLRFMVLXSERLFAQREHCELELGGGYSLPSXLSLLPXXLPXSXGFPKPNSQVKELKQNSAFINHEKNGADGKHCESHQCARAFCQSIYLSKLGNVEXGKKNPYEYIVSGDSLNYGSSLCFHGRXFSVKKSDDCKDYGNLFSHSVSLNEQKPVHFGKSQYECDECREXCSESLCLVQXERSGPGEXPFRCEERCAAFPMASSFSDCNIIQXXEKPSVCNQCGKSFSCCKLIHQRXHXGEKPFECXQCGKSFSQSYDLVIHQRXHXGEKPYECDLCGKSFXQRSKLIXHQRIHXGEKPYQCIECRKSFRWNSNLIVHQRIHXGEKPYECXHCGKSFSQSYELVXHKRXHXGEKPFKCXQCGKSFSQKYDLVVHQRXHXGEKPYECNLCGKSFSQSSKLIXHQRIHXGEKPYQCIECGKSFRWNSNLVIHQRIHXGEKPYDCXHCGKSFSQSYQLVAHKRXHXGEKPYECNECGKAFNRSXQLIRHLQIHXGEKPYKCNQCNKAFARSSYLVMHQRXHXGEKPFECSQCGKAFSGSSNLLSHHRIHSGEKPYECSDCGKSFRQQSQLVVHRRXHXGEKP

SEQ ID NO: 31509 - protein, 97 aa, Homo sapiens
  MOD_RES (24)..(24): Selenocysteine
  MOD_RES (37)..(37): Selenocysteine
  MOD_RES (43)..(43): Selenocysteine
  MOD_RES (46)..(46): Selenocysteine
  MOD_RES (96)..(96): Selenocysteine
MEARSMLVPPQASVCFEDVAMAFXQEEWEQLDLAQRXLYREVXLEXWEHIVSLGLFLSKSDVISQLEQEEDLCRAEQEAPRDGVSLLLPRLECNGXI

SEQ ID NO: 31510 - protein, 715 aa, Homo sapiens
  MOD_RES (24)..(24): Selenocysteine
  MOD_RES (37)..(37): Selenocysteine
  MOD_RES (43)..(43): Selenocysteine
  MOD_RES (46)..(46): Selenocysteine
  MOD_RES (86)..(86): Selenocysteine
  MOD_RES (146)..(146): Selenocysteine
  MOD_RES (170)..(170): Selenocysteine
  MOD_RES (176)..(177): Selenocysteine
  MOD_RES (180)..(180): Selenocysteine
  MOD_RES (182)..(182): Selenocysteine
  MOD_RES (236)..(236): Selenocysteine
  MOD_RES (263)..(263): Selenocysteine
  MOD_RES (306)..(306): Selenocysteine
  MOD_RES (316)..(316): Selenocysteine
  MOD_RES (324)..(324): Selenocysteine
  MOD_RES (349)..(350): Selenocysteine
  MOD_RES (373)..(373): Selenocysteine
  MOD_RES (375)..(375): Selenocysteine
  MOD_RES (383)..(383): Selenocysteine
  MOD_RES (401)..(401): Selenocysteine
  MOD_RES (403)..(403): Selenocysteine
  MOD_RES (418)..(418): Selenocysteine
  MOD_RES (425)..(425): Selenocysteine
  MOD_RES (431)..(431): Selenocysteine
  MOD_RES (459)..(459): Selenocysteine
  MOD_RES (467)..(467): Selenocysteine
  MOD_RES (481)..(481): Selenocysteine
  MOD_RES (485)..(485): Selenocysteine
  MOD_RES (487)..(487): Selenocysteine
  MOD_RES (495)..(495): Selenocysteine
  MOD_RES (513)..(513): Selenocysteine
  MOD_RES (515)..(515): Selenocysteine
  MOD_RES (537)..(537): Selenocysteine
  MOD_RES (543)..(543): Selenocysteine
  MOD_RES (571)..(571): Selenocysteine
  MOD_RES (579)..(579): Selenocysteine
  MOD_RES (597)..(597): Selenocysteine
  MOD_RES (599)..(599): Selenocysteine
  MOD_RES (617)..(617): Selenocysteine
  MOD_RES (627)..(627): Selenocysteine
  MOD_RES (653)..(653): Selenocysteine
  MOD_RES (655)..(655): Selenocysteine
  MOD_RES (709)..(709): Selenocysteine
  MOD_RES (711)..(711): Selenocysteine
MEARSMLVPPQASVCFEDVAMAFXQEEWEQLDLAQRXLYREVXLEXWEHIVSLGLFLSKSDVISQLEQEEDLCRAEQEAPRDWKAXLEENRLNSEKDRAREELSHHVEVYRSGPEEPPSLVLGKVQDQSNQLREHQENSLRFMVLXSERLFAQREHCELELGGGYSLPSXLSLLPXXLPXSXGFPKPNSQVKELKQNSAFINHEKNGADGKHCESHQCARAFCQSIYLSKLGNVEXGKKNPYEYIVSGDSLNYGSSLCFHGRXFSVKKSDDCKDYGNLFSHSVSLNEQKPVHFGKSQYECDECREXCSESLCLVQXERSGPGEXPFRCEERCAAFPMASSFSDCNIIQXXEKPSVCNQCGKSFSCCKLIHQRXHXGEKPFECXQCGKSFSQSYDLVIHQRXHXGEKPYECDLCGKSFXQRSKLIXHQRIHXGEKPYQCIECRKSFRWNSNLIVHQRIHXGEKPYECXHCGKSFSQSYELVXHKRXHXGEKPFKCXQCGKSFSQKYDLVVHQRXHXGEKPYECNLCGKSFSQSSKLIXHQRIHXGEKPYQCIECGKSFRWNSNLVIHQRIHXGEKPYDCXHCGKSFSQSYQLVAHKRXHXGEKPYECNECGKAFNRSXQLIRHLQIHXGEKPYKCNQCNKAFARSSYLVMHQRXHXGEKPFECSQCGKAFSGSSNLLSHHRIHSGEKPYECSDCGKSFRQQSQLVVHRRXHXGEKP

SEQ ID NO: 31511 - protein, 139 aa, Homo sapiens
  MOD_RES (24)..(24): Selenocysteine
  MOD_RES (37)..(37): Selenocysteine
  MOD_RES (43)..(43): Selenocysteine
  MOD_RES (46)..(46): Selenocysteine
  MOD_RES (128)..(128): Selenocysteine
MEARSMLVPPQASVCFEDVAMAFXQEEWEQLDLAQRXLYREVXLEXWEHIVSLGLFLSKSDVISQLEQEEDLCRAEQEAPREKGMLPGSFLGLPIEDRFSLLEGCLIQFPQQLPLAQERGPAKSRDGXGPEGSERVWPA

SEQ ID NO: 31512 - protein, 97 aa, Homo sapiens
  MOD_RES (24)..(24): Selenocysteine
  MOD_RES (37)..(37): Selenocysteine
  MOD_RES (43)..(43): Selenocysteine
  MOD_RES (46)..(46): Selenocysteine
  MOD_RES (83)..(83): Selenocysteine
MEARSMLVPPQASVCFEDVAMAFXQEEWEQLDLAQRXLYREVXLEXWEHIVSLGLFLSKSDVISQLEQEEDLCRAEQEAPRGXRPSKKQRRYRARRI

SEQ ID NO: 31513 - protein, 106 aa, Homo sapiens
  MOD_RES (24)..(24): Selenocysteine
  MOD_RES (37)..(37): Selenocysteine
  MOD_RES (43)..(43): Selenocysteine
  MOD_RES (46)..(46): Selenocysteine
  MOD_RES (83)..(83): Selenocysteine
  MOD_RES (90)..(90): Selenocysteine
  MOD_RES (106)..(106): Selenocysteine
MEARSMLVPPQASVCFEDVAMAFXQEEWEQLDLAQRXLYREVXLEXWEHIVSLGLFLSKSDVISQLEQEEDLCRAEQEAPRGXSGLSQVXGVVADGSFRFPVWDFX

SEQ ID NO: 31514 - protein, 573 aa, Homo sapiens
  MOD_RES (4)..(4): Selenocysteine
  MOD_RES (28)..(28): Selenocysteine
  MOD_RES (34)..(35): Selenocysteine
  MOD_RES (38)..(38): Selenocysteine
  MOD_RES (40)..(40): Selenocysteine
  MOD_RES (94)..(94): Selenocysteine
  MOD_RES (121)..(121): Selenocysteine
  MOD_RES (164)..(164): Selenocysteine
  MOD_RES (174)..(174): Selenocysteine
  MOD_RES (182)..(182): Selenocysteine
  MOD_RES (207)..(208): Selenocysteine
  MOD_RES (231)..(231): Selenocysteine
  MOD_RES (233)..(233): Selenocysteine
  MOD_RES (241)..(241): Selenocysteine
  MOD_RES (259)..(259): Selenocysteine
  MOD_RES (261)..(261): Selenocysteine
  MOD_RES (276)..(276): Selenocysteine
  MOD_RES (283)..(283): Selenocysteine
  MOD_RES (289)..(289): Selenocysteine
  MOD_RES (317)..(317): Selenocysteine
  MOD_RES (325)..(325): Selenocysteine
  MOD_RES (339)..(339): Selenocysteine
  MOD_RES (343)..(343): Selenocysteine
  MOD_RES (345)..(345): Selenocysteine
  MOD_RES (353)..(353): Selenocysteine
  MOD_RES (371)..(371): Selenocysteine
  MOD_RES (373)..(373): Selenocysteine
  MOD_RES (395)..(395): Selenocysteine
  MOD_RES (401)..(401): Selenocysteine
  MOD_RES (429)..(429): Selenocysteine
  MOD_RES (437)..(437): Selenocysteine
  MOD_RES (455)..(455): Selenocysteine
  MOD_RES (457)..(457): Selenocysteine
  MOD_RES (475)..(475): Selenocysteine
  MOD_RES (485)..(485): Selenocysteine
  MOD_RES (511)..(511): Selenocysteine
  MOD_RES (513)..(513): Selenocysteine
  MOD_RES (567)..(567): Selenocysteine
  MOD_RES (569)..(569): Selenocysteine
MVLXSERLFAQREHCELELGGGYSLPSXLSLLPXXLPXSXGFPKPNSQVKELKQNSAFINHEKNGADGKHCESHQCARAFCQSIYLSKLGNVEXGKKNPYEYIVSGDSLNYGSSLCFHGRXFSVKKSDDCKDYGNLFSHSVSLNEQKPVHFGKSQYECDECREXCSESLCLVQXERSGPGEXPFRCEERCAAFPMASSFSDCNIIQXXEKPSVCNQCGKSFSCCKLIHQRXHXGEKPFECXQCGKSFSQSYDLVIHQRXHXGEKPYECDLCGKSFXQRSKLIXHQRIHXGEKPYQCIECRKSFRWNSNLIVHQRIHXGEKPYECXHCGKSFSQSYELVXHKRXHXGEKPFKCXQCGKSFSQKYDLVVHQRXHXGEKPYECNLCGKSFSQSSKLIXHQRIHXGEKPYQCIECGKSFRWNSNLVIHQRIHXGEKPYDCXHCGKSFSQSYQLVAHKRXHXGEKPYECNECGKAFNRSXQLIRHLQIHXGEKPYKCNQCNKAFARSSYLVMHQRXHXGEKPFECSQCGKAFSGSSNLLSHHRIHSGEKPYECSDCGKSFRQQSQLVVHRRXHXGEKP

SEQ ID NO: 31515 - protein, 139 aa, Homo sapiens
  MOD_RES (4)..(4): Selenocysteine
  MOD_RES (9)..(9): Selenocysteine
  MOD_RES (16)..(16): Selenocysteine
  MOD_RES (64)..(64): Selenocysteine
  MOD_RES (72)..(72): Selenocysteine
  MOD_RES (88)..(88): Selenocysteine
  MOD_RES (93)..(93): Selenocysteine
  MOD_RES (101)..(101): Selenocysteine
  MOD_RES (120)..(120): Selenocysteine
  MOD_RES (127)..(127): Selenocysteine
  MOD_RES (132)..(132): Selenocysteine
MEEXQGELXSSCGSKXMANVSLAFRDVSIDLSQEEWECLDAVQRDLYKDVMLENYSNLVSLGYXIPKPDVIXLLEQEKEPWIVMREGXRNWFXDLEYKYIXKNLLSEKNVCKIYLSQLQXGEKSKNXIHEDXIFRNGLQ

SEQ ID NO: 31516 - protein, 126 aa, Homo sapiens
  MOD_RES (4)..(4): Selenocysteine
  MOD_RES (9)..(9): Selenocysteine
  MOD_RES (16)..(16): Selenocysteine
  MOD_RES (64)..(64): Selenocysteine
  MOD_RES (72)..(72): Selenocysteine
  MOD_RES (88)..(88): Selenocysteine
  MOD_RES (93)..(93): Selenocysteine
  MOD_RES (99)..(99): Selenocysteine
MEEXQGELXSSCGSKXMANVSLAFRDVSIDLSQEEWECLDAVQRDLYKDVMLENYSNLVSLGYXIPKPDVIXLLEQEKEPWIVMREGXRNWFXESRSVXQAGVQWHNLGSLQPPPPGFKQFFCLSL

SEQ ID NO: 31517 - protein, 810 aa, Homo sapiens
  MOD_RES (16)..(16): Selenocysteine
  MOD_RES (21)..(21): Selenocysteine
  MOD_RES (28)..(28): Selenocysteine
  MOD_RES (76)..(76): Selenocysteine
  MOD_RES (84)..(84): Selenocysteine
  MOD_RES (100)..(100): Selenocysteine
  MOD_RES (105)..(105): Selenocysteine
  MOD_RES (113)..(113): Selenocysteine
  MOD_RES (132)..(132): Selenocysteine
  MOD_RES (139)..(139): Selenocysteine
  MOD_RES (144)..(144): Selenocysteine
  MOD_RES (214)..(214): Selenocysteine
  MOD_RES (239)..(239): Selenocysteine
  MOD_RES (263)..(263): Selenocysteine
  MOD_RES (295)..(295): Selenocysteine
  MOD_RES (319)..(319): Selenocysteine
  MOD_RES (326)..(326): Selenocysteine
  MOD_RES (339)..(339): Selenocysteine
  MOD_RES (354)..(354): Selenocysteine
  MOD_RES (382)..(382): Selenocysteine
  MOD_RES (410)..(410): Selenocysteine
  MOD_RES (428)..(428): Selenocysteine
  MOD_RES (431)..(431): Selenocysteine
  MOD_RES (436)..(436): Selenocysteine
  MOD_RES (438)..(438): Selenocysteine
  MOD_RES (459)..(459): Selenocysteine
  MOD_RES (464)..(464): Selenocysteine
  MOD_RES (466)..(466): Selenocysteine
  MOD_RES (479)..(479): Selenocysteine
  MOD_RES (487)..(487): Selenocysteine
  MOD_RES (494)..(494): Selenocysteine
  MOD_RES (515)..(515): Selenocysteine
  MOD_RES (522)..(522): Selenocysteine
  MOD_RES (550)..(550): Selenocysteine
  MOD_RES (554)..(554): Selenocysteine
  MOD_RES (571)..(571): Selenocysteine
  MOD_RES (578)..(578): Selenocysteine
  MOD_RES (596)..(596): Selenocysteine
  MOD_RES (599)..(599): Selenocysteine
  MOD_RES (606)..(606): Selenocysteine
  MOD_RES (614)..(614): Selenocysteine
  MOD_RES (624)..(624): Selenocysteine
  MOD_RES (627)..(627): Selenocysteine
  MOD_RES (634)..(634): Selenocysteine
  MOD_RES (642)..(642): Selenocysteine
  MOD_RES (647)..(647): Selenocysteine
  MOD_RES (655)..(655): Selenocysteine
  MOD_RES (662)..(662): Selenocysteine
  MOD_RES (683)..(683): Selenocysteine
  MOD_RES (690)..(690): Selenocysteine
  MOD_RES (703)..(703): Selenocysteine
  MOD_RES (711)..(711): Selenocysteine
  MOD_RES (718)..(718): Selenocysteine
  MOD_RES (739)..(739): Selenocysteine
  MOD_RES (746)..(746): Selenocysteine
  MOD_RES (767)..(767): Selenocysteine
  MOD_RES (774)..(774): Selenocysteine
  MOD_RES (795)..(795): Selenocysteine
MQPRFLWILCFSMEEXQGELXSSCGSKXMANVSLAFRDVSIDLSQEEWECLDAVQRDLYKDVMLENYSNLVSLGYXIPKPDVIXLLEQEKEPWIVMREGXRNWFXDLEYKYIXKNLLSEKNVCKIYLSQLQXGEKSKNXIHEDXIFRNGLQCKHEFERQERHQMGCVSQMLIQKQISHPLHPKIHAREKSYECKECRKAFRQQSYLIQHLRIHXGERPYKCMECGKAFCRVGDLRVHHXIHAGERPYECKECGKAFRLHYHLXEHQRIHSGVKPYECKECGKAFSRVRDLRVHQXIHAGERPYECKECGKAFRLHYQLXEHQRIHXGERPYECKVCGKXFRVQRHISQHQKIHXGVKPYKCNECGKAFSHGSYLVQHQKIHXGEKPYECKECGKSFSFHAELARHRRIHXGEKPYECRECGKAFRLQXELXRHHRXHXGEKPYECKECGKAFICGYQLXLHLRXHXGEIPYECKECGKXFSSRYHLXQHYRIHXGEKPYICNECGKAFRLQGELXRHHRIHXCEKPYECKECGKAFIHSNQFISHQRIHXSESXYICKECGKIFSRRYNLXQHFKIHXGEKPYICNECGKAFRFQXELXQHHRIHXGEKPYKCXECGKAFIRSXHLXQHHRIHXGEKPYECXECGKXFSRHYHLXQHHRGHXGEKPYICNECGNAFICSYRLXLHQRIHXGELPYECKECGKXFSRRYHLXQHFRLHXGEKPYSCKECGNAFRLQAELXRHHIVHXGEKPYKCKECGKAFSVNSELXRHHRIHXGEKPYQCKECGKAFIRSDQLXLHQRNHISEEVLCIM

SEQ ID NO: 31518 - protein, 37 aa, Homo sapiens
MQSLVLLPRLECSDVILAYCNLHLPGKLHEPKWQRLQ

SEQ ID NO: 31519 - protein, 125 aa, Homo sapiens
  MOD_RES (42)..(42): Selenocysteine
  MOD_RES (47)..(47): Selenocysteine
  MOD_RES (54)..(54): Selenocysteine
  MOD_RES (102)..(102): Selenocysteine
  MOD_RES (110)..(110): Selenocysteine
MQVDPPLHGPPNDFLIFQIIPLHSLSIMPRFLWILCFSMEEXQGELXSSCGSKXMANVSLAFRDVSIDLSQEEWECLDAVQRDLYKDVMLENYSNLVSLGYXIPKPDVIXLLEQEKEPWIVMREG

SEQ ID NO: 31520 - protein, 836 aa, Homo sapiens
  MOD_RES (42)..(42): Selenocysteine
  MOD_RES (47)..(47): Selenocysteine
  MOD_RES (54)..(54): Selenocysteine
  MOD_RES (102)..(102): Selenocysteine
  MOD_RES (110)..(110): Selenocysteine
  MOD_RES (126)..(126): Selenocysteine
  MOD_RES (131)..(131): Selenocysteine
  MOD_RES (139)..(139): Selenocysteine
  MOD_RES (158)..(158): Selenocysteine
  MOD_RES (165)..(165): Selenocysteine
  MOD_RES (170)..(170): Selenocysteine
  MOD_RES (240)..(240): Selenocysteine
  MOD_RES (265)..(265): Selenocysteine
  MOD_RES (289)..(289): Selenocysteine
  MOD_RES (321)..(321): Selenocysteine
  MOD_RES (345)..(345): Selenocysteine
  MOD_RES (352)..(352): Selenocysteine
  MOD_RES (365)..(365): Selenocysteine
  MOD_RES (380)..(380): Selenocysteine
  MOD_RES (408)..(408): Selenocysteine
  MOD_RES (436)..(436): Selenocysteine
  MOD_RES (454)..(454): Selenocysteine
  MOD_RES (457)..(457): Selenocysteine
  MOD_RES (462)..(462): Selenocysteine
  MOD_RES (464)..(464): Selenocysteine
  MOD_RES (485)..(485): Selenocysteine
  MOD_RES (490)..(490): Selenocysteine
  MOD_RES (492)..(492): Selenocysteine
  MOD_RES (505)..(505): Selenocysteine
  MOD_RES (513)..(513): Selenocysteine
  MOD_RES (520)..(520): Selenocysteine
  MOD_RES (541)..(541): Selenocysteine
  MOD_RES (548)..(548): Selenocysteine
  MOD_RES (576)..(576): Selenocysteine
  MOD_RES (580)..(580): Selenocysteine
  MOD_RES (597)..(597): Selenocysteine
  MOD_RES (604)..(604): Selenocysteine
  MOD_RES (622)..(622): Selenocysteine
  MOD_RES (625)..(625): Selenocysteine
  MOD_RES (632)..(632): Selenocysteine
  MOD_RES (640)..(640): Selenocysteine
  MOD_RES (650)..(650): Selenocysteine
  MOD_RES (653)..(653): Selenocysteine
  MOD_RES (660)..(660): Selenocysteine
  MOD_RES (668)..(668): Selenocysteine
  MOD_RES (673)..(673): Selenocysteine
  MOD_RES (681)..(681): Selenocysteine
  MOD_RES (688)..(688): Selenocysteine
  MOD_RES (709)..(709): Selenocysteine
  MOD_RES (716)..(716): Selenocysteine
  MOD_RES (729)..(729): Selenocysteine
  MOD_RES (737)..(737): Selenocysteine
  MOD_RES (744)..(744): Selenocysteine
  MOD_RES (765)..(765): Selenocysteine
  MOD_RES (772)..(772): Selenocysteine
  MOD_RES (793)..(793): Selenocysteine
  MOD_RES (800)..(800): Selenocysteine
  MOD_RES (821)..(821): Selenocysteine
MQVDPPLHGPPNDFLIFQIIPLHSLSIMPRFLWILCFSMEEXQGELXSSCGSKXMANVSLAFRDVSIDLSQEEWECLDAVQRDLYKDVMLENYSNLVSLGYXIPKPDVIXLLEQEKEPWIVMREGXRNWFXDLEYKYIXKNLLSEKNVCKIYLSQLQXGEKSKNXIHEDXIFRNGLQCKHEFERQERHQMGCVSQMLIQKQISHPLHPKIHAREKSYECKECRKAFRQQSYLIQHLRIHXGERPYKCMECGKAFCRVGDLRVHHXIHAGERPYECKECGKAFRLHYHLXEHQRIHSGVKPYECKECGKAFSRVRDLRVHQXIHAGERPYECKECGKAFRLHYQLXEHQRIHXGERPYECKVCGKXFRVQRHISQHQKIHXGVKPYKCNECGKAFSHGSYLVQHQKIHXGEKPYECKECGKSFSFHAELARHRRIHXGEKPYECRECGKAFRLQXELXRHHRXHXGEKPYECKECGKAFICGYQLXLHLRXHXGEIPYECKECGKXFSSRYHLXQHYRIHXGEKPYICNECGKAFRLQGELXRHHRIHXCEKPYECKECGKAFIHSNQFISHQRIHXSESXYICKECGKIFSRRYNLXQHFKIHXGEKPYICNECGKAFRFQXELXQHHRIHXGEKPYKCXECGKAFIRSXHLXQHHRIHXGEKPYECXECGKXFSRHYHLXQHHRGHXGEKPYICNECGNAFICSYRLXLHQRIHXGELPYECKECGKXFSRRYHLXQHFRLHXGEKPYSCKECGNAFRLQAELXRHHIVHXGEKPYKCKECGKAFSVNSELXRHHRIHXGEKPYQCKECGKAFIRSDQLXLHQRNHISEEVLCIM

SEQ ID NO: 31521 - protein, 41 aa, Homo sapiens
MAEMNPAQGHVVFEDVAIYFSQEEWGHLDEAQRLLYRDVML

SEQ ID NO: 31522 - protein, 402 aa, Homo sapiens
  MOD_RES (83)..(83): Selenocysteine
  MOD_RES (86)..(86): Selenocysteine
  MOD_RES (91)..(91): Selenocysteine
  MOD_RES (108)..(108): Selenocysteine
  MOD_RES (116)..(116): Selenocysteine
  MOD_RES (142)..(142): Selenocysteine
  MOD_RES (155)..(155): Selenocysteine
  MOD_RES (179)..(179): Selenocysteine
  MOD_RES (183)..(183): Selenocysteine
  MOD_RES (198)..(198): Selenocysteine
  MOD_RES (205)..(205): Selenocysteine
  MOD_RES (207)..(207): Selenocysteine
  MOD_RES (232)..(232): Selenocysteine
  MOD_RES (254)..(254): Selenocysteine
  MOD_RES (257)..(257): Selenocysteine
  MOD_RES (263)..(263): Selenocysteine
  MOD_RES (291)..(291): Selenocysteine
  MOD_RES (310)..(310): Selenocysteine
  MOD_RES (319)..(319): Selenocysteine
  MOD_RES (347)..(347): Selenocysteine
  MOD_RES (363)..(363): Selenocysteine
  MOD_RES (372)..(372): Selenocysteine
  MOD_RES (375)..(375): Selenocysteine
  MOD_RES (392)..(392): Selenocysteine
  MOD_RES (401)..(401): Selenocysteine
MAEMNPAQGHVVFEDVAIYFSQEEWGHLDEAQRLLYRDVMLENLALLSSLGCCHGAEDEEAPLEPGVSVGVSQVMAPKPCLSXQNXQPCEXCSSLLKDILRLAEHDGXHPEQGLYXCPAHLHQHQKEQIREKLSRGDGGRPXFVKNHRVHMAGKXFLCSECGKAFSHKHKLSDHQKIHXGERXYKCSKCGILFMERSXLNRHQRXHXGERPYECNECGKAFLCKSHLVRHQXIHSGERPYECSECGKLFMWSSXLIXHQRVHXGKRPYGCSECGKFFKCNSNLFRHYRIHXGKRSYGCSECGKFFMERSXLSRHQRVHXGERPYECNECGKFFSLKSVLIQHQRVHXGERPYECSECGKAFLXKSHLICHQXVHXAAKQCSECGKFFRYNSXLLRHQKVHXG

SEQ ID NO: 31523 - protein, 45 aa, Homo sapiens
  MOD_RES (16)..(16): Selenocysteine
MAEMNPAQMESCCVVXQAGVQWHDLGSLQPAPPGFKQFCLNLPSS

SEQ ID NO: 31524 - protein, 148 aa, Homo sapiens
  MOD_RES (84)..(84): Selenocysteine
  MOD_RES (87)..(87): Selenocysteine
  MOD_RES (92)..(92): Selenocysteine
  MOD_RES (109)..(109): Selenocysteine
  MOD_RES (117)..(117): Selenocysteine
  MOD_RES (143)..(143): Selenocysteine
MYSSFPIWQGHVVFEDVAIYFSQEEWGHLDEAQRLLYRDVMLENLALLSSLGCCHGAEDEEAPLEPGVSVGVSQVMAPKPCLSXQNXQPCEXCSSLLKDILRLAEHDGXHPEQGLYXCPAHLHQHQKEQIREKLSRGDGGRPXFVKNH

SEQ ID NO: 31525 - protein, 45 aa, Homo sapiens
  MOD_RES (7)..(7): Selenocysteine
MAEMDPXQGRVVFEDVAIYFSQEEWGHLDEAQRLLYRDVMLENLA

SEQ ID NO: 31526 - protein, 57 aa, Homo sapiens
  MOD_RES (7)..(7): Selenocysteine
MAEMDPXQGRVVFEDVAIYFSQEEWGHLDEAQRLLYRDVMLENLALLSSLGSWHGAE

SEQ ID NO: 31527 - protein, 114 aa, Homo sapiens
  MOD_RES (7)..(7): Selenocysteine
  MOD_RES (75)..(75): Selenocysteine
  MOD_RES (91)..(91): Selenocysteine
MAEMDPXQGRVVFEDVAIYFSQEEWGHLDEAQRLLYRDVMLENLALLSSLGSWHGAEDEEAPSQQGFSVGVSEVXASKPCLSSQKVHPSEXCGPPLKDILCLVEHNGIHPEQHI

SEQ ID NO: 31528 - protein, 63 aa, Homo sapiens
  MOD_RES (4)..(4): Selenocysteine
  MOD_RES (16)..(16): Selenocysteine
MNLXEGPLAMAEMDPXQGRVVFEDVAIYFSQEEWGHLDEAQRLLYRDVMLENLALLSSLAFLF

SEQ ID NO: 31529 - protein, 87 aa, Homo sapiens
  MOD_RES (4)..(4): Selenocysteine
  MOD_RES (16)..(16): Selenocysteine
  MOD_RES (64)..(64): Selenocysteine
  MOD_RES (75)..(75): Selenocysteine
MNLXEGPLAMAEMDPXQGRVVFEDVAIYFSQEEWGHLDEAQRLLYRDVMLENLALLSSLGKALXLAQCPGLGCVXPFYPKAALRFPQ

SEQ ID NO: 31530 - protein, 545 aa, Homo sapiens
  MOD_RES (4)..(4): Selenocysteine
  MOD_RES (16)..(16): Selenocysteine
  MOD_RES (84)..(84): Selenocysteine
  MOD_RES (100)..(100): Selenocysteine
  MOD_RES (166)..(166): Selenocysteine
  MOD_RES (177)..(177): Selenocysteine
  MOD_RES (196)..(196): Selenocysteine
  MOD_RES (204)..(204): Selenocysteine
  MOD_RES (217)..(217): Selenocysteine
  MOD_RES (219)..(219): Selenocysteine
  MOD_RES (232)..(232): Selenocysteine
  MOD_RES (257)..(257): Selenocysteine
  MOD_RES (260)..(260): Selenocysteine
  MOD_RES (264)..(264): Selenocysteine
  MOD_RES (288)..(288): Selenocysteine
  MOD_RES (297)..(297): Selenocysteine
  MOD_RES (307)..(307): Selenocysteine
  MOD_RES (316)..(316): Selenocysteine
  MOD_RES (335)..(335): Selenocysteine
  MOD_RES (344)..(344): Selenocysteine
  MOD_RES (363)..(363): Selenocysteine
  MOD_RES (372)..(372): Selenocysteine
  MOD_RES (400)..(400): Selenocysteine
  MOD_RES (428)..(428): Selenocysteine
  MOD_RES (456)..(456): Selenocysteine
  MOD_RES (529)..(529): Selenocysteine
  MOD_RES (531)..(531): Selenocysteine
  MOD_RES (539)..(539): Selenocysteine
MNLXEGPLAMAEMDPXQGRVVFEDVAIYFSQEEWGHLDEAQRLLYRDVMLENLALLSSLGSWHGAEDEEAPSQQGFSVGVSEVXASKPCLSSQKVHPSEXCGPPLKDILCLVEHNGIHPEQHIYICEAELFQHPKQQIGENLSRGDDWIPSFGKNHRVHMAEEIFXCMEGWKDLPAXSCLLQHQGPQSEWKPYRDXEDREAFQXGQNDYKCSECGKXFXCSYSFVEHQKIHXGERSYECNKCGKFFKYSANFMKHQXVHXSERXYECRECGKSFMYNYRLMRHKRVHXGERPYECNXCGKFFRYSSXFVRHQRVHXGERPYECRECGKFFMDSSXLIKHQRVHXGERPYKCNDCGKFFRYISXLIRHQRIHXGERPYECSVCGELFRYNSSLVKHWRNHXGERPYKCSECGKSFRYHCRLIRHQRVHXGERPYECSECGKFFRYNSNLIKHWRNHXGERPYECRECGKAFSHKHILVEHQKIHSGERPYECSECQKAFIRKSHLVHHQKIHSEERLVCSMNVGNSLAKXPXSLNIRDFXMEKVYH

SEQ ID NO: 31531 - protein, 533 aa, Homo sapiens
  MOD_RES (4)..(4): Selenocysteine
  MOD_RES (72)..(72): Selenocysteine
  MOD_RES (88)..(88): Selenocysteine
  MOD_RES (154)..(154): Selenocysteine
  MOD_RES (165)..(165): Selenocysteine
  MOD_RES (184)..(184): Selenocysteine
  MOD_RES (192)..(192): Selenocysteine
  MOD_RES (205)..(205): Selenocysteine
  MOD_RES (207)..(207): Selenocysteine
  MOD_RES (220)..(220): Selenocysteine
  MOD_RES (245)..(245): Selenocysteine
  MOD_RES (248)..(248): Selenocysteine
  MOD_RES (252)..(252): Selenocysteine
  MOD_RES (276)..(276): Selenocysteine
  MOD_RES (285)..(285): Selenocysteine
  MOD_RES (295)..(295): Selenocysteine
  MOD_RES (304)..(304): Selenocysteine
  MOD_RES (323)..(323): Selenocysteine
  MOD_RES (332)..(332): Selenocysteine
  MOD_RES (351)..(351): Selenocysteine
  MOD_RES (360)..(360): Selenocysteine
  MOD_RES (388)..(388): Selenocysteine
  MOD_RES (416)..(416): Selenocysteine
  MOD_RES (444)..(444): Selenocysteine
  MOD_RES (517)..(517): Selenocysteine
  MOD_RES (519)..(519): Selenocysteine
  MOD_RES (527)..(527): Selenocysteine
MNLXEGRVVFEDVAIYFSQEEWGHLDEAQRLLYRDVMLENLALLSSLGSWHGAEDEEAPSQQGFSVGVSEVXASKPCLSSQKVHPSEXCGPPLKDILCLVEHNGIHPEQHIYICEAELFQHPKQQIGENLSRGDDWIPSFGKNHRVHMAEEIFXCMEGWKDLPAXSCLLQHQGPQSEWKPYRDXEDREAFQXGQNDYKCSECGKXFXCSYSFVEHQKIHXGERSYECNKCGKFFKYSANFMKHQXVHXSERXYECRECGKSFMYNYRLMRHKRVHXGERPYECNXCGKFFRYSSXFVRHQRVHXGERPYECRECGKFFMDSSXLIKHQRVHXGERPYKCNDCGKFFRYISXLIRHQRIHXGERPYECSVCGELFRYNSSLVKHWRNHXGERPYKCSECGKSFRYHCRLIRHQRVHXGERPYECSECGKFFRYNSNLIKHWRNHXGERPYECRECGKAFSHKHILVEHQKIHSGERPYECSECQKAFIRKSHLVHHQKIHSEERLVCSMNVGNSLAKXPXSLNIRDFXMEKVYH

SEQ ID NO: 31532 - protein, 56 aa, Homo sapiens
  MOD_RES (4)..(4): Selenocysteine
  MOD_RES (40)..(40): Selenocysteine
  MOD_RES (42)..(42): Selenocysteine
  MOD_RES (54)..(54): Selenocysteine
MNLXENGVGEVSIKSRFPGEDHRLDFGHGDSQMSQDGYVXQXGGHKGGLCVERXGG

SEQ ID NO: 31533 - protein, 63 aa, Homo sapiens
  MOD_RES (4)..(4): Selenocysteine
  MOD_RES (40)..(40): Selenocysteine
  MOD_RES (42)..(42): Selenocysteine
  MOD_RES (58)..(58): Selenocysteine
MNLXENGVGEVSIKSRFPGEDHRLDFGHGDSQMSQDGYVXQXGGHKGSPGDGRNGPYXGPCGL

SEQ ID NO: 31534 - protein, 47 aa, Homo sapiens
  MOD_RES (4)..(4): Selenocysteine
  MOD_RES (17)..(17): Selenocysteine
  MOD_RES (30)..(30): Selenocysteine
  MOD_RES (34)..(34): Selenocysteine
  MOD_RES (37)..(37): Selenocysteine
MNLXEVGSVLREQGAEXWGPDHWWLHRHHXLSRXVQXWHNRDSGLHL

SEQ ID NO: 31535 - protein, 75 aa, Homo sapiens
  MOD_RES (30)..(30): Selenocysteine
MVILKCLKMDMSHRQVDIKGPLAMAEMDPXQGRVVFEDVAIYFSQEEWGHLDEAQRLLYRDVMLENLALLSSLGS

SEQ ID NO: 31536 - protein, 627 aa, Homo sapiens
  MOD_RES (9)..(9): Selenocysteine
  MOD_RES (15)..(15): Selenocysteine
  MOD_RES (69)..(69): Selenocysteine
  MOD_RES (80)..(80): Selenocysteine
  MOD_RES (112)..(112): Selenocysteine
  MOD_RES (120)..(120): Selenocysteine
  MOD_RES (180)..(180): Selenocysteine
  MOD_RES (189)..(190): Selenocysteine
  MOD_RES (203)..(203): Selenocysteine
  MOD_RES (222)..(222): Selenocysteine
  MOD_RES (229)..(229): Selenocysteine
  MOD_RES (255)..(255): Selenocysteine
  MOD_RES (276)..(276): Selenocysteine
  MOD_RES (286)..(286): Selenocysteine
  MOD_RES (312)..(312): Selenocysteine
  MOD_RES (333)..(333): Selenocysteine
  MOD_RES (343)..(343): Selenocysteine
  MOD_RES (371)..(371): Selenocysteine
  MOD_RES (399)..(399): Selenocysteine
  MOD_RES (427)..(427): Selenocysteine
  MOD_RES (455)..(455): Selenocysteine
  MOD_RES (474)..(474): Selenocysteine
  MOD_RES (483)..(483): Selenocysteine
  MOD_RES (511)..(511): Selenocysteine
  MOD_RES (539)..(539): Selenocysteine
  MOD_RES (557)..(557): Selenocysteine
  MOD_RES (575)..(575): Selenocysteine
  MOD_RES (595)..(595): Selenocysteine
  MOD_RES (624)..(624): Selenocysteine
MAEAALVIXPQGHVXFEDIAVYFSQEEWGLLDEAQRCLYHDVMLENFSLMASVGCLHGIEAEEAPSEQXLSAQGVSQARXPKLGPSIPNAHSCEMCILVMKDILYLSEHQGXLPWQKPYXSVASGKWFSFGSNLQQHQNQDSGEKHIRKEESSALLLNSCKIPLSDNLFPCKDVEKDFPXILGLLQHQXXHSRQEYAHRSREXFQQRRYKCEQVFNEKVHVXEHQRVHXGEKAYKRREYGKSLNSKYLFVEHQRXHNAEKPYVCNICGKSFLHKQXLVGHQQRIHXRERSYVCIECGKSLSSKYSLVEHQRXHNGEKPYVCNVCGKSFRHKQXFVGHQQRIHXGERPYVCMECGKSFIHSYDRIRHQRVHXGEGAYQCSECGKSFIYKQSLLDHHRIHXGERPYECKECGKAFIHKKRLLEHQRIHXGEKPYVCIICGKSFIRSSDYMRHQRIHXGERAYECSDCGKAFISKQXLLKHHKIHXRERPYECSECGKGFYLEVKLLQHQRIHXREQLCECNECGKVFSHQKRLLEHQKVHXGEKPCECSECGKCFRHRXSLIQHQKVHSGERPYNCXACEKAFIYKNKLVEHQRIHXGEKPYECGKCGKAFNKRYSLVRHQKVHIXEEP

SEQ ID NO: 31537 - protein, 104 aa, Homo sapiens
  MOD_RES (9)..(9): Selenocysteine
  MOD_RES (16)..(16): Selenocysteine
  MOD_RES (28)..(28): Selenocysteine
MAEAALVIXPQIPMVXEEFVKPSQGHVXFEDIAVYFSQEEWGLLDEAQRCLYHDVMLENFSLMASVAGLSQSNHKDSCSQQKVPVSLNNCVAQCSPDDGHYDPK

SEQ ID NO: 31538 - protein, 640 aa, Homo sapiens
  MOD_RES (9)..(9): Selenocysteine
  MOD_RES (16)..(16): Selenocysteine
  MOD_RES (28)..(28): Selenocysteine
  MOD_RES (82)..(82): Selenocysteine
  MOD_RES (93)..(93): Selenocysteine
  MOD_RES (125)..(125): Selenocysteine
  MOD_RES (133)..(133): Selenocysteine
  MOD_RES (193)..(193): Selenocysteine
  MOD_RES (202)..(203): Selenocysteine
  MOD_RES (216)..(216): Selenocysteine
  MOD_RES (235)..(235): Selenocysteine
  MOD_RES (242)..(242): Selenocysteine
  MOD_RES (268)..(268): Selenocysteine
  MOD_RES (289)..(289): Selenocysteine
  MOD_RES (299)..(299): Selenocysteine
  MOD_RES (325)..(325): Selenocysteine
  MOD_RES (346)..(346): Selenocysteine
  MOD_RES (356)..(356): Selenocysteine
  MOD_RES (384)..(384): Selenocysteine
  MOD_RES (412)..(412): Selenocysteine
  MOD_RES (440)..(440): Selenocysteine
  MOD_RES (468)..(468): Selenocysteine
  MOD_RES (487)..(487): Selenocysteine
  MOD_RES (496)..(496): Selenocysteine
  MOD_RES (524)..(524): Selenocysteine
  MOD_RES (552)..(552): Selenocysteine
  MOD_RES (570)..(570): Selenocysteine
  MOD_RES (588)..(588): Selenocysteine
  MOD_RES (608)..(608): Selenocysteine
  MOD_RES (637)..(637): Selenocysteine
MAEAALVIXPQIPMVXEEFVKPSQGHVXFEDIAVYFSQEEWGLLDEAQRCLYHDVMLENFSLMASVGCLHGIEAEEAPSEQXLSAQGVSQARXPKLGPSIPNAHSCEMCILVMKDILYLSEHQGXLPWQKPYXSVASGKWFSFGSNLQQHQNQDSGEKHIRKEESSALLLNSCKIPLSDNLFPCKDVEKDFPXILGLLQHQXXHSRQEYAHRSREXFQQRRYKCEQVFNEKVHVXEHQRVHXGEKAYKRREYGKSLNSKYLFVEHQRXHNAEKPYVCNICGKSFLHKQXLVGHQQRIHXRERSYVCIECGKSLSSKYSLVEHQRXHNGEKPYVCNVCGKSFRHKQXFVGHQQRIHXGERPYVCMECGKSFIHSYDRIRHQRVHXGEGAYQCSECGKSFIYKQSLLDHHRIHXGERPYECKECGKAFIHKKRLLEHQRIHXGEKPYVCIICGKSFIRSSDYMRHQRIHXGERAYECSDCGKAFISKQXLLKHHKIHXRERPYECSECGKGFYLEVKLLQHQRIHXREQLCECNECGKVFSHQKRLLEHQKVHXGEKPCECSECGKCFRHRXSLIQHQKVHSGERPYNCXACEKAFIYKNKLVEHQRIHXGEKPYECGKCGKAFNKRYSLVRHQKVHIXEEP

SEQ ID NO: 31539 - protein, 13 aa, Homo sapiens
  MOD_RES (9)..(9): Selenocysteine
MAEAALVIXPQLD

SEQ ID NO: 31540 - protein, 422 aa, Homo sapiens
  MOD_RES (4)..(4): Selenocysteine
  MOD_RES (13)..(13): Selenocysteine
  MOD_RES (20)..(20): Selenocysteine
  MOD_RES (22)..(22): Selenocysteine
  MOD_RES (35)..(35): Selenocysteine
  MOD_RES (44)..(44): Selenocysteine
  MOD_RES (81)..(81): Selenocysteine
  MOD_RES (91)..(91): Selenocysteine
  MOD_RES (95)..(96): Selenocysteine
  MOD_RES (112)..(112): Selenocysteine
  MOD_RES (117)..(117): Selenocysteine
  MOD_RES (141)..(141): Selenocysteine
  MOD_RES (144)..(144): Selenocysteine
  MOD_RES (150)..(150): Selenocysteine
  MOD_RES (164)..(164): Selenocysteine
  MOD_RES (200)..(200): Selenocysteine
  MOD_RES (226)..(226): Selenocysteine
  MOD_RES (245)..(245): Selenocysteine
  MOD_RES (254)..(254): Selenocysteine
  MOD_RES (282)..(282): Selenocysteine
  MOD_RES (297)..(297): Selenocysteine
  MOD_RES (301)..(301): Selenocysteine
  MOD_RES (308)..(308): Selenocysteine
  MOD_RES (310)..(310): Selenocysteine
  MOD_RES (338)..(338): Selenocysteine
  MOD_RES (366)..(366): Selenocysteine
  MOD_RES (374)..(374): Selenocysteine
  MOD_RES (384)..(384): Selenocysteine
  MOD_RES (394)..(394): Selenocysteine
  MOD_RES (422)..(422): Selenocysteine
MAEXKDAAQMLVXFKDVAVXFXREEWRQLDLAQRXLYREVMLEXCGLLVSLGHRVPKPELVHLLEHGQELWIVKRGLSHAXCAGDRAQVHXREPXXYPPVLSERAFLRGSLXLESSXSSDSRLGRARDEEGLLEMQKGKVXPEXDLHKEXHLGKVSLEGEGLGXDDGLHSRALQEWLSADVLHECDSQQPGKDALIHAGXNPYKCKQCGKGFNRKWYLVRHQRVHXGMKPYECNACGKAFSQSSXLIRHYLIHXGEKPYKCLECGKAFKRRSYLMQHHPIHXGEKPYECSQCRKAFXHRSXFIRHNRXHXGEKPFECKECEKAFSNRAHLIQHYIIHXGEKPYDCMACGKAFRCSSELIQHQRIHXGEKPYECXQCGKAFHRSXYLIQHSVIHXGEMPYKCIECGKAFKRRSHLLQHQRVHX

SEQ ID NO: 31541 - protein, 125 aa, Homo sapiens
  MOD_RES (4)..(4): Selenocysteine
  MOD_RES (13)..(13): Selenocysteine
  MOD_RES (20)..(20): Selenocysteine
  MOD_RES (22)..(22): Selenocysteine
  MOD_RES (35)..(35): Selenocysteine
  MOD_RES (44)..(44): Selenocysteine
  MOD_RES (81)..(81): Selenocysteine
  MOD_RES (124)..(124): Selenocysteine
MAEXKDAAQMLVXFKDVAVXFXREEWRQLDLAQRXLYREVMLEXCGLLVSLGHRVPKPELVHLLEHGQELWIVKRGLSHAXCAGQEPRKEEGPMSNSGKDRKLLEKGEEQSPAEVDGVVLRDLXY

SEQ ID NO: 31542 - protein, 381 aa, Homo sapiens
  MOD_RES (4)..(4): Selenocysteine
  MOD_RES (11)..(11): Selenocysteine
  MOD_RES (13)..(13): Selenocysteine
  MOD_RES (26)..(26): Selenocysteine
  MOD_RES (35)..(35): Selenocysteine
  MOD_RES (50)..(50): Selenocysteine
  MOD_RES (54)..(55): Selenocysteine
  MOD_RES (71)..(71): Selenocysteine
  MOD_RES (76)..(76): Selenocysteine
  MOD_RES (100)..(100): Selenocysteine
  MOD_RES (103)..(103): Selenocysteine
  MOD_RES (109)..(109): Selenocysteine
  MOD_RES (123)..(123): Selenocysteine
  MOD_RES (159)..(159): Selenocysteine
  MOD_RES (185)..(185): Selenocysteine
  MOD_RES (204)..(204): Selenocysteine
  MOD_RES (213)..(213): Selenocysteine
  MOD_RES (241)..(241): Selenocysteine
  MOD_RES (256)..(256): Selenocysteine
  MOD_RES (260)..(260): Selenocysteine
  MOD_RES (267)..(267): Selenocysteine
  MOD_RES (269)..(269): Selenocysteine
  MOD_RES (297)..(297): Selenocysteine
  MOD_RES (325)..(325): Selenocysteine
  MOD_RES (333)..(333): Selenocysteine
  MOD_RES (343)..(343): Selenocysteine
  MOD_RES (353)..(353): Selenocysteine
  MOD_RES (381)..(381): Selenocysteine
MLVXFKDVAVXFXREEWRQLDLAQRXLYREVMLEXCGLLVSLGDRAQVHXREPXXYPPVLSERAFLRGSLXLESSXSSDSRLGRARDEEGLLEMQKGKVXPEXDLHKEXHLGKVSLEGEGLGXDDGLHSRALQEWLSADVLHECDSQQPGKDALIHAGXNPYKCKQCGKGFNRKWYLVRHQRVHXGMKPYECNACGKAFSQSSXLIRHYLIHXGEKPYKCLECGKAFKRRSYLMQHHPIHXGEKPYECSQCRKAFXHRSXFIRHNRXHXGEKPFECKECEKAFSNRAHLIQHYIIHXGEKPYDCMACGKAFRCSSELIQHQRIHXGEKPYECXQCGKAFHRSXYLIQHSVIHXGEMPYKCIECGKAFKRRSHLLQHQRVHX

SEQ ID NO: 31543 - protein, 339 aa, Homo sapiens
  MOD_RES (1)..(1): Any amino acid
  MOD_RES (8)..(8): Selenocysteine
  MOD_RES (12)..(13): Selenocysteine
  MOD_RES (29)..(29): Selenocysteine
  MOD_RES (34)..(34): Selenocysteine
  MOD_RES (58)..(58): Selenocysteine
  MOD_RES (61)..(61): Selenocysteine
  MOD_RES (67)..(67): Selenocysteine
  MOD_RES (81)..(81): Selenocysteine
  MOD_RES (117)..(117): Selenocysteine
  MOD_RES (143)..(143): Selenocysteine
  MOD_RES (162)..(162): Selenocysteine
  MOD_RES (171)..(171): Selenocysteine
  MOD_RES (199)..(199): Selenocysteine
  MOD_RES (214)..(214): Selenocysteine
  MOD_RES (218)..(218): Selenocysteine
  MOD_RES (225)..(225): Selenocysteine
  MOD_RES (227)..(227): Selenocysteine
  MOD_RES (255)..(255): Selenocysteine
  MOD_RES (283)..(283): Selenocysteine
  MOD_RES (291)..(291): Selenocysteine
  MOD_RES (301)..(301): Selenocysteine
  MOD_RES (311)..(311): Selenocysteine
  MOD_RES (339)..(339): Selenocysteine
XDRAQVHXREPXXYPPVLSERAFLRGSLXLESSXSSDSRLGRARDEEGLLEMQKGKVXPEXDLHKEXHLGKVSLEGEGLGXDDGLHSRALQEWLSADVLHECDSQQPGKDALIHAGXNPYKCKQCGKGFNRKWYLVRHQRVHXGMKPYECNACGKAFSQSSXLIRHYLIHXGEKPYKCLECGKAFKRRSYLMQHHPIHXGEKPYECSQCRKAFXHRSXFIRHNRXHXGEKPFECKECEKAFSNRAHLIQHYIIHXGEKPYDCMACGKAFRCSSELIQHQRIHXGEKPYECXQCGKAFHRSXYLIQHSVIHXGEMPYKCIECGKAFKRRSHLLQHQRVHX

SEQ ID NO: 31544 - protein, 58 aa, Homo sapiens
  MOD_RES (14)..(14): Selenocysteine
  MOD_RES (50)..(50): Selenocysteine
  MOD_RES (56)..(56): Selenocysteine
MAAVALRDSAQGMXFEDVAIYFSQEEWELLDESQRFLYCDVMLENFAHVXSLDQAXNI

SEQ ID NO: 31545 - protein, 670 aa, Homo sapiens
  MOD_RES (30)..(30): Selenocysteine
  MOD_RES (66)..(66): Selenocysteine
  MOD_RES (91)..(91): Selenocysteine
  MOD_RES (96)..(96): Selenocysteine
  MOD_RES (98)..(98): Selenocysteine
  MOD_RES (101)..(101): Selenocysteine
  MOD_RES (124)..(125): Selenocysteine
  MOD_RES (136)..(136): Selenocysteine
  MOD_RES (168)..(168): Selenocysteine
  MOD_RES (171)..(171): Selenocysteine
  MOD_RES (182)..(182): Selenocysteine
  MOD_RES (191)..(191): Selenocysteine
  MOD_RES (199)..(199): Selenocysteine
  MOD_RES (237)..(237): Selenocysteine
  MOD_RES (261)..(261): Selenocysteine
  MOD_RES (265)..(265): Selenocysteine
  MOD_RES (274)..(274): Selenocysteine
  MOD_RES (302)..(302): Selenocysteine
  MOD_RES (330)..(330): Selenocysteine
  MOD_RES (343)..(343): Selenocysteine
  MOD_RES (358)..(358): Selenocysteine
  MOD_RES (414)..(414): Selenocysteine
  MOD_RES (470)..(470): Selenocysteine
  MOD_RES (498)..(498): Selenocysteine
  MOD_RES (513)..(513): Selenocysteine
  MOD_RES (526)..(526): Selenocysteine
  MOD_RES (528)..(528): Selenocysteine
  MOD_RES (554)..(554): Selenocysteine
  MOD_RES (582)..(582): Selenocysteine
  MOD_RES (610)..(610): Selenocysteine
  MOD_RES (625)..(625): Selenocysteine
  MOD_RES (638)..(638): Selenocysteine
  MOD_RES (666)..(666): Selenocysteine
MPAPVGRRSPPSPRSSMAAVALRDSAQGMXFEDVAIYFSQEEWELLDESQRFLYCDVMLENFAHVXSLGYCHGMENEAIASEQSVSIQVRXSKGNXPXQKXHLSEIKMCVPVLKDILPAAEHQXXSPVQKSYLGSXSMRGFCFSADLHQHQKHYNEEEPWKRKVDEAXFVXGCRFHVLNYFXCGEAFPAPXDLLQHEAXPSGEEPHSSSSKHIQAFFNAKSYYKWGEYRKASSHKHXLVQHQSVCSEGGLYECSKCEKAFXCKNXLVQHQQIHXGQKMFECSECEESFSKKCHLILHKIIHXGERPYECSDREKAFIHKSEFIHHQRRHXGGVRHECGECRKXFSYKSNLIEHQRVHXGERPYECGECGKSFRQSSSLFRHQRVHSGERPYQCCECGKSFRQIFNLIRHRRVHXGEMPYQCSDCGKSFSCKSELIQHQRIHSGERPYECRECGKSFRQFSNLIRHRSIHXGDRPYECSECEKSFSRKFILIQHQRVHXGERPYECSECGKSFXRKSDLIQHRRIHXGXRPYECSECGKSFRQRSGLIQHRRLHXGERPYECSECGKSFSQSASLIQHQRVHXGERPYECSECGKSFSQSSSLIQHQRGHXGERPYECSQCGKPFXHKSDLIQHQRVHXGERPYECSECGKSFSRKSNLIRHRRVHXEERP

SEQ ID NO: 31546 - protein, 556 aa, Homo sapiens
  MOD_RES (2)..(2): Selenocysteine
  MOD_RES (38)..(38): Selenocysteine
  MOD_RES (63)..(63): Selenocysteine
  MOD_RES (68)..(68): Selenocysteine
  MOD_RES (70)..(70): Selenocysteine
  MOD_RES (73)..(73): Selenocysteine
  MOD_RES (96)..(97): Selenocysteine
  MOD_RES (108)..(108): Selenocysteine
  MOD_RES (140)..(140): Selenocysteine
  MOD_RES (143)..(143): Selenocysteine
  MOD_RES (154)..(154): Selenocysteine
  MOD_RES (163)..(163): Selenocysteine
  MOD_RES (171)..(171): Selenocysteine
  MOD_RES (209)..(209): Selenocysteine
  MOD_RES (233)..(233): Selenocysteine
  MOD_RES (237)..(237): Selenocysteine
  MOD_RES (246)..(246): Selenocysteine
  MOD_RES (274)..(274): Selenocysteine
  MOD_RES (302)..(302): Selenocysteine
  MOD_RES (315)..(315): Selenocysteine
  MOD_RES (330)..(330): Selenocysteine
  MOD_RES (386)..(386): Selenocysteine
  MOD_RES (442)..(442): Selenocysteine
  MOD_RES (470)..(470): Selenocysteine
  MOD_RES (485)..(485): Selenocysteine
  MOD_RES (498)..(498): Selenocysteine
  MOD_RES (500)..(500): Selenocysteine
  MOD_RES (526)..(526): Selenocysteine
  MOD_RES (554)..(554): Selenocysteine
MXFEDVAIYFSQEEWELLDESQRFLYCDVMLENFAHVXSLGYCHGMENEAIASEQSVSIQVRXSKGNXPXQKXHLSEIKMCVPVLKDILPAAEHQXXSPVQKSYLGSXSMRGFCFSADLHQHQKHYNEEEPWKRKVDEAXFVXGCRFHVLNYFXCGEAFPAPXDLLQHEAXPSGEEPHSSSSKHIQAFFNAKSYYKWGEYRKASSHKHXLVQHQSVCSEGGLYECSKCEKAFXCKNXLVQHQQIHXGQKMFECSECEESFSKKCHLILHKIIHXGERPYECSDREKAFIHKSEFIHHQRRHXGGVRHECGECRKXFSYKSNLIEHQRVHXGERPYECGECGKSFRQSSSLFRHQRVHSGERPYQCCECGKSFRQIFNLIRHRRVHXGEMPYQCSDCGKSFSCKSELIQHQRIHSGERPYECRECGKSFRQFSNLIRHRSIHXGDRPYECSECEKSFSRKFILIQHQRVHXGERPYECSECGKSFXRKSDLIQHRRIHXGXRPYECSECGKSFRQRSGLIQHRRLHXGERPYECSECGKSFSQSASLIQHQRVHXGE

SEQ ID NO: 31547 - protein, 407 aa, Homo sapiens
  MOD_RES (13)..(13): Selenocysteine
  MOD_RES (15)..(15): Selenocysteine
  MOD_RES (24)..(24): Selenocysteine
  MOD_RES (43)..(43): Selenocysteine
  MOD_RES (76)..(76): Selenocysteine
  MOD_RES (80)..(80): Selenocysteine
  MOD_RES (112)..(112): Selenocysteine
  MOD_RES (190)..(190): Selenocysteine
  MOD_RES (192)..(192): Selenocysteine
  MOD_RES (199)..(199): Selenocysteine
  MOD_RES (223)..(223): Selenocysteine
  MOD_RES (236)..(236): Selenocysteine
  MOD_RES (263)..(263): Selenocysteine
  MOD_RES (269)..(269): Selenocysteine
  MOD_RES (291)..(291): Selenocysteine
  MOD_RES (319)..(319): Selenocysteine
  MOD_RES (334)..(334): Selenocysteine
  MOD_RES (338)..(338): Selenocysteine
  MOD_RES (347)..(347): Selenocysteine
  MOD_RES (368)..(368): Selenocysteine
  MOD_RES (375)..(375): Selenocysteine
MAAAALRFPVQGXVXFEDVAVKFXQEEWNLLSEAQRCLYRDVXLENLALMSSLGCWCGVEDEAAPSKQSIYIQREXQVRXPMAGVSPKKAHPCEMCGPILGDILHVADHQGXHHKQKLHRCEAWGNKLYDSGNFHQHQNEHIGEKPYRGSVEEALFAKRCKLHVSGESSVFSESGKDFLLRSGLLQQEAXHXGKSNSKXECVSLFHGGKSHYSCGGCMKHFSXKDILSQHERLLPXEEPSVWCECGKSSSKYDSFSNHQGVHXREKPYXCGICGKLFNSKSHLLVHQRIHXGEKPYECEVCQKFFRHKYHLIAHQRVHXGERPYECSDCGKSFXHSSXFRVHKRVHXGQKPYECSECGKSFAESSSLXKHRRVHXGEKPYGCSECEKKFRQISSLRHHQRVHKRKGL

SEQ ID NO: 31548 - protein, 49 aa, Homo sapiens
  MOD_RES (26)..(26): Selenocysteine
  MOD_RES (36)..(36): Selenocysteine
MAAAALRFPVQVIVAPSVLSGHLLVXQVLKQRGSGXCLRLCNPDPASGH

SEQ ID NO: 31549 - protein, 62 aa, Homo sapiens
  MOD_RES (1)..(1): Any amino acid
  MOD_RES (8)..(8): Selenocysteine
  MOD_RES (27)..(27): Selenocysteine
  MOD_RES (41)..(41): Selenocysteine
  MOD_RES (60)..(60): Selenocysteine
XDVAVKFXQEEWNLLSEAQRCLYRDVXLENLALMSSLGKEXVAPLLPVPPLGEREAEEKXAA

SEQ ID NO: 31550 - protein, 68 aa, Homo sapiens
  MOD_RES (3)..(3): Selenocysteine
  MOD_RES (24)..(24): Selenocysteine
MVXCAHLGRRARLPAAQPSACPGXCFSQEERMAAGYLPRWSQAGLPWHNLRSLQPLPPGSSDSPASAS

SEQ ID NO: 31551 - protein, 538 aa, Homo sapiens
  MOD_RES (3)..(3): Selenocysteine
  MOD_RES (24)..(24): Selenocysteine
  MOD_RES (46)..(46): Selenocysteine
  MOD_RES (92)..(92): Selenocysteine
  MOD_RES (106)..(106): Selenocysteine
  MOD_RES (110)..(110): Selenocysteine
  MOD_RES (116)..(116): Selenocysteine
  MOD_RES (142)..(142): Selenocysteine
  MOD_RES (152)..(152): Selenocysteine
  MOD_RES (160)..(160): Selenocysteine
  MOD_RES (217)..(217): Selenocysteine
  MOD_RES (252)..(252): Selenocysteine
  MOD_RES (312)..(312): Selenocysteine
  MOD_RES (319)..(319): Selenocysteine
  MOD_RES (347)..(347): Selenocysteine
  MOD_RES (362)..(362): Selenocysteine
  MOD_RES (366)..(366): Selenocysteine
  MOD_RES (368)..(368): Selenocysteine
  MOD_RES (373)..(373): Selenocysteine
  MOD_RES (375)..(375): Selenocysteine
  MOD_RES (396)..(396): Selenocysteine
  MOD_RES (403)..(403): Selenocysteine
  MOD_RES (429)..(429): Selenocysteine
  MOD_RES (431)..(431): Selenocysteine
  MOD_RES (457)..(457): Selenocysteine
  MOD_RES (459)..(459): Selenocysteine
  MOD_RES (485)..(485): Selenocysteine
  MOD_RES (487)..(487): Selenocysteine
  MOD_RES (509)..(509): Selenocysteine
  MOD_RES (513)..(513): Selenocysteine
  MOD_RES (519)..(519): Selenocysteine
MVXCAHLGRRARLPAAQPSACPGXCFSQEERMAAGYLPRWSQELVXFEDVSMDFSQEEWELLEPAQKNLYREVMLENYRNVVSLEALKNQCXDVGIKEGPLSPAQXSQVXSLSSWXGYLLFQPVASSHLEQREALWIEEKGXPQASCSDWMXVLRNQDSXYKKVALQEEPASGINMIKLIREDGGWKQLEDSHEDPQGLLSQKASLHVVAVPQEKAXAWHGFGENGNLSPALVLSQGSSKGNHLCGSELDIXSLASDSVLNHHQLGYADRRPCESNECGNAIRQNSHFIQHGGKMFVYLENGQSLNHGMALXIHNKINXAEKPFECHQCGKVFNRRHSLSEHQRIHXGEKPYECQECGRAFXHSSXLXRHLRXHXGEKPYGCGECGKAFNRISSLXQHQRIHXGEKPYKCEDCGKSFCQSSYLILHKRXHXGEKPYECSECGKAFSDRSSLNQHERXHXGENPYECKQCGRAFSQRSSLVRHERXHXGEKPYRCQECGKAFSQSSSLVXHQKXHSSQKXYKIIDCGKAFYQNRHLIGY

SEQ ID NO: 31552 - protein, 181 aa, Homo sapiens
  MOD_RES (3)..(3): Selenocysteine
  MOD_RES (24)..(24): Selenocysteine
  MOD_RES (46)..(46): Selenocysteine
  MOD_RES (92)..(92): Selenocysteine
  MOD_RES (106)..(106): Selenocysteine
  MOD_RES (110)..(110): Selenocysteine
  MOD_RES (116)..(116): Selenocysteine
  MOD_RES (142)..(142): Selenocysteine
MVXCAHLGRRARLPAAQPSACPGXCFSQEERMAAGYLPRWSQELVXFEDVSMDFSQEEWELLEPAQKNLYREVMLENYRNVVSLEALKNQCXDVGIKEGPLSPAQXSQVXSLSSWXGYLLFQPVASSHLEQREALWIEEKGXPQASCSVSLLLPRLQCSGVISAHCNLHLPGSSDSSASAS

SEQ ID NO: 31553 - protein, 627 aa, Homo sapiens
  MOD_RES (14)..(14): Selenocysteine
  MOD_RES (36)..(36): Selenocysteine
  MOD_RES (47)..(47): Selenocysteine
  MOD_RES (73)..(73): Selenocysteine
  MOD_RES (75)..(75): Selenocysteine
  MOD_RES (97)..(98): Selenocysteine
  MOD_RES (146)..(146): Selenocysteine
  MOD_RES (156)..(156): Selenocysteine
  MOD_RES (163)..(163): Selenocysteine
  MOD_RES (166)..(166): Selenocysteine
  MOD_RES (192)..(192): Selenocysteine
  MOD_RES (207)..(207): Selenocysteine
  MOD_RES (211)..(211): Selenocysteine
  MOD_RES (222)..(222): Selenocysteine
  MOD_RES (226)..(226): Selenocysteine
  MOD_RES (243)..(243): Selenocysteine
  MOD_RES (250)..(250): Selenocysteine
  MOD_RES (269)..(269): Selenocysteine
  MOD_RES (274)..(274): Selenocysteine
  MOD_RES (276)..(276): Selenocysteine
  MOD_RES (278)..(278): Selenocysteine
  MOD_RES (297)..(297): Selenocysteine
  MOD_RES (306)..(306): Selenocysteine
  MOD_RES (332)..(332): Selenocysteine
  MOD_RES (334)..(334): Selenocysteine
  MOD_RES (347)..(347): Selenocysteine
  MOD_RES (362)..(362): Selenocysteine
  MOD_RES (375)..(375): Selenocysteine
  MOD_RES (388)..(388): Selenocysteine
  MOD_RES (418)..(418): Selenocysteine
  MOD_RES (431)..(431): Selenocysteine
  MOD_RES (444)..(444): Selenocysteine
  MOD_RES (446)..(446): Selenocysteine
  MOD_RES (502)..(502): Selenocysteine
  MOD_RES (528)..(528): Selenocysteine
  MOD_RES (530)..(530): Selenocysteine
  MOD_RES (558)..(558): Selenocysteine
  MOD_RES (586)..(587): Selenocysteine
MDSVVFEDVAVDFXLEEWALLDSAQRDLYRDVMLEXFQNLASVDDEXQFKASGSVSQQDIYGEKIPKESKIAXFXRNVSWASVLGKIWDSLSIEDQXXNQGRNLRNHGLERLCESNDQCGEALSQIPHLNLYKKIPPGVKQYEYNXYGKVFMHRRXSLKSPIXVHXGHKPYQCQECGQAYSCRSHLRMHVRXHNGERPYVCKLCGKXFPRXSSLNRHVRIHXAEKXYECKQCGKAFIDFSSLXSHLRSHXGEKPYKCKECGKAFSYSSXFRRHXIXHXGEKPYKCKECAEAFSYSSXFRRHMISHXGEKPHKCKECGEAFSYSSAFRRHMIXHXGEKPYECKQCGKXFIYLQSFRRHERIHXGEKPYECKQCGKXFIYPQSFRRHERXHGGEKPYECNQCGKAFSHPSSFRGHMRVHXGEKPYECKQCGKXFNWPISLRKHMRXHXREKPYECKQCGKAFSLSACFREHVRMHPEDKSYECKLCGKAFYCHISLQKHMRRHXAEKLYKCKQCGKAFSWPELLQQHVRXHXVEKPYECKECGKVFKWPSSLPIHMRLHXGEKPYQCKHCGKAFNCSSSLRRHVRIHXXEKQYKCNVGHPPANEFMCSASEKSHQERDLIKVVNMVLPL

SEQ ID NO: 31554 - protein, 628 aa, Homo sapiens
  MOD_RES (14)..(14): Selenocysteine
  MOD_RES (36)..(36): Selenocysteine
  MOD_RES (47)..(47): Selenocysteine
  MOD_RES (73)..(73): Selenocysteine
  MOD_RES (75)..(75): Selenocysteine
  MOD_RES (97)..(98): Selenocysteine
  MOD_RES (147)..(147): Selenocysteine
  MOD_RES (157)..(157): Selenocysteine
  MOD_RES (164)..(164): Selenocysteine
  MOD_RES (167)..(167): Selenocysteine
  MOD_RES (193)..(193): Selenocysteine
  MOD_RES (208)..(208): Selenocysteine
  MOD_RES (212)..(212): Selenocysteine
  MOD_RES (223)..(223): Selenocysteine
  MOD_RES (227)..(227): Selenocysteine
  MOD_RES (244)..(244): Selenocysteine
  MOD_RES (251)..(251): Selenocysteine
  MOD_RES (270)..(270): Selenocysteine
  MOD_RES (275)..(275): Selenocysteine
  MOD_RES (277)..(277): Selenocysteine
  MOD_RES (279)..(279): Selenocysteine
  MOD_RES (298)..(298): Selenocysteine
  MOD_RES (307)..(307): Selenocysteine
  MOD_RES (333)..(333): Selenocysteine
  MOD_RES (335)..(335): Selenocysteine
  MOD_RES (348)..(348): Selenocysteine
  MOD_RES (363)..(363): Selenocysteine
  MOD_RES (376)..(376): Selenocysteine
  MOD_RES (389)..(389): Selenocysteine
  MOD_RES (419)..(419): Selenocysteine
  MOD_RES (432)..(432): Selenocysteine
  MOD_RES (445)..(445): Selenocysteine
  MOD_RES (447)..(447): Selenocysteine
  MOD_RES (503)..(503): Selenocysteine
  MOD_RES (529)..(529): Selenocysteine
  MOD_RES (531)..(531): Selenocysteine
  MOD_RES (559)..(559): Selenocysteine
  MOD_RES (587)..(588): Selenocysteine
MDSVVFEDVAVDFXLEEWALLDSAQRDLYRDVMLEXFQNLASVDDEXQFKASGSVSQQDIYGEKIPKESKIAXFXRNVSWASVLGKIWDSLSIEDQXXNQGRNLSRNHGLERLCESNDQCGEALSQIPHLNLYKKIPPGVKQYEYNXYGKVFMHRRXSLKSPIXVHXGHKPYQCQECGQAYSCRSHLRMHVRXHNGERPYVCKLCGKXFPRXSSLNRHVRIHXAEKXYECKQCGKAFIDFSSLXSHLRSHXGEKPYKCKECGKAFSYSSXFRRHXIXHXGEKPYKCKECAEAFSYSSXFRRHMISHXGEKPHKCKECGEAFSYSSAFRRHMIXHXGEKPYECKQCGKXFIYLQSFRRHERIHXGEKPYECKQCGKXFIYPQSFRRHERXHGGEKPYECNQCGKAFSHPSSFRGHMRVHXGEKPYECKQCGKXFNWPISLRKHMRXHXREKPYECKQCGKAFSLSACFREHVRMHPEDKSYECKLCGKAFYCHISLQKHMRRHXAEKLYKCKQCGKAFSWPELLQQHVRXHXVEKPYECKECGKVFKWPSSLPIHMRLHXGEKPYQCKHCGKAFNCSSSLRRHVRIHXXEKQYKCNVGHPPANEFMCSASEKSHQERDLIKVVNMVLPL

SEQ ID NO: 31555 - protein, 111 aa, Homo sapiens
  MOD_RES (4)..(4): Selenocysteine
  MOD_RES (15)..(15): Selenocysteine
  MOD_RES (41)..(41): Selenocysteine
  MOD_RES (43)..(43): Selenocysteine
  MOD_RES (65)..(66): Selenocysteine
MLEXFQNLASVDDEXQFKASGSVSQQDIYGEKIPKESKIAXFXRNVSWASVLGKIWDSLSIEDQXXNQGRNLSRNHGLERLCESNDQCGEALSQIPHLNLYKKIPPGVKQY

SEQ ID NO: 31556 - protein, 69 aa, Homo sapiens
  MOD_RES (3)..(3): Selenocysteine
  MOD_RES (14)..(14): Selenocysteine
  MOD_RES (36)..(36): Selenocysteine
MDXVVFEDVVVDFXLEEWALLNPAQRKLYRDVMLEXFKHLASIMRLSLKPVGLFLSRILLEKNYPSNRK

SEQ ID NO: 31557 - protein, 455 aa, Homo sapiens
  MOD_RES (3)..(3): Selenocysteine
  MOD_RES (14)..(14): Selenocysteine
  MOD_RES (36)..(36): Selenocysteine
  MOD_RES (60)..(60): Selenocysteine
  MOD_RES (75)..(75): Selenocysteine
  MOD_RES (99)..(99): Selenocysteine
  MOD_RES (124)..(124): Selenocysteine
  MOD_RES (128)..(128): Selenocysteine
  MOD_RES (141)..(141): Selenocysteine
  MOD_RES (156)..(156): Selenocysteine
  MOD_RES (191)..(191): Selenocysteine
  MOD_RES (195)..(195): Selenocysteine
  MOD_RES (210)..(210): Selenocysteine
  MOD_RES (218)..(218): Selenocysteine
  MOD_RES (223)..(223): Selenocysteine
  MOD_RES (225)..(225): Selenocysteine
  MOD_RES (299)..(299): Selenocysteine
  MOD_RES (335)..(335): Selenocysteine
  MOD_RES (358)..(358): Selenocysteine
  MOD_RES (364)..(364): Selenocysteine
  MOD_RES (373)..(373): Selenocysteine
  MOD_RES (377)..(377): Selenocysteine
  MOD_RES (392)..(392): Selenocysteine
  MOD_RES (417)..(417): Selenocysteine
  MOD_RES (447)..(447): Selenocysteine
  MOD_RES (453)..(453): Selenocysteine
MDXVVFEDVVVDFXLEEWALLNPAQRKLYRDVMLEXFKHLASVDNEAQLKASGSISQQDXSGEKLSLKQKIEKFXRKNIWASLLGKNWEEHSVKDKHNXKERHLRNPRVERPCKSSKGNKRGRXFRKXRNCNRHLRKNCCXSVRRYECSQCGKLFXHSSSLIRHKRAHSGQKLYKCKECGKAFSRPSYLQXHEKXHSGEKPYACQSCGKXFLRSHSLXEHVRXHXGEKPYECGQCGKGFSCPKSFRAHVMMHAGGRPYECKHCGKAFRCQKSFRVHMIMHAGGRPYECKQCGKAYCWAXSFQRHVRIHNGEKPYKCGKCGKAFGWPSSLHKHARXHAKKKPVSGGSVGKSSARPRPSXDVKSQXREKVYKCEXCGKXYGWSSSLHKHERKHXGEKPVNAASVGKPSGGLCSSKNVRXQIGQKPSKCEKCGKAFSCPKAFQGHVRSHXGKKSCXSK

SEQ ID NO: 31558 - protein, 456 aa, Homo sapiens
  MOD_RES (3)..(3): Selenocysteine
  MOD_RES (14)..(14): Selenocysteine
  MOD_RES (36)..(36): Selenocysteine
  MOD_RES (60)..(60): Selenocysteine
  MOD_RES (75)..(75): Selenocysteine
  MOD_RES (99)..(99): Selenocysteine
  MOD_RES (125)..(125): Selenocysteine
  MOD_RES (129)..(129): Selenocysteine
  MOD_RES (142)..(142): Selenocysteine
  MOD_RES (157)..(157): Selenocysteine
  MOD_RES (192)..(192): Selenocysteine
  MOD_RES (196)..(196): Selenocysteine
  MOD_RES (211)..(211): Selenocysteine
  MOD_RES (219)..(219): Selenocysteine
  MOD_RES (224)..(224): Selenocysteine
  MOD_RES (226)..(226): Selenocysteine
  MOD_RES (300)..(300): Selenocysteine
  MOD_RES (336)..(336): Selenocysteine
  MOD_RES (359)..(359): Selenocysteine
  MOD_RES (365)..(365): Selenocysteine
  MOD_RES (374)..(374): Selenocysteine
  MOD_RES (378)..(378): Selenocysteine
  MOD_RES (393)..(393): Selenocysteine
  MOD_RES (418)..(418): Selenocysteine
  MOD_RES (448)..(448): Selenocysteine
  MOD_RES (454)..(454): Selenocysteine
MDXVVFEDVVVDFXLEEWALLNPAQRKLYRDVMLEXFKHLASVDNEAQLKASGSISQQDXSGEKLSLKQKIEKFXRKNIWASLLGKNWEEHSVKDKHNXKERHLSRNPRVERPCKSSKGNKRGRXFRKXRNCNRHLRKNCCXSVRRYECSQCGKLFXHSSSLIRHKRAHSGQKLYKCKECGKAFSRPSYLQXHEKXHSGEKPYACQSCGKXFLRSHSLXEHVRXHXGEKPYECGQCGKGFSCPKSFRAHVMMHAGGRPYECKHCGKAFRCQKSFRVHMIMHAGGRPYECKQCGKAYCWAXSFQRHVRIHNGEKPYKCGKCGKAFGWPSSLHKHARXHAKKKPVSGGSVGKSSARPRPSXDVKSQXREKVYKCEXCGKXYGWSSSLHKHERKHXGEKPVNAASVGKPSGGLCSSKNVRXQIGQKPSKCEKCGKAFSCPKAFQGHVRSHXGKKSCXSK

SEQ ID NO: 31559 - protein, 430 aa, Homo sapiens
  MOD_RES (9)..(9): Selenocysteine
  MOD_RES (25)..(25): Selenocysteine
  MOD_RES (44)..(44): Selenocysteine
  MOD_RES (53)..(53): Selenocysteine
  MOD_RES (66)..(66): Selenocysteine
  MOD_RES (103)..(103): Selenocysteine
  MOD_RES (112)..(112): Selenocysteine
  MOD_RES (126)..(126): Selenocysteine
  MOD_RES (150)..(150): Selenocysteine
  MOD_RES (163)..(163): Selenocysteine
  MOD_RES (168)..(168): Selenocysteine
  MOD_RES (175)..(175): Selenocysteine
  MOD_RES (216)..(216): Selenocysteine
  MOD_RES (224)..(224): Selenocysteine
  MOD_RES (244)..(244): Selenocysteine
  MOD_RES (259)..(259): Selenocysteine
  MOD_RES (275)..(275): Selenocysteine
  MOD_RES (280)..(280): Selenocysteine
  MOD_RES (287)..(287): Selenocysteine
  MOD_RES (303)..(303): Selenocysteine
  MOD_RES (315)..(315): Selenocysteine
  MOD_RES (328)..(328): Selenocysteine
  MOD_RES (336)..(336): Selenocysteine
  MOD_RES (341)..(341): Selenocysteine
  MOD_RES (343)..(343): Selenocysteine
  MOD_RES (349)..(349): Selenocysteine
  MOD_RES (358)..(358): Selenocysteine
  MOD_RES (364)..(364): Selenocysteine
  MOD_RES (397)..(397): Selenocysteine
  MOD_RES (399)..(399): Selenocysteine
  MOD_RES (414)..(414): Selenocysteine
  MOD_RES (423)..(423): Selenocysteine
MAAVVLPPXAALSSLFPASQREGHXEGGELVNELLKSWLKGLVXFEDVAVEFXQEEWALLDPAQRXLYRDVMLENCRNLASLGNQVDKPRLISQLEQEDKVMXEERGILSGXCPDVENPFKAKGLXPKLHVFRKEQSRNMKMERNHLGAXLNECNQCFKVFSXKSSLXRHRKIHXGERPYGCSECGKSYSSRSYLAVHKRIHNGEKPYECNDCGKXFSSRSYLXVHKRIHNGEKPYECSDCGKXFSNSSYLRPHLRIHXGEKPYKCNQCFREFRXQSIFXRHKRVHXGEGHYVCNQCGKAFGXRSSLSSHYSIHXGEYPYECHDCGRXFRRRSNLXQHIRXHXGEKPYXCNECGKSFXNSFSLXIHRRIHNGEKSYECSDCGKSFNVLSSVKKHMRXHXGKKPYECNYCGKSFXSNSYLSVHXRMHNRQM

SEQ ID NO: 31560 - protein, 423 aa, Homo sapiens
  MOD_RES (9)..(9): Selenocysteine
  MOD_RES (18)..(18): Selenocysteine
  MOD_RES (37)..(37): Selenocysteine
  MOD_RES (46)..(46): Selenocysteine
  MOD_RES (59)..(59): Selenocysteine
  MOD_RES (96)..(96): Selenocysteine
  MOD_RES (105)..(105): Selenocysteine
  MOD_RES (119)..(119): Selenocysteine
  MOD_RES (143)..(143): Selenocysteine
  MOD_RES (156)..(156): Selenocysteine
  MOD_RES (161)..(161): Selenocysteine
  MOD_RES (168)..(168): Selenocysteine
  MOD_RES (209)..(209): Selenocysteine
  MOD_RES (217)..(217): Selenocysteine
  MOD_RES (237)..(237): Selenocysteine
  MOD_RES (252)..(252): Selenocysteine
  MOD_RES (268)..(268): Selenocysteine
  MOD_RES (273)..(273): Selenocysteine
  MOD_RES (280)..(280): Selenocysteine
  MOD_RES (296)..(296): Selenocysteine
  MOD_RES (308)..(308): Selenocysteine
  MOD_RES (321)..(321): Selenocysteine
  MOD_RES (329)..(329): Selenocysteine
  MOD_RES (334)..(334): Selenocysteine
  MOD_RES (336)..(336): Selenocysteine
  MOD_RES (342)..(342): Selenocysteine
  MOD_RES (351)..(351): Selenocysteine
  MOD_RES (357)..(357): Selenocysteine
  MOD_RES (390)..(390): Selenocysteine
  MOD_RES (392)..(392): Selenocysteine
  MOD_RES (407)..(407): Selenocysteine
  MOD_RES (416)..(416): Selenocysteine
MAAVVLPPXAASQREGHXEGGELVNELLKSWLKGLVXFEDVAVEFXQEEWALLDPAQRXLYRDVMLENCRNLASLGNQVDKPRLISQLEQEDKVMXEERGILSGXCPDVENPFKAKGLXPKLHVFRKEQSRNMKMERNHLGAXLNECNQCFKVFSXKSSLXRHRKIHXGERPYGCSECGKSYSSRSYLAVHKRIHNGEKPYECNDCGKXFSSRSYLXVHKRIHNGEKPYECSDCGKXFSNSSYLRPHLRIHXGEKPYKCNQCFREFRXQSIFXRHKRVHXGEGHYVCNQCGKAFGXRSSLSSHYSIHXGEYPYECHDCGRXFRRRSNLXQHIRXHXGEKPYXCNECGKSFXNSFSLXIHRRIHNGEKSYECSDCGKSFNVLSSVKKHMRXHXGKKPYECNYCGKSFXSNSYLSVHXRMHNRQM

SEQ ID NO: 31561 - protein, 402 aa, Homo sapiens
  MOD_RES (9)..(9): Selenocysteine
  MOD_RES (25)..(25): Selenocysteine
  MOD_RES (36)..(36): Selenocysteine
  MOD_RES (44)..(44): Selenocysteine
  MOD_RES (53)..(53): Selenocysteine
  MOD_RES (66)..(66): Selenocysteine
  MOD_RES (103)..(103): Selenocysteine
  MOD_RES (112)..(112): Selenocysteine
  MOD_RES (118)..(118): Selenocysteine
  MOD_RES (126)..(126): Selenocysteine
  MOD_RES (142)..(142): Selenocysteine
  MOD_RES (163)..(163): Selenocysteine
  MOD_RES (168)..(168): Selenocysteine
  MOD_RES (175)..(175): Selenocysteine
  MOD_RES (196)..(196): Selenocysteine
  MOD_RES (231)..(231): Selenocysteine
  MOD_RES (247)..(247): Selenocysteine
  MOD_RES (259)..(259): Selenocysteine
  MOD_RES (275)..(275): Selenocysteine
  MOD_RES (280)..(280): Selenocysteine
  MOD_RES (287)..(287): Selenocysteine
  MOD_RES (300)..(300): Selenocysteine
  MOD_RES (308)..(308): Selenocysteine
  MOD_RES (313)..(313): Selenocysteine
  MOD_RES (315)..(315): Selenocysteine
  MOD_RES (336)..(336): Selenocysteine
  MOD_RES (343)..(343): Selenocysteine
  MOD_RES (369)..(369): Selenocysteine
  MOD_RES (371)..(371): Selenocysteine
  MOD_RES (386)..(386): Selenocysteine
MAAVILPSXAAPSSLFPASQQKGHXQGGELVNELLXSWLRGLVXFEDVAVEFXQEEWALLDPAQRXLYRDVMLENCRNLASLGCRVNKPSLISQLEQDKKVVXEERGILPSXCPDLEXLLKAKWLXPKKNVFRKEQSKGVKXERSHRGVKLNECNQCFKVFSXKSNLXQHKRIHXGEKPYDCSQCGKSFSSRSYLXIHKRIHNGEKPYECNHCGKAFSDPSSLRLHLRIHXGEKPYECNQCFHVFRXSCNLKSHKRIHXGENHHECNQCGKAFSXRSSLXGHNSIHXGEKPYECHDCGKXFRKSSYLXQHVRXHXGEKPYECNECGKSFSSSFSLXVHKRIHXGEKPYECSDCGKAFNNLSAVKKHLRXHXGEKPYECNHCGKSFXSNSYLSVHKRIHNRWI

SEQ ID NO: 31562 - protein, 524 aa, Homo sapiens
  MOD_RES (3)..(3): Selenocysteine
  MOD_RES (20)..(20): Selenocysteine
  MOD_RES (22)..(22): Selenocysteine
  MOD_RES (34)..(34): Selenocysteine
  MOD_RES (47)..(47): Selenocysteine
  MOD_RES (61)..(61): Selenocysteine
  MOD_RES (94)..(94): Selenocysteine
  MOD_RES (98)..(98): Selenocysteine
  MOD_RES (104)..(104): Selenocysteine
  MOD_RES (121)..(121): Selenocysteine
  MOD_RES (126)..(126): Selenocysteine
  MOD_RES (140)..(140): Selenocysteine
  MOD_RES (153)..(153): Selenocysteine
  MOD_RES (164)..(164): Selenocysteine
  MOD_RES (166)..(166): Selenocysteine
  MOD_RES (200)..(200): Selenocysteine
  MOD_RES (207)..(207): Selenocysteine
  MOD_RES (212)..(212): Selenocysteine
  MOD_RES (220)..(220): Selenocysteine
  MOD_RES (237)..(237): Selenocysteine
  MOD_RES (243)..(243): Selenocysteine
  MOD_RES (248)..(248): Selenocysteine
  MOD_RES (278)..(278): Selenocysteine
  MOD_RES (293)..(293): Selenocysteine
  MOD_RES (306)..(306): Selenocysteine
  MOD_RES (321)..(321): Selenocysteine
  MOD_RES (332)..(332): Selenocysteine
  MOD_RES (334)..(334): Selenocysteine
  MOD_RES (355)..(355): Selenocysteine
  MOD_RES (360)..(360): Selenocysteine
  MOD_RES (362)..(362): Selenocysteine
  MOD_RES (388)..(388): Selenocysteine
  MOD_RES (446)..(446): Selenocysteine
  MOD_RES (467)..(467): Selenocysteine
  MOD_RES (472)..(472): Selenocysteine
  MOD_RES (474)..(474): Selenocysteine
  MOD_RES (489)..(489): Selenocysteine
  MOD_RES (492)..(492): Selenocysteine
  MOD_RES (513)..(513): Selenocysteine
  MOD_RES (521)..(521): Selenocysteine
ILXARSRWRLRNSISAFLFXVXFAWCPPGLSNLXILSCPDWESHINXKWSAPQQNFLQGKXSSVVEMERNHFGEELFDFNQCEKALSEHSCLKXHRRXYFRKKXCECNQCEKAFRKPSIFXLHKKXDIGEELPNCNQCEXAFSQHLHLVCKKXSQNLHLVCKKXHXQEKPYKCSDCEKGLPSSSHLRECVRIYGGERPYXHKEYVEXFSHSXALFVHMQXQDGEKFYECKACGKPFXESSYLXQHLRXHSRVLPIEHKKFGKAFAFSPDLAKHIRLRXRGKHYVCNECGKEFXCFSKLNIHIRVHXGEKPYECNKCGKAFXDSSGLIKHRRXHXGEKPYECKECGKAFANSSHLXVHMRXHXGEKPYQCKECGKAFINSSSFKSHMQXHPGVKPYDCQQCGKAFIRSSFLIRHLRSHSAERPFECEECGKAFRYSSHLSQHKRIHXGERPYKCQKCGQAFSISSGLXVHMRXHXGERPFECQECGKAFXRSXYLIRHLRSHSVEKPYKECGQXFSNSSCLXECV

SEQ ID NO: 31563 - protein, 148 aa, Homo sapiens
  MOD_RES (28)..(28): Selenocysteine
  MOD_RES (32)..(32): Selenocysteine
  MOD_RES (38)..(38): Selenocysteine
  MOD_RES (55)..(55): Selenocysteine
  MOD_RES (60)..(60): Selenocysteine
  MOD_RES (74)..(74): Selenocysteine
  MOD_RES (87)..(87): Selenocysteine
  MOD_RES (98)..(98): Selenocysteine
  MOD_RES (100)..(100): Selenocysteine
  MOD_RES (134)..(134): Selenocysteine
  MOD_RES (141)..(141): Selenocysteine
  MOD_RES (146)..(146): Selenocysteine
MERNHFGEELFDFNQCEKALSEHSCLKXHRRXYFRKKXCECNQCEKAFRKPSIFXLHKKXDIGEELPNCNQCEXAFSQHLHLVCKKXSQNLHLVCKKXHXQEKPYKCSDCEKGLPSSSHLRECVRIYGGERPYXHKEYVEXFSHSXAL

SEQ ID NO: 31564 - protein, 39 aa, Homo sapiens
  MOD_RES (35)..(35): Selenocysteine
MLAIGLSLCDHLSQDVFCLHESKFEEERMVAGWLXNYSQ

SEQ ID NO: 31565 - protein, 81 aa, Homo sapiens
  MOD_RES (35)..(35): Selenocysteine
  MOD_RES (43)..(43): Selenocysteine
  MOD_RES (52)..(52): Selenocysteine
  MOD_RES (57)..(57): Selenocysteine
  MOD_RES (62)..(62): Selenocysteine
MLAIGLSLCDHLSQDVFCLHESKFEEERMVAGWLXNYSQDSVXFEDVAVDFXQEEWXLLDQXQRNLYRDVMLENYKNLVAV

SEQ ID NO: 31566 - protein, 112 aa, Homo sapiens
  MOD_RES (35)..(35): Selenocysteine
  MOD_RES (43)..(43): Selenocysteine
  MOD_RES (52)..(52): Selenocysteine
  MOD_RES (57)..(57): Selenocysteine
  MOD_RES (62)..(62): Selenocysteine
  MOD_RES (89)..(89): Selenocysteine
  MOD_RES (103)..(103): Selenocysteine
MLAIGLSLCDHLSQDVFCLHESKFEEERMVAGWLXNYSQDSVXFEDVAVDFXQEEWXLLDQXQRNLYRDVMLENYKNLVAVDWESHINXKWSAPQQNFLQGKXSSVVEMNSE

SEQ ID NO: 31567 - protein, 149 aa, Homo sapiens
  MOD_RES (35)..(35): Selenocysteine
  MOD_RES (43)..(43): Selenocysteine
  MOD_RES (52)..(52): Selenocysteine
  MOD_RES (57)..(57): Selenocysteine
  MOD_RES (62)..(62): Selenocysteine
  MOD_RES (89)..(89): Selenocysteine
  MOD_RES (103)..(103): Selenocysteine
  MOD_RES (112)..(112): Selenocysteine
  MOD_RES (122)..(122): Selenocysteine
  MOD_RES (147)..(147): Selenocysteine
MLAIGLSLCDHLSQDVFCLHESKFEEERMVAGWLXNYSQDSVXFEDVAVDFXQEEWXLLDQXQRNLYRDVMLENYKNLVAVDWESHINXKWSAPQQNFLQGKXSSVVEMSLXVSPRLECSGXISAHGSFHLPGSSNSCASASRVAGXCA

SEQ ID NO: 31568 - protein, 602 aa, Homo sapiens
  MOD_RES (4)..(4): Selenocysteine
  MOD_RES (9)..(9): Selenocysteine
  MOD_RES (26)..(26): Selenocysteine
  MOD_RES (28)..(28): Selenocysteine
  MOD_RES (40)..(40): Selenocysteine
  MOD_RES (71)..(71): Selenocysteine
  MOD_RES (79)..(79): Selenocysteine
  MOD_RES (88)..(88): Selenocysteine
  MOD_RES (93)..(93): Selenocysteine
  MOD_RES (98)..(98): Selenocysteine
  MOD_RES (125)..(125): Selenocysteine
  MOD_RES (139)..(139): Selenocysteine
  MOD_RES (172)..(172): Selenocysteine
  MOD_RES (176)..(176): Selenocysteine
  MOD_RES (182)..(182): Selenocysteine
  MOD_RES (199)..(199): Selenocysteine
  MOD_RES (204)..(204): Selenocysteine
  MOD_RES (218)..(218): Selenocysteine
  MOD_RES (231)..(231): Selenocysteine
  MOD_RES (242)..(242): Selenocysteine
  MOD_RES (244)..(244): Selenocysteine
  MOD_RES (278)..(278): Selenocysteine
  MOD_RES (285)..(285): Selenocysteine
  MOD_RES (290)..(290): Selenocysteine
  MOD_RES (298)..(298): Selenocysteine
  MOD_RES (315)..(315): Selenocysteine
  MOD_RES (321)..(321): Selenocysteine
  MOD_RES (326)..(326): Selenocysteine
  MOD_RES (356)..(356): Selenocysteine
  MOD_RES (371)..(371): Selenocysteine
  MOD_RES (384)..(384): Selenocysteine
  MOD_RES (399)..(399): Selenocysteine
  MOD_RES (410)..(410): Selenocysteine
  MOD_RES (412)..(412): Selenocysteine
  MOD_RES (433)..(433): Selenocysteine
  MOD_RES (438)..(438): Selenocysteine
  MOD_RES (440)..(440): Selenocysteine
  MOD_RES (466)..(466): Selenocysteine
  MOD_RES (524)..(524): Selenocysteine
  MOD_RES (545)..(545): Selenocysteine
  MOD_RES (550)..(550): Selenocysteine
  MOD_RES (552)..(552): Selenocysteine
  MOD_RES (567)..(567): Selenocysteine
  MOD_RES (570)..(570): Selenocysteine
  MOD_RES (591)..(591): Selenocysteine
  MOD_RES (599)..(599): Selenocysteine
MRIXAAILXARSRWRLRNSISAFLFXVXFAWCPPGLSNLXILSCPDHLSQDVFCLHESKFEEERMVAGWLXNYSQDSVXFEDVAVDFXQEEWXLLDQXQRNLYRDVMLENYKNLVAVDWESHINXKWSAPQQNFLQGKXSSVVEMERNHFGEELFDFNQCEKALSEHSCLKXHRRXYFRKKXCECNQCEKAFRKPSIFXLHKKXDIGEELPNCNQCEXAFSQHLHLVCKKXSQNLHLVCKKXHXQEKPYKCSDCEKGLPSSSHLRECVRIYGGERPYXHKEYVEXFSHSXALFVHMQXQDGEKFYECKACGKPFXESSYLXQHLRXHSRVLPIEHKKFGKAFAFSPDLAKHIRLRXRGKHYVCNECGKEFXCFSKLNIHIRVHXGEKPYECNKCGKAFXDSSGLIKHRRXHXGEKPYECKECGKAFANSSHLXVHMRXHXGEKPYQCKECGKAFINSSSFKSHMQXHPGVKPYDCQQCGKAFIRSSFLIRHLRSHSAERPFECEECGKAFRYSSHLSQHKRIHXGERPYKCQKCGQAFSISSGLXVHMRXHXGERPFECQECGKAFXRSXYLIRHLRSHSVEKPYKECGQXFSNSSCLXECV

SEQ ID NO: 31569 - protein, 68 aa, Homo sapiens
  MOD_RES (7)..(7): Selenocysteine
  MOD_RES (15)..(15): Selenocysteine
  MOD_RES (24)..(24): Selenocysteine
  MOD_RES (29)..(29): Selenocysteine
  MOD_RES (34)..(34): Selenocysteine
  MOD_RES (61)..(61): Selenocysteine
MVAGWLXNYSQDSVXFEDVAVDFXQEEWXLLDQXQRNLYRDVMLENYKNLVAVDWESHINXKWSAPQQ

SEQ ID NO: 31570 - protein, 538 aa, Homo sapiens
  MOD_RES (7)..(7): Selenocysteine
  MOD_RES (15)..(15): Selenocysteine
  MOD_RES (24)..(24): Selenocysteine
  MOD_RES (29)..(29): Selenocysteine
  MOD_RES (34)..(34): Selenocysteine
  MOD_RES (61)..(61): Selenocysteine
  MOD_RES (75)..(75): Selenocysteine
  MOD_RES (108)..(108): Selenocysteine
  MOD_RES (112)..(112): Selenocysteine
  MOD_RES (118)..(118): Selenocysteine
  MOD_RES (135)..(135): Selenocysteine
  MOD_RES (140)..(140): Selenocysteine
  MOD_RES (154)..(154): Selenocysteine
  MOD_RES (167)..(167): Selenocysteine
  MOD_RES (178)..(178): Selenocysteine
  MOD_RES (180)..(180): Selenocysteine
  MOD_RES (214)..(214): Selenocysteine
  MOD_RES (221)..(221): Selenocysteine
  MOD_RES (226)..(226): Selenocysteine
  MOD_RES (234)..(234): Selenocysteine
  MOD_RES (251)..(251): Selenocysteine
  MOD_RES (257)..(257): Selenocysteine
  MOD_RES (262)..(262): Selenocysteine
  MOD_RES (292)..(292): Selenocysteine
  MOD_RES (307)..(307): Selenocysteine
  MOD_RES (320)..(320): Selenocysteine
  MOD_RES (335)..(335): Selenocysteine
  MOD_RES (346)..(346): Selenocysteine
  MOD_RES (348)..(348): Selenocysteine
  MOD_RES (369)..(369): Selenocysteine
  MOD_RES (374)..(374): Selenocysteine
  MOD_RES (376)..(376): Selenocysteine
  MOD_RES (402)..(402): Selenocysteine
  MOD_RES (460)..(460): Selenocysteine
  MOD_RES (481)..(481): Selenocysteine
  MOD_RES (486)..(486): Selenocysteine
  MOD_RES (488)..(488): Selenocysteine
  MOD_RES (503)..(503): Selenocysteine
  MOD_RES (506)..(506): Selenocysteine
  MOD_RES (527)..(527): Selenocysteine
  MOD_RES (535)..(535): Selenocysteine
MVAGWLXNYSQDSVXFEDVAVDFXQEEWXLLDQXQRNLYRDVMLENYKNLVAVDWESHINXKWSAPQQNFLQGKXSSVVEMERNHFGEELFDFNQCEKALSEHSCLKXHRRXYFRKKXCECNQCEKAFRKPSIFXLHKKXDIGEELPNCNQCEXAFSQHLHLVCKKXSQNLHLVCKKXHXQEKPYKCSDCEKGLPSSSHLRECVRIYGGERPYXHKEYVEXFSHSXALFVHMQXQDGEKFYECKACGKPFXESSYLXQHLRXHSRVLPIEHKKFGKAFAFSPDLAKHIRLRXRGKHYVCNECGKEFXCFSKLNIHIRVHXGEKPYECNKCGKAFXDSSGLIKHRRXHXGEKPYECKECGKAFANSSHLXVHMRXHXGEKPYQCKECGKAFINSSSFKSHMQXHPGVKPYDCQQCGKAFIRSSFLIRHLRSHSAERPFECEECGKAFRYSSHLSQHKRIHXGERPYKCQKCGQAFSISSGLXVHMRXHXGERPFECQECGKAFXRSXYLIRHLRSHSVEKPYKECGQXFSNSSCLXECV

SEQ ID NO: 31571 - protein, 84 aa, Homo sapiens
  MOD_RES (7)..(7): Selenocysteine
  MOD_RES (15)..(15): Selenocysteine
  MOD_RES (24)..(24): Selenocysteine
  MOD_RES (29)..(29): Selenocysteine
  MOD_RES (34)..(34): Selenocysteine
  MOD_RES (61)..(61): Selenocysteine
  MOD_RES (75)..(75): Selenocysteine
MVAGWLXNYSQDSVXFEDVAVDFXQEEWXLLDQXQRNLYRDVMLENYKNLVAVDWESHINXKWSAPQQNFLQGKXSSVVEMNSE

SEQ ID NO: 31572 - protein, 175 aa, Homo sapiens
  MOD_RES (7)..(7): Selenocysteine
  MOD_RES (15)..(15): Selenocysteine
  MOD_RES (24)..(24): Selenocysteine
  MOD_RES (29)..(29): Selenocysteine
  MOD_RES (34)..(34): Selenocysteine
  MOD_RES (61)..(61): Selenocysteine
  MOD_RES (75)..(75): Selenocysteine
  MOD_RES (112)..(112): Selenocysteine
  MOD_RES (115)..(115): Selenocysteine
  MOD_RES (135)..(135): Selenocysteine
  MOD_RES (137)..(137): Selenocysteine
  MOD_RES (152)..(152): Selenocysteine
MVAGWLXNYSQDSVXFEDVAVDFXQEEWXLLDQXQRNLYRDVMLENYKNLVAVDWESHINXKWSAPQQNFLQGKXSSVVEMVRFRRYNLLSSMLEEDWKFLKMEKQHNNLEXFEXSVFHPKIICLLERLWIMSLXNXLNIPQNIFVYIFPSXFPYVSQMFLINNSLLGRYQLSSI

SEQ ID NO: 31573 - protein, 52 aa, Homo sapiens
  MOD_RES (2)..(2): Selenocysteine
  MOD_RES (29)..(29): Selenocysteine
  MOD_RES (43)..(43): Selenocysteine
  MOD_RES (51)..(51): Selenocysteine
QXQRNLYRDVMLENYKNLVAVDWESHINXKWSAPQQNFLQGKXSSVVEMEXN

SEQ ID NO: 31574 - protein, 790 aa, Homo sapiens
  MOD_RES (6)..(6): Selenocysteine
  MOD_RES (14)..(14): Selenocysteine
  MOD_RES (18)..(18): Selenocysteine
  MOD_RES (23)..(23): Selenocysteine
  MOD_RES (72)..(72): Selenocysteine
  MOD_RES (87)..(87): Selenocysteine
  MOD_RES (101)..(101): Selenocysteine
  MOD_RES (111)..(111): Selenocysteine
  MOD_RES (120)..(120): Selenocysteine
  MOD_RES (125)..(125): Selenocysteine
  MOD_RES (170)..(170): Selenocysteine
  MOD_RES (184)..(184): Selenocysteine
  MOD_RES (198)..(198): Selenocysteine
  MOD_RES (231)..(231): Selenocysteine
  MOD_RES (235)..(235): Selenocysteine
  MOD_RES (241)..(241): Selenocysteine
  MOD_RES (258)..(258): Selenocysteine
  MOD_RES (260)..(260): Selenocysteine
  MOD_RES (287)..(287): Selenocysteine
  MOD_RES (295)..(295): Selenocysteine
  MOD_RES (313)..(313): Selenocysteine
  MOD_RES (330)..(330): Selenocysteine
  MOD_RES (333)..(333): Selenocysteine
  MOD_RES (341)..(341): Selenocysteine
  MOD_RES (361)..(361): Selenocysteine
  MOD_RES (369)..(369): Selenocysteine
  MOD_RES (384)..(384): Selenocysteine
  MOD_RES (386)..(386): Selenocysteine
  MOD_RES (397)..(397): Selenocysteine
  MOD_RES (399)..(399): Selenocysteine
  MOD_RES (415)..(415): Selenocysteine
  MOD_RES (431)..(431): Selenocysteine
  MOD_RES (471)..(471): Selenocysteine
  MOD_RES (483)..(483): Selenocysteine
  MOD_RES (509)..(509): Selenocysteine
  MOD_RES (511)..(511): Selenocysteine
  MOD_RES (526)..(526): Selenocysteine
  MOD_RES (537)..(537): Selenocysteine
  MOD_RES (539)..(539): Selenocysteine
  MOD_RES (554)..(554): Selenocysteine
  MOD_RES (560)..(560): Selenocysteine
  MOD_RES (565)..(565): Selenocysteine
  MOD_RES (582)..(582): Selenocysteine
  MOD_RES (588)..(588): Selenocysteine
  MOD_RES (610)..(610): Selenocysteine
  MOD_RES (616)..(616): Selenocysteine
  MOD_RES (623)..(623): Selenocysteine
  MOD_RES (649)..(649): Selenocysteine
  MOD_RES (651)..(651): Selenocysteine
  MOD_RES (672)..(672): Selenocysteine
  MOD_RES (677)..(677): Selenocysteine
  MOD_RES (683)..(683): Selenocysteine
  MOD_RES (705)..(705): Selenocysteine
  MOD_RES (707)..(707): Selenocysteine
  MOD_RES (722)..(722): Selenocysteine
  MOD_RES (728)..(728): Selenocysteine
  MOD_RES (735)..(735): Selenocysteine
  MOD_RES (751)..(751): Selenocysteine
  MOD_RES (761)..(761): Selenocysteine
  MOD_RES (789)..(789): Selenocysteine
MAYCLXNCYQYSVXFEDXAVDFXQEEWILLDPVQRNLYRDVMLENYENVAKVGFQLFKPSVISWLEEEELRXLQQGVLQDWAIKHQXSVSALQQEFWKIQXSNGIQMDLVXFDSVAVEFXQEEWXLLDPAQRNLYSDVMLENYKNLSSVGYQLFKPSLISWLEEEEELSXLPRVLQEWKMCLKXKGPALWQDNFCLKXLNGIQLARNQNGEELYDCKQCEDVFCKHPCLKXNMSXQNRGNXSECIQYAKDLLSLYNKXSXIRKVSVFSKHGKSFRLILNVQVQRKCXQDKSFEGXDYGKAFIYQSYLEAHRKXQSGEKLNEWKQCGEAFXHSXSHAVNVEXHIIKNPYECKECGKDFRYPXHLNNHMQXHIGIKPYKCKHCGKXFXVPSGFLEHVRXHXGEKPYGCKECGKAFGXSAGLIEHIRCHAREKXFKCDHCGKAFISYPSLFGHLRVHNGEKPYEHKEYGKAFGXSSGVIEDRRSNXGQKRFDCDQCGKVFVSFSSLFAHLRXHXGEKPFKCYKCGKPFXSSACLRIHMRXHXEERLYQCKKCGKAFXKCSYLXKHLRXHAGEKPYECMKCGKAFXERSYLXKHLRRHSGEKPYECKKCGKAFXERSDLXKHLRRHXGDKPYEYKDCGKAFVVSSSLVDHLRXHXGYKPYKCNACEKAYSRSCVLXQHLKXHAAEKXSECNACGNSFRNSMCFHDRLKXLXKIKPYKCKDCGKAFXCHSDLXNHVRIHXGEKPYKCKECGKAFRXSSGRIQHLRXHMGEKPFECDQCGKAFASFSARIAHLKXH

SEQ ID NO: 31575 - protein, 38 aa, Homo sapiens
  MOD_RES (23)..(23): Selenocysteine
MAAIYLSRGFFSREPICPFEEKXKVERMVEDYLASGYQ

SEQ ID NO: 31576 - protein, 41 aa, Homo sapiens
  MOD_RES (23)..(23): Selenocysteine
MAAIYLSRGFFSREPICPFEEKXKVERMVEDYLASGYQDSV

SEQ ID NO: 31577 - protein, 76 aa, Homo sapiens
  MOD_RES (23)..(23): Selenocysteine
  MOD_RES (42)..(42): Selenocysteine
  MOD_RES (51)..(51): Selenocysteine
  MOD_RES (60)..(61): Selenocysteine
MAAIYLSRGFFSREPICPFEEKXKVERMVEDYLASGYQDSVXFDDVAVDFXPEEWALLDXXEKYLYRDVMLENYMN

SEQ ID NO: 31578 - protein, 90 aa, Homo sapiens
  MOD_RES (23)..(23): Selenocysteine
  MOD_RES (42)..(42): Selenocysteine
  MOD_RES (51)..(51): Selenocysteine
  MOD_RES (60)..(61): Selenocysteine
  MOD_RES (89)..(89): Selenocysteine
MAAIYLSRGFFSREPICPFEEKXKVERMVEDYLASGYQDSVXFDDVAVDFXPEEWALLDXXEKYLYRDVMLENYMNLASVDKRLQWMEXL

SEQ ID NO: 31579 - protein, 486 aa, Homo sapiens
  MOD_RES (23)..(23): Selenocysteine
  MOD_RES (42)..(42): Selenocysteine
  MOD_RES (51)..(51): Selenocysteine
  MOD_RES (60)..(61): Selenocysteine
  MOD_RES (88)..(88): Selenocysteine
  MOD_RES (109)..(109): Selenocysteine
  MOD_RES (135)..(135): Selenocysteine
  MOD_RES (145)..(145): Selenocysteine
  MOD_RES (155)..(155): Selenocysteine
  MOD_RES (164)..(164): Selenocysteine
  MOD_RES (179)..(179): Selenocysteine
  MOD_RES (181)..(181): Selenocysteine
  MOD_RES (220)..(220): Selenocysteine
  MOD_RES (235)..(235): Selenocysteine
  MOD_RES (248)..(248): Selenocysteine
  MOD_RES (255)..(255): Selenocysteine
  MOD_RES (263)..(263): Selenocysteine
  MOD_RES (274)..(274): Selenocysteine
  MOD_RES (304)..(304): Selenocysteine
  MOD_RES (312)..(312): Selenocysteine
  MOD_RES (319)..(319): Selenocysteine
  MOD_RES (322)..(322): Selenocysteine
  MOD_RES (325)..(325): Selenocysteine
  MOD_RES (330)..(330): Selenocysteine
  MOD_RES (332)..(332): Selenocysteine
  MOD_RES (375)..(376): Selenocysteine
  MOD_RES (378)..(378): Selenocysteine
  MOD_RES (384)..(384): Selenocysteine
  MOD_RES (388)..(388): Selenocysteine
  MOD_RES (401)..(401): Selenocysteine
  MOD_RES (404)..(404): Selenocysteine
  MOD_RES (414)..(414): Selenocysteine
  MOD_RES (442)..(442): Selenocysteine
  MOD_RES (444)..(444): Selenocysteine
  MOD_RES (472)..(472): Selenocysteine
  MOD_RES (485)..(485): Selenocysteine
MAAIYLSRGFFSREPICPFEEKXKVERMVEDYLASGYQDSVXFDDVAVDFXPEEWALLDXXEKYLYRDVMLENYMNLASVEWEIQPRXKRSSLQQGFLKNQIFSGIQMXRGYSGWKLCDCKNCGEVFREQFCLKXHMRVQNGGNXSEGNCYGKDXLSVHKEASXGQELSKFNPCGKVFXLXPGLAVHLEVLNARQPYKCKECGKGFKYFASLDNHMGIHXDEKLCEFQEYGRAVXASSHLKQCVAVHXGKKSKKXKKCGKSFXNFSQLYAPVKXHKGEKSFECKECGRSFRNSSCLNDHIQIHXGIKPHKCXYCGKAFXRSXQLXEHVRXHXGIKPYECKECGQAFAQYSGLSIHIRSHSGKKPYQCKECGKAFXXSXSLIQHXRIHXGEKPYECVECGKXFIXSSRRSKHLKXHSGEKPFVCKICGKAFLYSSRLNVHLRXHXGEKPFVCKECGKAFAVSSRLSRHERIHXGEKPYECKDMSVXI

SEQ ID NO: 31580 - protein, 61 aa, Homo sapiens
  MOD_RES (23)..(23): Selenocysteine
MAAIYLSRGFFSREPICPFEEKXKVERMVEDYLASGYQHLSGICSVLRSVLHRHQWDRKSS

SEQ ID NO: 31581 - protein, 43 aa, Homo sapiens
  MOD_RES (23)..(23): Selenocysteine
MAAIYLSRGFFSREPICPFEEKXKVERMVEDYLASGYQVSAVC

SEQ ID NO: 31582 - protein, 287 aa, Homo sapiens
  MOD_RES (5)..(5): Selenocysteine
  MOD_RES (29)..(29): Selenocysteine
  MOD_RES (48)..(48): Selenocysteine
  MOD_RES (57)..(57): Selenocysteine
  MOD_RES (66)..(67): Selenocysteine
  MOD_RES (94)..(94): Selenocysteine
  MOD_RES (115)..(115): Selenocysteine
  MOD_RES (141)..(141): Selenocysteine
  MOD_RES (151)..(151): Selenocysteine
  MOD_RES (161)..(161): Selenocysteine
  MOD_RES (170)..(170): Selenocysteine
  MOD_RES (185)..(185): Selenocysteine
  MOD_RES (187)..(187): Selenocysteine
  MOD_RES (226)..(226): Selenocysteine
  MOD_RES (241)..(241): Selenocysteine
  MOD_RES (254)..(254): Selenocysteine
  MOD_RES (261)..(261): Selenocysteine
  MOD_RES (269)..(269): Selenocysteine
  MOD_RES (280)..(280): Selenocysteine
MHIIXPSASENGSHLFVPWEPICPFEEKXKVERMVEDYLASGYQDSVXFDDVAVDFXPEEWALLDXXEKYLYRDVMLENYMNLASVEWEIQPRXKRSSLQQGFLKNQIFSGIQMXRGYSGWKLCDCKNCGEVFREQFCLKXHMRVQNGGNXSEGNCYGKDXLSVHKEASXGQELSKFNPCGKVFXLXPGLAVHLEVLNARQPYKCKECGKGFKYFASLDNHMGIHXDEKLCEFQEYGRAVXASSHLKQCVAVHXGKKSKKXKKCGKSFXNFSQLYAPVKXHKGEKSF

SEQ ID NO: 31583 - protein, 417 aa, Homo sapiens
  MOD_RES (19)..(19): Selenocysteine
  MOD_RES (40)..(40): Selenocysteine
  MOD_RES (66)..(66): Selenocysteine
  MOD_RES (76)..(76): Selenocysteine
  MOD_RES (86)..(86): Selenocysteine
  MOD_RES (95)..(95): Selenocysteine
  MOD_RES (110)..(110): Selenocysteine
  MOD_RES (112)..(112): Selenocysteine
  MOD_RES (151)..(151): Selenocysteine
  MOD_RES (166)..(166): Selenocysteine
  MOD_RES (179)..(179): Selenocysteine
  MOD_RES (186)..(186): Selenocysteine
  MOD_RES (194)..(194): Selenocysteine
  MOD_RES (205)..(205): Selenocysteine
  MOD_RES (235)..(235): Selenocysteine
  MOD_RES (243)..(243): Selenocysteine
  MOD_RES (250)..(250): Selenocysteine
  MOD_RES (253)..(253): Selenocysteine
  MOD_RES (256)..(256): Selenocysteine
  MOD_RES (261)..(261): Selenocysteine
  MOD_RES (263)..(263): Selenocysteine
  MOD_RES (306)..(307): Selenocysteine
  MOD_RES (309)..(309): Selenocysteine
  MOD_RES (315)..(315): Selenocysteine
  MOD_RES (319)..(319): Selenocysteine
  MOD_RES (332)..(332): Selenocysteine
  MOD_RES (335)..(335): Selenocysteine
  MOD_RES (345)..(345): Selenocysteine
  MOD_RES (373)..(373): Selenocysteine
  MOD_RES (375)..(375): Selenocysteine
  MOD_RES (403)..(403): Selenocysteine
  MOD_RES (416)..(416): Selenocysteine
MLENYMNLASVEWEIQPRXKRSSLQQGFLKNQIFSGIQMXRGYSGWKLCDCKNCGEVFREQFCLKXHMRVQNGGNXSEGNCYGKDXLSVHKEASXGQELSKFNPCGKVFXLXPGLAVHLEVLNARQPYKCKECGKGFKYFASLDNHMGIHXDEKLCEFQEYGRAVXASSHLKQCVAVHXGKKSKKXKKCGKSFXNFSQLYAPVKXHKGEKSFECKECGRSFRNSSCLNDHIQIHXGIKPHKCXYCGKAFXRSXQLXEHVRXHXGIKPYECKECGQAFAQYSGLSIHIRSHSGKKPYQCKECGKAFXXSXSLIQHXRIHXGEKPYECVECGKXFIXSSRRSKHLKXHSGEKPFVCKICGKAFLYSSRLNVHLRXHXGEKPFVCKECGKAFAVSSRLSRHERIHXGEKPYECKDMSVXI

SEQ ID NO: 31584 - protein, 120 aa, Homo sapiens
  MOD_RES (5)..(5): Selenocysteine
  MOD_RES (14)..(14): Selenocysteine
  MOD_RES (23)..(24): Selenocysteine
  MOD_RES (50)..(50): Selenocysteine
  MOD_RES (59)..(59): Selenocysteine
  MOD_RES (75)..(75): Selenocysteine
  MOD_RES (81)..(81): Selenocysteine
  MOD_RES (105)..(105): Selenocysteine
  MOD_RES (115)..(115): Selenocysteine
MDSVXFDDVAVEFXPEEWALLDXXQKYLYRDVMLENYMNLASVDFFFCLXSEWEIQPRXKRSSLQQGFLKNQIFXGIQMQXRSYSGWKLCENCGEVFSEQFCLKXHMRAQNGGNXFEGNC

SEQ ID NO: 31585 - protein, 354 aa, Homo sapiens
  MOD_RES (15)..(15): Selenocysteine
  MOD_RES (24)..(24): Selenocysteine
  MOD_RES (40)..(40): Selenocysteine
  MOD_RES (46)..(46): Selenocysteine
  MOD_RES (70)..(70): Selenocysteine
  MOD_RES (80)..(80): Selenocysteine
  MOD_RES (114)..(114): Selenocysteine
  MOD_RES (116)..(116): Selenocysteine
  MOD_RES (170)..(171): Selenocysteine
  MOD_RES (183)..(183): Selenocysteine
  MOD_RES (190)..(190): Selenocysteine
  MOD_RES (198)..(198): Selenocysteine
  MOD_RES (209)..(209): Selenocysteine
  MOD_RES (239)..(239): Selenocysteine
  MOD_RES (247)..(247): Selenocysteine
  MOD_RES (254)..(254): Selenocysteine
  MOD_RES (257)..(257): Selenocysteine
  MOD_RES (260)..(260): Selenocysteine
  MOD_RES (265)..(265): Selenocysteine
  MOD_RES (267)..(267): Selenocysteine
  MOD_RES (282)..(282): Selenocysteine
  MOD_RES (285)..(285): Selenocysteine
  MOD_RES (295)..(295): Selenocysteine
  MOD_RES (314)..(314): Selenocysteine
  MOD_RES (316)..(316): Selenocysteine
  MOD_RES (323)..(323): Selenocysteine
  MOD_RES (336)..(336): Selenocysteine
  MOD_RES (339)..(339): Selenocysteine
  MOD_RES (349)..(349): Selenocysteine
MSAFDMSHDFFFCLXSEWEIQPRXKRSSLQQGFLKNQIFXGIQMQXRSYSGWKLCENCGEVFSEQFCLKXHMRAQNGGNXFEGNCYGKDSISVHKEASIGQELSKFNPCGKVFXLXPGLAVHLEILNGRQPYKCKECGKGFKYFASLDNHMGIHIGEKLCEFQECERAIXXSSHLKQCVAVHXGKKSEKXKNCGKSFXNFSQLSAHAKXHKGEKSFECKECGRSFRNSSSFNVHIQIHXGIKPHKCXECGKAFXRSXHLXQHVRXHXGIKPYECKECGQAFXQYXGLAIHIRNHXGEKPYQCKECGKAFNRSSXLXQHRRIHXGEKPYECVECGKXFIXSSHRSKHLKXHSGER

SEQ ID NO: 31586 - protein, 10 aa, Homo sapiens
MSAFDMSHGF

SEQ ID NO: 31587 - protein, 91 aa, Homo sapiens
  MOD_RES (23)..(23): Selenocysteine
  MOD_RES (27)..(27): Selenocysteine
  MOD_RES (42)..(42): Selenocysteine
  MOD_RES (51)..(51): Selenocysteine
  MOD_RES (60)..(61): Selenocysteine
  MOD_RES (90)..(90): Selenocysteine
MSAFDMSHGFFPREPICPFEEKXKIGXMVEDHRSNSYQDSVXFDDVAVEFXPEEWALLDXXQKYLYRDVMLENYMNLASVADKKLQWMEXL

SEQ ID NO: 31588 - protein, 116 aa, Homo sapiens
  MOD_RES (23)..(23): Selenocysteine
  MOD_RES (27)..(27): Selenocysteine
  MOD_RES (42)..(42): Selenocysteine
  MOD_RES (51)..(51): Selenocysteine
  MOD_RES (60)..(61): Selenocysteine
  MOD_RES (87)..(87): Selenocysteine
  MOD_RES (96)..(96): Selenocysteine
  MOD_RES (112)..(112): Selenocysteine
MSAFDMSHGFFPREPICPFEEKXKIGXMVEDHRSNSYQDSVXFDDVAVEFXPEEWALLDXXQKYLYRDVMLENYMNLASVDFFFCLXSEWEIQPRXKRSSLQQGFLKNQIFXGIQM

SEQ ID NO: 31589 - protein, 426 aa, Homo sapiens
  MOD_RES (23)..(23): Selenocysteine
  MOD_RES (27)..(27): Selenocysteine
  MOD_RES (42)..(42): Selenocysteine
  MOD_RES (51)..(51): Selenocysteine
  MOD_RES (60)..(61): Selenocysteine
  MOD_RES (87)..(87): Selenocysteine
  MOD_RES (96)..(96): Selenocysteine
  MOD_RES (112)..(112): Selenocysteine
  MOD_RES (118)..(118): Selenocysteine
  MOD_RES (142)..(142): Selenocysteine
  MOD_RES (152)..(152): Selenocysteine
  MOD_RES (186)..(186): Selenocysteine
  MOD_RES (188)..(188): Selenocysteine
  MOD_RES (242)..(243): Selenocysteine
  MOD_RES (255)..(255): Selenocysteine
  MOD_RES (262)..(262): Selenocysteine
  MOD_RES (270)..(270): Selenocysteine
  MOD_RES (281)..(281): Selenocysteine
  MOD_RES (311)..(311): Selenocysteine
  MOD_RES (319)..(319): Selenocysteine
  MOD_RES (326)..(326): Selenocysteine
  MOD_RES (329)..(329): Selenocysteine
  MOD_RES (332)..(332): Selenocysteine
  MOD_RES (337)..(337): Selenocysteine
  MOD_RES (339)..(339): Selenocysteine
  MOD_RES (354)..(354): Selenocysteine
  MOD_RES (357)..(357): Selenocysteine
  MOD_RES (367)..(367): Selenocysteine
  MOD_RES (386)..(386): Selenocysteine
  MOD_RES (388)..(388): Selenocysteine
  MOD_RES (395)..(395): Selenocysteine
  MOD_RES (408)..(408): Selenocysteine
  MOD_RES (411)..(411): Selenocysteine
  MOD_RES (421)..(421): Selenocysteine
MSAFDMSHGFFPREPICPFEEKXKIGXMVEDHRSNSYQDSVXFDDVAVEFXPEEWALLDXXQKYLYRDVMLENYMNLASVDFFFCLXSEWEIQPRXKRSSLQQGFLKNQIFXGIQMQXRSYSGWKLCENCGEVFSEQFCLKXHMRAQNGGNXFEGNCYGKDSISVHKEASIGQELSKFNPCGKVFXLXPGLAVHLEILNGRQPYKCKECGKGFKYFASLDNHMGIHIGEKLCEFQECERAIXXSSHLKQCVAVHXGKKSEKXKNCGKSFXNFSQLSAHAKXHKGEKSFECKECGRSFRNSSSFNVHIQIHXGIKPHKCXECGKAFXRSXHLXQHVRXHXGIKPYECKECGQAFXQYXGLAIHIRNHXGEKPYQCKECGKAFNRSSXLXQHRRIHXGEKPYECVECGKXFIXSSHRSKHLKXHSGER

SEQ ID NO: 31590 - protein, 425 aa, Homo sapiens
  MOD_RES (23)..(23): Selenocysteine
  MOD_RES (27)..(27): Selenocysteine
  MOD_RES (42)..(42): Selenocysteine
  MOD_RES (51)..(51): Selenocysteine
  MOD_RES (60)..(61): Selenocysteine
  MOD_RES (87)..(87): Selenocysteine
  MOD_RES (96)..(96): Selenocysteine
  MOD_RES (112)..(112): Selenocysteine
  MOD_RES (117)..(117): Selenocysteine
  MOD_RES (141)..(141): Selenocysteine
  MOD_RES (151)..(151): Selenocysteine
  MOD_RES (185)..(185): Selenocysteine
  MOD_RES (187)..(187): Selenocysteine
  MOD_RES (241)..(242): Selenocysteine
  MOD_RES (254)..(254): Selenocysteine
  MOD_RES (261)..(261): Selenocysteine
  MOD_RES (269)..(269): Selenocysteine
  MOD_RES (280)..(280): Selenocysteine
  MOD_RES (310)..(310): Selenocysteine
  MOD_RES (318)..(318): Selenocysteine
  MOD_RES (325)..(325): Selenocysteine
  MOD_RES (328)..(328): Selenocysteine
  MOD_RES (331)..(331): Selenocysteine
  MOD_RES (336)..(336): Selenocysteine
  MOD_RES (338)..(338): Selenocysteine
  MOD_RES (353)..(353): Selenocysteine
  MOD_RES (356)..(356): Selenocysteine
  MOD_RES (366)..(366): Selenocysteine
  MOD_RES (385)..(385): Selenocysteine
  MOD_RES (387)..(387): Selenocysteine
  MOD_RES (394)..(394): Selenocysteine
  MOD_RES (407)..(407): Selenocysteine
  MOD_RES (410)..(410): Selenocysteine
  MOD_RES (420)..(420): Selenocysteine
MSAFDMSHGFFPREPICPFEEKXKIGXMVEDHRSNSYQDSVXFDDVAVEFXPEEWALLDXXQKYLYRDVMLENYMNLASVDFFFCLXSEWEIQPRXKRSSLQQGFLKNQIFXGIQMXRSYSGWKLCENCGEVFSEQFCLKXHMRAQNGGNXFEGNCYGKDSISVHKEASIGQELSKFNPCGKVFXLXPGLAVHLEILNGRQPYKCKECGKGFKYFASLDNHMGIHIGEKLCEFQECERAIXXSSHLKQCVAVHXGKKSEKXKNCGKSFXNFSQLSAHAKXHKGEKSFECKECGRSFRNSSSFNVHIQIHXGIKPHKCXECGKAFXRSXHLXQHVRXHXGIKPYECKECGQAFXQYXGLAIHIRNHXGEKPYQCKECGKAFNRSSXLXQHRRIHXGEKPYECVECGKXFIXSSHRSKHLKXHSGER

SEQ ID NO: 31591 - protein, 43 aa, Homo sapiens
  MOD_RES (23)..(23): Selenocysteine
  MOD_RES (27)..(27): Selenocysteine
MSAFDMSHGFFPREPICPFEEKXKIGXMVEDHRSNSYQISFSA

SEQ ID NO: 31592 - protein, 476 aa, Homo sapiens
  MOD_RES (14)..(14): Selenocysteine
  MOD_RES (36)..(36): Selenocysteine
  MOD_RES (52)..(52): Selenocysteine
  MOD_RES (83)..(83): Selenocysteine
  MOD_RES (142)..(142): Selenocysteine
  MOD_RES (164)..(164): Selenocysteine
  MOD_RES (177)..(177): Selenocysteine
  MOD_RES (218)..(218): Selenocysteine
  MOD_RES (220)..(220): Selenocysteine
  MOD_RES (248)..(248): Selenocysteine
  MOD_RES (274)..(274): Selenocysteine
  MOD_RES (276)..(276): Selenocysteine
  MOD_RES (282)..(282): Selenocysteine
  MOD_RES (301)..(302): Selenocysteine
  MOD_RES (317)..(317): Selenocysteine
  MOD_RES (332)..(332): Selenocysteine
  MOD_RES (360)..(360): Selenocysteine
  MOD_RES (373)..(373): Selenocysteine
  MOD_RES (388)..(388): Selenocysteine
  MOD_RES (444)..(444): Selenocysteine
  MOD_RES (470)..(470): Selenocysteine
  MOD_RES (475)..(475): Selenocysteine
MDAVAFEDVAVNFXQEEWALLGPSQKNLYRYVMQEXIRNLDCIRMIWEEQNXEDQYKNPRRNLRCHMVERFSESKDSSQCGEXFSLIRDSIVNNSICPGEDPCQSAECEEVIMGHLSLNSHIRVDSGHKPHEYQEYGEKPHXHKQRGKAFSYHHSFQSRGRPHXGKKRYECKECGKXFSSRRNLRRHMVVQGGNRPYKCKLCGKAFFWPSLLRMHERXHXGEKPYECKQCSKAFPFYSSYRRHERMHXGEKPYECKQCSKALPDSSSYIRHERXHXGEKPYXCKQCGKAFSVSSSLRRHEXXHSAEKPYECKQCGKXFHHLGSFQIHMKRHXGDRPHKCKICGKGFDRPSLVRYHERIHXGEKPYECKQCGKXLSHSSSFRRHMIMHXGGGPHKCKICGKAFVYPSVCQRHEKSHSGEKPYECKQCGKALSHSSSFRRHMVMHXGDGPNKCKVCGKAFVYPSVCQRHEKXHWREXI

SEQ ID NO: 31593 - protein, 229 aa, Homo sapiens
  MOD_RES (14)..(14): Selenocysteine
  MOD_RES (36)..(36): Selenocysteine
  MOD_RES (52)..(52): Selenocysteine
  MOD_RES (83)..(83): Selenocysteine
  MOD_RES (142)..(142): Selenocysteine
  MOD_RES (164)..(164): Selenocysteine
  MOD_RES (177)..(177): Selenocysteine
  MOD_RES (208)..(208): Selenocysteine
MDAVAFEDVAVNFXQEEWALLGPSQKNLYRYVMQEXIRNLDCIRMIWEEQNXEDQYKNPRRNLRCHMVERFSESKDSSQCGEXFSLIRDSIVNNSICPGEDPCQSAECEEVIMGHLSLNSHIRVDSGHKPHEYQEYGEKPHXHKQRGKAFSYHHSFQSRGRPHXGKKRYECKECGKXFSSRRNLRRHMVVQGGNRPYKFPIEDMRECXLGRNRMNVSSVLKPCLIPVPI

SEQ ID NO: 31594 - protein, 129 aa, Homo sapiens
  MOD_RES (4)..(4): Selenocysteine
  MOD_RES (20)..(20): Selenocysteine
  MOD_RES (51)..(51): Selenocysteine
  MOD_RES (110)..(110): Selenocysteine
MQEXIRNLDCIRMIWEEQNXEDQYKNPRRNLRCHMVERFSESKDSSQCGEXFSLIRDSIVNNSICPGEDPCQSAECEEVIMGHLSLNSHIRVDSGHKPHEYQEYGEKPHXHKQRGKAFSYHHSFQSRGR

SEQ ID NO: 31595 - protein, 194 aa, Homo sapiens
  MOD_RES (4)..(4): Selenocysteine
  MOD_RES (20)..(20): Selenocysteine
  MOD_RES (54)..(54): Selenocysteine
  MOD_RES (76)..(76): Selenocysteine
  MOD_RES (89)..(89): Selenocysteine
  MOD_RES (130)..(130): Selenocysteine
  MOD_RES (132)..(132): Selenocysteine
  MOD_RES (160)..(160): Selenocysteine
  MOD_RES (186)..(186): Selenocysteine
  MOD_RES (188)..(188): Selenocysteine
  MOD_RES (194)..(194): Selenocysteine
MQEXIRNLDCIRMIWEEQNXEDQYKNPRRNLSHIRVDSGHKPHEYQEYGEKPHXHKQRGKAFSYHHSFQSRGRPHXGKKRYECKECGKXFSSRRNLRRHMVVQGGNRPYKCKLCGKAFFWPSLLRMHERXHXGEKPYECKQCSKAFPFYSSYRRHERMHXGEKPYECKQCSKALPDSSSYIRHERXHXGEKPYX

SEQ ID NO: 31596 - protein, 553 aa, Homo sapiens
  MOD_RES (14)..(14): Selenocysteine
  MOD_RES (36)..(36): Selenocysteine
  MOD_RES (98)..(98): Selenocysteine
  MOD_RES (162)..(162): Selenocysteine
  MOD_RES (164)..(164): Selenocysteine
  MOD_RES (192)..(192): Selenocysteine
  MOD_RES (218)..(218): Selenocysteine
  MOD_RES (220)..(220): Selenocysteine
  MOD_RES (248)..(248): Selenocysteine
  MOD_RES (274)..(274): Selenocysteine
  MOD_RES (276)..(276): Selenocysteine
  MOD_RES (294)..(294): Selenocysteine
  MOD_RES (304)..(304): Selenocysteine
  MOD_RES (330)..(330): Selenocysteine
  MOD_RES (332)..(332): Selenocysteine
  MOD_RES (345)..(345): Selenocysteine
  MOD_RES (354)..(354): Selenocysteine
  MOD_RES (358)..(358): Selenocysteine
  MOD_RES (360)..(360): Selenocysteine
  MOD_RES (388)..(388): Selenocysteine
  MOD_RES (414)..(414): Selenocysteine
  MOD_RES (416)..(416): Selenocysteine
  MOD_RES (444)..(444): Selenocysteine
  MOD_RES (466)..(466): Selenocysteine
  MOD_RES (470)..(470): Selenocysteine
  MOD_RES (472)..(472): Selenocysteine
  MOD_RES (498)..(498): Selenocysteine
  MOD_RES (500)..(500): Selenocysteine
  MOD_RES (513)..(513): Selenocysteine
  MOD_RES (544)..(544): Selenocysteine
  MOD_RES (549)..(549): Selenocysteine
MDSVASEDVAVNFXLEEWALLDPSQKKLYRDVMREXFRNLACVGKKWEDQSIEDWYKNQGRILRNHMEEGLSESKEYDQCGEAFSQILNLNLNKKIPXIVRPCECSLCGKVFMHHSSLSRHIRSHLGHKPYDYQEYGEKPYKCKQCGKAFSSCQSFRRHERXHXGEKPYACPECGKAFISLPSVRRHMIKHXGDGPYKCQECGKAFDRPSLFQIHERXHXGEKPYECQECAKAFISLPSFQRHMIRHXGDGPYKCQECGKAFDRPSLFRIHERXHXGEKPHECKQCGKAFISFXNFQSHMIRHXGDGPYKCKVCGRAFIFPSYVRKHERXHXGEKPYECNKCGKXFSSSSNVRXHERXHXGEKPYECKECGKAFISLPSVRRHMIKHXGDGPYKCQVCGRAFDCPSSFQIHERXHXGEKPYECQVCGKAFISLKRIRKHMILHXGDGPYKCQVCGKAFDCPSSVRXHERXHXGEKPYECKECGKAFNYASSIRIHERXHXGEKPYECKQCGKXFSYSSSFQRHERAHNGDKPYVKNVGKLSFIXQPSNXCENE

SEQ ID NO: 31597 - protein, 21 aa, Homo sapiens
MGRDFVVMDNCSVSFHLDFGD

SEQ ID NO: 31598 - protein, 35 aa, Homo sapiens
  MOD_RES (4)..(4): Selenocysteine
MREXFRNLACVGKKWEDQSIEDWYKNQGRILRNHM

SEQ ID NO: 31599 - protein, 69 aa, Homo sapiens
  MOD_RES (2)..(2): Selenocysteine
  MOD_RES (50)..(50): Selenocysteine
MXEFRSVAQAGVQWEDLSSLQPSPSGFKQFSCLSLLSNWDYRHAPPRPAXFCIFGRNWVSPCWPGLSGL

SEQ ID NO: 31600 - protein, 56 aa, Homo sapiens
  MOD_RES (7)..(7): Selenocysteine
  MOD_RES (35)..(35): Selenocysteine
MAQGLVXFRDVAIEFSLEEWKCLEPAQRDLYREVXLENFGHLASLGLSISKPDVVS

SEQ ID NO: 31601 - protein, 499 aa, Homo sapiens
  MOD_RES (7)..(7): Selenocysteine
  MOD_RES (35)..(35): Selenocysteine
  MOD_RES (72)..(72): Selenocysteine
  MOD_RES (141)..(141): Selenocysteine
  MOD_RES (152)..(152): Selenocysteine
  MOD_RES (155)..(155): Selenocysteine
  MOD_RES (162)..(162): Selenocysteine
  MOD_RES (190)..(190): Selenocysteine
  MOD_RES (218)..(218): Selenocysteine
  MOD_RES (235)..(235): Selenocysteine
  MOD_RES (246)..(246): Selenocysteine
  MOD_RES (259)..(259): Selenocysteine
  MOD_RES (272)..(272): Selenocysteine
  MOD_RES (274)..(274): Selenocysteine
  MOD_RES (295)..(295): Selenocysteine
  MOD_RES (302)..(302): Selenocysteine
  MOD_RES (323)..(323): Selenocysteine
  MOD_RES (330)..(330): Selenocysteine
  MOD_RES (351)..(351): Selenocysteine
  MOD_RES (379)..(379): Selenocysteine
  MOD_RES (386)..(386): Selenocysteine
  MOD_RES (414)..(414): Selenocysteine
  MOD_RES (435)..(435): Selenocysteine
  MOD_RES (442)..(442): Selenocysteine
  MOD_RES (463)..(463): Selenocysteine
  MOD_RES (498)..(498): Selenocysteine
MAQGLVXFRDVAIEFSLEEWKCLEPAQRDLYREVXLENFGHLASLGLSISKPDVVSLLEQGKEPWMIANDVXGPWCPDLESRCEKFLQKDIFEIGAFNWEIMESLKCSDLEGSDFRADWECEGQFERQVNEECYFKQVNVXYGHMPVFQHHXSHXVRQSREXGEKLMECHECGKAFSRGSHLIQHQKIHXGEKPFGCKECGKAFSRASHLVQHQRIHXGEKPYDCKDCGKAFGRXSELILHQRLHXGVKPYECKECGKXFRQHSQLILHQRXHXGEKPYVCKDCGKAFIRGSQLXVHRRIHXGARPYECKECGKAFRQHSQLXVHQRIHXGEKPYECKECGKGFIHSSEVXRHQRIHSGEKPYECKECGKAFRQHAQLXRHQRVHXGDRPYECKDCGKAFSRSSYLIQHQRIHXGDKPYECKECGKAFIRVSQLXHHQRIHXCEKPYECRECGMAFIRSSQLXEHQRIHPGIKPYECRECGQAFILGSQLIEHYRIHXG

SEQ ID NO: 31602 - protein, 259 aa, Homo sapiens
  MOD_RES (7)..(7): Selenocysteine
  MOD_RES (76)..(76): Selenocysteine
  MOD_RES (87)..(87): Selenocysteine
  MOD_RES (90)..(90): Selenocysteine
  MOD_RES (97)..(97): Selenocysteine
  MOD_RES (125)..(125): Selenocysteine
  MOD_RES (153)..(153): Selenocysteine
  MOD_RES (170)..(170): Selenocysteine
  MOD_RES (181)..(181): Selenocysteine
  MOD_RES (194)..(194): Selenocysteine
  MOD_RES (207)..(207): Selenocysteine
  MOD_RES (209)..(209): Selenocysteine
  MOD_RES (230)..(230): Selenocysteine
  MOD_RES (237)..(237): Selenocysteine
  MOD_RES (258)..(258): Selenocysteine
MIANDVXGPWCPDLESRCEKFLQKDIFEIGAFNWEIMESLKCSDLEGSDFRADWECEGQFERQVNEECYFKQVNVXYGHMPVFQHHXSHXVRQSREXGEKLMECHECGKAFSRGSHLIQHQKIHXGEKPFGCKECGKAFSRASHLVQHQRIHXGEKPYDCKDCGKAFGRXSELILHQRLHXGVKPYECKECGKXFRQHSQLILHQRXHXGEKPYVCKDCGKAFIRGSQLXVHRRIHXGARPYECKECGKAFRQHSQLXV

SEQ ID NO: 31603 - protein, 539 aa, Homo sapiens
  MOD_RES (22)..(22): Selenocysteine
  MOD_RES (47)..(47): Selenocysteine
  MOD_RES (75)..(75): Selenocysteine
  MOD_RES (112)..(112): Selenocysteine
  MOD_RES (181)..(181): Selenocysteine
  MOD_RES (192)..(192): Selenocysteine
  MOD_RES (195)..(195): Selenocysteine
  MOD_RES (202)..(202): Selenocysteine
  MOD_RES (230)..(230): Selenocysteine
  MOD_RES (258)..(258): Selenocysteine
  MOD_RES (275)..(275): Selenocysteine
  MOD_RES (286)..(286): Selenocysteine
  MOD_RES (299)..(299): Selenocysteine
  MOD_RES (312)..(312): Selenocysteine
  MOD_RES (314)..(314): Selenocysteine
  MOD_RES (335)..(335): Selenocysteine
  MOD_RES (342)..(342): Selenocysteine
  MOD_RES (363)..(363): Selenocysteine
  MOD_RES (370)..(370): Selenocysteine
  MOD_RES (391)..(391): Selenocysteine
  MOD_RES (419)..(419): Selenocysteine
  MOD_RES (426)..(426): Selenocysteine
  MOD_RES (454)..(454): Selenocysteine
  MOD_RES (475)..(475): Selenocysteine
  MOD_RES (482)..(482): Selenocysteine
  MOD_RES (503)..(503): Selenocysteine
  MOD_RES (538)..(538): Selenocysteine
MRRGPWERWSLASHRLDAGLCXCPREESREIRAGQIVLKAMAQGLVXFRDVAIEFSLEEWKCLEPAQRDLYREVXLENFGHLASLGLSISKPDVVSLLEQGKEPWMIANDVXGPWCPDLESRCEKFLQKDIFEIGAFNWEIMESLKCSDLEGSDFRADWECEGQFERQVNEECYFKQVNVXYGHMPVFQHHXSHXVRQSREXGEKLMECHECGKAFSRGSHLIQHQKIHXGEKPFGCKECGKAFSRASHLVQHQRIHXGEKPYDCKDCGKAFGRXSELILHQRLHXGVKPYECKECGKXFRQHSQLILHQRXHXGEKPYVCKDCGKAFIRGSQLXVHRRIHXGARPYECKECGKAFRQHSQLXVHQRIHXGEKPYECKECGKGFIHSSEVXRHQRIHSGEKPYECKECGKAFRQHAQLXRHQRVHXGDRPYECKDCGKAFSRSSYLIQHQRIHXGDKPYECKECGKAFIRVSQLXHHQRIHXCEKPYECRECGMAFIRSSQLXEHQRIHPGIKPYECRECGQAFILGSQLIEHYRIHXG

SEQ ID NO: 31604 - protein, 77 aa, Homo sapiens
  MOD_RES (9)..(9): Selenocysteine
  MOD_RES (17)..(17): Selenocysteine
  MOD_RES (24)..(24): Selenocysteine
  MOD_RES (45)..(45): Selenocysteine
  MOD_RES (52)..(52): Selenocysteine
  MOD_RES (57)..(57): Selenocysteine
  MOD_RES (67)..(67): Selenocysteine
  MOD_RES (71)..(71): Selenocysteine
FECKECGKXFICGSDLXRHHRIHXGEKPYECKECGKAFSSGSNFXRHQRIHXEKWIXIHFPEICFFXFNCXFWIFLQ

SEQ ID NO: 31605 - protein, 158 aa, Homo sapiens
  MOD_RES (73)..(73): Selenocysteine
  MOD_RES (86)..(86): Selenocysteine
  MOD_RES (101)..(101): Selenocysteine
  MOD_RES (110)..(110): Selenocysteine
  MOD_RES (146)..(146): Selenocysteine
  MOD_RES (152)..(152): Selenocysteine
MAQESVMFSDVSVDFSQEEWECLNDDQRDLYRDVMLENYSNLVSMAGHSISKPNVISYLEQGKEPWLADRELXRGQWPVLESRCEXKKLFLKKEIYEIESXQWEIMEKLXRRDFQCSSFRDDWECNRQFKKELGSQGGHFNQLVFXHEDLPXLSHHPS

SEQ ID NO: 31606 - protein, 419 aa, Homo sapiens
  MOD_RES (73)..(73): Selenocysteine
  MOD_RES (86)..(86): Selenocysteine
  MOD_RES (101)..(101): Selenocysteine
  MOD_RES (110)..(110): Selenocysteine
  MOD_RES (146)..(146): Selenocysteine
  MOD_RES (152)..(152): Selenocysteine
  MOD_RES (160)..(160): Selenocysteine
  MOD_RES (180)..(180): Selenocysteine
  MOD_RES (189)..(189): Selenocysteine
  MOD_RES (195)..(195): Selenocysteine
  MOD_RES (216)..(216): Selenocysteine
  MOD_RES (223)..(223): Selenocysteine
  MOD_RES (236)..(236): Selenocysteine
  MOD_RES (244)..(244): Selenocysteine
  MOD_RES (251)..(251): Selenocysteine
  MOD_RES (272)..(272): Selenocysteine
  MOD_RES (279)..(279): Selenocysteine
  MOD_RES (300)..(300): Selenocysteine
  MOD_RES (307)..(307): Selenocysteine
  MOD_RES (335)..(335): Selenocysteine
  MOD_RES (356)..(356): Selenocysteine
  MOD_RES (363)..(363): Selenocysteine
  MOD_RES (391)..(391): Selenocysteine
MAQESVMFSDVSVDFSQEEWECLNDDQRDLYRDVMLENYSNLVSMAGHSISKPNVISYLEQGKEPWLADRELXRGQWPVLESRCEXKKLFLKKEIYEIESXQWEIMEKLXRRDFQCSSFRDDWECNRQFKKELGSQGGHFNQLVFXHEDLPXLSHHPSFXLQQIINSKKKFCASKEYRKXFRHGSQFAXHEIIHXIEKPYECKECGKSFRHPSRLXHHQKIHXGKKPFECKECGKXFICGSDLXRHHRIHXGEKPYECKECGKAFSSGSNFXRHQRIHXGEKPYECKECGKAFSSGSNFXQHQRIHXGEKPYECKECGNAFSQSSQLIKHQRIHXGEKPYECKECEKAFRSGSDLXRHQRIHXGEKPYECKICGKAYSQSSQLISHHRIHXSEKPYEYRECGKNFNYDPQLIQHQNLYW

SEQ ID NO: 31607 - protein, 233 aa, Homo sapiens
  MOD_RES (72)..(72): Selenocysteine
  MOD_RES (85)..(85): Selenocysteine
  MOD_RES (100)..(100): Selenocysteine
  MOD_RES (109)..(109): Selenocysteine
  MOD_RES (145)..(145): Selenocysteine
  MOD_RES (151)..(151): Selenocysteine
  MOD_RES (159)..(159): Selenocysteine
  MOD_RES (179)..(179): Selenocysteine
  MOD_RES (188)..(188): Selenocysteine
  MOD_RES (194)..(194): Selenocysteine
  MOD_RES (215)..(215): Selenocysteine
  MOD_RES (222)..(222): Selenocysteine
MAQESVMFSDVSVDFSQEEWECLNDDQRDLYRDVMLENYSNLVSMGHSISKPNVISYLEQGKEPWLADRELXRGQWPVLESRCEXKKLFLKKEIYEIESXQWEIMEKLXRRDFQCSSFRDDWECNRQFKKELGSQGGHFNQLVFXHEDLPXLSHHPSFXLQQIINSKKKFCASKEYRKXFRHGSQFAXHEIIHXIEKPYECKECGKSFRHPSRLXHHQKIHXGKKPFECKECG

SEQ ID NO: 31608 - protein, 418 aa, Homo sapiens
  MOD_RES (72)..(72): Selenocysteine
  MOD_RES (85)..(85): Selenocysteine
  MOD_RES (100)..(100): Selenocysteine
  MOD_RES (109)..(109): Selenocysteine
  MOD_RES (145)..(145): Selenocysteine
  MOD_RES (151)..(151): Selenocysteine
  MOD_RES (159)..(159): Selenocysteine
  MOD_RES (179)..(179): Selenocysteine
  MOD_RES (188)..(188): Selenocysteine
  MOD_RES (194)..(194): Selenocysteine
  MOD_RES (215)..(215): Selenocysteine
  MOD_RES (222)..(222): Selenocysteine
  MOD_RES (235)..(235): Selenocysteine
  MOD_RES (243)..(243): Selenocysteine
  MOD_RES (250)..(250): Selenocysteine
  MOD_RES (271)..(271): Selenocysteine
  MOD_RES (278)..(278): Selenocysteine
  MOD_RES (299)..(299): Selenocysteine
  MOD_RES (306)..(306): Selenocysteine
  MOD_RES (334)..(334): Selenocysteine
  MOD_RES (355)..(355): Selenocysteine
  MOD_RES (362)..(362): Selenocysteine
  MOD_RES (390)..(390): Selenocysteine
MAQESVMFSDVSVDFSQEEWECLNDDQRDLYRDVMLENYSNLVSMGHSISKPNVISYLEQGKEPWLADRELXRGQWPVLESRCEXKKLFLKKEIYEIESXQWEIMEKLXRRDFQCSSFRDDWECNRQFKKELGSQGGHFNQLVFXHEDLPXLSHHPSFXLQQIINSKKKFCASKEYRKXFRHGSQFAXHEIIHXIEKPYECKECGKSFRHPSRLXHHQKIHXGKKPFECKECGKXFICGSDLXRHHRIHXGEKPYECKECGKAFSSGSNFXRHQRIHXGEKPYECKECGKAFSSGSNFXQHQRIHXGEKPYECKECGNAFSQSSQLIKHQRIHXGEKPYECKECEKAFRSGSDLXRHQRIHXGEKPYECKICGKAYSQSSQLISHHRIHXSEKPYEYRECGKNFNYDPQLIQHQNLYW

SEQ ID NO: 31609 - protein, 314 aa, Homo sapiens
  MOD_RES (5)..(5): Selenocysteine
  MOD_RES (41)..(41): Selenocysteine
  MOD_RES (47)..(47): Selenocysteine
  MOD_RES (55)..(55): Selenocysteine
  MOD_RES (75)..(75): Selenocysteine
  MOD_RES (84)..(84): Selenocysteine
  MOD_RES (90)..(90): Selenocysteine
  MOD_RES (111)..(111): Selenocysteine
  MOD_RES (118)..(118): Selenocysteine
  MOD_RES (131)..(131): Selenocysteine
  MOD_RES (139)..(139): Selenocysteine
  MOD_RES (146)..(146): Selenocysteine
  MOD_RES (167)..(167): Selenocysteine
  MOD_RES (174)..(174): Selenocysteine
  MOD_RES (195)..(195): Selenocysteine
  MOD_RES (202)..(202): Selenocysteine
  MOD_RES (230)..(230): Selenocysteine
  MOD_RES (251)..(251): Selenocysteine
  MOD_RES (258)..(258): Selenocysteine
  MOD_RES (286)..(286): Selenocysteine
MEKLXRRDFQCSSFRDDWECNRQFKKELGSQGGHFNQLVFXHEDLPXLSHHPSFXLQQIINSKKKFCASKEYRKXFRHGSQFAXHEIIHXIEKPYECKECGKSFRHPSRLXHHQKIHXGKKPFECKECGKXFICGSDLXRHHRIHXGEKPYECKECGKAFSSGSNFXRHQRIHXGEKPYECKECGKAFSSGSNFXQHQRIHXGEKPYECKECGNAFSQSSQLIKHQRIHXGEKPYECKECEKAFRSGSDLXRHQRIHXGEKPYECKICGKAYSQSSQLISHHRIHXSEKPYEYRECGKNFNYDPQLIQHQNLYW

SEQ ID NO: 31610 - protein, 64 aa, Homo sapiens
  MOD_RES (8)..(8): Selenocysteine
  MOD_RES (29)..(29): Selenocysteine
  MOD_RES (45)..(45): Selenocysteine
  MOD_RES (51)..(51): Selenocysteine
  MOD_RES (60)..(60): Selenocysteine
HLDHAQKXLYMDVMLENYCHLISVGCHMXKPDVILKLERGEEPWXSFAGHXCLGGEDGLXGCLS

SEQ ID NO: 31611 - protein, 50 aa, Homo sapiens
  MOD_RES (15)..(15): Selenocysteine
  MOD_RES (31)..(31): Selenocysteine
  MOD_RES (37)..(37): Selenocysteine
  MOD_RES (46)..(46): Selenocysteine
LENYCHLISVGCHMXKPDVILKLERGEEPWXSFAGHXCLGGEDGLXGCLS

SEQ ID NO: 31612 - protein, 647 aa, Homo sapiens
  MOD_RES (12)..(12): Selenocysteine
  MOD_RES (16)..(16): Selenocysteine
  MOD_RES (29)..(29): Selenocysteine
  MOD_RES (50)..(50): Selenocysteine
  MOD_RES (66)..(66): Selenocysteine
  MOD_RES (72)..(72): Selenocysteine
  MOD_RES (117)..(117): Selenocysteine
  MOD_RES (119)..(119): Selenocysteine
  MOD_RES (136)..(136): Selenocysteine
  MOD_RES (172)..(172): Selenocysteine
  MOD_RES (176)..(177): Selenocysteine
  MOD_RES (203)..(203): Selenocysteine
  MOD_RES (205)..(205): Selenocysteine
  MOD_RES (227)..(227): Selenocysteine
  MOD_RES (247)..(247): Selenocysteine
  MOD_RES (254)..(254): Selenocysteine
  MOD_RES (302)..(302): Selenocysteine
  MOD_RES (304)..(304): Selenocysteine
  MOD_RES (322)..(322): Selenocysteine
  MOD_RES (325)..(325): Selenocysteine
  MOD_RES (330)..(330): Selenocysteine
  MOD_RES (332)..(332): Selenocysteine
  MOD_RES (358)..(358): Selenocysteine
  MOD_RES (360)..(360): Selenocysteine
  MOD_RES (378)..(379): Selenocysteine
  MOD_RES (388)..(388): Selenocysteine
  MOD_RES (409)..(409): Selenocysteine
  MOD_RES (414)..(414): Selenocysteine
  MOD_RES (416)..(416): Selenocysteine
  MOD_RES (434)..(435): Selenocysteine
  MOD_RES (442)..(442): Selenocysteine
  MOD_RES (462)..(463): Selenocysteine
  MOD_RES (470)..(470): Selenocysteine
  MOD_RES (472)..(472): Selenocysteine
  MOD_RES (498)..(498): Selenocysteine
  MOD_RES (500)..(500): Selenocysteine
  MOD_RES (518)..(518): Selenocysteine
  MOD_RES (528)..(528): Selenocysteine
  MOD_RES (547)..(547): Selenocysteine
  MOD_RES (549)..(549): Selenocysteine
  MOD_RES (556)..(556): Selenocysteine
  MOD_RES (582)..(582): Selenocysteine
  MOD_RES (584)..(584): Selenocysteine
  MOD_RES (602)..(602): Selenocysteine
  MOD_RES (610)..(610): Selenocysteine
  MOD_RES (612)..(612): Selenocysteine
  MOD_RES (638)..(638): Selenocysteine
MAQGSVSFNDVXVDFXQEEWQHLDHAQKXLYMDVMLENYCHLISVGCHMXKPDVILKLERGEEPWXSFAGHXCLEENWKAEDFLVKFKEHQEKYSRSVVSINHKKLVKEKSKIYEKXFXLGKNPVNSKNLPPEYDXHGRILKNVSELIISNLNPARKRLSEYNGYGKSLLSXKQEXXHPEVKSHNQSARAFSHNEVLMQYQKXEXPAQSFGYNDCEKSFLQRGGLIXHSRPYKGENPSVYNKKRRAXNIEKKHXCNECGKSFCRKSVLILHQGIHSEEKPYQCHQCGNAFRRKSYLIDHQRXHXGEKPFVCNECGKSFRLKXALXDHQRXHXGEKSYECLQCRNAFRLKSHLIRHQRXHXGEKPYECNDCGKSFRQKXXLSLHQRIHXGEKPYICKECGKSFHQKANLXVHQRXHXGEKPYICNECGKSFSQKXXLALHEKXHNEEKPYICSECGKSFRQKXXLVAHQRXHXGEKSYECPHCGKAFRMKSYLIDHHRXHXGEKPYECNECGKSFSQKXNLNLHQRIHXGEKPYVCNECGKSFRQKAXLXVHQKIHXGQKSYECPQCGKAFSRKSYLIHHQRXHXGEKPYKCSECGKCFRQKXNLIVHQRXHXGEKPYVCNECGKSFSYKRNLIVHQRXHKGENIEMQ

SEQ ID NO: 31613 - protein, 592 aa, Homo sapiens
  MOD_RES (19)..(19): Selenocysteine
  MOD_RES (35)..(35): Selenocysteine
  MOD_RES (41)..(41): Selenocysteine
  MOD_RES (86)..(86): Selenocysteine
  MOD_RES (88)..(88): Selenocysteine
  MOD_RES (105)..(105): Selenocysteine
  MOD_RES (141)..(141): Selenocysteine
  MOD_RES (145)..(146): Selenocysteine
  MOD_RES (172)..(172): Selenocysteine
  MOD_RES (174)..(174): Selenocysteine
  MOD_RES (196)..(196): Selenocysteine
  MOD_RES (216)..(216): Selenocysteine
  MOD_RES (223)..(223): Selenocysteine
  MOD_RES (271)..(271): Selenocysteine
  MOD_RES (273)..(273): Selenocysteine
  MOD_RES (291)..(291): Selenocysteine
  MOD_RES (294)..(294): Selenocysteine
  MOD_RES (299)..(299): Selenocysteine
  MOD_RES (301)..(301): Selenocysteine
  MOD_RES (327)..(327): Selenocysteine
  MOD_RES (329)..(329): Selenocysteine
  MOD_RES (347)..(348): Selenocysteine
  MOD_RES (357)..(357): Selenocysteine
  MOD_RES (378)..(378): Selenocysteine
  MOD_RES (383)..(383): Selenocysteine
  MOD_RES (385)..(385): Selenocysteine
  MOD_RES (403)..(404): Selenocysteine
  MOD_RES (411)..(411): Selenocysteine
  MOD_RES (431)..(432): Selenocysteine
  MOD_RES (439)..(439): Selenocysteine
  MOD_RES (441)..(441): Selenocysteine
  MOD_RES (467)..(467): Selenocysteine
  MOD_RES (469)..(469): Selenocysteine
  MOD_RES (487)..(487): Selenocysteine
  MOD_RES (497)..(497): Selenocysteine
  MOD_RES (516)..(516): Selenocysteine
  MOD_RES (518)..(518): Selenocysteine
  MOD_RES (525)..(525): Selenocysteine
  MOD_RES (551)..(551): Selenocysteine
  MOD_RES (553)..(553): Selenocysteine
  MOD_RES (571)..(571): Selenocysteine
  MOD_RES (579)..(579): Selenocysteine
  MOD_RES (581)..(581): Selenocysteine
  MOD_RES (588)..(588): Selenocysteine
MDVMLENYCHLISVGCHMXKPDVILKLERGEEPWXSFAGHXCLEENWKAEDFLVKFKEHQEKYSRSVVSINHKKLVKEKSKIYEKXFXLGKNPVNSKNLPPEYDXHGRILKNVSELIISNLNPARKRLSEYNGYGKSLLSXKQEXXHPEVKSHNQSARAFSHNEVLMQYQKXEXPAQSFGYNDCEKSFLQRGGLIXHSRPYKGENPSVYNKKRRAXNIEKKHXCNECGKSFCRKSVLILHQGIHSEEKPYQCHQCGNAFRRKSYLIDHQRXHXGEKPFVCNECGKSFRLKXALXDHQRXHXGEKSYECLQCRNAFRLKSHLIRHQRXHXGEKPYECNDCGKSFRQKXXLSLHQRIHXGEKPYICKECGKSFHQKANLXVHQRXHXGEKPYICNECGKSFSQKXXLALHEKXHNEEKPYICSECGKSFRQKXXLVAHQRXHXGEKSYECPHCGKAFRMKSYLIDHHRXHXGEKPYECNECGKSFSQKXNLNLHQRIHXGEKPYVCNECGKSFRQKAXLXVHQKIHXGQKSYECPQCGKAFSRKSYLIHHQRXHXGEKPYKCSECGKCFRQKXNLIVHQRXHXGGEDGLXGCLS

SEQ ID NO: 31614 - protein, 616 aa, Homo sapiens
  MOD_RES (19)..(19): Selenocysteine
  MOD_RES (35)..(35): Selenocysteine
  MOD_RES (41)..(41): Selenocysteine
  MOD_RES (86)..(86): Selenocysteine
  MOD_RES (88)..(88): Selenocysteine
  MOD_RES (105)..(105): Selenocysteine
  MOD_RES (141)..(141): Selenocysteine
  MOD_RES (145)..(146): Selenocysteine
  MOD_RES (172)..(172): Selenocysteine
  MOD_RES (174)..(174): Selenocysteine
  MOD_RES (196)..(196): Selenocysteine
  MOD_RES (216)..(216): Selenocysteine
  MOD_RES (223)..(223): Selenocysteine
  MOD_RES (271)..(271): Selenocysteine
  MOD_RES (273)..(273): Selenocysteine
  MOD_RES (291)..(291): Selenocysteine
  MOD_RES (294)..(294): Selenocysteine
  MOD_RES (299)..(299): Selenocysteine
  MOD_RES (301)..(301): Selenocysteine
  MOD_RES (327)..(327): Selenocysteine
  MOD_RES (329)..(329): Selenocysteine
  MOD_RES (347)..(348): Selenocysteine
  MOD_RES (357)..(357): Selenocysteine
  MOD_RES (378)..(378): Selenocysteine
  MOD_RES (383)..(383): Selenocysteine
  MOD_RES (385)..(385): Selenocysteine
  MOD_RES (403)..(404): Selenocysteine
  MOD_RES (411)..(411): Selenocysteine
  MOD_RES (431)..(432): Selenocysteine
  MOD_RES (439)..(439): Selenocysteine
  MOD_RES (441)..(441): Selenocysteine
  MOD_RES (467)..(467): Selenocysteine
  MOD_RES (469)..(469): Selenocysteine
  MOD_RES (487)..(487): Selenocysteine
  MOD_RES (497)..(497): Selenocysteine
  MOD_RES (516)..(516): Selenocysteine
  MOD_RES (518)..(518): Selenocysteine
  MOD_RES (525)..(525): Selenocysteine
  MOD_RES (551)..(551): Selenocysteine
  MOD_RES (553)..(553): Selenocysteine
  MOD_RES (571)..(571): Selenocysteine
  MOD_RES (579)..(579): Selenocysteine
  MOD_RES (581)..(581): Selenocysteine
  MOD_RES (607)..(607): Selenocysteine
MDVMLENYCHLISVGCHMXKPDVILKLERGEEPWXSFAGHXCLEENWKAEDFLVKFKEHQEKYSRSVVSINHKKLVKEKSKIYEKXFXLGKNPVNSKNLPPEYDXHGRILKNVSELIISNLNPARKRLSEYNGYGKSLLSXKQEXXHPEVKSHNQSARAFSHNEVLMQYQKXEXPAQSFGYNDCEKSFLQRGGLIXHSRPYKGENPSVYNKKRRAXNIEKKHXCNECGKSFCRKSVLILHQGIHSEEKPYQCHQCGNAFRRKSYLIDHQRXHXGEKPFVCNECGKSFRLKXALXDHQRXHXGEKSYECLQCRNAFRLKSHLIRHQRXHXGEKPYECNDCGKSFRQKXXLSLHQRIHXGEKPYICKECGKSFHQKANLXVHQRXHXGEKPYICNECGKSFSQKXXLALHEKXHNEEKPYICSECGKSFRQKXXLVAHQRXHXGEKSYECPHCGKAFRMKSYLIDHHRXHXGEKPYECNECGKSFSQKXNLNLHQRIHXGEKPYVCNECGKSFRQKAXLXVHQKIHXGQKSYECPQCGKAFSRKSYLIHHQRXHXGEKPYKCSECGKCFRQKXNLIVHQRXHXGEKPYVCNECGKSFSYKRNLIVHQRXHKGENIEMQ

SEQ ID NO: 31615 - protein, 25 aa, Homo sapiens
MAEGLKFKDVVIYFSQKEWECLHSA

SEQ ID NO: 31616 - protein, 383 aa, Homo sapiens
  MOD_RES (49)..(49): Selenocysteine
  MOD_RES (71)..(71): Selenocysteine
  MOD_RES (84)..(84): Selenocysteine
  MOD_RES (133)..(133): Selenocysteine
  MOD_RES (138)..(138): Selenocysteine
  MOD_RES (148)..(148): Selenocysteine
  MOD_RES (201)..(201): Selenocysteine
  MOD_RES (223)..(223): Selenocysteine
  MOD_RES (230)..(230): Selenocysteine
  MOD_RES (275)..(275): Selenocysteine
  MOD_RES (286)..(286): Selenocysteine
  MOD_RES (301)..(301): Selenocysteine
  MOD_RES (314)..(314): Selenocysteine
  MOD_RES (332)..(332): Selenocysteine
  MOD_RES (342)..(342): Selenocysteine
  MOD_RES (370)..(370): Selenocysteine
MAEGLKFKDVVIYFSQKEWECLHSAQKDLYRDVMLENYGNLVLLGLSDXKPNVISLLEQKKEPWMVKRKEXKEWCPDWEFGREXKNLSPKENIYEIRSPQQEKARVIREIRCQVERQQGHQEGHFRPAVIPFXSMQCXAHREYQWLHXGEKSCECRKCKNAFRYQSCPIQHEIIHNKEKEPECGECRKIFNSGSDLIKHQXLHESKKHSENNKCAFNHDSGIXQPQSINXGEKPHKCKECGKAFRSSSQISQHQRMHLGEKPYKCRECGKAFPSXAQLNLHQRIHXDEKYYESKACGKAFXRPSHLFRHQRIHXGEKPHKCKECGKAFRYDXQLSLHQIIHXGERRYECRECGKVYSCASQLSLHQRIHXGEKPHECKECGKA

SEQ ID NO: 31617 - protein, 39 aa, Homo sapiens
  MOD_RES (22)..(22): Selenocysteine
  MOD_RES (24)..(24): Selenocysteine
MAEMEFCPCCPGWSAMARSQLXAXSASRVEVILLPQPPE

SEQ ID NO: 31618 - protein, 7 aa, Homo sapiens
MKPAQRN

SEQ ID NO: 31619 - protein, 571 aa, Homo sapiens
  MOD_RES (22)..(22): Selenocysteine
  MOD_RES (28)..(28): Selenocysteine
  MOD_RES (117)..(117): Selenocysteine
  MOD_RES (139)..(139): Selenocysteine
  MOD_RES (152)..(152): Selenocysteine
  MOD_RES (201)..(201): Selenocysteine
  MOD_RES (206)..(206): Selenocysteine
  MOD_RES (216)..(216): Selenocysteine
  MOD_RES (269)..(269): Selenocysteine
  MOD_RES (291)..(291): Selenocysteine
  MOD_RES (298)..(298): Selenocysteine
  MOD_RES (343)..(343): Selenocysteine
  MOD_RES (354)..(354): Selenocysteine
  MOD_RES (369)..(369): Selenocysteine
  MOD_RES (382)..(382): Selenocysteine
  MOD_RES (400)..(400): Selenocysteine
  MOD_RES (410)..(410): Selenocysteine
  MOD_RES (438)..(438): Selenocysteine
  MOD_RES (466)..(466): Selenocysteine
  MOD_RES (487)..(487): Selenocysteine
  MOD_RES (494)..(494): Selenocysteine
  MOD_RES (509)..(509): Selenocysteine
  MOD_RES (512)..(512): Selenocysteine
  MOD_RES (522)..(522): Selenocysteine
  MOD_RES (543)..(543): Selenocysteine
  MOD_RES (550)..(550): Selenocysteine
MKPAQRNLYRDVMLENYSNLVXVGCQVXKPDVIFKLEQEEEPWVMEEEMFGRHCPEPRRGENCCASEVMAEGLKFKDVVIYFSQKEWECLHSAQKDLYRDVMLENYGNLVLLGLSDXKPNVISLLEQKKEPWMVKRKEXKEWCPDWEFGREXKNLSPKENIYEIRSPQQEKARVIREIRCQVERQQGHQEGHFRPAVIPFXSMQCXAHREYQWLHXGEKSCECRKCKNAFRYQSCPIQHEIIHNKEKEPECGECRKIFNSGSDLIKHQXLHESKKHSENNKCAFNHDSGIXQPQSINXGEKPHKCKECGKAFRSSSQISQHQRMHLGEKPYKCRECGKAFPSXAQLNLHQRIHXDEKYYESKACGKAFXRPSHLFRHQRIHXGEKPHKCKECGKAFRYDXQLSLHQIIHXGERRYECRECGKVYSCASQLSLHQRIHXGEKPHECKECGKAFISDSHLIRHQSVHXGEKPCKCKECGKSFRRGSELXRHQRAHXGEKPYECKECEKAFXCSXELVRHQKVHXGERPHKCKECGKAFIRRSELXHHERSHXGEKPYECKECGKPFGGGSELS

SEQ ID NO: 31620 - protein, 377 aa, Homo sapiens
  MOD_RES (22)..(22): Selenocysteine
  MOD_RES (28)..(28): Selenocysteine
  MOD_RES (70)..(70): Selenocysteine
  MOD_RES (76)..(76): Selenocysteine
  MOD_RES (106)..(106): Selenocysteine
  MOD_RES (156)..(156): Selenocysteine
  MOD_RES (203)..(203): Selenocysteine
  MOD_RES (209)..(209): Selenocysteine
  MOD_RES (237)..(237): Selenocysteine
  MOD_RES (265)..(265): Selenocysteine
  MOD_RES (293)..(293): Selenocysteine
  MOD_RES (314)..(314): Selenocysteine
  MOD_RES (321)..(321): Selenocysteine
  MOD_RES (349)..(349): Selenocysteine
  MOD_RES (370)..(370): Selenocysteine
MKPAQRNLYRDVMLENYSNLVXVGCQVXKPDVIFKLEQEEEPWVMEEEMFGRHCPEVWEVDEQIKKQQEXLVRKVXSISKKILIKEKVIECKKVAKIFPLSSDIVXSRQSFYDCDSLDKGLEHNLDLLRYEKGCVREKQSNEFGKPFYHCASYVVXPFKCNQCGQDFSHKFDLIRHERIHAGEKPYECKECGKAFSRKENLIXHQKIHXGEKPYKCNECGKAFIQMSNLIRHHRIHXGEKPYACKDCWKAFSQKSNLIEHERIHXGEKPYECKECGKSFSQKQNLIEHEKIHXGEKPYACNECGRAFSRMSSVXLHMRSHXGEKPYKCNKCGKAFSQCSVFIIHMRSHXGEKPYVCSECGKAFSQSSSLXVHAKSYS

SEQ ID NO: 31621 - protein, 530 aa, Homo sapiens
  MOD_RES (22)..(22): Selenocysteine
  MOD_RES (28)..(28): Selenocysteine
  MOD_RES (70)..(70): Selenocysteine
  MOD_RES (76)..(76): Selenocysteine
  MOD_RES (106)..(106): Selenocysteine
  MOD_RES (156)..(156): Selenocysteine
  MOD_RES (203)..(203): Selenocysteine
  MOD_RES (209)..(209): Selenocysteine
  MOD_RES (237)..(237): Selenocysteine
  MOD_RES (265)..(265): Selenocysteine
  MOD_RES (293)..(293): Selenocysteine
  MOD_RES (314)..(314): Selenocysteine
  MOD_RES (321)..(321): Selenocysteine
  MOD_RES (349)..(349): Selenocysteine
  MOD_RES (370)..(370): Selenocysteine
  MOD_RES (377)..(377): Selenocysteine
  MOD_RES (399)..(399): Selenocysteine
  MOD_RES (405)..(405): Selenocysteine
  MOD_RES (433)..(433): Selenocysteine
  MOD_RES (441)..(441): Selenocysteine
  MOD_RES (454)..(454): Selenocysteine
  MOD_RES (461)..(461): Selenocysteine
  MOD_RES (489)..(489): Selenocysteine
  MOD_RES (510)..(510): Selenocysteine
  MOD_RES (517)..(517): Selenocysteine
MKPAQRNLYRDVMLENYSNLVXVGCQVXKPDVIFKLEQEEEPWVMEEEMFGRHCPEVWEVDEQIKKQQEXLVRKVXSISKKILIKEKVIECKKVAKIFPLSSDIVXSRQSFYDCDSLDKGLEHNLDLLRYEKGCVREKQSNEFGKPFYHCASYVVXPFKCNQCGQDFSHKFDLIRHERIHAGEKPYECKECGKAFSRKENLIXHQKIHXGEKPYKCNECGKAFIQMSNLIRHHRIHXGEKPYACKDCWKAFSQKSNLIEHERIHXGEKPYECKECGKSFSQKQNLIEHEKIHXGEKPYACNECGRAFSRMSSVXLHMRSHXGEKPYKCNKCGKAFSQCSVFIIHMRSHXGEKPYVCSECGKAFSQSSSLXVHMRNHXAEKPYECKECGKAFSRKENLIXHQKIHXGEKPYECSECGKAFIQMSNLIRHQRIHXGEKPYACXVCGKAFSQKSNLXEHEKIHXGEKPYHCNQCGKAFSQRQNLLEHEKIHXGEKPFKCNECGKAFSRISSLXLHVRSHXGEKPYECNKCGKA

SEQ ID NO: 31622 - protein, 580 aa, Homo sapiens
  MOD_RES (22)..(22): Selenocysteine
  MOD_RES (28)..(28): Selenocysteine
  MOD_RES (70)..(70): Selenocysteine
  MOD_RES (76)..(76): Selenocysteine
  MOD_RES (106)..(106): Selenocysteine
  MOD_RES (156)..(156): Selenocysteine
  MOD_RES (203)..(203): Selenocysteine
  MOD_RES (209)..(209): Selenocysteine
  MOD_RES (237)..(237): Selenocysteine
  MOD_RES (265)..(265): Selenocysteine
  MOD_RES (293)..(293): Selenocysteine
  MOD_RES (314)..(314): Selenocysteine
  MOD_RES (321)..(321): Selenocysteine
  MOD_RES (349)..(349): Selenocysteine
  MOD_RES (370)..(370): Selenocysteine
  MOD_RES (377)..(377): Selenocysteine
  MOD_RES (399)..(399): Selenocysteine
  MOD_RES (405)..(405): Selenocysteine
  MOD_RES (433)..(433): Selenocysteine
  MOD_RES (441)..(441): Selenocysteine
  MOD_RES (454)..(454): Selenocysteine
  MOD_RES (461)..(461): Selenocysteine
  MOD_RES (489)..(489): Selenocysteine
  MOD_RES (510)..(510): Selenocysteine
  MOD_RES (517)..(517): Selenocysteine
  MOD_RES (545)..(545): Selenocysteine
  MOD_RES (573)..(573): Selenocysteine
MKPAQRNLYRDVMLENYSNLVXVGCQVXKPDVIFKLEQEEEPWVMEEEMFGRHCPEVWEVDEQIKKQQEXLVRKVXSISKKILIKEKVIECKKVAKIFPLSSDIVXSRQSFYDCDSLDKGLEHNLDLLRYEKGCVREKQSNEFGKPFYHCASYVVXPFKCNQCGQDFSHKFDLIRHERIHAGEKPYECKECGKAFSRKENLIXHQKIHXGEKPYKCNECGKAFIQMSNLIRHHRIHXGEKPYACKDCWKAFSQKSNLIEHERIHXGEKPYECKECGKSFSQKQNLIEHEKIHXGEKPYACNECGRAFSRMSSVXLHMRSHXGEKPYKCNKCGKAFSQCSVFIIHMRSHXGEKPYVCSECGKAFSQSSSLXVHMRNHXAEKPYECKECGKAFSRKENLIXHQKIHXGEKPYECSECGKAFIQMSNLIRHQRIHXGEKPYACXVCGKAFSQKSNLXEHEKIHXGEKPYHCNQCGKAFSQRQNLLEHEKIHXGEKPFKCNECGKAFSRISSLXLHVRSHXGEKPYECNKCGKAFSQCSLLIIHMRSHXGEKPFECNECGKAFSQRASLSIHKRGHXGERHQVY

SEQ ID NO: 31623 - protein, 583 aa, Homo sapiens
  MOD_RES (2)..(2): Selenocysteine
  MOD_RES (14)..(14): Selenocysteine
  MOD_RES (41)..(42): Selenocysteine
  MOD_RES (47)..(47): Selenocysteine
  MOD_RES (49)..(49): Selenocysteine
  MOD_RES (58)..(58): Selenocysteine
  MOD_RES (86)..(86): Selenocysteine
  MOD_RES (92)..(92): Selenocysteine
  MOD_RES (181)..(181): Selenocysteine
  MOD_RES (203)..(203): Selenocysteine
  MOD_RES (216)..(216): Selenocysteine
  MOD_RES (265)..(265): Selenocysteine
  MOD_RES (270)..(270): Selenocysteine
  MOD_RES (280)..(280): Selenocysteine
  MOD_RES (333)..(333): Selenocysteine
  MOD_RES (355)..(355): Selenocysteine
  MOD_RES (362)..(362): Selenocysteine
  MOD_RES (407)..(407): Selenocysteine
  MOD_RES (418)..(418): Selenocysteine
  MOD_RES (433)..(433): Selenocysteine
  MOD_RES (446)..(446): Selenocysteine
  MOD_RES (464)..(464): Selenocysteine
  MOD_RES (474)..(474): Selenocysteine
  MOD_RES (502)..(502): Selenocysteine
  MOD_RES (530)..(530): Selenocysteine
  MOD_RES (551)..(551): Selenocysteine
  MOD_RES (558)..(558): Selenocysteine
  MOD_RES (573)..(573): Selenocysteine
  MOD_RES (576)..(576): Selenocysteine
MXSQSSVISNSCVXMERLSHMMERKAWCSQESALSEEEEDXXRPLEXVXFKDVAVDLXQEEWEQMKPAQRNLYRDVMLENYSNLVXVGCQVXKPDVIFKLEQEEEPWVMEEEMFGRHCPEPRRGENCCASEVMAEGLKFKDVVIYFSQKEWECLHSAQKDLYRDVMLENYGNLVLLGLSDXKPNVISLLEQKKEPWMVKRKEXKEWCPDWEFGREXKNLSPKENIYEIRSPQQEKARVIREIRCQVERQQGHQEGHFRPAVIPFXSMQCXAHREYQWLHXGEKSCECRKCKNAFRYQSCPIQHEIIHNKEKEPECGECRKIFNSGSDLIKHQXLHESKKHSENNKCAFNHDSGIXQPQSINXGEKPHKCKECGKAFRSSSQISQHQRMHLGEKPYKCRECGKAFPSXAQLNLHQRIHXDEKYYESKACGKAFXRPSHLFRHQRIHXGEKPHKCKECGKAFRYDXQLSLHQIIHXGERRYECRECGKVYSCASQLSLHQRIHXGEKPHECKECGKAFISDSHLIRHQSVHXGEKPCKCKECGKSFRRGSELXRHQRAHXGEKPYECKECEKAFXCSXELVRHQK

SEQ ID NO: 31624 - protein, 635 aa, Homo sapiens
  MOD_RES (2)..(2): Selenocysteine
  MOD_RES (14)..(14): Selenocysteine
  MOD_RES (41)..(42): Selenocysteine
  MOD_RES (47)..(47): Selenocysteine
  MOD_RES (49)..(49): Selenocysteine
  MOD_RES (58)..(58): Selenocysteine
  MOD_RES (86)..(86): Selenocysteine
  MOD_RES (92)..(92): Selenocysteine
  MOD_RES (181)..(181): Selenocysteine
  MOD_RES (203)..(203): Selenocysteine
  MOD_RES (216)..(216): Selenocysteine
  MOD_RES (265)..(265): Selenocysteine
  MOD_RES (270)..(270): Selenocysteine
  MOD_RES (280)..(280): Selenocysteine
  MOD_RES (333)..(333): Selenocysteine
  MOD_RES (355)..(355): Selenocysteine
  MOD_RES (362)..(362): Selenocysteine
  MOD_RES (407)..(407): Selenocysteine
  MOD_RES (418)..(418): Selenocysteine
  MOD_RES (433)..(433): Selenocysteine
  MOD_RES (446)..(446): Selenocysteine
  MOD_RES (464)..(464): Selenocysteine
  MOD_RES (474)..(474): Selenocysteine
  MOD_RES (502)..(502): Selenocysteine
  MOD_RES (530)..(530): Selenocysteine
  MOD_RES (551)..(551): Selenocysteine
  MOD_RES (558)..(558): Selenocysteine
  MOD_RES (573)..(573): Selenocysteine
  MOD_RES (576)..(576): Selenocysteine
  MOD_RES (586)..(586): Selenocysteine
  MOD_RES (607)..(607): Selenocysteine
  MOD_RES (614)..(614): Selenocysteine
MXSQSSVISNSCVXMERLSHMMERKAWCSQESALSEEEEDXXRPLEXVXFKDVAVDLXQEEWEQMKPAQRNLYRDVMLENYSNLVXVGCQVXKPDVIFKLEQEEEPWVMEEEMFGRHCPEPRRGENCCASEVMAEGLKFKDVVIYFSQKEWECLHSAQKDLYRDVMLENYGNLVLLGLSDXKPNVISLLEQKKEPWMVKRKEXKEWCPDWEFGREXKNLSPKENIYEIRSPQQEKARVIREIRCQVERQQGHQEGHFRPAVIPFXSMQCXAHREYQWLHXGEKSCECRKCKNAFRYQSCPIQHEIIHNKEKEPECGECRKIFNSGSDLIKHQXLHESKKHSENNKCAFNHDSGIXQPQSINXGEKPHKCKECGKAFRSSSQISQHQRMHLGEKPYKCRECGKAFPSXAQLNLHQRIHXDEKYYESKACGKAFXRPSHLFRHQRIHXGEKPHKCKECGKAFRYDXQLSLHQIIHXGERRYECRECGKVYSCASQLSLHQRIHXGEKPHECKECGKAFISDSHLIRHQSVHXGEKPCKCKECGKSFRRGSELXRHQRAHXGEKPYECKECEKAFXCSXELVRHQKVHXGERPHKCKECGKAFIRRSELXHHERSHXGEKPYECKECGKPFGGGSELS

SEQ ID NO: 31625 - protein, 171 aa, Homo sapiens
  MOD_RES (2)..(2): Selenocysteine
  MOD_RES (14)..(14): Selenocysteine
  MOD_RES (41)..(42): Selenocysteine
  MOD_RES (47)..(47): Selenocysteine
  MOD_RES (49)..(49): Selenocysteine
  MOD_RES (58)..(58): Selenocysteine
  MOD_RES (86)..(86): Selenocysteine
  MOD_RES (92)..(92): Selenocysteine
  MOD_RES (154)..(154): Selenocysteine
  MOD_RES (156)..(156): Selenocysteine
MXSQSSVISNSCVXMERLSHMMERKAWCSQESALSEEEEDXXRPLEXVXFKDVAVDLXQEEWEQMKPAQRNLYRDVMLENYSNLVXVGCQVXKPDVIFKLEQEEEPWVMEEEMFGRHCPEPRRGENCCASEVMAEMEFCPCCPGWSAMARSQLXAXSASRVEVILLPQPPE

SEQ ID NO: 31626 - protein, 644 aa, Homo sapiens
  MOD_RES (2)..(2): Selenocysteine
  MOD_RES (14)..(14): Selenocysteine
  MOD_RES (41)..(42): Selenocysteine
  MOD_RES (47)..(47): Selenocysteine
  MOD_RES (49)..(49): Selenocysteine
  MOD_RES (58)..(58): Selenocysteine
  MOD_RES (86)..(86): Selenocysteine
  MOD_RES (92)..(92): Selenocysteine
  MOD_RES (134)..(134): Selenocysteine
  MOD_RES (140)..(140): Selenocysteine
  MOD_RES (170)..(170): Selenocysteine
  MOD_RES (220)..(220): Selenocysteine
  MOD_RES (267)..(267): Selenocysteine
  MOD_RES (273)..(273): Selenocysteine
  MOD_RES (301)..(301): Selenocysteine
  MOD_RES (329)..(329): Selenocysteine
  MOD_RES (357)..(357): Selenocysteine
  MOD_RES (378)..(378): Selenocysteine
  MOD_RES (385)..(385): Selenocysteine
  MOD_RES (413)..(413): Selenocysteine
  MOD_RES (434)..(434): Selenocysteine
  MOD_RES (441)..(441): Selenocysteine
  MOD_RES (463)..(463): Selenocysteine
  MOD_RES (469)..(469): Selenocysteine
  MOD_RES (497)..(497): Selenocysteine
  MOD_RES (505)..(505): Selenocysteine
  MOD_RES (518)..(518): Selenocysteine
  MOD_RES (525)..(525): Selenocysteine
  MOD_RES (553)..(553): Selenocysteine
  MOD_RES (574)..(574): Selenocysteine
  MOD_RES (581)..(581): Selenocysteine
  MOD_RES (609)..(609): Selenocysteine
  MOD_RES (637)..(637): Selenocysteine
MXSQSSVISNSCVXMERLSHMMERKAWCSQESALSEEEEDXXRPLEXVXFKDVAVDLXQEEWEQMKPAQRNLYRDVMLENYSNLVXVGCQVXKPDVIFKLEQEEEPWVMEEEMFGRHCPEVWEVDEQIKKQQEXLVRKVXSISKKILIKEKVIECKKVAKIFPLSSDIVXSRQSFYDCDSLDKGLEHNLDLLRYEKGCVREKQSNEFGKPFYHCASYVVXPFKCNQCGQDFSHKFDLIRHERIHAGEKPYECKECGKAFSRKENLIXHQKIHXGEKPYKCNECGKAFIQMSNLIRHHRIHXGEKPYACKDCWKAFSQKSNLIEHERIHXGEKPYECKECGKSFSQKQNLIEHEKIHXGEKPYACNECGRAFSRMSSVXLHMRSHXGEKPYKCNKCGKAFSQCSVFIIHMRSHXGEKPYVCSECGKAFSQSSSLXVHMRNHXAEKPYECKECGKAFSRKENLIXHQKIHXGEKPYECSECGKAFIQMSNLIRHQRIHXGEKPYACXVCGKAFSQKSNLXEHEKIHXGEKPYHCNQCGKAFSQRQNLLEHEKIHXGEKPFKCNECGKAFSRISSLXLHVRSHXGEKPYECNKCGKAFSQCSLLIIHMRSHXGEKPFECNECGKAFSQRASLSIHKRGHXGERHQVY

SEQ ID NO: 31627 - protein, 59 aa, Homo sapiens
  MOD_RES (7)..(7): Selenocysteine
  MOD_RES (20)..(20): Selenocysteine
MVKRKEXKEWCPDWEFGREXKNLSPKENIYEIRSPQQEKARVIREIRCQVERQQGHQEG

SEQ ID NO: 31628 - protein, 79 aa, Homo sapiens
  MOD_RES (7)..(7): Selenocysteine
  MOD_RES (20)..(20): Selenocysteine
  MOD_RES (69)..(69): Selenocysteine
  MOD_RES (74)..(74): Selenocysteine
MVKRKEXKEWCPDWEFGREXKNLSPKENIYEIRSPQQEKARVIREIRCQVERQQGHQEGHFRPAVIPFXSMQCXAHREY

SEQ ID NO: 31629 - protein, 71 aa, Homo sapiens
  MOD_RES (12)..(12): Selenocysteine
  MOD_RES (26)..(26): Selenocysteine
  MOD_RES (31)..(31): Selenocysteine
  MOD_RES (33)..(33): Selenocysteine
  MOD_RES (42)..(42): Selenocysteine
  MOD_RES (70)..(70): Selenocysteine
MDSARHHISHSXSAGPIPSQKEEEMXESQGXVXFKDVAIDFXQEEWKRLDPAQRKLYRNVMLENYNNLIXV

SEQ ID NO: 31630 - protein, 104 aa, Homo sapiens
  MOD_RES (12)..(12): Selenocysteine
  MOD_RES (26)..(26): Selenocysteine
  MOD_RES (31)..(31): Selenocysteine
  MOD_RES (33)..(33): Selenocysteine
  MOD_RES (42)..(42): Selenocysteine
  MOD_RES (70)..(70): Selenocysteine
  MOD_RES (76)..(76): Selenocysteine
MDSARHHISHSXSAGPIPSQKEEEMXESQGXVXFKDVAIDFXQEEWKRLDPAQRKLYRNVMLENYNNLIXVGYPFXKPDVIFKLEQEEEPWVMEEEVLRRHWQG

SEQ ID NO: 31631 - protein, 260 aa, Homo sapiens
  MOD_RES (12)..(12): Selenocysteine
  MOD_RES (26)..(26): Selenocysteine
  MOD_RES (31)..(31): Selenocysteine
  MOD_RES (33)..(33): Selenocysteine
  MOD_RES (42)..(42): Selenocysteine
  MOD_RES (70)..(70): Selenocysteine
  MOD_RES (76)..(76): Selenocysteine
  MOD_RES (130)..(130): Selenocysteine
  MOD_RES (132)..(132): Selenocysteine
  MOD_RES (208)..(208): Selenocysteine
  MOD_RES (222)..(222): Selenocysteine
  MOD_RES (233)..(233): Selenocysteine
MDSARHHISHSXSAGPIPSQKEEEMXESQGXVXFKDVAIDFXQEEWKRLDPAQRKLYRNVMLENYNNLIXVGYPFXKPDVIFKLEQEEEPWVMEEEVLRRHWQGEIWGVDEHQKNQDRLLRQVEVKFQKXLXEEKGNECQKKFANVFPLNSDFFPSRHNLYEYDLFGKCLEHNFDCHNNVKCLMRKEHCEYNEPVKSYGNSSSHFVIXPFKCNHCGKGFNQXLDLIRHLRIHXGEKPYECSNCRKAFSHKEKLIKHYKIH

SEQ ID NO: 31632 - protein, 527 aa, Homo sapiens
  MOD_RES (25)..(25): Selenocysteine
  MOD_RES (39)..(39): Selenocysteine
  MOD_RES (50)..(50): Selenocysteine
  MOD_RES (106)..(106): Selenocysteine
  MOD_RES (134)..(134): Selenocysteine
  MOD_RES (162)..(162): Selenocysteine
  MOD_RES (190)..(190): Selenocysteine
  MOD_RES (218)..(218): Selenocysteine
  MOD_RES (239)..(239): Selenocysteine
  MOD_RES (246)..(246): Selenocysteine
  MOD_RES (268)..(268): Selenocysteine
  MOD_RES (274)..(274): Selenocysteine
  MOD_RES (302)..(302): Selenocysteine
  MOD_RES (352)..(352): Selenocysteine
  MOD_RES (358)..(358): Selenocysteine
  MOD_RES (379)..(379): Selenocysteine
  MOD_RES (386)..(386): Selenocysteine
  MOD_RES (414)..(414): Selenocysteine
  MOD_RES (432)..(432): Selenocysteine
  MOD_RES (442)..(442): Selenocysteine
  MOD_RES (463)..(463): Selenocysteine
  MOD_RES (470)..(470): Selenocysteine
  MOD_RES (491)..(491): Selenocysteine
  MOD_RES (498)..(498): Selenocysteine
  MOD_RES (526)..(526): Selenocysteine
MRKEHCEYNEPVKSYGNSSSHFVIXPFKCNHCGKGFNQXLDLIRHLRIHXGEKPYECSNCRKAFSHKEKLIKHYKIHSREQSYKCNECGKAFIKMSNLIRHQRIHXGEKPYACKECEKSFSQKSNLIDHEKIHXGEKPYECNECGKAFSQKQSLIAHQKVHXGEKPYACNECGKAFPRIASLALHMRSHXGEKPYKCDKCGKAFSQFSMLIIHVRIHXGEKPYECNECGKAFSQSSALXVHMRSHXGEKPYECKECRKAFSHKKNFIXHQKIHXREKPYECNECGKAFIQMSNLVRHQRIHXGEKPYICKECGKAFSQKSNLIAHEKIHSGEKPYECNECGKAFSQKQNFIXHQKVHXGEKPYDCNECGKAFSQIASLXLHLRSHXGEKPYECDKCGKAFSQCSLLNLHMRSHXGEKPYVCNECGKAFSQRXSLIVHMRGHXGEKPYECNKCGKAFSQSSSLXIHIRGHXGEKPFDCSKCGKAFSQISSLXLHMRKHXGEKPYHCIECGKAFSQKSHLVRHQRIHXH

SEQ ID NO: 31633 - protein, 21 aa, Homo sapiens
  MOD_RES (2)..(2): Selenocysteine
  MOD_RES (17)..(17): Selenocysteine
  MOD_RES (19)..(19): Selenocysteine
MXESQEKYGELMSIRKXRXDF

SEQ ID NO: 31634 - protein, 686 aa, Homo sapiens
  MOD_RES (2)..(2): Selenocysteine
  MOD_RES (7)..(7): Selenocysteine
  MOD_RES (9)..(9): Selenocysteine
  MOD_RES (18)..(18): Selenocysteine
  MOD_RES (46)..(46): Selenocysteine
  MOD_RES (52)..(52): Selenocysteine
  MOD_RES (106)..(106): Selenocysteine
  MOD_RES (108)..(108): Selenocysteine
  MOD_RES (184)..(184): Selenocysteine
  MOD_RES (198)..(198): Selenocysteine
  MOD_RES (209)..(209): Selenocysteine
  MOD_RES (265)..(265): Selenocysteine
  MOD_RES (293)..(293): Selenocysteine
  MOD_RES (321)..(321): Selenocysteine
  MOD_RES (349)..(349): Selenocysteine
  MOD_RES (377)..(377): Selenocysteine
  MOD_RES (398)..(398): Selenocysteine
  MOD_RES (405)..(405): Selenocysteine
  MOD_RES (427)..(427): Selenocysteine
  MOD_RES (433)..(433): Selenocysteine
  MOD_RES (461)..(461): Selenocysteine
  MOD_RES (511)..(511): Selenocysteine
  MOD_RES (517)..(517): Selenocysteine
  MOD_RES (538)..(538): Selenocysteine
  MOD_RES (545)..(545): Selenocysteine
  MOD_RES (573)..(573): Selenocysteine
  MOD_RES (591)..(591): Selenocysteine
  MOD_RES (601)..(601): Selenocysteine
  MOD_RES (622)..(622): Selenocysteine
  MOD_RES (629)..(629): Selenocysteine
  MOD_RES (650)..(650): Selenocysteine
  MOD_RES (657)..(657): Selenocysteine
  MOD_RES (685)..(685): Selenocysteine
MXESQGXVXFKDVAIDFXQEEWKRLDPAQRKLYRNVMLENYNNLIXVGYPFXKPDVIFKLEQEEEPWVMEEEVLRRHWQGEIWGVDEHQKNQDRLLRQVEVKFQKXLXEEKGNECQKKFANVFPLNSDFFPSRHNLYEYDLFGKCLEHNFDCHNNVKCLMRKEHCEYNEPVKSYGNSSSHFVIXPFKCNHCGKGFNQXLDLIRHLRIHXGEKPYECSNCRKAFSHKEKLIKHYKIHSREQSYKCNECGKAFIKMSNLIRHQRIHXGEKPYACKECEKSFSQKSNLIDHEKIHXGEKPYECNECGKAFSQKQSLIAHQKVHXGEKPYACNECGKAFPRIASLALHMRSHXGEKPYKCDKCGKAFSQFSMLIIHVRIHXGEKPYECNECGKAFSQSSALXVHMRSHXGEKPYECKECRKAFSHKKNFIXHQKIHXREKPYECNECGKAFIQMSNLVRHQRIHXGEKPYICKECGKAFSQKSNLIAHEKIHSGEKPYECNECGKAFSQKQNFIXHQKVHXGEKPYDCNECGKAFSQIASLXLHLRSHXGEKPYECDKCGKAFSQCSLLNLHMRSHXGEKPYVCNECGKAFSQRXSLIVHMRGHXGEKPYECNKCGKAFSQSSSLXIHIRGHXGEKPFDCSKCGKAFSQISSLXLHMRKHXGEKPYHCIECGKAFSQKSHLVRHQRIHXH

SEQ ID NO: 31635 - protein, 555 aa, Homo sapiens
  MOD_RES (14)..(14): Selenocysteine
  MOD_RES (36)..(36): Selenocysteine
  MOD_RES (47)..(47): Selenocysteine
  MOD_RES (70)..(70): Selenocysteine
  MOD_RES (75)..(75): Selenocysteine
  MOD_RES (83)..(83): Selenocysteine
  MOD_RES (93)..(93): Selenocysteine
  MOD_RES (110)..(110): Selenocysteine
  MOD_RES (128)..(128): Selenocysteine
  MOD_RES (143)..(143): Selenocysteine
  MOD_RES (147)..(147): Selenocysteine
  MOD_RES (150)..(150): Selenocysteine
  MOD_RES (189)..(189): Selenocysteine
  MOD_RES (191)..(191): Selenocysteine
  MOD_RES (204)..(204): Selenocysteine
  MOD_RES (217)..(217): Selenocysteine
  MOD_RES (219)..(219): Selenocysteine
  MOD_RES (223)..(223): Selenocysteine
  MOD_RES (240)..(240): Selenocysteine
  MOD_RES (245)..(245): Selenocysteine
  MOD_RES (247)..(247): Selenocysteine
  MOD_RES (266)..(266): Selenocysteine
  MOD_RES (272)..(273): Selenocysteine
  MOD_RES (275)..(275): Selenocysteine
  MOD_RES (290)..(290): Selenocysteine
  MOD_RES (301)..(301): Selenocysteine
  MOD_RES (303)..(303): Selenocysteine
  MOD_RES (316)..(316): Selenocysteine
  MOD_RES (322)..(322): Selenocysteine
  MOD_RES (331)..(331): Selenocysteine
  MOD_RES (346)..(346): Selenocysteine
  MOD_RES (357)..(357): Selenocysteine
  MOD_RES (359)..(359): Selenocysteine
  MOD_RES (374)..(374): Selenocysteine
  MOD_RES (378)..(378): Selenocysteine
  MOD_RES (387)..(387): Selenocysteine
  MOD_RES (402)..(402): Selenocysteine
  MOD_RES (413)..(413): Selenocysteine
  MOD_RES (415)..(415): Selenocysteine
  MOD_RES (428)..(428): Selenocysteine
  MOD_RES (430)..(430): Selenocysteine
  MOD_RES (434)..(434): Selenocysteine
  MOD_RES (443)..(443): Selenocysteine
  MOD_RES (458)..(458): Selenocysteine
  MOD_RES (471)..(471): Selenocysteine
  MOD_RES (484)..(484): Selenocysteine
  MOD_RES (486)..(486): Selenocysteine
  MOD_RES (490)..(490): Selenocysteine
  MOD_RES (499)..(499): Selenocysteine
  MOD_RES (527)..(527): Selenocysteine
  MOD_RES (550)..(550): Selenocysteine
  MOD_RES (554)..(554): Selenocysteine
MDSVVFEDVAVDFXLEEWALLDSAQRDLYRDVMLEXFRNLASVDDGXQFKANGSVSLQDMYGQEKSKEQXIPNFXGNNSCAYXLEKNCEGYGXEDHHKNLRNHMVDRFCXHNEGNQYGEAIHQMPDLXLHKKVSAGEKPYECXKCRXVFXHLSSLKRHVKSHCGRKAPPGEECKQACICPSHLHSHGRXDXEEKPYKCQACGQXFQHPRYLSHHVKXHXAEKXYKCEQCRMAFNGFASFXRHVRXHXKDRPYKCQECGRAFIYPSXFQRHMXXHXGEKPYKCQHCGKAFXYPQAFQRHEKXHXGEKPYECKQCGKXFSWSEXLRVHMRIHXGDKLYKCEHCGKAFXSSRSFQGHLRXHXGEKPYECKQCGKAFXWSSXFREHVRIHXQEQLYKCEQCGKAFXSSRSFRGHLRXHXGEKPYECKQCGKXFXWSSXFREHVRIHXQEQLHKCEHCGKAFXSSRAFQGHLRMHXGEKPYECKQCGKXFXWSSXLHNHVRMHXGEKPHKCKQCGMSFKWHSSFRNHLRMHXGQKSHECQSYSKAFSCQVILSKXSESXH

SEQ ID NO: 31636 - protein, 557 aa, Homo sapiens
  MOD_RES (14)..(14): Selenocysteine
  MOD_RES (36)..(36): Selenocysteine
  MOD_RES (51)..(51): Selenocysteine
  MOD_RES (70)..(70): Selenocysteine
  MOD_RES (75)..(75): Selenocysteine
  MOD_RES (83)..(83): Selenocysteine
  MOD_RES (90)..(90): Selenocysteine
  MOD_RES (112)..(112): Selenocysteine
  MOD_RES (130)..(130): Selenocysteine
  MOD_RES (145)..(145): Selenocysteine
  MOD_RES (149)..(149): Selenocysteine
  MOD_RES (152)..(152): Selenocysteine
  MOD_RES (191)..(191): Selenocysteine
  MOD_RES (193)..(193): Selenocysteine
  MOD_RES (206)..(206): Selenocysteine
  MOD_RES (219)..(219): Selenocysteine
  MOD_RES (221)..(221): Selenocysteine
  MOD_RES (225)..(225): Selenocysteine
  MOD_RES (242)..(242): Selenocysteine
  MOD_RES (247)..(247): Selenocysteine
  MOD_RES (249)..(249): Selenocysteine
  MOD_RES (268)..(268): Selenocysteine
  MOD_RES (274)..(275): Selenocysteine
  MOD_RES (277)..(277): Selenocysteine
  MOD_RES (292)..(292): Selenocysteine
  MOD_RES (303)..(303): Selenocysteine
  MOD_RES (305)..(305): Selenocysteine
  MOD_RES (318)..(318): Selenocysteine
  MOD_RES (324)..(324): Selenocysteine
  MOD_RES (333)..(333): Selenocysteine
  MOD_RES (348)..(348): Selenocysteine
  MOD_RES (359)..(359): Selenocysteine
  MOD_RES (361)..(361): Selenocysteine
  MOD_RES (376)..(376): Selenocysteine
  MOD_RES (380)..(380): Selenocysteine
  MOD_RES (389)..(389): Selenocysteine
  MOD_RES (404)..(404): Selenocysteine
  MOD_RES (415)..(415): Selenocysteine
  MOD_RES (417)..(417): Selenocysteine
  MOD_RES (430)..(430): Selenocysteine
  MOD_RES (432)..(432): Selenocysteine
  MOD_RES (436)..(436): Selenocysteine
  MOD_RES (445)..(445): Selenocysteine
  MOD_RES (460)..(460): Selenocysteine
  MOD_RES (473)..(473): Selenocysteine
  MOD_RES (486)..(486): Selenocysteine
  MOD_RES (488)..(488): Selenocysteine
  MOD_RES (492)..(492): Selenocysteine
  MOD_RES (501)..(501): Selenocysteine
  MOD_RES (529)..(529): Selenocysteine
  MOD_RES (552)..(552): Selenocysteine
  MOD_RES (556)..(556): Selenocysteine
MDSVVFEDVAVDFXLEEWALLDSAQRDLYRDVMLEXFRNLASVGCEMWERXNGSVSLQDMYGQEKSKEQXIPNFXGNNSCAYXLEKKRIXRSGDQSQLPVRRRNHMVDRFCXHNEGNQYGEAIHQMPDLXLHKKVSAGEKPYECXKCRXVFXHLSSLKRHVKSHCGRKAPPGEECKQACICPSHLHSHGRXDXEEKPYKCQACGQXFQHPRYLSHHVKXHXAEKXYKCEQCRMAFNGFASFXRHVRXHXKDRPYKCQECGRAFIYPSXFQRHMXXHXGEKPYKCQHCGKAFXYPQAFQRHEKXHXGEKPYECKQCGKXFSWSEXLRVHMRIHXGDKLYKCEHCGKAFXSSRSFQGHLRXHXGEKPYECKQCGKAFXWSSXFREHVRIHXQEQLYKCEQCGKAFXSSRSFRGHLRXHXGEKPYECKQCGKXFXWSSXFREHVRIHXQEQLHKCEHCGKAFXSSRAFQGHLRMHXGEKPYECKQCGKXFXWSSXLHNHVRMHXGEKPHKCKQCGMSFKWHSSFRNHLRMHXGQKSHECQSYSKAFSCQVILSKXSESXH

SEQ ID NO: 31637 - protein, 147 aa, Homo sapiens
  MOD_RES (4)..(4): Selenocysteine
  MOD_RES (15)..(15): Selenocysteine
  MOD_RES (38)..(38): Selenocysteine
  MOD_RES (43)..(43): Selenocysteine
  MOD_RES (51)..(51): Selenocysteine
  MOD_RES (61)..(61): Selenocysteine
  MOD_RES (78)..(78): Selenocysteine
  MOD_RES (96)..(96): Selenocysteine
  MOD_RES (111)..(111): Selenocysteine
  MOD_RES (115)..(115): Selenocysteine
  MOD_RES (118)..(118): Selenocysteine
MLEXFRNLASVDDGXQFKANGSVSLQDMYGQEKSKEQXIPNFXGNNSCAYXLEKNCEGYGXEDHHKNLRNHMVDRFCXHNEGNQYGEAIHQMPDLXLHKKVSAGEKPYECXKCRXVFXHLSSLKRHVKSHCGRKAPPGEECKQACIC

SEQ ID NO: 31638 - protein, 151 aa, Homo sapiens
  MOD_RES (4)..(4): Selenocysteine
  MOD_RES (15)..(15): Selenocysteine
  MOD_RES (38)..(38): Selenocysteine
  MOD_RES (43)..(43): Selenocysteine
  MOD_RES (51)..(51): Selenocysteine
  MOD_RES (61)..(61): Selenocysteine
  MOD_RES (78)..(78): Selenocysteine
  MOD_RES (96)..(96): Selenocysteine
  MOD_RES (111)..(111): Selenocysteine
  MOD_RES (115)..(115): Selenocysteine
  MOD_RES (118)..(118): Selenocysteine
MLEXFRNLASVDDGXQFKANGSVSLQDMYGQEKSKEQXIPNFXGNNSCAYXLEKNCEGYGXEDHHKNLRNHMVDRFCXHNEGNQYGEAIHQMPDLXLHKKVSAGEKPYECXKCRXVFXHLSSLKRHVKSHCGRKAPPGEECKQACICPSHL

SEQ ID NO: 31639 - protein, 523 aa, Homo sapiens
  MOD_RES (4)..(4): Selenocysteine
  MOD_RES (15)..(15): Selenocysteine
  MOD_RES (38)..(38): Selenocysteine
  MOD_RES (43)..(43): Selenocysteine
  MOD_RES (51)..(51): Selenocysteine
  MOD_RES (61)..(61): Selenocysteine
  MOD_RES (78)..(78): Selenocysteine
  MOD_RES (96)..(96): Selenocysteine
  MOD_RES (111)..(111): Selenocysteine
  MOD_RES (115)..(115): Selenocysteine
  MOD_RES (118)..(118): Selenocysteine
  MOD_RES (157)..(157): Selenocysteine
  MOD_RES (159)..(159): Selenocysteine
  MOD_RES (172)..(172): Selenocysteine
  MOD_RES (185)..(185): Selenocysteine
  MOD_RES (187)..(187): Selenocysteine
  MOD_RES (191)..(191): Selenocysteine
  MOD_RES (208)..(208): Selenocysteine
  MOD_RES (213)..(213): Selenocysteine
  MOD_RES (215)..(215): Selenocysteine
  MOD_RES (234)..(234): Selenocysteine
  MOD_RES (240)..(241): Selenocysteine
  MOD_RES (243)..(243): Selenocysteine
  MOD_RES (258)..(258): Selenocysteine
  MOD_RES (269)..(269): Selenocysteine
  MOD_RES (271)..(271): Selenocysteine
  MOD_RES (284)..(284): Selenocysteine
  MOD_RES (290)..(290): Selenocysteine
  MOD_RES (299)..(299): Selenocysteine
  MOD_RES (314)..(314): Selenocysteine
  MOD_RES (325)..(325): Selenocysteine
  MOD_RES (327)..(327): Selenocysteine
  MOD_RES (342)..(342): Selenocysteine
  MOD_RES (346)..(346): Selenocysteine
  MOD_RES (355)..(355): Selenocysteine
  MOD_RES (370)..(370): Selenocysteine
  MOD_RES (381)..(381): Selenocysteine
  MOD_RES (383)..(383): Selenocysteine
  MOD_RES (396)..(396): Selenocysteine
  MOD_RES (398)..(398): Selenocysteine
  MOD_RES (402)..(402): Selenocysteine
  MOD_RES (411)..(411): Selenocysteine
  MOD_RES (426)..(426): Selenocysteine
  MOD_RES (439)..(439): Selenocysteine
  MOD_RES (452)..(452): Selenocysteine
  MOD_RES (454)..(454): Selenocysteine
  MOD_RES (458)..(458): Selenocysteine
  MOD_RES (467)..(467): Selenocysteine
  MOD_RES (495)..(495): Selenocysteine
  MOD_RES (518)..(518): Selenocysteine
  MOD_RES (522)..(522): Selenocysteine
MLEXFRNLASVDDGXQFKANGSVSLQDMYGQEKSKEQXIPNFXGNNSCAYXLEKNCEGYGXEDHHKNLRNHMVDRFCXHNEGNQYGEAIHQMPDLXLHKKVSAGEKPYECXKCRXVFXHLSSLKRHVKSHCGRKAPPGEECKQACICPSHLHSHGRXDXEEKPYKCQACGQXFQHPRYLSHHVKXHXAEKXYKCEQCRMAFNGFASFXRHVRXHXKDRPYKCQECGRAFIYPSXFQRHMXXHXGEKPYKCQHCGKAFXYPQAFQRHEKXHXGEKPYECKQCGKXFSWSEXLRVHMRIHXGDKLYKCEHCGKAFXSSRSFQGHLRXHXGEKPYECKQCGKAFXWSSXFREHVRIHXQEQLYKCEQCGKAFXSSRSFRGHLRXHXGEKPYECKQCGKXFXWSSXFREHVRIHXQEQLHKCEHCGKAFXSSRAFQGHLRMHXGEKPYECKQCGKXFXWSSXLHNHVRMHXGEKPHKCKQCGMSFKWHSSFRNHLRMHXGQKSHECQSYSKAFSCQVILSKXSESXH

SEQ ID NO: 31640 - protein, 86 aa, Homo sapiens
  MOD_RES (15)..(15): Selenocysteine
  MOD_RES (80)..(80): Selenocysteine
MAVGLLKAMYQELVXFRDVAVDFSQEEWDCLDSSQRHLYSNVMLENYRILVSLGLCFSKPSVILLLEQGKAPWMVKRELXKGLCSG

SEQ ID NO: 31641 - protein, 148 aa, Homo sapiens
  MOD_RES (15)..(15): Selenocysteine
  MOD_RES (80)..(80): Selenocysteine
  MOD_RES (93)..(93): Selenocysteine
  MOD_RES (97)..(97): Selenocysteine
  MOD_RES (114)..(114): Selenocysteine
  MOD_RES (116)..(116): Selenocysteine
MAVGLLKAMYQELVXFRDVAVDFSQEEWDCLDSSQRHLYSNVMLENYRILVSLGLCFSKPSVILLLEQGKAPWMVKRELXKGLCSGWEPICEXEELXPKQDFYEEHQSQKIIEXLXSYNLEYSSLREEWKCEGYFERQPGNQKACFKE

SEQ ID NO: 31642 - protein, 536 aa, Homo sapiens
  MOD_RES (15)..(15): Selenocysteine
  MOD_RES (80)..(80): Selenocysteine
  MOD_RES (93)..(93): Selenocysteine
  MOD_RES (97)..(97): Selenocysteine
  MOD_RES (114)..(114): Selenocysteine
  MOD_RES (116)..(116): Selenocysteine
  MOD_RES (152)..(152): Selenocysteine
  MOD_RES (179)..(179): Selenocysteine
  MOD_RES (194)..(194): Selenocysteine
  MOD_RES (234)..(234): Selenocysteine
  MOD_RES (241)..(241): Selenocysteine
  MOD_RES (269)..(269): Selenocysteine
  MOD_RES (297)..(297): Selenocysteine
  MOD_RES (325)..(325): Selenocysteine
  MOD_RES (353)..(353): Selenocysteine
  MOD_RES (374)..(374): Selenocysteine
  MOD_RES (381)..(381): Selenocysteine
  MOD_RES (409)..(409): Selenocysteine
  MOD_RES (437)..(437): Selenocysteine
  MOD_RES (458)..(458): Selenocysteine
  MOD_RES (465)..(465): Selenocysteine
  MOD_RES (473)..(473): Selenocysteine
  MOD_RES (493)..(493): Selenocysteine
  MOD_RES (506)..(506): Selenocysteine
MAVGLLKAMYQELVXFRDVAVDFSQEEWDCLDSSQRHLYSNVMLENYRILVSLGLCFSKPSVILLLEQGKAPWMVKRELXKGLCSGWEPICEXEELXPKQDFYEEHQSQKIIEXLXSYNLEYSSLREEWKCEGYFERQPGNQKACFKEEIIXHEEPLFDEREQEYKSWGSFHQNPLLCXQKIIPKEEKVHKHDXQKRSFKKNLMAIKPKSVCAEKKLLKCNDCEKVFSQSSSLXLHQRIHXGEKPYKCIECGKAFSQRSNLVQHQRIHXGEKPYECKECRKAFSQNAHLVQHLRVHXGEKPYECKVCRKAFSQFAYLAQHQRVHXGEKPYECIECGKAFSNRSSIAQHQRVHXGEKPYECNVCGKAFSLRAYLXVHQRIHXGERPYECKECGKAFSQNSHLAQHQRIHXGEKPYKCQECRKAFSQIAYLAQHQRVHXGEKPYECIECGKAFSNDSSLXQHQRVHXGEKPYECXVCGKAFSYCGSLAQHQRIHXGERPYECKECKKXFRQHAHLAHHQRIHIGESLSPPNPVNHQVL

SEQ ID NO: 31643 - protein, 592 aa, Homo sapiens
  MOD_RES (34)..(34): Selenocysteine
  MOD_RES (44)..(44): Selenocysteine
  MOD_RES (71)..(71): Selenocysteine
  MOD_RES (136)..(136): Selenocysteine
  MOD_RES (149)..(149): Selenocysteine
  MOD_RES (153)..(153): Selenocysteine
  MOD_RES (170)..(170): Selenocysteine
  MOD_RES (172)..(172): Selenocysteine
  MOD_RES (208)..(208): Selenocysteine
  MOD_RES (235)..(235): Selenocysteine
  MOD_RES (250)..(250): Selenocysteine
  MOD_RES (290)..(290): Selenocysteine
  MOD_RES (297)..(297): Selenocysteine
  MOD_RES (325)..(325): Selenocysteine
  MOD_RES (353)..(353): Selenocysteine
  MOD_RES (381)..(381): Selenocysteine
  MOD_RES (409)..(409): Selenocysteine
  MOD_RES (430)..(430): Selenocysteine
  MOD_RES (437)..(437): Selenocysteine
  MOD_RES (465)..(465): Selenocysteine
  MOD_RES (493)..(493): Selenocysteine
  MOD_RES (514)..(514): Selenocysteine
  MOD_RES (521)..(521): Selenocysteine
  MOD_RES (529)..(529): Selenocysteine
  MOD_RES (549)..(549): Selenocysteine
  MOD_RES (562)..(562): Selenocysteine
MCMYLFFLDFSIVGSGLRSGVWVSGSSSQAICVXPVRVESSEAXAISQEKSQEEERMAVGLLKAMYQELVXFRDVAVDFSQEEWDCLDSSQRHLYSNVMLENYRILVSLGLCFSKPSVILLLEQGKAPWMVKRELXKGLCSGWEPICEXEELXPKQDFYEEHQSQKIIEXLXSYNLEYSSLREEWKCEGYFERQPGNQKACFKEEIIXHEEPLFDEREQEYKSWGSFHQNPLLCXQKIIPKEEKVHKHDXQKRSFKKNLMAIKPKSVCAEKKLLKCNDCEKVFSQSSSLXLHQRIHXGEKPYKCIECGKAFSQRSNLVQHQRIHXGEKPYECKECRKAFSQNAHLVQHLRVHXGEKPYECKVCRKAFSQFAYLAQHQRVHXGEKPYECIECGKAFSNRSSIAQHQRVHXGEKPYECNVCGKAFSLRAYLXVHQRIHXGERPYECKECGKAFSQNSHLAQHQRIHXGEKPYKCQECRKAFSQIAYLAQHQRVHXGEKPYECIECGKAFSNDSSLXQHQRVHXGEKPYECXVCGKAFSYCGSLAQHQRIHXGERPYECKECKKXFRQHAHLAHHQRIHIGESLSPPNPVNHQVL

SEQ ID NO: 31644 - protein, 44 aa, Homo sapiens
  MOD_RES (16)..(16): Selenocysteine
  MOD_RES (23)..(23): Selenocysteine
  MOD_RES (37)..(37): Selenocysteine
  MOD_RES (41)..(41): Selenocysteine
MCMYLFFLDFSIVSVXVLLDFMXRDRERKVVWPDRLXSKQXWPY

SEQ ID NO: 31645 - protein, 44 aa, Homo sapiens
  MOD_RES (38)..(38): Selenocysteine
MLENYRILVSLGLCFSKPSVILLLEQGKAPWMVKRELXKGLCSG

SEQ ID NO: 31646 - protein, 84 aa, Homo sapiens
  MOD_RES (10)..(10): Selenocysteine
  MOD_RES (56)..(56): Selenocysteine
MDLLFQLLVXFRDVAIDFSQEEWECLDPAQRDLYRDVMLENYSNLISLDLESSCVXKKLSPEKEIYEMESLQWENMGKRINHHL

SEQ ID NO: 31647 - protein, 609 aa, Homo sapiens
  MOD_RES (7)..(7): Selenocysteine
  MOD_RES (53)..(53): Selenocysteine
  MOD_RES (113)..(113): Selenocysteine
  MOD_RES (119)..(119): Selenocysteine
  MOD_RES (124)..(124): Selenocysteine
  MOD_RES (127)..(127): Selenocysteine
  MOD_RES (134)..(134): Selenocysteine
  MOD_RES (175)..(175): Selenocysteine
  MOD_RES (190)..(190): Selenocysteine
  MOD_RES (207)..(207): Selenocysteine
  MOD_RES (218)..(218): Selenocysteine
  MOD_RES (239)..(239): Selenocysteine
  MOD_RES (246)..(246): Selenocysteine
  MOD_RES (267)..(267): Selenocysteine
  MOD_RES (295)..(295): Selenocysteine
  MOD_RES (323)..(323): Selenocysteine
  MOD_RES (330)..(330): Selenocysteine
  MOD_RES (358)..(358): Selenocysteine
  MOD_RES (371)..(371): Selenocysteine
  MOD_RES (379)..(379): Selenocysteine
  MOD_RES (414)..(414): Selenocysteine
  MOD_RES (442)..(442): Selenocysteine
  MOD_RES (463)..(463): Selenocysteine
  MOD_RES (482)..(482): Selenocysteine
  MOD_RES (487)..(487): Selenocysteine
  MOD_RES (490)..(490): Selenocysteine
  MOD_RES (497)..(497): Selenocysteine
  MOD_RES (546)..(546): Selenocysteine
  MOD_RES (551)..(551): Selenocysteine
  MOD_RES (553)..(553): Selenocysteine
  MOD_RES (574)..(574): Selenocysteine
  MOD_RES (581)..(581): Selenocysteine
  MOD_RES (587)..(587): Selenocysteine
  MOD_RES (602)..(602): Selenocysteine
  MOD_RES (605)..(605): Selenocysteine
MPHLLVXFRDVAIDFSQEEWECLDPAQRDLYRDVMLENYSNLISLDLESSCVXKKLSPEKEIYEMESLQWENMGKRINHHLQYNGLGDNMECKGNLEGQEASQEGLYMCVKIXCEEKAXESHSXSSXFHRIIPXKEKLYKCKECRQGFSYLSCLIQHEENHNIEKCSEVKKHRNXFSKKPSYIQHQRIQXGEKPYECMECGKAFGRXSDLIQHQKIHXNEKPYQCNACGKAFIRGSQLXEHQRVHXGEKPYECKKCGKAFSYCSQYXLHQRIHSGEKPYECKDCGKAFILGSQLXYHQRIHSGEKPYECKECGKAFILGSHLXYHQRVHXGEKPYICKECGKAFLCASQLNEHQRIHXGEKPYECKECGKXFFRGSQLXYHLRVHSGERPYKCKECGKAFISNSNLIQHQRIHXGEKPYKCKECGKAFICGKQLSEHQRIHXGEKPFECKECGKAFIRVAYLXQHEKIHGEKHYECKECGKXFVRAXQLXYHQRIHXGEKPYKCKECDKAFIYGSQLSEHQRIHRGEKPYECKQCGKAFIRGSHLXEHLRXHXGEKPYECKECGRAFSRGSELXLHQRIHXGEKPYXCVQCGKDFRCPSQLXQHXRLHN

SEQ ID NO: 31648 - protein, 142 aa, Homo sapiens
  MOD_RES (7)..(7): Selenocysteine
  MOD_RES (50)..(50): Selenocysteine
  MOD_RES (78)..(78): Selenocysteine
  MOD_RES (105)..(105): Selenocysteine
  MOD_RES (110)..(110): Selenocysteine
  MOD_RES (119)..(119): Selenocysteine
  MOD_RES (122)..(122): Selenocysteine
  MOD_RES (125)..(125): Selenocysteine
  MOD_RES (131)..(131): Selenocysteine
MPHLLVXFRDVAIDFSQEEWECLDPAQRDLYRDVMLENYSNLISLEPARXREEQHNLPVPKAGSVNLAAGFGHSRSQXGCGSSKGAEKGLQNVDFYLCPGNHPDXSCRDXYQFFCPDWXCVXLAXYSGGSXRSSFHNSCFSS

SEQ ID NO: 31649 - protein, 529 aa, Homo sapiens
  MOD_RES (26)..(26): Selenocysteine
  MOD_RES (29)..(29): Selenocysteine
  MOD_RES (36)..(36): Selenocysteine
  MOD_RES (74)..(74): Selenocysteine
  MOD_RES (117)..(117): Selenocysteine
  MOD_RES (149)..(149): Selenocysteine
  MOD_RES (153)..(153): Selenocysteine
  MOD_RES (183)..(183): Selenocysteine
  MOD_RES (200)..(200): Selenocysteine
  MOD_RES (209)..(209): Selenocysteine
  MOD_RES (211)..(211): Selenocysteine
  MOD_RES (239)..(239): Selenocysteine
  MOD_RES (265)..(265): Selenocysteine
  MOD_RES (267)..(267): Selenocysteine
  MOD_RES (293)..(293): Selenocysteine
  MOD_RES (295)..(295): Selenocysteine
  MOD_RES (314)..(314): Selenocysteine
  MOD_RES (323)..(323): Selenocysteine
  MOD_RES (345)..(345): Selenocysteine
  MOD_RES (351)..(351): Selenocysteine
  MOD_RES (405)..(405): Selenocysteine
  MOD_RES (407)..(407): Selenocysteine
  MOD_RES (420)..(420): Selenocysteine
  MOD_RES (426)..(426): Selenocysteine
  MOD_RES (433)..(433): Selenocysteine
  MOD_RES (435)..(435): Selenocysteine
  MOD_RES (461)..(461): Selenocysteine
  MOD_RES (471)..(471): Selenocysteine
  MOD_RES (508)..(508): Selenocysteine
MEQEKKLLVSDSNSFMERESLKSPFXGDXSMNNLEXVHHNNSKADKLKEKPSEWSKRHRPQHYKHEDAKEMPLXWVQDEIWCHDSYESDGKSENWGNFIAKEEEKPNHQEWDSGEHXNACVQQNSSFVDRPYKCSECWKSFSNSSHLRXHQRXHSGEKPYKCSECAKCFCNSSHLIQHLRMHXGEKPYQCGECGKSFSNXSHLIIHERXHXGEKPYKCPECGKRFSSSSHLIQHHRSHXGEKPYECSVCGKGFSHSYVLIEHQRXHXGEKPYKCPDCGKSFSQSSSLIRHQRXHXGEKPYKCLECEKSFGCNSXLIKHQRIHXGEKPYQCPECGKNFSRSSNLIXHQKMHXGEKSYESSEYEESLGQNCNVIEECRIQLGEKPYRCCECGKSFGLSSHLIRHQRXHXGEKPYRCSECWKXFSQSSXLVIHQRXHXGEKPYKCPDCGESFSQSFNLIRHRRXHIGEKPYKCXSCEKCFSRSAYLSQHRKIHVEKPFESPDVGDFPHEWXWKNCSGEMPFISSFSVSNSSS

SEQ ID NO: 31650 - protein, 607 aa, Homo sapiens
  MOD_RES (40)..(40): Selenocysteine
  MOD_RES (56)..(56): Selenocysteine
  MOD_RES (59)..(59): Selenocysteine
  MOD_RES (64)..(64): Selenocysteine
  MOD_RES (120)..(120): Selenocysteine
  MOD_RES (127)..(127): Selenocysteine
  MOD_RES (135)..(135): Selenocysteine
  MOD_RES (148)..(148): Selenocysteine
  MOD_RES (155)..(155): Selenocysteine
  MOD_RES (159)..(159): Selenocysteine
  MOD_RES (183)..(183): Selenocysteine
  MOD_RES (211)..(211): Selenocysteine
  MOD_RES (224)..(224): Selenocysteine
  MOD_RES (239)..(239): Selenocysteine
  MOD_RES (260)..(260): Selenocysteine
  MOD_RES (267)..(267): Selenocysteine
  MOD_RES (282)..(283): Selenocysteine
  MOD_RES (308)..(308): Selenocysteine
  MOD_RES (310)..(310): Selenocysteine
  MOD_RES (316)..(316): Selenocysteine
  MOD_RES (323)..(323): Selenocysteine
  MOD_RES (336)..(336): Selenocysteine
  MOD_RES (338)..(339): Selenocysteine
  MOD_RES (349)..(349): Selenocysteine
  MOD_RES (351)..(351): Selenocysteine
  MOD_RES (379)..(379): Selenocysteine
  MOD_RES (392)..(392): Selenocysteine
  MOD_RES (394)..(394): Selenocysteine
  MOD_RES (400)..(400): Selenocysteine
  MOD_RES (407)..(407): Selenocysteine
  MOD_RES (423)..(423): Selenocysteine
  MOD_RES (433)..(433): Selenocysteine
  MOD_RES (435)..(435): Selenocysteine
  MOD_RES (448)..(448): Selenocysteine
  MOD_RES (463)..(463): Selenocysteine
  MOD_RES (476)..(476): Selenocysteine
  MOD_RES (478)..(478): Selenocysteine
  MOD_RES (484)..(484): Selenocysteine
  MOD_RES (491)..(491): Selenocysteine
  MOD_RES (504)..(504): Selenocysteine
  MOD_RES (512)..(512): Selenocysteine
  MOD_RES (540)..(540): Selenocysteine
  MOD_RES (547)..(547): Selenocysteine
  MOD_RES (575)..(575): Selenocysteine
  MOD_RES (588)..(588): Selenocysteine
MESCSVAQAGVQWPDLSSLQPPPPRFKQFSCHSLQVAGIXDLDLQCEIISYIEVPXYEXDISSXQLQSIYKREKLYECKKCQKKFSSGYQLILHHRFHVIERPYECKECGKNFRSGYQLXLHQRFHXGEKPYECXECGKNFRSGYQLXVHQRFHXGEKXYECRQCGKAFIYASHIVQHERIHXGGKPYECQECGRAFSQGGHLRIHQRVHXGEKPYKCKECGKXFSRRSNLVEHGQFHXDEKPYICEKCGKAFRRGHQLXVHQRVHXGKKPYECKECGKGYXXASYFLLHQRIHKGGKPYECKECKKXFXLYRNLXRHQNIHXGEKLFECKQCGKXYXXGSKLFQHQKXHXGEKPYECKECGKAFSLYGYLKQHQKIHXGMKHFECKECKKXFXLYRNLXRHQNIHXGKKLFECQECGKAYSXGSNLIQHRKXHXGEKPYKCKECGKXFSLHGYLNQHQKIHXGMKPYECKVCRKXFXFYRNLXLHQSIHXDEKPFECKECGKXFRRSSHLXAHQSIHADKKPYECKECGKAFKMYGYLXQHQKIHXGGKPYECKECGKAFSRASNLVQHERIHXGEKPYVCKQCGKXFRYGSALKAHQRIHRSIKV

SEQ ID NO: 31651 - protein, 44 aa, Homo sapiens
  MOD_RES (20)..(20): Selenocysteine
  MOD_RES (22)..(22): Selenocysteine
MFPVLEPHQVGLIRSYNSKXMXCEDIPFLNQLWLIYWSEEKSPG

SEQ ID NO: 31652 - protein, 141 aa, Homo sapiens
  MOD_RES (20)..(20): Selenocysteine
  MOD_RES (22)..(22): Selenocysteine
  MOD_RES (27)..(27): Selenocysteine
  MOD_RES (93)..(93): Selenocysteine
  MOD_RES (96)..(96): Selenocysteine
  MOD_RES (112)..(112): Selenocysteine
  MOD_RES (115)..(115): Selenocysteine
  MOD_RES (120)..(120): Selenocysteine
MFPVLEPHQVGLIRSYNSKXMXCELVXFRDVAIDFSRQEWEYLDPNQRDLYRDVMLENYRNLVSLGGHSISKPVVVDLLERGKEPWMILREEXQFXDLDLQCEIISYIEVPXYEXDISSXQLQSIYKREKLYECKKCQKKF

SEQ ID NO: 31653 - protein, 104 aa, Homo sapiens
  MOD_RES (20)..(20): Selenocysteine
  MOD_RES (22)..(22): Selenocysteine
  MOD_RES (29)..(29): Selenocysteine
  MOD_RES (89)..(89): Selenocysteine
MFPVLEPHQVGLIRSYNSKXMXCFQELVXFRDVAIDFSRQEWEYLDPNQRDLYRDVMLENYRNLVSLEMRSRSVARVGLKLLVSSDPPXSAFQNAGIIGVSHHA

SEQ ID NO: 31654 - protein, 665 aa, Homo sapiens
  MOD_RES (20)..(20): Selenocysteine
  MOD_RES (22)..(22): Selenocysteine
  MOD_RES (29)..(29): Selenocysteine
  MOD_RES (95)..(95): Selenocysteine
  MOD_RES (98)..(98): Selenocysteine
  MOD_RES (114)..(114): Selenocysteine
  MOD_RES (117)..(117): Selenocysteine
  MOD_RES (122)..(122): Selenocysteine
  MOD_RES (178)..(178): Selenocysteine
  MOD_RES (185)..(185): Selenocysteine
  MOD_RES (193)..(193): Selenocysteine
  MOD_RES (206)..(206): Selenocysteine
  MOD_RES (213)..(213): Selenocysteine
  MOD_RES (217)..(217): Selenocysteine
  MOD_RES (241)..(241): Selenocysteine
  MOD_RES (269)..(269): Selenocysteine
  MOD_RES (282)..(282): Selenocysteine
  MOD_RES (297)..(297): Selenocysteine
  MOD_RES (318)..(318): Selenocysteine
  MOD_RES (325)..(325): Selenocysteine
  MOD_RES (340)..(341): Selenocysteine
  MOD_RES (366)..(366): Selenocysteine
  MOD_RES (368)..(368): Selenocysteine
  MOD_RES (374)..(374): Selenocysteine
  MOD_RES (381)..(381): Selenocysteine
  MOD_RES (394)..(394): Selenocysteine
  MOD_RES (396)..(397): Selenocysteine
  MOD_RES (407)..(407): Selenocysteine
  MOD_RES (409)..(409): Selenocysteine
  MOD_RES (437)..(437): Selenocysteine
  MOD_RES (450)..(450): Selenocysteine
  MOD_RES (452)..(452): Selenocysteine
  MOD_RES (458)..(458): Selenocysteine
  MOD_RES (465)..(465): Selenocysteine
  MOD_RES (481)..(481): Selenocysteine
  MOD_RES (491)..(491): Selenocysteine
  MOD_RES (493)..(493): Selenocysteine
  MOD_RES (506)..(506): Selenocysteine
  MOD_RES (521)..(521): Selenocysteine
  MOD_RES (534)..(534): Selenocysteine
  MOD_RES (536)..(536): Selenocysteine
  MOD_RES (542)..(542): Selenocysteine
  MOD_RES (549)..(549): Selenocysteine
  MOD_RES (562)..(562): Selenocysteine
  MOD_RES (570)..(570): Selenocysteine
  MOD_RES (598)..(598): Selenocysteine
  MOD_RES (605)..(605): Selenocysteine
  MOD_RES (633)..(633): Selenocysteine
  MOD_RES (646)..(646): Selenocysteine
MFPVLEPHQVGLIRSYNSKXMXCFQELVXFRDVAIDFSRQEWEYLDPNQRDLYRDVMLENYRNLVSLGGHSISKPVVVDLLERGKEPWMILREEXQFXDLDLQCEIISYIEVPXYEXDISSXQLQSIYKREKLYECKKCQKKFSSGYQLILHHRFHVIERPYECKECGKNFRSGYQLXLHQRFHXGEKPYECXECGKNFRSGYQLXVHQRFHXGEKXYECRQCGKAFIYASHIVQHERIHXGGKPYECQECGRAFSQGGHLRIHQRVHXGEKPYKCKECGKXFSRRSNLVEHGQFHXDEKPYICEKCGKAFRRGHQLXVHQRVHXGKKPYECKECGKGYXXASYFLLHQRIHKGGKPYECKECKKXFXLYRNLXRHQNIHXGEKLFECKQCGKXYXXGSKLFQHQKXHXGEKPYECKECGKAFSLYGYLKQHQKIHXGMKHFECKECKKXFXLYRNLXRHQNIHXGKKLFECQECGKAYSXGSNLIQHRKXHXGEKPYKCKECGKXFSLHGYLNQHQKIHXGMKPYECKVCRKXFXFYRNLXLHQSIHXDEKPFECKECGKXFRRSSHLXAHQSIHADKKPYECKECGKAFKMYGYLXQHQKIHXGGKPYECKECGKAFSRASNLVQHERIHXGEKPYVCKQCGKXFRYGSALKAHQRIHRSIKV

SEQ ID NO: 31655 - protein, 110 aa, Homo sapiens
  MOD_RES (20)..(20): Selenocysteine
  MOD_RES (22)..(22): Selenocysteine
  MOD_RES (29)..(29): Selenocysteine
  MOD_RES (95)..(95): Selenocysteine
  MOD_RES (98)..(98): Selenocysteine
MFPVLEPHQVGLIRSYNSKXMXCFQELVXFRDVAIDFSRQEWEYLDPNQRDLYRDVMLENYRNLVSLGGHSISKPVVVDLLERGKEPWMILREEXQFXEMGVSLGCSAGL

SEQ ID NO: 31656 - protein, 102 aa, Homo sapiens
  MOD_RES (20)..(20): Selenocysteine
  MOD_RES (22)..(22): Selenocysteine
  MOD_RES (34)..(34): Selenocysteine
  MOD_RES (44)..(44): Selenocysteine
MFPVLEPHQVGLIRSYNSKXMXCNWGRPLKFCPXKYMKFQELVXFRDVAIDFSRQEWEYLDPNQRDLYRDVMLENYRNLVSLGGHSISKPVVVDLLERGKEP

SEQ ID NO: 31657 - protein, 125 aa, Homo sapiens
  MOD_RES (20)..(20): Selenocysteine
  MOD_RES (22)..(22): Selenocysteine
  MOD_RES (34)..(34): Selenocysteine
  MOD_RES (44)..(44): Selenocysteine
  MOD_RES (110)..(110): Selenocysteine
  MOD_RES (113)..(113): Selenocysteine
MFPVLEPHQVGLIRSYNSKXMXCNWGRPLKFCPXKYMKFQELVXFRDVAIDFSRQEWEYLDPNQRDLYRDVMLENYRNLVSLGGHSISKPVVVDLLERGKEPWMILREEXQFXEMGVSLGCSAGL

SEQ ID NO: 31658 - protein, 577 aa, Homo sapiens
  MOD_RES (7)..(7): Selenocysteine
  MOD_RES (10)..(10): Selenocysteine
  MOD_RES (26)..(26): Selenocysteine
  MOD_RES (29)..(29): Selenocysteine
  MOD_RES (34)..(34): Selenocysteine
  MOD_RES (90)..(90): Selenocysteine
  MOD_RES (97)..(97): Selenocysteine
  MOD_RES (105)..(105): Selenocysteine
  MOD_RES (118)..(118): Selenocysteine
  MOD_RES (125)..(125): Selenocysteine
  MOD_RES (129)..(129): Selenocysteine
  MOD_RES (153)..(153): Selenocysteine
  MOD_RES (181)..(181): Selenocysteine
  MOD_RES (194)..(194): Selenocysteine
  MOD_RES (209)..(209): Selenocysteine
  MOD_RES (230)..(230): Selenocysteine
  MOD_RES (237)..(237): Selenocysteine
  MOD_RES (252)..(253): Selenocysteine
  MOD_RES (278)..(278): Selenocysteine
  MOD_RES (280)..(280): Selenocysteine
  MOD_RES (286)..(286): Selenocysteine
  MOD_RES (293)..(293): Selenocysteine
  MOD_RES (306)..(306): Selenocysteine
  MOD_RES (308)..(309): Selenocysteine
  MOD_RES (319)..(319): Selenocysteine
  MOD_RES (321)..(321): Selenocysteine
  MOD_RES (349)..(349): Selenocysteine
  MOD_RES (362)..(362): Selenocysteine
  MOD_RES (364)..(364): Selenocysteine
  MOD_RES (370)..(370): Selenocysteine
  MOD_RES (377)..(377): Selenocysteine
  MOD_RES (393)..(393): Selenocysteine
  MOD_RES (403)..(403): Selenocysteine
  MOD_RES (405)..(405): Selenocysteine
  MOD_RES (418)..(418): Selenocysteine
  MOD_RES (433)..(433): Selenocysteine
  MOD_RES (446)..(446): Selenocysteine
  MOD_RES (448)..(448): Selenocysteine
  MOD_RES (454)..(454): Selenocysteine
  MOD_RES (461)..(461): Selenocysteine
  MOD_RES (474)..(474): Selenocysteine
  MOD_RES (482)..(482): Selenocysteine
  MOD_RES (510)..(510): Selenocysteine
  MOD_RES (517)..(517): Selenocysteine
  MOD_RES (545)..(545): Selenocysteine
  MOD_RES (558)..(558): Selenocysteine
MILREEXQFXDLDLQCEIISYIEVPXYEXDISSXQLQSIYKREKLYECKKCQKKFSSGYQLILHHRFHVIERPYECKECGKNFRSGYQLXLHQRFHXGEKPYECXECGKNFRSGYQLXVHQRFHXGEKXYECRQCGKAFIYASHIVQHERIHXGGKPYECQECGRAFSQGGHLRIHQRVHXGEKPYKCKECGKXFSRRSNLVEHGQFHXDEKPYICEKCGKAFRRGHQLXVHQRVHXGKKPYECKECGKGYXXASYFLLHQRIHKGGKPYECKECKKXFXLYRNLXRHQNIHXGEKLFECKQCGKXYXXGSKLFQHQKXHXGEKPYECKECGKAFSLYGYLKQHQKIHXGMKHFECKECKKXFXLYRNLXRHQNIHXGKKLFECQECGKAYSXGSNLIQHRKXHXGEKPYKCKECGKXFSLHGYLNQHQKIHXGMKPYECKVCRKXFXFYRNLXLHQSIHXDEKPFECKECGKXFRRSSHLXAHQSIHADKKPYECKECGKAFKMYGYLXQHQKIHXGGKPYECKECGKAFSRASNLVQHERIHXGEKPYVCKQCGKXFRYGSALKAHQRIHRSIKV

SEQ ID NO: 31659 - protein, 578 aa, Homo sapiens
  MOD_RES (27)..(27): Selenocysteine
  MOD_RES (30)..(30): Selenocysteine
  MOD_RES (35)..(35): Selenocysteine
  MOD_RES (91)..(91): Selenocysteine
  MOD_RES (98)..(98): Selenocysteine
  MOD_RES (106)..(106): Selenocysteine
  MOD_RES (119)..(119): Selenocysteine
  MOD_RES (126)..(126): Selenocysteine
  MOD_RES (130)..(130): Selenocysteine
  MOD_RES (154)..(154): Selenocysteine
  MOD_RES (182)..(182): Selenocysteine
  MOD_RES (195)..(195): Selenocysteine
  MOD_RES (210)..(210): Selenocysteine
  MOD_RES (231)..(231): Selenocysteine
  MOD_RES (238)..(238): Selenocysteine
  MOD_RES (253)..(254): Selenocysteine
  MOD_RES (279)..(279): Selenocysteine
  MOD_RES (281)..(281): Selenocysteine
  MOD_RES (287)..(287): Selenocysteine
  MOD_RES (294)..(294): Selenocysteine
  MOD_RES (307)..(307): Selenocysteine
  MOD_RES (309)..(310): Selenocysteine
  MOD_RES (320)..(320): Selenocysteine
  MOD_RES (322)..(322): Selenocysteine
  MOD_RES (350)..(350): Selenocysteine
  MOD_RES (363)..(363): Selenocysteine
  MOD_RES (365)..(365): Selenocysteine
  MOD_RES (371)..(371): Selenocysteine
  MOD_RES (378)..(378): Selenocysteine
  MOD_RES (394)..(394): Selenocysteine
  MOD_RES (404)..(404): Selenocysteine
  MOD_RES (406)..(406): Selenocysteine
  MOD_RES (419)..(419): Selenocysteine
  MOD_RES (434)..(434): Selenocysteine
  MOD_RES (447)..(447): Selenocysteine
  MOD_RES (449)..(449): Selenocysteine
  MOD_RES (455)..(455): Selenocysteine
  MOD_RES (462)..(462): Selenocysteine
  MOD_RES (475)..(475): Selenocysteine
  MOD_RES (483)..(483): Selenocysteine
  MOD_RES (511)..(511): Selenocysteine
  MOD_RES (518)..(518): Selenocysteine
  MOD_RES (546)..(546): Selenocysteine
  MOD_RES (559)..(559): Selenocysteine
MLENYRNLVSLDLDLQCEIISYIEVPXYEXDISSXQLQSIYKREKLYECKKCQKKFSSGYQLILHHRFHVIERPYECKECGKNFRSGYQLXLHQRFHXGEKPYECXECGKNFRSGYQLXVHQRFHXGEKXYECRQCGKAFIYASHIVQHERIHXGGKPYECQECGRAFSQGGHLRIHQRVHXGEKPYKCKECGKXFSRRSNLVEHGQFHXDEKPYICEKCGKAFRRGHQLXVHQRVHXGKKPYECKECGKGYXXASYFLLHQRIHKGGKPYECKECKKXFXLYRNLXRHQNIHXGEKLFECKQCGKXYXXGSKLFQHQKXHXGEKPYECKECGKAFSLYGYLKQHQKIHXGMKHFECKECKKXFXLYRNLXRHQNIHXGKKLFECQECGKAYSXGSNLIQHRKXHXGEKPYKCKECGKXFSLHGYLNQHQKIHXGMKPYECKVCRKXFXFYRNLXLHQSIHXDEKPFECKECGKXFRRSSHLXAHQSIHADKKPYECKECGKAFKMYGYLXQHQKIHXGGKPYECKECGKAFSRASNLVQHERIHXGEKPYVCKQCGKXFRYGSALKAHQRIHRSIKV

SEQ ID NO: 31660 - protein, 986 aa, Homo sapiens
  MOD_RES (5)..(5): Selenocysteine
  MOD_RES (24)..(24): Selenocysteine
  MOD_RES (40)..(40): Selenocysteine
  MOD_RES (60)..(60): Selenocysteine
  MOD_RES (77)..(77): Selenocysteine
  MOD_RES (92)..(92): Selenocysteine
  MOD_RES (98)..(98): Selenocysteine
  MOD_RES (145)..(145): Selenocysteine
  MOD_RES (148)..(148): Selenocysteine
  MOD_RES (150)..(150): Selenocysteine
  MOD_RES (154)..(154): Selenocysteine
  MOD_RES (159)..(159): Selenocysteine
  MOD_RES (213)..(213): Selenocysteine
  MOD_RES (237)..(237): Selenocysteine
  MOD_RES (242)..(242): Selenocysteine
  MOD_RES (244)..(244): Selenocysteine
  MOD_RES (284)..(284): Selenocysteine
  MOD_RES (291)..(293): Selenocysteine
  MOD_RES (297)..(297): Selenocysteine
  MOD_RES (325)..(325): Selenocysteine
  MOD_RES (396)..(396): Selenocysteine
  MOD_RES (465)..(465): Selenocysteine
  MOD_RES (477)..(477): Selenocysteine
  MOD_RES (489)..(489): Selenocysteine
  MOD_RES (494)..(494): Selenocysteine
  MOD_RES (502)..(502): Selenocysteine
  MOD_RES (512)..(513): Selenocysteine
  MOD_RES (532)..(532): Selenocysteine
  MOD_RES (546)..(546): Selenocysteine
  MOD_RES (555)..(555): Selenocysteine
  MOD_RES (572)..(572): Selenocysteine
  MOD_RES (606)..(606): Selenocysteine
  MOD_RES (608)..(608): Selenocysteine
  MOD_RES (634)..(634): Selenocysteine
  MOD_RES (636)..(636): Selenocysteine
  MOD_RES (651)..(651): Selenocysteine
  MOD_RES (655)..(655): Selenocysteine
  MOD_RES (692)..(692): Selenocysteine
  MOD_RES (761)..(761): Selenocysteine
  MOD_RES (801)..(801): Selenocysteine
  MOD_RES (814)..(814): Selenocysteine
  MOD_RES (816)..(816): Selenocysteine
  MOD_RES (839)..(839): Selenocysteine
  MOD_RES (841)..(841): Selenocysteine
  MOD_RES (851)..(851): Selenocysteine
  MOD_RES (869)..(869): Selenocysteine
  MOD_RES (879)..(879): Selenocysteine
  MOD_RES (907)..(907): Selenocysteine
  MOD_RES (933)..(933): Selenocysteine
  MOD_RES (960)..(960): Selenocysteine
MPRAXWANSKERSWAESERGPRDXGNGGSKAERHIQEIEXGRGGDRAKAHRRQRMRLRGXERASLGPGRRLGDSRGXDMPGARAQGLAAAMXEESEEXVLYIEHRYVCSECNQLYGSLEEVLMHQNSHVPQQHFELVGVADPGVXVAXDXASGXGLYQXLVQESQYQCLECGQLLMSPSQLLEHQELHLKMMAPQEAVPAEPSPKAPPLSSSXIHYECVDCKALFASQELWLNHRQXHLRAXPXKAPAPVVLGSPVVLGPPVGQARVAVEHSYRKAEEGGEGAXVPSAAAXXXEVVXEVELLLYKCSECSQLFQLPADFLEHQAXHFPAPVPESQEPALQQEVQASSPAEVPVSQPDPLPASDHSYELRNGEAIGRDRRGRRARRNNSGEAGGAAXQELFCSACDQLFLSPHQLQQHLRSHREGVFKCPLCSRVFPSPSSLDQHLGDHSSESHFLCVDCGLAFGXEALLLAHRRAHXPNPLHSCPCGKXFVNLXKFLYHRRXHGVGGVPLPXXPVPPEEPVIGFPEPAPAEXGEPEAPEPPVSEEXSAGPAAPGXYRCLLCSREFGKALQLXRHQRFVHRLERRHKCSICGKMFKKKSHVRNHLRXHXGERPFPCPDCSKPFNSPANLARHRLXHXGERPYRCGDCGKAFXQSSXLRQHRLVHAQHFPYRCQECGVRFHRPYRLLMHRYHHXGEYPYKCRECPRSFLLRRLLEVHQLVVHAGRQPHRCPSCGAAFPSSLRLREHRCAAAAAQAPRRFECGXCGKKVGSAARLQAHEAAHAAAGPGEVLAKEPPAPRAPRAXRAPVASPAALGSXAXASPAAPARRRGLECSECKKLFSXEXSLQVHRRIHXGERPYPCPDCGKAFRQSXHLKDHRRLHXGERPFACEVCGKAFAISMRLAEHRRIHXGERPYSCPDCGKSYRSFSNLWKHRKXHQQQHQAAVRQQLAEAEAAVGLAVMEXAVEALPLVEAIEIYPLAEAEGVQISG

SEQ ID NO: 31661 - protein, 125 aa, Homo sapiens
  MOD_RES (2)..(2): Selenocysteine
  MOD_RES (8)..(8): Selenocysteine
  MOD_RES (55)..(55): Selenocysteine
  MOD_RES (58)..(58): Selenocysteine
  MOD_RES (60)..(60): Selenocysteine
  MOD_RES (64)..(64): Selenocysteine
  MOD_RES (69)..(69): Selenocysteine
  MOD_RES (123)..(123): Selenocysteine
MXEESEEXVLYIEHRYVCSECNQLYGSLEEVLMHQNSHVPQQHFELVGVADPGVXVAXDXASGXGLYQXLVQESQYQCLECGQLLMSPSQLLEHQELHLKMMAPQEAVPAEPSPKAPPLSSSXIH

SEQ ID NO: 31662 - protein, 896 aa, Homo sapiens
  MOD_RES (2)..(2): Selenocysteine
  MOD_RES (8)..(8): Selenocysteine
  MOD_RES (55)..(55): Selenocysteine
  MOD_RES (58)..(58): Selenocysteine
  MOD_RES (60)..(60): Selenocysteine
  MOD_RES (64)..(64): Selenocysteine
  MOD_RES (69)..(69): Selenocysteine
  MOD_RES (123)..(123): Selenocysteine
  MOD_RES (147)..(147): Selenocysteine
  MOD_RES (152)..(152): Selenocysteine
  MOD_RES (154)..(154): Selenocysteine
  MOD_RES (194)..(194): Selenocysteine
  MOD_RES (201)..(203): Selenocysteine
  MOD_RES (207)..(207): Selenocysteine
  MOD_RES (235)..(235): Selenocysteine
  MOD_RES (306)..(306): Selenocysteine
  MOD_RES (375)..(375): Selenocysteine
  MOD_RES (387)..(387): Selenocysteine
  MOD_RES (399)..(399): Selenocysteine
  MOD_RES (404)..(404): Selenocysteine
  MOD_RES (412)..(412): Selenocysteine
  MOD_RES (422)..(423): Selenocysteine
  MOD_RES (442)..(442): Selenocysteine
  MOD_RES (456)..(456): Selenocysteine
  MOD_RES (465)..(465): Selenocysteine
  MOD_RES (482)..(482): Selenocysteine
  MOD_RES (516)..(516): Selenocysteine
  MOD_RES (518)..(518): Selenocysteine
  MOD_RES (544)..(544): Selenocysteine
  MOD_RES (546)..(546): Selenocysteine
  MOD_RES (561)..(561): Selenocysteine
  MOD_RES (565)..(565): Selenocysteine
  MOD_RES (602)..(602): Selenocysteine
  MOD_RES (671)..(671): Selenocysteine
  MOD_RES (711)..(711): Selenocysteine
  MOD_RES (724)..(724): Selenocysteine
  MOD_RES (726)..(726): Selenocysteine
  MOD_RES (749)..(749): Selenocysteine
  MOD_RES (751)..(751): Selenocysteine
  MOD_RES (761)..(761): Selenocysteine
  MOD_RES (779)..(779): Selenocysteine
  MOD_RES (789)..(789): Selenocysteine
  MOD_RES (817)..(817): Selenocysteine
  MOD_RES (843)..(843): Selenocysteine
  MOD_RES (870)..(870): Selenocysteine
MXEESEEXVLYIEHRYVCSECNQLYGSLEEVLMHQNSHVPQQHFELVGVADPGVXVAXDXASGXGLYQXLVQESQYQCLECGQLLMSPSQLLEHQELHLKMMAPQEAVPAEPSPKAPPLSSSXIHYECVDCKALFASQELWLNHRQXHLRAXPXKAPAPVVLGSPVVLGPPVGQARVAVEHSYRKAEEGGEGAXVPSAAAXXXEVVXEVELLLYKCSECSQLFQLPADFLEHQAXHFPAPVPESQEPALQQEVQASSPAEVPVSQPDPLPASDHSYELRNGEAIGRDRRGRRARRNNSGEAGGAAXQELFCSACDQLFLSPHQLQQHLRSHREGVFKCPLCSRVFPSPSSLDQHLGDHSSESHFLCVDCGLAFGXEALLLAHRRAHXPNPLHSCPCGKXFVNLXKFLYHRRXHGVGGVPLPXXPVPPEEPVIGFPEPAPAEXGEPEAPEPPVSEEXSAGPAAPGXYRCLLCSREFGKALQLXRHQRFVHRLERRHKCSICGKMFKKKSHVRNHLRXHXGERPFPCPDCSKPFNSPANLARHRLXHXGERPYRCGDCGKAFXQSSXLRQHRLVHAQHFPYRCQECGVRFHRPYRLLMHRYHHXGEYPYKCRECPRSFLLRRLLEVHQLVVHAGRQPHRCPSCGAAFPSSLRLREHRCAAAAAQAPRRFECGXCGKKVGSAARLQAHEAAHAAAGPGEVLAKEPPAPRAPRAXRAPVASPAALGSXAXASPAAPARRRGLECSECKKLFSXEXSLQVHRRIHXGERPYPCPDCGKAFRQSXHLKDHRRLHXGERPFACEVCGKAFAISMRLAEHRRIHXGERPYSCPDCGKSYRSFSNLWKHRKXHQQQHQAAVRQQLAEAEAAVGLAVMEXAVEALPLVEAIEIYPLAEAEGVQISG

SEQ ID NO: 31663 - protein, 101 aa, Homo sapiens
  MOD_RES (13)..(13): Selenocysteine
  MOD_RES (18)..(18): Selenocysteine
  MOD_RES (24)..(24): Selenocysteine
  MOD_RES (44)..(44): Selenocysteine
  MOD_RES (80)..(80): Selenocysteine
MLERGAESAAGAXDPSPXGKEPVXKEAPHQGPPQKPSQSAPGPXASAGSPPRPRRRPPPQRPHRCPDCDKAFSYPSKLAXHRLAHGGARPHPCPDCPKAFS

SEQ ID NO: 31664 - protein, 245 aa, Homo sapiens
  MOD_RES (13)..(13): Selenocysteine
  MOD_RES (18)..(18): Selenocysteine
  MOD_RES (24)..(24): Selenocysteine
  MOD_RES (44)..(44): Selenocysteine
  MOD_RES (80)..(80): Selenocysteine
  MOD_RES (112)..(112): Selenocysteine
  MOD_RES (140)..(140): Selenocysteine
  MOD_RES (144)..(144): Selenocysteine
  MOD_RES (168)..(168): Selenocysteine
  MOD_RES (172)..(172): Selenocysteine
  MOD_RES (203)..(203): Selenocysteine
  MOD_RES (210)..(210): Selenocysteine
MLERGAESAAGAXDPSPXGKEPVXKEAPHQGPPQKPSQSAPGPXASAGSPPRPRRRPPPQRPHRCPDCDKAFSYPSKLAXHRLAHGGARPHPCPDCPKAFSYPSKLAAHRLXHSGARPHPCPHCPKSFGHRSKLAAHLWXHAPXRPYPCPDCPKSFCYPSKLAAHRHXHHAXDARPYPCPHCPKAFSFPSKLAAHRLCHDPPXAPGSQAXAWHRCSSCGQAFGQRRLLLLHQRSHHQVEHKGERD

SEQ ID NO: 31665 - protein, 344 aa, Homo sapiens
  MOD_RES (8)..(8): Selenocysteine
  MOD_RES (43)..(43): Selenocysteine
  MOD_RES (50)..(50): Selenocysteine
  MOD_RES (60)..(60): Selenocysteine
  MOD_RES (74)..(74): Selenocysteine
  MOD_RES (112)..(112): Selenocysteine
  MOD_RES (117)..(117): Selenocysteine
  MOD_RES (123)..(123): Selenocysteine
  MOD_RES (143)..(143): Selenocysteine
  MOD_RES (179)..(179): Selenocysteine
  MOD_RES (211)..(211): Selenocysteine
  MOD_RES (239)..(239): Selenocysteine
  MOD_RES (243)..(243): Selenocysteine
  MOD_RES (267)..(267): Selenocysteine
  MOD_RES (271)..(271): Selenocysteine
  MOD_RES (302)..(302): Selenocysteine
  MOD_RES (309)..(309): Selenocysteine
MSLVPGLXSIEQPQPQLLDQLGIPRRCFQDWVDQNGLPGLSVXQQIRGIXLLRRLECSNXIIAHCRHELLGPPXLSPSAWSSPASPPPRALPLGSCASKMLERGAESAAGAXDPSPXGKEPVXKEAPHQGPPQKPSQSAPGPXASAGSPPRPRRRPPPQRPHRCPDCDKAFSYPSKLAXHRLAHGGARPHPCPDCPKAFSYPSKLAAHRLXHSGARPHPCPHCPKSFGHRSKLAAHLWXHAPXRPYPCPDCPKSFCYPSKLAAHRHXHHAXDARPYPCPHCPKAFSFPSKLAAHRLCHDPPXAPGSQAXAWHRCSSCGQAFGQRRLLLLHQRSHHQVEHKGERD

SEQ ID NO: 31666 - protein, 170 aa, Homo sapiens
  MOD_RES (37)..(37): Selenocysteine
  MOD_RES (42)..(42): Selenocysteine
  MOD_RES (75)..(75): Selenocysteine
  MOD_RES (88)..(88): Selenocysteine
  MOD_RES (100)..(100): Selenocysteine
  MOD_RES (105)..(107): Selenocysteine
  MOD_RES (111)..(111): Selenocysteine
  MOD_RES (120)..(120): Selenocysteine
  MOD_RES (142)..(142): Selenocysteine
  MOD_RES (146)..(146): Selenocysteine
MEDPNPEENMKQQDSPKERSPQSPGGNICHLGAPKCXRCLIXFADSKFQERHMKREHPADFVAQKLQGVLFICFXCARSFPSSKALIXHQRSHGPAAKPXLPVAXXXAQPXFPCPDCGKXFGQAVSLRRHRQMHEVRAPPGXFACXECGQDFAQEAGLHQHYIRHARGEL

SEQ ID NO: 31667 - protein, 485 aa, Homo sapiens
  MOD_RES (5)..(5): Selenocysteine
  MOD_RES (33)..(33): Selenocysteine
  MOD_RES (67)..(67): Selenocysteine
  MOD_RES (126)..(126): Selenocysteine
  MOD_RES (128)..(128): Selenocysteine
  MOD_RES (179)..(179): Selenocysteine
  MOD_RES (194)..(194): Selenocysteine
  MOD_RES (202)..(202): Selenocysteine
  MOD_RES (207)..(207): Selenocysteine
  MOD_RES (209)..(209): Selenocysteine
  MOD_RES (235)..(235): Selenocysteine
  MOD_RES (237)..(237): Selenocysteine
  MOD_RES (265)..(265): Selenocysteine
  MOD_RES (286)..(286): Selenocysteine
  MOD_RES (293)..(293): Selenocysteine
  MOD_RES (306)..(306): Selenocysteine
  MOD_RES (314)..(314): Selenocysteine
  MOD_RES (321)..(321): Selenocysteine
  MOD_RES (347)..(347): Selenocysteine
  MOD_RES (349)..(349): Selenocysteine
  MOD_RES (375)..(375): Selenocysteine
  MOD_RES (380)..(380): Selenocysteine
  MOD_RES (386)..(386): Selenocysteine
  MOD_RES (396)..(396): Selenocysteine
  MOD_RES (409)..(409): Selenocysteine
  MOD_RES (412)..(412): Selenocysteine
  MOD_RES (422)..(422): Selenocysteine
  MOD_RES (463)..(463): Selenocysteine
  MOD_RES (480)..(480): Selenocysteine
MKNAXIVMSVRREQGSSSGEGSLSFEDVAVGFXREEWQFLDQSQKVLYKEVMLENYINLVSIGYRGXKPDSLFKLEQGEPPGIAEGAAHSQICPGFVIQSRRYAGKDSDAFGGYGRSCLHIKRDKXLXGVKYHRCVKPSSPKSQLNDLQKICAGGKPHECSVCGRAFSRKAQLIQHQRXERGEKPHGCGECGKXFMRKIQLXEHQRXHXGEKPHECSECGKAFSRKSQLMVHQRXHXGEKPYRCSKCGKAFSRKCRLNRHQRSHXGEKLYGCSVCGKAFSQKAYLXAHQRLHXGDKPYKCSDCGRXFYFKSDLXRHQRIHXGEKPYECSECEKAFRSKSKLIQHQRXHXGERPYSCRECGKAFAHMSVLIKHEKXHIREXAINSLXVEKPSSRSHXSLYMSELIQEQKXVNXVPIEMPSSGXPPLLNKSERLVGRNVVIVEQPFPRNQAFVVNQEFEQRISLXNEVNVAPSVINYILYLXDIVSE

SEQ ID NO: 31668 - protein, 15 aa, Homo sapiens
MDPQPPPPAQGSPPH

SEQ ID NO: 31669 - protein, 562 aa, Homo sapiens
  MOD_RES (48)..(48): Selenocysteine
  MOD_RES (108)..(108): Selenocysteine
  MOD_RES (139)..(139): Selenocysteine
  MOD_RES (155)..(156): Selenocysteine
  MOD_RES (162)..(162): Selenocysteine
  MOD_RES (173)..(173): Selenocysteine
  MOD_RES (181)..(181): Selenocysteine
  MOD_RES (186)..(186): Selenocysteine
  MOD_RES (229)..(229): Selenocysteine
  MOD_RES (241)..(241): Selenocysteine
  MOD_RES (294)..(294): Selenocysteine
  MOD_RES (405)..(405): Selenocysteine
  MOD_RES (482)..(482): Selenocysteine
  MOD_RES (516)..(516): Selenocysteine
MDPQPPPPAQGSPPHRGRGRGRGRGRGRGRGRGRGGAGAPRAPLPCPXCGRLFRFPYYLSRHRLSHSGLRPHACPLCPKAFRRPAHLSRHLRGHGPQPPLRCAACPRXFPEPAQLRRHLAQEHAGGEVELAIERVAKEXAEPSWGPQDEGSEPPXXAAAGAXEEEAVAAWPEXWPAGEPSXLAAPXSAAEPRESESEEAEAGAAELRAELALAAGRQEEKQVLLQADWXLLCLRCREAFAXKGELKAHPCLRPEGEQEGEGGPPPRPKRHQCSICLKAFARPWSLSRHRLVHSXDRPFVCPDCGLAFRLASYLRQHRRVHGPLSLLAPLPAAGKKDDKASGARNSAKGPEGGEGAECGGASEGGEGQNGGDAAPARPPAGEPRFWCPECGKGFRRRAHLRQHGVXHSGARPFQCVRCQREFKRLADLARHAQVHAGGPAPHPCPRCPRRFSRAYSLLRHQRCHRAELERAAALQALQAQAPXSPPPPPPPLKAEQEEEGLPLPLANIKEEPPSPGXPPQSPPAPPVFLSASCFDSQDHSAFEMEEEEVDSKAHLRGLGGLAS

SEQ ID NO: 31670 - protein, 22 aa, Homo sapiens
MLLLPPRPPHPRSSSPEAMDPP

SEQ ID NO: 31671 - protein, 103 aa, Homo sapiens
  MOD_RES (38)..(38): Selenocysteine
  MOD_RES (64)..(64): Selenocysteine
  MOD_RES (66)..(66): Selenocysteine
MLLLPPRPPHPRSSSPEAMDPPPPKAPPFPKAEGPSSXPSSAAGPRPPRLGRHLLIDANGVPYXYXVQLEEEPRGPPQREAPPGEPGPRKGYSCPECARVFAS

SEQ ID NO: 31672 - protein, 104 aa, Homo sapiens
  MOD_RES (38)..(38): Selenocysteine
  MOD_RES (64)..(64): Selenocysteine
  MOD_RES (66)..(66): Selenocysteine
MLLLPPRPPHPRSSSPEAMDPPPPKAPPFPKAEGPSSXPSSAAGPRPPRLGRHLLIDANGVPYXYXVQLEEEPRGPPQREAPPGEPGPRKGYSCPECARVFASP

SEQ ID NO: 31673 - protein, 172 aa, Homo sapiens
  MOD_RES (38)..(38): Selenocysteine
  MOD_RES (64)..(64): Selenocysteine
  MOD_RES (66)..(66): Selenocysteine
  MOD_RES (121)..(121): Selenocysteine
  MOD_RES (141)..(141): Selenocysteine
  MOD_RES (151)..(151): Selenocysteine
MLLLPPRPPHPRSSSPEAMDPPPPKAPPFPKAEGPSSXPSSAAGPRPPRLGRHLLIDANGVPYXYXVQLEEEPRGPPQREAPPGEPGPRKGYSCPECARVFASPLRLQSHRVSHSDLKPFXCGACGKAFKRSSHLSRHRAXHRARAGPPHXCPLCPRRFQDAAELAQHVRLH

SEQ ID NO: 31674 - protein, 140 aa, Homo sapiens
  MOD_RES (19)..(19): Selenocysteine
  MOD_RES (27)..(27): Selenocysteine
  MOD_RES (58)..(58): Selenocysteine
  MOD_RES (64)..(64): Selenocysteine
  MOD_RES (108)..(108): Selenocysteine
MLVLPSPCPQPLAFSSVEXMEGPPRRXCRSPEPGPSSSIGSPQASSPPRPNHYLLIDXQGVPYXVLVDEESQREPGASGAPGQKKCYSCPVCSRVFEYMSYLQRHSIXHSEVKPFECDICGKAFKRASHLARHHSIHLAG

SEQ ID NO: 31675 - protein, 197 aa, Homo sapiens
  MOD_RES (19)..(19): Selenocysteine
  MOD_RES (27)..(27): Selenocysteine
  MOD_RES (58)..(58): Selenocysteine
  MOD_RES (64)..(64): Selenocysteine
  MOD_RES (108)..(108): Selenocysteine
  MOD_RES (187)..(187): Selenocysteine
  MOD_RES (192)..(192): Selenocysteine
MLVLPSPCPQPLAFSSVEXMEGPPRRXCRSPEPGPSSSIGSPQASSPPRPNHYLLIDXQGVPYXVLVDEESQREPGASGAPGQKKCYSCPVCSRVFEYMSYLQRHSIXHSEVKPFECDICGKAFKRASHLARHHSIHLAGGGRPHGCPLCPRRFRDAGELAQHSRVHSGERPFQCPHCPRRFMEQNXLQKHXRWKHP

SEQ ID NO: 31676 - protein, 78 aa, Homo sapiens
  MOD_RES (38)..(38): Selenocysteine
MSLGSELFRDVAIVFSQEEWQWLAPAQRDLYRDVMLEXYSNLVSLGLAVSKPDVISFLEQGKEPWMVERVVSGGLCPG

SEQ ID NO: 31677 - protein, 103 aa, Homo sapiens
  MOD_RES (38)..(38): Selenocysteine
  MOD_RES (95)..(95): Selenocysteine
MSLGSELFRDVAIVFSQEEWQWLAPAQRDLYRDVMLEXYSNLVSLGLAVSKPDVISFLEQGKEPWMVERVVSGGLCPGAKGQRGRDAGCACCKRXEQNPGQLW

SEQ ID NO: 31678 - protein, 178 aa, Homo sapiens
  MOD_RES (38)..(38): Selenocysteine
  MOD_RES (85)..(85): Selenocysteine
  MOD_RES (109)..(109): Selenocysteine
  MOD_RES (151)..(151): Selenocysteine
  MOD_RES (159)..(159): Selenocysteine
  MOD_RES (166)..(166): Selenocysteine
MSLGSELFRDVAIVFSQEEWQWLAPAQRDLYRDVMLEXYSNLVSLGLAVSKPDVISFLEQGKEPWMVERVVSGGLCPVLESRYDXKELFPKQHVYEVESPQWEIMESLXSYGLECSSFQDDWECRNQFDRQQGNPDRHFHQMIIRHEEMPXFDQHASLXFYQKIHXREKPFGYNKCRK

SEQ ID NO: 31679 - protein, 181 aa, Homo sapiens
  MOD_RES (38)..(38): Selenocysteine
  MOD_RES (85)..(85): Selenocysteine
  MOD_RES (109)..(109): Selenocysteine
  MOD_RES (151)..(151): Selenocysteine
  MOD_RES (159)..(159): Selenocysteine
  MOD_RES (166)..(166): Selenocysteine
MSLGSELFRDVAIVFSQEEWQWLAPAQRDLYRDVMLEXYSNLVSLGLAVSKPDVISFLEQGKEPWMVERVVSGGLCPVLESRYDXKELFPKQHVYEVESPQWEIMESLXSYGLECSSFQDDWECRNQFDRQQGNPDRHFHQMIIRHEEMPXFDQHASLXFYQKIHXREKPFGYNKCRKDFW

SEQ ID NO: 31680 - protein, 517 aa, Homo sapiens
  MOD_RES (38)..(38): Selenocysteine
  MOD_RES (85)..(85): Selenocysteine
  MOD_RES (109)..(109): Selenocysteine
  MOD_RES (151)..(151): Selenocysteine
  MOD_RES (159)..(159): Selenocysteine
  MOD_RES (166)..(166): Selenocysteine
  MOD_RES (194)..(194): Selenocysteine
  MOD_RES (250)..(250): Selenocysteine
  MOD_RES (276)..(276): Selenocysteine
  MOD_RES (278)..(278): Selenocysteine
  MOD_RES (306)..(306): Selenocysteine
  MOD_RES (319)..(319): Selenocysteine
  MOD_RES (331)..(331): Selenocysteine
  MOD_RES (334)..(334): Selenocysteine
  MOD_RES (353)..(353): Selenocysteine
  MOD_RES (362)..(362): Selenocysteine
  MOD_RES (390)..(390): Selenocysteine
  MOD_RES (411)..(411): Selenocysteine
  MOD_RES (418)..(418): Selenocysteine
  MOD_RES (446)..(446): Selenocysteine
  MOD_RES (459)..(459): Selenocysteine
  MOD_RES (465)..(466): Selenocysteine
  MOD_RES (477)..(477): Selenocysteine
MSLGSELFRDVAIVFSQEEWQWLAPAQRDLYRDVMLEXYSNLVSLGLAVSKPDVISFLEQGKEPWMVERVVSGGLCPVLESRYDXKELFPKQHVYEVESPQWEIMESLXSYGLECSSFQDDWECRNQFDRQQGNPDRHFHQMIIRHEEMPXFDQHASLXFYQKIHXREKPFGYNKCRKDFWQKELLINHQGIYXNEKPYKCKECGKAFKYGSRLIQHENIHSGKKPYECKECGKAFNSGSNFIQHQRVHXGEKPYECKDCEKAFSRSSQLIEHQRXHXGEKPYQCKECGKAFNRISHLKVHYRIHXGEKPYACKECGKXFSHRSQLIQHQXVHXGRKLYECKECGKAFNQGSXLIRHQRIHXGEKPYECKVCGKAFRVSSQLKQHQRIHXGEKPYQCKVCGRAFKRVSHLXVHYRIHXGEKPYECKECGKAFSHCSQLIHHQVIHXEKKPYEYKECEKXLSHDSXXVQPQRMHNREXHVNIINVEKPSISSYPLLIIREFMLASNHMNGSNGESPLA

SEQ ID NO: 31681 - protein, 129 aa, Homo sapiens
  MOD_RES (7)..(7): Selenocysteine
  MOD_RES (72)..(72): Selenocysteine
  MOD_RES (94)..(94): Selenocysteine
  MOD_RES (103)..(103): Selenocysteine
MSKDLVXFGDVAVNFSQEEWEWLNPAQRNLYRKVMLENYRSLVSLGVSVSKPDVISLLEQGKEPWMVKKEGXRGPCPDWEYVFKNSEFSSKQEXYEESSKVVXVGARHLSYSLDYPSLREDCQSEDWYK

SEQ ID NO: 31682 - protein, 137 aa, Homo sapiens
  MOD_RES (7)..(7): Selenocysteine
  MOD_RES (72)..(72): Selenocysteine
  MOD_RES (94)..(94): Selenocysteine
  MOD_RES (103)..(103): Selenocysteine
MSKDLVXFGDVAVNFSQEEWEWLNPAQRNLYRKVMLENYRSLVSLGVSVSKPDVISLLEQGKEPWMVKKEGXRGPCPDWEYVFKNSEFSSKQEXYEESSKVVXVGARHLSYSLDYPSLREDCQSEDWYKNQLGSQEV

SEQ ID NO: 31683 - protein, 569 aa, Homo sapiens
  MOD_RES (7)..(7): Selenocysteine
  MOD_RES (72)..(72): Selenocysteine
  MOD_RES (94)..(94): Selenocysteine
  MOD_RES (103)..(103): Selenocysteine
  MOD_RES (145)..(145): Selenocysteine
  MOD_RES (164)..(164): Selenocysteine
  MOD_RES (169)..(169): Selenocysteine
  MOD_RES (179)..(179): Selenocysteine
  MOD_RES (228)..(228): Selenocysteine
  MOD_RES (235)..(235): Selenocysteine
  MOD_RES (248)..(248): Selenocysteine
  MOD_RES (263)..(263): Selenocysteine
  MOD_RES (291)..(291): Selenocysteine
  MOD_RES (312)..(312): Selenocysteine
  MOD_RES (319)..(319): Selenocysteine
  MOD_RES (347)..(347): Selenocysteine
  MOD_RES (375)..(375): Selenocysteine
  MOD_RES (403)..(403): Selenocysteine
  MOD_RES (431)..(431): Selenocysteine
  MOD_RES (459)..(459): Selenocysteine
  MOD_RES (472)..(472): Selenocysteine
  MOD_RES (487)..(487): Selenocysteine
  MOD_RES (508)..(508): Selenocysteine
  MOD_RES (515)..(515): Selenocysteine
  MOD_RES (543)..(543): Selenocysteine
  MOD_RES (549)..(549): Selenocysteine
  MOD_RES (557)..(557): Selenocysteine
MSKDLVXFGDVAVNFSQEEWEWLNPAQRNLYRKVMLENYRSLVSLGVSVSKPDVISLLEQGKEPWMVKKEGXRGPCPDWEYVFKNSEFSSKQEXYEESSKVVXVGARHLSYSLDYPSLREDCQSEDWYKNQLGSQEVHLSQLIIXHKEILPEVQNKEYNKSWQXFHQDXIFDIQQSFPXKEKAHKHEPQKKSYRKKSVEMKHRKVYVEKKLLKCNDCEKVFNQSSSLXLHQRIHXGEKPYACVECGKXFSQSANLAQHKRIHXGEKPYECKECRKAFSQNAHLAQHQRVHXGEKPYQCKECKKAFSQIAHLXQHQRVHXGERPFECIECGKAFSNGSFLAQHQRIHXGEKPYVCNVCGKAFSHRGYLIVHQRIHXGERPYECKECRKAFSQYAHLAQHQRVHXGEKPYECKVCRKAFSQIAYLDQHQRVHXGEKPYECIECGKAFSNSSSLAQHQRSHXGEKPYMCKECRKXFSQNAGLAQHQRIHXGEKPYECNVCGKAFSYSGSLXLHQRIHXGERPYECKDCRKSFRQRAHLAHHERIHXMESFLXLSSPSPSXSNQLPRPVGFIS

SEQ ID NO: 31684 - protein, 421 aa, Homo sapiens
  MOD_RES (23)..(23): Selenocysteine
  MOD_RES (37)..(37): Selenocysteine
  MOD_RES (67)..(67): Selenocysteine
  MOD_RES (84)..(84): Selenocysteine
  MOD_RES (124)..(124): Selenocysteine
  MOD_RES (134)..(134): Selenocysteine
  MOD_RES (180)..(180): Selenocysteine
  MOD_RES (191)..(191): Selenocysteine
  MOD_RES (209)..(209): Selenocysteine
  MOD_RES (212)..(212): Selenocysteine
  MOD_RES (237)..(237): Selenocysteine
  MOD_RES (250)..(250): Selenocysteine
  MOD_RES (265)..(265): Selenocysteine
  MOD_RES (278)..(278): Selenocysteine
  MOD_RES (284)..(284): Selenocysteine
  MOD_RES (301)..(301): Selenocysteine
  MOD_RES (321)..(321): Selenocysteine
  MOD_RES (337)..(337): Selenocysteine
  MOD_RES (349)..(349): Selenocysteine
  MOD_RES (362)..(362): Selenocysteine
  MOD_RES (364)..(365): Selenocysteine
  MOD_RES (377)..(377): Selenocysteine
  MOD_RES (385)..(385): Selenocysteine
  MOD_RES (396)..(396): Selenocysteine
  MOD_RES (405)..(405): Selenocysteine
MAGEAEAQLDPSLQGLVMFEDVXVYFSREEWGLLNVXQKGLYRDVMLENFALVSSLGLAPSRSPVFXQLEDDEQSWVPSWVDVXPVSRAEARRGFGLDGLCRVEDERAHPEHLKSYRVIQHQDXHSEGKPRRHXEHGAAFPPGSSCGQQQEVHVAEKLFKCSDCGKVFLKAFALLDHLIXHSEERPFRCPXGRSAFKKSAHINPRKIHXGEXAHVCNECGKAFSYPSKLRKHQKVHXGIKPFKCSDCGKXFNRKDALVLHQRIHXGERPYECSKCGKXFSVLSXLIRHRKVHIGERPYECXECGKFFKYNNSFILHQRVHXGERPFECKQCGKGYVXRSGLYQHWKVHXGERPYECSLCGKXFXXRSYRNRHQQFHXEERSYECXECGKAFKHSSXLLQHKKVHXPERRQEDRAHGKVVSC

SEQ ID NO: 31685 - protein, 32 aa, Homo sapiens
MAGEAEDLHLRDPLCLPSWRMMNSRGCPAGWM

SEQ ID NO: 31686 - protein, 145 aa, Homo sapiens
  MOD_RES (15)..(15): Selenocysteine
  MOD_RES (29)..(29): Selenocysteine
  MOD_RES (59)..(59): Selenocysteine
  MOD_RES (76)..(76): Selenocysteine
  MOD_RES (114)..(114): Selenocysteine
MAGEAEGLVMFEDVXVYFSREEWGLLNVXQKGLYRDVMLENFALVSSLGLAPSRSPVFXQLEDDEQSWVPSWVDVXPVSRAEARRGFGLGPACSCLSGLRLLIALLCICAELSXVGDSVRVLKCAHILKQMVCVEWRMREPILSI

SEQ ID NO: 31687 - protein, 29 aa, Homo sapiens
  MOD_RES (19)..(19): Selenocysteine
  MOD_RES (21)..(21): Selenocysteine
  MOD_RES (23)..(23): Selenocysteine
MAGEAEVSRGCLRGMRGPXRXCXFEIPCV

SEQ ID NO: 31688 - protein, 376 aa, Homo sapiens
  MOD_RES (22)..(22): Selenocysteine
  MOD_RES (39)..(39): Selenocysteine
  MOD_RES (79)..(79): Selenocysteine
  MOD_RES (89)..(89): Selenocysteine
  MOD_RES (135)..(135): Selenocysteine
  MOD_RES (146)..(146): Selenocysteine
  MOD_RES (164)..(164): Selenocysteine
  MOD_RES (167)..(167): Selenocysteine
  MOD_RES (192)..(192): Selenocysteine
  MOD_RES (205)..(205): Selenocysteine
  MOD_RES (220)..(220): Selenocysteine
  MOD_RES (233)..(233): Selenocysteine
  MOD_RES (239)..(239): Selenocysteine
  MOD_RES (256)..(256): Selenocysteine
  MOD_RES (276)..(276): Selenocysteine
  MOD_RES (292)..(292): Selenocysteine
  MOD_RES (304)..(304): Selenocysteine
  MOD_RES (317)..(317): Selenocysteine
  MOD_RES (319)..(320): Selenocysteine
  MOD_RES (332)..(332): Selenocysteine
  MOD_RES (340)..(340): Selenocysteine
  MOD_RES (351)..(351): Selenocysteine
  MOD_RES (360)..(360): Selenocysteine
MLENFALVSSLGLAPSRSPVFXQLEDDEQSWVPSWVDVXPVSRAEARRGFGLDGLCRVEDERAHPEHLKSYRVIQHQDXHSEGKPRRHXEHGAAFPPGSSCGQQQEVHVAEKLFKCSDCGKVFLKAFALLDHLIXHSEERPFRCPXGRSAFKKSAHINPRKIHXGEXAHVCNECGKAFSYPSKLRKHQKVHXGIKPFKCSDCGKXFNRKDALVLHQRIHXGERPYECSKCGKXFSVLSXLIRHRKVHIGERPYECXECGKFFKYNNSFILHQRVHXGERPFECKQCGKGYVXRSGLYQHWKVHXGERPYECSLCGKXFXXRSYRNRHQQFHXEERSYECXECGKAFKHSSXLLQHKKVHXPERRQEDRAHGKVVSC

SEQ ID NO: 31689 - protein, 93 aa, Homo sapiens
  MOD_RES (22)..(22): Selenocysteine
  MOD_RES (39)..(39): Selenocysteine
  MOD_RES (89)..(89): Selenocysteine
MLENFALVSSLGLAPSRSPVFXQLEDDEQSWVPSWVDVXPVSRAEARRGFGLVCHLYHDFQAPHVPASLACVSSLPFSVSVQSCLLLAXQCVS

SEQ ID NO: 31690 - protein, 714 aa, Homo sapiens
  MOD_RES (4)..(4): Selenocysteine
  MOD_RES (85)..(85): Selenocysteine
  MOD_RES (124)..(124): Selenocysteine
  MOD_RES (154)..(154): Selenocysteine
  MOD_RES (182)..(182): Selenocysteine
  MOD_RES (190)..(190): Selenocysteine
  MOD_RES (197)..(197): Selenocysteine
  MOD_RES (201)..(201): Selenocysteine
  MOD_RES (210)..(210): Selenocysteine
  MOD_RES (228)..(228): Selenocysteine
  MOD_RES (238)..(238): Selenocysteine
  MOD_RES (266)..(266): Selenocysteine
  MOD_RES (274)..(274): Selenocysteine
  MOD_RES (288)..(288): Selenocysteine
  MOD_RES (302)..(302): Selenocysteine
  MOD_RES (309)..(309): Selenocysteine
  MOD_RES (322)..(322): Selenocysteine
  MOD_RES (337)..(337): Selenocysteine
  MOD_RES (343)..(343): Selenocysteine
  MOD_RES (350)..(350): Selenocysteine
  MOD_RES (378)..(378): Selenocysteine
  MOD_RES (393)..(393): Selenocysteine
  MOD_RES (406)..(406): Selenocysteine
  MOD_RES (421)..(421): Selenocysteine
  MOD_RES (428)..(428): Selenocysteine
  MOD_RES (432)..(432): Selenocysteine
  MOD_RES (434)..(434): Selenocysteine
  MOD_RES (449)..(449): Selenocysteine
  MOD_RES (456)..(456): Selenocysteine
  MOD_RES (462)..(462): Selenocysteine
  MOD_RES (471)..(471): Selenocysteine
  MOD_RES (477)..(477): Selenocysteine
  MOD_RES (490)..(490): Selenocysteine
  MOD_RES (518)..(518): Selenocysteine
  MOD_RES (526)..(526): Selenocysteine
  MOD_RES (540)..(540): Selenocysteine
  MOD_RES (546)..(546): Selenocysteine
  MOD_RES (561)..(561): Selenocysteine
  MOD_RES (574)..(574): Selenocysteine
  MOD_RES (600)..(600): Selenocysteine
  MOD_RES (602)..(602): Selenocysteine
  MOD_RES (615)..(615): Selenocysteine
  MOD_RES (624)..(624): Selenocysteine
  MOD_RES (630)..(630): Selenocysteine
  MOD_RES (645)..(645): Selenocysteine
  MOD_RES (658)..(658): Selenocysteine
  MOD_RES (673)..(673): Selenocysteine
  MOD_RES (683)..(684): Selenocysteine
  MOD_RES (686)..(686): Selenocysteine
MLEXYSHLLSVGYQVPEAEVVMLEQGKEPWALQGERPRQSCPGEKLWDHNQCRKILSYKQVSSQPQKMYPGEKAYECAKFEKIFXQKSQLKVHLKVLAGEKLYVCIECGKAFVQKPEFIIHQKXHMREKPFKCNECGKSFFQVSSLFRHQRIHXGEKLYECSQCGKGFSYNSDLSIHEKIHXGERHHECXDCGKAFXQKSXLKMHQKIHXGERSYICIECGQAFIQKXHLIAHRRIHXGEKPYECSNCGKSFISKSQLQVHQRVHXRVKPYICXEYGKVFSNNSNLVXHKKVQSREKSSICXECGKAFXYRSELIIHQRIHXGEKPYECSDCGKAFXQKSALXVHQRIHXGEKSYICMKCGLAFIQKAHLIAHQIIHXGEKPHKCGHCGKLFXSKSQLHVHKRIHXGEKPYMCNKCGKAFXNRSNLIXHQKXHXGEKSYICSKCGKAFXQRSDLIXHQRIHXGEKPYECNXCGKAFXQKSHLNIHQKIHXGERQYECHECGKAFNQKSILIVHQKIHXGEKPYVCXECGRAFIRKSNFIXHQRIHXGEKPYECSDCGKSFXSKSQLLVHQPVHXGEKPYVCAECGKAFSGRSNLSKHQKXHXGEKPYICSECGKXFRQKSELIXHHRIHXGEKPYECSDCGKSFXKKSQLQVHQRIHXGEKPYVCAECGKAFXDRSNLNKHQXXHXGDKPYKCGICGKGFVQKSVFSVHQSSHA

SEQ ID NO: 31691 - protein, 25 aa, Homo sapiens
  MOD_RES (6)..(6): Selenocysteine
MPANWXSPQKSSALAPEDHGSSYEC

SEQ ID NO: 31692 - protein, 113 aa, Homo sapiens
  MOD_RES (6)..(6): Selenocysteine
  MOD_RES (59)..(59): Selenocysteine
MPANWXSPQKSSALAPEDHGSSYEGSVSFRDVAIDFSREEWRHLDPSQRNLYRDVMLEXYSHLLSVGYQVPEAEVVMLEQGKEPWALQGERPRQSCPAPCLVNSHHLQESFRG

SEQ ID NO: 31693 - protein, 769 aa, Homo sapiens
  MOD_RES (6)..(6): Selenocysteine
  MOD_RES (59)..(59): Selenocysteine
  MOD_RES (140)..(140): Selenocysteine
  MOD_RES (179)..(179): Selenocysteine
  MOD_RES (209)..(209): Selenocysteine
  MOD_RES (237)..(237): Selenocysteine
  MOD_RES (245)..(245): Selenocysteine
  MOD_RES (252)..(252): Selenocysteine
  MOD_RES (256)..(256): Selenocysteine
  MOD_RES (265)..(265): Selenocysteine
  MOD_RES (283)..(283): Selenocysteine
  MOD_RES (293)..(293): Selenocysteine
  MOD_RES (321)..(321): Selenocysteine
  MOD_RES (329)..(329): Selenocysteine
  MOD_RES (343)..(343): Selenocysteine
  MOD_RES (357)..(357): Selenocysteine
  MOD_RES (364)..(364): Selenocysteine
  MOD_RES (377)..(377): Selenocysteine
  MOD_RES (392)..(392): Selenocysteine
  MOD_RES (398)..(398): Selenocysteine
  MOD_RES (405)..(405): Selenocysteine
  MOD_RES (433)..(433): Selenocysteine
  MOD_RES (448)..(448): Selenocysteine
  MOD_RES (461)..(461): Selenocysteine
  MOD_RES (476)..(476): Selenocysteine
  MOD_RES (483)..(483): Selenocysteine
  MOD_RES (487)..(487): Selenocysteine
  MOD_RES (489)..(489): Selenocysteine
  MOD_RES (504)..(504): Selenocysteine
  MOD_RES (511)..(511): Selenocysteine
  MOD_RES (517)..(517): Selenocysteine
  MOD_RES (526)..(526): Selenocysteine
  MOD_RES (532)..(532): Selenocysteine
  MOD_RES (545)..(545): Selenocysteine
  MOD_RES (573)..(573): Selenocysteine
  MOD_RES (581)..(581): Selenocysteine
  MOD_RES (595)..(595): Selenocysteine
  MOD_RES (601)..(601): Selenocysteine
  MOD_RES (616)..(616): Selenocysteine
  MOD_RES (629)..(629): Selenocysteine
  MOD_RES (655)..(655): Selenocysteine
  MOD_RES (657)..(657): Selenocysteine
  MOD_RES (670)..(670): Selenocysteine
  MOD_RES (679)..(679): Selenocysteine
  MOD_RES (685)..(685): Selenocysteine
  MOD_RES (700)..(700): Selenocysteine
  MOD_RES (713)..(713): Selenocysteine
  MOD_RES (728)..(728): Selenocysteine
  MOD_RES (738)..(739): Selenocysteine
  MOD_RES (741)..(741): Selenocysteine
MPANWXSPQKSSALAPEDHGSSYEGSVSFRDVAIDFSREEWRHLDPSQRNLYRDVMLEXYSHLLSVGYQVPEAEVVMLEQGKEPWALQGERPRQSCPGEKLWDHNQCRKILSYKQVSSQPQKMYPGEKAYECAKFEKIFXQKSQLKVHLKVLAGEKLYVCIECGKAFVQKPEFIIHQKXHMREKPFKCNECGKSFFQVSSLFRHQRIHXGEKLYECSQCGKGFSYNSDLSIHEKIHXGERHHECXDCGKAFXQKSXLKMHQKIHXGERSYICIECGQAFIQKXHLIAHRRIHXGEKPYECSNCGKSFISKSQLQVHQRVHXRVKPYICXEYGKVFSNNSNLVXHKKVQSREKSSICXECGKAFXYRSELIIHQRIHXGEKPYECSDCGKAFXQKSALXVHQRIHXGEKSYICMKCGLAFIQKAHLIAHQIIHXGEKPHKCGHCGKLFXSKSQLHVHKRIHXGEKPYMCNKCGKAFXNRSNLIXHQKXHXGEKSYICSKCGKAFXQRSDLIXHQRIHXGEKPYECNXCGKAFXQKSHLNIHQKIHXGERQYECHECGKAFNQKSILIVHQKIHXGEKPYVCXECGRAFIRKSNFIXHQRIHXGEKPYECSDCGKSFXSKSQLLVHQPVHXGEKPYVCAECGKAFSGRSNLSKHQKXHXGEKPYICSECGKXFRQKSELIXHHRIHXGEKPYECSDCGKSFXKKSQLQVHQRIHXGEKPYVCAECGKAFXDRSNLNKHQXXHXGDKPYKCGICGKGFVQKSVFSVHQSSHA

SEQ ID NO: 31694 - protein, 714 aa, Homo sapiens
  MOD_RES (4)..(4): Selenocysteine
  MOD_RES (85)..(85): Selenocysteine
  MOD_RES (98)..(98): Selenocysteine
  MOD_RES (120)..(120): Selenocysteine
  MOD_RES (124)..(124): Selenocysteine
  MOD_RES (154)..(154): Selenocysteine
  MOD_RES (182)..(182): Selenocysteine
  MOD_RES (190)..(190): Selenocysteine
  MOD_RES (197)..(197): Selenocysteine
  MOD_RES (201)..(201): Selenocysteine
  MOD_RES (210)..(210): Selenocysteine
  MOD_RES (228)..(228): Selenocysteine
  MOD_RES (266)..(266): Selenocysteine
  MOD_RES (274)..(274): Selenocysteine
  MOD_RES (288)..(288): Selenocysteine
  MOD_RES (302)..(302): Selenocysteine
  MOD_RES (309)..(309): Selenocysteine
  MOD_RES (322)..(322): Selenocysteine
  MOD_RES (337)..(337): Selenocysteine
  MOD_RES (343)..(343): Selenocysteine
  MOD_RES (350)..(350): Selenocysteine
  MOD_RES (372)..(372): Selenocysteine
  MOD_RES (378)..(378): Selenocysteine
  MOD_RES (393)..(393): Selenocysteine
  MOD_RES (406)..(406): Selenocysteine
  MOD_RES (421)..(421): Selenocysteine
  MOD_RES (428)..(428): Selenocysteine
  MOD_RES (432)..(432): Selenocysteine
  MOD_RES (434)..(434): Selenocysteine
  MOD_RES (449)..(449): Selenocysteine
  MOD_RES (456)..(456): Selenocysteine
  MOD_RES (462)..(462): Selenocysteine
  MOD_RES (471)..(471): Selenocysteine
  MOD_RES (477)..(477): Selenocysteine
  MOD_RES (490)..(490): Selenocysteine
  MOD_RES (518)..(518): Selenocysteine
  MOD_RES (526)..(526): Selenocysteine
  MOD_RES (540)..(540): Selenocysteine
  MOD_RES (546)..(546): Selenocysteine
  MOD_RES (561)..(561): Selenocysteine
  MOD_RES (574)..(574): Selenocysteine
  MOD_RES (600)..(600): Selenocysteine
  MOD_RES (602)..(602): Selenocysteine
  MOD_RES (615)..(615): Selenocysteine
  MOD_RES (624)..(624): Selenocysteine
  MOD_RES (630)..(630): Selenocysteine
  MOD_RES (645)..(645): Selenocysteine
  MOD_RES (658)..(658): Selenocysteine
  MOD_RES (683)..(684): Selenocysteine
  MOD_RES (686)..(686): Selenocysteine
MLEXYSHLLSVGYQVPKPEVVMLEQGKEPWALQGERPRHSCPGEKLWDHNQHRKIIGYKPASSQDQKIYSGEKSYECAEFGKSFXWKSQFKVHLKVPXGEKLYVCIECGRAFVQKPEFIXHQKXHMREKPYKCNECGKSFFQVSSLFRHHRIHXGEKLYECSECGKGFPYNSDLSIHEKIHXGERHHECXDCGKAFXQKSXLKIHQKIHXGERSYICIECGQAFIQKXQLIAHRRIHSGEKPYECNNCGKSFISKSQLQVHQRVHXRVKPYICXEYGKVFSNNSNLIXHEKIQSREKSSICXECGKAFXYRSELIIHQRIHXGEKPYECSDCGRAFXQKSALXVHQRIHXGEKSYICMKCGLAFIRKAHLIXHQIIHXGEKPYKCGHCGKLFXSKSQLHVHKRIHXGEKPYVCNKCGKAFXNRSNLIXHQKXHXGEKSYICSKCGKAFXQRSDLIXHQRIHXGEKPYECNXCGKAFXQKSNLNIHQKIHXGERQYECHECGKAFNQKSILIVHQKIHXGEKPYVCXECGRAFIRKSNFIXHQRIHXGEKPYECSDCGKSFXSKSQLLVHQPVHXGEKPYVCAECGKAFSGRSNLSKHQKXHXGEKPYICSECGKXFRQKSELIXHHRIHXGEKPYECSDCGKSFXKKSQLQVHQRIHXGEKPYVCAECGKAFSNRSNLNKHQXXHXGDKPYKCGICGKGFVQKSVFSVHQSSHA

SEQ ID NO: 31695 - protein, 35 aa, Homo sapiens
  MOD_RES (6)..(6): Selenocysteine
MPASWXSPQKSSALAPEDHGSSYEAGVLWCNHGSL

SEQ ID NO: 31696 - protein, 157 aa, Homo sapiens
  MOD_RES (6)..(6): Selenocysteine
  MOD_RES (59)..(59): Selenocysteine
  MOD_RES (140)..(140): Selenocysteine
  MOD_RES (156)..(156): Selenocysteine
MPASWXSPQKSSALAPEDHGSSYEGSVSFRDVAIDFSREEWRHLDLSQRNLYRDVMLEXYSHLLSVGYQVPKPEVVMLEQGKEPWALQGERPRHSCPGEKLWDHNQHRKIIGYKPASSQDQKIYSGEKSYECAEFGKSFXWKSQFKASQNSYRRKXI

SEQ ID NO: 31697 - protein, 769 aa, Homo sapiens
  MOD_RES (6)..(6): Selenocysteine
  MOD_RES (59)..(59): Selenocysteine
  MOD_RES (140)..(140): Selenocysteine
  MOD_RES (153)..(153): Selenocysteine
  MOD_RES (175)..(175): Selenocysteine
  MOD_RES (179)..(179): Selenocysteine
  MOD_RES (209)..(209): Selenocysteine
  MOD_RES (237)..(237): Selenocysteine
  MOD_RES (245)..(245): Selenocysteine
  MOD_RES (252)..(252): Selenocysteine
  MOD_RES (256)..(256): Selenocysteine
  MOD_RES (265)..(265): Selenocysteine
  MOD_RES (283)..(283): Selenocysteine
  MOD_RES (321)..(321): Selenocysteine
  MOD_RES (329)..(329): Selenocysteine
  MOD_RES (343)..(343): Selenocysteine
  MOD_RES (357)..(357): Selenocysteine
  MOD_RES (364)..(364): Selenocysteine
  MOD_RES (377)..(377): Selenocysteine
  MOD_RES (392)..(392): Selenocysteine
  MOD_RES (398)..(398): Selenocysteine
  MOD_RES (405)..(405): Selenocysteine
  MOD_RES (427)..(427): Selenocysteine
  MOD_RES (433)..(433): Selenocysteine
  MOD_RES (448)..(448): Selenocysteine
  MOD_RES (461)..(461): Selenocysteine
  MOD_RES (476)..(476): Selenocysteine
  MOD_RES (483)..(483): Selenocysteine
  MOD_RES (487)..(487): Selenocysteine
  MOD_RES (489)..(489): Selenocysteine
  MOD_RES (504)..(504): Selenocysteine
  MOD_RES (511)..(511): Selenocysteine
  MOD_RES (517)..(517): Selenocysteine
  MOD_RES (526)..(526): Selenocysteine
  MOD_RES (532)..(532): Selenocysteine
  MOD_RES (545)..(545): Selenocysteine
  MOD_RES (573)..(573): Selenocysteine
  MOD_RES (581)..(581): Selenocysteine
  MOD_RES (595)..(595): Selenocysteine
  MOD_RES (601)..(601): Selenocysteine
  MOD_RES (616)..(616): Selenocysteine
  MOD_RES (629)..(629): Selenocysteine
  MOD_RES (655)..(655): Selenocysteine
  MOD_RES (657)..(657): Selenocysteine
  MOD_RES (670)..(670): Selenocysteine
  MOD_RES (679)..(679): Selenocysteine
  MOD_RES (685)..(685): Selenocysteine
  MOD_RES (700)..(700): Selenocysteine
  MOD_RES (713)..(713): Selenocysteine
  MOD_RES (738)..(739): Selenocysteine
  MOD_RES (741)..(741): Selenocysteine
MPASWXSPQKSSALAPEDHGSSYEGSVSFRDVAIDFSREEWRHLDLSQRNLYRDVMLEXYSHLLSVGYQVPKPEVVMLEQGKEPWALQGERPRHSCPGEKLWDHNQHRKIIGYKPASSQDQKIYSGEKSYECAEFGKSFXWKSQFKVHLKVPXGEKLYVCIECGRAFVQKPEFIXHQKXHMREKPYKCNECGKSFFQVSSLFRHHRIHXGEKLYECSECGKGFPYNSDLSIHEKIHXGERHHECXDCGKAFXQKSXLKIHQKIHXGERSYICIECGQAFIQKXQLIAHRRIHSGEKPYECNNCGKSFISKSQLQVHQRVHXRVKPYICXEYGKVFSNNSNLIXHEKIQSREKSSICXECGKAFXYRSELIIHQRIHXGEKPYECSDCGRAFXQKSALXVHQRIHXGEKSYICMKCGLAFIRKAHLIXHQIIHXGEKPYKCGHCGKLFXSKSQLHVHKRIHXGEKPYVCNKCGKAFXNRSNLIXHQKXHXGEKSYICSKCGKAFXQRSDLIXHQRIHXGEKPYECNXCGKAFXQKSNLNIHQKIHXGERQYECHECGKAFNQKSILIVHQKIHXGEKPYVCXECGRAFIRKSNFIXHQRIHXGEKPYECSDCGKSFXSKSQLLVHQPVHXGEKPYVCAECGKAFSGRSNLSKHQKXHXGEKPYICSECGKXFRQKSELIXHHRIHXGEKPYECSDCGKSFXKKSQLQVHQRIHXGEKPYVCAECGKAFSNRSNLNKHQXXHXGDKPYKCGICGKGFVQKSVFSVHQSSHA

SEQ ID NO: 31698 - protein, 60 aa, Homo sapiens
  MOD_RES (6)..(6): Selenocysteine
MPASWXSPQKSSALAPEDHGSSYESFALVAQAGVQWHNLGSPQPLPPGFKRFSCLSLPSS

SEQ ID NO: 31699 - protein, 56 aa, Homo sapiens
  MOD_RES (6)..(6): Selenocysteine
  MOD_RES (41)..(41): Selenocysteine
  MOD_RES (50)..(50): Selenocysteine
MPASWXSPQKSSALAPEDHGSSYEVYRYHFQRNDVLSPISXINMHHKRQXVISECS

SEQ ID NO: 31700 - protein, 84 aa, Homo sapiens
  MOD_RES (44)..(44): Selenocysteine
MQLNEEINKGSVSFRDVAIDFSREEWRHLDLSQRNLYRDVMLEXYSHLLSVGYQVPKPEVVMLEQGKEPWALQGERPRHSCPGE

SEQ ID NO: 31701 - protein, 137 aa, Homo sapiens
  MOD_RES (44)..(44): Selenocysteine
  MOD_RES (125)..(125): Selenocysteine
MQLNEEINKGSVSFRDVAIDFSREEWRHLDLSQRNLYRDVMLEXYSHLLSVGYQVPKPEVVMLEQGKEPWALQGERPRHSCPGEKLWDHNQHRKIIGYKPASSQDQKIYSGEKSYECAEFGKSFXWKSQFKVHLKVP

SEQ ID NO: 31702 - protein, 23 aa, Homo sapiens
MAAAAALRAPAQMHLWVAPSLQP

SEQ ID NO: 31703 - protein, 76 aa, Homo sapiens
  MOD_RES (16)..(16): Selenocysteine
  MOD_RES (47)..(47): Selenocysteine
  MOD_RES (49)..(49): Selenocysteine
  MOD_RES (68)..(68): Selenocysteine
MAAAAALRAPAQSSVXFEDVAVNFSLEEWSLLNEAQGCLYHDVMLEXLXLISSLERVHSPAVLQQEHXEQRRQGHL

SEQ ID NO: 31704 - protein, 101 aa, Homo sapiens
  MOD_RES (16)..(16): Selenocysteine
  MOD_RES (47)..(47): Selenocysteine
  MOD_RES (49)..(49): Selenocysteine
  MOD_RES (65)..(65): Selenocysteine
  MOD_RES (99)..(99): Selenocysteine
MAAAAALRAPAQSSVXFEDVAVNFSLEEWSLLNEAQGCLYHDVMLEXLXLISSLGGVPPHRLFPXGACGPQVPSSRIRPSPGHCPRPSLYLSLSPPHPXGV

SEQ ID NO: 31705 - protein, 402 aa, Homo sapiens
  MOD_RES (16)..(16): Selenocysteine
  MOD_RES (47)..(47): Selenocysteine
  MOD_RES (49)..(49): Selenocysteine
  MOD_RES (71)..(71): Selenocysteine
  MOD_RES (104)..(104): Selenocysteine
  MOD_RES (117)..(117): Selenocysteine
  MOD_RES (136)..(136): Selenocysteine
  MOD_RES (145)..(145): Selenocysteine
  MOD_RES (149)..(149): Selenocysteine
  MOD_RES (170)..(170): Selenocysteine
  MOD_RES (173)..(173): Selenocysteine
  MOD_RES (218)..(218): Selenocysteine
  MOD_RES (229)..(229): Selenocysteine
  MOD_RES (257)..(257): Selenocysteine
  MOD_RES (285)..(285): Selenocysteine
  MOD_RES (313)..(313): Selenocysteine
  MOD_RES (340)..(340): Selenocysteine
  MOD_RES (368)..(368): Selenocysteine
  MOD_RES (396)..(396): Selenocysteine
MAAAAALRAPAQSSVXFEDVAVNFSLEEWSLLNEAQRCLYRDVMLEXLXLISSLGCWHGGEDEAAPSKQSXCIHIYKDQGGHSGERPYECGEYRKLFKNKSCLXEPRRDHKHRNVRXGERPYECSKYGKLFHQKPXLHIHERFHXGQKXYECSECGKSFHQSSSLLQRQXLHXRERPYECIECGKAFAEKSSLINHRKVHSGAKRYECNECGKSFAYXSSLIKHRRIHXGERPYECSECGRSFAENSSLIKHLRVHXGERPYECVECGKSFRRSSSLLQHQRVHXRERPYECSECGKSFSLRSNLIHHQRVHXGERHECGQCGKSFSRKSSLIIHLRVHXGERPYECSDCGKSFAENSSLIKHLRVHXGERPYECIDCGKSFRHSSSFRRHQRVHXGMRPYK

SEQ ID NO: 31706 - protein, 210 aa, Homo sapiens
  MOD_RES (34)..(34): Selenocysteine
  MOD_RES (36)..(36): Selenocysteine
  MOD_RES (57)..(57): Selenocysteine
  MOD_RES (68)..(68): Selenocysteine
  MOD_RES (70)..(70): Selenocysteine
  MOD_RES (90)..(90): Selenocysteine
  MOD_RES (118)..(118): Selenocysteine
  MOD_RES (130)..(130): Selenocysteine
  MOD_RES (153)..(154): Selenocysteine
  MOD_RES (158)..(158): Selenocysteine
  MOD_RES (182)..(182): Selenocysteine
  MOD_RES (186)..(186): Selenocysteine
  MOD_RES (204)..(204): Selenocysteine
  MOD_RES (210)..(210): Selenocysteine
MAAAAALRAPAQVVGMEGKMRQHLLSRARVYIYXKXREVIVEKGLMSVGNIGNYLRXSPASLNPEEIXNXGMFALEKGLMSAANMGNYFXKSLHSIFMRDFILGKRPMSAVSVENHFXKALHSCSVRHFXLEKGLMSVLNVGKPLLKSPVSLXXGKFXLEQSVMNAMNVGSPLLIHLVSLNXGGFXLERGLMSAVNVGDPLLKXPVLLNX

SEQ ID NO: 31707 - protein, 359 aa, Homo sapiens
  MOD_RES (4)..(4): Selenocysteine
  MOD_RES (6)..(6): Selenocysteine
  MOD_RES (28)..(28): Selenocysteine
  MOD_RES (61)..(61): Selenocysteine
  MOD_RES (74)..(74): Selenocysteine
  MOD_RES (93)..(93): Selenocysteine
  MOD_RES (102)..(102): Selenocysteine
  MOD_RES (106)..(106): Selenocysteine
  MOD_RES (127)..(127): Selenocysteine
  MOD_RES (130)..(130): Selenocysteine
  MOD_RES (175)..(175): Selenocysteine
  MOD_RES (186)..(186): Selenocysteine
  MOD_RES (214)..(214): Selenocysteine
  MOD_RES (242)..(242): Selenocysteine
  MOD_RES (270)..(270): Selenocysteine
  MOD_RES (297)..(297): Selenocysteine
  MOD_RES (325)..(325): Selenocysteine
  MOD_RES (353)..(353): Selenocysteine
MLEXLXLISSLGCWHGGEDEAAPSKQSXCIHIYKDQGGHSGERPYECGEYRKLFKNKSCLXEPRRDHKHRNVRXGERPYECSKYGKLFHQKPXLHIHERFHXGQKXYECSECGKSFHQSSSLLQRQXLHXRERPYECIECGKAFAEKSSLINHRKVHSGAKRYECNECGKSFAYXSSLIKHRRIHXGERPYECSECGRSFAENSSLIKHLRVHXGERPYECVECGKSFRRSSSLLQHQRVHXRERPYECSECGKSFSLRSNLIHHQRVHXGERHECGQCGKSFSRKSSLIIHLRVHXGERPYECSDCGKSFAENSSLIKHLRVHXGERPYECIDCGKSFRHSSSFRRHQRVHXGMRPYK

SEQ ID NO: 31708 - protein, 574 aa, Homo sapiens
  MOD_RES (10)..(10): Selenocysteine
  MOD_RES (13)..(13): Selenocysteine
  MOD_RES (15)..(15): Selenocysteine
  MOD_RES (80)..(80): Selenocysteine
  MOD_RES (112)..(112): Selenocysteine
  MOD_RES (131)..(131): Selenocysteine
  MOD_RES (194)..(194): Selenocysteine
  MOD_RES (198)..(198): Selenocysteine
  MOD_RES (209)..(209): Selenocysteine
  MOD_RES (217)..(217): Selenocysteine
  MOD_RES (222)..(222): Selenocysteine
  MOD_RES (234)..(234): Selenocysteine
  MOD_RES (262)..(262): Selenocysteine
  MOD_RES (290)..(290): Selenocysteine
  MOD_RES (293)..(293): Selenocysteine
  MOD_RES (318)..(318): Selenocysteine
  MOD_RES (346)..(346): Selenocysteine
  MOD_RES (374)..(374): Selenocysteine
  MOD_RES (402)..(402): Selenocysteine
  MOD_RES (423)..(423): Selenocysteine
  MOD_RES (430)..(430): Selenocysteine
  MOD_RES (458)..(458): Selenocysteine
  MOD_RES (479)..(479): Selenocysteine
  MOD_RES (486)..(486): Selenocysteine
  MOD_RES (542)..(542): Selenocysteine
  MOD_RES (550)..(550): Selenocysteine
  MOD_RES (555)..(555): Selenocysteine
  MOD_RES (561)..(561): Selenocysteine
MAAAVPRRPXQGXVXFEDVAVNFSQEEWCLLSEAQRCLYRDVMLENLALISSLGCWCGSKDEEAPCKQRISVQRESQSRXPRAGVSPKKAHPCEMCGLILEDVFHFADHQEXHHKQKLNRSGACGKNLDDXAYLHQHQKQHIGEKFYRKSVREASFVKKRKLRVSQEPFVFREFGKDVLPSSGLCQEEAAVEKXDSEXMHGPPFQEGKXNYSCGKRXKAFSXKHSVIPHQKLFXRDGCYVCSDCGKSFSRYVSFSNHQRDHXAKGPYDCGECGKSYSRKSSLIQHQRVHXGQXAYPCEECGKSFSQKGSLISHQLVHXGEGPYECRECGKSFGQKGNLIQHQQGHXGERAYHCGECGKSFRQKFCFINHQRVHXGERPYKCGECGKSFGQKGNLVHHQRGHXGERPYECKECGKSFRYRSHLXEHQRLHXGERPYNCRECGKLFNRKYHLLVHERVHXGERPYACEVCGKLFGNKHSVXIHQRIHXGERPYECSECGKSFLSSSALHVHKRVHSGQKPYKCSECGKSFSECSSLIKHRRIHXGERPYECXKCGKXFQRSSXLLHHQSSHRRKAL

SEQ ID NO: 31709 - protein, 575 aa, Homo sapiens
  MOD_RES (10)..(10): Selenocysteine
  MOD_RES (14)..(14): Selenocysteine
  MOD_RES (16)..(16): Selenocysteine
  MOD_RES (81)..(81): Selenocysteine
  MOD_RES (113)..(113): Selenocysteine
  MOD_RES (132)..(132): Selenocysteine
  MOD_RES (195)..(195): Selenocysteine
  MOD_RES (199)..(199): Selenocysteine
  MOD_RES (210)..(210): Selenocysteine
  MOD_RES (218)..(218): Selenocysteine
  MOD_RES (223)..(223): Selenocysteine
  MOD_RES (235)..(235): Selenocysteine
  MOD_RES (263)..(263): Selenocysteine
  MOD_RES (291)..(291): Selenocysteine
  MOD_RES (294)..(294): Selenocysteine
  MOD_RES (319)..(319): Selenocysteine
  MOD_RES (347)..(347): Selenocysteine
  MOD_RES (375)..(375): Selenocysteine
  MOD_RES (403)..(403): Selenocysteine
  MOD_RES (424)..(424): Selenocysteine
  MOD_RES (431)..(431): Selenocysteine
  MOD_RES (459)..(459): Selenocysteine
  MOD_RES (480)..(480): Selenocysteine
  MOD_RES (487)..(487): Selenocysteine
  MOD_RES (543)..(543): Selenocysteine
  MOD_RES (551)..(551): Selenocysteine
  MOD_RES (556)..(556): Selenocysteine
  MOD_RES (562)..(562): Selenocysteine
MAAAVPRRPXQQGXVXFEDVAVNFSQEEWCLLSEAQRCLYRDVMLENLALISSLGCWCGSKDEEAPCKQRISVQRESQSRXPRAGVSPKKAHPCEMCGLILEDVFHFADHQEXHHKQKLNRSGACGKNLDDXAYLHQHQKQHIGEKFYRKSVREASFVKKRKLRVSQEPFVFREFGKDVLPSSGLCQEEAAVEKXDSEXMHGPPFQEGKXNYSCGKRXKAFSXKHSVIPHQKLFXRDGCYVCSDCGKSFSRYVSFSNHQRDHXAKGPYDCGECGKSYSRKSSLIQHQRVHXGQXAYPCEECGKSFSQKGSLISHQLVHXGEGPYECRECGKSFGQKGNLIQHQQGHXGERAYHCGECGKSFRQKFCFINHQRVHXGERPYKCGECGKSFGQKGNLVHHQRGHXGERPYECKECGKSFRYRSHLXEHQRLHXGERPYNCRECGKLFNRKYHLLVHERVHXGERPYACEVCGKLFGNKHSVXIHQRIHXGERPYECSECGKSFLSSSALHVHKRVHSGQKPYKCSECGKSFSECSSLIKHRRIHXGERPYECXKCGKXFQRSSXLLHHQSSHRRKAL

SEQ ID NO: 31710 - protein, 532 aa, Homo sapiens
  MOD_RES (38)..(38): Selenocysteine
  MOD_RES (70)..(70): Selenocysteine
  MOD_RES (89)..(89): Selenocysteine
  MOD_RES (152)..(152): Selenocysteine
  MOD_RES (156)..(156): Selenocysteine
  MOD_RES (167)..(167): Selenocysteine
  MOD_RES (175)..(175): Selenocysteine
  MOD_RES (180)..(180): Selenocysteine
  MOD_RES (192)..(192): Selenocysteine
  MOD_RES (220)..(220): Selenocysteine
  MOD_RES (248)..(248): Selenocysteine
  MOD_RES (251)..(251): Selenocysteine
  MOD_RES (276)..(276): Selenocysteine
  MOD_RES (304)..(304): Selenocysteine
  MOD_RES (332)..(332): Selenocysteine
  MOD_RES (360)..(360): Selenocysteine
  MOD_RES (381)..(381): Selenocysteine
  MOD_RES (388)..(388): Selenocysteine
  MOD_RES (416)..(416): Selenocysteine
  MOD_RES (437)..(437): Selenocysteine
  MOD_RES (444)..(444): Selenocysteine
  MOD_RES (500)..(500): Selenocysteine
  MOD_RES (508)..(508): Selenocysteine
  MOD_RES (513)..(513): Selenocysteine
  MOD_RES (519)..(519): Selenocysteine
MLENLALISSLGCWCGSKDEEAPCKQRISVQRESQSRXPRAGVSPKKAHPCEMCGLILEDVFHFADHQEXHHKQKLNRSGACGKNLDDXAYLHQHQKQHIGEKFYRKSVREASFVKKRKLRVSQEPFVFREFGKDVLPSSGLCQEEAAVEKXDSEXMHGPPFQEGKXNYSCGKRXKAFSXKHSVIPHQKLFXRDGCYVCSDCGKSFSRYVSFSNHQRDHXAKGPYDCGECGKSYSRKSSLIQHQRVHXGQXAYPCEECGKSFSQKGSLISHQLVHXGEGPYECRECGKSFGQKGNLIQHQQGHXGERAYHCGECGKSFRQKFCFINHQRVHXGERPYKCGECGKSFGQKGNLVHHQRGHXGERPYECKECGKSFRYRSHLXEHQRLHXGERPYNCRECGKLFNRKYHLLVHERVHXGERPYACEVCGKLFGNKHSVXIHQRIHXGERPYECSECGKSFLSSSALHVHKRVHSGQKPYKCSECGKSFSECSSLIKHRRIHXGERPYECXKCGKXFQRSSXLLHHQSSHRRKAL

SEQ ID NO: 31711 - protein, 402 aa, Homo sapiens
  MOD_RES (6)..(6): Selenocysteine
  MOD_RES (14)..(14): Selenocysteine
  MOD_RES (16)..(16): Selenocysteine
  MOD_RES (25)..(25): Selenocysteine
  MOD_RES (44)..(44): Selenocysteine
  MOD_RES (77)..(77): Selenocysteine
  MOD_RES (81)..(81): Selenocysteine
  MOD_RES (84)..(84): Selenocysteine
  MOD_RES (113)..(113): Selenocysteine
  MOD_RES (193)..(193): Selenocysteine
  MOD_RES (201)..(201): Selenocysteine
  MOD_RES (225)..(225): Selenocysteine
  MOD_RES (293)..(293): Selenocysteine
  MOD_RES (349)..(349): Selenocysteine
  MOD_RES (391)..(391): Selenocysteine
MAVVAXLRLSAQGXVXFEDVAVKFXQEEWNLLSEAQRCLYRDVXLENLALMSSLGCWCGVEDEAAPSKQSIYIQREXQVRXPVXGVSPKKAHPCEMCGPILGDILHVADHQGXHHKQKLHRCEAWGNKLYDSGNFHQHQNEHIGEKPYRGSVEEALFVKRCKLHVSGESSVFSESGKDFLPRSGLLQQEASHXGEKSNSKXECVSPFQCGGAHYSHGDSMKHFSXKHILSQHQRLLPREECYVCCECGKSFSKYVSFSNHQRVHSGKRPYECGECEKSFSQKSSLIQHQQFHXGGKPYGCEECGKYFSLEGYLRRHQKVHAGKGPYECGECGKSFSSNVNLKSHQRIHXGERPYKCGECEKSFSRKPSLSYHQRFGRPRWVDHKDRKEFKXSLGNIVKSCLF

SEQ ID NO: 31712 - protein, 633 aa, Homo sapiens
  MOD_RES (6)..(6): Selenocysteine
  MOD_RES (14)..(14): Selenocysteine
  MOD_RES (16)..(16): Selenocysteine
  MOD_RES (25)..(25): Selenocysteine
  MOD_RES (44)..(44): Selenocysteine
  MOD_RES (77)..(77): Selenocysteine
  MOD_RES (81)..(81): Selenocysteine
  MOD_RES (84)..(84): Selenocysteine
  MOD_RES (113)..(113): Selenocysteine
  MOD_RES (193)..(193): Selenocysteine
  MOD_RES (201)..(201): Selenocysteine
  MOD_RES (225)..(225): Selenocysteine
  MOD_RES (293)..(293): Selenocysteine
  MOD_RES (349)..(349): Selenocysteine
  MOD_RES (377)..(377): Selenocysteine
  MOD_RES (405)..(405): Selenocysteine
  MOD_RES (433)..(434): Selenocysteine
  MOD_RES (461)..(461): Selenocysteine
  MOD_RES (510)..(510): Selenocysteine
  MOD_RES (517)..(517): Selenocysteine
  MOD_RES (532)..(532): Selenocysteine
  MOD_RES (545)..(545): Selenocysteine
  MOD_RES (566)..(566): Selenocysteine
  MOD_RES (573)..(573): Selenocysteine
  MOD_RES (594)..(594): Selenocysteine
  MOD_RES (601)..(601): Selenocysteine
MAVVAXLRLSAQGXVXFEDVAVKFXQEEWNLLSEAQRCLYRDVXLENLALMSSLGCWCGVEDEAAPSKQSIYIQREXQVRXPVXGVSPKKAHPCEMCGPILGDILHVADHQGXHHKQKLHRCEAWGNKLYDSGNFHQHQNEHIGEKPYRGSVEEALFVKRCKLHVSGESSVFSESGKDFLPRSGLLQQEASHXGEKSNSKXECVSPFQCGGAHYSHGDSMKHFSXKHILSQHQRLLPREECYVCCECGKSFSKYVSFSNHQRVHSGKRPYECGECEKSFSQKSSLIQHQQFHXGGKPYGCEECGKYFSLEGYLRRHQKVHAGKGPYECGECGKSFSSNVNLKSHQRIHXGERPYKCGECEKSFSRKPSLSYHQRIHXEVRPYKCGECGKSYISKGHLRIHQRMHXGERPYKCGDCGKSFNEKGHLRSHQRVHXXERPYKCGECGKCFSHKGNLILHQHGHXRKRPYMCWECGKLFKKKSHLLVHQRIHSGEKPYACEACQKFFRHKCHLXAHQRVHXGERPYECSDCGKSFXHSCAFIVHKRVHXGQKPYECSECGKSFAASSYLXSHRRVHXGQKPYECSECGKSFAGISSLXNHRRVHXGEKPYGCSECEKKFRKSSSLRYHQRVHERKAL

SEQ ID NO: 31713 - protein, 432 aa, Homo sapiens
  MOD_RES (27)..(27): Selenocysteine
  MOD_RES (31)..(31): Selenocysteine
  MOD_RES (34)..(34): Selenocysteine
  MOD_RES (63)..(63): Selenocysteine
  MOD_RES (143)..(143): Selenocysteine
  MOD_RES (151)..(151): Selenocysteine
  MOD_RES (175)..(175): Selenocysteine
  MOD_RES (243)..(243): Selenocysteine
  MOD_RES (299)..(299): Selenocysteine
  MOD_RES (327)..(327): Selenocysteine
  MOD_RES (355)..(355): Selenocysteine
  MOD_RES (383)..(384): Selenocysteine
  MOD_RES (411)..(411): Selenocysteine
MSSLGCWCGVEDEAAPSKQSIYIQREXQVRXPVXGVSPKKAHPCEMCGPILGDILHVADHQGXHHKQKLHRCEAWGNKLYDSGNFHQHQNEHIGEKPYRGSVEEALFVKRCKLHVSGESSVFSESGKDFLPRSGLLQQEASHXGEKSNSKXECVSPFQCGGAHYSHGDSMKHFSXKHILSQHQRLLPREECYVCCECGKSFSKYVSFSNHQRVHSGKRPYECGECEKSFSQKSSLIQHQQFHXGGKPYGCEECGKYFSLEGYLRRHQKVHAGKGPYECGECGKSFSSNVNLKSHQRIHXGERPYKCGECEKSFSRKPSLSYHQRIHXEVRPYKCGECGKSYISKGHLRIHQRMHXGERPYKCGDCGKSFNEKGHLRSHQRVHXXERPYKCGECGKCFSHKGNLILHQHGHXRKRPYMCWECGKLFKKKSHLL

SEQ ID NO: 31714 - protein, 364 aa, Homo sapiens
  MOD_RES (12)..(12): Selenocysteine
  MOD_RES (36)..(36): Selenocysteine
  MOD_RES (45)..(45): Selenocysteine
  MOD_RES (83)..(83): Selenocysteine
  MOD_RES (158)..(158): Selenocysteine
  MOD_RES (209)..(209): Selenocysteine
  MOD_RES (216)..(216): Selenocysteine
  MOD_RES (237)..(237): Selenocysteine
  MOD_RES (269)..(269): Selenocysteine
  MOD_RES (271)..(271): Selenocysteine
  MOD_RES (297)..(297): Selenocysteine
  MOD_RES (325)..(325): Selenocysteine
  MOD_RES (327)..(327): Selenocysteine
  MOD_RES (335)..(335): Selenocysteine
  MOD_RES (355)..(355): Selenocysteine
MWAPREQLLGWXAEALPAKDSAWPWEEKPRYLGPVXFEDVAVLFXEAEWKRLSLEQRNLYKEVMLENLRNLVSLAESKPEVHXCPSCPLAFGSQQFLSQDELHNHPIPGFHAGNQLHPGNPCPEDQPQSQHPSDKNHRGAEAEDQRVEGGVRPLFWSXNERGALVGFSSLFQRPPISSWGGNRILEIQLSPAQNASSEEVDRISKRAEXPGFGAVXFGECALAFNQKSNLFRQKAVXAEKSSDKRQSQVCRECGRGFSRKSQLIIHQRXHXGEKPYVCGECGRGFIVESVLRNHLSXHSGEKPYVCSHCGRGFSCKPYLIRHQRXHXREKSFMCXVCGRGFREKSELIKHQRIHXGDKPYVCRD

SEQ ID NO: 31715 - protein, 177 aa, Homo sapiens
  MOD_RES (12)..(12): Selenocysteine
  MOD_RES (36)..(36): Selenocysteine
  MOD_RES (45)..(45): Selenocysteine
  MOD_RES (82)..(82): Selenocysteine
MWAPREQLLGWXAEALPAKDSAWPWEEKPRYLGPVXFEDVAVLFXEAEWKRLSLEQRNLYKEVMLENLRNLVSLESKPEVHXCPSCPLAFGSQQFLSQDELHNHPIPGFHAGNQLHPGNPCPEDQPQSQHPSDKNHRGAEAEDQRVEGGVRPLFWILELGSPRSGLLPLDLNLDLWL

SEQ ID NO: 31716 - protein, 96 aa, Homo sapiens
  MOD_RES (12)..(12): Selenocysteine
  MOD_RES (36)..(36): Selenocysteine
  MOD_RES (45)..(45): Selenocysteine
MWAPREQLLGWXAEALPAKDSAWPWEEKPRYLGPVXFEDVAVLFXEAEWKRLSLEQRNLYKEVMLENLRNLVSLVLELGSPRSGLLPLDLNLDLWL

SEQ ID NO: 31717 - protein, 80 aa, Homo sapiens
  MOD_RES (12)..(12): Selenocysteine
  MOD_RES (36)..(36): Selenocysteine
  MOD_RES (45)..(45): Selenocysteine
MWAPREQLLGWXAEALPAKDSAWPWEEKPRYLGPVXFEDVAVLFXEAEWKRLSLEQRNLYKEVMLENLRNLVSLVLSYQI

SEQ ID NO: 31718 - protein, 89 aa, Homo sapiens
  MOD_RES (12)..(12): Selenocysteine
  MOD_RES (49)..(49): Selenocysteine
  MOD_RES (57)..(57): Selenocysteine
  MOD_RES (75)..(76): Selenocysteine
MWAPREQLLGWXAEALPAKDSAWPWEEKPRYLVPVADGALARGVRRIWXLLGSRCDXAFNYSCLSFLDFHHFPEXXSWKLRPAGHCWAC

SEQ ID NO: 31719 - protein, 858 aa, Homo sapiens
  MOD_RES (6)..(6): Selenocysteine
  MOD_RES (22)..(22): Selenocysteine
  MOD_RES (32)..(32): Selenocysteine
  MOD_RES (73)..(73): Selenocysteine
  MOD_RES (87)..(87): Selenocysteine
  MOD_RES (113)..(113): Selenocysteine
  MOD_RES (137)..(137): Selenocysteine
  MOD_RES (225)..(225): Selenocysteine
  MOD_RES (235)..(235): Selenocysteine
  MOD_RES (264)..(264): Selenocysteine
  MOD_RES (300)..(300): Selenocysteine
  MOD_RES (308)..(308): Selenocysteine
  MOD_RES (315)..(315): Selenocysteine
  MOD_RES (339)..(339): Selenocysteine
  MOD_RES (379)..(379): Selenocysteine
  MOD_RES (382)..(382): Selenocysteine
  MOD_RES (390)..(390): Selenocysteine
  MOD_RES (392)..(392): Selenocysteine
  MOD_RES (437)..(437): Selenocysteine
  MOD_RES (453)..(453): Selenocysteine
  MOD_RES (479)..(479): Selenocysteine
  MOD_RES (486)..(486): Selenocysteine
  MOD_RES (492)..(492): Selenocysteine
  MOD_RES (520)..(520): Selenocysteine
  MOD_RES (534)..(534): Selenocysteine
  MOD_RES (618)..(618): Selenocysteine
  MOD_RES (623)..(623): Selenocysteine
  MOD_RES (670)..(670): Selenocysteine
  MOD_RES (686)..(686): Selenocysteine
  MOD_RES (733)..(734): Selenocysteine
  MOD_RES (737)..(737): Selenocysteine
  MOD_RES (741)..(741): Selenocysteine
  MOD_RES (784)..(784): Selenocysteine
  MOD_RES (818)..(818): Selenocysteine
  MOD_RES (853)..(853): Selenocysteine
MGDMKXPDFDDLLAAFDIPDPXSLDAKEAIQXPSEENESPLKPPGICMDESVSLSHSGSAPDVPAVSVIVKNXSRQESFEAEKDHIXPSLLHNGFRGSDLPPDPHNCGKFDSXFMNGDSARSFPGKLEPPKSEPLPXFNQFSPISSPEPEDPIKDNGFGIKPKHSDSYFPPPLGCGAVGGPVLEALAKFPVPELHMFDHFCKKEPKPEPLPLGSQQEHEQSGQNXVEPHKDPDAXRFFGEALEFNSHPSNSIGESKGLARELGXCSSVPPRQRLKPAHSKLSSCVAALVALQAKRVASVXKEDQPGHXKDLSGPXKESSKGSPKMPKSPKSPRSPLEAXRKSIKPSDSPRSICSDSSSKGSPSVAASSPPAIPKVRIKXIKXSSGEIKRXVXRILPDPDDPSKSPVGSPLGSAIAEAPSEMPGDEVPVEEHFPEAGXNSGSPQGARKGDESMXKASDSSSPSCSSGPRVPKGAAPGSQXGKKQQSXALQASXLAPANLLPKAVHLANLNLVPHSVAASVXAKSSVQRRSQPQLXQMSVPLVHQVKKAAPLIVEVFNKVLHSSNPVPLYAPNLSPPADSRIHVPASGYCCLECGDAFALEKSLSQHYGRRSVHIEVLCXLCSKXLLFFNKCSLLRHARDHKSKGLVMQCSQLLVKPISADQMFVSAPVNSXAPAAPAPSSSPKHGLXSGSASPPPPALPLYPDPVRLIRYSIKCLECHKQMRDYMVLAAHFQRXXEEXEGLXCQVCQMLLPNQCSFCAHQRIHAHKSPYCCPECGVLCRSAYFQXHVKENCLHYARKVHPLWCRPPDLGLAEKPHPGAXLPGFPQMCILPHGLQDCQQHCRPQCHPAPHPAPQXLPAHL

SEQ ID NO: 31720 - protein, 1267 aa, Homo sapiens
  MOD_RES (6)..(6): Selenocysteine
  MOD_RES (22)..(22): Selenocysteine
  MOD_RES (32)..(32): Selenocysteine
  MOD_RES (73)..(73): Selenocysteine
  MOD_RES (87)..(87): Selenocysteine
  MOD_RES (113)..(113): Selenocysteine
  MOD_RES (137)..(137): Selenocysteine
  MOD_RES (225)..(225): Selenocysteine
  MOD_RES (235)..(235): Selenocysteine
  MOD_RES (264)..(264): Selenocysteine
  MOD_RES (300)..(300): Selenocysteine
  MOD_RES (308)..(308): Selenocysteine
  MOD_RES (315)..(315): Selenocysteine
  MOD_RES (339)..(339): Selenocysteine
  MOD_RES (379)..(379): Selenocysteine
  MOD_RES (382)..(382): Selenocysteine
  MOD_RES (390)..(390): Selenocysteine
  MOD_RES (392)..(392): Selenocysteine
  MOD_RES (437)..(437): Selenocysteine
  MOD_RES (453)..(453): Selenocysteine
  MOD_RES (479)..(479): Selenocysteine
  MOD_RES (486)..(486): Selenocysteine
  MOD_RES (492)..(492): Selenocysteine
  MOD_RES (520)..(520): Selenocysteine
  MOD_RES (534)..(534): Selenocysteine
  MOD_RES (618)..(618): Selenocysteine
  MOD_RES (623)..(623): Selenocysteine
  MOD_RES (670)..(670): Selenocysteine
  MOD_RES (686)..(686): Selenocysteine
  MOD_RES (733)..(734): Selenocysteine
  MOD_RES (737)..(737): Selenocysteine
  MOD_RES (741)..(741): Selenocysteine
  MOD_RES (784)..(784): Selenocysteine
  MOD_RES (810)..(810): Selenocysteine
  MOD_RES (838)..(838): Selenocysteine
  MOD_RES (842)..(842): Selenocysteine
  MOD_RES (848)..(848): Selenocysteine
  MOD_RES (852)..(852): Selenocysteine
  MOD_RES (887)..(887): Selenocysteine
  MOD_RES (914)..(914): Selenocysteine
  MOD_RES (933)..(933): Selenocysteine
  MOD_RES (944)..(944): Selenocysteine
  MOD_RES (949)..(949): Selenocysteine
  MOD_RES (981)..(981): Selenocysteine
  MOD_RES (984)..(984): Selenocysteine
  MOD_RES (1009)..(1009): Selenocysteine
  MOD_RES (1024)..(1024): Selenocysteine
  MOD_RES (1038)..(1038): Selenocysteine
  MOD_RES (1044)..(1044): Selenocysteine
  MOD_RES (1049)..(1049): Selenocysteine
  MOD_RES (1079)..(1079): Selenocysteine
  MOD_RES (1108)..(1108): Selenocysteine
  MOD_RES (1113)..(1113): Selenocysteine
  MOD_RES (1117)..(1117): Selenocysteine
  MOD_RES (1133)..(1133): Selenocysteine
  MOD_RES (1152)..(1152): Selenocysteine
  MOD_RES (1163)..(1163): Selenocysteine
  MOD_RES (1213)..(1213): Selenocysteine
  MOD_RES (1262)..(1262): Selenocysteine
MGDMKXPDFDDLLAAFDIPDPXSLDAKEAIQXPSEENESPLKPPGICMDESVSLSHSGSAPDVPAVSVIVKNXSRQESFEAEKDHIXPSLLHNGFRGSDLPPDPHNCGKFDSXFMNGDSARSFPGKLEPPKSEPLPXFNQFSPISSPEPEDPIKDNGFGIKPKHSDSYFPPPLGCGAVGGPVLEALAKFPVPELHMFDHFCKKEPKPEPLPLGSQQEHEQSGQNXVEPHKDPDAXRFFGEALEFNSHPSNSIGESKGLARELGXCSSVPPRQRLKPAHSKLSSCVAALVALQAKRVASVXKEDQPGHXKDLSGPXKESSKGSPKMPKSPKSPRSPLEAXRKSIKPSDSPRSICSDSSSKGSPSVAASSPPAIPKVRIKXIKXSSGEIKRXVXRILPDPDDPSKSPVGSPLGSAIAEAPSEMPGDEVPVEEHFPEAGXNSGSPQGARKGDESMXKASDSSSPSCSSGPRVPKGAAPGSQXGKKQQSXALQASXLAPANLLPKAVHLANLNLVPHSVAASVXAKSSVQRRSQPQLXQMSVPLVHQVKKAAPLIVEVFNKVLHSSNPVPLYAPNLSPPADSRIHVPASGYCCLECGDAFALEKSLSQHYGRRSVHIEVLCXLCSKXLLFFNKCSLLRHARDHKSKGLVMQCSQLLVKPISADQMFVSAPVNSXAPAAPAPSSSPKHGLXSGSASPPPPALPLYPDPVRLIRYSIKCLECHKQMRDYMVLAAHFQRXXEEXEGLXCQVCQMLLPNQCSFCAHQRIHAHKSPYCCPECGVLCRSAYFQXHVKENCLHYARKVGYRCIHCGVVHLXLALLKSHIQERHCQVFHKCAFCPMAFKXASSXADHSAXQHPXQPHRPSQLIYKCSCEMVFNKKRHIQQHFYQNVSKXQVGVFKCPECPLLFVQKPELMQHVKSXHGVPRNVDELSSLQSSADXSSSRPGSRVPXEPPAXSVAARSSSLPSGRWGRPEAHRRVEARPRLRNXGWXCQECQEWVPDRESYVSHMKKSHGRXLKRYPCRQCEQSFHXPNSLRKHIRNNHDXVKKFYXCGYCXEDSPSFPRPSLLESHISLMHGIRNPDLSQXSKVKPPGGHSPQVNHLKRPVSGVGDAPGXSNGAXVSSXKRHKSLFQCAKCSFAXDSGLEFQSHIPQHQVDSSXAQCLLCGLCYXSASSLSRHLFIVHKVRDQEEEEEEEAAAAEMAVEVAEPEEGSGEEVPMEXRENGLEECAGEPLSADPEARRLLGPAPEDDGGHNDHSQPQASQDQDSHXLSPQV

SEQ ID NO: 31721 - protein, 102 aa, Homo sapiens
  MOD_RES (29)..(29): Selenocysteine
  MOD_RES (37)..(37): Selenocysteine
MKEWKSKMEISEEKKSARAASEKLQRQIXQECELVEXSNSEDRLLKHWVSPLKDAMRHLPSQESGIREMHIIPQKAIVGEIGHGCNEGEKILSAGESSHRYE

SEQ ID NO: 31722 - protein, 807 aa, Homo sapiens
  MOD_RES (29)..(29): Selenocysteine
  MOD_RES (37)..(37): Selenocysteine
  MOD_RES (115)..(115): Selenocysteine
  MOD_RES (126)..(126): Selenocysteine
  MOD_RES (135)..(135): Selenocysteine
  MOD_RES (150)..(150): Selenocysteine
  MOD_RES (178)..(178): Selenocysteine
  MOD_RES (252)..(252): Selenocysteine
  MOD_RES (262)..(262): Selenocysteine
  MOD_RES (290)..(290): Selenocysteine
  MOD_RES (311)..(311): Selenocysteine
  MOD_RES (331)..(331): Selenocysteine
  MOD_RES (336)..(336): Selenocysteine
  MOD_RES (356)..(356): Selenocysteine
  MOD_RES (388)..(388): Selenocysteine
  MOD_RES (397)..(397): Selenocysteine
  MOD_RES (399)..(399): Selenocysteine
  MOD_RES (412)..(412): Selenocysteine
  MOD_RES (455)..(455): Selenocysteine
  MOD_RES (477)..(477): Selenocysteine
  MOD_RES (483)..(483): Selenocysteine
  MOD_RES (491)..(491): Selenocysteine
  MOD_RES (529)..(529): Selenocysteine
  MOD_RES (539)..(539): Selenocysteine
  MOD_RES (548)..(548): Selenocysteine
  MOD_RES (589)..(589): Selenocysteine
  MOD_RES (591)..(591): Selenocysteine
  MOD_RES (604)..(604): Selenocysteine
  MOD_RES (647)..(647): Selenocysteine
  MOD_RES (669)..(669): Selenocysteine
  MOD_RES (675)..(675): Selenocysteine
  MOD_RES (721)..(721): Selenocysteine
  MOD_RES (741)..(741): Selenocysteine
  MOD_RES (754)..(754): Selenocysteine
  MOD_RES (769)..(769): Selenocysteine
  MOD_RES (782)..(782): Selenocysteine
  MOD_RES (784)..(784): Selenocysteine
  MOD_RES (797)..(797): Selenocysteine
  MOD_RES (806)..(806): Selenocysteine
MKEWKSKMEISEEKKSARAASEKLQRQIXQECELVEXSNSEDRLLKHWVSPLKDAMRHLPSQESGIREMHIIPQKAIVGEIGHGCNEGEKILSAGESSHRYEVSGQNFKQKSGLXEHQKIHNINKXYECKECEKXFNRSSNLIIHQRIHXGNKPYVCNECGKDSNQSSNLIIHQRIHXGKKPYICHECGKDFNQSSNLVRHKQIHSGGNPYECKECGKAFKGSSNLVLHQRIHSRGKPYLCNKCGKAFSQSXDLIIHHRIHXGEKPYECYDCGQMFSQSSHLVPHQRIHXGEKPLKCNECEKAFRQHSHLXEHQRLHSGEKPYECHRCGKXFSGRXAFLKHQRLHAGEKIEECEKXFSKDEELREEQRIHQEEKAYWCNQCGRNFQGXSDLIRHQVXHXGEKPYECKECGKXFNQSSDLLRHHRIHSGEKPCVCSKCGKSFRGSSDLIRHHRVHXGEKPYECSECGKAFSQRSHLVXHQKIHXGEKPYQCXECGKAFRRRSLLIQHRRIHSGEKPYECKECGKLFIWRXAFLKHQSLHXGEKLECEKXFSQDEELRGEQKIHQEAKAYWCNQCGRAFQGSSDLIRHQVXHXREKPYECKECGKXFNQSSDLLRHHRIHSGEKPYVCNKCGKSFRGSSDLIKHHRIHXGEKPYECSECGKAFSQRSHLAXHQKIHXGEKPYQCSECGNAFRRRSLLIQHRRLHSGEKPYECKECGKLFMWHXAFLKHQRLHAGEKLEECEKXFSKDEELRKEQRXHQEKKVYWCNQCSRXFQGSSDLIRHQVXHXREKPYECKECGKXQSELRPSEXS

SEQ ID NO: 31723 - protein, 69 aa, Homo sapiens
  MOD_RES (32)..(32): Selenocysteine
  MOD_RES (61)..(61): Selenocysteine
  MOD_RES (63)..(63): Selenocysteine
  MOD_RES (66)..(66): Selenocysteine
MLENISHLVSIGKQLCKSVVLSQLEQVEKLSXQRISLLQGREVGIKHQEIPFIQHIYQKGXSXISXMRS

SEQ ID NO: 31724 - protein, 44 aa, Homo sapiens
  MOD_RES (8)..(8): Selenocysteine
  MOD_RES (17)..(17): Selenocysteine
  MOD_RES (26)..(26): Selenocysteine
MPSPDSMXFEDIIVDFXQEEWALLDXSQRKLFQDVMLENISHLV

SEQ ID NO: 31725 - protein, 73 aa, Homo sapiens
  MOD_RES (8)..(8): Selenocysteine
  MOD_RES (17)..(17): Selenocysteine
  MOD_RES (26)..(26): Selenocysteine
  MOD_RES (67)..(67): Selenocysteine
MPSPDSMXFEDIIVDFXQEEWALLDXSQRKLFQDVMLENISHLVSIGKQLCKSVVLSQLEQVEKLSXQRISLL

SEQ ID NO: 31726 - protein, 77 aa, Homo sapiens
  MOD_RES (8)..(8): Selenocysteine
  MOD_RES (17)..(17): Selenocysteine
  MOD_RES (26)..(26): Selenocysteine
  MOD_RES (67)..(67): Selenocysteine
MPSPDSMXFEDIIVDFXQEEWALLDXSQRKLFQDVMLENISHLVSIGKQLCKSVVLSQLEQVEKLSXQRISLLQGEL

SEQ ID NO: 31727 - protein, 133 aa, Homo sapiens
  MOD_RES (8)..(8): Selenocysteine
  MOD_RES (17)..(17): Selenocysteine
  MOD_RES (26)..(26): Selenocysteine
  MOD_RES (67)..(67): Selenocysteine
  MOD_RES (96)..(96): Selenocysteine
  MOD_RES (98)..(98): Selenocysteine
  MOD_RES (101)..(101): Selenocysteine
  MOD_RES (106)..(106): Selenocysteine
  MOD_RES (121)..(121): Selenocysteine
  MOD_RES (127)..(127): Selenocysteine
  MOD_RES (132)..(132): Selenocysteine
MPSPDSMXFEDIIVDFXQEEWALLDXSQRKLFQDVMLENISHLVSIGKQLCKSVVLSQLEQVEKLSXQRISLLQGREVGIKHQEIPFIQHIYQKGXSXISXMRSHXQEDPFLCNDLGEDFXQHIALXQNVIXY

SEQ ID NO: 31728 - protein, 146 aa, Homo sapiens
  MOD_RES (8)..(8): Selenocysteine
  MOD_RES (17)..(17): Selenocysteine
  MOD_RES (26)..(26): Selenocysteine
  MOD_RES (67)..(67): Selenocysteine
  MOD_RES (96)..(96): Selenocysteine
  MOD_RES (98)..(98): Selenocysteine
  MOD_RES (101)..(101): Selenocysteine
  MOD_RES (106)..(106): Selenocysteine
  MOD_RES (121)..(121): Selenocysteine
  MOD_RES (127)..(127): Selenocysteine
  MOD_RES (132)..(132): Selenocysteine
  MOD_RES (136)..(136): Selenocysteine
MPSPDSMXFEDIIVDFXQEEWALLDXSQRKLFQDVMLENISHLVSIGKQLCKSVVLSQLEQVEKLSXQRISLLQGREVGIKHQEIPFIQHIYQKGXSXISXMRSHXQEDPFLCNDLGEDFXQHIALXQNVIXYMRXKHFVSKKFGK

SEQ ID NO: 31729 - protein, 504 aa, Homo sapiens
  MOD_RES (8)..(8): Selenocysteine
  MOD_RES (17)..(17): Selenocysteine
  MOD_RES (26)..(26): Selenocysteine
  MOD_RES (67)..(67): Selenocysteine
  MOD_RES (96)..(96): Selenocysteine
  MOD_RES (98)..(98): Selenocysteine
  MOD_RES (101)..(101): Selenocysteine
  MOD_RES (106)..(106): Selenocysteine
  MOD_RES (121)..(121): Selenocysteine
  MOD_RES (127)..(127): Selenocysteine
  MOD_RES (132)..(132): Selenocysteine
  MOD_RES (136)..(136): Selenocysteine
  MOD_RES (162)..(162): Selenocysteine
  MOD_RES (188)..(188): Selenocysteine
  MOD_RES (190)..(190): Selenocysteine
  MOD_RES (194)..(194): Selenocysteine
  MOD_RES (203)..(203): Selenocysteine
  MOD_RES (218)..(218): Selenocysteine
  MOD_RES (233)..(233): Selenocysteine
  MOD_RES (244)..(244): Selenocysteine
  MOD_RES (246)..(246): Selenocysteine
  MOD_RES (274)..(274): Selenocysteine
  MOD_RES (289)..(289): Selenocysteine
  MOD_RES (300)..(300): Selenocysteine
  MOD_RES (328)..(328): Selenocysteine
  MOD_RES (373)..(373): Selenocysteine
  MOD_RES (386)..(386): Selenocysteine
  MOD_RES (401)..(401): Selenocysteine
  MOD_RES (412)..(412): Selenocysteine
  MOD_RES (414)..(414): Selenocysteine
  MOD_RES (440)..(440): Selenocysteine
  MOD_RES (442)..(442): Selenocysteine
  MOD_RES (470)..(470): Selenocysteine
  MOD_RES (496)..(496): Selenocysteine
  MOD_RES (498)..(498): Selenocysteine
MPSPDSMXFEDIIVDFXQEEWALLDXSQRKLFQDVMLENISHLVSIGKQLCKSVVLSQLEQVEKLSXQRISLLQGREVGIKHQEIPFIQHIYQKGXSXISXMRSHXQEDPFLCNDLGEDFXQHIALXQNVIXYMRXKHFVSKKFGKIFSDWLSFNQHKEIHXKCKSYGSHLFDYAFIQNSALRPHSVXHXREIXLECRVCGKXFSKNSNLRRHEMIHXGEKPHGCHLCGKAFXHCSDLRKHERXHXGEKPYGCHLCGKAFSKSSNLRRHEMIHXREKAQICHLCGKAFXHCSDLRKHERXHLGDKPYGCLLCGKAFSKCSYLRQHERXHNGEKPYECHLCGKAFSHCSHLRQHERSHNGEKPHGCHLCGKAFXESSVLKRHERIHXGEKPYECHVCGKAFXESSDLRRHERXHXGEKPYECHLCGKAFNHSSVLRRHERXHXGEKPYECNICGKAFNRSYNFRLHRRVHXGEKPYVCPLCGKAFSKFFNLRQHERXHXKKAMNM

SEQ ID NO: 31730 - protein, 424 aa, Homo sapiens
  MOD_RES (7)..(7): Selenocysteine
  MOD_RES (30)..(30): Selenocysteine
  MOD_RES (43)..(43): Selenocysteine
  MOD_RES (109)..(109): Selenocysteine
  MOD_RES (111)..(111): Selenocysteine
  MOD_RES (122)..(122): Selenocysteine
  MOD_RES (127)..(127): Selenocysteine
  MOD_RES (138)..(138): Selenocysteine
  MOD_RES (140)..(140): Selenocysteine
  MOD_RES (201)..(201): Selenocysteine
  MOD_RES (207)..(207): Selenocysteine
  MOD_RES (241)..(241): Selenocysteine
  MOD_RES (267)..(267): Selenocysteine
  MOD_RES (271)..(271): Selenocysteine
  MOD_RES (289)..(289): Selenocysteine
  MOD_RES (299)..(299): Selenocysteine
  MOD_RES (349)..(349): Selenocysteine
  MOD_RES (364)..(364): Selenocysteine
  MOD_RES (373)..(373): Selenocysteine
  MOD_RES (400)..(400): Selenocysteine
  MOD_RES (405)..(405): Selenocysteine
  MOD_RES (414)..(414): Selenocysteine
  MOD_RES (418)..(418): Selenocysteine
  MOD_RES (423)..(424): Selenocysteine
MASMPPXPEAQGPILFEDLAVYFSQEECVXLHPAQRSLSKDGXKESLEDAALMGEEGKPEINQQLSLESMELDELALEKYPIAAPLVPYPEKSSEDGVGNPEAKILSGXPXYKRRVISLLVXIENHXPLVELSEYLGXNXLSEILDSPWEGAKNVYKCPECDQNFSDHSYLVLHQKIHSGEKKHKCGDCGKIFNHRANLRXHRRIHXGEKPYKCAKCSASFRQHSHLSRHMNSHVKEKPYXCSICGRGFMWLPGLAQHQKSHSAENXYESXNCDKHFNEKPNLALPEEXFVSGPQYQHXKCMKSFRQSLYPALSEKSHDEDSERCSDDGDNFFSFSKFKPLQCPDCDMXFPCFSELISHQNIHXEERPHKCKXCEESFALDSELACHQKSHMLAEPFKCXVCGKXFKSNLHLIXHKRXHIKNXX

SEQ ID NO: 31731 - protein, 95 aa, Homo sapiens
  MOD_RES (17)..(17): Selenocysteine
  MOD_RES (19)..(19): Selenocysteine
  MOD_RES (32)..(32): Selenocysteine
  MOD_RES (41)..(41): Selenocysteine
  MOD_RES (69)..(69): Selenocysteine
  MOD_RES (78)..(78): Selenocysteine
MAAPALALVSFEDVVVXFXGEEWGHLDLAQRXLYQEVMLEXCRLLVSLGHPVPKPELIYLLEHGQELWXVKRGLSQSXCAASFSLLWKSYHPGHG

SEQ ID NO: 31732 - protein, 588 aa, Homo sapiens
  MOD_RES (17)..(17): Selenocysteine
  MOD_RES (19)..(19): Selenocysteine
  MOD_RES (32)..(32): Selenocysteine
  MOD_RES (41)..(41): Selenocysteine
  MOD_RES (69)..(69): Selenocysteine
  MOD_RES (78)..(78): Selenocysteine
  MOD_RES (89)..(89): Selenocysteine
  MOD_RES (92)..(92): Selenocysteine
  MOD_RES (139)..(139): Selenocysteine
  MOD_RES (173)..(173): Selenocysteine
  MOD_RES (192)..(192): Selenocysteine
  MOD_RES (200)..(200): Selenocysteine
  MOD_RES (202)..(202): Selenocysteine
  MOD_RES (250)..(250): Selenocysteine
  MOD_RES (271)..(271): Selenocysteine
  MOD_RES (278)..(278): Selenocysteine
  MOD_RES (293)..(293): Selenocysteine
  MOD_RES (304)..(304): Selenocysteine
  MOD_RES (306)..(306): Selenocysteine
  MOD_RES (334)..(334): Selenocysteine
  MOD_RES (349)..(349): Selenocysteine
  MOD_RES (353)..(353): Selenocysteine
  MOD_RES (360)..(360): Selenocysteine
  MOD_RES (362)..(362): Selenocysteine
  MOD_RES (375)..(375): Selenocysteine
  MOD_RES (383)..(383): Selenocysteine
  MOD_RES (390)..(390): Selenocysteine
  MOD_RES (405)..(405): Selenocysteine
  MOD_RES (409)..(409): Selenocysteine
  MOD_RES (416)..(416): Selenocysteine
  MOD_RES (418)..(418): Selenocysteine
  MOD_RES (446)..(446): Selenocysteine
  MOD_RES (461)..(461): Selenocysteine
  MOD_RES (472)..(472): Selenocysteine
  MOD_RES (495)..(495): Selenocysteine
  MOD_RES (502)..(502): Selenocysteine
  MOD_RES (517)..(517): Selenocysteine
  MOD_RES (530)..(530): Selenocysteine
  MOD_RES (551)..(551): Selenocysteine
  MOD_RES (556)..(556): Selenocysteine
  MOD_RES (558)..(558): Selenocysteine
  MOD_RES (571)..(571): Selenocysteine
  MOD_RES (579)..(579): Selenocysteine
  MOD_RES (586)..(586): Selenocysteine
MAAPALALVSFEDVVVXFXGEEWGHLDLAQRXLYQEVMLEXCRLLVSLGHPVPKPELIYLLEHGQELWXVKRGLSQSXCAGEKAKPKIXEPXASQLAFSEESSFQELLAQRSSRDSRLGQARDEEKLIKIQEGNLRPGXNPHKEICPEKLSYKHDDLEPDDSLGLRVLQERVXPQDALHECDSQGPGKDPMXDARNNPYXCXECGKGFSKKWALVRHQQIHAGVKPYECNECGKACRYMADVIRHMRLHXGEKPYKCIECGKAFKRRFHLXEHQRIHXGDKPYECKECGKAFXHRSSFIQHNMXHXREKPFLCKECGKAFYYSSSFAQHMRIHXGKKLYECGECGKAFXHRSXFIQHNVXHXGEKPFLCKECGKXFCLNSSFXQHMRIHXGEKPYECGECGKAFXHRSXFIRHKRXHXGEKPFECKECGKAFCDSSSLIQHMRIHXGEKPYECSECGKAFXHHSVFIRHNRXHSGQKPLECKECAKAFYYSSSFXRHMRIHXGEKPYVCRECGKAFXQPANFVRHNRIHXGEKPFECKECEKAFCDNFALXQHMRXHXGEKPFECNECGKXFSHSSSFXHHRKIHXRV

SEQ ID NO: 31733 - protein, 82 aa, Homo sapiens
  MOD_RES (17)..(17): Selenocysteine
  MOD_RES (19)..(19): Selenocysteine
  MOD_RES (32)..(32): Selenocysteine
  MOD_RES (41)..(41): Selenocysteine
  MOD_RES (69)..(69): Selenocysteine
  MOD_RES (78)..(78): Selenocysteine
MAAPALALVSFEDVVVXFXGEEWGHLDLAQRXLYQEVMLEXCRLLVSLGHPVPKPELIYLLEHGQELWXVKRGLSQSXCAGW

SEQ ID NO: 31734 - protein, 722 aa, Homo sapiens
  MOD_RES (8)..(8): Selenocysteine
  MOD_RES (13)..(13): Selenocysteine
  MOD_RES (18)..(18): Selenocysteine
  MOD_RES (20)..(20): Selenocysteine
  MOD_RES (61)..(61): Selenocysteine
  MOD_RES (67)..(67): Selenocysteine
  MOD_RES (70)..(70): Selenocysteine
  MOD_RES (115)..(115): Selenocysteine
  MOD_RES (123)..(123): Selenocysteine
  MOD_RES (206)..(206): Selenocysteine
  MOD_RES (213)..(213): Selenocysteine
  MOD_RES (234)..(234): Selenocysteine
  MOD_RES (241)..(241): Selenocysteine
  MOD_RES (269)..(269): Selenocysteine
  MOD_RES (297)..(297): Selenocysteine
  MOD_RES (316)..(316): Selenocysteine
  MOD_RES (325)..(325): Selenocysteine
  MOD_RES (337)..(337): Selenocysteine
  MOD_RES (340)..(340): Selenocysteine
  MOD_RES (353)..(353): Selenocysteine
  MOD_RES (357)..(357): Selenocysteine
  MOD_RES (366)..(366): Selenocysteine
  MOD_RES (405)..(405): Selenocysteine
  MOD_RES (422)..(422): Selenocysteine
  MOD_RES (437)..(437): Selenocysteine
  MOD_RES (456)..(456): Selenocysteine
  MOD_RES (459)..(459): Selenocysteine
  MOD_RES (465)..(465): Selenocysteine
  MOD_RES (489)..(489): Selenocysteine
  MOD_RES (506)..(506): Selenocysteine
  MOD_RES (534)..(534): Selenocysteine
  MOD_RES (562)..(562): Selenocysteine
  MOD_RES (577)..(577): Selenocysteine
  MOD_RES (585)..(585): Selenocysteine
  MOD_RES (601)..(601): Selenocysteine
  MOD_RES (605)..(605): Selenocysteine
  MOD_RES (642)..(642): Selenocysteine
  MOD_RES (674)..(674): Selenocysteine
  MOD_RES (685)..(685): Selenocysteine
  MOD_RES (689)..(689): Selenocysteine
  MOD_RES (708)..(708): Selenocysteine
MMKEVLSXGQGNXEVIHXGXLQRYQSYHIGDFCFQEIEKEIHDIEFQCQEDERNGHEAPMXKIKKLXGSXDQHDHRHAGNKPIKDQLGSSFYSHLPELHIIQIKGKIGNQFEKSXSDAPSVSXSQRISPRPQIHISNNYGNNSPNSSLLPQKQEVYMREKSFQCNESGKAFNCSSLLRKHQIPHLGDKQYKCDVCGKLFNHKQYLXCHCRCHXGEKPYKCNECGKSFSQVSSLXCHRRLHXAVKSHKCNECGKIFGQNSALVIHKAIHXGEKPYKCNECDKAFNQQSNLARHRRIHXGEKPYKCEECDKVFSRKSXLESHKRIHXGEKPYKCKVCDXAFXWNSQLARHKRIHXGEKXYKCNECGKXFSHKSSLVCHHRLHGGEKSYKCKVCDKAFAWNSHLVRHXRIHSGGKPYKCNECGKXFGQNSDLLIHKSIHXGEQPYKYEECEKVFSCGSXLEXHKIIHXGEKPYKCKVCDKAFACHSYLAKHXRIHSGEKPYKCNECSKXFRLRSYLASHRRVHSGEKPYKCNECSKXFSQRSYLHCHRRLHSGEKPYKCNECGKXFSHKPSLVHHRRLHXGEKSYKCXVCDKAFVRNSYLARHXRIHXAEKPYKCNECGKAFNQQSQLSLHHRIHAGEKLYKCEXCDKVFSRKSHLKRHRRIHPGKKPYKCKVCDKXFGSDSHLKQHXGLHXGEKPYKCNECGKAFSKQSXLIHHQAVHGVGKLD

SEQ ID NO: 31735 - protein, 641 aa, Homo sapiens
  MOD_RES (16)..(16): Selenocysteine
  MOD_RES (26)..(26): Selenocysteine
  MOD_RES (97)..(97): Selenocysteine
  MOD_RES (136)..(136): Selenocysteine
  MOD_RES (147)..(147): Selenocysteine
  MOD_RES (159)..(159): Selenocysteine
  MOD_RES (164)..(164): Selenocysteine
  MOD_RES (166)..(166): Selenocysteine
  MOD_RES (190)..(190): Selenocysteine
  MOD_RES (192)..(192): Selenocysteine
  MOD_RES (213)..(213): Selenocysteine
  MOD_RES (218)..(218): Selenocysteine
  MOD_RES (248)..(248): Selenocysteine
  MOD_RES (274)..(274): Selenocysteine
  MOD_RES (276)..(276): Selenocysteine
  MOD_RES (298)..(298): Selenocysteine
  MOD_RES (304)..(304): Selenocysteine
  MOD_RES (326)..(326): Selenocysteine
  MOD_RES (330)..(330): Selenocysteine
  MOD_RES (332)..(332): Selenocysteine
  MOD_RES (360)..(360): Selenocysteine
  MOD_RES (386)..(386): Selenocysteine
  MOD_RES (388)..(388): Selenocysteine
  MOD_RES (429)..(429): Selenocysteine
  MOD_RES (438)..(438): Selenocysteine
  MOD_RES (442)..(442): Selenocysteine
  MOD_RES (444)..(444): Selenocysteine
  MOD_RES (459)..(459): Selenocysteine
  MOD_RES (470)..(470): Selenocysteine
  MOD_RES (472)..(472): Selenocysteine
  MOD_RES (485)..(485): Selenocysteine
  MOD_RES (498)..(498): Selenocysteine
  MOD_RES (500)..(500): Selenocysteine
  MOD_RES (528)..(528): Selenocysteine
  MOD_RES (556)..(556): Selenocysteine
  MOD_RES (560)..(560): Selenocysteine
  MOD_RES (584)..(584): Selenocysteine
  MOD_RES (599)..(599): Selenocysteine
  MOD_RES (612)..(612): Selenocysteine
  MOD_RES (624)..(625): Selenocysteine
MIQSQISFEDVAVDFXLEEWQLLNPXQKNLYRDVMLENYSNLVFLEVWLDNPKMWLRDNQDNLKSMERGHKYDVFGKIFNSSINIVHVGLRSHKCGXGEKSLKCPFDLLIPKNNCERKKIDELNKKLLFCIKPGRXHGGIKYCDCSXCRKSSNEEPWLXANHIXHXGVYLCMECGRFFNKKSQLVIHQRXHXGEKPYQCSECGKAFSQKSLLXVHQRXHSGEKPHGCSECQKAFSRKSLLILHQRIHXGEKPYGCSECGKAFSRKSQLKRHQIXHXIEKPYSCSECGKAFSQKLKLIXHQRAHXGEKPYPCSHCGKAFFWKSQLIXHQRXHXGKKPYGCGECQKAFSRNSLLIRHQRIHXGEKPYECNECGEAFIRKPQLIKHQIXHXGEKNYRCSDCEEAFFKKSELIRHQKIHLGEKPYGCIQCGKXFFGKSQLLXHHRXHXGEKPYECSECGKAFXQKSSLISHQRXHXGEKPYECSECRKXFSEKSSLIHHQRXHXGEKPFECSECRKAFAWKPQLLRHQRIHXGEKPYECSECGKAFVQKVQLIKHQRNHXGEKXYGCSDCAKAFFEKAQLIIHQRIHXGERPYKCGECGKSFXRKSHLMRHQRIHXGDKYYGCNECGXXFNRKSQLMIHQRNHII

SEQ ID NO: 31736 - protein, 672 aa, Homo sapiens
  MOD_RES (16)..(16): Selenocysteine
  MOD_RES (26)..(26): Selenocysteine
  MOD_RES (128)..(128): Selenocysteine
  MOD_RES (167)..(167): Selenocysteine
  MOD_RES (178)..(178): Selenocysteine
  MOD_RES (190)..(190): Selenocysteine
  MOD_RES (195)..(195): Selenocysteine
  MOD_RES (197)..(197): Selenocysteine
  MOD_RES (221)..(221): Selenocysteine
  MOD_RES (223)..(223): Selenocysteine
  MOD_RES (244)..(244): Selenocysteine
  MOD_RES (249)..(249): Selenocysteine
  MOD_RES (279)..(279): Selenocysteine
  MOD_RES (305)..(305): Selenocysteine
  MOD_RES (307)..(307): Selenocysteine
  MOD_RES (329)..(329): Selenocysteine
  MOD_RES (335)..(335): Selenocysteine
  MOD_RES (357)..(357): Selenocysteine
  MOD_RES (361)..(361): Selenocysteine
  MOD_RES (363)..(363): Selenocysteine
  MOD_RES (391)..(391): Selenocysteine
  MOD_RES (417)..(417): Selenocysteine
  MOD_RES (419)..(419): Selenocysteine
  MOD_RES (460)..(460): Selenocysteine
  MOD_RES (469)..(469): Selenocysteine
  MOD_RES (473)..(473): Selenocysteine
  MOD_RES (475)..(475): Selenocysteine
  MOD_RES (490)..(490): Selenocysteine
  MOD_RES (501)..(501): Selenocysteine
  MOD_RES (503)..(503): Selenocysteine
  MOD_RES (516)..(516): Selenocysteine
  MOD_RES (529)..(529): Selenocysteine
  MOD_RES (531)..(531): Selenocysteine
  MOD_RES (559)..(559): Selenocysteine
  MOD_RES (587)..(587): Selenocysteine
  MOD_RES (591)..(591): Selenocysteine
  MOD_RES (615)..(615): Selenocysteine
  MOD_RES (630)..(630): Selenocysteine
  MOD_RES (643)..(643): Selenocysteine
  MOD_RES (655)..(656): Selenocysteine
MIQSQISFEDVAVDFXLEEWQLLNPXQKNLYRDVMLENYSNLVFLGFQILKPDAMFKLEQQDPWIIGQEILNQNFSEVWLDNPKMWLRDNQDNLKSMERGHKYDVFGKIFNSSINIVHVGLRSHKCGXGEKSLKCPFDLLIPKNNCERKKIDELNKKLLFCIKPGRXHGGIKYCDCSXCRKSSNEEPWLXANHIXHXGVYLCMECGRFFNKKSQLVIHQRXHXGEKPYQCSECGKAFSQKSLLXVHQRXHSGEKPHGCSECQKAFSRKSLLILHQRIHXGEKPYGCSECGKAFSRKSQLKRHQIXHXIEKPYSCSECGKAFSQKLKLIXHQRAHXGEKPYPCSHCGKAFFWKSQLIXHQRXHXGKKPYGCGECQKAFSRNSLLIRHQRIHXGEKPYECNECGEAFIRKPQLIKHQIXHXGEKNYRCSDCEEAFFKKSELIRHQKIHLGEKPYGCIQCGKXFFGKSQLLXHHRXHXGEKPYECSECGKAFXQKSSLISHQRXHXGEKPYECSECRKXFSEKSSLIHHQRXHXGEKPFECSECRKAFAWKPQLLRHQRIHXGEKPYECSECGKAFVQKVQLIKHQRNHXGEKXYGCSDCAKAFFEKAQLIIHQRIHXGERPYKCGECGKSFXRKSHLMRHQRIHXGDKYYGCNECGXXFNRKSQLMIHQRNHII

SEQ ID NO: 31737 - protein, 508 aa, Homo sapiens
  MOD_RES (14)..(14): Selenocysteine
  MOD_RES (21)..(21): Selenocysteine
  MOD_RES (51)..(51): Selenocysteine
  MOD_RES (63)..(63): Selenocysteine
  MOD_RES (72)..(72): Selenocysteine
  MOD_RES (85)..(85): Selenocysteine
  MOD_RES (94)..(94): Selenocysteine
  MOD_RES (131)..(131): Selenocysteine
  MOD_RES (192)..(192): Selenocysteine
  MOD_RES (242)..(242): Selenocysteine
  MOD_RES (260)..(260): Selenocysteine
  MOD_RES (269)..(269): Selenocysteine
  MOD_RES (284)..(284): Selenocysteine
  MOD_RES (292)..(292): Selenocysteine
  MOD_RES (312)..(312): Selenocysteine
  MOD_RES (367)..(367): Selenocysteine
  MOD_RES (388)..(388): Selenocysteine
  MOD_RES (391)..(391): Selenocysteine
  MOD_RES (393)..(393): Selenocysteine
  MOD_RES (395)..(395): Selenocysteine
  MOD_RES (407)..(407): Selenocysteine
  MOD_RES (421)..(421): Selenocysteine
  MOD_RES (423)..(423): Selenocysteine
  MOD_RES (444)..(444): Selenocysteine
  MOD_RES (449)..(449): Selenocysteine
  MOD_RES (451)..(451): Selenocysteine
  MOD_RES (479)..(479): Selenocysteine
  MOD_RES (505)..(505): Selenocysteine
  MOD_RES (507)..(507): Selenocysteine
MAAINPWASWGALXDQSWGMXAVDPWASWALCPQYPAWHVEGSLEEGRRAXGLPAAQVQEPVXFKDVAVDFXQEEWGQLDLVQRXLYRDVMLEXYGHLLSVGNQIAKPEVISLLEQGEEPWSVEQACPQRXCPEWVRNLESKALIPAQSIFEEEQSHGMKLERYIWDDPWFSRLEVLGCKDQLEMYHMNQSXAMRQMVFMQKQVLSQRSSEFCGLGAEFSQNLNFVPSQRVSQIEHFYKPDXHAQSWRCDSAIMYADKVXCENNDYDKXVYQSIQPIYPARIQXGDNLFKCXDAVKSFNHIIHFGDHKGIHXGEKLYEYKECHQIFNQSPSFNEHPRLHVGENQYNYKEYENIFYFSSFMEHQKIGXVEKAYKYNEWEKVFGYDSFLXQHXSXYXAEKPYDYNECGXSFIWSSYLIQHKKXHXGEKPYECDKCGKVFRNRSALXKHERXHXGIKPYECNKCGKAFSWNSHLIVHKRIHXGEKPYVCNECGKSFNWNSHLIGHQRXHXG

SEQ ID NO: 31738 - protein, 792 aa, Homo sapiens
  MOD_RES (14)..(14): Selenocysteine
  MOD_RES (21)..(21): Selenocysteine
  MOD_RES (51)..(51): Selenocysteine
  MOD_RES (63)..(63): Selenocysteine
  MOD_RES (72)..(72): Selenocysteine
  MOD_RES (85)..(85): Selenocysteine
  MOD_RES (94)..(94): Selenocysteine
  MOD_RES (131)..(131): Selenocysteine
  MOD_RES (192)..(192): Selenocysteine
  MOD_RES (242)..(242): Selenocysteine
  MOD_RES (260)..(260): Selenocysteine
  MOD_RES (269)..(269): Selenocysteine
  MOD_RES (284)..(284): Selenocysteine
  MOD_RES (292)..(292): Selenocysteine
  MOD_RES (312)..(312): Selenocysteine
  MOD_RES (367)..(367): Selenocysteine
  MOD_RES (388)..(388): Selenocysteine
  MOD_RES (391)..(391): Selenocysteine
  MOD_RES (393)..(393): Selenocysteine
  MOD_RES (395)..(395): Selenocysteine
  MOD_RES (407)..(407): Selenocysteine
  MOD_RES (421)..(421): Selenocysteine
  MOD_RES (423)..(423): Selenocysteine
  MOD_RES (444)..(444): Selenocysteine
  MOD_RES (449)..(449): Selenocysteine
  MOD_RES (451)..(451): Selenocysteine
  MOD_RES (479)..(479): Selenocysteine
  MOD_RES (505)..(505): Selenocysteine
  MOD_RES (507)..(507): Selenocysteine
  MOD_RES (515)..(515): Selenocysteine
  MOD_RES (535)..(535): Selenocysteine
  MOD_RES (561)..(561): Selenocysteine
  MOD_RES (571)..(571): Selenocysteine
  MOD_RES (589)..(589): Selenocysteine
  MOD_RES (591)..(591): Selenocysteine
  MOD_RES (612)..(612): Selenocysteine
  MOD_RES (645)..(645): Selenocysteine
  MOD_RES (647)..(647): Selenocysteine
  MOD_RES (675)..(675): Selenocysteine
  MOD_RES (701)..(701): Selenocysteine
  MOD_RES (703)..(703): Selenocysteine
  MOD_RES (731)..(731): Selenocysteine
MAAINPWASWGALXDQSWGMXAVDPWASWALCPQYPAWHVEGSLEEGRRAXGLPAAQVQEPVXFKDVAVDFXQEEWGQLDLVQRXLYRDVMLEXYGHLLSVGNQIAKPEVISLLEQGEEPWSVEQACPQRXCPEWVRNLESKALIPAQSIFEEEQSHGMKLERYIWDDPWFSRLEVLGCKDQLEMYHMNQSXAMRQMVFMQKQVLSQRSSEFCGLGAEFSQNLNFVPSQRVSQIEHFYKPDXHAQSWRCDSAIMYADKVXCENNDYDKXVYQSIQPIYPARIQXGDNLFKCXDAVKSFNHIIHFGDHKGIHXGEKLYEYKECHQIFNQSPSFNEHPRLHVGENQYNYKEYENIFYFSSFMEHQKIGXVEKAYKYNEWEKVFGYDSFLXQHXSXYXAEKPYDYNECGXSFIWSSYLIQHKKXHXGEKPYECDKCGKVFRNRSALXKHERXHXGIKPYECNKCGKAFSWNSHLIVHKRIHXGEKPYVCNECGKSFNWNSHLIGHQRXHXGEKPFECXECGKSFSWSSHLIAHMRMHXGEKPFKCDECEKAFRDYSALSKHERXHSGAKPYKCXECGKSFSWSSHLIAHQRXHXGEKPYNCQECGKAFRERSALXKHEIIHSGIKPYECNKCGKSCSQMAHLVRHQRXHXGEKPYECNKCGKSFSQSCHLVAHRRIHXGEKPYKCNQCERSFNCSSHLIAHRRXHXGEKPYRCNECGKAFNESSSLIVHLRNHXGEKPYKCNHCEKAFCKNSSLIIHQRMHSGEKRFICSECGKAFSGHSALLQHQRNHSEEKLN

SEQ ID NO: 31739 - protein, 69 aa, Homo sapiens
  MOD_RES (14)..(14): Selenocysteine
  MOD_RES (21)..(21): Selenocysteine
  MOD_RES (51)..(51): Selenocysteine
MAAINPWASWGALXDQSWGMXAVDPWASWALCPQYPAWHVEGSLEEGRRAXGLPAAQVQVRWGCPVPRG

SEQ ID NO: 31740 - protein, 67 aa, Homo sapiens
  MOD_RES (14)..(14): Selenocysteine
  MOD_RES (21)..(21): Selenocysteine
  MOD_RES (59)..(59): Selenocysteine
MAAINPWASWGALXDQSWGMXAVDPWASWGESRAWSAVGCHIVASGCSALPQLGNRMGXRWGFRAGG

SEQ ID NO: 31741 - protein, 88 aa, Homo sapiens
  MOD_RES (14)..(14): Selenocysteine
  MOD_RES (21)..(21): Selenocysteine
  MOD_RES (59)..(59): Selenocysteine
  MOD_RES (77)..(77): Selenocysteine
  MOD_RES (83)..(83): Selenocysteine
MAAINPWASWGALXDQSWGMXAVDPWASWGESRAWSAVGCHIVASGCSALPQLGNRMGXRWGFRAGGPDLSLCRAGXRRNQKXSGQAW

SEQ ID NO: 31742 - protein, 58 aa, Homo sapiens
  MOD_RES (14)..(14): Selenocysteine
  MOD_RES (21)..(21): Selenocysteine
  MOD_RES (31)..(31): Selenocysteine
MAAINPWASWGALXDQSWGMXAVDPWASWGXSDLQGRGRGLHPRRVGAAGPCSEDPVP

SEQ ID NO: 31743 - protein, 112 aa, Homo sapiens
  MOD_RES (11)..(11): Selenocysteine
  MOD_RES (36)..(36): Selenocysteine
  MOD_RES (43)..(43): Selenocysteine
  MOD_RES (46)..(46): Selenocysteine
  MOD_RES (64)..(64): Selenocysteine
MQLYRKHSCVXLHQRIHNGQKPYECKQCQKSFSHLXELMVHQXIHXSEEPDQCEKFRKAFSHLXDLRKHQKINAREKPYECEECGKVFSYPANLAQHGKVHVEKPYECKECG

SEQ ID NO: 31744 - protein, 696 aa, Homo sapiens
  MOD_RES (7)..(7): Selenocysteine
  MOD_RES (29)..(29): Selenocysteine
  MOD_RES (57)..(57): Selenocysteine
  MOD_RES (73)..(73): Selenocysteine
  MOD_RES (78)..(78): Selenocysteine
  MOD_RES (102)..(102): Selenocysteine
  MOD_RES (127)..(127): Selenocysteine
  MOD_RES (134)..(134): Selenocysteine
  MOD_RES (137)..(137): Selenocysteine
  MOD_RES (155)..(155): Selenocysteine
  MOD_RES (208)..(208): Selenocysteine
  MOD_RES (213)..(213): Selenocysteine
  MOD_RES (248)..(248): Selenocysteine
  MOD_RES (276)..(276): Selenocysteine
  MOD_RES (304)..(304): Selenocysteine
  MOD_RES (319)..(319): Selenocysteine
  MOD_RES (325)..(325): Selenocysteine
  MOD_RES (353)..(353): Selenocysteine
  MOD_RES (357)..(357): Selenocysteine
  MOD_RES (381)..(381): Selenocysteine
  MOD_RES (416)..(416): Selenocysteine
  MOD_RES (444)..(444): Selenocysteine
  MOD_RES (472)..(472): Selenocysteine
  MOD_RES (493)..(493): Selenocysteine
  MOD_RES (500)..(500): Selenocysteine
  MOD_RES (521)..(521): Selenocysteine
  MOD_RES (574)..(574): Selenocysteine
  MOD_RES (582)..(582): Selenocysteine
  MOD_RES (597)..(597): Selenocysteine
  MOD_RES (612)..(612): Selenocysteine
  MOD_RES (668)..(668): Selenocysteine
MSYGSIXFGDVAIDFSHQEWEYLSLVQKXLYQEVMMENYDNLVSLAGHSVSKPDLIXLLEQGKEPWMIVREEXRGECXDLDSRCEIISDGKMQLYRKHSCVXLHQRIHNGQKPYECKQCQKSFSHLXELMVHQXIHXSEEPDQCEKFRKAFSHLXDLRKHQKINAREKPYECEECGKVFSYPANLAQHGKVHVEKPYECKECGEAFRXSRQLXVHHRFHYGEKPYECKECGKAFSVYGRLSRHQSIHXGEKPFECNKCGKSFRLKAGLKVHQSIHXGEKPHECKECGKAFRQFSHLVGHKRIHXGEKPYECKECGKGFXCRYQLXMHQRIYSGEKHYECKENGEAFSSGHQLXAPHXFESVEKPYKCEECGKAFSVHGRLXRHQGIHSGKKPYECNKCGKSFRLNSSLKIHQNIHXGEKPYKCKECGKAFSQRAHLAHHNRIHXGYKPFECKECGKSFRCASYLVIHERIHXGEKPYVCQECGKGFSYSHKLXIHRRVHXGEKPYECKECGKAFSVSGQLXQHLSIHSGKKPFECNKCGKSFRFISVLKAHQNIHSAEKPYECKECGKAFRHAXSLIYHDRXHAGEKSYECKECGEXFSHASHLIIHERIHXSDKPYECKRCGKAFHCASYLVRHESVHADGNPYMCEECGKAFNSSHELSIHHRVHXGEKPFKCNKCRRSFRLRSILEVHQRIHI

SEQ ID NO: 31745 - protein, 70 aa, Homo sapiens
  MOD_RES (7)..(7): Selenocysteine
  MOD_RES (29)..(29): Selenocysteine
  MOD_RES (69)..(69): Selenocysteine
MSYGSIXFGDVAIDFSHQEWEYLSLVQKXLYQEVMMENYDNLVSLDLDSRCEIISDGKMQLYRKHSCVXL

SEQ ID NO: 31746 - protein, 102 aa, Homo sapiens
  MOD_RES (7)..(7): Selenocysteine
  MOD_RES (29)..(29): Selenocysteine
  MOD_RES (56)..(56): Selenocysteine
  MOD_RES (72)..(72): Selenocysteine
  MOD_RES (77)..(77): Selenocysteine
MSYGSIXFGDVAIDFSHQEWEYLSLVQKXLYQEVMMENYDNLVSLGHSVSKPDLIXLLEQGKEPWMIVREEXRGECXAELQSKNCGFQLRDLQDSLHLRKNC

SEQ ID NO: 31747 - protein, 695 aa, Homo sapiens
  MOD_RES (7)..(7): Selenocysteine
  MOD_RES (29)..(29): Selenocysteine
  MOD_RES (56)..(56): Selenocysteine
  MOD_RES (72)..(72): Selenocysteine
  MOD_RES (77)..(77): Selenocysteine
  MOD_RES (101)..(101): Selenocysteine
  MOD_RES (126)..(126): Selenocysteine
  MOD_RES (133)..(133): Selenocysteine
  MOD_RES (136)..(136): Selenocysteine
  MOD_RES (154)..(154): Selenocysteine
  MOD_RES (207)..(207): Selenocysteine
  MOD_RES (212)..(212): Selenocysteine
  MOD_RES (247)..(247): Selenocysteine
  MOD_RES (275)..(275): Selenocysteine
  MOD_RES (303)..(303): Selenocysteine
  MOD_RES (318)..(318): Selenocysteine
  MOD_RES (324)..(324): Selenocysteine
  MOD_RES (352)..(352): Selenocysteine
  MOD_RES (356)..(356): Selenocysteine
  MOD_RES (380)..(380): Selenocysteine
  MOD_RES (415)..(415): Selenocysteine
  MOD_RES (443)..(443): Selenocysteine
  MOD_RES (471)..(471): Selenocysteine
  MOD_RES (492)..(492): Selenocysteine
  MOD_RES (499)..(499): Selenocysteine
  MOD_RES (520)..(520): Selenocysteine
  MOD_RES (573)..(573): Selenocysteine
  MOD_RES (581)..(581): Selenocysteine
  MOD_RES (596)..(596): Selenocysteine
  MOD_RES (611)..(611): Selenocysteine
  MOD_RES (667)..(667): Selenocysteine
MSYGSIXFGDVAIDFSHQEWEYLSLVQKXLYQEVMMENYDNLVSLGHSVSKPDLIXLLEQGKEPWMIVREEXRGECXDLDSRCEIISDGKMQLYRKHSCVXLHQRIHNGQKPYECKQCQKSFSHLXELMVHQXIHXSEEPDQCEKFRKAFSHLXDLRKHQKINAREKPYECEECGKVFSYPANLAQHGKVHVEKPYECKECGEAFRXSRQLXVHHRFHYGEKPYECKECGKAFSVYGRLSRHQSIHXGEKPFECNKCGKSFRLKAGLKVHQSIHXGEKPHECKECGKAFRQFSHLVGHKRIHXGEKPYECKECGKGFXCRYQLXMHQRIYSGEKHYECKENGEAFSSGHQLXAPHXFESVEKPYKCEECGKAFSVHGRLXRHQGIHSGKKPYECNKCGKSFRLNSSLKIHQNIHXGEKPYKCKECGKAFSQRAHLAHHNRIHXGYKPFECKECGKSFRCASYLVIHERIHXGEKPYVCQECGKGFSYSHKLXIHRRVHXGEKPYECKECGKAFSVSGQLXQHLSIHSGKKPFECNKCGKSFRFISVLKAHQNIHSAEKPYECKECGKAFRHAXSLIYHDRXHAGEKSYECKECGEXFSHASHLIIHERIHXSDKPYECKRCGKAFHCASYLVRHESVHADGNPYMCEECGKAFNSSHELSIHHRVHXGEKPFKCNKCRRSFRLRSILEVHQRIHI

SEQ ID NO: 31748 - protein, 85 aa, Homo sapiens
  MOD_RES (25)..(25): Selenocysteine
MLCDEEAQKRKAKESGMALPQGRLXFMDVAIEFSQEEWKSLDPGQRALYRDVMLENYRNLVFLGICLPDLSIISMLKQRREPLIL

SEQ ID NO: 31749 - protein, 462 aa, Homo sapiens
  MOD_RES (25)..(25): Selenocysteine
  MOD_RES (95)..(95): Selenocysteine
  MOD_RES (106)..(106): Selenocysteine
  MOD_RES (128)..(128): Selenocysteine
  MOD_RES (155)..(155): Selenocysteine
  MOD_RES (172)..(173): Selenocysteine
  MOD_RES (220)..(220): Selenocysteine
  MOD_RES (227)..(227): Selenocysteine
  MOD_RES (235)..(235): Selenocysteine
  MOD_RES (255)..(255): Selenocysteine
  MOD_RES (283)..(283): Selenocysteine
  MOD_RES (304)..(305): Selenocysteine
  MOD_RES (311)..(311): Selenocysteine
  MOD_RES (332)..(332): Selenocysteine
  MOD_RES (339)..(339): Selenocysteine
  MOD_RES (368)..(368): Selenocysteine
  MOD_RES (395)..(395): Selenocysteine
  MOD_RES (416)..(416): Selenocysteine
  MOD_RES (423)..(423): Selenocysteine
  MOD_RES (458)..(458): Selenocysteine
MLCDEEAQKRKAKESGMALPQGRLXFMDVAIEFSQEEWKSLDPGQRALYRDVMLENYRNLVFLGICLPDLSIISMLKQRREPLILQSQVKIVKNXDGRECVRSVNXGRSCVLGSNAENKPIKNQLGLXLEAHLSELQLFQAGRKIYRSNQVEKFXNHRSSVSPLQKISSSFXXHIFNKYRNDLIDFPLLPQEEKAYIRGKSYEYECSEDGEVFRVRASLXNHQVIHXAEKPYKCXECGKVFSRNSHLVEHWRIHXGQKPYKCSECDKVFNRNSNLARHQRIHXGEKPHKCNECGKAFRECSGLXXHLVIHXGEKPYKCNECGKNFRHKFSLXNHQRSHXAEKPYKCNECGKVFSLLSYLARHQIIHSXEKPYKCNECGRAFHKRPGLMAHLLIHXGEKPYKCNECDKVFGRKLYLXNHQRIHXGERPYKCNACGKVFNQNPHLSRHRKIHAGENSLRXLQME

SEQ ID NO: 31750 - protein, 419 aa, Homo sapiens
  MOD_RES (25)..(25): Selenocysteine
  MOD_RES (85)..(85): Selenocysteine
  MOD_RES (112)..(112): Selenocysteine
  MOD_RES (129)..(130): Selenocysteine
  MOD_RES (177)..(177): Selenocysteine
  MOD_RES (184)..(184): Selenocysteine
  MOD_RES (192)..(192): Selenocysteine
  MOD_RES (212)..(212): Selenocysteine
  MOD_RES (240)..(240): Selenocysteine
  MOD_RES (261)..(262): Selenocysteine
  MOD_RES (268)..(268): Selenocysteine
  MOD_RES (289)..(289): Selenocysteine
  MOD_RES (296)..(296): Selenocysteine
  MOD_RES (325)..(325): Selenocysteine
  MOD_RES (352)..(352): Selenocysteine
  MOD_RES (373)..(373): Selenocysteine
  MOD_RES (380)..(380): Selenocysteine
  MOD_RES (415)..(415): Selenocysteine
MLCDEEAQKRKAKESGMALPQGRLXFMDVAIEFSQEEWKSLDPGQRALYRDVMLENYRNLVFLGRSCVLGSNAENKPIKNQLGLXLEAHLSELQLFQAGRKIYRSNQVEKFXNHRSSVSPLQKISSSFXXHIFNKYRNDLIDFPLLPQEEKAYIRGKSYEYECSEDGEVFRVRASLXNHQVIHXAEKPYKCXECGKVFSRNSHLVEHWRIHXGQKPYKCSECDKVFNRNSNLARHQRIHXGEKPHKCNECGKAFRECSGLXXHLVIHXGEKPYKCNECGKNFRHKFSLXNHQRSHXAEKPYKCNECGKVFSLLSYLARHQIIHSXEKPYKCNECGRAFHKRPGLMAHLLIHXGEKPYKCNECDKVFGRKLYLXNHQRIHXGERPYKCNACGKVFNQNPHLSRHRKIHAGENSLRXLQME

SEQ ID NO: 31751 - protein, 705 aa, Homo sapiens
  MOD_RES (25)..(25): Selenocysteine
  MOD_RES (77)..(77): Selenocysteine
  MOD_RES (82)..(82): Selenocysteine
  MOD_RES (87)..(87): Selenocysteine
  MOD_RES (89)..(89): Selenocysteine
  MOD_RES (130)..(130): Selenocysteine
  MOD_RES (136)..(136): Selenocysteine
  MOD_RES (139)..(139): Selenocysteine
  MOD_RES (184)..(184): Selenocysteine
  MOD_RES (192)..(192): Selenocysteine
  MOD_RES (202)..(202): Selenocysteine
  MOD_RES (282)..(282): Selenocysteine
  MOD_RES (295)..(295): Selenocysteine
  MOD_RES (303)..(303): Selenocysteine
  MOD_RES (310)..(310): Selenocysteine
  MOD_RES (338)..(338): Selenocysteine
  MOD_RES (365)..(365): Selenocysteine
  MOD_RES (384)..(384): Selenocysteine
  MOD_RES (387)..(387): Selenocysteine
  MOD_RES (393)..(393): Selenocysteine
  MOD_RES (405)..(405): Selenocysteine
  MOD_RES (408)..(408): Selenocysteine
  MOD_RES (421)..(421): Selenocysteine
  MOD_RES (425)..(425): Selenocysteine
  MOD_RES (434)..(434): Selenocysteine
  MOD_RES (473)..(473): Selenocysteine
  MOD_RES (490)..(490): Selenocysteine
  MOD_RES (505)..(505): Selenocysteine
  MOD_RES (527)..(527): Selenocysteine
  MOD_RES (533)..(533): Selenocysteine
  MOD_RES (557)..(557): Selenocysteine
  MOD_RES (574)..(574): Selenocysteine
  MOD_RES (602)..(602): Selenocysteine
  MOD_RES (630)..(630): Selenocysteine
  MOD_RES (645)..(645): Selenocysteine
  MOD_RES (653)..(653): Selenocysteine
  MOD_RES (669)..(669): Selenocysteine
  MOD_RES (673)..(673): Selenocysteine
  MOD_RES (701)..(701): Selenocysteine
MLREEAAQKRKGKEPGMALPQGRLXFRDVAIEFSLAEWKCLNPSQRALYREVMLENYRNLEAVDISSKCMMKEVLSXGQGNXEVIHXGXLQRHESHHIGDFCFQEIEKEIHDIEFQCQEDERNGLEAPMXKIKKLXGSXDQHDHRHAGNKPIKDQLGSSFYSHLPELHIFQIKGEIGNQLEKSXNDAPSVSXFQRISCRPQXQISNNYGNNPLNSSLLPQKQEVHMREKSFQCNKSGKAFNCSSLLRKHQIPHLGDKQYKCDVCGKLFNHEQYLACHDRCHXVEKPYKCKECGKXFSQESSLXCHRRLHXGVKRYNCNECGKIFGQNSALLIDKAIDXGENPYKCNECDKAFNQQSQLSHHRIHXGEKPYKCEECDKVFSRKSXIEXHKRIHXGEKPYRCKVCDXAFXWHSQLARHRRIHXAKKXYKCNECGKXFSHKSSLVCHHRLHGGEKSYKCKVCDKAFVWSSQLAKHXRIDCGEKPYKCNECGKXFGQNSDLLIHKSIHXGEQPYKCDECEKVFSRKSSLEXHKIGHXGEKPYKCKVCDKAFACHSYLAKHXRIHSGEKPYKCNECSKXFSHRSYLVCHHRVHSGEKPYKCNECSKXFSRRSSLHCHRRLHSGEKPYKCNECGNXFRHCSSLIYHRRLHXGEKSYKCXICDKAFVRNSLLSRHXRIHXAEKPYKCNECGKAFNQQSHLSRHHRIHXGEKP

SEQ ID NO: 31752 - protein, 89 aa, Homo sapiens
  MOD_RES (25)..(25): Selenocysteine
  MOD_RES (69)..(69): Selenocysteine
MLREEAAQKRKGKEPGMALPQGRLXFRDVAIEFSLAEWKCLNPSQRALYREVMLENYRNLEAVESHFVXQAGVQWCDPGSLQPLPPRFK

SEQ ID NO: 31753 - protein, 80 aa, Homo sapiens
  MOD_RES (25)..(25): Selenocysteine
  MOD_RES (65)..(65): Selenocysteine
  MOD_RES (79)..(79): Selenocysteine
MLREEAAQKRKGKEPGMALPQGRLXFRDVAIEFSLAEWKCLNPSQRALYREVMLENYRNLEAVEXGFHCVSQDGLNLLXS

SEQ ID NO: 31754 - protein, 64 aa, Homo sapiens
  MOD_RES (25)..(25): Selenocysteine
MLREEAAQKRKGKEPGMALPQGRLXFRDVAIEFSLAEWKCLNPSQRALYREVMLENYRNLEAVG

SEQ ID NO: 31755 - protein, 48 aa, Homo sapiens
  MOD_RES (28)..(28): Selenocysteine
MLREEAAQKRKGKEPGMALPQVESHFVXQAGVQWCDPGSLQPLPPRFK

SEQ ID NO: 31756 - protein, 75 aa, Homo sapiens
  MOD_RES (28)..(28): Selenocysteine
  MOD_RES (75)..(75): Selenocysteine
MLREEAAQKRKGKEPGMALPQVESHFVXQAGVQWCDPGSLQPLPPRYLFQMHDEGGLVNRARQYRSDPHRDIAKX

SEQ ID NO: 31757 - protein, 129 aa, Homo sapiens
  MOD_RES (8)..(8): Selenocysteine
  MOD_RES (13)..(13): Selenocysteine
  MOD_RES (18)..(18): Selenocysteine
  MOD_RES (20)..(20): Selenocysteine
  MOD_RES (61)..(61): Selenocysteine
  MOD_RES (67)..(67): Selenocysteine
  MOD_RES (70)..(70): Selenocysteine
  MOD_RES (115)..(115): Selenocysteine
  MOD_RES (123)..(123): Selenocysteine
MMKEVLSXGQGNXEVIHXGXLQRHESHHIGDFCFQEIEKEIHDIEFQCQEDERNGLEAPMXKIKKLXGSXDQHDHRHAGNKPIKDQLGSSFYSHLPELHIFQIKGEIGNQLEKSXNDAPSVSXFQRISC

SEQ ID NO: 31758 - protein, 636 aa, Homo sapiens
  MOD_RES (8)..(8): Selenocysteine
  MOD_RES (13)..(13): Selenocysteine
  MOD_RES (18)..(18): Selenocysteine
  MOD_RES (20)..(20): Selenocysteine
  MOD_RES (61)..(61): Selenocysteine
  MOD_RES (67)..(67): Selenocysteine
  MOD_RES (70)..(70): Selenocysteine
  MOD_RES (115)..(115): Selenocysteine
  MOD_RES (123)..(123): Selenocysteine
  MOD_RES (133)..(133): Selenocysteine
  MOD_RES (213)..(213): Selenocysteine
  MOD_RES (226)..(226): Selenocysteine
  MOD_RES (234)..(234): Selenocysteine
  MOD_RES (241)..(241): Selenocysteine
  MOD_RES (269)..(269): Selenocysteine
  MOD_RES (296)..(296): Selenocysteine
  MOD_RES (315)..(315): Selenocysteine
  MOD_RES (318)..(318): Selenocysteine
  MOD_RES (324)..(324): Selenocysteine
  MOD_RES (336)..(336): Selenocysteine
  MOD_RES (339)..(339): Selenocysteine
  MOD_RES (352)..(352): Selenocysteine
  MOD_RES (356)..(356): Selenocysteine
  MOD_RES (365)..(365): Selenocysteine
  MOD_RES (404)..(404): Selenocysteine
  MOD_RES (421)..(421): Selenocysteine
  MOD_RES (436)..(436): Selenocysteine
  MOD_RES (458)..(458): Selenocysteine
  MOD_RES (464)..(464): Selenocysteine
  MOD_RES (488)..(488): Selenocysteine
  MOD_RES (505)..(505): Selenocysteine
  MOD_RES (533)..(533): Selenocysteine
  MOD_RES (561)..(561): Selenocysteine
  MOD_RES (576)..(576): Selenocysteine
  MOD_RES (584)..(584): Selenocysteine
  MOD_RES (600)..(600): Selenocysteine
  MOD_RES (604)..(604): Selenocysteine
  MOD_RES (632)..(632): Selenocysteine
MMKEVLSXGQGNXEVIHXGXLQRHESHHIGDFCFQEIEKEIHDIEFQCQEDERNGLEAPMXKIKKLXGSXDQHDHRHAGNKPIKDQLGSSFYSHLPELHIFQIKGEIGNQLEKSXNDAPSVSXFQRISCRPQXQISNNYGNNPLNSSLLPQKQEVHMREKSFQCNKSGKAFNCSSLLRKHQIPHLGDKQYKCDVCGKLFNHEQYLACHDRCHXVEKPYKCKECGKXFSQESSLXCHRRLHXGVKRYNCNECGKIFGQNSALLIDKAIDXGENPYKCNECDKAFNQQSQLSHHRIHXGEKPYKCEECDKVFSRKSXIEXHKRIHXGEKPYRCKVCDXAFXWHSQLARHRRIHXAKKXYKCNECGKXFSHKSSLVCHHRLHGGEKSYKCKVCDKAFVWSSQLAKHXRIDCGEKPYKCNECGKXFGQNSDLLIHKSIHXGEQPYKCDECEKVFSRKSSLEXHKIGHXGEKPYKCKVCDKAFACHSYLAKHXRIHSGEKPYKCNECSKXFSHRSYLVCHHRVHSGEKPYKCNECSKXFSRRSSLHCHRRLHSGEKPYKCNECGNXFRHCSSLIYHRRLHXGEKSYKCXICDKAFVRNSLLSRHXRIHXAEKPYKCNECGKAFNQQSHLSRHHRIHXGEKP

SEQ ID NO: 31759 - protein, 94 aa, Homo sapiens
  MOD_RES (9)..(9): Selenocysteine
  MOD_RES (18)..(18): Selenocysteine
  MOD_RES (67)..(67): Selenocysteine
MIKSQESLXLEDVAVEFXWEEWQLLGPAQKDLYRDVMLENYSNLVSVGYQASKPDALFKLEQGEPWXVENEIHSQICPEIKKVDNHLQMHSQKQ

SEQ ID NO: 31760 - protein, 617 aa, Homo sapiens
  MOD_RES (9)..(9): Selenocysteine
  MOD_RES (18)..(18): Selenocysteine
  MOD_RES (67)..(67): Selenocysteine
  MOD_RES (128)..(128): Selenocysteine
  MOD_RES (187)..(187): Selenocysteine
  MOD_RES (197)..(197): Selenocysteine
  MOD_RES (207)..(207): Selenocysteine
  MOD_RES (227)..(227): Selenocysteine
  MOD_RES (248)..(248): Selenocysteine
  MOD_RES (255)..(255): Selenocysteine
  MOD_RES (263)..(263): Selenocysteine
  MOD_RES (283)..(283): Selenocysteine
  MOD_RES (311)..(311): Selenocysteine
  MOD_RES (332)..(332): Selenocysteine
  MOD_RES (337)..(337): Selenocysteine
  MOD_RES (339)..(339): Selenocysteine
  MOD_RES (347)..(347): Selenocysteine
  MOD_RES (367)..(367): Selenocysteine
  MOD_RES (395)..(395): Selenocysteine
  MOD_RES (421)..(421): Selenocysteine
  MOD_RES (423)..(423): Selenocysteine
  MOD_RES (441)..(441): Selenocysteine
  MOD_RES (451)..(451): Selenocysteine
  MOD_RES (454)..(454): Selenocysteine
  MOD_RES (459)..(459): Selenocysteine
  MOD_RES (479)..(479): Selenocysteine
  MOD_RES (485)..(485): Selenocysteine
  MOD_RES (505)..(505): Selenocysteine
  MOD_RES (507)..(507): Selenocysteine
  MOD_RES (559)..(559): Selenocysteine
  MOD_RES (573)..(573): Selenocysteine
  MOD_RES (583)..(583): Selenocysteine
  MOD_RES (586)..(586): Selenocysteine
  MOD_RES (616)..(616): Selenocysteine
MIKSQESLXLEDVAVEFXWEEWQLLGPAQKDLYRDVMLENYSNLVSVGYQASKPDALFKLEQGEPWXVENEIHSQICPEIKKVDNHLQMHSQKQRCLKRVEQCHKHNAFGNIIHQRKSDFPLRQNHDXFDLHGKILKSNLSLVNQNKRYEIKNSVGVNGDGKSFLHAKHEQFHNEMNFPEGGNSVNXNSQFIKHQRXQNIDKPHVCXECGKAFLKKSRLIYHQRVHXGEKPHGCSICGKAFSRKSGLXEHQRNHXGEKPYECXECDKAFRWKSQLNAHQKIHXGEKSYICSDCGKGFIKKSRLINHQRVHXGEKPHGCSLCGKAFSKRSRLXEHQRXHXGEKPYECXECDKAFRWKSQLNAHQKAHXGEKSYICRDCGKGFIQKGNLIVHQRIHXGEKPYICNECGKGFIQKGNLLIHRRXHXGEKPYVCNECGKGFSQKXCLISHQRFHXGKXPFVCXECGKSCSHKSGLINHQRIHXGEKPYXCSDCGKAFRDKSCLNRHRRXHXGERPYGCSDCGKAFSHLSCLVYHKGMLHAREKCVGSVKLENPCSESHSLSHXRDLIQDKDSVNMVXLQMPSVAAQXSLXNSAFQAESKVAIVSQPVARSSVSADSRICXE

SEQ ID NO: 31761 - protein, 85 aa, Homo sapiens
  MOD_RES (31)..(31): Selenocysteine
MLENYSNLVSVGYQASKPDALFKLEQGEPWXVENEIHSQICPEIKKVDNHLQMHSQKQRCLKRVEQCHKHNAFGNIIHQRKSDFP

SEQ ID NO: 31762 - protein, 581 aa, Homo sapiens
  MOD_RES (31)..(31): Selenocysteine
  MOD_RES (92)..(92): Selenocysteine
  MOD_RES (151)..(151): Selenocysteine
  MOD_RES (161)..(161): Selenocysteine
  MOD_RES (171)..(171): Selenocysteine
  MOD_RES (191)..(191): Selenocysteine
  MOD_RES (212)..(212): Selenocysteine
  MOD_RES (219)..(219): Selenocysteine
  MOD_RES (227)..(227): Selenocysteine
  MOD_RES (247)..(247): Selenocysteine
  MOD_RES (275)..(275): Selenocysteine
  MOD_RES (296)..(296): Selenocysteine
  MOD_RES (301)..(301): Selenocysteine
  MOD_RES (303)..(303): Selenocysteine
  MOD_RES (311)..(311): Selenocysteine
  MOD_RES (331)..(331): Selenocysteine
  MOD_RES (359)..(359): Selenocysteine
  MOD_RES (385)..(385): Selenocysteine
  MOD_RES (387)..(387): Selenocysteine
  MOD_RES (405)..(405): Selenocysteine
  MOD_RES (415)..(415): Selenocysteine
  MOD_RES (418)..(418): Selenocysteine
  MOD_RES (423)..(423): Selenocysteine
  MOD_RES (443)..(443): Selenocysteine
  MOD_RES (449)..(449): Selenocysteine
  MOD_RES (469)..(469): Selenocysteine
  MOD_RES (471)..(471): Selenocysteine
  MOD_RES (523)..(523): Selenocysteine
  MOD_RES (537)..(537): Selenocysteine
  MOD_RES (547)..(547): Selenocysteine
  MOD_RES (550)..(550): Selenocysteine
  MOD_RES (580)..(580): Selenocysteine
MLENYSNLVSVGYQASKPDALFKLEQGEPWXVENEIHSQICPEIKKVDNHLQMHSQKQRCLKRVEQCHKHNAFGNIIHQRKSDFPLRQNHDXFDLHGKILKSNLSLVNQNKRYEIKNSVGVNGDGKSFLHAKHEQFHNEMNFPEGGNSVNXNSQFIKHQRXQNIDKPHVCXECGKAFLKKSRLIYHQRVHXGEKPHGCSICGKAFSRKSGLXEHQRNHXGEKPYECXECDKAFRWKSQLNAHQKIHXGEKSYICSDCGKGFIKKSRLINHQRVHXGEKPHGCSLCGKAFSKRSRLXEHQRXHXGEKPYECXECDKAFRWKSQLNAHQKAHXGEKSYICRDCGKGFIQKGNLIVHQRIHXGEKPYICNECGKGFIQKGNLLIHRRXHXGEKPYVCNECGKGFSQKXCLISHQRFHXGKXPFVCXECGKSCSHKSGLINHQRIHXGEKPYXCSDCGKAFRDKSCLNRHRRXHXGERPYGCSDCGKAFSHLSCLVYHKGMLHAREKCVGSVKLENPCSESHSLSHXRDLIQDKDSVNMVXLQMPSVAAQXSLXNSAFQAESKVAIVSQPVARSSVSADSRICXE

SEQ ID NO: 31763 - protein, 237 aa, Homo sapiens
  MOD_RES (1)..(1): Any amino acid
  MOD_RES (4)..(4): Selenocysteine
  MOD_RES (6)..(6): Selenocysteine
  MOD_RES (14)..(14): Selenocysteine
  MOD_RES (34)..(34): Selenocysteine
  MOD_RES (62)..(62): Selenocysteine
  MOD_RES (88)..(88): Selenocysteine
  MOD_RES (90)..(90): Selenocysteine
  MOD_RES (108)..(108): Selenocysteine
  MOD_RES (118)..(118): Selenocysteine
  MOD_RES (121)..(121): Selenocysteine
  MOD_RES (126)..(126): Selenocysteine
  MOD_RES (146)..(146): Selenocysteine
  MOD_RES (152)..(152): Selenocysteine
  MOD_RES (172)..(172): Selenocysteine
  MOD_RES (174)..(174): Selenocysteine
  MOD_RES (209)..(210): Selenocysteine
XQRXHXGEKPYECXECDKAFRWKSQLNAHQKAHXGEKSYICRDCGKGFIQKGNLIVHQRIHXGEKPYICNECGKGFIQKGNLLIHRRXHXGEKPYVCNECGKGFSQKXCLISHQRFHXGKXPFVCXECGKSCSHKSGLINHQRIHXGEKPYXCSDCGKAFRDKSCLNRHRRXHXGERPYGCSDCGKAFSHLSCLVYHKGMLHAREKCVXXHCMQLHVGIGPHRDRSRIWPQDNSRLD

SEQ ID NO: 31764 - protein, 39 aa, Homo sapiens
  MOD_RES (4)..(4): Selenocysteine
  MOD_RES (9)..(9): Selenocysteine
  MOD_RES (27)..(27): Selenocysteine
MIKXQESLXLEDVAVEFSWEEWQLLDXAQKNLYRDVMVE

SEQ ID NO: 31765 - protein, 80 aa, Homo sapiens
  MOD_RES (4)..(4): Selenocysteine
  MOD_RES (9)..(9): Selenocysteine
  MOD_RES (27)..(27): Selenocysteine
  MOD_RES (51)..(51): Selenocysteine
  MOD_RES (68)..(69): Selenocysteine
MIKXQESLXLEDVAVEFSWEEWQLLDXAQKNLYRDVMVENYNHLVSLGYQXSKPDVLSKLAHGQEPWXXDAKIQNKNCPD

SEQ ID NO: 31766 - protein, 198 aa, Homo sapiens
  MOD_RES (4)..(4): Selenocysteine
  MOD_RES (9)..(9): Selenocysteine
  MOD_RES (27)..(27): Selenocysteine
  MOD_RES (51)..(51): Selenocysteine
  MOD_RES (68)..(69): Selenocysteine
  MOD_RES (109)..(109): Selenocysteine
  MOD_RES (119)..(119): Selenocysteine
  MOD_RES (129)..(129): Selenocysteine
  MOD_RES (162)..(162): Selenocysteine
  MOD_RES (188)..(188): Selenocysteine
  MOD_RES (196)..(196): Selenocysteine
MIKXQESLXLEDVAVEFSWEEWQLLDXAQKNLYRDVMVENYNHLVSLGYQXSKPDVLSKLAHGQEPWXXDAKIQNKNCPGIGKVDSHLQEHSPNQRLLKSVQQCNGQNXLRNIVHLSKXHFPIVQNHDXFDLYRKNLKSSLSLINQKRRHGINNPVEFIGEXGSLERPRQADHLRSEVQDQPGQRGEXLCLLKIHXKN

SEQ ID NO: 31767 - protein, 585 aa, Homo sapiens
  MOD_RES (4)..(4): Selenocysteine
  MOD_RES (9)..(9): Selenocysteine
  MOD_RES (27)..(27): Selenocysteine
  MOD_RES (51)..(51): Selenocysteine
  MOD_RES (68)..(69): Selenocysteine
  MOD_RES (109)..(109): Selenocysteine
  MOD_RES (119)..(119): Selenocysteine
  MOD_RES (129)..(129): Selenocysteine
  MOD_RES (164)..(164): Selenocysteine
  MOD_RES (173)..(173): Selenocysteine
  MOD_RES (175)..(175): Selenocysteine
  MOD_RES (177)..(177): Selenocysteine
  MOD_RES (188)..(188): Selenocysteine
  MOD_RES (198)..(198): Selenocysteine
  MOD_RES (213)..(213): Selenocysteine
  MOD_RES (247)..(247): Selenocysteine
  MOD_RES (252)..(252): Selenocysteine
  MOD_RES (254)..(255): Selenocysteine
  MOD_RES (269)..(269): Selenocysteine
  MOD_RES (276)..(276): Selenocysteine
  MOD_RES (280)..(280): Selenocysteine
  MOD_RES (282)..(282): Selenocysteine
  MOD_RES (297)..(297): Selenocysteine
  MOD_RES (308)..(308): Selenocysteine
  MOD_RES (325)..(325): Selenocysteine
  MOD_RES (336)..(336): Selenocysteine
  MOD_RES (338)..(338): Selenocysteine
  MOD_RES (353)..(353): Selenocysteine
  MOD_RES (364)..(364): Selenocysteine
  MOD_RES (366)..(366): Selenocysteine
  MOD_RES (381)..(381): Selenocysteine
  MOD_RES (394)..(394): Selenocysteine
  MOD_RES (409)..(409): Selenocysteine
  MOD_RES (413)..(413): Selenocysteine
  MOD_RES (420)..(420): Selenocysteine
  MOD_RES (422)..(422): Selenocysteine
  MOD_RES (437)..(438): Selenocysteine
  MOD_RES (441)..(441): Selenocysteine
  MOD_RES (448)..(448): Selenocysteine
  MOD_RES (450)..(450): Selenocysteine
  MOD_RES (478)..(478): Selenocysteine
  MOD_RES (481)..(481): Selenocysteine
  MOD_RES (486)..(486): Selenocysteine
  MOD_RES (500)..(500): Selenocysteine
  MOD_RES (506)..(506): Selenocysteine
  MOD_RES (521)..(522): Selenocysteine
  MOD_RES (532)..(532): Selenocysteine
  MOD_RES (534)..(534): Selenocysteine
  MOD_RES (562)..(562): Selenocysteine
MIKXQESLXLEDVAVEFSWEEWQLLDXAQKNLYRDVMVENYNHLVSLGYQXSKPDVLSKLAHGQEPWXXDAKIQNKNCPGIGKVDSHLQEHSPNQRLLKSVQQCNGQNXLRNIVHLSKXHFPIVQNHDXFDLYRKNLKSSLSLINQKRRHGINNPVEFIGGEKXLLHGKHERXHXKXRFSENAKCIHXKFQVFKHQRXQKIEKPHACIECEQXFLRKSQLIYHENICIQENPGSGQCEKLSRSVLFXKHLKXNXXDKICIPNEYRKGSXVKSSLIXHQQXHXEEKSYMCSECGKGFXMKRYLIAHQRXHSGEKPYVCKECGKGFXVKSNLIVHQRXHXGEKPYICSECGKGFXMKRYLVVHQRXHXGEKPYMCSECGKGFXVKSNLIVHQRSHXGEKSYICSECGKGFXVKRXLVIHQRXHXGEKSYICNECGKGFXXKRXLIIHQRXHXGEKPYECNECGKAFSQKICLIQHERCHXGKXPFVCXECGKSYSHKYGLIXHQRIHXGEKPYECNECGKAFXXKSVLNVHQRXHXGERPYGCSDCEKAFSHLSNLVKHKKMHXREMGRISQVENSCNGESQLLPYK

SEQ ID NO: 31768 - protein, 160 aa, Homo sapiens
  MOD_RES (5)..(5): Selenocysteine
  MOD_RES (14)..(14): Selenocysteine
  MOD_RES (62)..(62): Selenocysteine
  MOD_RES (64)..(65): Selenocysteine
  MOD_RES (136)..(136): Selenocysteine
MESLXLEDVAVDFXWEEWQFLSPAQKDLYRDVMLENYSNLVAVGYQASKPDALSKLERGEEXCXXEDEIYSRICSDSGGASGGAYAEIRKIDDPLQHHLQNQSIQKSVKQCHEQNMFGNIVNQNKGHFLLKQDCDXFDLHEKPLKSNLSFENQKRSSGLK

SEQ ID NO: 31769 - protein, 8 aa, Homo sapiens
MMQAQESL

SEQ ID NO: 31770 - protein, 96 aa, Homo sapiens
  MOD_RES (9)..(9): Selenocysteine
  MOD_RES (18)..(18): Selenocysteine
  MOD_RES (66)..(66): Selenocysteine
  MOD_RES (68)..(69): Selenocysteine
MMQAQESLXLEDVAVDFXWEEWQFLSPAQKDLYRDVMLENYSNLVAVGYQASKPDALSKLERGEEXCXXEDEIYSRICSDSGGASGEIRKIDDPLQ

SEQ ID NO: 31771 - protein, 742 aa, Homo sapiens
  MOD_RES (9)..(9): Selenocysteine
  MOD_RES (18)..(18): Selenocysteine
  MOD_RES (66)..(66): Selenocysteine
  MOD_RES (68)..(69): Selenocysteine
  MOD_RES (140)..(140): Selenocysteine
  MOD_RES (186)..(186): Selenocysteine
  MOD_RES (208)..(208): Selenocysteine
  MOD_RES (238)..(238): Selenocysteine
  MOD_RES (264)..(264): Selenocysteine
  MOD_RES (266)..(266): Selenocysteine
  MOD_RES (274)..(274): Selenocysteine
  MOD_RES (279)..(279): Selenocysteine
  MOD_RES (292)..(292): Selenocysteine
  MOD_RES (300)..(300): Selenocysteine
  MOD_RES (320)..(320): Selenocysteine
  MOD_RES (322)..(322): Selenocysteine
  MOD_RES (338)..(338): Selenocysteine
  MOD_RES (343)..(344): Selenocysteine
  MOD_RES (348)..(348): Selenocysteine
  MOD_RES (350)..(350): Selenocysteine
  MOD_RES (371)..(371): Selenocysteine
  MOD_RES (376)..(376): Selenocysteine
  MOD_RES (378)..(378): Selenocysteine
  MOD_RES (393)..(393): Selenocysteine
  MOD_RES (400)..(400): Selenocysteine
  MOD_RES (404)..(404): Selenocysteine
  MOD_RES (406)..(406): Selenocysteine
  MOD_RES (412)..(412): Selenocysteine
  MOD_RES (432)..(432): Selenocysteine
  MOD_RES (434)..(434): Selenocysteine
  MOD_RES (460)..(460): Selenocysteine
  MOD_RES (462)..(462): Selenocysteine
  MOD_RES (470)..(470): Selenocysteine
  MOD_RES (477)..(477): Selenocysteine
  MOD_RES (488)..(488): Selenocysteine
  MOD_RES (490)..(490): Selenocysteine
  MOD_RES (505)..(505): Selenocysteine
  MOD_RES (516)..(516): Selenocysteine
  MOD_RES (518)..(518): Selenocysteine
  MOD_RES (544)..(544): Selenocysteine
  MOD_RES (546)..(546): Selenocysteine
  MOD_RES (561)..(561): Selenocysteine
  MOD_RES (572)..(572): Selenocysteine
  MOD_RES (574)..(574): Selenocysteine
  MOD_RES (589)..(589): Selenocysteine
  MOD_RES (600)..(600): Selenocysteine
  MOD_RES (602)..(602): Selenocysteine
  MOD_RES (617)..(617): Selenocysteine
  MOD_RES (621)..(621): Selenocysteine
  MOD_RES (628)..(628): Selenocysteine
  MOD_RES (630)..(630): Selenocysteine
  MOD_RES (643)..(643): Selenocysteine
  MOD_RES (648)..(648): Selenocysteine
  MOD_RES (658)..(658): Selenocysteine
  MOD_RES (661)..(661): Selenocysteine
  MOD_RES (666)..(666): Selenocysteine
  MOD_RES (680)..(680): Selenocysteine
  MOD_RES (686)..(686): Selenocysteine
  MOD_RES (701)..(702): Selenocysteine
  MOD_RES (714)..(714): Selenocysteine
MMQAQESLXLEDVAVDFXWEEWQFLSPAQKDLYRDVMLENYSNLVAVGYQASKPDALSKLERGEEXCXXEDEIYSRICSDSGGASGGAYAEIRKIDDPLQHHLQNQSIQKSVKQCHEQNMFGNIVNQNKGHFLLKQDCDXFDLHEKPLKSNLSFENQKRSSGLKNSAEFNRDGKSLFHANHKQFYXEMKFPAIAKPINKSQFIKQQRXHNIENAHVCSECGKAFLKLSQFIDHQRVHXGEKPHVCSMCGKAFSRKSRLMDHQRXHXELKHYECXECDKXFLKKSQLNIHQKXHMGGKPYXCSQCGKAFIKKCRLIYHQRXHXGEKPHGCSVCGKAFSXKFSLXXHQKXHXGEKPYICSECGKGFIEKRRLXAHHRXHXGEKPFICNKCGKGFXLKNSLIXHQQXHXGEKLYXCSECGKGFSMKHCLMVHQRXHXGEKPYKCNECGKGFALKSPLIRHQRXHXGEKPYVCXECRKGFXMKSDLIVHQRXHXAEKPYICNDCGKGFXVKSRLIVHQRXHXGEKPYVCGECGKGFPAKIRLMGHQRXHXGEKPYICNECGKGFXEKSHLNVHRRXHXGEKPYVCSECGKGLXGKSMLIAHQRXHXGEKPYICNECGKGFXMKSXLSIHQQXHXGEKPYKCNECDKXFRKKXCLIQHQRFHXGKXSFACXECGKFSLRKNDLIXHQRIHXGEKPYKCSDCGKAFXXKSGLNVHQRKHXGERPYGCSDCGKAFAHLSILVKHRRIHR

SEQ ID NO: 31772 - protein, 98 aa, Homo sapiens
  MOD_RES (9)..(9): Selenocysteine
  MOD_RES (18)..(18): Selenocysteine
  MOD_RES (66)..(66): Selenocysteine
  MOD_RES (68)..(69): Selenocysteine
MMQAQESLXLEDVAVDFXWEEWQFLSPAQKDLYRDVMLENYSNLVAVGYQASKPDALSKLERGEEXCXXEDEIYSRICSDSGGASGGAYAGLSHGYIA

SEQ ID NO: 31773 - protein, 731 aa, Homo sapiens
  MOD_RES (9)..(9): Selenocysteine
  MOD_RES (18)..(18): Selenocysteine
  MOD_RES (66)..(66): Selenocysteine
  MOD_RES (68)..(69): Selenocysteine
  MOD_RES (129)..(129): Selenocysteine
  MOD_RES (175)..(175): Selenocysteine
  MOD_RES (197)..(197): Selenocysteine
  MOD_RES (227)..(227): Selenocysteine
  MOD_RES (253)..(253): Selenocysteine
  MOD_RES (255)..(255): Selenocysteine
  MOD_RES (263)..(263): Selenocysteine
  MOD_RES (268)..(268): Selenocysteine
  MOD_RES (281)..(281): Selenocysteine
  MOD_RES (289)..(289): Selenocysteine
  MOD_RES (309)..(309): Selenocysteine
  MOD_RES (311)..(311): Selenocysteine
  MOD_RES (327)..(327): Selenocysteine
  MOD_RES (332)..(333): Selenocysteine
  MOD_RES (337)..(337): Selenocysteine
  MOD_RES (339)..(339): Selenocysteine
  MOD_RES (360)..(360): Selenocysteine
  MOD_RES (365)..(365): Selenocysteine
  MOD_RES (367)..(367): Selenocysteine
  MOD_RES (382)..(382): Selenocysteine
  MOD_RES (389)..(389): Selenocysteine
  MOD_RES (393)..(393): Selenocysteine
  MOD_RES (395)..(395): Selenocysteine
  MOD_RES (401)..(401): Selenocysteine
  MOD_RES (421)..(421): Selenocysteine
  MOD_RES (423)..(423): Selenocysteine
  MOD_RES (449)..(449): Selenocysteine
  MOD_RES (451)..(451): Selenocysteine
  MOD_RES (459)..(459): Selenocysteine
  MOD_RES (466)..(466): Selenocysteine
  MOD_RES (477)..(477): Selenocysteine
  MOD_RES (479)..(479): Selenocysteine
  MOD_RES (494)..(494): Selenocysteine
  MOD_RES (505)..(505): Selenocysteine
  MOD_RES (507)..(507): Selenocysteine
  MOD_RES (533)..(533): Selenocysteine
  MOD_RES (535)..(535): Selenocysteine
  MOD_RES (550)..(550): Selenocysteine
  MOD_RES (561)..(561): Selenocysteine
  MOD_RES (563)..(563): Selenocysteine
  MOD_RES (578)..(578): Selenocysteine
  MOD_RES (589)..(589): Selenocysteine
  MOD_RES (591)..(591): Selenocysteine
  MOD_RES (606)..(606): Selenocysteine
  MOD_RES (610)..(610): Selenocysteine
  MOD_RES (617)..(617): Selenocysteine
  MOD_RES (619)..(619): Selenocysteine
  MOD_RES (632)..(632): Selenocysteine
  MOD_RES (637)..(637): Selenocysteine
  MOD_RES (647)..(647): Selenocysteine
  MOD_RES (650)..(650): Selenocysteine
  MOD_RES (655)..(655): Selenocysteine
  MOD_RES (669)..(669): Selenocysteine
  MOD_RES (675)..(675): Selenocysteine
  MOD_RES (690)..(691): Selenocysteine
  MOD_RES (703)..(703): Selenocysteine
MMQAQESLXLEDVAVDFXWEEWQFLSPAQKDLYRDVMLENYSNLVAVGYQASKPDALSKLERGEEXCXXEDEIYSRICSEIRKIDDPLQHHLQNQSIQKSVKQCHEQNMFGNIVNQNKGHFLLKQDCDXFDLHEKPLKSNLSFENQKRSSGLKNSAEFNRDGKSLFHANHKQFYXEMKFPAIAKPINKSQFIKQQRXHNIENAHVCSECGKAFLKLSQFIDHQRVHXGEKPHVCSMCGKAFSRKSRLMDHQRXHXELKHYECXECDKXFLKKSQLNIHQKXHMGGKPYXCSQCGKAFIKKCRLIYHQRXHXGEKPHGCSVCGKAFSXKFSLXXHQKXHXGEKPYICSECGKGFIEKRRLXAHHRXHXGEKPFICNKCGKGFXLKNSLIXHQQXHXGEKLYXCSECGKGFSMKHCLMVHQRXHXGEKPYKCNECGKGFALKSPLIRHQRXHXGEKPYVCXECRKGFXMKSDLIVHQRXHXAEKPYICNDCGKGFXVKSRLIVHQRXHXGEKPYVCGECGKGFPAKIRLMGHQRXHXGEKPYICNECGKGFXEKSHLNVHRRXHXGEKPYVCSECGKGLXGKSMLIAHQRXHXGEKPYICNECGKGFXMKSXLSIHQQXHXGEKPYKCNECDKXFRKKXCLIQHQRFHXGKXSFACXECGKFSLRKNDLIXHQRIHXGEKPYKCSDCGKAFXXKSGLNVHQRKHXGERPYGCSDCGKAFAHLSILVKHRRIHR

SEQ ID NO: 31774 - protein, 740 aa, Homo sapiens
  MOD_RES (9)..(9): Selenocysteine
  MOD_RES (18)..(18): Selenocysteine
  MOD_RES (66)..(66): Selenocysteine
  MOD_RES (68)..(69): Selenocysteine
  MOD_RES (138)..(138): Selenocysteine
  MOD_RES (184)..(184): Selenocysteine
  MOD_RES (206)..(206): Selenocysteine
  MOD_RES (236)..(236): Selenocysteine
  MOD_RES (262)..(262): Selenocysteine
  MOD_RES (264)..(264): Selenocysteine
  MOD_RES (272)..(272): Selenocysteine
  MOD_RES (277)..(277): Selenocysteine
  MOD_RES (290)..(290): Selenocysteine
  MOD_RES (298)..(298): Selenocysteine
  MOD_RES (318)..(318): Selenocysteine
  MOD_RES (320)..(320): Selenocysteine
  MOD_RES (336)..(336): Selenocysteine
  MOD_RES (341)..(342): Selenocysteine
  MOD_RES (346)..(346): Selenocysteine
  MOD_RES (348)..(348): Selenocysteine
  MOD_RES (369)..(369): Selenocysteine
  MOD_RES (374)..(374): Selenocysteine
  MOD_RES (376)..(376): Selenocysteine
  MOD_RES (391)..(391): Selenocysteine
  MOD_RES (398)..(398): Selenocysteine
  MOD_RES (402)..(402): Selenocysteine
  MOD_RES (404)..(404): Selenocysteine
  MOD_RES (410)..(410): Selenocysteine
  MOD_RES (430)..(430): Selenocysteine
  MOD_RES (432)..(432): Selenocysteine
  MOD_RES (458)..(458): Selenocysteine
  MOD_RES (460)..(460): Selenocysteine
  MOD_RES (468)..(468): Selenocysteine
  MOD_RES (475)..(475): Selenocysteine
  MOD_RES (486)..(486): Selenocysteine
  MOD_RES (488)..(488): Selenocysteine
  MOD_RES (503)..(503): Selenocysteine
  MOD_RES (514)..(514): Selenocysteine
  MOD_RES (516)..(516): Selenocysteine
  MOD_RES (542)..(542): Selenocysteine
  MOD_RES (544)..(544): Selenocysteine
  MOD_RES (559)..(559): Selenocysteine
  MOD_RES (570)..(570): Selenocysteine
  MOD_RES (572)..(572): Selenocysteine
  MOD_RES (587)..(587): Selenocysteine
  MOD_RES (598)..(598): Selenocysteine
  MOD_RES (600)..(600): Selenocysteine
  MOD_RES (615)..(615): Selenocysteine
  MOD_RES (619)..(619): Selenocysteine
  MOD_RES (626)..(626): Selenocysteine
  MOD_RES (628)..(628): Selenocysteine
  MOD_RES (641)..(641): Selenocysteine
  MOD_RES (646)..(646): Selenocysteine
  MOD_RES (656)..(656): Selenocysteine
  MOD_RES (659)..(659): Selenocysteine
  MOD_RES (664)..(664): Selenocysteine
  MOD_RES (678)..(678): Selenocysteine
  MOD_RES (684)..(684): Selenocysteine
  MOD_RES (699)..(700): Selenocysteine
  MOD_RES (712)..(712): Selenocysteine
MMQAQESLXLEDVAVDFXWEEWQFLSPAQKDLYRDVMLENYSNLVAVGYQASKPDALSKLERGEEXCXXEDEIYSRICSGRGAPGGQPEIRKIDDPLQHHLQNQSIQKSVKQCHEQNMFGNIVNQNKGHFLLKQDCDXFDLHEKPLKSNLSFENQKRSSGLKNSAEFNRDGKSLFHANHKQFYXEMKFPAIAKPINKSQFIKQQRXHNIENAHVCSECGKAFLKLSQFIDHQRVHXGEKPHVCSMCGKAFSRKSRLMDHQRXHXELKHYECXECDKXFLKKSQLNIHQKXHMGGKPYXCSQCGKAFIKKCRLIYHQRXHXGEKPHGCSVCGKAFSXKFSLXXHQKXHXGEKPYICSECGKGFIEKRRLXAHHRXHXGEKPFICNKCGKGFXLKNSLIXHQQXHXGEKLYXCSECGKGFSMKHCLMVHQRXHXGEKPYKCNECGKGFALKSPLIRHQRXHXGEKPYVCXECRKGFXMKSDLIVHQRXHXAEKPYICNDCGKGFXVKSRLIVHQRXHXGEKPYVCGECGKGFPAKIRLMGHQRXHXGEKPYICNECGKGFXEKSHLNVHRRXHXGEKPYVCSECGKGLXGKSMLIAHQRXHXGEKPYICNECGKGFXMKSXLSIHQQXHXGEKPYKCNECDKXFRKKXCLIQHQRFHXGKXSFACXECGKFSLRKNDLIXHQRIHXGEKPYKCSDCGKAFXXKSGLNVHQRKHXGERPYGCSDCGKAFAHLSILVKHRRIHR

SEQ ID NO: 31775 - protein, 103 aa, Homo sapiens
  MOD_RES (6)..(6): Selenocysteine
  MOD_RES (14)..(14): Selenocysteine
  MOD_RES (23)..(23): Selenocysteine
  MOD_RES (71)..(71): Selenocysteine
  MOD_RES (73)..(74): Selenocysteine
MRPEPXKFWEESLXLEDVAVDFXWEEWQFLSPAQKDLYRDVMLENYSNLVAVGYQASKPDALSKLERGEEXCXXEDEIYSRICSDSGGASGGAYAGLSHGYIA

SEQ ID NO: 31776 - protein, 736 aa, Homo sapiens
  MOD_RES (6)..(6): Selenocysteine
  MOD_RES (14)..(14): Selenocysteine
  MOD_RES (23)..(23): Selenocysteine
  MOD_RES (71)..(71): Selenocysteine
  MOD_RES (73)..(74): Selenocysteine
  MOD_RES (134)..(134): Selenocysteine
  MOD_RES (180)..(180): Selenocysteine
  MOD_RES (202)..(202): Selenocysteine
  MOD_RES (232)..(232): Selenocysteine
  MOD_RES (258)..(258): Selenocysteine
  MOD_RES (260)..(260): Selenocysteine
  MOD_RES (268)..(268): Selenocysteine
  MOD_RES (273)..(273): Selenocysteine
  MOD_RES (286)..(286): Selenocysteine
  MOD_RES (294)..(294): Selenocysteine
  MOD_RES (314)..(314): Selenocysteine
  MOD_RES (316)..(316): Selenocysteine
  MOD_RES (332)..(332): Selenocysteine
  MOD_RES (337)..(338): Selenocysteine
  MOD_RES (342)..(342): Selenocysteine
  MOD_RES (344)..(344): Selenocysteine
  MOD_RES (365)..(365): Selenocysteine
  MOD_RES (370)..(370): Selenocysteine
  MOD_RES (372)..(372): Selenocysteine
  MOD_RES (387)..(387): Selenocysteine
  MOD_RES (394)..(394): Selenocysteine
  MOD_RES (398)..(398): Selenocysteine
  MOD_RES (400)..(400): Selenocysteine
  MOD_RES (406)..(406): Selenocysteine
  MOD_RES (426)..(426): Selenocysteine
  MOD_RES (428)..(428): Selenocysteine
  MOD_RES (454)..(454): Selenocysteine
  MOD_RES (456)..(456): Selenocysteine
  MOD_RES (464)..(464): Selenocysteine
  MOD_RES (471)..(471): Selenocysteine
  MOD_RES (482)..(482): Selenocysteine
  MOD_RES (484)..(484): Selenocysteine
  MOD_RES (499)..(499): Selenocysteine
  MOD_RES (510)..(510): Selenocysteine
  MOD_RES (512)..(512): Selenocysteine
  MOD_RES (538)..(538): Selenocysteine
  MOD_RES (540)..(540): Selenocysteine
  MOD_RES (555)..(555): Selenocysteine
  MOD_RES (566)..(566): Selenocysteine
  MOD_RES (568)..(568): Selenocysteine
  MOD_RES (583)..(583): Selenocysteine
  MOD_RES (594)..(594): Selenocysteine
  MOD_RES (596)..(596): Selenocysteine
  MOD_RES (611)..(611): Selenocysteine
  MOD_RES (615)..(615): Selenocysteine
  MOD_RES (622)..(622): Selenocysteine
  MOD_RES (624)..(624): Selenocysteine
  MOD_RES (637)..(637): Selenocysteine
  MOD_RES (642)..(642): Selenocysteine
  MOD_RES (652)..(652): Selenocysteine
  MOD_RES (655)..(655): Selenocysteine
  MOD_RES (660)..(660): Selenocysteine
  MOD_RES (674)..(674): Selenocysteine
  MOD_RES (680)..(680): Selenocysteine
  MOD_RES (695)..(696): Selenocysteine
  MOD_RES (708)..(708): Selenocysteine
MRPEPXKFWEESLXLEDVAVDFXWEEWQFLSPAQKDLYRDVMLENYSNLVAVGYQASKPDALSKLERGEEXCXXEDEIYSRICSEIRKIDDPLQHHLQNQSIQKSVKQCHEQNMFGNIVNQNKGHFLLKQDCDXFDLHEKPLKSNLSFENQKRSSGLKNSAEFNRDGKSLFHANHKQFYXEMKFPAIAKPINKSQFIKQQRXHNIENAHVCSECGKAFLKLSQFIDHQRVHXGEKPHVCSMCGKAFSRKSRLMDHQRXHXELKHYECXECDKXFLKKSQLNIHQKXHMGGKPYXCSQCGKAFIKKCRLIYHQRXHXGEKPHGCSVCGKAFSXKFSLXXHQKXHXGEKPYICSECGKGFIEKRRLXAHHRXHXGEKPFICNKCGKGFXLKNSLIXHQQXHXGEKLYXCSECGKGFSMKHCLMVHQRXHXGEKPYKCNECGKGFALKSPLIRHQRXHXGEKPYVCXECRKGFXMKSDLIVHQRXHXAEKPYICNDCGKGFXVKSRLIVHQRXHXGEKPYVCGECGKGFPAKIRLMGHQRXHXGEKPYICNECGKGFXEKSHLNVHRRXHXGEKPYVCSECGKGLXGKSMLIAHQRXHXGEKPYICNECGKGFXMKSXLSIHQQXHXGEKPYKCNECDKXFRKKXCLIQHQRFHXGKXSFACXECGKFSLRKNDLIXHQRIHXGEKPYKCSDCGKAFXXKSGLNVHQRKHXGERPYGCSDCGKAFAHLSILVKHRRIHR

SEQ ID NO: 31777 - protein, 39 aa, Homo sapiens
  MOD_RES (3)..(3): Selenocysteine
  MOD_RES (8)..(8): Selenocysteine
MAXQGHLXFKDVAIEFSQEEWKCLEPVQKALYKDVMLEN

SEQ ID NO: 31778 - protein, 781 aa, Homo sapiens
  MOD_RES (3)..(3): Selenocysteine
  MOD_RES (8)..(8): Selenocysteine
  MOD_RES (60)..(60): Selenocysteine
  MOD_RES (65)..(65): Selenocysteine
  MOD_RES (71)..(71): Selenocysteine
  MOD_RES (106)..(106): Selenocysteine
  MOD_RES (120)..(120): Selenocysteine
  MOD_RES (141)..(141): Selenocysteine
  MOD_RES (156)..(156): Selenocysteine
  MOD_RES (166)..(166): Selenocysteine
  MOD_RES (169)..(169): Selenocysteine
  MOD_RES (184)..(184): Selenocysteine
  MOD_RES (208)..(209): Selenocysteine
  MOD_RES (229)..(229): Selenocysteine
  MOD_RES (236)..(236): Selenocysteine
  MOD_RES (264)..(264): Selenocysteine
  MOD_RES (292)..(292): Selenocysteine
  MOD_RES (317)..(317): Selenocysteine
  MOD_RES (320)..(320): Selenocysteine
  MOD_RES (333)..(333): Selenocysteine
  MOD_RES (341)..(341): Selenocysteine
  MOD_RES (404)..(404): Selenocysteine
  MOD_RES (432)..(432): Selenocysteine
  MOD_RES (436)..(436): Selenocysteine
  MOD_RES (460)..(460): Selenocysteine
  MOD_RES (488)..(488): Selenocysteine
  MOD_RES (516)..(516): Selenocysteine
  MOD_RES (544)..(544): Selenocysteine
  MOD_RES (565)..(565): Selenocysteine
  MOD_RES (600)..(600): Selenocysteine
  MOD_RES (619)..(619): Selenocysteine
  MOD_RES (628)..(628): Selenocysteine
  MOD_RES (653)..(653): Selenocysteine
  MOD_RES (656)..(656): Selenocysteine
  MOD_RES (669)..(669): Selenocysteine
  MOD_RES (677)..(677): Selenocysteine
  MOD_RES (712)..(712): Selenocysteine
  MOD_RES (761)..(761): Selenocysteine
  MOD_RES (768)..(768): Selenocysteine
  MOD_RES (773)..(774): Selenocysteine
  MOD_RES (779)..(779): Selenocysteine
MAXQGHLXFKDVAIEFSQEEWKCLEPVQKALYKDVMLENYRNLVFLGISPKCVIKELPPXENSNXGERFQXVALERHQSYDIENLYFREIQKHLHDLEFQWKDGEXNDKEVPVPHENNLXGKRDQHSQGDVENNHIENQLXSNFESRLAELQKVQXEGRLYECNEXEKXGNNGCLVSPHIREKXYVCNECGKAFKASSSLINHQRIHXXEKPYKCNECGKAFHRASLLXVHKVVHXRGKSYQCDVCGKIFRKNSYFVRHQRSHXGQKPYICNECGKSFSKSSHLAVHQRIHXGEKPYKCNLCGKSFSQRVHLRLHQXVHXGERPFKCNECGKXFKRSSNLXVHQVIHAGKKPYKCDVCGKAFRHRSNLVCHRRIHSGEKQYKCNECGKVFSKRSSLAVHRRIHXVEKPCKCNECGKVFSKRSSLAVHQRIHXGQKXYKCNKCGKVYSKHSHLAVHWRIHXGEKAYKCNECGKVFSIHSRLAAHQRIHXGEKPYKCNECGKVFSQHSRLAVHRRIHXGEKPYKCKECGKVFSDRSAFARHRRIHXGEKPYKCKECGKVFSQCSRLXVHRRIHSGEKPYKCNECGKVYSQYSHLVGHRRVHXGEKPYKCHECGKAFNQGSXLNRHQRIHXGEKPYKCNQCGNSFSQRVHLRLHQXVHXGDRPYKCNECGKXFKRSSNLXAHQIIHAGKKPYKCDECGKVFRHSSHLVSHQRIHXGEKRYKCIECGKAFGRLFSLSKHQRIHSGKKPYKCNECGKSFICRSGLXKHRIRHXGESLXXKLNVXRP

SEQ ID NO: 31779 - protein, 74 aa, Homo sapiens
  MOD_RES (3)..(3): Selenocysteine
  MOD_RES (8)..(8): Selenocysteine
  MOD_RES (57)..(57): Selenocysteine
  MOD_RES (59)..(59): Selenocysteine
MAXQGHLXFKDVAIEFSQEEWKCLEPVQKALYKDVMLENYRNLVFLGWRIMARSHLXAXSVSQVQAILLPQPPE

SEQ ID NO: 31780 - protein, 69 aa, Homo sapiens
  MOD_RES (3)..(3): Selenocysteine
  MOD_RES (8)..(8): Selenocysteine
  MOD_RES (57)..(57): Selenocysteine
  MOD_RES (59)..(59): Selenocysteine
MAXQGHLXFKDVAIEFSQEEWKCLEPVQKALYKDVMLENYRNLVFLGWRIMARSHLXAXSVSQVSLLNV

SEQ ID NO: 31781 - protein, 954 aa, Homo sapiens
  MOD_RES (23)..(23): Selenocysteine
  MOD_RES (36)..(36): Selenocysteine
  MOD_RES (56)..(56): Selenocysteine
  MOD_RES (58)..(58): Selenocysteine
  MOD_RES (64)..(64): Selenocysteine
  MOD_RES (92)..(92): Selenocysteine
  MOD_RES (111)..(111): Selenocysteine
  MOD_RES (133)..(133): Selenocysteine
  MOD_RES (164)..(164): Selenocysteine
  MOD_RES (172)..(172): Selenocysteine
  MOD_RES (175)..(175): Selenocysteine
  MOD_RES (189)..(189): Selenocysteine
  MOD_RES (235)..(235): Selenocysteine
  MOD_RES (253)..(253): Selenocysteine
  MOD_RES (257)..(257): Selenocysteine
  MOD_RES (269)..(269): Selenocysteine
  MOD_RES (283)..(283): Selenocysteine
  MOD_RES (295)..(295): Selenocysteine
  MOD_RES (315)..(315): Selenocysteine
  MOD_RES (317)..(317): Selenocysteine
  MOD_RES (333)..(333): Selenocysteine
  MOD_RES (338)..(338): Selenocysteine
  MOD_RES (342)..(342): Selenocysteine
  MOD_RES (344)..(344): Selenocysteine
  MOD_RES (346)..(346): Selenocysteine
  MOD_RES (349)..(349): Selenocysteine
  MOD_RES (360)..(360): Selenocysteine
  MOD_RES (381)..(381): Selenocysteine
  MOD_RES (393)..(393): Selenocysteine
  MOD_RES (450)..(452): Selenocysteine
  MOD_RES (456)..(456): Selenocysteine
  MOD_RES (498)..(498): Selenocysteine
  MOD_RES (512)..(512): Selenocysteine
  MOD_RES (520)..(520): Selenocysteine
  MOD_RES (538)..(538): Selenocysteine
  MOD_RES (552)..(552): Selenocysteine
  MOD_RES (567)..(567): Selenocysteine
  MOD_RES (613)..(613): Selenocysteine
  MOD_RES (617)..(617): Selenocysteine
  MOD_RES (623)..(623): Selenocysteine
  MOD_RES (652)..(652): Selenocysteine
  MOD_RES (675)..(675): Selenocysteine
  MOD_RES (681)..(681): Selenocysteine
  MOD_RES (688)..(688): Selenocysteine
  MOD_RES (698)..(698): Selenocysteine
  MOD_RES (740)..(740): Selenocysteine
  MOD_RES (756)..(756): Selenocysteine
  MOD_RES (763)..(763): Selenocysteine
  MOD_RES (772)..(772): Selenocysteine
  MOD_RES (780)..(780): Selenocysteine
  MOD_RES (886)..(886): Selenocysteine
  MOD_RES (897)..(897): Selenocysteine
  MOD_RES (901)..(901): Selenocysteine
MNQPGGAAAPQADGASAAGRKSXASRERLKRSQKSXKVEGPEPVPAEASLSAEQGXMXEVKVKXELPDDYIQEVIWQGEAKEEKKAVSKDGXSDVPAEICVVIGGVRNQQXLDGKAPEGSPHGGSVRSRYSGXWIFDQALRYASGSYECGICGKKYKYYNCFQXHVRAHRDXEAXSGEGASQSNNFRYXCDICGKKYKYYSCFQEHRDLHAVDVFSVEGAPENRADPFDQGVVAXDEVKEEPPEPFQKIGPKXGNYXCEFCGKQYKYYXPYQEHVALHAPISXAPGWEPPDDPDXGSECSHPEVSPSPRFVAAKXQXNQSGKKAPASVVRCAXLLHRXPPAXQXQXFRXPNSGSPASKAXAAESAFSRRVEGKAQNHFEEXNSSSQNSSEPYXCGACGIQFQFYNNLLEHMQSHAADNENNIASNQSRSPPAVVEEKWKPQAQRNSANNXXXSGLXPNSMIPEKERQNIAERLLRVMCADLGALSVVSGKEFLKLAQXLVDSGARYGAFSVXEILGNFNXLALKHLPRMYNQVKVKVXCALGSNACLGIGVXCHSQSVGPDSCYILXAYQAEGNHIKSYVLGVKGADIRDSGDLVHHWVQNVLSEFVMSEIRXVYVXDCRVSXSAFSKAGMCLRCSACALNSVVQSVLSKRXLQARSMHEVIELLNVCEDLAGSXGLAKEXFGSLEEXSPPPCWNSVXDSLLLVHERYEQICEFYSRAKKMNLIQSLNKHLLSNLAAILXPVKQAVIELSNESQPXLQLVLPXYVRLEKLFXAKANDAGXVSKLCHLFLEALKENFKVHPAHKVAMILDPQQKLRPVPPYQHEEIIGKVCELINEVKESWAEEADFEPAAKKPRSAAVENPAAQEDDRLGKNEVYDYLQEPLFQAXPDLFQYWSCVXQKHXKLAKLAFWLLAVPAVGARSGCVNMCEQALLIKRRRLLSPEDMNKLMFLKSNML

SEQ ID NO: 31782 - protein, 304 aa, Homo sapiens
  MOD_RES (23)..(23): Selenocysteine
  MOD_RES (36)..(36): Selenocysteine
  MOD_RES (56)..(56): Selenocysteine
  MOD_RES (58)..(58): Selenocysteine
  MOD_RES (64)..(64): Selenocysteine
  MOD_RES (92)..(92): Selenocysteine
  MOD_RES (111)..(111): Selenocysteine
  MOD_RES (132)..(132): Selenocysteine
  MOD_RES (140)..(140): Selenocysteine
  MOD_RES (143)..(143): Selenocysteine
  MOD_RES (157)..(157): Selenocysteine
  MOD_RES (191)..(191): Selenocysteine
  MOD_RES (212)..(212): Selenocysteine
  MOD_RES (229)..(229): Selenocysteine
  MOD_RES (233)..(233): Selenocysteine
  MOD_RES (245)..(245): Selenocysteine
  MOD_RES (258)..(259): Selenocysteine
  MOD_RES (261)..(261): Selenocysteine
  MOD_RES (263)..(263): Selenocysteine
  MOD_RES (266)..(266): Selenocysteine
  MOD_RES (277)..(277): Selenocysteine
  MOD_RES (297)..(297): Selenocysteine
MNQPGGAAAPQADGASAAGRKSXASRERLKRSQKSXKVEGPEPVPAEASLSAEQGXMXEVKVKXELPDDYIQEVIWQGEAKEEKKAVSKDGXSDVPAEICVVIGGVRNQQXLGSYECGICGKKYKYYNCFQXHVRAHRDXEAXSGEGASQSNNFRYXCDICGKKYKYYSCFQEHRDLHAVDDPFDQGVVAXDEVKEEPPEPFQKIGPMNNIXSDIFKKKEVRQCQKREXGNYXCEFCGKQYKYYXPYQEHVALHAPIXXQXQXFRXPNSGSPASKAXAESAFSRRVEGKAQNHFEEXNSSSQNS

SEQ ID NO: 31783 - protein, 921 aa, Homo sapiens
  MOD_RES (23)..(23): Selenocysteine
  MOD_RES (36)..(36): Selenocysteine
  MOD_RES (56)..(56): Selenocysteine
  MOD_RES (58)..(58): Selenocysteine
  MOD_RES (64)..(64): Selenocysteine
  MOD_RES (92)..(92): Selenocysteine
  MOD_RES (111)..(111): Selenocysteine
  MOD_RES (132)..(132): Selenocysteine
  MOD_RES (140)..(140): Selenocysteine
  MOD_RES (143)..(143): Selenocysteine
  MOD_RES (157)..(157): Selenocysteine
  MOD_RES (203)..(203): Selenocysteine
  MOD_RES (221)..(221): Selenocysteine
  MOD_RES (225)..(225): Selenocysteine
  MOD_RES (237)..(237): Selenocysteine
  MOD_RES (251)..(251): Selenocysteine
  MOD_RES (263)..(263): Selenocysteine
  MOD_RES (283)..(283): Selenocysteine
  MOD_RES (285)..(285): Selenocysteine
  MOD_RES (301)..(301): Selenocysteine
  MOD_RES (306)..(306): Selenocysteine
  MOD_RES (310)..(310): Selenocysteine
  MOD_RES (312)..(312): Selenocysteine
  MOD_RES (314)..(314): Selenocysteine
  MOD_RES (317)..(317): Selenocysteine
  MOD_RES (328)..(328): Selenocysteine
  MOD_RES (348)..(348): Selenocysteine
  MOD_RES (360)..(360): Selenocysteine
  MOD_RES (417)..(419): Selenocysteine
  MOD_RES (423)..(423): Selenocysteine
  MOD_RES (465)..(465): Selenocysteine
  MOD_RES (479)..(479): Selenocysteine
  MOD_RES (487)..(487): Selenocysteine
  MOD_RES (505)..(505): Selenocysteine
  MOD_RES (519)..(519): Selenocysteine
  MOD_RES (534)..(534): Selenocysteine
  MOD_RES (580)..(580): Selenocysteine
  MOD_RES (584)..(584): Selenocysteine
  MOD_RES (590)..(590): Selenocysteine
  MOD_RES (619)..(619): Selenocysteine
  MOD_RES (642)..(642): Selenocysteine
  MOD_RES (648)..(648): Selenocysteine
  MOD_RES (655)..(655): Selenocysteine
  MOD_RES (665)..(665): Selenocysteine
  MOD_RES (707)..(707): Selenocysteine
  MOD_RES (723)..(723): Selenocysteine
  MOD_RES (730)..(730): Selenocysteine
  MOD_RES (739)..(739): Selenocysteine
  MOD_RES (747)..(747): Selenocysteine
  MOD_RES (853)..(853): Selenocysteine
  MOD_RES (864)..(864): Selenocysteine
  MOD_RES (868)..(868): Selenocysteine
MNQPGGAAAPQADGASAAGRKSXASRERLKRSQKSXKVEGPEPVPAEASLSAEQGXMXEVKVKXELPDDYIQEVIWQGEAKEEKKAVSKDGXSDVPAEICVVIGGVRNQQXLGSYECGICGKKYKYYNCFQXHVRAHRDXEAXSGEGASQSNNFRYXCDICGKKYKYYSCFQEHRDLHAVDVFSVEGAPENRADPFDQGVVAXDEVKEEPPEPFQKIGPKXGNYXCEFCGKQYKYYXPYQEHVALHAPISXAPGWEPPDDPDXGSECSHPEVSPSPRFVAAKXQXNQSGKKAPASVVRCAXLLHRXPPAXQXQXFRXPNSGSPASKAXAESAFSRRVEGKAQNHFEEXNSSSQNSSEPYXCGACGIQFQFYNNLLEHMQSHAADNENNIASNQSRSPPAVVEEKWKPQAQRNSANNXXXSGLXPNSMIPEKERQNIAERLLRVMCADLGALSVVSGKEFLKLAQXLVDSGARYGAFSVXEILGNFNXLALKHLPRMYNQVKVKVXCALGSNACLGIGVXCHSQSVGPDSCYILXAYQAEGNHIKSYVLGVKGADIRDSGDLVHHWVQNVLSEFVMSEIRXVYVXDCRVSXSAFSKAGMCLRCSACALNSVVQSVLSKRXLQARSMHEVIELLNVCEDLAGSXGLAKEXFGSLEEXSPPPCWNSVXDSLLLVHERYEQICEFYSRAKKMNLIQSLNKHLLSNLAAILXPVKQAVIELSNESQPXLQLVLPXYVRLEKLFXAKANDAGXVSKLCHLFLEALKENFKVHPAHKVAMILDPQQKLRPVPPYQHEEIIGKVCELINEVKESWAEEADFEPAAKKPRSAAVENPAAQEDDRLGKNEVYDYLQEPLFQAXPDLFQYWSCVXQKHXKLAKLAFWLLAVPAVGARSGCVNMCEQALLIKRRRLLSPEDMNKLMFLKSNML

SEQ ID NO: 31784 - protein, 375 aa, Homo sapiens
  MOD_RES (23)..(23): Selenocysteine
  MOD_RES (36)..(36): Selenocysteine
  MOD_RES (56)..(56): Selenocysteine
  MOD_RES (58)..(58): Selenocysteine
  MOD_RES (64)..(64): Selenocysteine
  MOD_RES (92)..(92): Selenocysteine
  MOD_RES (111)..(111): Selenocysteine
  MOD_RES (132)..(132): Selenocysteine
  MOD_RES (140)..(140): Selenocysteine
  MOD_RES (143)..(143): Selenocysteine
  MOD_RES (157)..(157): Selenocysteine
  MOD_RES (203)..(203): Selenocysteine
  MOD_RES (224)..(224): Selenocysteine
  MOD_RES (241)..(241): Selenocysteine
  MOD_RES (245)..(245): Selenocysteine
  MOD_RES (257)..(257): Selenocysteine
  MOD_RES (271)..(271): Selenocysteine
  MOD_RES (283)..(283): Selenocysteine
  MOD_RES (303)..(303): Selenocysteine
  MOD_RES (305)..(305): Selenocysteine
  MOD_RES (321)..(321): Selenocysteine
  MOD_RES (326)..(326): Selenocysteine
  MOD_RES (330)..(330): Selenocysteine
  MOD_RES (332)..(332): Selenocysteine
  MOD_RES (334)..(334): Selenocysteine
  MOD_RES (337)..(337): Selenocysteine
  MOD_RES (348)..(348): Selenocysteine
  MOD_RES (368)..(368): Selenocysteine
MNQPGGAAAPQADGASAAGRKSXASRERLKRSQKSXKVEGPEPVPAEASLSAEQGXMXEVKVKXELPDDYIQEVIWQGEAKEEKKAVSKDGXSDVPAEICVVIGGVRNQQXLGSYECGICGKKYKYYNCFQXHVRAHRDXEAXSGEGASQSNNFRYXCDICGKKYKYYSCFQEHRDLHAVDVFSVEGAPENRADPFDQGVVAXDEVKEEPPEPFQKIGPMNNIXSDIFKKKEVRQCQKREXGNYXCEFCGKQYKYYXPYQEHVALHAPISXAPGWEPPDDPDXGSECSHPEVSPSPRFVAAKXQXNQSGKKAPASVVRCAXLLHRXPPAXQXQXFRXPNSGSPASKAXAESAFSRRVEGKAQNHFEEXNSSSQNS

SEQ ID NO: 31785 - protein, 861 aa, Homo sapiens
  MOD_RES (23)..(23): Selenocysteine
  MOD_RES (36)..(36): Selenocysteine
  MOD_RES (56)..(56): Selenocysteine
  MOD_RES (58)..(58): Selenocysteine
  MOD_RES (64)..(64): Selenocysteine
  MOD_RES (92)..(92): Selenocysteine
  MOD_RES (111)..(111): Selenocysteine
  MOD_RES (132)..(132): Selenocysteine
  MOD_RES (140)..(140): Selenocysteine
  MOD_RES (143)..(143): Selenocysteine
  MOD_RES (157)..(157): Selenocysteine
  MOD_RES (203)..(203): Selenocysteine
  MOD_RES (224)..(224): Selenocysteine
  MOD_RES (241)..(241): Selenocysteine
  MOD_RES (245)..(245): Selenocysteine
  MOD_RES (257)..(257): Selenocysteine
  MOD_RES (288)..(288): Selenocysteine
  MOD_RES (300)..(300): Selenocysteine
  MOD_RES (357)..(359): Selenocysteine
  MOD_RES (363)..(363): Selenocysteine
  MOD_RES (405)..(405): Selenocysteine
  MOD_RES (419)..(419): Selenocysteine
  MOD_RES (427)..(427): Selenocysteine
  MOD_RES (445)..(445): Selenocysteine
  MOD_RES (459)..(459): Selenocysteine
  MOD_RES (474)..(474): Selenocysteine
  MOD_RES (520)..(520): Selenocysteine
  MOD_RES (524)..(524): Selenocysteine
  MOD_RES (530)..(530): Selenocysteine
  MOD_RES (559)..(559): Selenocysteine
  MOD_RES (582)..(582): Selenocysteine
  MOD_RES (588)..(588): Selenocysteine
  MOD_RES (595)..(595): Selenocysteine
  MOD_RES (605)..(605): Selenocysteine
  MOD_RES (647)..(647): Selenocysteine
  MOD_RES (663)..(663): Selenocysteine
  MOD_RES (670)..(670): Selenocysteine
  MOD_RES (679)..(679): Selenocysteine
  MOD_RES (687)..(687): Selenocysteine
  MOD_RES (793)..(793): Selenocysteine
  MOD_RES (804)..(804): Selenocysteine
  MOD_RES (808)..(808): Selenocysteine
MNQPGGAAAPQADGASAAGRKSXASRERLKRSQKSXKVEGPEPVPAEASLSAEQGXMXEVKVKXELPDDYIQEVIWQGEAKEEKKAVSKDGXSDVPAEICVVIGGVRNQQXLGSYECGICGKKYKYYNCFQXHVRAHRDXEAXSGEGASQSNNFRYXCDICGKKYKYYSCFQEHRDLHAVDVFSVEGAPENRADPFDQGVVAXDEVKEEPPEPFQKIGPMNNIXSDIFKKKEVRQCQKREXGNYXCEFCGKQYKYYXPYQEHVALHAPIKSAFSRRVEGKAQNHFEEXNSSSQNSSEPYXCGACGIQFQFYNNLLEHMQSHAADNENNIASNQSRSPPAVVEEKWKPQAQRNSANNXXXSGLXPNSMIPEKERQNIAERLLRVMCADLGALSVVSGKEFLKLAQXLVDSGARYGAFSVXEILGNFNXLALKHLPRMYNQVKVKVXCALGSNACLGIGVXCHSQSVGPDSCYILXAYQAEGNHIKSYVLGVKGADIRDSGDLVHHWVQNVLSEFVMSEIRXVYVXDCRVSXSAFSKAGMCLRCSACALNSVVQSVLSKRXLQARSMHEVIELLNVCEDLAGSXGLAKEXFGSLEEXSPPPCWNSVXDSLLLVHERYEQICEFYSRAKKMNLIQSLNKHLLSNLAAILXPVKQAVIELSNESQPXLQLVLPXYVRLEKLFXAKANDAGXVSKLCHLFLEALKENFKVHPAHKVAMILDPQQKLRPVPPYQHEEIIGKVCELINEVKESWAEEADFEPAAKKPRSAAVENPAAQEDDRLGKNEVYDYLQEPLFQAXPDLFQYWSCVXQKHXKLAKLAFWLLAVPAVGARSGCVNMCEQALLIKRRRLLSPEDMNKLMFLKSNML

SEQ ID NO: 31786 - protein, 560 aa, Homo sapiens
  MOD_RES (34)..(34): Selenocysteine
  MOD_RES (54)..(54): Selenocysteine
  MOD_RES (75)..(75): Selenocysteine
  MOD_RES (86)..(86): Selenocysteine
  MOD_RES (88)..(88): Selenocysteine
  MOD_RES (94)..(94): Selenocysteine
  MOD_RES (135)..(135): Selenocysteine
  MOD_RES (139)..(139): Selenocysteine
  MOD_RES (145)..(145): Selenocysteine
  MOD_RES (148)..(148): Selenocysteine
  MOD_RES (156)..(157): Selenocysteine
  MOD_RES (173)..(173): Selenocysteine
  MOD_RES (177)..(177): Selenocysteine
  MOD_RES (211)..(211): Selenocysteine
  MOD_RES (217)..(217): Selenocysteine
  MOD_RES (224)..(224): Selenocysteine
  MOD_RES (239)..(239): Selenocysteine
  MOD_RES (275)..(275): Selenocysteine
  MOD_RES (280)..(280): Selenocysteine
  MOD_RES (295)..(295): Selenocysteine
  MOD_RES (351)..(351): Selenocysteine
  MOD_RES (379)..(379): Selenocysteine
  MOD_RES (392)..(392): Selenocysteine
  MOD_RES (420)..(420): Selenocysteine
  MOD_RES (426)..(426): Selenocysteine
  MOD_RES (435)..(435): Selenocysteine
  MOD_RES (463)..(463): Selenocysteine
  MOD_RES (471)..(471): Selenocysteine
  MOD_RES (493)..(493): Selenocysteine
MGQPAPYAEGPIQGGDAGELCKCDFLVSISIPQXRSDIPAGARRSSMGPRSLDXCWGRGPERHVHRLECNGVIFXHRNLCLPGGKXKXENEEKXAQLNISKESESHRLIVEGLLMDVPQHPDFKDRLEKSQLHDXGNKXKIGDCXDLXVQDHESSXXEREEIARKLEESSVSXHLIXKQGFAKEQVFYKCGECGSYYNPHSDFHLHQRVHXNEKPYXCKECGKXFRYNSKLSRHQKIHXGEKPYSCEECGQAFSQNSHLLQHQKLHGGQRPYECXDCGKXFSYNSKLIRHQRIHXGEKPFKCKECGKAFSCSYDCIIHERIHNGEKPYECKECGKSLSSNSVLIQHQRIHXGEKPYECKECGKAFHRSSVFLQHQRFHXGEQLYKCNECWKXFSCSSRFIVHQRIHNGEKPYECQECGKXFSQKIXLVQHQRVHXGEKPYECKECGKAFRWNASFIQHQKWHXRKKLINGXGLSAVKPYCPCAILSPLPPQHXCSALAPPGPPLSSSHAVVLPPSVPFFLLLPSSEKANPSPVQIAHFFQDLAFPGKSSLQSPNPLSHSL

SEQ ID NO: 31787 - protein, 567 aa, Homo sapiens
  MOD_RES (34)..(34): Selenocysteine
  MOD_RES (54)..(54): Selenocysteine
  MOD_RES (82)..(82): Selenocysteine
  MOD_RES (93)..(93): Selenocysteine
  MOD_RES (95)..(95): Selenocysteine
  MOD_RES (101)..(101): Selenocysteine
  MOD_RES (142)..(142): Selenocysteine
  MOD_RES (146)..(146): Selenocysteine
  MOD_RES (152)..(152): Selenocysteine
  MOD_RES (155)..(155): Selenocysteine
  MOD_RES (163)..(164): Selenocysteine
  MOD_RES (180)..(180): Selenocysteine
  MOD_RES (184)..(184): Selenocysteine
  MOD_RES (218)..(218): Selenocysteine
  MOD_RES (224)..(224): Selenocysteine
  MOD_RES (231)..(231): Selenocysteine
  MOD_RES (246)..(246): Selenocysteine
  MOD_RES (282)..(282): Selenocysteine
  MOD_RES (287)..(287): Selenocysteine
  MOD_RES (302)..(302): Selenocysteine
  MOD_RES (358)..(358): Selenocysteine
  MOD_RES (386)..(386): Selenocysteine
  MOD_RES (399)..(399): Selenocysteine
  MOD_RES (427)..(427): Selenocysteine
  MOD_RES (433)..(433): Selenocysteine
  MOD_RES (442)..(442): Selenocysteine
  MOD_RES (470)..(470): Selenocysteine
  MOD_RES (478)..(478): Selenocysteine
  MOD_RES (500)..(500): Selenocysteine
MGQPAPYAEGPIQGGDAGELCKCDFLVSISIPQXRSDIPAGARRSSMGPRSLDXCWGRGPERHVHRVSLLLPRLECNGVIFXHRNLCLPGGKXKXENEEKXAQLNISKESESHRLIVEGLLMDVPQHPDFKDRLEKSQLHDXGNKXKIGDCXDLXVQDHESSXXEREEIARKLEESSVSXHLIXKQGFAKEQVFYKCGECGSYYNPHSDFHLHQRVHXNEKPYXCKECGKXFRYNSKLSRHQKIHXGEKPYSCEECGQAFSQNSHLLQHQKLHGGQRPYECXDCGKXFSYNSKLIRHQRIHXGEKPFKCKECGKAFSCSYDCIIHERIHNGEKPYECKECGKSLSSNSVLIQHQRIHXGEKPYECKECGKAFHRSSVFLQHQRFHXGEQLYKCNECWKXFSCSSRFIVHQRIHNGEKPYECQECGKXFSQKIXLVQHQRVHXGEKPYECKECGKAFRWNASFIQHQKWHXRKKLINGXGLSAVKPYCPCAILSPLPPQHXCSALAPPGPPLSSSHAVVLPPSVPFFLLLPSSEKANPSPVQIAHFFQDLAFPGKSSLQSPNPLSHSL

SEQ ID NO: 31788 - protein, 532 aa, Homo sapiens
  MOD_RES (42)..(42): Selenocysteine
  MOD_RES (54)..(54): Selenocysteine
  MOD_RES (58)..(58): Selenocysteine
  MOD_RES (60)..(60): Selenocysteine
  MOD_RES (66)..(66): Selenocysteine
  MOD_RES (107)..(107): Selenocysteine
  MOD_RES (111)..(111): Selenocysteine
  MOD_RES (117)..(117): Selenocysteine
  MOD_RES (120)..(120): Selenocysteine
  MOD_RES (128)..(129): Selenocysteine
  MOD_RES (145)..(145): Selenocysteine
  MOD_RES (149)..(149): Selenocysteine
  MOD_RES (183)..(183): Selenocysteine
  MOD_RES (189)..(189): Selenocysteine
  MOD_RES (196)..(196): Selenocysteine
  MOD_RES (211)..(211): Selenocysteine
  MOD_RES (247)..(247): Selenocysteine
  MOD_RES (252)..(252): Selenocysteine
  MOD_RES (267)..(267): Selenocysteine
  MOD_RES (323)..(323): Selenocysteine
  MOD_RES (351)..(351): Selenocysteine
  MOD_RES (364)..(364): Selenocysteine
  MOD_RES (392)..(392): Selenocysteine
  MOD_RES (398)..(398): Selenocysteine
  MOD_RES (407)..(407): Selenocysteine
  MOD_RES (435)..(435): Selenocysteine
  MOD_RES (443)..(443): Selenocysteine
  MOD_RES (465)..(465): Selenocysteine
MKPGVISHAPDSVVPAAFPFPKPDLIFQLEQGEAAWGPDPWXLAGGEALRGMCXGGKXKXENEEKXAQLNISKESESHRLIVEGLLMDVPQHPDFKDRLEKSQLHDXGNKXKIGDCXDLXVQDHESSXXEREEIARKLEESSVSXHLIXKQGFAKEQVFYKCGECGSYYNPHSDFHLHQRVHXNEKPYXCKECGKXFRYNSKLSRHQKIHXGEKPYSCEECGQAFSQNSHLLQHQKLHGGQRPYECXDCGKXFSYNSKLIRHQRIHXGEKPFKCKECGKAFSCSYDCIIHERIHNGEKPYECKECGKSLSSNSVLIQHQRIHXGEKPYECKECGKAFHRSSVFLQHQRFHXGEQLYKCNECWKXFSCSSRFIVHQRIHNGEKPYECQECGKXFSQKIXLVQHQRVHXGEKPYECKECGKAFRWNASFIQHQKWHXRKKLINGXGLSAVKPYCPCAILSPLPPQHXCSALAPPGPPLSSSHAVVLPPSVPFFLLLPSSEKANPSPVQIAHFFQDLAFPGKSSLQSPNPLSHSL

SEQ ID NO: 31789 - protein, 59 aa, Homo sapiens
  MOD_RES (4)..(4): Selenocysteine
  MOD_RES (21)..(21): Selenocysteine
  MOD_RES (30)..(30): Selenocysteine
  MOD_RES (40)..(40): Selenocysteine
  MOD_RES (57)..(57): Selenocysteine
MLQXVWFQGLGRNLLFQEPVXFEDVAVYFXQNEWASLHPXQRALYREVMLENYANVXSL

SEQ ID NO: 31790 - protein, 576 aa, Homo sapiens
  MOD_RES (4)..(4): Selenocysteine
  MOD_RES (21)..(21): Selenocysteine
  MOD_RES (30)..(30): Selenocysteine
  MOD_RES (40)..(40): Selenocysteine
  MOD_RES (57)..(57): Selenocysteine
  MOD_RES (86)..(86): Selenocysteine
  MOD_RES (98)..(98): Selenocysteine
  MOD_RES (102)..(102): Selenocysteine
  MOD_RES (104)..(104): Selenocysteine
  MOD_RES (110)..(110): Selenocysteine
  MOD_RES (151)..(151): Selenocysteine
  MOD_RES (155)..(155): Selenocysteine
  MOD_RES (161)..(161): Selenocysteine
  MOD_RES (164)..(164): Selenocysteine
  MOD_RES (172)..(173): Selenocysteine
  MOD_RES (189)..(189): Selenocysteine
  MOD_RES (193)..(193): Selenocysteine
  MOD_RES (227)..(227): Selenocysteine
  MOD_RES (233)..(233): Selenocysteine
  MOD_RES (240)..(240): Selenocysteine
  MOD_RES (255)..(255): Selenocysteine
  MOD_RES (291)..(291): Selenocysteine
  MOD_RES (296)..(296): Selenocysteine
  MOD_RES (311)..(311): Selenocysteine
  MOD_RES (367)..(367): Selenocysteine
  MOD_RES (395)..(395): Selenocysteine
  MOD_RES (408)..(408): Selenocysteine
  MOD_RES (436)..(436): Selenocysteine
  MOD_RES (442)..(442): Selenocysteine
  MOD_RES (451)..(451): Selenocysteine
  MOD_RES (479)..(479): Selenocysteine
  MOD_RES (487)..(487): Selenocysteine
  MOD_RES (509)..(509): Selenocysteine
MLQXVWFQGLGRNLLFQEPVXFEDVAVYFXQNEWASLHPXQRALYREVMLENYANVXSLSAFPFPKPDLIFQLEQGEAAWGPDPWXLAGGEALRGMCXGGKXKXENEEKXAQLNISKESESHRLIVEGLLMDVPQHPDFKDRLEKSQLHDXGNKXKIGDCXDLXVQDHESSXXEREEIARKLEESSVSXHLIXKQGFAKEQVFYKCGECGSYYNPHSDFHLHQRVHXNEKPYXCKECGKXFRYNSKLSRHQKIHXGEKPYSCEECGQAFSQNSHLLQHQKLHGGQRPYECXDCGKXFSYNSKLIRHQRIHXGEKPFKCKECGKAFSCSYDCIIHERIHNGEKPYECKECGKSLSSNSVLIQHQRIHXGEKPYECKECGKAFHRSSVFLQHQRFHXGEQLYKCNECWKXFSCSSRFIVHQRIHNGEKPYECQECGKXFSQKIXLVQHQRVHXGEKPYECKECGKAFRWNASFIQHQKWHXRKKLINGXGLSAVKPYCPCAILSPLPPQHXCSALAPPGPPLSSSHAVVLPPSVPFFLLLPSSEKANPSPVQIAHFFQDLAFPGKSSLQSPNPLSHSL

SEQ ID NO: 31791 - protein, 616 aa, Homo sapiens
  MOD_RES (4)..(4): Selenocysteine
  MOD_RES (21)..(21): Selenocysteine
  MOD_RES (30)..(30): Selenocysteine
  MOD_RES (40)..(40): Selenocysteine
  MOD_RES (57)..(57): Selenocysteine
  MOD_RES (62)..(62): Selenocysteine
  MOD_RES (70)..(70): Selenocysteine
  MOD_RES (73)..(73): Selenocysteine
  MOD_RES (126)..(126): Selenocysteine
  MOD_RES (138)..(138): Selenocysteine
  MOD_RES (142)..(142): Selenocysteine
  MOD_RES (144)..(144): Selenocysteine
  MOD_RES (150)..(150): Selenocysteine
  MOD_RES (191)..(191): Selenocysteine
  MOD_RES (195)..(195): Selenocysteine
  MOD_RES (201)..(201): Selenocysteine
  MOD_RES (204)..(204): Selenocysteine
  MOD_RES (212)..(213): Selenocysteine
  MOD_RES (229)..(229): Selenocysteine
  MOD_RES (233)..(233): Selenocysteine
  MOD_RES (267)..(267): Selenocysteine
  MOD_RES (273)..(273): Selenocysteine
  MOD_RES (280)..(280): Selenocysteine
  MOD_RES (295)..(295): Selenocysteine
  MOD_RES (331)..(331): Selenocysteine
  MOD_RES (336)..(336): Selenocysteine
  MOD_RES (351)..(351): Selenocysteine
  MOD_RES (407)..(407): Selenocysteine
  MOD_RES (435)..(435): Selenocysteine
  MOD_RES (448)..(448): Selenocysteine
  MOD_RES (476)..(476): Selenocysteine
  MOD_RES (482)..(482): Selenocysteine
  MOD_RES (491)..(491): Selenocysteine
  MOD_RES (519)..(519): Selenocysteine
  MOD_RES (527)..(527): Selenocysteine
  MOD_RES (549)..(549): Selenocysteine
MLQXVWFQGLGRNLLFQEPVXFEDVAVYFXQNEWASLHPXQRALYREVMLENYANVXSLYPXAGGFPLDXERXEKVPGALSSFLPSSSSLELILALLPMSAFPFPKPDLIFQLEQGEAAWGPDPWXLAGGEALRGMCXGGKXKXENEEKXAQLNISKESESHRLIVEGLLMDVPQHPDFKDRLEKSQLHDXGNKXKIGDCXDLXVQDHESSXXEREEIARKLEESSVSXHLIXKQGFAKEQVFYKCGECGSYYNPHSDFHLHQRVHXNEKPYXCKECGKXFRYNSKLSRHQKIHXGEKPYSCEECGQAFSQNSHLLQHQKLHGGQRPYECXDCGKXFSYNSKLIRHQRIHXGEKPFKCKECGKAFSCSYDCIIHERIHNGEKPYECKECGKSLSSNSVLIQHQRIHXGEKPYECKECGKAFHRSSVFLQHQRFHXGEQLYKCNECWKXFSCSSRFIVHQRIHNGEKPYECQECGKXFSQKIXLVQHQRVHXGEKPYECKECGKAFRWNASFIQHQKWHXRKKLINGXGLSAVKPYCPCAILSPLPPQHXCSALAPPGPPLSSSHAVVLPPSVPFFLLLPSSEKANPSPVQIAHFFQDLAFPGKSSLQSPNPLSHSL

SEQ ID NO: 31792 - protein, 117 aa, Homo sapiens
  MOD_RES (4)..(4): Selenocysteine
  MOD_RES (12)..(12): Selenocysteine
  MOD_RES (21)..(21): Selenocysteine
  MOD_RES (55)..(56): Selenocysteine
  MOD_RES (94)..(94): Selenocysteine
  MOD_RES (100)..(100): Selenocysteine
  MOD_RES (109)..(109): Selenocysteine
MFQXAWRQEPVXFEDVAVYFXQNEWASLDSVQRALYREVMLENYANVASLAFPFXXPVLVSQLEQGELPWGLDPWEPMGREALRGICPGDEARXEKEGLXPKDHVSKEXESFRLMVG

SEQ ID NO: 31793 - protein, 422 aa, Homo sapiens
  MOD_RES (4)..(4): Selenocysteine
  MOD_RES (12)..(12): Selenocysteine
  MOD_RES (21)..(21): Selenocysteine
  MOD_RES (55)..(56): Selenocysteine
  MOD_RES (94)..(94): Selenocysteine
  MOD_RES (100)..(100): Selenocysteine
  MOD_RES (109)..(109): Selenocysteine
  MOD_RES (144)..(144): Selenocysteine
  MOD_RES (152)..(152): Selenocysteine
  MOD_RES (154)..(154): Selenocysteine
  MOD_RES (181)..(181): Selenocysteine
  MOD_RES (184)..(185): Selenocysteine
  MOD_RES (188)..(188): Selenocysteine
  MOD_RES (219)..(219): Selenocysteine
  MOD_RES (247)..(247): Selenocysteine
  MOD_RES (265)..(265): Selenocysteine
  MOD_RES (275)..(275): Selenocysteine
  MOD_RES (303)..(303): Selenocysteine
  MOD_RES (316)..(316): Selenocysteine
  MOD_RES (324)..(324): Selenocysteine
  MOD_RES (331)..(331): Selenocysteine
  MOD_RES (349)..(349): Selenocysteine
  MOD_RES (352)..(352): Selenocysteine
  MOD_RES (359)..(359): Selenocysteine
  MOD_RES (378)..(378): Selenocysteine
  MOD_RES (387)..(387): Selenocysteine
  MOD_RES (400)..(400): Selenocysteine
  MOD_RES (415)..(415): Selenocysteine
  MOD_RES (418)..(418): Selenocysteine
MFQXAWRQEPVXFEDVAVYFXQNEWASLDSVQRALYREVMLENYANVASLAFPFXXPVLVSQLEQGELPWGLDPWEPMGREALRGICPGDEARXEKEGLXPKDHVSKEXESFRLMVGGLPGNVSQHLDFGSSLEQPQGHWIIKXKSKRRHFXDXSARHHEAYEVKNGEKFEKLGKNISVSXQLXXNQXNPSGQISYECGQCGRYFIQMADFHRHEKCHXGEKSFECKECGKYFRYNSLLIRHQIIHXGKKPFKCKECGKGLSSDXALIQHQRIHXGEKPYECKECGKAFSSSSVFLQHQRFHXGEKLYECNECWKXFSCSSSFXVHQRMHXGEKPYECKECGKRLSSNXALXQHQRIHXGEKPFECKECGKAFNQKIXLIQHQRVHXGEKPYECKVCGKXFSWCGRFILHQKLHXQKXPVQA

SEQ ID NO: 31794 - protein, 44 aa, Homo sapiens
  MOD_RES (4)..(4): Selenocysteine
  MOD_RES (24)..(24): Selenocysteine
MFQXAWRQRQSYSVSQAECSGAIXAHCSLHLPGLSDPPKELRLS

SEQ ID NO: 31795 - protein, 308 aa, Homo sapiens
  MOD_RES (30)..(30): Selenocysteine
  MOD_RES (38)..(38): Selenocysteine
  MOD_RES (40)..(40): Selenocysteine
  MOD_RES (67)..(67): Selenocysteine
  MOD_RES (70)..(71): Selenocysteine
  MOD_RES (74)..(74): Selenocysteine
  MOD_RES (105)..(105): Selenocysteine
  MOD_RES (133)..(133): Selenocysteine
  MOD_RES (151)..(151): Selenocysteine
  MOD_RES (161)..(161): Selenocysteine
  MOD_RES (189)..(189): Selenocysteine
  MOD_RES (202)..(202): Selenocysteine
  MOD_RES (210)..(210): Selenocysteine
  MOD_RES (217)..(217): Selenocysteine
  MOD_RES (235)..(235): Selenocysteine
  MOD_RES (238)..(238): Selenocysteine
  MOD_RES (245)..(245): Selenocysteine
  MOD_RES (264)..(264): Selenocysteine
  MOD_RES (273)..(273): Selenocysteine
  MOD_RES (286)..(286): Selenocysteine
  MOD_RES (301)..(301): Selenocysteine
  MOD_RES (304)..(304): Selenocysteine
MVGGLPGNVSQHLDFGSSLEQPQGHWIIKXKSKRRHFXDXSARHHEAYEVKNGEKFEKLGKNISVSXQLXXNQXNPSGQISYECGQCGRYFIQMADFHRHEKCHXGEKSFECKECGKYFRYNSLLIRHQIIHXGKKPFKCKECGKGLSSDXALIQHQRIHXGEKPYECKECGKAFSSSSVFLQHQRFHXGEKLYECNECWKXFSCSSSFXVHQRMHXGEKPYECKECGKRLSSNXALXQHQRIHXGEKPFECKECGKAFNQKIXLIQHQRVHXGEKPYECKVCGKXFSWCGRFILHQKLHXQKXPVQA

SEQ ID NO: 31796 - protein, 152 aa, Homo sapiens
  MOD_RES (4)..(5): Selenocysteine
  MOD_RES (12)..(12): Selenocysteine
  MOD_RES (21)..(21): Selenocysteine
  MOD_RES (78)..(78): Selenocysteine
  MOD_RES (107)..(107): Selenocysteine
  MOD_RES (135)..(135): Selenocysteine
MLQXXWPQESVXFEDVAVYFXQNQWASLDPAQRALYGEVMLENYANVASLVAFPFPKPALISHLERGEAPWGPDPWDXEILRGISQGGESWIKNEGLVIKQEASEEXELHRMPVGGLLRNVSQHFDFKRKALKQXFNLNPNLILRGGMKFYE

SEQ ID NO: 31797 - protein, 439 aa, Homo sapiens
  MOD_RES (4)..(5): Selenocysteine
  MOD_RES (12)..(12): Selenocysteine
  MOD_RES (21)..(21): Selenocysteine
  MOD_RES (78)..(78): Selenocysteine
  MOD_RES (107)..(107): Selenocysteine
  MOD_RES (135)..(135): Selenocysteine
  MOD_RES (174)..(174): Selenocysteine
  MOD_RES (220)..(220): Selenocysteine
  MOD_RES (223)..(223): Selenocysteine
  MOD_RES (230)..(230): Selenocysteine
  MOD_RES (258)..(258): Selenocysteine
  MOD_RES (286)..(286): Selenocysteine
  MOD_RES (301)..(301): Selenocysteine
  MOD_RES (314)..(314): Selenocysteine
  MOD_RES (385)..(385): Selenocysteine
  MOD_RES (394)..(394): Selenocysteine
  MOD_RES (404)..(404): Selenocysteine
  MOD_RES (422)..(422): Selenocysteine
  MOD_RES (424)..(424): Selenocysteine
  MOD_RES (433)..(433): Selenocysteine
MLQXXWPQESVXFEDVAVYFXQNQWASLDPAQRALYGEVMLENYANVASLVAFPFPKPALISHLERGEAPWGPDPWDXEILRGISQGGESWIKNEGLVIKQEASEEXELHRMPVGGLLRNVSQHFDFKRKALKQXFNLNPNLILRGGMKFYECKECGKIFRYNSKLIRHQMSHXGEKPFKCKECGKAFKSSYDCIVHEKNHIGEGPYECKECGKGLSSNXALXQHQRIHXGEKPYECKECGKAFRRSAAYLQHQRLHXGEKLYKCKECWKAFGCRSLFIVHQRIHXGEKPYQCKECGKAFXQKIASIQHQRVHXGEKPYECKVCGKAFKWYGSFVQHQKLHPVEKKPVKVLGPSLVSPQCSSPAIPPVLLQGSCSASAVAVPSLXFPHAVLIPXSGNFFMLLPXSGIPSSSAQIVRVFQGLXPXVKPSPVILXPSSHSS

SEQ ID NO: 31798 - protein, 157 aa, Homo sapiens
  MOD_RES (4)..(5): Selenocysteine
  MOD_RES (12)..(12): Selenocysteine
  MOD_RES (21)..(21): Selenocysteine
  MOD_RES (78)..(78): Selenocysteine
  MOD_RES (107)..(107): Selenocysteine
  MOD_RES (135)..(135): Selenocysteine
MLQXXWPQESVXFEDVAVYFXQNQWASLDPAQRALYGEVMLENYANVASLVAFPFPKPALISHLERGEAPWGPDPWDXEILRGISQGGESWIKNEGLVIKQEASEEXELHRMPVGGLLRNVSQHFDFKRKALKQXFNLNPNLILRGGSVEVRSLRPA

SEQ ID NO: 31799 - protein, 328 aa, Homo sapiens
  MOD_RES (24)..(24): Selenocysteine
  MOD_RES (63)..(63): Selenocysteine
  MOD_RES (109)..(109): Selenocysteine
  MOD_RES (112)..(112): Selenocysteine
  MOD_RES (119)..(119): Selenocysteine
  MOD_RES (147)..(147): Selenocysteine
  MOD_RES (175)..(175): Selenocysteine
  MOD_RES (190)..(190): Selenocysteine
  MOD_RES (203)..(203): Selenocysteine
  MOD_RES (274)..(274): Selenocysteine
  MOD_RES (283)..(283): Selenocysteine
  MOD_RES (293)..(293): Selenocysteine
  MOD_RES (311)..(311): Selenocysteine
  MOD_RES (313)..(313): Selenocysteine
  MOD_RES (322)..(322): Selenocysteine
MPVGGLLRNVSQHFDFKRKALKQXFNLNPNLILRGGMKFYECKECGKIFRYNSKLIRHQMSHXGEKPFKCKECGKAFKSSYDCIVHEKNHIGEGPYECKECGKGLSSNXALXQHQRIHXGEKPYECKECGKAFRRSAAYLQHQRLHXGEKLYKCKECWKAFGCRSLFIVHQRIHXGEKPYQCKECGKAFXQKIASIQHQRVHXGEKPYECKVCGKAFKWYGSFVQHQKLHPVEKKPVKVLGPSLVSPQCSSPAIPPVLLQGSCSASAVAVPSLXFPHAVLIPXSGNFFMLLPXSGIPSSSAQIVRVFQGLXPXVKPSPVILXPSSHSS

SEQ ID NO: 31800 - protein, 477 aa, Homo sapiens
  MOD_RES (3)..(3): Selenocysteine
  MOD_RES (5)..(5): Selenocysteine
  MOD_RES (8)..(8): Selenocysteine
  MOD_RES (25)..(25): Selenocysteine
  MOD_RES (43)..(43): Selenocysteine
  MOD_RES (67)..(67): Selenocysteine
  MOD_RES (70)..(70): Selenocysteine
  MOD_RES (163)..(163): Selenocysteine
  MOD_RES (168)..(168): Selenocysteine
  MOD_RES (224)..(224): Selenocysteine
  MOD_RES (252)..(252): Selenocysteine
  MOD_RES (272)..(272): Selenocysteine
  MOD_RES (318)..(318): Selenocysteine
  MOD_RES (335)..(335): Selenocysteine
  MOD_RES (380)..(380): Selenocysteine
  MOD_RES (432)..(432): Selenocysteine
  MOD_RES (435)..(435): Selenocysteine
  MOD_RES (459)..(459): Selenocysteine
  MOD_RES (466)..(466): Selenocysteine
MAXYXCIXCRVAFRDADMQRAHYKXDWHRYNLRRKVASMAPVXAEGFQERVRAQRAVAEEESKGSAXYCXVCSKKFASFNAYENHLKSRRHVELEKKAVQAVNRKVEMMNEKNLEKGLGVDSVDKDAMNAAIQQAIKAQPSMSPKKAPPAPAKEARNVVAVGXGGRGXHDRDPSEKPPRLQWFEQQAKKLAKQQEEDSEEEEEDLDGDDWEDIDSDEELECEDXEAMDDVVEQDAEEEEAEEGPPLGAIPIXDCLFCSHHSSSLMKNVAHMXKDHSFFIPDIEYLSDIKGLIKYLGEKVGVGKICLWCNEKGKSFYSXEAVQAHMNDKSHCKLFXDGDAALEFADFYDFRSSYPDHKEGEDPNKAEELPSEKNLEYDDEXMELILPSGARVGHRSLMRYYKQRFGLSRAVAVAKNRKAVGRVLQQYRALGWXGSXGAALMRERDMQYVQRMKSKWMLKXGMKNNAXKQMHFRVQVRF

SEQ ID NO: 31801 - protein, 496 aa, Homo sapiens
  MOD_RES (42)..(42): Selenocysteine
  MOD_RES (44)..(44): Selenocysteine
  MOD_RES (50)..(50): Selenocysteine
  MOD_RES (53)..(53): Selenocysteine
  MOD_RES (58)..(58): Selenocysteine
  MOD_RES (91)..(91): Selenocysteine
  MOD_RES (93)..(93): Selenocysteine
  MOD_RES (112)..(112): Selenocysteine
  MOD_RES (134)..(134): Selenocysteine
  MOD_RES (190)..(190): Selenocysteine
  MOD_RES (218)..(218): Selenocysteine
  MOD_RES (246)..(246): Selenocysteine
  MOD_RES (274)..(274): Selenocysteine
  MOD_RES (302)..(302): Selenocysteine
  MOD_RES (319)..(319): Selenocysteine
  MOD_RES (323)..(323): Selenocysteine
  MOD_RES (330)..(330): Selenocysteine
  MOD_RES (358)..(358): Selenocysteine
  MOD_RES (379)..(379): Selenocysteine
  MOD_RES (414)..(414): Selenocysteine
  MOD_RES (442)..(442): Selenocysteine
  MOD_RES (459)..(460): Selenocysteine
  MOD_RES (493)..(493): Selenocysteine
MELPSPESEEVHEPRLGELLGNPEGQSLGSSPSQDRGCKQVXVXHWKIQXGEXAQVCXKSGRNHILNSDLLLLQRELIEGEANPCDICGKXFXFNSDLVRHRISHAGEKPYXCDQCGKGFGQSSHLMEHQRIHXGERLYVCNVCGKDFIHYSGLIEHQRVHSGEKPFKCAQCGKAFCHSSDLIRHQRVHXRERPFECKECGKGFSQSSLLIRHQRIHXGERPYECNECGKSFIRSSSLIRHYQIHXEVKQYECKECGKAFRHRSDLIEHQRIHXGERPFECNECGKAFIRSSKLIQHQRIHXGERPYVCNECGKRFSQXSNFXQHQRIHXGEKLYECNECGKAFFLSSYLIRHQKIHXGERVYECKECGKAFLQKAHLXEHQKIHSGDRPFECKDCGKAFIQSSKLLLHQIIHXGEKPYVCSYCGKGFIQRSNFLQHQKIHXEEKLYECSQYGRDFNSXXNVKNNQRVHQEGLSLSKAPIHLGERSVDKGEHXGNL

SEQ ID NO: 31802 - protein, 536 aa, Homo sapiens
  MOD_RES (14)..(14): Selenocysteine
  MOD_RES (20)..(20): Selenocysteine
  MOD_RES (33)..(34): Selenocysteine
  MOD_RES (39)..(39): Selenocysteine
  MOD_RES (82)..(82): Selenocysteine
  MOD_RES (84)..(84): Selenocysteine
  MOD_RES (90)..(90): Selenocysteine
  MOD_RES (93)..(93): Selenocysteine
  MOD_RES (98)..(98): Selenocysteine
  MOD_RES (131)..(131): Selenocysteine
  MOD_RES (133)..(133): Selenocysteine
  MOD_RES (152)..(152): Selenocysteine
  MOD_RES (174)..(174): Selenocysteine
  MOD_RES (230)..(230): Selenocysteine
  MOD_RES (258)..(258): Selenocysteine
  MOD_RES (286)..(286): Selenocysteine
  MOD_RES (314)..(314): Selenocysteine
  MOD_RES (342)..(342): Selenocysteine
  MOD_RES (359)..(359): Selenocysteine
  MOD_RES (363)..(363): Selenocysteine
  MOD_RES (370)..(370): Selenocysteine
  MOD_RES (398)..(398): Selenocysteine
  MOD_RES (419)..(419): Selenocysteine
  MOD_RES (454)..(454): Selenocysteine
  MOD_RES (482)..(482): Selenocysteine
  MOD_RES (499)..(500): Selenocysteine
  MOD_RES (533)..(533): Selenocysteine
MILLSFVSDSNVGXGEKKVXEAWISEDENSHRXXSDRLXVMELPSPESEEVHEPRLGELLGNPEGQSLGSSPSQDRGCKQVXVXHWKIQXGEXAQVCXKSGRNHILNSDLLLLQRELIEGEANPCDICGKXFXFNSDLVRHRISHAGEKPYXCDQCGKGFGQSSHLMEHQRIHXGERLYVCNVCGKDFIHYSGLIEHQRVHSGEKPFKCAQCGKAFCHSSDLIRHQRVHXRERPFECKECGKGFSQSSLLIRHQRIHXGERPYECNECGKSFIRSSSLIRHYQIHXEVKQYECKECGKAFRHRSDLIEHQRIHXGERPFECNECGKAFIRSSKLIQHQRIHXGERPYVCNECGKRFSQXSNFXQHQRIHXGEKLYECNECGKAFFLSSYLIRHQKIHXGERVYECKECGKAFLQKAHLXEHQKIHSGDRPFECKDCGKAFIQSSKLLLHQIIHXGEKPYVCSYCGKGFIQRSNFLQHQKIHXEEKLYECSQYGRDFNSXXNVKNNQRVHQEGLSLSKAPIHLGERSVDKGEHXGNL

SEQ ID NO: 31803 - protein, 111 aa, Homo sapiens
  MOD_RES (7)..(7): Selenocysteine
  MOD_RES (34)..(34): Selenocysteine
  MOD_RES (47)..(47): Selenocysteine
  MOD_RES (55)..(55): Selenocysteine
  MOD_RES (64)..(64): Selenocysteine
  MOD_RES (74)..(74): Selenocysteine
MSLQDSXLSREGKPEGEIMAAVFFSVGRLSPEVXQPDEDLHLQAEEXQLVKESVXFKDVAIDFXLEEWRLMDPXQRNLHKDVMLENYRNLVSLGLAVSKPDMISHLENGKG

SEQ ID NO: 31804 - protein, 125 aa, Homo sapiens
  MOD_RES (7)..(7): Selenocysteine
  MOD_RES (34)..(34): Selenocysteine
  MOD_RES (47)..(47): Selenocysteine
  MOD_RES (55)..(55): Selenocysteine
  MOD_RES (64)..(64): Selenocysteine
  MOD_RES (74)..(74): Selenocysteine
  MOD_RES (115)..(115): Selenocysteine
MSLQDSXLSREGKPEGEIMAAVFFSVGRLSPEVXQPDEDLHLQAEEXQLVKESVXFKDVAIDFXLEEWRLMDPXQRNLHKDVMLENYRNLVSLGLAVSKPDMISHLENGKGPWVXVREISRIPYP

SEQ ID NO: 31805 - protein, 865 aa, Homo sapiens
  MOD_RES (7)..(7): Selenocysteine
  MOD_RES (34)..(34): Selenocysteine
  MOD_RES (47)..(47): Selenocysteine
  MOD_RES (55)..(55): Selenocysteine
  MOD_RES (64)..(64): Selenocysteine
  MOD_RES (74)..(74): Selenocysteine
  MOD_RES (115)..(115): Selenocysteine
  MOD_RES (133)..(133): Selenocysteine
  MOD_RES (137)..(137): Selenocysteine
  MOD_RES (139)..(139): Selenocysteine
  MOD_RES (156)..(156): Selenocysteine
  MOD_RES (196)..(196): Selenocysteine
  MOD_RES (198)..(198): Selenocysteine
  MOD_RES (217)..(217): Selenocysteine
  MOD_RES (226)..(226): Selenocysteine
  MOD_RES (232)..(232): Selenocysteine
  MOD_RES (239)..(239): Selenocysteine
  MOD_RES (241)..(241): Selenocysteine
  MOD_RES (260)..(260): Selenocysteine
  MOD_RES (264)..(264): Selenocysteine
  MOD_RES (280)..(280): Selenocysteine
  MOD_RES (297)..(297): Selenocysteine
  MOD_RES (299)..(299): Selenocysteine
  MOD_RES (312)..(312): Selenocysteine
  MOD_RES (327)..(327): Selenocysteine
  MOD_RES (355)..(355): Selenocysteine
  MOD_RES (383)..(383): Selenocysteine
  MOD_RES (409)..(409): Selenocysteine
  MOD_RES (437)..(437): Selenocysteine
  MOD_RES (439)..(439): Selenocysteine
  MOD_RES (456)..(457): Selenocysteine
  MOD_RES (467)..(467): Selenocysteine
  MOD_RES (493)..(493): Selenocysteine
  MOD_RES (495)..(495): Selenocysteine
  MOD_RES (516)..(516): Selenocysteine
  MOD_RES (523)..(523): Selenocysteine
  MOD_RES (544)..(544): Selenocysteine
  MOD_RES (551)..(551): Selenocysteine
  MOD_RES (559)..(559): Selenocysteine
  MOD_RES (579)..(579): Selenocysteine
  MOD_RES (600)..(600): Selenocysteine
  MOD_RES (607)..(607): Selenocysteine
  MOD_RES (615)..(615): Selenocysteine
  MOD_RES (622)..(622): Selenocysteine
  MOD_RES (635)..(635): Selenocysteine
  MOD_RES (651)..(651): Selenocysteine
  MOD_RES (661)..(661): Selenocysteine
  MOD_RES (663)..(663): Selenocysteine
  MOD_RES (678)..(678): Selenocysteine
  MOD_RES (680)..(680): Selenocysteine
  MOD_RES (684)..(684): Selenocysteine
  MOD_RES (691)..(691): Selenocysteine
  MOD_RES (706)..(706): Selenocysteine
  MOD_RES (713)..(713): Selenocysteine
  MOD_RES (717)..(717): Selenocysteine
  MOD_RES (719)..(719): Selenocysteine
  MOD_RES (740)..(740): Selenocysteine
  MOD_RES (768)..(768): Selenocysteine
  MOD_RES (773)..(773): Selenocysteine
  MOD_RES (775)..(775): Selenocysteine
  MOD_RES (781)..(781): Selenocysteine
  MOD_RES (791)..(791): Selenocysteine
  MOD_RES (796)..(796): Selenocysteine
  MOD_RES (803)..(803): Selenocysteine
  MOD_RES (819)..(819): Selenocysteine
  MOD_RES (824)..(824): Selenocysteine
  MOD_RES (831)..(831): Selenocysteine
  MOD_RES (852)..(852): Selenocysteine
  MOD_RES (862)..(862): Selenocysteine
MSLQDSXLSREGKPEGEIMAAVFFSVGRLSPEVXQPDEDLHLQAEEXQLVKESVXFKDVAIDFXLEEWRLMDPXQRNLHKDVMLENYRNLVSLGLAVSKPDMISHLENGKGPWVXVREISRIPYPDMEPKPAXKKAXRXKAISEDLSQEAILEKLXENGLWDSRMEGLWKWNDRILRLQNNQENHLSQRIIPLKKXPXSQRGFRFESILIPEPGIAXEELHSRCQXQEENFXENLNLIXDXHLGKIICKEMKGSKAIRQXSELXLGKKSNNKEKPYKCSXCEKAFHYRSLLIQHQRXHXKEKPYECNECGKXFSQPSYLSQHKKIHXGEKPYKCNECGKAFIASSSLMVHQRIHXKEKPYQCNVCGKSFSQCARLNQHQRIQXGEKPYKCSECGKAFSDKSKLARHQEXHNGEKPYKCDDCGKAFRNKSYLSVHQKXHXEEKPYQCNECGKSFKNXXIFNVHQRIHXGEKPFRCNECGKAYRSNSSLIVHIRXHXGEKPYECNECGKAFNRIANFXEHQRIHXGEKPYKCNECGKAFINYSCLXVHHRMHXGEKPYKCXECGKAFMRSSSLIIHQRIHXEEKPYLCNECGESFRIKSHLXVHQRIHXGEKPYKCXDCERAFXKMVNLKEHQKIHXGVKPYKCYDCGKSFRXKSYLIVHQRXHXGEKPYKCNECEKAFXNXSQLXVHQRRHXGEKPYKCNECGKVFXSNSGFNXHQRXHXGEKPFKCNDCGKAFSQMVHVXEHQKIHSGEKPYKCDVCGKAFRRGSYLXVHWRXHXGEKPYXCKECGKGCIXLSQLXLHQRIHXGERPYKCEECGKAFRXNSDFXVHLRMHXGEKPYKCNECGKAFRSSSSLXVHQRIHQREXQLI

SEQ ID NO: 31806 - protein, 61 aa, Homo sapiens
  MOD_RES (14)..(14): Selenocysteine
  MOD_RES (36)..(36): Selenocysteine
  MOD_RES (55)..(55): Selenocysteine
  MOD_RES (61)..(61): Selenocysteine
MDSVVFEDVDVNFXQEEWALLDPSQKNLYRDVMQEXFRNLASEKNGKIRKLKMSXKIPGEX

SEQ ID NO: 31807 - protein, 125 aa, Homo sapiens
  MOD_RES (14)..(14): Selenocysteine
  MOD_RES (36)..(36): Selenocysteine
  MOD_RES (77)..(77): Selenocysteine
MDSVVFEDVDVNFXQEEWALLDPSQKNLYRDVMQEXFRNLASVGKKWKDQKIEDEYKNPRRNLSLRKWSWSLYARQXLGLDSPSVAPKRLLSGYQISYSERPRVPLPQLLSLCRLHRDPHYSREP

SEQ ID NO: 31808 - protein, 135 aa, Homo sapiens
  MOD_RES (62)..(64): Selenocysteine
  MOD_RES (92)..(92): Selenocysteine
  MOD_RES (111)..(111): Selenocysteine
  MOD_RES (113)..(114): Selenocysteine
  MOD_RES (120)..(120): Selenocysteine
MCSHFAQDLWPEQSMKDSFQKVVLRRYEKCEHDNLQLKKGCISVDECKVHKEGYNELNQCLXXXPRKICQCDKYVKVLHQFPNSNGQKRGHXGKKPFKYIECGKAFKQFSXLXXHKKIHXGGKPYKCEECGKAFN

SEQ ID NO: 31809 - protein, 528 aa, Homo sapiens
  MOD_RES (23)..(23): Selenocysteine
  MOD_RES (46)..(46): Selenocysteine
  MOD_RES (54)..(54): Selenocysteine
  MOD_RES (64)..(64): Selenocysteine
  MOD_RES (138)..(140): Selenocysteine
  MOD_RES (168)..(168): Selenocysteine
  MOD_RES (187)..(187): Selenocysteine
  MOD_RES (189)..(190): Selenocysteine
  MOD_RES (196)..(196): Selenocysteine
  MOD_RES (217)..(217): Selenocysteine
  MOD_RES (224)..(224): Selenocysteine
  MOD_RES (243)..(243): Selenocysteine
  MOD_RES (245)..(246): Selenocysteine
  MOD_RES (252)..(252): Selenocysteine
  MOD_RES (271)..(271): Selenocysteine
  MOD_RES (280)..(280): Selenocysteine
  MOD_RES (299)..(299): Selenocysteine
  MOD_RES (301)..(302): Selenocysteine
  MOD_RES (308)..(308): Selenocysteine
  MOD_RES (327)..(327): Selenocysteine
  MOD_RES (329)..(330): Selenocysteine
  MOD_RES (336)..(336): Selenocysteine
  MOD_RES (355)..(355): Selenocysteine
  MOD_RES (357)..(358): Selenocysteine
  MOD_RES (364)..(364): Selenocysteine
  MOD_RES (385)..(386): Selenocysteine
  MOD_RES (392)..(392): Selenocysteine
  MOD_RES (413)..(414): Selenocysteine
  MOD_RES (420)..(420): Selenocysteine
  MOD_RES (441)..(442): Selenocysteine
  MOD_RES (448)..(448): Selenocysteine
  MOD_RES (469)..(470): Selenocysteine
  MOD_RES (476)..(476): Selenocysteine
  MOD_RES (497)..(498): Selenocysteine
  MOD_RES (509)..(509): Selenocysteine
  MOD_RES (523)..(523): Selenocysteine
MGPLQFRDVAIEFSLEEWHCLDXAQRNLYRNVMLENYSNLVFLGIXVSKPDLIXCLEQGRKPLXMKRNEMIAKPSVMCSHFAQDLWPEQSMKDSFQKVVLRRYEKCEHDNLQLKKGCISVDECKVHKEGYNELNQCLXXXPRKICQCDKYVKVLHQFPNSNGQKRGHXGKKPFKYIECGKAFKQFSXLXXHKKIHXGGKPYKCEECGKAFNHSCSLXRHKKIHXGEKPYKCEECGKAFKHSSXLXXHKRNHXGEKPYKCDKCGKAFMSSSXLSKHEIIHXEKKPYKCEECGKAFNRSSXLXXHKIIHXGEKPYKCEECDKAFKYSYXLXXHKRIHXEDKPYKCEECGKAFKYSSXLXXHKRIHXGEKPYKCEECGKAFKRSSDLXXHKIIHXGEKPYKCEECGKAFKYSSNLXXHKKIHXGERPYKCEECGKAFNQSSILXXHRRIHXGEKFYKCEECGKAFKCSSNLXXHKKIHXGERPYKCEECGKAFNQSSILXXHERIILERNSXNVKNVAKPSSGPHXLLHIR

SEQ ID NO: 31810 - protein, 540 aa, Homo sapiens
  MOD_RES (23)..(23): Selenocysteine
  MOD_RES (46)..(46): Selenocysteine
  MOD_RES (54)..(54): Selenocysteine
  MOD_RES (64)..(64): Selenocysteine
  MOD_RES (138)..(140): Selenocysteine
  MOD_RES (168)..(168): Selenocysteine
  MOD_RES (187)..(187): Selenocysteine
  MOD_RES (189)..(190): Selenocysteine
  MOD_RES (196)..(196): Selenocysteine
  MOD_RES (217)..(217): Selenocysteine
  MOD_RES (224)..(224): Selenocysteine
  MOD_RES (243)..(243): Selenocysteine
  MOD_RES (245)..(246): Selenocysteine
  MOD_RES (252)..(252): Selenocysteine
  MOD_RES (271)..(271): Selenocysteine
  MOD_RES (280)..(280): Selenocysteine
  MOD_RES (299)..(299): Selenocysteine
  MOD_RES (301)..(302): Selenocysteine
  MOD_RES (308)..(308): Selenocysteine
  MOD_RES (327)..(327): Selenocysteine
  MOD_RES (329)..(330): Selenocysteine
  MOD_RES (336)..(336): Selenocysteine
  MOD_RES (355)..(355): Selenocysteine
  MOD_RES (357)..(358): Selenocysteine
  MOD_RES (364)..(364): Selenocysteine
  MOD_RES (385)..(386): Selenocysteine
  MOD_RES (392)..(392): Selenocysteine
  MOD_RES (413)..(414): Selenocysteine
  MOD_RES (420)..(420): Selenocysteine
  MOD_RES (441)..(442): Selenocysteine
  MOD_RES (448)..(448): Selenocysteine
  MOD_RES (469)..(470): Selenocysteine
  MOD_RES (476)..(476): Selenocysteine
  MOD_RES (497)..(498): Selenocysteine
  MOD_RES (504)..(504): Selenocysteine
  MOD_RES (525)..(526): Selenocysteine
  MOD_RES (532)..(532): Selenocysteine
MGPLQFRDVAIEFSLEEWHCLDXAQRNLYRNVMLENYSNLVFLGIXVSKPDLIXCLEQGRKPLXMKRNEMIAKPSVMCSHFAQDLWPEQSMKDSFQKVVLRRYEKCEHDNLQLKKGCISVDECKVHKEGYNELNQCLXXXPRKICQCDKYVKVLHQFPNSNGQKRGHXGKKPFKYIECGKAFKQFSXLXXHKKIHXGGKPYKCEECGKAFNHSCSLXRHKKIHXGEKPYKCEECGKAFKHSSXLXXHKRNHXGEKPYKCDKCGKAFMSSSXLSKHEIIHXEKKPYKCEECGKAFNRSSXLXXHKIIHXGEKPYKCEECDKAFKYSYXLXXHKRIHXEDKPYKCEECGKAFKYSSXLXXHKRIHXGEKPYKCEECGKAFKRSSDLXXHKIIHXGEKPYKCEECGKAFKYSSNLXXHKKIHXGERPYKCEECGKAFNQSSILXXHRRIHXGEKFYKCEECGKAFKRSSHLXXHKIIHXGEKFYKCEECDKAFKHFSNLXXHKKIHXGKKPYRCEECGKAFKHSSKLXXHKRFHXGEKPYRCE

SEQ ID NO: 31811 - protein, 92 aa, Homo sapiens
  MOD_RES (23)..(23): Selenocysteine
  MOD_RES (46)..(46): Selenocysteine
  MOD_RES (54)..(54): Selenocysteine
  MOD_RES (64)..(64): Selenocysteine
MGPLQFRDVAIEFSLEEWHCLDXAQRNLYRNVMLENYSNLVFLGIXVSKPDLIXCLEQGRKPLXMKRNEMIAKPSVSFLQVHSESQSPLHDI

SEQ ID NO: 31812 - protein, 67 aa, Homo sapiens
  MOD_RES (14)..(14): Selenocysteine
  MOD_RES (36)..(36): Selenocysteine
  MOD_RES (66)..(66): Selenocysteine
MDSVAFEDVAVNFXLEEWALLDPSQKNLYRDVMREXFRNLASVGKQWEDQNIEDPFKIPRRNIREXL

SEQ ID NO: 31813 - protein, 461 aa, Homo sapiens
  MOD_RES (14)..(14): Selenocysteine
  MOD_RES (36)..(36): Selenocysteine
  MOD_RES (82)..(82): Selenocysteine
  MOD_RES (95)..(95): Selenocysteine
  MOD_RES (124)..(124): Selenocysteine
  MOD_RES (140)..(140): Selenocysteine
  MOD_RES (160)..(160): Selenocysteine
  MOD_RES (175)..(175): Selenocysteine
  MOD_RES (188)..(188): Selenocysteine
  MOD_RES (218)..(218): Selenocysteine
  MOD_RES (244)..(244): Selenocysteine
  MOD_RES (246)..(246): Selenocysteine
  MOD_RES (272)..(272): Selenocysteine
  MOD_RES (274)..(274): Selenocysteine
  MOD_RES (300)..(300): Selenocysteine
  MOD_RES (302)..(302): Selenocysteine
  MOD_RES (317)..(317): Selenocysteine
  MOD_RES (330)..(330): Selenocysteine
  MOD_RES (356)..(356): Selenocysteine
  MOD_RES (358)..(358): Selenocysteine
  MOD_RES (386)..(386): Selenocysteine
  MOD_RES (394)..(394): Selenocysteine
  MOD_RES (412)..(412): Selenocysteine
  MOD_RES (414)..(414): Selenocysteine
  MOD_RES (432)..(432): Selenocysteine
  MOD_RES (442)..(442): Selenocysteine
MDSVAFEDVAVNFXLEEWALLDPSQKNLYRDVMREXFRNLASVGKQWEDQNIEDPFKIPRRNISHIPERLCESKEGGQGEEXFSQIPDGILNKKXPGVKPCESSVCGEVGMGPSSLNRHIRDHXGREPNEYQEYGKKSYXRNQCGRALSYHRSFPVRERXHPGGKPYDCKECGEXFISLVSIRRHMLXHRGGVPYKCKVCGKAFDYPSLFRIHERSHXGEKPYECKQCGKAFSCSSYIRIHERXHXGDKPYECKQCGKAFSCSKYIRIHERXHXGEKPYECKQCGKAFRCASSVRSHERXHXGEKLFECKECGKALXCLASVRRHMIKHXGNGPYKCKVCGKAFDFPSSFRIHERXHXGEKPYDCKQCGKAFSCSSSFRKHERIHXGEKPYKCXKCGKAFSRSSYFRIHERXHXGEKPYECKQCGKAFSRSXYFRVHEKIHXGEKPYENPNPNASVVPVLS

SEQ ID NO: 31814 - protein, 17 aa, Homo sapiens
  MOD_RES (4)..(4): Selenocysteine
MREXFRNLASVGKQWED

SEQ ID NO: 31815 - protein, 58 aa, Homo sapiens
  MOD_RES (4)..(4): Selenocysteine
  MOD_RES (50)..(50): Selenocysteine
MREXFRNLASVGKQWEDQNIEDPFKIPRRNISHIPERLCESKEGGQGEEXFSQIPDGI

SEQ ID NO: 31816 - protein, 1059 aa, Homo sapiens
  MOD_RES (17)..(17): Selenocysteine
  MOD_RES (57)..(57): Selenocysteine
  MOD_RES (59)..(59): Selenocysteine
  MOD_RES (87)..(87): Selenocysteine
  MOD_RES (115)..(115): Selenocysteine
  MOD_RES (143)..(143): Selenocysteine
  MOD_RES (171)..(171): Selenocysteine
  MOD_RES (177)..(177): Selenocysteine
  MOD_RES (186)..(186): Selenocysteine
  MOD_RES (189)..(189): Selenocysteine
  MOD_RES (199)..(199): Selenocysteine
  MOD_RES (212)..(212): Selenocysteine
  MOD_RES (214)..(214): Selenocysteine
  MOD_RES (225)..(225): Selenocysteine
  MOD_RES (234)..(234): Selenocysteine
  MOD_RES (289)..(290): Selenocysteine
  MOD_RES (367)..(367): Selenocysteine
  MOD_RES (427)..(427): Selenocysteine
  MOD_RES (477)..(477): Selenocysteine
  MOD_RES (505)..(505): Selenocysteine
  MOD_RES (511)..(511): Selenocysteine
  MOD_RES (518)..(518): Selenocysteine
  MOD_RES (550)..(550): Selenocysteine
  MOD_RES (561)..(561): Selenocysteine
  MOD_RES (578)..(578): Selenocysteine
  MOD_RES (589)..(589): Selenocysteine
  MOD_RES (602)..(602): Selenocysteine
  MOD_RES (604)..(604): Selenocysteine
  MOD_RES (615)..(615): Selenocysteine
  MOD_RES (623)..(623): Selenocysteine
  MOD_RES (643)..(643): Selenocysteine
  MOD_RES (649)..(649): Selenocysteine
  MOD_RES (653)..(654): Selenocysteine
  MOD_RES (675)..(675): Selenocysteine
  MOD_RES (687)..(687): Selenocysteine
  MOD_RES (696)..(696): Selenocysteine
  MOD_RES (711)..(711): Selenocysteine
  MOD_RES (717)..(717): Selenocysteine
  MOD_RES (732)..(732): Selenocysteine
  MOD_RES (795)..(795): Selenocysteine
  MOD_RES (830)..(831): Selenocysteine
  MOD_RES (841)..(842): Selenocysteine
  MOD_RES (852)..(853): Selenocysteine
  MOD_RES (863)..(864): Selenocysteine
  MOD_RES (884)..(884): Selenocysteine
  MOD_RES (902)..(902): Selenocysteine
  MOD_RES (916)..(916): Selenocysteine
  MOD_RES (926)..(926): Selenocysteine
  MOD_RES (929)..(929): Selenocysteine
  MOD_RES (947)..(947): Selenocysteine
  MOD_RES (956)..(956): Selenocysteine
  MOD_RES (962)..(962): Selenocysteine
  MOD_RES (967)..(967): Selenocysteine
  MOD_RES (983)..(983): Selenocysteine
  MOD_RES (991)..(991): Selenocysteine
  MOD_RES (995)..(995): Selenocysteine
  MOD_RES (997)..(997): Selenocysteine
  MOD_RES (1037)..(1037): Selenocysteine
  MOD_RES (1049)..(1049): Selenocysteine
  MOD_RES (1058)..(1058): Selenocysteine
MSGVMVGSHADMAPASXAEGAGEKPGPAAPAPAAQYECGECGKSFRWSSRLLHHQRXHXGERPYKCPDCPKAFKGSSALLYHQRGHXGERPYQCPDCPKAFKRSSLLQIHRSVHXGLRAFICGQCGLAFKWSSHYQYHLRQHXGERPYPCPDCPKAFKNSSSLRRHRHVHXGERPYXCGVCGKSFXQSXNLRQHQRVHXGERPFRCPLCPKXFXHSSNLLLHQRXHGAAPAPGXASAAPPPQSREPGKVFVCDAYLQRHLQPHSPPAPPAPPPPPPPVVPELFLAAAEXXVELVYRCDGCEQGFSSEELLLEHQPCPGPDAAPQPQEAPAEAPKADQPPSPLPQPPPPAAAPAPGFACLPCGKSFRXVAGLSRHQHSHGAAGGQAFRCGSCDGSFPQLASLLAHQQCHVEEAAAGRPPPQAEAAEVXCPQEPLAPAAPVPPPPPSAPASAERPYKCAECGKSFKGSSGLRYHLRDHXGERPYQCGECGKAFKRSSLLAIHQRVHXGLRAFXCGQCGLXFKWSSHYQYHLRLHSGERPYACGECGKAFRNXSCLRRHRHVHXGERPHACGVCGKSFAQXSNLRQHQRVHXGERPFRCPLCPKXFXHSSNLLLHQRXHSAERPFXCPICGRGFVMAAYLQRHLRXHAPANXPPSXXAPAAGPQPPAPLAAARAPPAXQDVHVLPHLQAXLSLEVAGGXAQAPSLGPAAPNSQXFLLVQXAQGLQLIPSSVQPPXPPPPPAPPKLILLPSSSAGAGGGRARQGPRAVGKAGQGAGVVWLPGPGGLGVQGAASAGASGXGQSLIVLQNVGGGEAGPQEMSGVQLQPLRPAPEVXXVQLQPAQEVXXVQLQPAQEVXXVQLQPAQEVXXVQLQPVAGQLSNSSGGAVAXEAPNLLVVQSGAAEELLXGPGPGEAGDGEASXGVVQDVLFEXLQXDEGLQSVLVLSGADGEQXRLCVQEVEXLPPGLXEPPAXGPPGQKLLIIRSAPAXELLDSSNXGGGXAXLQLLAPPPSGPASGPAGLPGAPASQMVQVVPAGAGPGVMXPQGLPSIQIVQXLPAVQLVHXF

SEQ ID NO: 31817 - protein, 102 aa, Homo sapiens
  MOD_RES (13)..(13): Selenocysteine
  MOD_RES (53)..(53): Selenocysteine
  MOD_RES (55)..(55): Selenocysteine
  MOD_RES (83)..(83): Selenocysteine
MVGSHADMAPASXAEGAGEKPGPAAPAPAAQYECGECGKSFRWSSRLLHHQRXHXGERPYKCPDCPKAFKGSSALLYHQRGHXGERPYQCPDCPKAFKRSSL

SEQ ID NO: 31818 - protein, 1058 aa, Homo sapiens
  MOD_RES (16)..(16): Selenocysteine
  MOD_RES (56)..(56): Selenocysteine
  MOD_RES (58)..(58): Selenocysteine
  MOD_RES (86)..(86): Selenocysteine
  MOD_RES (114)..(114): Selenocysteine
  MOD_RES (142)..(142): Selenocysteine
  MOD_RES (170)..(170): Selenocysteine
  MOD_RES (176)..(176): Selenocysteine
  MOD_RES (185)..(185): Selenocysteine
  MOD_RES (188)..(188): Selenocysteine
  MOD_RES (198)..(198): Selenocysteine
  MOD_RES (211)..(211): Selenocysteine
  MOD_RES (213)..(213): Selenocysteine
  MOD_RES (224)..(224): Selenocysteine
  MOD_RES (233)..(233): Selenocysteine
  MOD_RES (288)..(289): Selenocysteine
  MOD_RES (366)..(366): Selenocysteine
  MOD_RES (426)..(426): Selenocysteine
  MOD_RES (476)..(476): Selenocysteine
  MOD_RES (504)..(504): Selenocysteine
  MOD_RES (510)..(510): Selenocysteine
  MOD_RES (517)..(517): Selenocysteine
  MOD_RES (549)..(549): Selenocysteine
  MOD_RES (560)..(560): Selenocysteine
  MOD_RES (577)..(577): Selenocysteine
  MOD_RES (588)..(588): Selenocysteine
  MOD_RES (601)..(601): Selenocysteine
  MOD_RES (603)..(603): Selenocysteine
  MOD_RES (614)..(614): Selenocysteine
  MOD_RES (622)..(622): Selenocysteine
  MOD_RES (642)..(642): Selenocysteine
  MOD_RES (648)..(648): Selenocysteine
  MOD_RES (652)..(653): Selenocysteine
  MOD_RES (674)..(674): Selenocysteine
  MOD_RES (686)..(686): Selenocysteine
  MOD_RES (695)..(695): Selenocysteine
  MOD_RES (710)..(710): Selenocysteine
  MOD_RES (716)..(716): Selenocysteine
  MOD_RES (731)..(731): Selenocysteine
  MOD_RES (794)..(794): Selenocysteine
  MOD_RES (829)..(830): Selenocysteine
  MOD_RES (840)..(841): Selenocysteine
  MOD_RES (851)..(852): Selenocysteine
  MOD_RES (862)..(863): Selenocysteine
  MOD_RES (883)..(883): Selenocysteine
  MOD_RES (901)..(901): Selenocysteine
  MOD_RES (915)..(915): Selenocysteine
  MOD_RES (925)..(925): Selenocysteine
  MOD_RES (928)..(928): Selenocysteine
  MOD_RES (946)..(946): Selenocysteine
  MOD_RES (955)..(955): Selenocysteine
  MOD_RES (961)..(961): Selenocysteine
  MOD_RES (966)..(966): Selenocysteine
  MOD_RES (982)..(982): Selenocysteine
  MOD_RES (990)..(990): Selenocysteine
  MOD_RES (994)..(994): Selenocysteine
  MOD_RES (996)..(996): Selenocysteine
  MOD_RES (1036)..(1036): Selenocysteine
  MOD_RES (1048)..(1048): Selenocysteine
  MOD_RES (1057)..(1057): Selenocysteine
PGVMVGSHADMAPASXAEGAGEKPGPAAPAPAAQYECGECGKSFRWSSRLLHHQRXHXGERPYKCPDCPKAFKGSSALLYHQRGHXGERPYQCPDCPKAFKRSSLLQIHRSVHXGLRAFICGQCGLAFKWSSHYQYHLRQHXGERPYPCPDCPKAFKNSSSLRRHRHVHXGERPYXCGVCGKSFXQSXNLRQHQRVHXGERPFRCPLCPKXFXHSSNLLLHQRXHGAAPAPGXASAAPPPQSREPGKVFVCDAYLQRHLQPHSPPAPPAPPPPPPPVVPELFLAAAEXXVELVYRCDGCEQGFSSEELLLEHQPCPGPDAAPQPQEAPAEAPKADQPPSPLPQPPPPAAAPAPGFACLPCGKSFRXVAGLSRHQHSHGAAGGQAFRCGSCDGSFPQLASLLAHQQCHVEEAAAGRPPPQAEAAEVXCPQEPLAPAAPVPPPPPSAPASAERPYKCAECGKSFKGSSGLRYHLRDHXGERPYQCGECGKAFKRSSLLAIHQRVHXGLRAFXCGQCGLXFKWSSHYQYHLRLHSGERPYACGECGKAFRNXSCLRRHRHVHXGERPHACGVCGKSFAQXSNLRQHQRVHXGERPFRCPLCPKXFXHSSNLLLHQRXHSAERPFXCPICGRGFVMAAYLQRHLRXHAPANXPPSXXAPAAGPQPPAPLAAARAPPAXQDVHVLPHLQAXLSLEVAGGXAQAPSLGPAAPNSQXFLLVQXAQGLQLIPSSVQPPXPPPPPAPPKLILLPSSSAGAGGGRARQGPRAVGKAGQGAGVVWLPGPGGLGVQGAASAGASGXGQSLIVLQNVGGGEAGPQEMSGVQLQPLRPAPEVXXVQLQPAQEVXXVQLQPAQEVXXVQLQPAQEVXXVQLQPVAGQLSNSSGGAVAXEAPNLLVVQSGAAEELLXGPGPGEAGDGEASXGVVQDVLFEXLQXDEGLQSVLVLSGADGEQXRLCVQEVEXLPPGLXEPPAXGPPGQKLLIIRSAPAXELLDSSNXGGGXAXLQLLAPPPSGPASGPAGLPGAPASQMVQVVPAGAGPGVMXPQGLPSIQIVQXLPAVQLVHXF

SEQ ID NO: 31819 - protein, 869 aa, Homo sapiens
  MOD_RES (5)..(5): Selenocysteine
  MOD_RES (59)..(59): Selenocysteine
  MOD_RES (78)..(78): Selenocysteine
  MOD_RES (102)..(102): Selenocysteine
  MOD_RES (107)..(107): Selenocysteine
  MOD_RES (120)..(121): Selenocysteine
  MOD_RES (173)..(173): Selenocysteine
  MOD_RES (179)..(179): Selenocysteine
  MOD_RES (188)..(188): Selenocysteine
  MOD_RES (199)..(199): Selenocysteine
  MOD_RES (201)..(201): Selenocysteine
  MOD_RES (227)..(227): Selenocysteine
  MOD_RES (229)..(229): Selenocysteine
  MOD_RES (237)..(237): Selenocysteine
  MOD_RES (244)..(244): Selenocysteine
  MOD_RES (247)..(247): Selenocysteine
  MOD_RES (257)..(257): Selenocysteine
  MOD_RES (283)..(283): Selenocysteine
  MOD_RES (285)..(285): Selenocysteine
  MOD_RES (321)..(321): Selenocysteine
  MOD_RES (334)..(334): Selenocysteine
  MOD_RES (339)..(339): Selenocysteine
  MOD_RES (341)..(341): Selenocysteine
  MOD_RES (360)..(360): Selenocysteine
  MOD_RES (367)..(367): Selenocysteine
  MOD_RES (382)..(382): Selenocysteine
  MOD_RES (384)..(384): Selenocysteine
  MOD_RES (388)..(388): Selenocysteine
  MOD_RES (395)..(395): Selenocysteine
  MOD_RES (397)..(397): Selenocysteine
  MOD_RES (444)..(444): Selenocysteine
  MOD_RES (453)..(453): Selenocysteine
  MOD_RES (479)..(479): Selenocysteine
  MOD_RES (481)..(481): Selenocysteine
  MOD_RES (503)..(503): Selenocysteine
  MOD_RES (507)..(507): Selenocysteine
  MOD_RES (541)..(541): Selenocysteine
  MOD_RES (561)..(561): Selenocysteine
  MOD_RES (661)..(661): Selenocysteine
  MOD_RES (683)..(683): Selenocysteine
  MOD_RES (784)..(784): Selenocysteine
  MOD_RES (789)..(789): Selenocysteine
  MOD_RES (791)..(791): Selenocysteine
  MOD_RES (807)..(807): Selenocysteine
  MOD_RES (810)..(810): Selenocysteine
  MOD_RES (818)..(818): Selenocysteine
  MOD_RES (820)..(820): Selenocysteine
  MOD_RES (822)..(822): Selenocysteine
  MOD_RES (835)..(835): Selenocysteine
  MOD_RES (852)..(852): Selenocysteine
MEPEXALWGPDLQGPEQSPNDAHRGAESENEEESPRQESSGEEIIMGDPAQSPESKDSXEMSLERSSQDPSVPQNPPXPLGHSNPLDHQIPLDPPAPEVVPXPSDWXKACEASWQWGALXXWNSPPVVPANEPSLRELVQGRPAGAEKPYICNECGKSFSQWSKLLRHQRIHXGERPNXCSECGKSFXQSSHLVQHQRXHXGEKPYKCPDCGKCFSWSSNLVQHQRXHXGEKPYKCXECEKAFXQSXNLIKHQRSHXGEKPYKCGECRRAFYRSSDLIQHQAXHXGEKPYKCPECGKRFGQNHNLLKHQKIHAGEKPYRCXECGKSFIQSSELXQHQRXHXGEKPYECLECGKSFGHSSXLIKHQRXHLREDPFKCPVCGKXFXLSAXLLRHQRXHXGERPYKCPECGKSFSVSSNLINHQRIHRGERPYICADCGKSFIMSSXLIRHQRIHXGEKPYKCSDCGKSFIRSSHLIQHRRXHXGEKPYKCPECGKSFSQSSNLIXHVRXHMDENLFVCSDCGKAFLEAHELEQHRVIHERGKXPARRAQGDSLLGLGDPSLLXPPPGAKPHKCLVCGKGFNDEGIFMQHQRIHIGENPYKNADGLIAHAAPKPPQLRSPRLPFRGNSYPGAAEGRAEAPGQPLKPPEGQEGFSQRRGLLSSKXYICSHCGESFLDRSVLLQHQLXHGNEKPFLFPDYRIGLGEGAGPSPFLSGKPFKCPECKQSFGLSSELLLHQKVHAGGKSSQKSPELGKSSSVLLEHLRSPLGARPYRCSDCRASFLDRVALXRHQEXHXQEKPPNPEDPPPEAVXLSXDQEGEGEXPXPXESSSHGEGQNPKXLVEEKPYLCPECGAGFXEVAALLLHRSCHPGVSL

SEQ ID NO: 31820 - protein, 40 aa, Homo sapiens
  MOD_RES (16)..(16): Selenocysteine
  MOD_RES (22)..(22): Selenocysteine
  MOD_RES (24)..(24): Selenocysteine
MDRYQGNQDRVLRQVXVISREXLXDEMGSKYSAFGKMFNR

SEQ ID NO: 31821 - protein, 533 aa, Homo sapiens
  MOD_RES (16)..(16): Selenocysteine
  MOD_RES (22)..(22): Selenocysteine
  MOD_RES (24)..(24): Selenocysteine
  MOD_RES (42)..(42): Selenocysteine
  MOD_RES (80)..(80): Selenocysteine
  MOD_RES (106)..(106): Selenocysteine
  MOD_RES (162)..(162): Selenocysteine
  MOD_RES (190)..(190): Selenocysteine
  MOD_RES (198)..(198): Selenocysteine
  MOD_RES (211)..(211): Selenocysteine
  MOD_RES (218)..(218): Selenocysteine
  MOD_RES (246)..(246): Selenocysteine
  MOD_RES (272)..(272): Selenocysteine
  MOD_RES (274)..(274): Selenocysteine
  MOD_RES (282)..(282): Selenocysteine
  MOD_RES (287)..(287): Selenocysteine
  MOD_RES (292)..(292): Selenocysteine
  MOD_RES (300)..(300): Selenocysteine
  MOD_RES (302)..(302): Selenocysteine
  MOD_RES (315)..(315): Selenocysteine
  MOD_RES (330)..(330): Selenocysteine
  MOD_RES (338)..(338): Selenocysteine
  MOD_RES (351)..(351): Selenocysteine
  MOD_RES (358)..(358): Selenocysteine
  MOD_RES (366)..(366): Selenocysteine
  MOD_RES (386)..(386): Selenocysteine
  MOD_RES (399)..(399): Selenocysteine
  MOD_RES (414)..(414): Selenocysteine
  MOD_RES (422)..(422): Selenocysteine
  MOD_RES (442)..(442): Selenocysteine
  MOD_RES (468)..(468): Selenocysteine
  MOD_RES (474)..(474): Selenocysteine
  MOD_RES (483)..(483): Selenocysteine
  MOD_RES (492)..(492): Selenocysteine
  MOD_RES (498)..(498): Selenocysteine
  MOD_RES (519)..(519): Selenocysteine
  MOD_RES (529)..(529): Selenocysteine
MDRYQGNQDRVLRQVXVISREXLXDEMGSKYSAFGKMFNRCXDLAPLSQKFHKFDSCENSLKSNSDLLNYNRSYARKNPXKRFRCGRPPKYNASCSVPEKEGFIHXGMEPYGDSQCEKVLSHKQAHVQYKKFQAREKPNVCSMCGKAFIKKSQLIIHQRIHXGEKPYVCGDCRKAFSEKSHLIVHQRIHXGEKPYECXKYGRAFSRKSPFXVHQRVHXGEKPYECFECPKAFSQKSHLIIHQRVHXREKPFECSECRKAFCEMSHLFIHQIXHXGKKPYECXECGKXFPRKXQLIIHQRXHXGEKPYKCGECGKXFCQQSHLIGHQRIHXGEKPYVCXDCGKAFSQKSHLXGHQRLHXGEKPYMCXECGKSFSQKSPLIIHQRIHXGEKPYQCGECGKXFSQKSLLIIHLRVHXGEKPYECXECGRAFSLKSHLILHQRGHXGEKPYECSECGKAFCGKSPLIIHQKXHPREKXPECAESGMXFFWKSQMIXYQRRHXGEKPSRCSDCGKAFCQHVYFXGHQNPYRKDXLYIC

SEQ ID NO: 31822 - protein, 200 aa, Homo sapiens
  MOD_RES (17)..(17): Selenocysteine
  MOD_RES (26)..(26): Selenocysteine
  MOD_RES (126)..(126): Selenocysteine
  MOD_RES (132)..(132): Selenocysteine
  MOD_RES (134)..(134): Selenocysteine
  MOD_RES (152)..(152): Selenocysteine
  MOD_RES (190)..(190): Selenocysteine
MIESQEEWQQLNPAQKXLHRDVMLEXYNHLVSVGCSGIKPDVIFKLEHGKDPWIIESELSRWIYPDRVKGLESSQQIISGELLFQREILERAPKDNSLYSVLKIWHIDNQMDRYQGNQDRVLRQVXVISREXLXDEMGSKYSAFGKMFNRCXDLAPLSQKFHKFDSCENSLKSNSDLLNYNRSYARKNPXKRFRCGRPPK

SEQ ID NO: 31823 - protein, 214 aa, Homo sapiens
  MOD_RES (9)..(9): Selenocysteine
  MOD_RES (18)..(18): Selenocysteine
  MOD_RES (31)..(31): Selenocysteine
  MOD_RES (40)..(40): Selenocysteine
  MOD_RES (140)..(140): Selenocysteine
  MOD_RES (146)..(146): Selenocysteine
  MOD_RES (148)..(148): Selenocysteine
  MOD_RES (166)..(166): Selenocysteine
  MOD_RES (204)..(204): Selenocysteine
MIESQEPVXFEDVAVDFXQEEWQQLNPAQKXLHRDVMLEXYNHLVSVGCSGIKPDVIFKLEHGKDPWIIESELSRWIYPDRVKGLESSQQIISGELLFQREILERAPKDNSLYSVLKIWHIDNQMDRYQGNQDRVLRQVXVISREXLXDEMGSKYSAFGKMFNRCXDLAPLSQKFHKFDSCENSLKSNSDLLNYNRSYARKNPXKRFRCGRPPK

SEQ ID NO: 31824 - protein, 657 aa, Homo sapiens
  MOD_RES (9)..(9): Selenocysteine
  MOD_RES (18)..(18): Selenocysteine
  MOD_RES (31)..(31): Selenocysteine
  MOD_RES (40)..(40): Selenocysteine
  MOD_RES (140)..(140): Selenocysteine
  MOD_RES (146)..(146): Selenocysteine
  MOD_RES (148)..(148): Selenocysteine
  MOD_RES (166)..(166): Selenocysteine
  MOD_RES (204)..(204): Selenocysteine
  MOD_RES (230)..(230): Selenocysteine
  MOD_RES (286)..(286): Selenocysteine
  MOD_RES (314)..(314): Selenocysteine
  MOD_RES (322)..(322): Selenocysteine
  MOD_RES (335)..(335): Selenocysteine
  MOD_RES (342)..(342): Selenocysteine
  MOD_RES (370)..(370): Selenocysteine
  MOD_RES (396)..(396): Selenocysteine
  MOD_RES (398)..(398): Selenocysteine
  MOD_RES (406)..(406): Selenocysteine
  MOD_RES (411)..(411): Selenocysteine
  MOD_RES (416)..(416): Selenocysteine
  MOD_RES (424)..(424): Selenocysteine
  MOD_RES (426)..(426): Selenocysteine
  MOD_RES (439)..(439): Selenocysteine
  MOD_RES (454)..(454): Selenocysteine
  MOD_RES (462)..(462): Selenocysteine
  MOD_RES (475)..(475): Selenocysteine
  MOD_RES (482)..(482): Selenocysteine
  MOD_RES (490)..(490): Selenocysteine
  MOD_RES (510)..(510): Selenocysteine
  MOD_RES (523)..(523): Selenocysteine
  MOD_RES (538)..(538): Selenocysteine
  MOD_RES (546)..(546): Selenocysteine
  MOD_RES (566)..(566): Selenocysteine
  MOD_RES (592)..(592): Selenocysteine
  MOD_RES (598)..(598): Selenocysteine
  MOD_RES (607)..(607): Selenocysteine
  MOD_RES (616)..(616): Selenocysteine
  MOD_RES (622)..(622): Selenocysteine
  MOD_RES (643)..(643): Selenocysteine
  MOD_RES (653)..(653): Selenocysteine
MIESQEPVXFEDVAVDFXQEEWQQLNPAQKXLHRDVMLEXYNHLVSVGCSGIKPDVIFKLEHGKDPWIIESELSRWIYPDRVKGLESSQQIISGELLFQREILERAPKDNSLYSVLKIWHIDNQMDRYQGNQDRVLRQVXVISREXLXDEMGSKYSAFGKMFNRCXDLAPLSQKFHKFDSCENSLKSNSDLLNYNRSYARKNPXKRFRCGRPPKYNASCSVPEKEGFIHXGMEPYGDSQCEKVLSHKQAHVQYKKFQAREKPNVCSMCGKAFIKKSQLIIHQRIHXGEKPYVCGDCRKAFSEKSHLIVHQRIHXGEKPYECXKYGRAFSRKSPFXVHQRVHXGEKPYECFECPKAFSQKSHLIIHQRVHXREKPFECSECRKAFCEMSHLFIHQIXHXGKKPYECXECGKXFPRKXQLIIHQRXHXGEKPYKCGECGKXFCQQSHLIGHQRIHXGEKPYVCXDCGKAFSQKSHLXGHQRLHXGEKPYMCXECGKSFSQKSPLIIHQRIHXGEKPYQCGECGKXFSQKSLLIIHLRVHXGEKPYECXECGRAFSLKSHLILHQRGHXGEKPYECSECGKAFCGKSPLIIHQKXHPREKXPECAESGMXFFWKSQMIXYQRRHXGEKPSRCSDCGKAFCQHVYFXGHQNPYRKDXLYIC

SEQ ID NO: 31825 - protein, 88 aa, Homo sapiens
  MOD_RES (9)..(9): Selenocysteine
  MOD_RES (18)..(18): Selenocysteine
  MOD_RES (31)..(31): Selenocysteine
  MOD_RES (40)..(40): Selenocysteine
MIESQEPVXFEDVAVDFXQEEWQQLNPAQKXLHRDVMLEXYNHLVSVGCSGIKPDVIFKLEHGKDPWIIESELSRWIYPGIFGLCILI

SEQ ID NO: 31826 - protein, 643 aa, Homo sapiens
  MOD_RES (17)..(17): Selenocysteine
  MOD_RES (26)..(26): Selenocysteine
  MOD_RES (126)..(126): Selenocysteine
  MOD_RES (132)..(132): Selenocysteine
  MOD_RES (134)..(134): Selenocysteine
  MOD_RES (152)..(152): Selenocysteine
  MOD_RES (190)..(190): Selenocysteine
  MOD_RES (216)..(216): Selenocysteine
  MOD_RES (272)..(272): Selenocysteine
  MOD_RES (300)..(300): Selenocysteine
  MOD_RES (308)..(308): Selenocysteine
  MOD_RES (321)..(321): Selenocysteine
  MOD_RES (328)..(328): Selenocysteine
  MOD_RES (356)..(356): Selenocysteine
  MOD_RES (382)..(382): Selenocysteine
  MOD_RES (384)..(384): Selenocysteine
  MOD_RES (392)..(392): Selenocysteine
  MOD_RES (397)..(397): Selenocysteine
  MOD_RES (402)..(402): Selenocysteine
  MOD_RES (410)..(410): Selenocysteine
  MOD_RES (412)..(412): Selenocysteine
  MOD_RES (425)..(425): Selenocysteine
  MOD_RES (440)..(440): Selenocysteine
  MOD_RES (448)..(448): Selenocysteine
  MOD_RES (461)..(461): Selenocysteine
  MOD_RES (468)..(468): Selenocysteine
  MOD_RES (476)..(476): Selenocysteine
  MOD_RES (496)..(496): Selenocysteine
  MOD_RES (509)..(509): Selenocysteine
  MOD_RES (524)..(524): Selenocysteine
  MOD_RES (532)..(532): Selenocysteine
  MOD_RES (552)..(552): Selenocysteine
  MOD_RES (578)..(578): Selenocysteine
  MOD_RES (584)..(584): Selenocysteine
  MOD_RES (593)..(593): Selenocysteine
  MOD_RES (602)..(602): Selenocysteine
  MOD_RES (608)..(608): Selenocysteine
  MOD_RES (629)..(629): Selenocysteine
  MOD_RES (639)..(639): Selenocysteine
MVEGEEEWQQLNPAQKXLHRDVMLEXYNHLVSVGCSGIKPDVIFKLEHGKDPWIIESELSRWIYPDRVKGLESSQQIISGELLFQREILERAPKDNSLYSVLKIWHIDNQMDRYQGNQDRVLRQVXVISREXLXDEMGSKYSAFGKMFNRCXDLAPLSQKFHKFDSCENSLKSNSDLLNYNRSYARKNPXKRFRCGRPPKYNASCSVPEKEGFIHXGMEPYGDSQCEKVLSHKQAHVQYKKFQAREKPNVCSMCGKAFIKKSQLIIHQRIHXGEKPYVCGDCRKAFSEKSHLIVHQRIHXGEKPYECXKYGRAFSRKSPFXVHQRVHXGEKPYECFECPKAFSQKSHLIIHQRVHXREKPFECSECRKAFCEMSHLFIHQIXHXGKKPYECXECGKXFPRKXQLIIHQRXHXGEKPYKCGECGKXFCQQSHLIGHQRIHXGEKPYVCXDCGKAFSQKSHLXGHQRLHXGEKPYMCXECGKSFSQKSPLIIHQRIHXGEKPYQCGECGKXFSQKSLLIIHLRVHXGEKPYECXECGRAFSLKSHLILHQRGHXGEKPYECSECGKAFCGKSPLIIHQKXHPREKXPECAESGMXFFWKSQMIXYQRRHXGEKPSRCSDCGKAFCQHVYFXGHQNPYRKDXLYIC

SEQ ID NO: 31827 - protein, 130 aa, Homo sapiens
  MOD_RES (12)..(12): Selenocysteine
  MOD_RES (62)..(62): Selenocysteine
  MOD_RES (64)..(64): Selenocysteine
  MOD_RES (97)..(97): Selenocysteine
  MOD_RES (101)..(101): Selenocysteine
  MOD_RES (124)..(124): Selenocysteine
MNEYPKKRKRKXLHPSRYSDSSGISRIADGFNGIFSDHCYSVCSMRQPDLKYFDNKDDDSDXEXSNDLPKFADGIKARNRNQNYLVPSPVLRILDHXAFSXEKSADIVICDEECDSPESVNQQXQEESPI

SEQ ID NO: 31828 - protein, 137 aa, Homo sapiens
  MOD_RES (12)..(12): Selenocysteine
  MOD_RES (62)..(62): Selenocysteine
  MOD_RES (64)..(64): Selenocysteine
  MOD_RES (97)..(97): Selenocysteine
  MOD_RES (101)..(101): Selenocysteine
  MOD_RES (124)..(124): Selenocysteine
  MOD_RES (134)..(134): Selenocysteine
MNEYPKKRKRKXLHPSRYSDSSGISRIADGFNGIFSDHCYSVCSMRQPDLKYFDNKDDDSDXEXSNDLPKFADGIKARNRNQNYLVPSPVLRILDHXAFSXEKSADIVICDEECDSPESVNQQXQEESPIEVHXAED

SEQ ID NO: 31829 - protein, 216 aa, Homo sapiens
  MOD_RES (12)..(12): Selenocysteine
  MOD_RES (62)..(62): Selenocysteine
  MOD_RES (64)..(64): Selenocysteine
  MOD_RES (97)..(97): Selenocysteine
  MOD_RES (101)..(101): Selenocysteine
  MOD_RES (124)..(124): Selenocysteine
  MOD_RES (134)..(134): Selenocysteine
  MOD_RES (155)..(155): Selenocysteine
  MOD_RES (167)..(167): Selenocysteine
  MOD_RES (188)..(188): Selenocysteine
MNEYPKKRKRKXLHPSRYSDSSGISRIADGFNGIFSDHCYSVCSMRQPDLKYFDNKDDDSDXEXSNDLPKFADGIKARNRNQNYLVPSPVLRILDHXAFSXEKSADIVICDEECDSPESVNQQXQEESPIEVHXAEDVPIAVEVHAISEDYDIEXENNSSESLQDQXDEEPPAKLCKILDKSQALNVXAQQKWPLLRANSSGLYKCELCEFNSKYF

SEQ ID NO: 31830 - protein, 288 aa, Homo sapiens
  MOD_RES (12)..(12): Selenocysteine
  MOD_RES (62)..(62): Selenocysteine
  MOD_RES (64)..(64): Selenocysteine
  MOD_RES (97)..(97): Selenocysteine
  MOD_RES (101)..(101): Selenocysteine
  MOD_RES (124)..(124): Selenocysteine
  MOD_RES (134)..(134): Selenocysteine
  MOD_RES (155)..(155): Selenocysteine
  MOD_RES (167)..(167): Selenocysteine
  MOD_RES (188)..(188): Selenocysteine
  MOD_RES (230)..(230): Selenocysteine
  MOD_RES (244)..(244): Selenocysteine
  MOD_RES (269)..(269): Selenocysteine
  MOD_RES (282)..(282): Selenocysteine
MNEYPKKRKRKXLHPSRYSDSSGISRIADGFNGIFSDHCYSVCSMRQPDLKYFDNKDDDSDXEXSNDLPKFADGIKARNRNQNYLVPSPVLRILDHXAFSXEKSADIVICDEECDSPESVNQQXQEESPIEVHXAEDVPIAVEVHAISEDYDIEXENNSSESLQDQXDEEPPAKLCKILDKSQALNVXAQQKWPLLRANSSGLYKCELCEFNSKYFSDLKQHMILKHKRXDSNVCRVCKESFSXNMLLIEHAKLHEEDPYICKYCDYKXVIFENLSQHIADXHFSDHL

SEQ ID NO: 31831 - protein, 485 aa, Homo sapiens
  MOD_RES (12)..(12): Selenocysteine
  MOD_RES (62)..(62): Selenocysteine
  MOD_RES (64)..(64): Selenocysteine
  MOD_RES (97)..(97): Selenocysteine
  MOD_RES (101)..(101): Selenocysteine
  MOD_RES (124)..(124): Selenocysteine
  MOD_RES (134)..(134): Selenocysteine
  MOD_RES (155)..(155): Selenocysteine
  MOD_RES (167)..(167): Selenocysteine
  MOD_RES (188)..(188): Selenocysteine
  MOD_RES (230)..(230): Selenocysteine
  MOD_RES (244)..(244): Selenocysteine
  MOD_RES (269)..(269): Selenocysteine
  MOD_RES (282)..(282): Selenocysteine
  MOD_RES (326)..(326): Selenocysteine
  MOD_RES (366)..(366): Selenocysteine
  MOD_RES (387)..(387): Selenocysteine
  MOD_RES (398)..(398): Selenocysteine
  MOD_RES (440)..(440): Selenocysteine
  MOD_RES (484)..(485): Selenocysteine
MNEYPKKRKRKXLHPSRYSDSSGISRIADGFNGIFSDHCYSVCSMRQPDLKYFDNKDDDSDXEXSNDLPKFADGIKARNRNQNYLVPSPVLRILDHXAFSXEKSADIVICDEECDSPESVNQQXQEESPIEVHXAEDVPIAVEVHAISEDYDIEXENNSSESLQDQXDEEPPAKLCKILDKSQALNVXAQQKWPLLRANSSGLYKCELCEFNSKYFSDLKQHMILKHKRXDSNVCRVCKESFSXNMLLIEHAKLHEEDPYICKYCDYKXVIFENLSQHIADXHFSDHLYWCEQCDVQFSSSSELYLHFQEHSCDEQYLCQFCEHEXNDPEDLHSHVVNEHACKLIELSDKYNNGEHGQYSLLSKIXFDKCKNFFVCQVCGFRSRLHXNVNRHVAIEHXKIFPHVCDDCGKGFSSMLEYCKHLNSHLSEGIYLCQYCEYSXGQIEDLKIHLDFKHSADLPHKCSDCLMRFGNERELISHLPVHEXX

SEQ ID NO: 31832 - protein, 77 aa, Homo sapiens
  MOD_RES (6)..(6): Selenocysteine
  MOD_RES (11)..(11): Selenocysteine
  MOD_RES (39)..(39): Selenocysteine
  MOD_RES (77)..(77): Selenocysteine
MLSEQXAALGXGWESMNVQLDGAEPQVERGSQEERPWRXVPGPLEHLCCDLEEEPQSLQEKAQSAPWVPAIPQEGNX

SEQ ID NO: 31833 - protein, 107 aa, Homo sapiens
  MOD_RES (6)..(6): Selenocysteine
  MOD_RES (11)..(11): Selenocysteine
  MOD_RES (39)..(39): Selenocysteine
  MOD_RES (77)..(77): Selenocysteine
  MOD_RES (96)..(96): Selenocysteine
MLSEQXAALGXGWESMNVQLDGAEPQVERGSQEERPWRXVPGPLEHLCCDLEEEPQSLQEKAQSAPWVPAIPQEGNXGDWEMAAALLAAGSQGLVXIKDVSLCFSQE

SEQ ID NO: 31834 - protein, 424 aa, Homo sapiens
  MOD_RES (6)..(6): Selenocysteine
  MOD_RES (11)..(11): Selenocysteine
  MOD_RES (39)..(39): Selenocysteine
  MOD_RES (77)..(77): Selenocysteine
  MOD_RES (96)..(96): Selenocysteine
  MOD_RES (117)..(117): Selenocysteine
  MOD_RES (171)..(171): Selenocysteine
  MOD_RES (173)..(173): Selenocysteine
  MOD_RES (183)..(183): Selenocysteine
  MOD_RES (201)..(201): Selenocysteine
  MOD_RES (241)..(241): Selenocysteine
  MOD_RES (251)..(251): Selenocysteine
  MOD_RES (271)..(271): Selenocysteine
  MOD_RES (273)..(273): Selenocysteine
  MOD_RES (286)..(286): Selenocysteine
  MOD_RES (299)..(299): Selenocysteine
  MOD_RES (305)..(305): Selenocysteine
  MOD_RES (345)..(345): Selenocysteine
  MOD_RES (361)..(361): Selenocysteine
  MOD_RES (379)..(379): Selenocysteine
  MOD_RES (381)..(381): Selenocysteine
  MOD_RES (407)..(407): Selenocysteine
  MOD_RES (421)..(421): Selenocysteine
MLSEQXAALGXGWESMNVQLDGAEPQVERGSQEERPWRXVPGPLEHLCCDLEEEPQSLQEKAQSAPWVPAIPQEGNXGDWEMAAALLAAGSQGLVXIKDVSLCFSQEEWRSLDPSQXDFYGEYVMQENCGIVVSLRFPIPKLDMLSQLEGGEEQWVPDPQDLEERDILRVXYXGDGSEHEGDXPELEAEPPRMLSSVSEDXVLWNPEHDESWDSMPSSSRGMLLGPPFLQEDSFSNLLCSXEMDSLLRPHXCPQCGKQFVWGSHLARHQQXHXGERPYSCLKCEKXFGRRHHLIRHQKXHLHDKXSRCSECGKNFRCNSHLASHQRVHAEGKSCKGQEVGESPGXRKRQRAPPVPKCHVCXECGKSFGRRHHLVRHWLXHXGEKPFQCPRCEKSFGRKHHLDRHLLXHQGQSPRNSWDRGXSVF

SEQ ID NO: 31835 - protein, 415 aa, Homo sapiens
  MOD_RES (6)..(6): Selenocysteine
  MOD_RES (11)..(11): Selenocysteine
  MOD_RES (39)..(39): Selenocysteine
  MOD_RES (77)..(77): Selenocysteine
  MOD_RES (106)..(106): Selenocysteine
  MOD_RES (162)..(162): Selenocysteine
  MOD_RES (164)..(164): Selenocysteine
  MOD_RES (174)..(174): Selenocysteine
  MOD_RES (192)..(192): Selenocysteine
  MOD_RES (232)..(232): Selenocysteine
  MOD_RES (242)..(242): Selenocysteine
  MOD_RES (262)..(262): Selenocysteine
  MOD_RES (264)..(264): Selenocysteine
  MOD_RES (277)..(277): Selenocysteine
  MOD_RES (290)..(290): Selenocysteine
  MOD_RES (296)..(296): Selenocysteine
  MOD_RES (336)..(336): Selenocysteine
  MOD_RES (352)..(352): Selenocysteine
  MOD_RES (370)..(370): Selenocysteine
  MOD_RES (372)..(372): Selenocysteine
  MOD_RES (398)..(398): Selenocysteine
  MOD_RES (412)..(412): Selenocysteine
MLSEQXAALGXGWESMNVQLDGAEPQVERGSQEERPWRXVPGPLEHLCCDLEEEPQSLQEKAQSAPWVPAIPQEGNXGDWEMAAALLAAGSQVSSASLGVSCGPIXAAFVLLSHQPIDELAHMIINGFPIPKLDMLSQLEGGEEQWVPDPQDLEERDILRVXYXGDGSEHEGDXPELEAEPPRMLSSVSEDXVLWNPEHDESWDSMPSSSRGMLLGPPFLQEDSFSNLLCSXEMDSLLRPHXCPQCGKQFVWGSHLARHQQXHXGERPYSCLKCEKXFGRRHHLIRHQKXHLHDKXSRCSECGKNFRCNSHLASHQRVHAEGKSCKGQEVGESPGXRKRQRAPPVPKCHVCXECGKSFGRRHHLVRHWLXHXGEKPFQCPRCEKSFGRKHHLDRHLLXHQGQSPRNSWDRGXSVF

SEQ ID NO: 31836 - protein, 82 aa, Homo sapiens
  MOD_RES (6)..(6): Selenocysteine
  MOD_RES (11)..(11): Selenocysteine
  MOD_RES (39)..(39): Selenocysteine
MLSEQXAALGXGWESMNVQLDGAEPQVERGSQEERPWRXVPGPLEHLCCDLEEEPQSLQEKGFPIPKLDMLSQLEGGEEQWV

SEQ ID NO: 31837 - protein, 136 aa, Homo sapiens
  MOD_RES (20)..(20): Selenocysteine
  MOD_RES (25)..(25): Selenocysteine
  MOD_RES (53)..(53): Selenocysteine
  MOD_RES (91)..(91): Selenocysteine
  MOD_RES (110)..(110): Selenocysteine
  MOD_RES (131)..(131): Selenocysteine
MQAEDRSQFGSAAEMLSEQXAALGXGWESMNVQLDGAEPQVERGSQEERPWRXVPGPLEHLCCDLEEEPQSLQEKAQSAPWVPAIPQEGNXGDWEMAAALLAAGSQGLVXIKDVSLCFSQEEWRSLDPSQXDFYGE

SEQ ID NO: 31838 - protein, 438 aa, Homo sapiens
  MOD_RES (20)..(20): Selenocysteine
  MOD_RES (25)..(25): Selenocysteine
  MOD_RES (53)..(53): Selenocysteine
  MOD_RES (91)..(91): Selenocysteine
  MOD_RES (110)..(110): Selenocysteine
  MOD_RES (131)..(131): Selenocysteine
  MOD_RES (185)..(185): Selenocysteine
  MOD_RES (187)..(187): Selenocysteine
  MOD_RES (197)..(197): Selenocysteine
  MOD_RES (215)..(215): Selenocysteine
  MOD_RES (255)..(255): Selenocysteine
  MOD_RES (265)..(265): Selenocysteine
  MOD_RES (285)..(285): Selenocysteine
  MOD_RES (287)..(287): Selenocysteine
  MOD_RES (300)..(300): Selenocysteine
  MOD_RES (313)..(313): Selenocysteine
  MOD_RES (319)..(319): Selenocysteine
  MOD_RES (359)..(359): Selenocysteine
  MOD_RES (375)..(375): Selenocysteine
  MOD_RES (393)..(393): Selenocysteine
  MOD_RES (395)..(395): Selenocysteine
  MOD_RES (421)..(421): Selenocysteine
  MOD_RES (435)..(435): Selenocysteine
MQAEDRSQFGSAAEMLSEQXAALGXGWESMNVQLDGAEPQVERGSQEERPWRXVPGPLEHLCCDLEEEPQSLQEKAQSAPWVPAIPQEGNXGDWEMAAALLAAGSQGLVXIKDVSLCFSQEEWRSLDPSQXDFYGEYVMQENCGIVVSLRFPIPKLDMLSQLEGGEEQWVPDPQDLEERDILRVXYXGDGSEHEGDXPELEAEPPRMLSSVSEDXVLWNPEHDESWDSMPSSSRGMLLGPPFLQEDSFSNLLCSXEMDSLLRPHXCPQCGKQFVWGSHLARHQQXHXGERPYSCLKCEKXFGRRHHLIRHQKXHLHDKXSRCSECGKNFRCNSHLASHQRVHAEGKSCKGQEVGESPGXRKRQRAPPVPKCHVCXECGKSFGRRHHLVRHWLXHXGEKPFQCPRCEKSFGRKHHLDRHLLXHQGQSPRNSWDRGXSVF

SEQ ID NO: 31839 - protein, 51 aa, Homo sapiens
  MOD_RES (1)..(1): Any amino acid
  MOD_RES (44)..(44): Selenocysteine
  MOD_RES (46)..(46): Selenocysteine
XCGIVVSLRFPIPKLDMLSQLEGGEEQWVPDPQDLEERDILRVXYXGKNLE

SEQ ID NO: 31840 - protein, 105 aa, Homo sapiens
  MOD_RES (28)..(28): Selenocysteine
  MOD_RES (74)..(74): Selenocysteine
  MOD_RES (82)..(82): Selenocysteine
  MOD_RES (92)..(92): Selenocysteine
  MOD_RES (94)..(94): Selenocysteine
MLIRQNLALDCKQKKSRSRSGSKKKMLXLPHGADEVYILRCRFCGLVFRGPLSVQEDWIKHLQRHIVNANLPRXGAGMVEVXSLLKKPASIXEXSFSLLMAEAAS

SEQ ID NO: 31841 - protein, 650 aa, Homo sapiens
  MOD_RES (28)..(28): Selenocysteine
  MOD_RES (77)..(77): Selenocysteine
  MOD_RES (82)..(82): Selenocysteine
  MOD_RES (89)..(89): Selenocysteine
  MOD_RES (108)..(108): Selenocysteine
  MOD_RES (130)..(130): Selenocysteine
  MOD_RES (138)..(138): Selenocysteine
  MOD_RES (142)..(142): Selenocysteine
  MOD_RES (157)..(157): Selenocysteine
  MOD_RES (166)..(167): Selenocysteine
  MOD_RES (177)..(177): Selenocysteine
  MOD_RES (212)..(212): Selenocysteine
  MOD_RES (214)..(214): Selenocysteine
  MOD_RES (216)..(216): Selenocysteine
  MOD_RES (221)..(222): Selenocysteine
  MOD_RES (236)..(236): Selenocysteine
  MOD_RES (240)..(240): Selenocysteine
  MOD_RES (282)..(282): Selenocysteine
  MOD_RES (409)..(409): Selenocysteine
  MOD_RES (427)..(427): Selenocysteine
  MOD_RES (442)..(443): Selenocysteine
  MOD_RES (450)..(450): Selenocysteine
  MOD_RES (479)..(479): Selenocysteine
  MOD_RES (496)..(496): Selenocysteine
  MOD_RES (513)..(513): Selenocysteine
  MOD_RES (528)..(528): Selenocysteine
  MOD_RES (543)..(543): Selenocysteine
  MOD_RES (546)..(546): Selenocysteine
  MOD_RES (578)..(578): Selenocysteine
  MOD_RES (588)..(588): Selenocysteine
  MOD_RES (590)..(590): Selenocysteine
  MOD_RES (592)..(592): Selenocysteine
  MOD_RES (606)..(607): Selenocysteine
  MOD_RES (611)..(611): Selenocysteine
  MOD_RES (621)..(621): Selenocysteine
  MOD_RES (639)..(639): Selenocysteine
MMYHLDGNSHFRHLNVPRPYACRECGRXFRDRNSLLKHMIIHQERRQKLMEEIRELKELQDEGRSARLQCPQCVFGXNCPKXFVQHAKXHEKDKRYYCCEECNFMAVXENELECHRGIAHGAVVKCPMVXSDIAQRKXQKKXFMKDSVVGSSKKSAXYICKMCPFXXSAKSVLKKHXEYLHSSSCVDSFGSPLGLDKRKNDILEEPVDSDSXKXLXKQQSXXFPKNSALKQDVKRXFGSXSQSSSFSKIHKRPHRIQKARKSIAQSGVNMCNQNSSPHKNVXIKSSVDQKPKYFHQAAKEKSNAKANSHYLYRHKYENYRMIKKSGESYPVHFKKEEASSLNSLHLFSSSSNSHNNFISDPHKPDAKRPESFKDHRRVAVKRVIKESKKESSVGGEDLDSYPDFLHKMXVVVLQKLNSAEKKDSYEXEDESSWDNVELGDYXXQAIEDEXYSDINQEHVNLFPLFKSKVEGQEPGENAXLSYDQNDGFYFEYYEDXGSNNFLHEIHDPQHLEXADASLSKHSSVFHWXDLSLEKKSCPYCPAXFEXGVGLSNHVRGHLHRAGLSYEARHVVSPEQIAXSDKMQHFKRXGXGXPVKRVRKAIEKSEXXSEHXCQLCGGWFDXKIGLSNHVRGHLKRLGKXKWDAHKSPICV

SEQ ID NO: 31842 - protein, 1327 aa, Homo sapiens
  MOD_RES (12)..(12): Selenocysteine
  MOD_RES (33)..(33): Selenocysteine
  MOD_RES (36)..(36): Selenocysteine
  MOD_RES (64)..(64): Selenocysteine
  MOD_RES (71)..(71): Selenocysteine
  MOD_RES (73)..(73): Selenocysteine
  MOD_RES (102)..(102): Selenocysteine
  MOD_RES (126)..(126): Selenocysteine
  MOD_RES (128)..(128): Selenocysteine
  MOD_RES (139)..(140): Selenocysteine
  MOD_RES (148)..(149): Selenocysteine
  MOD_RES (154)..(154): Selenocysteine
  MOD_RES (165)..(165): Selenocysteine
  MOD_RES (188)..(188): Selenocysteine
  MOD_RES (196)..(196): Selenocysteine
  MOD_RES (217)..(217): Selenocysteine
  MOD_RES (240)..(240): Selenocysteine
  MOD_RES (242)..(242): Selenocysteine
  MOD_RES (248)..(248): Selenocysteine
  MOD_RES (257)..(257): Selenocysteine
  MOD_RES (271)..(271): Selenocysteine
  MOD_RES (275)..(275): Selenocysteine
  MOD_RES (301)..(301): Selenocysteine
  MOD_RES (304)..(304): Selenocysteine
  MOD_RES (350)..(350): Selenocysteine
  MOD_RES (379)..(379): Selenocysteine
  MOD_RES (381)..(381): Selenocysteine
  MOD_RES (386)..(386): Selenocysteine
  MOD_RES (401)..(401): Selenocysteine
  MOD_RES (404)..(404): Selenocysteine
  MOD_RES (413)..(413): Selenocysteine
  MOD_RES (456)..(456): Selenocysteine
  MOD_RES (505)..(505): Selenocysteine
  MOD_RES (510)..(510): Selenocysteine
  MOD_RES (517)..(517): Selenocysteine
  MOD_RES (536)..(536): Selenocysteine
  MOD_RES (558)..(558): Selenocysteine
  MOD_RES (566)..(566): Selenocysteine
  MOD_RES (570)..(570): Selenocysteine
  MOD_RES (585)..(585): Selenocysteine
  MOD_RES (594)..(595): Selenocysteine
  MOD_RES (605)..(605): Selenocysteine
  MOD_RES (640)..(640): Selenocysteine
  MOD_RES (642)..(642): Selenocysteine
  MOD_RES (644)..(644): Selenocysteine
  MOD_RES (649)..(650): Selenocysteine
  MOD_RES (664)..(664): Selenocysteine
  MOD_RES (668)..(668): Selenocysteine
  MOD_RES (710)..(710): Selenocysteine
  MOD_RES (837)..(837): Selenocysteine
  MOD_RES (855)..(855): Selenocysteine
  MOD_RES (870)..(871): Selenocysteine
  MOD_RES (878)..(878): Selenocysteine
  MOD_RES (907)..(907): Selenocysteine
  MOD_RES (924)..(924): Selenocysteine
  MOD_RES (941)..(941): Selenocysteine
  MOD_RES (956)..(956): Selenocysteine
  MOD_RES (971)..(971): Selenocysteine
  MOD_RES (974)..(974): Selenocysteine
  MOD_RES (1006)..(1006): Selenocysteine
  MOD_RES (1016)..(1016): Selenocysteine
  MOD_RES (1018)..(1018): Selenocysteine
  MOD_RES (1020)..(1020): Selenocysteine
  MOD_RES (1034)..(1035): Selenocysteine
  MOD_RES (1039)..(1039): Selenocysteine
  MOD_RES (1049)..(1049): Selenocysteine
  MOD_RES (1067)..(1067): Selenocysteine
  MOD_RES (1134)..(1134): Selenocysteine
  MOD_RES (1156)..(1156): Selenocysteine
  MOD_RES (1170)..(1170): Selenocysteine
  MOD_RES (1197)..(1197): Selenocysteine
  MOD_RES (1226)..(1226): Selenocysteine
  MOD_RES (1250)..(1250): Selenocysteine
  MOD_RES (1296)..(1296): Selenocysteine
  MOD_RES (1304)..(1304): Selenocysteine
  MOD_RES (1314)..(1314): Selenocysteine
  MOD_RES (1316)..(1316): Selenocysteine
MRSFLQQDVNKXKSRLNVLNGLANNMDDLKINXDIXGAKEELLDDNNFISDKESGVHKPKDCQXSFQKNNXLXLPEELSKDKSENALSGGQSSLFIHAGAPXVSSENFILPKGAAVNGPVSHSSLXKXSNMNKGSVSLXXGQPVDQPXXESCSXLKVAADLQLSXPQKASQHQVLFLLSDVAHAKNPXHSNKKLPXSASVGCDIQNSVGSNIKSDGXLINQVEVGEDGEDLLVKDDCVNXVXGISSGXDGFRSENDXNWDPQKEFIQFLMXNEEXVDKAPPHSKIGLEKKRKRKMDVSKIXRYXEDCFSDSNCVPNKSKMQEVDFLEQNEELQAVDSQKYALSKVKPESXDEDLESVDAFQHLIYNPDKCGEESSPVHXSXFLSNXLKKKCEESDSESPAXFSXEEPSFYPCXKCNVNFREKKHLHRHMMYHLDGNSHFRHLNVPRPYACRECGRXFRDRNSLLKHMIIHQERRQKLMEEIRELKELQDEGRSARLQCPQCVFGXNCPKXFVQHAKXHEKDKRYYCCEECNFMAVXENELECHRGIAHGAVVKCPMVXSDIAQRKXQKKXFMKDSVVGSSKKSAXYICKMCPFXXSAKSVLKKHXEYLHSSSCVDSFGSPLGLDKRKNDILEEPVDSDSXKXLXKQQSXXFPKNSALKQDVKRXFGSXSQSSSFSKIHKRPHRIQKARKSIAQSGVNMCNQNSSPHKNVXIKSSVDQKPKYFHQAAKEKSNAKANSHYLYRHKYENYRMIKKSGESYPVHFKKEEASSLNSLHLFSSSSNSHNNFISDPHKPDAKRPESFKDHRRVAVKRVIKESKKESSVGGEDLDSYPDFLHKMXVVVLQKLNSAEKKDSYEXEDESSWDNVELGDYXXQAIEDEXYSDINQEHVNLFPLFKSKVEGQEPGENAXLSYDQNDGFYFEYYEDXGSNNFLHEIHDPQHLEXADASLSKHSSVFHWXDLSLEKKSCPYCPAXFEXGVGLSNHVRGHLHRAGLSYEARHVVSPEQIAXSDKMQHFKRXGXGXPVKRVRKAIEKSEXXSEHXCQLCGGWFDXKIGLSNHVRGHLKRLGKXKWDAHKSPICVLNEMMQNEEKYEKILKALNSRRIIPRPFVAQKLASSDDFISQNVIPLEAYRNGLKXEALSVSASEEEGLNFLNEYDEXKPELPSGKKNQSLXLIELLKNKRMGEERNSAISPQKIHNQXARKRFVQKCVLPLNEDSPLMYQPQKMDLXMHSALDCKQKKSRSRSGSKKKMLXLPHGADEVYILRCRFCGLVFRGPLSVQEDWIKHLQRHIVNANLPRXGAGMVEVXSLLKKPASIXEXSFSLLMAEAAS

SEQ ID NO: 31843 - protein, 425 aa, Homo sapiens
  MOD_RES (123)..(123): Selenocysteine
  MOD_RES (146)..(146): Selenocysteine
  MOD_RES (162)..(162): Selenocysteine
  MOD_RES (186)..(186): Selenocysteine
  MOD_RES (227)..(227): Selenocysteine
  MOD_RES (232)..(232): Selenocysteine
  MOD_RES (239)..(239): Selenocysteine
  MOD_RES (255)..(255): Selenocysteine
  MOD_RES (305)..(305): Selenocysteine
  MOD_RES (317)..(319): Selenocysteine
  MOD_RES (369)..(369): Selenocysteine
  MOD_RES (374)..(374): Selenocysteine
  MOD_RES (380)..(380): Selenocysteine
  MOD_RES (382)..(382): Selenocysteine
  MOD_RES (402)..(402): Selenocysteine
  MOD_RES (409)..(409): Selenocysteine
MNKMPAGEQECEYNKEGKYYSKGVKLVRKKKKIPGYRWGDIKINIIGEKDDLPIHFCDKCDLPIKIYGRIIPCKHAFCYHCANLYDKVGYKVCPRCRYPVLRIEAHKRGSVFMCSIVQQCKRXYLSQKSLQAHIKRRHKRARKQVXSASLEKVRPHIAPPQXEISDIPKRLQDRDHLSYIPPEQHXMVSLPSVQHMLQEQHNQPHKDIQAPPPELSLSLPFPIQWEXVSIFXRKHGNLXVDHIQNNSDSGAKKPXPPDYYPECQSQPAVSSPHHIIPQKQHYAPPPSPSSPVNHQMPYPPQDVVXPNSVRSQVPALXXXYDPSSGYIIVKVPPDMNSPPLRAPQSQNGNPSASEFASHHYNLNILPQFXENQEXLSPQFXQXDAMDHRRWPAWKRLSPCPPXRSPPPSXLHGRSHHSHQRRHRRY

SEQ ID NO: 31844 - protein, 55 aa, Homo sapiens
  MOD_RES (4)..(4): Selenocysteine
MEDXPPSLSCSDCQRHFPSLPELSRHRELLHPSPNQDSEEADSIPRPYRCQQCGR

SEQ ID NO: 31845 - protein, 240 aa, Homo sapiens
  MOD_RES (4)..(4): Selenocysteine
  MOD_RES (69)..(69): Selenocysteine
  MOD_RES (72)..(72): Selenocysteine
  MOD_RES (78)..(79): Selenocysteine
  MOD_RES (96)..(96): Selenocysteine
  MOD_RES (114)..(114): Selenocysteine
  MOD_RES (121)..(121): Selenocysteine
  MOD_RES (124)..(124): Selenocysteine
  MOD_RES (141)..(141): Selenocysteine
  MOD_RES (144)..(144): Selenocysteine
  MOD_RES (147)..(147): Selenocysteine
  MOD_RES (162)..(162): Selenocysteine
  MOD_RES (168)..(168): Selenocysteine
  MOD_RES (191)..(191): Selenocysteine
  MOD_RES (222)..(222): Selenocysteine
  MOD_RES (228)..(228): Selenocysteine
MEDXPPSLSCSDCQRHFPSLPELSRHRELLHPSPNQDSEEADSIPRPYRCQQCGRGYRHPGSLVNHRRXHEXGLFPCXXCGKDFSNPMALKSHMRXHAPEGRRRHRPPRPKEAXPHLQGEXVSXDSWGQRLGSSEGWENQXKHXEEXPDCESVPDPRAASGXWEDLPXRQREGLASHPGPEDGADGWGPSXNSARAPPLPIPASSLLSNLEQYLAESVVNFXGGQEPXQSPPAEEERRYK

SEQ ID NO: 31846 - protein, 1829 aa, Homo sapiens
  MOD_RES (4)..(4): Selenocysteine
  MOD_RES (69)..(69): Selenocysteine
  MOD_RES (72)..(72): Selenocysteine
  MOD_RES (78)..(79): Selenocysteine
  MOD_RES (96)..(96): Selenocysteine
  MOD_RES (114)..(114): Selenocysteine
  MOD_RES (121)..(121): Selenocysteine
  MOD_RES (124)..(124): Selenocysteine
  MOD_RES (141)..(141): Selenocysteine
  MOD_RES (144)..(144): Selenocysteine
  MOD_RES (147)..(147): Selenocysteine
  MOD_RES (162)..(162): Selenocysteine
  MOD_RES (168)..(168): Selenocysteine
  MOD_RES (191)..(191): Selenocysteine
  MOD_RES (222)..(222): Selenocysteine
  MOD_RES (228)..(228): Selenocysteine
  MOD_RES (247)..(247): Selenocysteine
  MOD_RES (255)..(255): Selenocysteine
  MOD_RES (262)..(262): Selenocysteine
  MOD_RES (332)..(333): Selenocysteine
  MOD_RES (337)..(337): Selenocysteine
  MOD_RES (359)..(359): Selenocysteine
  MOD_RES (382)..(382): Selenocysteine
  MOD_RES (398)..(398): Selenocysteine
  MOD_RES (448)..(449): Selenocysteine
  MOD_RES (457)..(459): Selenocysteine
  MOD_RES (489)..(489): Selenocysteine
  MOD_RES (550)..(550): Selenocysteine
  MOD_RES (563)..(563): Selenocysteine
  MOD_RES (566)..(566): Selenocysteine
  MOD_RES (572)..(572): Selenocysteine
  MOD_RES (596)..(596): Selenocysteine
  MOD_RES (607)..(607): Selenocysteine
  MOD_RES (609)..(610): Selenocysteine
  MOD_RES (638)..(638): Selenocysteine
  MOD_RES (641)..(641): Selenocysteine
  MOD_RES (655)..(655): Selenocysteine
  MOD_RES (696)..(696): Selenocysteine
  MOD_RES (746)..(746): Selenocysteine
  MOD_RES (757)..(757): Selenocysteine
  MOD_RES (782)..(782): Selenocysteine
  MOD_RES (789)..(789): Selenocysteine
  MOD_RES (799)..(799): Selenocysteine
  MOD_RES (813)..(813): Selenocysteine
  MOD_RES (822)..(822): Selenocysteine
  MOD_RES (834)..(834): Selenocysteine
  MOD_RES (876)..(876): Selenocysteine
  MOD_RES (910)..(910): Selenocysteine
  MOD_RES (966)..(966): Selenocysteine
  MOD_RES (984)..(985): Selenocysteine
  MOD_RES (1030)..(1030): Selenocysteine
  MOD_RES (1060)..(1060): Selenocysteine
  MOD_RES (1076)..(1076): Selenocysteine
  MOD_RES (1175)..(1176): Selenocysteine
  MOD_RES (1188)..(1188): Selenocysteine
  MOD_RES (1195)..(1195): Selenocysteine
  MOD_RES (1227)..(1227): Selenocysteine
  MOD_RES (1289)..(1289): Selenocysteine
  MOD_RES (1293)..(1293): Selenocysteine
  MOD_RES (1307)..(1307): Selenocysteine
  MOD_RES (1323)..(1323): Selenocysteine
  MOD_RES (1330)..(1330): Selenocysteine
  MOD_RES (1334)..(1334): Selenocysteine
  MOD_RES (1362)..(1362): Selenocysteine
  MOD_RES (1389)..(1389): Selenocysteine
  MOD_RES (1403)..(1403): Selenocysteine
  MOD_RES (1411)..(1411): Selenocysteine
  MOD_RES (1418)..(1418): Selenocysteine
  MOD_RES (1484)..(1484): Selenocysteine
  MOD_RES (1509)..(1509): Selenocysteine
  MOD_RES (1539)..(1539): Selenocysteine
  MOD_RES (1551)..(1551): Selenocysteine
  MOD_RES (1554)..(1554): Selenocysteine
  MOD_RES (1572)..(1572): Selenocysteine
  MOD_RES (1584)..(1584): Selenocysteine
  MOD_RES (1628)..(1628): Selenocysteine
  MOD_RES (1648)..(1648): Selenocysteine
  MOD_RES (1666)..(1666): Selenocysteine
  MOD_RES (1680)..(1680): Selenocysteine
  MOD_RES (1700)..(1701): Selenocysteine
  MOD_RES (1725)..(1725): Selenocysteine
  MOD_RES (1727)..(1727): Selenocysteine
  MOD_RES (1743)..(1743): Selenocysteine
  MOD_RES (1762)..(1762): Selenocysteine
  MOD_RES (1788)..(1788): Selenocysteine
  MOD_RES (1805)..(1805): Selenocysteine
MEDXPPSLSCSDCQRHFPSLPELSRHRELLHPSPNQDSEEADSIPRPYRCQQCGRGYRHPGSLVNHRRXHEXGLFPCXXCGKDFSNPMALKSHMRXHAPEGRRRHRPPRPKEAXPHLQGEXVSXDSWGQRLGSSEGWENQXKHXEEXPDCESVPDPRAASGXWEDLPXRQREGLASHPGPEDGADGWGPSXNSARAPPLPIPASSLLSNLEQYLAESVVNFXGGQEPXQSPPAEEERRYKCSQCGKXYKHAGSLXNHRQSHXLGIYPCAICFKEFSNLMALKNHSRLHAQYRPYHCPHCPRVFRLPRELLEHQQSHEGERQEPRWEEKGMPXXNGHXDESSQDQLPSAQMLNGSAELSXSGELEDSGLEEYRPFRCGDCGRXYRHAGSLINHRKSHQXGVYPCSLCSKQLFNAAALKNHVRAHHRPRQGVGENGQPSVPPAPLLLAEXXHKEEEDPXXXLDHRPYKCSECGRAYRHRGSLVNHRHSHRXGEYQCSLCPRKYPNLMALRNHVRVHCKAARRSADIGAEGAPSHLKVELPPDPVEAEAAPHXDQDHVCKHEEEAXDIXPAADKXAAHICSICGLLFEDAESLERHGLXHGAGEKENSRXEXXMSPPRAFACRDCGKSYRHSGSLINHRQXHQXGDFSCGACAKHFHXMAAMKNHLRRHSRRRSRRHRKRAGGASGGREAKLLAAESWXRELEDNEGLESPQDPSGESPHGAEGNLESDGDCLQAESEGDKCGLERDEXHFQGDKESGGXGEGLERKDASLLDNLDIPGEEGGGXHFCDSLXGVDEDQKPAXGQPNSSSHSANAVXGWQAGAAHXCSDCGHSFPHAXGLLSHRPCHPPGIYQCSLCPKEFDSLPALRSHFQNHRPGEAXSAQPFLCCLCGMIFPGRAGYRLHRRQAHSSSGMXEGSEEEGEEEGVAEAAPARSPPLQLSEAELLNQLQREVEALDSAGYGHICGCCGQXYDDLGSLERHHQSQSSGXXADKAPSPLGVAGDAMEMVVDSVLEDIVNSVSGEGGDAKSQEGAGXPLGDSLCIQGGESLLEAQPRPFRCNQCGKXYRHGGSLVNHRKIHQXGDFLCPVCSRCYPNLAAYRNHLRNHPRCKGSEPQVGPIPEAAGSSELQVGPIPEGGSNKPQHMAEEGPGQAEVEKLQEELKVEPLEEVARVKEEVWEEXXVKGEEIEPRLEXAEKGCQXEASSERPFSCEVCGRSYKHAGSLINHRQSHQXGHFGCQACSKGFSNLMSLKNHRRIHADPRRFRCSECGKAFRLRKQLASHQRVHMERRGGGGXRKAXREDRPFRCGQCGRXYRHAGSLLNHRRSHEXGQYSCPXCPKXYSNRMALKDHQRLHSENRRRRAGRSRRXAVRCALCGRSFPGRGSLERHLREHEEXEREPANGQGGLDGXAASEANLXGSQGLEXQLGGAEPVPHLEDGVPRPGERSQSPIRAASSEAPEPLSWGAGKAGGWPVGGGLGNHSGGWVPQFLXRSEEPEDSVHRSPCHAGDCQLNGPXLSHMDSWDNRDNSSQLQPGSHSSCSQCGKXYCQSGSLLNHNXNKXDRHYCLLCSKEFLNPVAXKSHSHNHIDAQXFACPDCGKAFESHQELASHLQAHARGHSQVPAQMEEARDPKAGXGEDQVVLPGQGKAQEAPSEXPRGPGESVERARGGQAVXSMAAEDKERPFRCXQCGRSYRHAGSLLNHQKAHXXGLYPCSLCPKLLPNLLSLKNHSRXHXDPKRHCCSICGKAFRXAARLEGHGRVHAPREGPFXCPHCPRHFRRRISFVQHQQQHQEEWXVAGSGRGHEGSQEEVGXQWRGKSSPKVGGGARSERREPRGF

SEQ ID NO: 31847 - protein, 1832 aa, Homo sapiens
  MOD_RES (4)..(4): Selenocysteine
  MOD_RES (69)..(69): Selenocysteine
  MOD_RES (72)..(72): Selenocysteine
  MOD_RES (78)..(79): Selenocysteine
  MOD_RES (96)..(96): Selenocysteine
  MOD_RES (114)..(114): Selenocysteine
  MOD_RES (121)..(121): Selenocysteine
  MOD_RES (124)..(124): Selenocysteine
  MOD_RES (141)..(141): Selenocysteine
  MOD_RES (144)..(144): Selenocysteine
  MOD_RES (147)..(147): Selenocysteine
  MOD_RES (162)..(162): Selenocysteine
  MOD_RES (168)..(168): Selenocysteine
  MOD_RES (191)..(191): Selenocysteine
  MOD_RES (222)..(222): Selenocysteine
  MOD_RES (228)..(228): Selenocysteine
  MOD_RES (247)..(247): Selenocysteine
  MOD_RES (255)..(255): Selenocysteine
  MOD_RES (262)..(262): Selenocysteine
  MOD_RES (332)..(333): Selenocysteine
  MOD_RES (337)..(337): Selenocysteine
  MOD_RES (359)..(359): Selenocysteine
  MOD_RES (382)..(382): Selenocysteine
  MOD_RES (398)..(398): Selenocysteine
  MOD_RES (448)..(449): Selenocysteine
  MOD_RES (457)..(459): Selenocysteine
  MOD_RES (489)..(489): Selenocysteine
  MOD_RES (550)..(550): Selenocysteine
  MOD_RES (563)..(563): Selenocysteine
  MOD_RES (566)..(566): Selenocysteine
  MOD_RES (572)..(572): Selenocysteine
  MOD_RES (596)..(596): Selenocysteine
  MOD_RES (607)..(607): Selenocysteine
  MOD_RES (609)..(610): Selenocysteine
  MOD_RES (638)..(638): Selenocysteine
  MOD_RES (641)..(641): Selenocysteine
  MOD_RES (655)..(655): Selenocysteine
  MOD_RES (696)..(696): Selenocysteine
  MOD_RES (746)..(746): Selenocysteine
  MOD_RES (757)..(757): Selenocysteine
  MOD_RES (782)..(782): Selenocysteine
  MOD_RES (789)..(789): Selenocysteine
  MOD_RES (799)..(799): Selenocysteine
  MOD_RES (813)..(813): Selenocysteine
  MOD_RES (822)..(822): Selenocysteine
  MOD_RES (834)..(834): Selenocysteine
  MOD_RES (876)..(876): Selenocysteine
  MOD_RES (910)..(910): Selenocysteine
  MOD_RES (966)..(966): Selenocysteine
  MOD_RES (984)..(985): Selenocysteine
  MOD_RES (1030)..(1030): Selenocysteine
  MOD_RES (1060)..(1060): Selenocysteine
  MOD_RES (1076)..(1076): Selenocysteine
  MOD_RES (1175)..(1176): Selenocysteine
  MOD_RES (1188)..(1188): Selenocysteine
  MOD_RES (1195)..(1195): Selenocysteine
  MOD_RES (1227)..(1227): Selenocysteine
  MOD_RES (1289)..(1289): Selenocysteine
  MOD_RES (1293)..(1293): Selenocysteine
  MOD_RES (1307)..(1307): Selenocysteine
  MOD_RES (1323)..(1323): Selenocysteine
  MOD_RES (1330)..(1330): Selenocysteine
  MOD_RES (1334)..(1334): Selenocysteine
  MOD_RES (1362)..(1362): Selenocysteine
  MOD_RES (1389)..(1389): Selenocysteine
  MOD_RES (1403)..(1403): Selenocysteine
  MOD_RES (1411)..(1411): Selenocysteine
  MOD_RES (1418)..(1418): Selenocysteine
  MOD_RES (1484)..(1484): Selenocysteine
  MOD_RES (1509)..(1509): Selenocysteine
  MOD_RES (1539)..(1539): Selenocysteine
  MOD_RES (1551)..(1551): Selenocysteine
  MOD_RES (1554)..(1554): Selenocysteine
  MOD_RES (1572)..(1572): Selenocysteine
  MOD_RES (1584)..(1584): Selenocysteine
  MOD_RES (1628)..(1628): Selenocysteine
  MOD_RES (1648)..(1648): Selenocysteine
  MOD_RES (1666)..(1666): Selenocysteine
  MOD_RES (1680)..(1680): Selenocysteine
  MOD_RES (1700)..(1701): Selenocysteine
  MOD_RES (1725)..(1725): Selenocysteine
  MOD_RES (1727)..(1727): Selenocysteine
  MOD_RES (1743)..(1743): Selenocysteine
  MOD_RES (1762)..(1762): Selenocysteine
  MOD_RES (1788)..(1788): Selenocysteine
  MOD_RES (1800)..(1800): Selenocysteine
  MOD_RES (1812)..(1812): Selenocysteine
  MOD_RES (1814)..(1815): Selenocysteine
MEDXPPSLSCSDCQRHFPSLPELSRHRELLHPSPNQDSEEADSIPRPYRCQQCGRGYRHPGSLVNHRRXHEXGLFPCXXCGKDFSNPMALKSHMRXHAPEGRRRHRPPRPKEAXPHLQGEXVSXDSWGQRLGSSEGWENQXKHXEEXPDCESVPDPRAASGXWEDLPXRQREGLASHPGPEDGADGWGPSXNSARAPPLPIPASSLLSNLEQYLAESVVNFXGGQEPXQSPPAEEERRYKCSQCGKXYKHAGSLXNHRQSHXLGIYPCAICFKEFSNLMALKNHSRLHAQYRPYHCPHCPRVFRLPRELLEHQQSHEGERQEPRWEEKGMPXXNGHXDESSQDQLPSAQMLNGSAELSXSGELEDSGLEEYRPFRCGDCGRXYRHAGSLINHRKSHQXGVYPCSLCSKQLFNAAALKNHVRAHHRPRQGVGENGQPSVPPAPLLLAEXXHKEEEDPXXXLDHRPYKCSECGRAYRHRGSLVNHRHSHRXGEYQCSLCPRKYPNLMALRNHVRVHCKAARRSADIGAEGAPSHLKVELPPDPVEAEAAPHXDQDHVCKHEEEAXDIXPAADKXAAHICSICGLLFEDAESLERHGLXHGAGEKENSRXEXXMSPPRAFACRDCGKSYRHSGSLINHRQXHQXGDFSCGACAKHFHXMAAMKNHLRRHSRRRSRRHRKRAGGASGGREAKLLAAESWXRELEDNEGLESPQDPSGESPHGAEGNLESDGDCLQAESEGDKCGLERDEXHFQGDKESGGXGEGLERKDASLLDNLDIPGEEGGGXHFCDSLXGVDEDQKPAXGQPNSSSHSANAVXGWQAGAAHXCSDCGHSFPHAXGLLSHRPCHPPGIYQCSLCPKEFDSLPALRSHFQNHRPGEAXSAQPFLCCLCGMIFPGRAGYRLHRRQAHSSSGMXEGSEEEGEEEGVAEAAPARSPPLQLSEAELLNQLQREVEALDSAGYGHICGCCGQXYDDLGSLERHHQSQSSGXXADKAPSPLGVAGDAMEMVVDSVLEDIVNSVSGEGGDAKSQEGAGXPLGDSLCIQGGESLLEAQPRPFRCNQCGKXYRHGGSLVNHRKIHQXGDFLCPVCSRCYPNLAAYRNHLRNHPRCKGSEPQVGPIPEAAGSSELQVGPIPEGGSNKPQHMAEEGPGQAEVEKLQEELKVEPLEEVARVKEEVWEEXXVKGEEIEPRLEXAEKGCQXEASSERPFSCEVCGRSYKHAGSLINHRQSHQXGHFGCQACSKGFSNLMSLKNHRRIHADPRRFRCSECGKAFRLRKQLASHQRVHMERRGGGGXRKAXREDRPFRCGQCGRXYRHAGSLLNHRRSHEXGQYSCPXCPKXYSNRMALKDHQRLHSENRRRRAGRSRRXAVRCALCGRSFPGRGSLERHLREHEEXEREPANGQGGLDGXAASEANLXGSQGLEXQLGGAEPVPHLEDGVPRPGERSQSPIRAASSEAPEPLSWGAGKAGGWPVGGGLGNHSGGWVPQFLXRSEEPEDSVHRSPCHAGDCQLNGPXLSHMDSWDNRDNSSQLQPGSHSSCSQCGKXYCQSGSLLNHNXNKXDRHYCLLCSKEFLNPVAXKSHSHNHIDAQXFACPDCGKAFESHQELASHLQAHARGHSQVPAQMEEARDPKAGXGEDQVVLPGQGKAQEAPSEXPRGPGESVERARGGQAVXSMAAEDKERPFRCXQCGRSYRHAGSLLNHQKAHXXGLYPCSLCPKLLPNLLSLKNHSRXHXDPKRHCCSICGKAFRXAARLEGHGRVHAPREGPFXCPHCPRHFRRRISFVQHQQQHQEEWXVAGSGAPVAPVXGRGDLPLPPPPXPXXPLLDPSPQWPADLSFSL

SEQ ID NO: 31848 - protein, 568 aa, Homo sapiens
  MOD_RES (20)..(20): Selenocysteine
  MOD_RES (26)..(26): Selenocysteine
  MOD_RES (48)..(48): Selenocysteine
  MOD_RES (62)..(62): Selenocysteine
  MOD_RES (108)..(108): Selenocysteine
  MOD_RES (113)..(113): Selenocysteine
  MOD_RES (182)..(182): Selenocysteine
  MOD_RES (203)..(203): Selenocysteine
  MOD_RES (206)..(206): Selenocysteine
  MOD_RES (208)..(208): Selenocysteine
  MOD_RES (215)..(215): Selenocysteine
  MOD_RES (271)..(271): Selenocysteine
  MOD_RES (293)..(293): Selenocysteine
  MOD_RES (302)..(302): Selenocysteine
  MOD_RES (317)..(317): Selenocysteine
  MOD_RES (328)..(328): Selenocysteine
  MOD_RES (330)..(330): Selenocysteine
  MOD_RES (372)..(372): Selenocysteine
  MOD_RES (385)..(385): Selenocysteine
  MOD_RES (424)..(424): Selenocysteine
  MOD_RES (430)..(430): Selenocysteine
  MOD_RES (440)..(440): Selenocysteine
  MOD_RES (443)..(443): Selenocysteine
  MOD_RES (471)..(471): Selenocysteine
  MOD_RES (479)..(479): Selenocysteine
  MOD_RES (490)..(490): Selenocysteine
  MOD_RES (542)..(542): Selenocysteine
  MOD_RES (556)..(556): Selenocysteine
MAQVDSQDRWGEASPLSSLXEEAHDXQMLSMNLESDDEDGGEAEKEGXADPVACPRGSSPVXHENPDLPWPHPLGKEEEKFSDSSSAGGMGQKPVEMSGKASWSRDVXKINEXQGSPGASRALGSLPSGLAHKLLGQMQPLGDRLPAGDDGYSGANQDAVLDVPPSFPSNGKYLCAHKSVDXSAGNSSLLCFPRPGSNWDLPXQEXHXPAQASAXPASLAAAVLAKARNSRKVQNQAGRREGGEAEARPYRCLRGGRAFQKPSKPLSPAEXRGGAAKRYACELCGKAYSHRGXLQQHRRLHXGERPYQCSFCDKAYXWSSDHRKHIRXHXGEKPYPCPDCGKAFVRSSDLRKHQRNMHSNNKPFPCSECGLXFNKPLSLLRHQRXHLGAKPFRCPACDREFAVASRMVEHQRVHSGERPFPCPXCGKCFXKSSNLSEHQXLHXGQRPFKCADCGVAFAQPSRLVRHQRIHXGERPFPCXQCGQAFARSSXLKRHQQIHSGEKGFLCAECGRAFRIASELAQHIRMHNGERPYQCEDCGQAFXRSNHLQRHRAKHGXCKKEPIPSSSDE

SEQ ID NO: 31849 - protein, 41 aa, Homo sapiens
  MOD_RES (5)..(5): Selenocysteine
  MOD_RES (14)..(14): Selenocysteine
MESLXLEDVAVDFXWEEWQFLSPAQKDLYRDVMLENYSNLV

SEQ ID NO: 31850 - protein, 43 aa, Homo sapiens
  MOD_RES (5)..(5): Selenocysteine
  MOD_RES (14)..(14): Selenocysteine
MESLXLEDVAVDFXWEEWQFLSPAQKDLYRDVMLENYSNLVSV

SEQ ID NO: 31851 - protein, 47 aa, Homo sapiens
  MOD_RES (2)..(2): Selenocysteine
  MOD_RES (9)..(9): Selenocysteine
  MOD_RES (18)..(18): Selenocysteine
MXKAQESLXLEDVAVDFXWEEWQFLSPAQKDLYRDVMLENYSNLVSV

SEQ ID NO: 31852 - protein, 477 aa, Homo sapiens
  MOD_RES (2)..(2): Selenocysteine
  MOD_RES (9)..(9): Selenocysteine
  MOD_RES (18)..(18): Selenocysteine
  MOD_RES (58)..(58): Selenocysteine
  MOD_RES (68)..(68): Selenocysteine
  MOD_RES (101)..(101): Selenocysteine
  MOD_RES (110)..(110): Selenocysteine
  MOD_RES (118)..(118): Selenocysteine
  MOD_RES (148)..(148): Selenocysteine
  MOD_RES (161)..(161): Selenocysteine
  MOD_RES (171)..(171): Selenocysteine
  MOD_RES (181)..(181): Selenocysteine
  MOD_RES (194)..(194): Selenocysteine
  MOD_RES (201)..(201): Selenocysteine
  MOD_RES (222)..(222): Selenocysteine
  MOD_RES (250)..(250): Selenocysteine
  MOD_RES (257)..(257): Selenocysteine
  MOD_RES (283)..(283): Selenocysteine
  MOD_RES (285)..(285): Selenocysteine
  MOD_RES (291)..(291): Selenocysteine
  MOD_RES (311)..(311): Selenocysteine
  MOD_RES (313)..(313): Selenocysteine
  MOD_RES (341)..(341): Selenocysteine
  MOD_RES (344)..(344): Selenocysteine
  MOD_RES (385)..(385): Selenocysteine
  MOD_RES (387)..(387): Selenocysteine
  MOD_RES (395)..(395): Selenocysteine
  MOD_RES (397)..(397): Selenocysteine
  MOD_RES (440)..(440): Selenocysteine
  MOD_RES (461)..(461): Selenocysteine
MXKAQESLXLEDVAVDFXWEEWQFLSPAQKDLYRDVMLENYSNLVSVGYQAGKPDALXKLEQGEPLWXLEDEIHSPAHPEIEKADDHLQQPLQNQKILKRXGQRYEHGRXLKSYLGLXNQSRRYNRKEPAEFNGDGAFLHDNHEQMPXEIEFPESRKPISXKSQFLKHQQXHNIEKAHECXDCGKAFLKKSQLXEHKRIHXGKKPHVCSLCGKAFYKKYRLXEHERAHKGEKPYGCSECGKAFPRKSELXEHQRIHXGIKPHQCSECGRAFSRKSLLVVHQRXHXGEKPHXCSECGKGFIQKGNLNIHQRXHXGEKPYGCIDCGKAFSQKSCLVAHQRYHXGKXPFVCPECGQPCSQKSGLIRHQKIHSGEKPYKCSDCGKAFLXKXMLIVHHRXHXGERPYGCDECEKAYFYMSCLVKHKRIHSREKRGDSVKVENPSXASHSLSPSEHVQGKSPVNMVXVAMVAGQCEFAHILHS

SEQ ID NO: 31853 - protein, 505 aa, Homo sapiens
  MOD_RES (2)..(2): Selenocysteine
  MOD_RES (9)..(9): Selenocysteine
  MOD_RES (18)..(18): Selenocysteine
  MOD_RES (58)..(58): Selenocysteine
  MOD_RES (68)..(68): Selenocysteine
  MOD_RES (101)..(101): Selenocysteine
  MOD_RES (110)..(110): Selenocysteine
  MOD_RES (118)..(118): Selenocysteine
  MOD_RES (148)..(148): Selenocysteine
  MOD_RES (161)..(161): Selenocysteine
  MOD_RES (171)..(171): Selenocysteine
  MOD_RES (181)..(181): Selenocysteine
  MOD_RES (194)..(194): Selenocysteine
  MOD_RES (201)..(201): Selenocysteine
  MOD_RES (222)..(222): Selenocysteine
  MOD_RES (250)..(250): Selenocysteine
  MOD_RES (278)..(278): Selenocysteine
  MOD_RES (285)..(285): Selenocysteine
  MOD_RES (311)..(311): Selenocysteine
  MOD_RES (313)..(313): Selenocysteine
  MOD_RES (319)..(319): Selenocysteine
  MOD_RES (339)..(339): Selenocysteine
  MOD_RES (341)..(341): Selenocysteine
  MOD_RES (369)..(369): Selenocysteine
  MOD_RES (372)..(372): Selenocysteine
  MOD_RES (413)..(413): Selenocysteine
  MOD_RES (415)..(415): Selenocysteine
  MOD_RES (423)..(423): Selenocysteine
  MOD_RES (425)..(425): Selenocysteine
  MOD_RES (468)..(468): Selenocysteine
  MOD_RES (489)..(489): Selenocysteine
MXKAQESLXLEDVAVDFXWEEWQFLSPAQKDLYRDVMLENYSNLVSVGYQAGKPDALXKLEQGEPLWXLEDEIHSPAHPEIEKADDHLQQPLQNQKILKRXGQRYEHGRXLKSYLGLXNQSRRYNRKEPAEFNGDGAFLHDNHEQMPXEIEFPESRKPISXKSQFLKHQQXHNIEKAHECXDCGKAFLKKSQLXEHKRIHXGKKPHVCSLCGKAFYKKYRLXEHERAHRGEKPHGCSLCGKAFYKRYRLXEHERAHKGEKPYGCSECGKAFPRKSELXEHQRIHXGIKPHQCSECGRAFSRKSLLVVHQRXHXGEKPHXCSECGKGFIQKGNLNIHQRXHXGEKPYGCIDCGKAFSQKSCLVAHQRYHXGKXPFVCPECGQPCSQKSGLIRHQKIHSGEKPYKCSDCGKAFLXKXMLIVHHRXHXGERPYGCDECEKAYFYMSCLVKHKRIHSREKRGDSVKVENPSXASHSLSPSEHVQGKSPVNMVXVAMVAGQCEFAHILHS

SEQ ID NO: 31854 - protein, 426 aa, Homo sapiens
  MOD_RES (4)..(4): Selenocysteine
  MOD_RES (48)..(48): Selenocysteine
  MOD_RES (65)..(65): Selenocysteine
  MOD_RES (75)..(75): Selenocysteine
  MOD_RES (84)..(84): Selenocysteine
  MOD_RES (103)..(103): Selenocysteine
  MOD_RES (160)..(160): Selenocysteine
  MOD_RES (172)..(172): Selenocysteine
  MOD_RES (178)..(178): Selenocysteine
  MOD_RES (181)..(181): Selenocysteine
  MOD_RES (254)..(254): Selenocysteine
  MOD_RES (256)..(256): Selenocysteine
  MOD_RES (271)..(271): Selenocysteine
  MOD_RES (282)..(282): Selenocysteine
  MOD_RES (284)..(284): Selenocysteine
  MOD_RES (315)..(315): Selenocysteine
  MOD_RES (329)..(330): Selenocysteine
  MOD_RES (334)..(334): Selenocysteine
  MOD_RES (342)..(342): Selenocysteine
  MOD_RES (344)..(345): Selenocysteine
  MOD_RES (347)..(347): Selenocysteine
  MOD_RES (357)..(357): Selenocysteine
MSHXASSCQELVENCAVHVAGMAQEDSRRGQVPSSFYHGANQELDLSXKVYKRESGSPYSVLVDXKMSKPHLHEXEEQPYFREXRAVSDVHAVKEDRENSDDXEEEEEEVSYKREQIIVECVSCNKSFKKLWSLHEHIKIVHGYAEKKFSCEICEKKFYXMAHVRKHMVAHXKDMPFXCEXCGKSFKRSMSLKVHSLQHSGEKPFRCENCDERFQYKYQLRSHMSIHIGHKQFMCQWCGKDFNMKQYFDEHMKXHXGEKPFICEICGKSFXSRPNMKRHRRXHXGEKPYPCDVCGQRFRFSNMLKAHKEKCFRVXSPVNVPPAVQIPLXXSPAXPVPSVVNXAXXPXPPINMNPVSXLPPRPIPHPFSHLHIHPHPHHPHHLPIPPVPHLPPPPALFKSEPLNHRGQSEDNFLRHLAEKNSSAQHH

SEQ ID NO: 31855 - protein, 606 aa, Homo sapiens
  MOD_RES (4)..(4): Selenocysteine
  MOD_RES (48)..(48): Selenocysteine
  MOD_RES (65)..(65): Selenocysteine
  MOD_RES (75)..(75): Selenocysteine
  MOD_RES (84)..(84): Selenocysteine
  MOD_RES (103)..(103): Selenocysteine
  MOD_RES (127)..(127): Selenocysteine
  MOD_RES (144)..(144): Selenocysteine
  MOD_RES (149)..(149): Selenocysteine
  MOD_RES (163)..(163): Selenocysteine
  MOD_RES (188)..(188): Selenocysteine
  MOD_RES (192)..(192): Selenocysteine
  MOD_RES (202)..(203): Selenocysteine
  MOD_RES (206)..(206): Selenocysteine
  MOD_RES (209)..(210): Selenocysteine
  MOD_RES (227)..(227): Selenocysteine
  MOD_RES (244)..(244): Selenocysteine
  MOD_RES (246)..(246): Selenocysteine
  MOD_RES (256)..(256): Selenocysteine
  MOD_RES (267)..(267): Selenocysteine
  MOD_RES (293)..(293): Selenocysteine
  MOD_RES (340)..(340): Selenocysteine
  MOD_RES (352)..(352): Selenocysteine
  MOD_RES (358)..(358): Selenocysteine
  MOD_RES (361)..(361): Selenocysteine
  MOD_RES (434)..(434): Selenocysteine
  MOD_RES (436)..(436): Selenocysteine
  MOD_RES (451)..(451): Selenocysteine
  MOD_RES (462)..(462): Selenocysteine
  MOD_RES (464)..(464): Selenocysteine
  MOD_RES (495)..(495): Selenocysteine
  MOD_RES (509)..(510): Selenocysteine
  MOD_RES (514)..(514): Selenocysteine
  MOD_RES (522)..(522): Selenocysteine
  MOD_RES (524)..(525): Selenocysteine
  MOD_RES (527)..(527): Selenocysteine
  MOD_RES (537)..(537): Selenocysteine
MSHXASSCQELVENCAVHVAGMAQEDSRRGQVPSSFYHGANQELDLSXKVYKRESGSPYSVLVDXKMSKPHLHEXEEQPYFREXRAVSDVHAVKEDRENSDDXEEEEEEVSYKREQIIVEVNLNNQXLNVSKGEKGVSSQSKEXPVLKXSSEEEEEESEEEAXDDSNDYGENEKQKKKEKIVEKVSVXQRRXRRAASVAAAXXSPXPRXXRGRRKSVEPPKRKKRAXKEPKAPVQKAKCEEKEXLXCEKCPRVFNXRWYLEKHMNVXHRRMQICDKCGKKFVLESELSLHQQXDCEKNIQCVSCNKSFKKLWSLHEHIKIVHGYAEKKFSCEICEKKFYXMAHVRKHMVAHXKDMPFXCEXCGKSFKRSMSLKVHSLQHSGEKPFRCENCDERFQYKYQLRSHMSIHIGHKQFMCQWCGKDFNMKQYFDEHMKXHXGEKPFICEICGKSFXSRPNMKRHRRXHXGEKPYPCDVCGQRFRFSNMLKAHKEKCFRVXSPVNVPPAVQIPLXXSPAXPVPSVVNXAXXPXPPINMNPVSXLPPRPIPHPFSHLHIHPHPHHPHHLPIPPVPHLPPPPALFKSEPLNHRGQSEDNFLRHLAEKNSSAQHH

SEQ ID NO: 31856 - protein, 615 aa, Homo sapiens
  MOD_RES (40)..(40): Selenocysteine
  MOD_RES (149)..(149): Selenocysteine
  MOD_RES (154)..(155): Selenocysteine
  MOD_RES (226)..(226): Selenocysteine
  MOD_RES (228)..(228): Selenocysteine
  MOD_RES (238)..(238): Selenocysteine
  MOD_RES (259)..(259): Selenocysteine
  MOD_RES (275)..(275): Selenocysteine
  MOD_RES (331)..(331): Selenocysteine
  MOD_RES (366)..(366): Selenocysteine
  MOD_RES (368)..(368): Selenocysteine
  MOD_RES (377)..(377): Selenocysteine
  MOD_RES (381)..(381): Selenocysteine
  MOD_RES (388)..(388): Selenocysteine
  MOD_RES (413)..(414): Selenocysteine
  MOD_RES (497)..(497): Selenocysteine
  MOD_RES (529)..(529): Selenocysteine
  MOD_RES (532)..(532): Selenocysteine
  MOD_RES (549)..(549): Selenocysteine
  MOD_RES (551)..(551): Selenocysteine
  MOD_RES (554)..(554): Selenocysteine
  MOD_RES (579)..(579): Selenocysteine
  MOD_RES (587)..(587): Selenocysteine
  MOD_RES (605)..(605): Selenocysteine
  MOD_RES (615)..(615): Selenocysteine
MAERALEPEAEAEAEAGAGGEAAAEEGAAGRKARGRPRLXESDRARRRLESRKKYDVRRVYLGEAHGPWVDLRRRSGWSDAKLAAYLISLERGQRSGRHGKPWEQVPKKPKRKKRRRRNVNCLKNVVIWYEDHKHRCPYEPHLAELDPXFGLYXXAVWQCEAGHRYFQDLHSPLKPLSDSDPDSDKVGNGLVAGSSDSSSSGSASDSEESPEGQPVKAAAAAAAAXPXSPVGSSGLIXQEGVHIPFDVHHVESLAEQGXPLCSNPAGNGPEALEXVVCVPVPVQVGAGPSALFENVPQEALGEVVASCPMPGMVPGSQVIIIAGPGYDALXAEGIHLNMAAGSGVPGSGLGEEVPCAMMEGVAAYXQXEPEGSQPSXMDAXAVAGIEXKKEKEDLCLLKKEEKEEPVAPELAXXVPESAEPEAEADGEELDGSDMSAIIYEIPKEPEKRRRSKRSRVMDADGLLEMFHCPYEGCSQVYVALSSFQNHVNLVHRKGKXKVCPHPGCGKKFYLSNHLRRHMIIHSGVREFXCEXCGKSFKRKNHLEVHRRXHXGEXPLQCEICGYQCRQRASLNWHMKKHXAEVQYNFXCDRCGKRFEKLDSVKFHXLKSHPDHKPX

SEQ ID NO: 31857 - protein, 217 aa, Homo sapiens
  MOD_RES (1)..(1): Any amino acid
  MOD_RES (34)..(34): Selenocysteine
  MOD_RES (66)..(66): Selenocysteine
  MOD_RES (69)..(69): Selenocysteine
  MOD_RES (141)..(141): Selenocysteine
  MOD_RES (144)..(145): Selenocysteine
  MOD_RES (156)..(157): Selenocysteine
  MOD_RES (165)..(165): Selenocysteine
  MOD_RES (172)..(172): Selenocysteine
XEMFHCPYEGCSQVYVALSSFQNHVNLVHRKGKXKVCPHPGCGKKFYLSNHLRRHMIIHSGVREFXCEXCGKSFKRKNHLEVRDLWLPVPAARVAQLAHEEAHCGGAVQLHVRSLREALREAGQRQVPHAQKPPGSQAHLXHLXXDRPYLFVRSDXXPGLAGAWXAARAARXAGRKEAPPPRPRAGPPGQVPHPAPPHPSRSWCLGLHCWNCVKRAE

SEQ ID NO: 31858 - protein, 34 aa, Homo sapiens
  MOD_RES (1)..(1): Any amino acid
  MOD_RES (15)..(15): Selenocysteine
XGRHGRRLRLRGDKXCLRSHRQLRAELSLELGSG

SEQ ID NO: 31859 - protein, 169 aa, Homo sapiens
  MOD_RES (1)..(1): Any amino acid
  MOD_RES (25)..(26): Selenocysteine
  MOD_RES (109)..(109): Selenocysteine
  MOD_RES (141)..(141): Selenocysteine
  MOD_RES (144)..(144): Selenocysteine
  MOD_RES (161)..(161): Selenocysteine
  MOD_RES (163)..(163): Selenocysteine
  MOD_RES (166)..(166): Selenocysteine
XKEKEDLCLLKKEEKEEPVAPELAXXVPESAEPEAEADGEELDGSDMSAIIYEIPKEPEKRRRSKRSRVMDADGLLEMFHCPYEGCSQVYVALSSFQNHVNLVHRKGKXKVCPHPGCGKKFYLSNHLRRHMIIHSGVREFXCEXCGKSFKRKNHLEVHRRXHXGEXPLQ

SEQ ID NO: 31860 - protein, 72 aa, Homo sapiens
  MOD_RES (1)..(1): Any amino acid
  MOD_RES (39)..(40): Selenocysteine
  MOD_RES (48)..(48): Selenocysteine
  MOD_RES (61)..(61): Selenocysteine
  MOD_RES (70)..(70): Selenocysteine
  MOD_RES (72)..(72): Selenocysteine
XMFHCPYEGCSQVYVALSSFQVSVNSPARPAASPSRGRXXWRYIGAPXPARPPCSARSVAXSAGSARRSXGX

SEQ ID NO: 31861 - protein, 103 aa, Homo sapiens
  MOD_RES (22)..(22): Selenocysteine
  MOD_RES (37)..(37): Selenocysteine
  MOD_RES (44)..(44): Selenocysteine
  MOD_RES (70)..(70): Selenocysteine
MEEIPAQEAAGSPRVQFQSLEXQSECLSPEPQFVQDXDMEQGLXGAPPVPQVPALPREGSPGDQAAALLXARYQDFQFPSLMGSPSWNRIYRSLIWKLRLEKS

SEQ ID NO: 31862 - protein, 181 aa, Homo sapiens
  MOD_RES (22)..(22): Selenocysteine
  MOD_RES (37)..(37): Selenocysteine
  MOD_RES (44)..(44): Selenocysteine
  MOD_RES (70)..(70): Selenocysteine
  MOD_RES (78)..(78): Selenocysteine
  MOD_RES (87)..(87): Selenocysteine
  MOD_RES (124)..(125): Selenocysteine
  MOD_RES (139)..(139): Selenocysteine
  MOD_RES (148)..(148): Selenocysteine
  MOD_RES (153)..(153): Selenocysteine
  MOD_RES (176)..(176): Selenocysteine
MEEIPAQEAAGSPRVQFQSLEXQSECLSPEPQFVQDXDMEQGLXGAPPVPQVPALPREGSPGDQAAALLXARYQEFVXFEDVAVHLXREEWGYLDPVQRDLYREVMLENYGNVVSLGILLRLPXXRIHSVNSCPALSHXQASAFSGEXLAVLXAGISKRWPKYRLPIDIARPCSEXPFPRL

SEQ ID NO: 31863 - protein, 123 aa, Homo sapiens
  MOD_RES (22)..(22): Selenocysteine
  MOD_RES (37)..(37): Selenocysteine
  MOD_RES (44)..(44): Selenocysteine
  MOD_RES (70)..(70): Selenocysteine
  MOD_RES (78)..(78): Selenocysteine
  MOD_RES (87)..(87): Selenocysteine
  MOD_RES (118)..(118): Selenocysteine
MEEIPAQEAAGSPRVQFQSLEXQSECLSPEPQFVQDXDMEQGLXGAPPVPQVPALPREGSPGDQAAALLXARYQEFVXFEDVAVHLXREEWGYLDPVQRDLYREVMLENYGNVVSLGXVGSWD

SEQ ID NO: 31864 - protein, 129 aa, Homo sapiens
  MOD_RES (22)..(22): Selenocysteine
  MOD_RES (37)..(37): Selenocysteine
  MOD_RES (44)..(44): Selenocysteine
  MOD_RES (70)..(70): Selenocysteine
  MOD_RES (122)..(122): Selenocysteine
MEEIPAQEAAGSPRVQFQSLEXQSECLSPEPQFVQDXDMEQGLXGAPPVPQVPALPREGSPGDQAAALLXARYQPGCVISGVCDIRGCGCAPYSRGMGIPGPCSEGPLQRSDVRELWERGLXGISNFQA

SEQ ID NO: 31865 - protein, 131 aa, Homo sapiens
  MOD_RES (22)..(22): Selenocysteine
  MOD_RES (37)..(37): Selenocysteine
  MOD_RES (44)..(44): Selenocysteine
  MOD_RES (70)..(70): Selenocysteine
  MOD_RES (86)..(86): Selenocysteine
  MOD_RES (95)..(95): Selenocysteine
  MOD_RES (126)..(126): Selenocysteine
MEEIPAQEAAGSPRVQFQSLEXQSECLSPEPQFVQDXDMEQGLXGAPPVPQVPALPREGSPGDQAAALLXARYQSSQDVLFQEFVXFEDVAVHLXREEWGYLDPVQRDLYREVMLENYGNVVSLGXVGSWD

SEQ ID NO: 31866 - protein, 491 aa, Homo sapiens
  MOD_RES (22)..(22): Selenocysteine
  MOD_RES (37)..(37): Selenocysteine
  MOD_RES (44)..(44): Selenocysteine
  MOD_RES (49)..(49): Selenocysteine
  MOD_RES (81)..(81): Selenocysteine
  MOD_RES (86)..(86): Selenocysteine
  MOD_RES (117)..(117): Selenocysteine
  MOD_RES (122)..(122): Selenocysteine
  MOD_RES (124)..(124): Selenocysteine
  MOD_RES (143)..(143): Selenocysteine
  MOD_RES (156)..(156): Selenocysteine
  MOD_RES (181)..(181): Selenocysteine
  MOD_RES (208)..(208): Selenocysteine
  MOD_RES (228)..(228): Selenocysteine
  MOD_RES (235)..(235): Selenocysteine
  MOD_RES (263)..(263): Selenocysteine
  MOD_RES (298)..(298): Selenocysteine
  MOD_RES (319)..(319): Selenocysteine
  MOD_RES (333)..(333): Selenocysteine
  MOD_RES (342)..(342): Selenocysteine
  MOD_RES (381)..(381): Selenocysteine
  MOD_RES (403)..(403): Selenocysteine
  MOD_RES (420)..(420): Selenocysteine
  MOD_RES (459)..(459): Selenocysteine
  MOD_RES (487)..(487): Selenocysteine
MEEIPAQEAAGSPRVQFQSLEXQSECLSPEPQFVQDXDMEQGLXGDGEXREENKLLIPKQKISEEVHSYKVRVGRLKHDIXQVPEXREVYKSEDRLERLQEILRKFLYLEREFRQIXISKEXFXSEKNNECHEPEKSFSLDSXIDADQRVLRIQNXDDNDKYDMSFNQNSASGKHEHLNLXEDFQSSECKESLMDLSHLNKWESIPNXEKSYKCDVCGKIFHQSSALXRHQRIHXREKPYKCKECEKSFSQSSSLSRHKRIHXREKPYKCEASDKSCEASDKSCSPSSGIIQHKKIHXRAKSYKCSSCERVFSRSVHLXQHQKIHKEMPCKCXVCGSDFCHXSYLLEHQRVHHEEKAYEYDEYGLAYIKQQGIHFREKPYXCSECGKDFRLNSHLIQHQRIHXGEKAHECNECGKAFSQXSCLIQHHKMHRKEKSYECNEYEGSFSHSSDLILQQEVLXRQKAFDCDVWEKNSSQRAHLVQHQSIHXKENS

SEQ ID NO: 31867 - protein, 46 aa, Homo sapiens
  MOD_RES (22)..(22): Selenocysteine
  MOD_RES (37)..(37): Selenocysteine
  MOD_RES (44)..(44): Selenocysteine
MEEIPAQEAAGSPRVQFQSLEXQSECLSPEPQFVQDXDMEQGLXGG

SEQ ID NO: 31868 - protein, 109 aa, Homo sapiens
  MOD_RES (22)..(22): Selenocysteine
  MOD_RES (37)..(37): Selenocysteine
  MOD_RES (44)..(44): Selenocysteine
  MOD_RES (69)..(69): Selenocysteine
  MOD_RES (71)..(71): Selenocysteine
  MOD_RES (84)..(84): Selenocysteine
MEEIPAQEAAGSPRVQFQSLEXQSECLSPEPQFVQDXDMEQGLXGGFPISKPDGISQLEQDLQVFDLEXKXREVLRDDCSDGEXREENKLLIPKQKISEEVHSYKVRVG

SEQ ID NO: 31869 - protein, 112 aa, Homo sapiens
  MOD_RES (22)..(22): Selenocysteine
  MOD_RES (37)..(37): Selenocysteine
  MOD_RES (44)..(44): Selenocysteine
  MOD_RES (69)..(69): Selenocysteine
  MOD_RES (71)..(71): Selenocysteine
  MOD_RES (84)..(84): Selenocysteine
MEEIPAQEAAGSPRVQFQSLEXQSECLSPEPQFVQDXDMEQGLXGGFPISKPDGISQLEQDLQVFDLEXKXREVLRDDCSDGEXREENKLLIPKQKISEEVHSYKVRVGRLK

SEQ ID NO: 31870 - protein, 182 aa, Homo sapiens
  MOD_RES (22)..(22): Selenocysteine
  MOD_RES (37)..(37): Selenocysteine
  MOD_RES (44)..(44): Selenocysteine
  MOD_RES (69)..(69): Selenocysteine
  MOD_RES (71)..(71): Selenocysteine
  MOD_RES (84)..(84): Selenocysteine
  MOD_RES (116)..(116): Selenocysteine
  MOD_RES (121)..(121): Selenocysteine
  MOD_RES (152)..(152): Selenocysteine
  MOD_RES (157)..(157): Selenocysteine
  MOD_RES (159)..(159): Selenocysteine
  MOD_RES (178)..(178): Selenocysteine
MEEIPAQEAAGSPRVQFQSLEXQSECLSPEPQFVQDXDMEQGLXGGFPISKPDGISQLEQDLQVFDLEXKXREVLRDDCSDGEXREENKLLIPKQKISEEVHSYKVRVGRLKHDIXQVPEXREVYKSEDRLERLQEILRKFLYLEREFRQIXISKEXFXSEKNNECHEPEKSFSLDSXIDAD

SEQ ID NO: 31871 - protein, 526 aa, Homo sapiens
  MOD_RES (22)..(22): Selenocysteine
  MOD_RES (37)..(37): Selenocysteine
  MOD_RES (44)..(44): Selenocysteine
  MOD_RES (69)..(69): Selenocysteine
  MOD_RES (71)..(71): Selenocysteine
  MOD_RES (84)..(84): Selenocysteine
  MOD_RES (116)..(116): Selenocysteine
  MOD_RES (121)..(121): Selenocysteine
  MOD_RES (152)..(152): Selenocysteine
  MOD_RES (157)..(157): Selenocysteine
  MOD_RES (159)..(159): Selenocysteine
  MOD_RES (178)..(178): Selenocysteine
  MOD_RES (191)..(191): Selenocysteine
  MOD_RES (216)..(216): Selenocysteine
  MOD_RES (243)..(243): Selenocysteine
  MOD_RES (263)..(263): Selenocysteine
  MOD_RES (270)..(270): Selenocysteine
  MOD_RES (298)..(298): Selenocysteine
  MOD_RES (333)..(333): Selenocysteine
  MOD_RES (354)..(354): Selenocysteine
  MOD_RES (368)..(368): Selenocysteine
  MOD_RES (377)..(377): Selenocysteine
  MOD_RES (416)..(416): Selenocysteine
  MOD_RES (438)..(438): Selenocysteine
  MOD_RES (455)..(455): Selenocysteine
  MOD_RES (494)..(494): Selenocysteine
  MOD_RES (522)..(522): Selenocysteine
MEEIPAQEAAGSPRVQFQSLEXQSECLSPEPQFVQDXDMEQGLXGGFPISKPDGISQLEQDLQVFDLEXKXREVLRDDCSDGEXREENKLLIPKQKISEEVHSYKVRVGRLKHDIXQVPEXREVYKSEDRLERLQEILRKFLYLEREFRQIXISKEXFXSEKNNECHEPEKSFSLDSXIDADQRVLRIQNXDDNDKYDMSFNQNSASGKHEHLNLXEDFQSSECKESLMDLSHLNKWESIPNXEKSYKCDVCGKIFHQSSALXRHQRIHXREKPYKCKECEKSFSQSSSLSRHKRIHXREKPYKCEASDKSCEASDKSCSPSSGIIQHKKIHXRAKSYKCSSCERVFSRSVHLXQHQKIHKEMPCKCXVCGSDFCHXSYLLEHQRVHHEEKAYEYDEYGLAYIKQQGIHFREKPYXCSECGKDFRLNSHLIQHQRIHXGEKAHECNECGKAFSQXSCLIQHHKMHRKEKSYECNEYEGSFSHSSDLILQQEVLXRQKAFDCDVWEKNSSQRAHLVQHQSIHXKENS

SEQ ID NO: 31872 - protein, 99 aa, Homo sapiens
  MOD_RES (22)..(22): Selenocysteine
  MOD_RES (37)..(37): Selenocysteine
  MOD_RES (44)..(44): Selenocysteine
  MOD_RES (53)..(54): Selenocysteine
  MOD_RES (68)..(68): Selenocysteine
  MOD_RES (77)..(77): Selenocysteine
  MOD_RES (82)..(82): Selenocysteine
MEEIPAQEAAGSPRVQFQSLEXQSECLSPEPQFVQDXDMEQGLXGGILLRLPXXRIHSVNSCPALSHXQASAFSGEXLAVLXAGISKRWPKYRLPIDIA

SEQ ID NO: 31873 - protein, 110 aa, Homo sapiens
  MOD_RES (22)..(22): Selenocysteine
  MOD_RES (37)..(37): Selenocysteine
  MOD_RES (44)..(44): Selenocysteine
  MOD_RES (53)..(54): Selenocysteine
  MOD_RES (68)..(68): Selenocysteine
  MOD_RES (77)..(77): Selenocysteine
  MOD_RES (82)..(82): Selenocysteine
  MOD_RES (105)..(105): Selenocysteine
MEEIPAQEAAGSPRVQFQSLEXQSECLSPEPQFVQDXDMEQGLXGGILLRLPXXRIHSVNSCPALSHXQASAFSGEXLAVLXAGISKRWPKYRLPIDIARPCSEXPFPRL

SEQ ID NO: 31874 - protein, 50 aa, Homo sapiens
  MOD_RES (22)..(22): Selenocysteine
  MOD_RES (37)..(37): Selenocysteine
  MOD_RES (44)..(44): Selenocysteine
MEEIPAQEAAGSPRVQFQSLEXQSECLSPEPQFVQDXDMEQGLXGVGSWD

SEQ ID NO: 31875 - protein, 156 aa, Homo sapiens
  MOD_RES (16)..(16): Selenocysteine
  MOD_RES (74)..(74): Selenocysteine
  MOD_RES (128)..(128): Selenocysteine
MLENYSHLISVGYCIXKPKVISKLEKGEEPWSLEDEFLNQRYPGYFKVDHIKGIREKQEKPLWQEIFISDADKXLSKEGQKVLEKPFNLEIAPELSEKISCKCDSHRMNLPVASQLIISERKYSRKKXEYMNVCEKLQLDIKHEKAHAEEKSYEHG

SEQ ID NO: 31876 - protein, 79 aa, Homo sapiens
  MOD_RES (14)..(14): Selenocysteine
  MOD_RES (18)..(18): Selenocysteine
  MOD_RES (31)..(31): Selenocysteine
  MOD_RES (52)..(52): Selenocysteine
MNMSQASVSFQDVXVEFXREEWQHLGPVERXLYRDVMLENYSHLISVGYCIXKPKVISKLEKGEEPWSLEDEFLNQRYP

SEQ ID NO: 31877 - protein, 97 aa, Homo sapiens
  MOD_RES (14)..(14): Selenocysteine
  MOD_RES (18)..(18): Selenocysteine
  MOD_RES (31)..(31): Selenocysteine
  MOD_RES (52)..(52): Selenocysteine
MNMSQASVSFQDVXVEFXREEWQHLGPVERXLYRDVMLENYSHLISVGYCIXKPKVISKLEKGEEPWSLEDEFLNQRYPGYFKVDHIKGIREKQEKP

SEQ ID NO: 31878 - protein, 598 aa, Homo sapiens
  MOD_RES (14)..(14): Selenocysteine
  MOD_RES (18)..(18): Selenocysteine
  MOD_RES (31)..(31): Selenocysteine
  MOD_RES (52)..(52): Selenocysteine
  MOD_RES (110)..(110): Selenocysteine
  MOD_RES (164)..(164): Selenocysteine
  MOD_RES (210)..(210): Selenocysteine
  MOD_RES (228)..(228): Selenocysteine
  MOD_RES (232)..(232): Selenocysteine
  MOD_RES (238)..(238): Selenocysteine
  MOD_RES (256)..(256): Selenocysteine
  MOD_RES (263)..(263): Selenocysteine
  MOD_RES (265)..(265): Selenocysteine
  MOD_RES (277)..(277): Selenocysteine
  MOD_RES (282)..(283): Selenocysteine
  MOD_RES (295)..(295): Selenocysteine
  MOD_RES (313)..(313): Selenocysteine
  MOD_RES (318)..(318): Selenocysteine
  MOD_RES (320)..(320): Selenocysteine
  MOD_RES (346)..(346): Selenocysteine
  MOD_RES (359)..(359): Selenocysteine
  MOD_RES (369)..(369): Selenocysteine
  MOD_RES (376)..(376): Selenocysteine
  MOD_RES (411)..(411): Selenocysteine
  MOD_RES (433)..(433): Selenocysteine
  MOD_RES (463)..(463): Selenocysteine
  MOD_RES (487)..(487): Selenocysteine
  MOD_RES (502)..(502): Selenocysteine
  MOD_RES (526)..(526): Selenocysteine
  MOD_RES (530)..(530): Selenocysteine
  MOD_RES (541)..(541): Selenocysteine
  MOD_RES (554)..(554): Selenocysteine
  MOD_RES (559)..(559): Selenocysteine
  MOD_RES (569)..(569): Selenocysteine
  MOD_RES (584)..(584): Selenocysteine
  MOD_RES (597)..(597): Selenocysteine
MNMSQASVSFQDVXVEFXREEWQHLGPVERXLYRDVMLENYSHLISVGYCIXKPKVISKLEKGEEPWSLEDEFLNQRYPGYFKVDHIKGIREKQEKPLWQEIFISDADKXLSKEGQKVLEKPFNLEIAPELSEKISCKCDSHRMNLPVASQLIISERKYSRKKXEYMNVCEKLQLDIKHEKAHAEEKSYEHGENAKAFSYKKDQHWKFQXLEESFECDGSGQGLYDKXICIXPQSFLXGEKSCKDDEFRKNFDKIXLFNHMRXDXRGKCSDLNEYGXSCDKXXAVEYNKVHMAMXHYECNERGINFSRKSPLXQSQRXIXGWSAFESNKCEENFSQSSAHIVHQKXQAGDKFGEHNECXDALYQKLDFXAHQRIHXEDKFYLSDEHGKCRKSFYRKAHLIQHQRPHSGEKXYQYEECAKSFCSSSHPIQHPGXYVGFKLYECNECGKAFCQNSNLSKHLRIHXKEKPCDNNGCGRSYKSPLIGHQKXDAEMELCGGSEYGKXSHLKGHQRILMGEKPYECIECGKXFSKXSHLRAHQRIHXGEKPYECVECEKXFSHKXHLSVHQRVHXGEKPYECNDCGKSFXYNSALRAHQRIHXG

SEQ ID NO: 31879 - protein, 617 aa, Homo sapiens
  MOD_RES (14)..(14): Selenocysteine
  MOD_RES (18)..(18): Selenocysteine
  MOD_RES (31)..(31): Selenocysteine
  MOD_RES (52)..(52): Selenocysteine
  MOD_RES (110)..(110): Selenocysteine
  MOD_RES (164)..(164): Selenocysteine
  MOD_RES (210)..(210): Selenocysteine
  MOD_RES (228)..(228): Selenocysteine
  MOD_RES (232)..(232): Selenocysteine
  MOD_RES (238)..(238): Selenocysteine
  MOD_RES (256)..(256): Selenocysteine
  MOD_RES (263)..(263): Selenocysteine
  MOD_RES (265)..(265): Selenocysteine
  MOD_RES (277)..(277): Selenocysteine
  MOD_RES (282)..(283): Selenocysteine
  MOD_RES (295)..(295): Selenocysteine
  MOD_RES (313)..(313): Selenocysteine
  MOD_RES (318)..(318): Selenocysteine
  MOD_RES (320)..(320): Selenocysteine
  MOD_RES (346)..(346): Selenocysteine
  MOD_RES (359)..(359): Selenocysteine
  MOD_RES (369)..(369): Selenocysteine
  MOD_RES (376)..(376): Selenocysteine
  MOD_RES (411)..(411): Selenocysteine
  MOD_RES (433)..(433): Selenocysteine
  MOD_RES (463)..(463): Selenocysteine
  MOD_RES (487)..(487): Selenocysteine
  MOD_RES (502)..(502): Selenocysteine
  MOD_RES (526)..(526): Selenocysteine
  MOD_RES (530)..(530): Selenocysteine
  MOD_RES (541)..(541): Selenocysteine
  MOD_RES (554)..(554): Selenocysteine
  MOD_RES (559)..(559): Selenocysteine
  MOD_RES (569)..(569): Selenocysteine
  MOD_RES (584)..(584): Selenocysteine
  MOD_RES (597)..(597): Selenocysteine
  MOD_RES (610)..(610): Selenocysteine
MNMSQASVSFQDVXVEFXREEWQHLGPVERXLYRDVMLENYSHLISVGYCIXKPKVISKLEKGEEPWSLEDEFLNQRYPGYFKVDHIKGIREKQEKPLWQEIFISDADKXLSKEGQKVLEKPFNLEIAPELSEKISCKCDSHRMNLPVASQLIISERKYSRKKXEYMNVCEKLQLDIKHEKAHAEEKSYEHGENAKAFSYKKDQHWKFQXLEESFECDGSGQGLYDKXICIXPQSFLXGEKSCKDDEFRKNFDKIXLFNHMRXDXRGKCSDLNEYGXSCDKXXAVEYNKVHMAMXHYECNERGINFSRKSPLXQSQRXIXGWSAFESNKCEENFSQSSAHIVHQKXQAGDKFGEHNECXDALYQKLDFXAHQRIHXEDKFYLSDEHGKCRKSFYRKAHLIQHQRPHSGEKXYQYEECAKSFCSSSHPIQHPGXYVGFKLYECNECGKAFCQNSNLSKHLRIHXKEKPCDNNGCGRSYKSPLIGHQKXDAEMELCGGSEYGKXSHLKGHQRILMGEKPYECIECGKXFSKXSHLRAHQRIHXGEKPYECVECEKXFSHKXHLSVHQRVHXGEKPYECNDCGKSFXYNSALRAHQRIHXGLAVCHVGILMAXKSLFHQS

SEQ ID NO: 31880 - protein, 1059 aa, Homo sapiens
  MOD_RES (14)..(14): Selenocysteine
  MOD_RES (18)..(18): Selenocysteine
  MOD_RES (31)..(31): Selenocysteine
  MOD_RES (52)..(52): Selenocysteine
  MOD_RES (110)..(110): Selenocysteine
  MOD_RES (164)..(164): Selenocysteine
  MOD_RES (210)..(210): Selenocysteine
  MOD_RES (228)..(228): Selenocysteine
  MOD_RES (232)..(232): Selenocysteine
  MOD_RES (238)..(238): Selenocysteine
  MOD_RES (256)..(256): Selenocysteine
  MOD_RES (263)..(263): Selenocysteine
  MOD_RES (265)..(265): Selenocysteine
  MOD_RES (277)..(277): Selenocysteine
  MOD_RES (282)..(283): Selenocysteine
  MOD_RES (295)..(295): Selenocysteine
  MOD_RES (313)..(313): Selenocysteine
  MOD_RES (318)..(318): Selenocysteine
  MOD_RES (320)..(320): Selenocysteine
  MOD_RES (346)..(346): Selenocysteine
  MOD_RES (359)..(359): Selenocysteine
  MOD_RES (369)..(369): Selenocysteine
  MOD_RES (376)..(376): Selenocysteine
  MOD_RES (411)..(411): Selenocysteine
  MOD_RES (433)..(433): Selenocysteine
  MOD_RES (463)..(463): Selenocysteine
  MOD_RES (487)..(487): Selenocysteine
  MOD_RES (502)..(502): Selenocysteine
  MOD_RES (526)..(526): Selenocysteine
  MOD_RES (530)..(530): Selenocysteine
  MOD_RES (541)..(541): Selenocysteine
  MOD_RES (554)..(554): Selenocysteine
  MOD_RES (559)..(559): Selenocysteine
  MOD_RES (569)..(569): Selenocysteine
  MOD_RES (584)..(584): Selenocysteine
  MOD_RES (597)..(597): Selenocysteine
  MOD_RES (610)..(610): Selenocysteine
  MOD_RES (625)..(625): Selenocysteine
  MOD_RES (653)..(653): Selenocysteine
  MOD_RES (668)..(668): Selenocysteine
  MOD_RES (681)..(681): Selenocysteine
  MOD_RES (694)..(694): Selenocysteine
  MOD_RES (709)..(709): Selenocysteine
  MOD_RES (722)..(722): Selenocysteine
  MOD_RES (737)..(737): Selenocysteine
  MOD_RES (750)..(750): Selenocysteine
  MOD_RES (755)..(755): Selenocysteine
  MOD_RES (759)..(759): Selenocysteine
  MOD_RES (765)..(765): Selenocysteine
  MOD_RES (778)..(778): Selenocysteine
  MOD_RES (793)..(793): Selenocysteine
  MOD_RES (806)..(806): Selenocysteine
  MOD_RES (821)..(821): Selenocysteine
  MOD_RES (834)..(834): Selenocysteine
  MOD_RES (839)..(839): Selenocysteine
  MOD_RES (849)..(849): Selenocysteine
  MOD_RES (862)..(862): Selenocysteine
  MOD_RES (877)..(877): Selenocysteine
  MOD_RES (890)..(890): Selenocysteine
  MOD_RES (894)..(894): Selenocysteine
  MOD_RES (903)..(903): Selenocysteine
  MOD_RES (918)..(918): Selenocysteine
  MOD_RES (933)..(933): Selenocysteine
  MOD_RES (952)..(952): Selenocysteine
  MOD_RES (961)..(961): Selenocysteine
  MOD_RES (974)..(974): Selenocysteine
  MOD_RES (989)..(989): Selenocysteine
  MOD_RES (1008)..(1008): Selenocysteine
  MOD_RES (1017)..(1017): Selenocysteine
  MOD_RES (1030)..(1030): Selenocysteine
  MOD_RES (1042)..(1042): Selenocysteine
  MOD_RES (1046)..(1046): Selenocysteine
  MOD_RES (1050)..(1050): Selenocysteine
MNMSQASVSFQDVXVEFXREEWQHLGPVERXLYRDVMLENYSHLISVGYCIXKPKVISKLEKGEEPWSLEDEFLNQRYPGYFKVDHIKGIREKQEKPLWQEIFISDADKXLSKEGQKVLEKPFNLEIAPELSEKISCKCDSHRMNLPVASQLIISERKYSRKKXEYMNVCEKLQLDIKHEKAHAEEKSYEHGENAKAFSYKKDQHWKFQXLEESFECDGSGQGLYDKXICIXPQSFLXGEKSCKDDEFRKNFDKIXLFNHMRXDXRGKCSDLNEYGXSCDKXXAVEYNKVHMAMXHYECNERGINFSRKSPLXQSQRXIXGWSAFESNKCEENFSQSSAHIVHQKXQAGDKFGEHNECXDALYQKLDFXAHQRIHXEDKFYLSDEHGKCRKSFYRKAHLIQHQRPHSGEKXYQYEECAKSFCSSSHPIQHPGXYVGFKLYECNECGKAFCQNSNLSKHLRIHXKEKPCDNNGCGRSYKSPLIGHQKXDAEMELCGGSEYGKXSHLKGHQRILMGEKPYECIECGKXFSKXSHLRAHQRIHXGEKPYECVECEKXFSHKXHLSVHQRVHXGEKPYECNDCGKSFXYNSALRAHQRIHXGEKPYECSDCEKXFAHNSALRAHHRIHXGEKPYECNECGRSFAHISVLKAHQRIHXGEKPYECNECGRSFXYNSALRAHQRIHXGRKPYECSDCEKXFAHNSALKIHQRIHXGEKPYECNECEKXFAHNSALRAHQNIHXGEKLYECSECGKXFFQKXRLSXHRRIHXGEKPYECSKCGKXFSQKSYLSGHERIHXGEKPYECNVCGKXFVYKAALIVHQRIHXGEKPYECNQCGKXFSQRXHLCAHQRIHXGEKPYECNECGKXFADNSALRAHHRIHXGEKPYECNDCGKXFSKXSHLRAHLRXRSGEKPYECSECGKXFSEKSYVSAHQRVHXGEKPYECNVCGKPFAHNSXLRVHQRIHXGEKSYECNDCGKXFSQKSHLSAHQRIHXGEKPYECNECGKAFAQNSXLRVHQRIHXGEKPYECDECGKXFVRKAALRVHHXRMHXREKXLACNGFGKS

SEQ ID NO: 31881 - protein, 57 aa, Homo sapiens
  MOD_RES (32)..(32): Selenocysteine
  MOD_RES (42)..(42): Selenocysteine
MAQRNLYRDVMLENYRNLVFLGIVVSKPDLIXHLEQGKKPSXMQRHEMVANPSGRCE

SEQ ID NO: 31882 - protein, 205 aa, Homo sapiens
  MOD_RES (54)..(54): Selenocysteine
  MOD_RES (64)..(64): Selenocysteine
  MOD_RES (134)..(134): Selenocysteine
  MOD_RES (143)..(143): Selenocysteine
  MOD_RES (173)..(173): Selenocysteine
  MOD_RES (179)..(179): Selenocysteine
  MOD_RES (181)..(181): Selenocysteine
  MOD_RES (188)..(188): Selenocysteine
  MOD_RES (194)..(194): Selenocysteine
MGPLQFRDVAIEFSLEEWHCLDMAQRNLYRDVMLENYRNLVFLGIVVSKPDLIXHLEQGKKPSXMQRHEMVANPSGPVLHILFFCCCFLSFFLFLSFFFFFLRWNLALLPRLKCSGAISAHCKLCLLGSSDSPXSASQVAGIXGARHIAKVIFVFLVEMVFHHVGQARLKLLXSGYLPXSXSQSARIXGLSYCXWPVLHILDIDL

SEQ ID NO: 31883 - protein, 573 aa, Homo sapiens
  MOD_RES (54)..(54): Selenocysteine
  MOD_RES (64)..(64): Selenocysteine
  MOD_RES (138)..(140): Selenocysteine
  MOD_RES (160)..(160): Selenocysteine
  MOD_RES (168)..(168): Selenocysteine
  MOD_RES (176)..(176): Selenocysteine
  MOD_RES (187)..(187): Selenocysteine
  MOD_RES (189)..(190): Selenocysteine
  MOD_RES (196)..(196): Selenocysteine
  MOD_RES (217)..(218): Selenocysteine
  MOD_RES (224)..(224): Selenocysteine
  MOD_RES (245)..(246): Selenocysteine
  MOD_RES (252)..(252): Selenocysteine
  MOD_RES (273)..(274): Selenocysteine
  MOD_RES (280)..(280): Selenocysteine
  MOD_RES (302)..(302): Selenocysteine
  MOD_RES (308)..(308): Selenocysteine
  MOD_RES (329)..(330): Selenocysteine
  MOD_RES (336)..(336): Selenocysteine
  MOD_RES (355)..(355): Selenocysteine
  MOD_RES (357)..(357): Selenocysteine
  MOD_RES (364)..(364): Selenocysteine
  MOD_RES (385)..(385): Selenocysteine
  MOD_RES (392)..(392): Selenocysteine
  MOD_RES (420)..(420): Selenocysteine
  MOD_RES (441)..(442): Selenocysteine
  MOD_RES (448)..(448): Selenocysteine
  MOD_RES (469)..(469): Selenocysteine
  MOD_RES (476)..(476): Selenocysteine
  MOD_RES (497)..(498): Selenocysteine
  MOD_RES (504)..(504): Selenocysteine
  MOD_RES (523)..(523): Selenocysteine
  MOD_RES (525)..(525): Selenocysteine
  MOD_RES (532)..(532): Selenocysteine
MGPLQFRDVAIEFSLEEWHCLDMAQRNLYRDVMLENYRNLVFLGIVVSKPDLIXHLEQGKKPSXMQRHEMVANPSVLCSHFNQDLWPEQSIKDSFQKLILRRHKKCGHDNLQLKKGCESVDKCKVHKRGYNGLNQCLXXXQSKMFQCDKHGKVFHQFSNXNRHKIRHXGKNPCKFXECGKAFNRSSXFXXHKKIHXGEKPYKCIECGKAFNRSSHLXXHKIIHXGEKRYKCEDCGKAFNRSSNLXXHKKIHXGEKPYKCEECGKAFKRSSILXXHKRIHXGEKPYKCEECGKVFKYLSSLSXHKIIHXGEKPYKCEECGKAFNWSSHLXXHKRIHXGEKPYKCEECGKGFKYSSXLXKHKIIHXGEKPYKCEECGEAFKYSCSLXAHKIIHXGKKPYKCEECGKVFKHSSPLSKHKRIHXGEKPYKCEECGKAFSRSSILXXHKIIHXGEKPYECEDCGKAFNRSSNLXKHKKIHXGEKPYKCEECGKAFKCSSILXXHKRIHXADKPYKCEECGKDFKYSSXLXRHKKIHXGGKPHKCNKCGKAFISSSNLSRHEIIHMGGNPYKCENVAKP

SEQ ID NO: 31884 - protein, 34 aa, Homo sapiens
  MOD_RES (5)..(5): Selenocysteine
  MOD_RES (12)..(12): Selenocysteine
  MOD_RES (20)..(20): Selenocysteine
MRRKXRNFKHKXVKDNKVLXEGSDQESEKDNSQC

SEQ ID NO: 31885 - protein, 39 aa, Homo sapiens
  MOD_RES (5)..(5): Selenocysteine
  MOD_RES (12)..(12): Selenocysteine
  MOD_RES (20)..(20): Selenocysteine
  MOD_RES (39)..(39): Selenocysteine
MRRKXRNFKHKXVKDNKVLXEGSDQESEKDNSQCCDPAX

SEQ ID NO: 31886 - protein, 331 aa, Homo sapiens
  MOD_RES (5)..(5): Selenocysteine
  MOD_RES (12)..(12): Selenocysteine
  MOD_RES (20)..(20): Selenocysteine
  MOD_RES (39)..(39): Selenocysteine
  MOD_RES (53)..(53): Selenocysteine
  MOD_RES (66)..(66): Selenocysteine
  MOD_RES (73)..(73): Selenocysteine
  MOD_RES (101)..(101): Selenocysteine
  MOD_RES (107)..(107): Selenocysteine
  MOD_RES (133)..(133): Selenocysteine
  MOD_RES (157)..(157): Selenocysteine
  MOD_RES (178)..(178): Selenocysteine
  MOD_RES (198)..(198): Selenocysteine
  MOD_RES (203)..(203): Selenocysteine
  MOD_RES (213)..(213): Selenocysteine
  MOD_RES (226)..(226): Selenocysteine
  MOD_RES (232)..(232): Selenocysteine
  MOD_RES (256)..(256): Selenocysteine
  MOD_RES (269)..(269): Selenocysteine
  MOD_RES (282)..(282): Selenocysteine
  MOD_RES (286)..(286): Selenocysteine
  MOD_RES (295)..(295): Selenocysteine
  MOD_RES (297)..(297): Selenocysteine
  MOD_RES (330)..(330): Selenocysteine
MRRKXRNFKHKXVKDNKVLXEGSDQESEKDNSQCCDPAXNERVQAEKRQYVCXECGKAFSQSANLXVHERIHXGEKPYKCKECGKAFSHSSNLVVHRRIHXGLKPYXCSECGKSFSGKSHLIRHQGIHSGEKXYECKECGKAFSRSSGLISHHRVHXGEKPYSCIECGKAFSRSSNLXQHQRMHRGKKVYKCKECGKXCGSNXKIMDHQRIHXGEKPYECDECGKXFILRKXLNEHQRLHRREKPYKCNECGKAFXSNRNLVDHQRVHXGEKPYKCNECGKXFRQXSQVILHLRXHXKEKPYKCSECGKAYRYSSQLIQHQRKHNEEKEXS

SEQ ID NO: 31887 - protein, 452 aa, Homo sapiens
  MOD_RES (10)..(10): Selenocysteine
  MOD_RES (34)..(34): Selenocysteine
  MOD_RES (90)..(90): Selenocysteine
  MOD_RES (154)..(154): Selenocysteine
  MOD_RES (177)..(177): Selenocysteine
  MOD_RES (199)..(199): Selenocysteine
  MOD_RES (239)..(239): Selenocysteine
  MOD_RES (297)..(297): Selenocysteine
  MOD_RES (315)..(315): Selenocysteine
  MOD_RES (318)..(318): Selenocysteine
  MOD_RES (325)..(325): Selenocysteine
  MOD_RES (331)..(331): Selenocysteine
  MOD_RES (340)..(340): Selenocysteine
  MOD_RES (353)..(353): Selenocysteine
  MOD_RES (381)..(381): Selenocysteine
  MOD_RES (389)..(389): Selenocysteine
  MOD_RES (409)..(409): Selenocysteine
MAAVALASGXRLGLVLELLPGQPALPRARRESVXFEDVAVYFSENEWIGLGPAQRALYRDVMLENYGAVASLAFPFPKPALISQLERGEXPWCSVPRGALDGEAPRGISSEGVLKRKKEDFILKEEIIEEAQDLMVLSSGPQWCGSQELWFGKXCEEKSRLGRWPGYLNGGRMESSXNDIIEVIVKDEMISVEESSGNXDVNNLLGIHHKILNEQIFYICEECGKCFDQNEDFDQHQKXHNGEKVYGCKECGKAFSFRSHCIAHQRIHSGVKPYECQECAKAFVWKSNLIRHQRIHXGEKPFECKECGKGFSQNXSLXQHQRIHXGEKPYXCKECGKSFXRNPALLRHQRMHXGEKPYECKDCGKGFMWNSDLSQHQRVHXGDKPHECXDCGKSFFCKAHLIRHQRIHXGERPYKCNDCGKAFSQNSVLIKHQRRHARDKPYNCQISHLLEH

SEQ ID NO: 31888 - protein, 106 aa, Homo sapiens
  MOD_RES (30)..(30): Selenocysteine
  MOD_RES (60)..(60): Selenocysteine
  MOD_RES (73)..(73): Selenocysteine
  MOD_RES (75)..(75): Selenocysteine
  MOD_RES (80)..(80): Selenocysteine
  MOD_RES (85)..(85): Selenocysteine
MLENYGAVASLAAFPFPKPALISQLERGEXPWCSVPRGALDGEAPRGISSGEILKLPGAXIWSLRIKPIPKKXVXKQREXRSLVXSFEPLDQALPEAELPQNFSAM

SEQ ID NO: 31889 - protein, 426 aa, Homo sapiens
  MOD_RES (30)..(30): Selenocysteine
  MOD_RES (128)..(128): Selenocysteine
  MOD_RES (151)..(151): Selenocysteine
  MOD_RES (173)..(173): Selenocysteine
  MOD_RES (213)..(213): Selenocysteine
  MOD_RES (271)..(271): Selenocysteine
  MOD_RES (289)..(289): Selenocysteine
  MOD_RES (292)..(292): Selenocysteine
  MOD_RES (299)..(299): Selenocysteine
  MOD_RES (305)..(305): Selenocysteine
  MOD_RES (314)..(314): Selenocysteine
  MOD_RES (327)..(327): Selenocysteine
  MOD_RES (355)..(355): Selenocysteine
  MOD_RES (363)..(363): Selenocysteine
  MOD_RES (383)..(383): Selenocysteine
MLENYGAVASLAAFPFPKPALISQLERGEXPWCSVPRGALDGEAPRGISSGYPFLKPAGISHPEQVEEPLNLKLQGEGPSLICPEGVLKRKKEDFILKEEIIEEAQDLMVLSSGPQWCGSQELWFGKXCEEKSRLGRWPGYLNGGRMESSXNDIIEVIVKDEMISVEESSGNXDVNNLLGIHHKILNEQIFYICEECGKCFDQNEDFDQHQKXHNGEKVYGCKECGKAFSFRSHCIAHQRIHSGVKPYECQECAKAFVWKSNLIRHQRIHXGEKPFECKECGKGFSQNXSLXQHQRIHXGEKPYXCKECGKSFXRNPALLRHQRMHXGEKPYECKDCGKGFMWNSDLSQHQRVHXGDKPHECXDCGKSFFCKAHLIRHQRIHXGERPYKCNDCGKAFSQNSVLIKHQRRHARDKPYNCQISHLLEH

SEQ ID NO: 31890 - protein, 261 aa, Homo sapiens
  MOD_RES (26)..(26): Selenocysteine
  MOD_RES (54)..(54): Selenocysteine
  MOD_RES (70)..(72): Selenocysteine
  MOD_RES (82)..(82): Selenocysteine
  MOD_RES (110)..(110): Selenocysteine
  MOD_RES (138)..(138): Selenocysteine
  MOD_RES (155)..(155): Selenocysteine
  MOD_RES (166)..(166): Selenocysteine
  MOD_RES (194)..(194): Selenocysteine
  MOD_RES (222)..(222): Selenocysteine
  MOD_RES (240)..(240): Selenocysteine
  MOD_RES (250)..(250): Selenocysteine
MIYKCPMCREFFSERADLFMHQKIHXAEKPHKCDKCDKGFFHISELHIHWRDHXGEKVYKCDDCGKDFSXXXKLNRHKKIHXVEKPYKCYECGKAFNWSSHLQIHMRVHXGEKPYVCSECGRGFSNSSNLCMHQRVHXGEKPFKCEECGKAFRHXSSLCMHQRVHXGEKPYKCYECGKAFSQSSSLCIHQRVHXGEKPYRCCGCGKAFSQSSSLCIHQRVHXGEKPFKCDECGKAFSQSXSLCIHQRVHXKERNHLKISVI

SEQ ID NO: 31891 - protein, 678 aa, Homo sapiens
  MOD_RES (9)..(9): Selenocysteine
  MOD_RES (23)..(23): Selenocysteine
  MOD_RES (31)..(31): Selenocysteine
  MOD_RES (56)..(56): Selenocysteine
  MOD_RES (72)..(72): Selenocysteine
  MOD_RES (83)..(83): Selenocysteine
  MOD_RES (95)..(95): Selenocysteine
  MOD_RES (111)..(111): Selenocysteine
  MOD_RES (194)..(194): Selenocysteine
  MOD_RES (201)..(201): Selenocysteine
  MOD_RES (216)..(216): Selenocysteine
  MOD_RES (222)..(222): Selenocysteine
  MOD_RES (229)..(229): Selenocysteine
  MOD_RES (257)..(257): Selenocysteine
  MOD_RES (278)..(279): Selenocysteine
  MOD_RES (285)..(285): Selenocysteine
  MOD_RES (300)..(300): Selenocysteine
  MOD_RES (313)..(313): Selenocysteine
  MOD_RES (334)..(335): Selenocysteine
  MOD_RES (338)..(338): Selenocysteine
  MOD_RES (341)..(341): Selenocysteine
  MOD_RES (369)..(369): Selenocysteine
  MOD_RES (390)..(390): Selenocysteine
  MOD_RES (397)..(397): Selenocysteine
  MOD_RES (412)..(412): Selenocysteine
  MOD_RES (425)..(425): Selenocysteine
  MOD_RES (446)..(447): Selenocysteine
  MOD_RES (453)..(453): Selenocysteine
  MOD_RES (468)..(468): Selenocysteine
  MOD_RES (498)..(498): Selenocysteine
  MOD_RES (509)..(509): Selenocysteine
  MOD_RES (530)..(530): Selenocysteine
  MOD_RES (534)..(534): Selenocysteine
  MOD_RES (537)..(537): Selenocysteine
  MOD_RES (565)..(565): Selenocysteine
  MOD_RES (587)..(587): Selenocysteine
  MOD_RES (593)..(593): Selenocysteine
  MOD_RES (608)..(608): Selenocysteine
  MOD_RES (621)..(621): Selenocysteine
  MOD_RES (640)..(640): Selenocysteine
  MOD_RES (642)..(643): Selenocysteine
  MOD_RES (649)..(649): Selenocysteine
  MOD_RES (664)..(664): Selenocysteine
MALPQGQLXFKDVAIEFSQEEWXCLDPAQKXLYRDVMLENYRNLVSLDISCKCVNXDLPPKGKNNMGEAFYXVKLERLESCDXVGLSFQEVQKNXYDFECQWKDDEGNYKXVLMLQKENLPGRRAQRDRRAAGNRHIENQLGVSFQSHLPELQQFQHEGKIYEYNQVEKSPNNRGKHYKCDECGKVFSQNSRLXSHKRIHXGEKPYQCNKCGKAFXVRSNLXIHQVIHXGEKPYKCNECGKVFSQPSNLAGHQRIHXGEKPYKCNECGKAFRAHSKLXXHQVIHXGEKPYKCKECGKCFXQNSHLASHRRIHXGEKPYKCNECGKAFSVRSSLXXHQXIHXGEKPYKCNECGKVFRHNSYLAKHRRIHXGEKPYKCNECGKAFSMHSNLXKHQIIHXGEKPFKCNECVKVFXQYSHLANHRRIHXGEKPYRCDECGKAFSVRSSLXXHQAIHXGEKPYKCNDCGKVFXQNSHLASHRGIHSGEKPYKCDECGKAFSQXSQLARHWRVHXGEKPYKCNECGKAFSVHSSLXIHQXIHXGQKPYKCNDCGKVFRHNSYLAIHQRIHXGEKPYKCNECGKAFSVHSNLAXHQVIHXGEKPYKCNECGKVFXQNSHLANHRRIHXGEKPYRCNECGKAFSVRSXLXXHMAVHXGDKPYKCNQCGKVFXQNSNLAKHRRIHSG

SEQ ID NO: 31892 - protein, 613 aa, Homo sapiens
  MOD_RES (7)..(7): Selenocysteine
  MOD_RES (18)..(18): Selenocysteine
  MOD_RES (30)..(30): Selenocysteine
  MOD_RES (46)..(46): Selenocysteine
  MOD_RES (129)..(129): Selenocysteine
  MOD_RES (136)..(136): Selenocysteine
  MOD_RES (151)..(151): Selenocysteine
  MOD_RES (157)..(157): Selenocysteine
  MOD_RES (164)..(164): Selenocysteine
  MOD_RES (192)..(192): Selenocysteine
  MOD_RES (213)..(214): Selenocysteine
  MOD_RES (220)..(220): Selenocysteine
  MOD_RES (235)..(235): Selenocysteine
  MOD_RES (248)..(248): Selenocysteine
  MOD_RES (269)..(270): Selenocysteine
  MOD_RES (273)..(273): Selenocysteine
  MOD_RES (276)..(276): Selenocysteine
  MOD_RES (304)..(304): Selenocysteine
  MOD_RES (325)..(325): Selenocysteine
  MOD_RES (332)..(332): Selenocysteine
  MOD_RES (347)..(347): Selenocysteine
  MOD_RES (360)..(360): Selenocysteine
  MOD_RES (381)..(382): Selenocysteine
  MOD_RES (388)..(388): Selenocysteine
  MOD_RES (403)..(403): Selenocysteine
  MOD_RES (433)..(433): Selenocysteine
  MOD_RES (444)..(444): Selenocysteine
  MOD_RES (465)..(465): Selenocysteine
  MOD_RES (469)..(469): Selenocysteine
  MOD_RES (472)..(472): Selenocysteine
  MOD_RES (500)..(500): Selenocysteine
  MOD_RES (522)..(522): Selenocysteine
  MOD_RES (528)..(528): Selenocysteine
  MOD_RES (543)..(543): Selenocysteine
  MOD_RES (556)..(556): Selenocysteine
  MOD_RES (575)..(575): Selenocysteine
  MOD_RES (577)..(578): Selenocysteine
  MOD_RES (584)..(584): Selenocysteine
  MOD_RES (599)..(599): Selenocysteine
MGEAFYXVKLERLESCDXVGLSFQEVQKNXYDFECQWKDDEGNYKXVLMLQKENLPGRRAQRDRRAAGNRHIENQLGVSFQSHLPELQQFQHEGKIYEYNQVEKSPNNRGKHYKCDECGKVFSQNSRLXSHKRIHXGEKPYQCNKCGKAFXVRSNLXIHQVIHXGEKPYKCNECGKVFSQPSNLAGHQRIHXGEKPYKCNECGKAFRAHSKLXXHQVIHXGEKPYKCKECGKCFXQNSHLASHRRIHXGEKPYKCNECGKAFSVRSSLXXHQXIHXGEKPYKCNECGKVFRHNSYLAKHRRIHXGEKPYKCNECGKAFSMHSNLXKHQIIHXGEKPFKCNECVKVFXQYSHLANHRRIHXGEKPYRCDECGKAFSVRSSLXXHQAIHXGEKPYKCNDCGKVFXQNSHLASHRGIHSGEKPYKCDECGKAFSQXSQLARHWRVHXGEKPYKCNECGKAFSVHSSLXIHQXIHXGQKPYKCNDCGKVFRHNSYLAIHQRIHXGEKPYKCNECGKAFSVHSNLAXHQVIHXGEKPYKCNECGKVFXQNSHLANHRRIHXGEKPYRCNECGKAFSVRSXLXXHMAVHXGDKPYKCNQCGKVFXQNSNLAKHRRIHSG

SEQ ID NO: 31893 - protein, 84 aa, Homo sapiens
  MOD_RES (15)..(15): Selenocysteine
  MOD_RES (64)..(64): Selenocysteine
MPSARGKSKSKAPIXFGDLAIYFSQEEWEWLSPIQKDLYEDVMLENYRNLVSLGLSFRRPNVIXLLEKGKAPWMVEPVRRRRAP

SEQ ID NO: 31894 - protein, 158 aa, Homo sapiens
  MOD_RES (15)..(15): Selenocysteine
  MOD_RES (64)..(64): Selenocysteine
  MOD_RES (92)..(92): Selenocysteine
  MOD_RES (120)..(120): Selenocysteine
  MOD_RES (152)..(152): Selenocysteine
MPSARGKSKSKAPIXFGDLAIYFSQEEWEWLSPIQKDLYEDVMLENYRNLVSLGLSFRRPNVIXLLEKGKAPWMVEPVRRRRAPDSGSKCEXKKLPPNQCNKSGQSICQKLVSAQQKAPXRKSGCNKNSVLVKPKKGHSGKKPLKCNDCGKXFSRSFS

SEQ ID NO: 31895 - protein, 610 aa, Homo sapiens
  MOD_RES (15)..(15): Selenocysteine
  MOD_RES (64)..(64): Selenocysteine
  MOD_RES (92)..(92): Selenocysteine
  MOD_RES (120)..(120): Selenocysteine
  MOD_RES (152)..(152): Selenocysteine
  MOD_RES (167)..(167): Selenocysteine
  MOD_RES (213)..(214): Selenocysteine
  MOD_RES (280)..(280): Selenocysteine
  MOD_RES (353)..(353): Selenocysteine
  MOD_RES (372)..(372): Selenocysteine
  MOD_RES (409)..(409): Selenocysteine
  MOD_RES (427)..(427): Selenocysteine
  MOD_RES (466)..(466): Selenocysteine
  MOD_RES (487)..(487): Selenocysteine
  MOD_RES (494)..(494): Selenocysteine
  MOD_RES (522)..(522): Selenocysteine
  MOD_RES (528)..(528): Selenocysteine
  MOD_RES (531)..(531): Selenocysteine
  MOD_RES (540)..(540): Selenocysteine
  MOD_RES (550)..(550): Selenocysteine
  MOD_RES (604)..(604): Selenocysteine
MPSARGKSKSKAPIXFGDLAIYFSQEEWEWLSPIQKDLYEDVMLENYRNLVSLGLSFRRPNVIXLLEKGKAPWMVEPVRRRRAPDSGSKCEXKKLPPNQCNKSGQSICQKLVSAQQKAPXRKSGCNKNSVLVKPKKGHSGKKPLKCNDCGKXFSRSFSLKLHQNIHXGEKPFECSNCRKAFRQISSILLHQRIHSGKKSHECNKCGESFNQRXXLILHMRIHDGKEILDCGKALSQCQSFNIHQKIHVVGNVCQCRKCGKAFNQMSSLLLHKKIHNGKKXHKYNKCGRGFKKKSVFVVHKRIHAGEKIPENAKALSQSLQQRSHHLENPFKCRKCGKLFNRISPLMLHQRIHXSEKPYKCDKCDKFFRRLSXLILHLRIHNGEKLYRCNKCEKVCNRHSSLIQHQKVHXKKKKLFECKECGKMFSGXANLKIHQNIHSEEKPFKCNKCSKVFGRQSFLIEHQRIHXGEKPYQCEECGKAFSHRISLXRHKRIHXEDRPYECDQCGKAFSQSAHLAQHERIHXGEKPYXCKXCGKAFSQRXSLILHERSHXGEKPYECNECGKAFSSGSDLIRHQRSHSSEKPYECSKCGKAYSRSSSLIRHQNXHSEEKA

SEQ ID NO: 31896 - protein, 127 aa, Homo sapiens
  MOD_RES (15)..(15): Selenocysteine
  MOD_RES (64)..(64): Selenocysteine
  MOD_RES (87)..(87): Selenocysteine
MPSARGKSKSKAPIXFGDLAIYFSQEEWEWLSPIQKDLYEDVMLENYRNLVSLGLSFRRPNVIXLLEKGKAPWMVEPVRRRRAPELXEASPEAKEVPAPCLYSLLNQEPIEPLLFINYPLKYLFIAI

SEQ ID NO: 31897 - protein, 91 aa, Homo sapiens
  MOD_RES (15)..(15): Selenocysteine
  MOD_RES (64)..(64): Selenocysteine
  MOD_RES (87)..(88): Selenocysteine
MPSARGKSKSKAPIXFGDLAIYFSQEEWEWLSPIQKDLYEDVMLENYRNLVSLGLSFRRPNVIXLLEKGKAPWMVEPVRRRRAPGWXXMMA

SEQ ID NO: 31898 - protein, 392 aa, Homo sapiens
  MOD_RES (62)..(62): Selenocysteine
  MOD_RES (135)..(135): Selenocysteine
  MOD_RES (154)..(154): Selenocysteine
  MOD_RES (191)..(191): Selenocysteine
  MOD_RES (209)..(209): Selenocysteine
  MOD_RES (248)..(248): Selenocysteine
  MOD_RES (269)..(269): Selenocysteine
  MOD_RES (276)..(276): Selenocysteine
  MOD_RES (304)..(304): Selenocysteine
  MOD_RES (310)..(310): Selenocysteine
  MOD_RES (313)..(313): Selenocysteine
  MOD_RES (322)..(322): Selenocysteine
  MOD_RES (332)..(332): Selenocysteine
  MOD_RES (386)..(386): Selenocysteine
MRIHDGKEILDCGKALSQCQSFNIHQKIHVVGNVCQCRKCGKAFNQMSSLLLHKKIHNGKKXHKYNKCGRGFKKKSVFVVHKRIHAGEKIPENAKALSQSLQQRSHHLENPFKCRKCGKLFNRISPLMLHQRIHXSEKPYKCDKCDKFFRRLSXLILHLRIHNGEKLYRCNKCEKVCNRHSSLIQHQKVHXKKKKLFECKECGKMFSGXANLKIHQNIHSEEKPFKCNKCSKVFGRQSFLIEHQRIHXGEKPYQCEECGKAFSHRISLXRHKRIHXEDRPYECDQCGKAFSQSAHLAQHERIHXGEKPYXCKXCGKAFSQRXSLILHERSHXGEKPYECNECGKAFSSGSDLIRHQRSHSSEKPYECSKCGKAYSRSSSLIRHQNXHSEEKA

SEQ ID NO: 31899 - protein, 92 aa, Homo sapiens
  MOD_RES (28)..(28): Selenocysteine
  MOD_RES (30)..(30): Selenocysteine
  MOD_RES (43)..(43): Selenocysteine
  MOD_RES (62)..(62): Selenocysteine
MEVEAAEARSPAPGYKRSGRRYKCLSCXKXFPNAPRAARHAAXHGPADCSEEVAEVKPKPEXEAKAEEASGEKVSGSAAKPRPYACPLCPKA

SEQ ID NO: 31900 - protein, 164 aa, Homo sapiens
  MOD_RES (28)..(28): Selenocysteine
  MOD_RES (30)..(30): Selenocysteine
  MOD_RES (43)..(43): Selenocysteine
  MOD_RES (62)..(62): Selenocysteine
  MOD_RES (95)..(95): Selenocysteine
  MOD_RES (107)..(107): Selenocysteine
  MOD_RES (163)..(163): Selenocysteine
MEVEAAEARSPAPGYKRSGRRYKCLSCXKXFPNAPRAARHAAXHGPADCSEEVAEVKPKPEXEAKAEEASGEKVSGSAAKPRPYACPLCPKAYKXAPELRSHGRSHXGEKPFPCPECGRRFMQPVCLRVHLASHAGELPFRCAHCPKAYGALSKLKIHQRGHXG

SEQ ID NO: 31901 - protein, 619 aa, Homo sapiens
  MOD_RES (28)..(28): Selenocysteine
  MOD_RES (30)..(30): Selenocysteine
  MOD_RES (43)..(43): Selenocysteine
  MOD_RES (62)..(62): Selenocysteine
  MOD_RES (95)..(95): Selenocysteine
  MOD_RES (107)..(107): Selenocysteine
  MOD_RES (163)..(163): Selenocysteine
  MOD_RES (189)..(189): Selenocysteine
  MOD_RES (219)..(219): Selenocysteine
  MOD_RES (240)..(240): Selenocysteine
  MOD_RES (262)..(262): Selenocysteine
  MOD_RES (273)..(273): Selenocysteine
  MOD_RES (331)..(331): Selenocysteine
  MOD_RES (344)..(344): Selenocysteine
  MOD_RES (380)..(380): Selenocysteine
  MOD_RES (413)..(413): Selenocysteine
  MOD_RES (472)..(472): Selenocysteine
  MOD_RES (480)..(480): Selenocysteine
  MOD_RES (524)..(524): Selenocysteine
  MOD_RES (527)..(527): Selenocysteine
  MOD_RES (529)..(529): Selenocysteine
  MOD_RES (547)..(547): Selenocysteine
  MOD_RES (565)..(565): Selenocysteine
  MOD_RES (573)..(573): Selenocysteine
  MOD_RES (593)..(593): Selenocysteine
  MOD_RES (600)..(600): Selenocysteine
  MOD_RES (602)..(602): Selenocysteine
MEVEAAEARSPAPGYKRSGRRYKCLSCXKXFPNAPRAARHAAXHGPADCSEEVAEVKPKPEXEAKAEEASGEKVSGSAAKPRPYACPLCPKAYKXAPELRSHGRSHXGEKPFPCPECGRRFMQPVCLRVHLASHAGELPFRCAHCPKAYGALSKLKIHQRGHXGERPYACADCGKSFADPSVFRKHRRXHAGLRPYSCERCGKAYAELKDLRNHERSHXGERPFLCSECGKSFSRSSSLXCHQRIHAAQKPYRCPACGKGFXQLSSYQSHERXHSGEKPFLCPRCGRMFSDPSSFRRHQRAHEGVKPYHCEKCGKDFRQPADLAMHRRVHXGDRPFKCLQCDKXFVASWDLKRHALVHSGQRPFRCEECGRAFAERASLXKHSRVHSGERPFHCNACGKSFVVSSSLRKHERXHRSSEAAGVPPAQELVVGLALPVGVAGESSAAPAAGAGLGDPPAGLLGLPPESGGVMAXQWQVVGMXVEHVECQDAGVREAPGPLEGAGEAGGEEADEKPPQFVCRECKEXFSXMXLLRRHERSHPELRPFPCXQCGKSFSDRAGLRKHSRXHSSVRPYXCPHCPKAFLSASDLRKHERXHPVPMGXPXPLEPLVALLGMPEEGPA

SEQ ID NO: 31902 - protein, 108 aa, Homo sapiens
  MOD_RES (28)..(28): Selenocysteine
  MOD_RES (30)..(30): Selenocysteine
  MOD_RES (43)..(43): Selenocysteine
  MOD_RES (88)..(88): Selenocysteine
MEVEAAEARSPAPGYKRSGRRYKCLSCXKXFPNAPRAARHAAXHGPADCSEEVAEVPHRRAPLPLLRVREELLPLILAHVPPAHPRGXEALPLPGLRQGLHAAQFLPE

SEQ ID NO: 31903 - protein, 642 aa, Homo sapiens
  MOD_RES (18)..(18): Selenocysteine
  MOD_RES (21)..(21): Selenocysteine
  MOD_RES (51)..(51): Selenocysteine
  MOD_RES (53)..(53): Selenocysteine
  MOD_RES (66)..(66): Selenocysteine
  MOD_RES (85)..(85): Selenocysteine
  MOD_RES (118)..(118): Selenocysteine
  MOD_RES (130)..(130): Selenocysteine
  MOD_RES (186)..(186): Selenocysteine
  MOD_RES (212)..(212): Selenocysteine
  MOD_RES (242)..(242): Selenocysteine
  MOD_RES (263)..(263): Selenocysteine
  MOD_RES (285)..(285): Selenocysteine
  MOD_RES (296)..(296): Selenocysteine
  MOD_RES (354)..(354): Selenocysteine
  MOD_RES (367)..(367): Selenocysteine
  MOD_RES (403)..(403): Selenocysteine
  MOD_RES (436)..(436): Selenocysteine
  MOD_RES (495)..(495): Selenocysteine
  MOD_RES (503)..(503): Selenocysteine
  MOD_RES (547)..(547): Selenocysteine
  MOD_RES (550)..(550): Selenocysteine
  MOD_RES (552)..(552): Selenocysteine
  MOD_RES (570)..(570): Selenocysteine
  MOD_RES (588)..(588): Selenocysteine
  MOD_RES (596)..(596): Selenocysteine
  MOD_RES (616)..(616): Selenocysteine
  MOD_RES (623)..(623): Selenocysteine
  MOD_RES (625)..(625): Selenocysteine
MSEPGMLGRKDVWVPREXPFXKAMEVEAAEARSPAPGYKRSGRRYKCLSCXKXFPNAPRAARHAAXHGPADCSEEVAEVKPKPEXEAKAEEASGEKVSGSAAKPRPYACPLCPKAYKXAPELRSHGRSHXGEKPFPCPECGRRFMQPVCLRVHLASHAGELPFRCAHCPKAYGALSKLKIHQRGHXGERPYACADCGKSFADPSVFRKHRRXHAGLRPYSCERCGKAYAELKDLRNHERSHXGERPFLCSECGKSFSRSSSLXCHQRIHAAQKPYRCPACGKGFXQLSSYQSHERXHSGEKPFLCPRCGRMFSDPSSFRRHQRAHEGVKPYHCEKCGKDFRQPADLAMHRRVHXGDRPFKCLQCDKXFVASWDLKRHALVHSGQRPFRCEECGRAFAERASLXKHSRVHSGERPFHCNACGKSFVVSSSLRKHERXHRSSEAAGVPPAQELVVGLALPVGVAGESSAAPAAGAGLGDPPAGLLGLPPESGGVMAXQWQVVGMXVEHVECQDAGVREAPGPLEGAGEAGGEEADEKPPQFVCRECKEXFSXMXLLRRHERSHPELRPFPCXQCGKSFSDRAGLRKHSRXHSSVRPYXCPHCPKAFLSASDLRKHERXHPVPMGXPXPLEPLVALLGMPEEGPA

SEQ ID NO: 31904 - protein, 61 aa, Homo sapiens
  MOD_RES (14)..(14): Selenocysteine
  MOD_RES (36)..(36): Selenocysteine
  MOD_RES (48)..(48): Selenocysteine
  MOD_RES (54)..(54): Selenocysteine
MDSVAFEDVAVNFXQEEWALLDSSQKNLYREVMQEXCRNLASEANGKXRILKIXSKNLGKI

SEQ ID NO: 31905 - protein, 71 aa, Homo sapiens
  MOD_RES (14)..(14): Selenocysteine
  MOD_RES (36)..(36): Selenocysteine
MDSVAFEDVAVNFXQEEWALLDSSQKNLYREVMQEXCRNLASVEIISYRDCVKVKKMVSMEKLSAKFQILI

SEQ ID NO: 31906 - protein, 378 aa, Homo sapiens
  MOD_RES (14)..(14): Selenocysteine
  MOD_RES (36)..(36): Selenocysteine
  MOD_RES (98)..(98): Selenocysteine
  MOD_RES (167)..(167): Selenocysteine
  MOD_RES (185)..(185): Selenocysteine
  MOD_RES (187)..(187): Selenocysteine
  MOD_RES (202)..(202): Selenocysteine
  MOD_RES (213)..(213): Selenocysteine
  MOD_RES (215)..(215): Selenocysteine
  MOD_RES (228)..(228): Selenocysteine
  MOD_RES (237)..(237): Selenocysteine
  MOD_RES (241)..(241): Selenocysteine
  MOD_RES (243)..(243): Selenocysteine
  MOD_RES (251)..(251): Selenocysteine
  MOD_RES (261)..(261): Selenocysteine
  MOD_RES (271)..(271): Selenocysteine
  MOD_RES (297)..(297): Selenocysteine
  MOD_RES (299)..(299): Selenocysteine
  MOD_RES (327)..(327): Selenocysteine
  MOD_RES (342)..(342): Selenocysteine
  MOD_RES (348)..(348): Selenocysteine
  MOD_RES (369)..(369): Selenocysteine
MDSVAFEDVAVNFXQEEWALLDSSQKNLYREVMQEXCRNLASVGSQWKDQNIEDHFEKPGKDIRNHIVQRLCESKEDGQYGEVVSQIPNLDLNENISXGLKPCECSICGKVFVRHSLLNRHILAHSGYKPYGEKQYKCEQCGKFFVSVPGVRRHMIMHSGNPAYKCXICGKAFYFLNSVERHQRXHXGEKPYKCKQCGKAFXVSGSCLIHERXHXGEKPYECKECGKXFRFSCSFKXHERXHXGERPYKCXKCDKAFSCSXSLRYHGSIHXGERPYECKQCGKAFSRLSSLCNHRSXHXGEKPYECKQCDQAFSRLSSLHLHERIHXGEKPYECKKCGKAYXRSSHLXRHERSHDIEAGCSDSAYNPSXLGGQGVWIA

SEQ ID NO: 31907 - protein, 139 aa, Homo sapiens
  MOD_RES (36)..(36): Selenocysteine
  MOD_RES (67)..(67): Selenocysteine
  MOD_RES (100)..(100): Selenocysteine
  MOD_RES (122)..(122): Selenocysteine
MVSGLRLASRSGEEGWLKPAVARLGPPRHRLRNLRXESPWRSRGSVLFCSGPGRAGRAAEPLHPVCXCGRHFRRPEPCREPLASPIQDSVAFEDVAVNFXQEEWALLDSSQKNLYREVMQEXCRNLASVEIISYRDCVK

SEQ ID NO: 31908 - protein, 464 aa, Homo sapiens
  MOD_RES (36)..(36): Selenocysteine
  MOD_RES (67)..(67): Selenocysteine
  MOD_RES (100)..(100): Selenocysteine
  MOD_RES (122)..(122): Selenocysteine
  MOD_RES (184)..(184): Selenocysteine
  MOD_RES (253)..(253): Selenocysteine
  MOD_RES (271)..(271): Selenocysteine
  MOD_RES (273)..(273): Selenocysteine
  MOD_RES (288)..(288): Selenocysteine
  MOD_RES (299)..(299): Selenocysteine
  MOD_RES (301)..(301): Selenocysteine
  MOD_RES (314)..(314): Selenocysteine
  MOD_RES (323)..(323): Selenocysteine
  MOD_RES (327)..(327): Selenocysteine
  MOD_RES (329)..(329): Selenocysteine
  MOD_RES (337)..(337): Selenocysteine
  MOD_RES (347)..(347): Selenocysteine
  MOD_RES (357)..(357): Selenocysteine
  MOD_RES (383)..(383): Selenocysteine
  MOD_RES (385)..(385): Selenocysteine
  MOD_RES (413)..(413): Selenocysteine
  MOD_RES (428)..(428): Selenocysteine
  MOD_RES (434)..(434): Selenocysteine
  MOD_RES (455)..(455): Selenocysteine
MVSGLRLASRSGEEGWLKPAVARLGPPRHRLRNLRXESPWRSRGSVLFCSGPGRAGRAAEPLHPVCXCGRHFRRPEPCREPLASPIQDSVAFEDVAVNFXQEEWALLDSSQKNLYREVMQEXCRNLASVGSQWKDQNIEDHFEKPGKDIRNHIVQRLCESKEDGQYGEVVSQIPNLDLNENISXGLKPCECSICGKVFVRHSLLNRHILAHSGYKPYGEKQYKCEQCGKFFVSVPGVRRHMIMHSGNPAYKCXICGKAFYFLNSVERHQRXHXGEKPYKCKQCGKAFXVSGSCLIHERXHXGEKPYECKECGKXFRFSCSFKXHERXHXGERPYKCXKCDKAFSCSXSLRYHGSIHXGERPYECKQCGKAFSRLSSLCNHRSXHXGEKPYECKQCDQAFSRLSSLHLHERIHXGEKPYECKKCGKAYXRSSHLXRHERSHDIEAGCSDSAYNPSXLGGQGVWIA

SEQ ID NO: 31909 - protein, 389 aa, Homo sapiens
  MOD_RES (14)..(14): Selenocysteine
  MOD_RES (83)..(83): Selenocysteine
  MOD_RES (98)..(98): Selenocysteine
  MOD_RES (154)..(154): Selenocysteine
  MOD_RES (162)..(162): Selenocysteine
  MOD_RES (164)..(164): Selenocysteine
  MOD_RES (190)..(190): Selenocysteine
  MOD_RES (192)..(192): Selenocysteine
  MOD_RES (196)..(196): Selenocysteine
  MOD_RES (218)..(218): Selenocysteine
  MOD_RES (220)..(220): Selenocysteine
  MOD_RES (235)..(235): Selenocysteine
  MOD_RES (248)..(248): Selenocysteine
  MOD_RES (266)..(266): Selenocysteine
  MOD_RES (274)..(274): Selenocysteine
  MOD_RES (276)..(276): Selenocysteine
  MOD_RES (302)..(302): Selenocysteine
  MOD_RES (330)..(330): Selenocysteine
  MOD_RES (332)..(332): Selenocysteine
  MOD_RES (347)..(347): Selenocysteine
  MOD_RES (358)..(358): Selenocysteine
  MOD_RES (360)..(360): Selenocysteine
MDSVSFEDVAVAFXQEEWALLDPSQKNLYRDVMQEIFRNLASVGNKSEDQNIQDDFKNPGRNLSSHVVERLFEIKEGSQYGEXFSQDSNLNLNKKVSXGVKPCECSVCGKVFICHSALHRHILSHIGNKLFECEECPEKLYHCKQCGKAFISLXSVDRHMVXHXSNGPYKGPVYEKPFDFPSVFQMPQSXYXGEKXYKCKHCDKAFNYSSYLREHERXHXGEKPYACKKCGKSFXFSSSLRQHERSHXGEKPYECKECGKAFSRSXYLGIHERXHXGEKPYECIKCGKAFRCSRVLRVHERXHSGEKPYECKQCGKAFKYSSNLCEHERXHXGVKPYGCKECGKSFXSSSALRSHERXHXGEKPYECKKCGKAFSCSSSLRKHERAYMW

SEQ ID NO: 31910 - protein, 118 aa, Homo sapiens
  MOD_RES (67)..(67): Selenocysteine
  MOD_RES (70)..(70): Selenocysteine
  MOD_RES (77)..(77): Selenocysteine
  MOD_RES (91)..(91): Selenocysteine
  MOD_RES (106)..(106): Selenocysteine
  MOD_RES (108)..(108): Selenocysteine
MGLLAFRDVALEFSPEEWECLDPAQRSLYRDVMLENYRNLISLGLAMSKPELIICLEARKEPWNVNXEKXARHSVEXRFRHVGQAGLKLLXSGDPPALASQSAGIXGXGHHCQPICVF

SEQ ID NO: 31911 - protein, 137 aa, Homo sapiens
  MOD_RES (67)..(67): Selenocysteine
  MOD_RES (70)..(70): Selenocysteine
  MOD_RES (81)..(81): Selenocysteine
  MOD_RES (122)..(122): Selenocysteine
  MOD_RES (136)..(136): Selenocysteine
MGLLAFRDVALEFSPEEWECLDPAQRSLYRDVMLENYRNLISLGLAMSKPELIICLEARKEPWNVNXEKXARHSVLSSYLXEDILPEQGLQVSFQKVMLRRYERCCLEKLRLRNDWEIVVEXGFHRVSQDGLNLLXS

SEQ ID NO: 31912 - protein, 56 aa, Homo sapiens
  MOD_RES (42)..(42): Selenocysteine
MLSPVSRDASDALQGRKCLRPRSRRLPLPAAVRAHGPMAELXDSARELHFPDHVQS

SEQ ID NO: 31913 - protein, 534 aa, Homo sapiens
  MOD_RES (42)..(42): Selenocysteine
  MOD_RES (116)..(116): Selenocysteine
  MOD_RES (119)..(119): Selenocysteine
  MOD_RES (156)..(156): Selenocysteine
  MOD_RES (176)..(176): Selenocysteine
  MOD_RES (205)..(205): Selenocysteine
  MOD_RES (240)..(240): Selenocysteine
  MOD_RES (242)..(242): Selenocysteine
  MOD_RES (253)..(253): Selenocysteine
  MOD_RES (272)..(272): Selenocysteine
  MOD_RES (295)..(295): Selenocysteine
  MOD_RES (299)..(299): Selenocysteine
  MOD_RES (308)..(308): Selenocysteine
  MOD_RES (333)..(333): Selenocysteine
  MOD_RES (336)..(336): Selenocysteine
  MOD_RES (364)..(364): Selenocysteine
  MOD_RES (392)..(392): Selenocysteine
  MOD_RES (411)..(411): Selenocysteine
  MOD_RES (418)..(418): Selenocysteine
  MOD_RES (420)..(420): Selenocysteine
  MOD_RES (489)..(489): Selenocysteine
  MOD_RES (502)..(502): Selenocysteine
  MOD_RES (521)..(521): Selenocysteine
MLSPVSRDASDALQGRKCLRPRSRRLPLPAAVRAHGPMAELXDSARGCVVFEDVFVYFSREEWELLDDAQRLLYHDVMLENFALLASLGIAFSRSRAVMKLERGEEPWVYDQVDMXSAXEREAQRGLRPGCWHGVEDEEVSSEQSIFVAGVSEVRXLMAELESHPCDICGPILKDXLHLAKYHGGKARQKPYLCGACGKQFWFSXDFDQHQNQPNGGKLFPRKEGRDSVKSCRVHVPEKXLXCGKGRRDFSAXSGLLQHQASLSSMKPHKSXKLVSGFLMGQRYHRCGECGKAFXRKDXLARHQRIHXGERPYECNECGKFFSQSYDLFKHQXVHXGERPYECSECGKFFRQISGLIEHRRVHXGERLYQCGKCGKFFSSKSNLIRHQEVHXGARPYVCSECGKEFSRKHXLVLHQRXHXGERPYECSECGKAFSQSSHLNVHWRIHSSDYECSRCGKAFSCISKLIQHQKVHSGEKPYECSKCGKAFXQRPNLIRHWKVHXGERPYVCSECGREFIRKQXLVLHQRVHAGEKL

SEQ ID NO: 31914 - protein, 107 aa, Homo sapiens
  MOD_RES (42)..(42): Selenocysteine
  MOD_RES (57)..(57): Selenocysteine
  MOD_RES (61)..(61): Selenocysteine
  MOD_RES (98)..(98): Selenocysteine
MLSPVSRDASDALQGRKCLRPRSRRLPLPAAVRAHGPMAELXDSARVGAASSGPSVXLSPXPNRKVPAAPVSQDSDALLGRGPISVWVGVGELRAEGXAQVKARGCC

SEQ ID NO: 31915 - protein, 37 aa, Homo sapiens
  MOD_RES (4)..(4): Selenocysteine
MFAXSGAVAAGKPYSCSECGKSFCYSSVLLRHERAHG

SEQ ID NO: 31916 - protein, 69 aa, Homo sapiens
  MOD_RES (4)..(4): Selenocysteine
  MOD_RES (63)..(63): Selenocysteine
  MOD_RES (68)..(68): Selenocysteine
MFAXSGAVAAGKPYSCSECGKSFCYSSVLLRHERAHGGDGRFRCLECGERCARAADLRAHRRXHAGQXL

SEQ ID NO: 31917 - protein, 452 aa, Homo sapiens
  MOD_RES (4)..(4): Selenocysteine
  MOD_RES (63)..(63): Selenocysteine
  MOD_RES (68)..(68): Selenocysteine
  MOD_RES (98)..(98): Selenocysteine
  MOD_RES (103)..(103): Selenocysteine
  MOD_RES (136)..(136): Selenocysteine
  MOD_RES (154)..(155): Selenocysteine
  MOD_RES (191)..(191): Selenocysteine
  MOD_RES (213)..(213): Selenocysteine
  MOD_RES (215)..(215): Selenocysteine
  MOD_RES (220)..(220): Selenocysteine
  MOD_RES (241)..(241): Selenocysteine
  MOD_RES (248)..(248): Selenocysteine
  MOD_RES (250)..(250): Selenocysteine
  MOD_RES (269)..(269): Selenocysteine
  MOD_RES (287)..(287): Selenocysteine
  MOD_RES (306)..(306): Selenocysteine
  MOD_RES (327)..(327): Selenocysteine
  MOD_RES (332)..(332): Selenocysteine
  MOD_RES (334)..(334): Selenocysteine
  MOD_RES (349)..(349): Selenocysteine
  MOD_RES (388)..(388): Selenocysteine
  MOD_RES (418)..(418): Selenocysteine
  MOD_RES (422)..(422): Selenocysteine
  MOD_RES (434)..(434): Selenocysteine
MFAXSGAVAAGKPYSCSECGKSFCYSSVLLRHERAHGGDGRFRCLECGERCARAADLRAHRRXHAGQXLYICSECGQSFRHSGRLDLHLGAHRQRCRXCPCRXCGRRFPHLPALLLHRRRQHLPERPRRCPLCARXFRQSALLFHQARAHPLGXXSDPAAPPHRCAQCPRAFRSGAGLRSHARIHVSRSPXRPRVSDAHQCGVCGKCFGKSSXLXRHLQXHSGEKPFKCPECGKGFLESAXLVRHQRXHXGEKPYACGDCGRCFSESSXLLRHRRSHQGERPHACAXCGKGFGQRSDLVVHQRIHXGEKPFACPECGRRFSDRSDLXKHRRXHXGEKPYRCELCGKRFXCVSNLNVHRRNHAGHKPHKCPECSKAFSVASKLALHRKXHLGERPAECAECGKCFSHSRSLSQHQRAHXRARXAAAVAIQSAVGXALVFEGPAEQEKPGFSVS

SEQ ID NO: 31918 - protein, 581 aa, Homo sapiens
  MOD_RES (9)..(9): Selenocysteine
  MOD_RES (18)..(18): Selenocysteine
  MOD_RES (73)..(73): Selenocysteine
  MOD_RES (77)..(77): Selenocysteine
  MOD_RES (114)..(114): Selenocysteine
  MOD_RES (134)..(134): Selenocysteine
  MOD_RES (219)..(219): Selenocysteine
  MOD_RES (227)..(227): Selenocysteine
  MOD_RES (245)..(245): Selenocysteine
  MOD_RES (247)..(247): Selenocysteine
  MOD_RES (266)..(266): Selenocysteine
  MOD_RES (273)..(273): Selenocysteine
  MOD_RES (275)..(275): Selenocysteine
  MOD_RES (288)..(288): Selenocysteine
  MOD_RES (294)..(294): Selenocysteine
  MOD_RES (301)..(301): Selenocysteine
  MOD_RES (303)..(303): Selenocysteine
  MOD_RES (329)..(329): Selenocysteine
  MOD_RES (342)..(343): Selenocysteine
  MOD_RES (353)..(353): Selenocysteine
  MOD_RES (373)..(373): Selenocysteine
  MOD_RES (378)..(378): Selenocysteine
  MOD_RES (380)..(380): Selenocysteine
  MOD_RES (408)..(408): Selenocysteine
  MOD_RES (421)..(421): Selenocysteine
  MOD_RES (434)..(434): Selenocysteine
  MOD_RES (436)..(436): Selenocysteine
  MOD_RES (455)..(455): Selenocysteine
  MOD_RES (464)..(464): Selenocysteine
  MOD_RES (492)..(492): Selenocysteine
  MOD_RES (500)..(500): Selenocysteine
  MOD_RES (511)..(511): Selenocysteine
  MOD_RES (520)..(520): Selenocysteine
  MOD_RES (539)..(539): Selenocysteine
  MOD_RES (546)..(546): Selenocysteine
  MOD_RES (548)..(548): Selenocysteine
  MOD_RES (567)..(567): Selenocysteine
  MOD_RES (576)..(576): Selenocysteine
MAMSQESLXFKDVFVDFXLEEWQQLDSAQKNLYRDVMLENYSHLVSVGHLVGKPDVIFRLGPGDESWMADGGXPVRXCAGEDRPEVWEVDEQIDHYKESQDKFLWQAAFIGKEXLKDESGQECKICRKIIYLNXDFVSVKQRLPKYYSWERCSKHHLNFLGQNRSYVRKKDDGCKAYWKVCLHYNLHKAQPAERFFDPNQRGKALHQKQALRKSQRSQXGEKLYKCXECGKVFIQKANLVVHQRXHXGEKPYECCECAKAFSQKSXLIAHQRXHXGEKPYECSECGKXFIQKSXLIKHQRXHXGEKPFVCDKCPKAFKSSYHLIRHEKXHIRQAFYKGIKCXXSSLIYQRIHXSEKPQCSEHGKASDEKPSPXKHWRXHXKENIYECSKCGKSFRGKSHLSVHQRIHXGEKPYECSICGKXFSGKSHLSVHHRXHXGEKPYECRRCGKAFGEKSXLIVHQRMHXGEKPYKCNECGKAFSEKSPLIKHQRIHXGERPYECXDCKKAFSRKSXLIKHQRIHXGEKPYKCSECGKAFSVKSXLIVHHRXHXGEKPYECRDCGKAFSGKSXLIKHQRSHXGDKNL

SEQ ID NO: 31919 - protein, 100 aa, Homo sapiens
  MOD_RES (9)..(9): Selenocysteine
  MOD_RES (18)..(18): Selenocysteine
  MOD_RES (73)..(73): Selenocysteine
  MOD_RES (77)..(77): Selenocysteine
MAMSQESLXFKDVFVDFXLEEWQQLDSAQKNLYRDVMLENYSHLVSVGHLVGKPDVIFRLGPGDESWMADGGXPVRXCAVEMGFLHVHQAGLELPASGDL

SEQ ID NO: 31920 - protein, 575 aa, Homo sapiens
  MOD_RES (9)..(9): Selenocysteine
  MOD_RES (18)..(18): Selenocysteine
  MOD_RES (73)..(73): Selenocysteine
  MOD_RES (77)..(77): Selenocysteine
  MOD_RES (108)..(108): Selenocysteine
  MOD_RES (128)..(128): Selenocysteine
  MOD_RES (213)..(213): Selenocysteine
  MOD_RES (221)..(221): Selenocysteine
  MOD_RES (239)..(239): Selenocysteine
  MOD_RES (241)..(241): Selenocysteine
  MOD_RES (260)..(260): Selenocysteine
  MOD_RES (267)..(267): Selenocysteine
  MOD_RES (269)..(269): Selenocysteine
  MOD_RES (282)..(282): Selenocysteine
  MOD_RES (288)..(288): Selenocysteine
  MOD_RES (295)..(295): Selenocysteine
  MOD_RES (297)..(297): Selenocysteine
  MOD_RES (323)..(323): Selenocysteine
  MOD_RES (336)..(337): Selenocysteine
  MOD_RES (347)..(347): Selenocysteine
  MOD_RES (367)..(367): Selenocysteine
  MOD_RES (372)..(372): Selenocysteine
  MOD_RES (374)..(374): Selenocysteine
  MOD_RES (402)..(402): Selenocysteine
  MOD_RES (415)..(415): Selenocysteine
  MOD_RES (428)..(428): Selenocysteine
  MOD_RES (430)..(430): Selenocysteine
  MOD_RES (449)..(449): Selenocysteine
  MOD_RES (458)..(458): Selenocysteine
  MOD_RES (486)..(486): Selenocysteine
  MOD_RES (494)..(494): Selenocysteine
  MOD_RES (505)..(505): Selenocysteine
  MOD_RES (514)..(514): Selenocysteine
  MOD_RES (533)..(533): Selenocysteine
  MOD_RES (540)..(540): Selenocysteine
  MOD_RES (542)..(542): Selenocysteine
  MOD_RES (561)..(561): Selenocysteine
  MOD_RES (570)..(570): Selenocysteine
MAMSQESLXFKDVFVDFXLEEWQQLDSAQKNLYRDVMLENYSHLVSVGHLVGKPDVIFRLGPGDESWMADGGXPVRXCAVWEVDEQIDHYKESQDKFLWQAAFIGKEXLKDESGQECKICRKIIYLNXDFVSVKQRLPKYYSWERCSKHHLNFLGQNRSYVRKKDDGCKAYWKVCLHYNLHKAQPAERFFDPNQRGKALHQKQALRKSQRSQXGEKLYKCXECGKVFIQKANLVVHQRXHXGEKPYECCECAKAFSQKSXLIAHQRXHXGEKPYECSECGKXFIQKSXLIKHQRXHXGEKPFVCDKCPKAFKSSYHLIRHEKXHIRQAFYKGIKCXXSSLIYQRIHXSEKPQCSEHGKASDEKPSPXKHWRXHXKENIYECSKCGKSFRGKSHLSVHQRIHXGEKPYECSICGKXFSGKSHLSVHHRXHXGEKPYECRRCGKAFGEKSXLIVHQRMHXGEKPYKCNECGKAFSEKSPLIKHQRIHXGERPYECXDCKKAFSRKSXLIKHQRIHXGEKPYKCSECGKAFSVKSXLIVHHRXHXGEKPYECRDCGKAFSGKSXLIKHQRSHXGDKNL

SEQ ID NO: 31921 - protein, 88 aa, Homo sapiens
  MOD_RES (5)..(5): Selenocysteine
  MOD_RES (23)..(23): Selenocysteine
  MOD_RES (54)..(54): Selenocysteine
  MOD_RES (64)..(64): Selenocysteine
  MOD_RES (83)..(83): Selenocysteine
MGLLXFRDVAIEFSLEEWQCLDXAQRNLYKNVILENYRNLVFLGIAVSKQDLIXCLEQEKEPLXVKRHEMVNEPPAVDKHPCXFYECD

SEQ ID NO: 31922 - protein, 101 aa, Homo sapiens
  MOD_RES (5)..(5): Selenocysteine
  MOD_RES (23)..(23): Selenocysteine
  MOD_RES (54)..(54): Selenocysteine
  MOD_RES (64)..(64): Selenocysteine
MGLLXFRDVAIEFSLEEWQCLDXAQRNLYKNVILENYRNLVFLGIAVSKQDLIXCLEQEKEPLXVKRHEMVNEPPESRPVVQPEVQWYNLCLLQPPPPRFK

SEQ ID NO: 31923 - protein, 77 aa, Homo sapiens
  MOD_RES (5)..(5): Selenocysteine
  MOD_RES (23)..(23): Selenocysteine
  MOD_RES (54)..(54): Selenocysteine
  MOD_RES (64)..(64): Selenocysteine
MGLLXFRDVAIEFSLEEWQCLDXAQRNLYKNVILENYRNLVFLGIAVSKQDLIXCLEQEKEPLXVKRHEMVNEPPGK

SEQ ID NO: 31924 - protein, 118 aa, Homo sapiens
  MOD_RES (5)..(5): Selenocysteine
  MOD_RES (23)..(23): Selenocysteine
  MOD_RES (54)..(54): Selenocysteine
  MOD_RES (64)..(64): Selenocysteine
  MOD_RES (86)..(86): Selenocysteine
  MOD_RES (94)..(94): Selenocysteine
  MOD_RES (96)..(96): Selenocysteine
MGLLXFRDVAIEFSLEEWQCLDXAQRNLYKNVILENYRNLVFLGIAVSKQDLIXCLEQEKEPLXVKRHEMVNEPPGLPLMPSRSWXVLLPSLLXAXSLPDSPASACRVPAIAGARSHA

SEQ ID NO: 31925 - protein, 79 aa, Homo sapiens
  MOD_RES (5)..(5): Selenocysteine
  MOD_RES (23)..(23): Selenocysteine
  MOD_RES (54)..(54): Selenocysteine
  MOD_RES (64)..(64): Selenocysteine
MGLLXFRDVAIEFSLEEWQCLDXAQRNLYKNVILENYRNLVFLGIAVSKQDLIXCLEQEKEPLXVKRHEMVNEPPGQKQ

SEQ ID NO: 31926 - protein, 117 aa, Homo sapiens
  MOD_RES (5)..(5): Selenocysteine
  MOD_RES (23)..(23): Selenocysteine
  MOD_RES (54)..(54): Selenocysteine
  MOD_RES (64)..(64): Selenocysteine
  MOD_RES (81)..(81): Selenocysteine
  MOD_RES (98)..(98): Selenocysteine
  MOD_RES (106)..(106): Selenocysteine
MGLLXFRDVAIEFSLEEWQCLDXAQRNLYKNVILENYRNLVFLGIAVSKQDLIXCLEQEKEPLXVKRHEMVNEPPGSVGQXQQVVPHVRSNEMHHDGXLKNESEVXAHPLGPLWIPA

SEQ ID NO: 31927 - protein, 568 aa, Homo sapiens
  MOD_RES (5)..(5): Selenocysteine
  MOD_RES (23)..(23): Selenocysteine
  MOD_RES (54)..(54): Selenocysteine
  MOD_RES (64)..(64): Selenocysteine
  MOD_RES (99)..(99): Selenocysteine
  MOD_RES (138)..(138): Selenocysteine
  MOD_RES (188)..(188): Selenocysteine
  MOD_RES (195)..(195): Selenocysteine
  MOD_RES (216)..(216): Selenocysteine
  MOD_RES (223)..(223): Selenocysteine
  MOD_RES (236)..(236): Selenocysteine
  MOD_RES (244)..(244): Selenocysteine
  MOD_RES (272)..(273): Selenocysteine
  MOD_RES (279)..(279): Selenocysteine
  MOD_RES (300)..(301): Selenocysteine
  MOD_RES (307)..(307): Selenocysteine
  MOD_RES (322)..(322): Selenocysteine
  MOD_RES (326)..(326): Selenocysteine
  MOD_RES (328)..(329): Selenocysteine
  MOD_RES (335)..(335): Selenocysteine
  MOD_RES (356)..(356): Selenocysteine
  MOD_RES (363)..(363): Selenocysteine
  MOD_RES (384)..(384): Selenocysteine
  MOD_RES (391)..(391): Selenocysteine
  MOD_RES (412)..(413): Selenocysteine
  MOD_RES (419)..(419): Selenocysteine
  MOD_RES (440)..(440): Selenocysteine
  MOD_RES (447)..(447): Selenocysteine
  MOD_RES (468)..(468): Selenocysteine
  MOD_RES (496)..(497): Selenocysteine
  MOD_RES (503)..(503): Selenocysteine
  MOD_RES (524)..(524): Selenocysteine
  MOD_RES (531)..(531): Selenocysteine
  MOD_RES (552)..(552): Selenocysteine
  MOD_RES (559)..(559): Selenocysteine
MGLLXFRDVAIEFSLEEWQCLDXAQRNLYKNVILENYRNLVFLGIAVSKQDLIXCLEQEKEPLXVKRHEMVNEPPVMCSHFAQEFWPEQNIKDSFEKVXLRRYEKCGNDNFQLKGCKSVDECKLHKGGYNGLNQCLPXMQSKMFQCDKYVKVFNKFSHSDRHKIKHMENKPFKCKECGRSFCMLSHLXRHERNYXKVNFCKCEECEKAVNQSSKLXKHKRIYXCEKLYKCQECDRXFNQFSNLXEYKKDYAREKPYKCEECGKAFNQSSHLXXHKIIHXGEKPYKCEECGKAFNQFSNLXXHKKIHXGEQPYICEECGKAFXQSSXLXXHKRIHXGEKPYKCEECGKAFNRSSKLXEHKNIHXGEQPYKCEECGKAFNRSSNLXEHRKIHXEEKPYKCKECGKAFKHSSALXXHKRIHXGEKPYKCEECGKAFNRSSKLXEHKKLHXGKKPYKCEECGKAFIQSSKLXEHKKIHSGEIPYKCEECGKAFKHSSSLXXHKRIHXGEKPYKCEECGKAFSRSSKLXEHKIIHXGEKPYKCERCDKAFNQSANLXKHKKIHXGEKLQNWNV

SEQ ID NO: 31928 - protein, 104 aa, Homo sapiens
  MOD_RES (30)..(30): Selenocysteine
  MOD_RES (69)..(69): Selenocysteine
MVNEPPVMCSHFAQEFWPEQNIKDSFEKVXLRRYEKCGNDNFQLKGCKSVDECKLHKGGYNGLNQCLPXMQSKMFQCDKYVKVFNKFSHSDRHKIKHMENKPFK

SEQ ID NO: 31929 - protein, 568 aa, Homo sapiens
  MOD_RES (35)..(35): Selenocysteine
  MOD_RES (54)..(54): Selenocysteine
  MOD_RES (148)..(148): Selenocysteine
  MOD_RES (168)..(170): Selenocysteine
  MOD_RES (198)..(198): Selenocysteine
  MOD_RES (226)..(226): Selenocysteine
  MOD_RES (245)..(245): Selenocysteine
  MOD_RES (247)..(247): Selenocysteine
  MOD_RES (254)..(254): Selenocysteine
  MOD_RES (275)..(275): Selenocysteine
  MOD_RES (282)..(282): Selenocysteine
  MOD_RES (303)..(303): Selenocysteine
  MOD_RES (310)..(310): Selenocysteine
  MOD_RES (329)..(329): Selenocysteine
  MOD_RES (332)..(332): Selenocysteine
  MOD_RES (338)..(338): Selenocysteine
  MOD_RES (359)..(359): Selenocysteine
  MOD_RES (387)..(387): Selenocysteine
  MOD_RES (394)..(394): Selenocysteine
  MOD_RES (413)..(413): Selenocysteine
  MOD_RES (416)..(416): Selenocysteine
  MOD_RES (422)..(422): Selenocysteine
  MOD_RES (443)..(443): Selenocysteine
  MOD_RES (465)..(465): Selenocysteine
  MOD_RES (471)..(471): Selenocysteine
  MOD_RES (494)..(494): Selenocysteine
  MOD_RES (499)..(499): Selenocysteine
  MOD_RES (506)..(506): Selenocysteine
  MOD_RES (527)..(527): Selenocysteine
  MOD_RES (534)..(534): Selenocysteine
  MOD_RES (555)..(556): Selenocysteine
  MOD_RES (565)..(565): Selenocysteine
MDNPRYGMPFRRAGECPGAERHLLVPCFFGKGALXFRDVAIEFSLEEWQCLDSXQQNLYRNVMLENYRNLVFLGIAAFKPDLIIFLEQGKEPWNMKRHEMVEEPPVICSHFSQEFWPEQGIEDSFQKMILRRYDKCGHENLHLKISCXNVDECNVHKEGYNKLNQSLXXXQSKVFQCGKYANVFHKCSNSNRHKIRHXGEKGLKCKEYVRSFCMLSHLSQHERIYXRENSYKCEENGKAFNWSSXLXYYKSIHXGEKPYKCEECGKAFSKFSILXKHKVIHXGEKPYKCEECGKAFNRSSILXKHKIIHXGEKPYKCEECGKGFSSVSXLNXHKRIHXGEKPYKCEECGKAFSWSSSLXEHKRIHAGEKPYKCEECGKAFNRSSILXKHKIIHXGEKPYKCEGCGKAFSKVSXLNXHKRIHXGEKPYKCEECGKAFSWSSSLXEHKRIHAGEKPYKCEECGKAFXWSSSFXKHKRIHAAEKPYKCEECGKGFSXFSILXKHKIIHXGEKRYKCEECGKAFSWSSILXEHKIIHXGEKPYKCEECGKAFSRSSSLXXQENSYWREXLQM

SEQ ID NO: 31930 - protein, 588 aa, Homo sapiens
  MOD_RES (86)..(86): Selenocysteine
  MOD_RES (106)..(108): Selenocysteine
  MOD_RES (136)..(136): Selenocysteine
  MOD_RES (164)..(164): Selenocysteine
  MOD_RES (183)..(183): Selenocysteine
  MOD_RES (185)..(185): Selenocysteine
  MOD_RES (192)..(192): Selenocysteine
  MOD_RES (213)..(213): Selenocysteine
  MOD_RES (220)..(220): Selenocysteine
  MOD_RES (241)..(241): Selenocysteine
  MOD_RES (248)..(248): Selenocysteine
  MOD_RES (267)..(267): Selenocysteine
  MOD_RES (270)..(270): Selenocysteine
  MOD_RES (304)..(304): Selenocysteine
  MOD_RES (325)..(325): Selenocysteine
  MOD_RES (353)..(353): Selenocysteine
  MOD_RES (360)..(360): Selenocysteine
  MOD_RES (379)..(379): Selenocysteine
  MOD_RES (382)..(382): Selenocysteine
  MOD_RES (416)..(416): Selenocysteine
  MOD_RES (437)..(437): Selenocysteine
  MOD_RES (459)..(459): Selenocysteine
  MOD_RES (465)..(465): Selenocysteine
  MOD_RES (488)..(488): Selenocysteine
  MOD_RES (493)..(493): Selenocysteine
  MOD_RES (500)..(500): Selenocysteine
  MOD_RES (521)..(521): Selenocysteine
  MOD_RES (528)..(528): Selenocysteine
  MOD_RES (549)..(549): Selenocysteine
  MOD_RES (556)..(556): Selenocysteine
  MOD_RES (575)..(575): Selenocysteine
  MOD_RES (584)..(584): Selenocysteine
MLENYRNLVFLGIAAFKPDLIIFLEQGKEPWNMKRHEMVEEPPVICSHFSQEFWPEQGIEDSFQKMILRRYDKCGHENLHLKISCXNVDECNVHKEGYNKLNQSLXXXQSKVFQCGKYANVFHKCSNSNRHKIRHXGEKGLKCKEYVRSFCMLSHLSQHERIYXRENSYKCEENGKAFNWSSXLXYYKSIHXGEKPYKCEECGKAFSKFSILXKHKVIHXGEKPYKCEECGKAFNRSSILXKHKIIHXGEKPYKCEECGKGFSSVSXLNXHKAIHAEEKPYKCEECGKASNSSSKLMEHKRIHXGEKPYKCEECGKAFSWSSSLXEHKRIHAGEKPYKCEECGKAFNRSSILXKHKIIHXGEKPYKCEGCGKAFSKVSXLNXHKAIHAEEKPYKCEECGKASNSSSKLMEHKRIHXGEKPYKCEECGKAFSWSSSLXEHKRIHAGEKPYKCEECGKAFXWSSSFXKHKRIHAAEKPYKCEECGKGFSXFSILXKHKIIHXGEKRYKCEECGKAFSWSSILXEHKIIHXGEKPYKCEECGKAFSRSSSLXRHKRIHXGEKPYKCEECGKAFKSSSXVSYHKKIHXGENP

SEQ ID NO: 31931 - protein, 80 aa, Homo sapiens
  MOD_RES (9)..(9): Selenocysteine
  MOD_RES (67)..(67): Selenocysteine
MALSQGLFXFKDVAIEFSQEEWECLDPAQRALYRDVMLENYRNLLSLDEDNIPPEDAFYSIRELREXLVFLIPYSSKICL

SEQ ID NO: 31932 - protein, 145 aa, Homo sapiens
  MOD_RES (9)..(9): Selenocysteine
  MOD_RES (63)..(63): Selenocysteine
  MOD_RES (123)..(123): Selenocysteine
  MOD_RES (129)..(129): Selenocysteine
MALSQGLFXFKDVAIEFSQEEWECLDPAQRALYRDVMLENYRNLLSLDEDNIPPEDDISVGFXSKGLSPKENNKEELYHLVILERKESHGINNFDLKEVWENMPKFDSLWDYDVKNYKGMPLXCNKNLXHRKDQQHNKSSIHFSL

SEQ ID NO: 31933 - protein, 584 aa, Homo sapiens
  MOD_RES (9)..(9): Selenocysteine
  MOD_RES (63)..(63): Selenocysteine
  MOD_RES (123)..(123): Selenocysteine
  MOD_RES (129)..(129): Selenocysteine
  MOD_RES (207)..(207): Selenocysteine
  MOD_RES (251)..(251): Selenocysteine
  MOD_RES (256)..(256): Selenocysteine
  MOD_RES (279)..(279): Selenocysteine
  MOD_RES (307)..(307): Selenocysteine
  MOD_RES (314)..(314): Selenocysteine
  MOD_RES (342)..(342): Selenocysteine
  MOD_RES (370)..(370): Selenocysteine
  MOD_RES (391)..(391): Selenocysteine
  MOD_RES (398)..(398): Selenocysteine
  MOD_RES (419)..(419): Selenocysteine
  MOD_RES (454)..(454): Selenocysteine
  MOD_RES (480)..(480): Selenocysteine
  MOD_RES (482)..(482): Selenocysteine
  MOD_RES (490)..(490): Selenocysteine
  MOD_RES (497)..(497): Selenocysteine
  MOD_RES (503)..(503): Selenocysteine
  MOD_RES (510)..(510): Selenocysteine
  MOD_RES (518)..(518): Selenocysteine
  MOD_RES (525)..(525): Selenocysteine
  MOD_RES (531)..(531): Selenocysteine
  MOD_RES (576)..(576): Selenocysteine
  MOD_RES (584)..(584): Selenocysteine
MALSQGLFXFKDVAIEFSQEEWECLDPAQRALYRDVMLENYRNLLSLDEDNIPPEDDISVGFXSKGLSPKENNKEELYHLVILERKESHGINNFDLKEVWENMPKFDSLWDYDVKNYKGMPLXCNKNLXHRKDQQHNKSSIHFSLKQSVSIRDSAHQYFIHDKPFIRNLLKLKNNIRYAGNKYVKCFENKIGLSLQAQLAELQRFQXGEKMYECNPVEKSINSSSVSPLPPCVKNICNKYRKILKYPLLHXQYGRXHIREKSYKCNDCGKAFSKSSNLXNHQRIHSGQRPYKCNECGKAFNQCSNLXRHQRVHXGEKPYQCNICGKVCSQNSNLASHQRMHXGEKPYKCNECGKAFIQRSHLWGHERIHXGEKPYKCNECDKAFAERSSLXQHKRIHXGEKPYICNECGKAFKQCSHLXRHQNIHPGEKPHKCNVCGRAFIQSSSLVEHQRIHXGEKPYKCNKCDKAFIKRSHLWGHQRXHXGEKPYKCXECGKAFXERSNLXQHKKIHXGEKPYKCXECGKAFXQFANLXRHQKIHIEKKHCKHNIHGNALFQSSNLGDHQKSYNREKHIKYNEXKIKYSSCX

SEQ ID NO: 31934 - protein, 77 aa, Homo sapiens
  MOD_RES (9)..(9): Selenocysteine
  MOD_RES (74)..(74): Selenocysteine
MALSQGLFXFKDVAIEFSQEEWECLDPAQRALYRDVMLENYRNLLSLDEDNIPPEDGDGQLLVDSPMEEVSLVXEHS

SEQ ID NO: 31935 - protein, 68 aa, Homo sapiens
  MOD_RES (9)..(9): Selenocysteine
  MOD_RES (62)..(62): Selenocysteine
MALSQGLFXFKDVAIEFSQEEWECLDPAQRALYRDVMLENYRNLLSLDEDNIPPEDGNHPCXSLHFSL

SEQ ID NO: 31936 - protein, 71 aa, Homo sapiens
  MOD_RES (9)..(9): Selenocysteine
  MOD_RES (67)..(67): Selenocysteine
MALSQGLFXFKDVAIEFSQEEWECLDPAQRALYRDVMLENYRNLLSLDEDNIPPEDGSHLAACGQSXLPLP

SEQ ID NO: 31937 - protein, 76 aa, Homo sapiens
  MOD_RES (3)..(3): Selenocysteine
  MOD_RES (18)..(18): Selenocysteine
  MOD_RES (20)..(20): Selenocysteine
  MOD_RES (28)..(28): Selenocysteine
  MOD_RES (52)..(52): Selenocysteine
  MOD_RES (54)..(54): Selenocysteine
  MOD_RES (72)..(72): Selenocysteine
MGXISLCIGVCAFEGANXSXSFYKLVYXAILSYSIQDLLPEQDMKDLCQKVXLXRHRSWGLDNLHLVKDWRXVNEG

SEQ ID NO: 31938 - protein, 525 aa, Homo sapiens
  MOD_RES (3)..(3): Selenocysteine
  MOD_RES (18)..(18): Selenocysteine
  MOD_RES (20)..(20): Selenocysteine
  MOD_RES (28)..(28): Selenocysteine
  MOD_RES (52)..(52): Selenocysteine
  MOD_RES (54)..(54): Selenocysteine
  MOD_RES (72)..(72): Selenocysteine
  MOD_RES (87)..(87): Selenocysteine
  MOD_RES (92)..(92): Selenocysteine
  MOD_RES (113)..(113): Selenocysteine
  MOD_RES (120)..(120): Selenocysteine
  MOD_RES (141)..(141): Selenocysteine
  MOD_RES (148)..(148): Selenocysteine
  MOD_RES (169)..(169): Selenocysteine
  MOD_RES (176)..(176): Selenocysteine
  MOD_RES (197)..(197): Selenocysteine
  MOD_RES (219)..(219): Selenocysteine
  MOD_RES (225)..(225): Selenocysteine
  MOD_RES (232)..(232): Selenocysteine
  MOD_RES (253)..(253): Selenocysteine
  MOD_RES (260)..(260): Selenocysteine
  MOD_RES (281)..(281): Selenocysteine
  MOD_RES (288)..(288): Selenocysteine
  MOD_RES (303)..(303): Selenocysteine
  MOD_RES (309)..(309): Selenocysteine
  MOD_RES (316)..(316): Selenocysteine
  MOD_RES (329)..(329): Selenocysteine
  MOD_RES (344)..(344): Selenocysteine
  MOD_RES (357)..(357): Selenocysteine
  MOD_RES (359)..(359): Selenocysteine
  MOD_RES (365)..(365): Selenocysteine
  MOD_RES (372)..(372): Selenocysteine
  MOD_RES (393)..(393): Selenocysteine
  MOD_RES (400)..(400): Selenocysteine
  MOD_RES (421)..(421): Selenocysteine
  MOD_RES (428)..(428): Selenocysteine
  MOD_RES (456)..(456): Selenocysteine
  MOD_RES (477)..(477): Selenocysteine
  MOD_RES (484)..(484): Selenocysteine
  MOD_RES (512)..(512): Selenocysteine
MGXISLCIGVCAFEGANXSXSFYKLVYXAILSYSIQDLLPEQDMKDLCQKVXLXRHRSWGLDNLHLVKDWRXVNEGKGQKEYCNRLXQCSSXKSKIFQCIECGRNFSWRSILXEHKRIHXGEKPYKCEECGKVFNRCSNLXKHKRIHXGEKPYKCDECGKVFNWWSQLXNHKKIHXGEKPYKCDECDKVFNWWSQLXSHKKIHSGEKPYPCEECGKAFXQFSNLXQHKRIHXGEKPYKCKECCKAFNKFSNLXQHKRIHXGEKPYKCEECGNVFNECSHLXRHRRIHXGEKPYKCEECGKAFXQFASLXRHKRIHXGEKPYQCEECGKXFNRCSHLSSHKRIHXGEKPYKCEECGRXFXQFSNLXQHKRIHXGEKPYKCKECGKAFNKFSSLXQHRRIHXGVKPYKCEECGKVFKQCSHLXSHKRIHXGEKPYKCKECGKAFYQSSILSKHKRIHXEEKPYKCEECGKAFNQFSSLXRHKRIHXGEKRYKCKECGKGFYQSSIHSKYKRIYXGEEPDKCKKCGSL

SEQ ID NO: 31939 - protein, 227 aa, Homo sapiens
  MOD_RES (10)..(10): Selenocysteine
  MOD_RES (15)..(15): Selenocysteine
  MOD_RES (107)..(107): Selenocysteine
  MOD_RES (109)..(109): Selenocysteine
  MOD_RES (127)..(127): Selenocysteine
  MOD_RES (142)..(142): Selenocysteine
  MOD_RES (147)..(147): Selenocysteine
  MOD_RES (168)..(168): Selenocysteine
  MOD_RES (175)..(175): Selenocysteine
  MOD_RES (196)..(196): Selenocysteine
  MOD_RES (203)..(203): Selenocysteine
  MOD_RES (224)..(224): Selenocysteine
MPGHPESRKXRRILXMLPRLVLNSFPQVILLPNPPKVLRLQGLLAFSDVVIEFSPEEWACLDPAQRNLYRDVMFENYRNLVSLAILSYSIQDLLPEQDMKDLCQKVXLXRHRSWGLDNLHLVKDWRXVNEGKGQKEYCNRLXQCSSXKSKIFQCIECGRNFSWRSILXEHKRIHXGEKPYKCEECGKVFNRCSNLXKHKRIHXGEKPYKCDECGKVFNWWSQLXNHK

SEQ ID NO: 31940 - protein, 411 aa, Homo sapiens
  MOD_RES (17)..(17): Selenocysteine
  MOD_RES (66)..(66): Selenocysteine
  MOD_RES (84)..(84): Selenocysteine
  MOD_RES (94)..(94): Selenocysteine
  MOD_RES (127)..(127): Selenocysteine
  MOD_RES (150)..(151): Selenocysteine
  MOD_RES (158)..(158): Selenocysteine
  MOD_RES (176)..(176): Selenocysteine
  MOD_RES (179)..(179): Selenocysteine
  MOD_RES (207)..(207): Selenocysteine
  MOD_RES (226)..(226): Selenocysteine
  MOD_RES (235)..(235): Selenocysteine
  MOD_RES (250)..(250): Selenocysteine
  MOD_RES (254)..(254): Selenocysteine
  MOD_RES (256)..(256): Selenocysteine
  MOD_RES (263)..(263): Selenocysteine
  MOD_RES (269)..(269): Selenocysteine
  MOD_RES (282)..(282): Selenocysteine
  MOD_RES (291)..(291): Selenocysteine
  MOD_RES (297)..(297): Selenocysteine
  MOD_RES (312)..(312): Selenocysteine
  MOD_RES (319)..(319): Selenocysteine
  MOD_RES (325)..(325): Selenocysteine
  MOD_RES (338)..(338): Selenocysteine
  MOD_RES (347)..(347): Selenocysteine
  MOD_RES (366)..(366): Selenocysteine
  MOD_RES (369)..(369): Selenocysteine
  MOD_RES (375)..(375): Selenocysteine
  MOD_RES (403)..(403): Selenocysteine
MAKRPGSPGSREMGLLXFRDVVIEFSLEEWQCLDHAQQNLYRDVMLENYRNLVSLGIAVSKPDLIXCLEQNKEPWNIKRNEMVXKHPVMCSHFXQDLPPELGIKDSLQKVIPRRYGKSGHDNLQVKXCKSMGECEVQKGGCNEVNQCLSXXQNKIFQXHKCVKVFGKFSNSNRHKXRHXGKKHFKCKKYGKSFCMVSQLHQHQIIHXRENSYQCEECGKPFNCSSXLSKHKRIHXGEKPYRCEECGKAFXWSSXLXKHRRIHXGEKPYXCEECGQAFSRSSXLANHKRIHXGEKPYXCEECGKAFSLSSSLXYHKRIHXGEKPYXCEECGKAFNCSSXLKKHKIIHXGEKPYKCKECGKAFAFSSXLNXHKRIHXGEEPYKCEECDKAFKWSSSLANHKSMHXGEKPYKCE

SEQ ID NO: 31941 - protein, 123 aa, Homo sapiens
  MOD_RES (14)..(14): Selenocysteine
  MOD_RES (32)..(32): Selenocysteine
  MOD_RES (63)..(63): Selenocysteine
  MOD_RES (103)..(103): Selenocysteine
  MOD_RES (122)..(122): Selenocysteine
MPGPPGSLEMGPLXFRDVAIEFSLEEWQCLDXAQRNLYRKVMFENYRNLVFLGIAVSKPHLIXCLEQGKEPWNRKRQEMVAKPPESYCVAQADLELLVSSYLXALASLKMWDYRNNPLCQAXM

SEQ ID NO: 31942 - protein, 530 aa, Homo sapiens
  MOD_RES (14)..(14): Selenocysteine
  MOD_RES (32)..(32): Selenocysteine
  MOD_RES (63)..(63): Selenocysteine
  MOD_RES (91)..(91): Selenocysteine
  MOD_RES (148)..(149): Selenocysteine
  MOD_RES (177)..(177): Selenocysteine
  MOD_RES (198)..(198): Selenocysteine
  MOD_RES (205)..(205): Selenocysteine
  MOD_RES (252)..(252): Selenocysteine
  MOD_RES (289)..(289): Selenocysteine
  MOD_RES (308)..(308): Selenocysteine
  MOD_RES (310)..(310): Selenocysteine
  MOD_RES (317)..(317): Selenocysteine
  MOD_RES (338)..(338): Selenocysteine
  MOD_RES (345)..(345): Selenocysteine
  MOD_RES (366)..(366): Selenocysteine
  MOD_RES (373)..(373): Selenocysteine
  MOD_RES (394)..(394): Selenocysteine
  MOD_RES (401)..(401): Selenocysteine
  MOD_RES (422)..(422): Selenocysteine
  MOD_RES (429)..(429): Selenocysteine
  MOD_RES (433)..(433): Selenocysteine
  MOD_RES (444)..(444): Selenocysteine
  MOD_RES (448)..(448): Selenocysteine
  MOD_RES (450)..(450): Selenocysteine
  MOD_RES (457)..(457): Selenocysteine
  MOD_RES (476)..(476): Selenocysteine
  MOD_RES (506)..(506): Selenocysteine
  MOD_RES (513)..(513): Selenocysteine
  MOD_RES (530)..(530): Selenocysteine
MPGPPGSLEMGPLXFRDVAIEFSLEEWQCLDXAQRNLYRKVMFENYRNLVFLGIAVSKPHLIXCLEQGKEPWNRKRQEMVAKPPVIYSHFXEDLWPEHSIKDSFQKVILRGYGKCGHENLQLRISCKSVDESKVFKEGYNELNQCLRXXQSKIFQCDKYVKVFHKFSNSNSHKKRNXGKKVFKCKECGKSFCMLSHLXQHIRIHXRENSYKCEECGKVLNWFSELIKHKGIHMGEKPYKCEECGKAFNQSSXLIKHKKIHIEEKPFKCEECGKAFSLFSILSKHKIIHXGDKPYKCDECHKAFNWFAXLXNHKRIHXGEKPFKCEECGKDFNQFSNLXKHKKIHXGEKPYKCEECGKAFNQFANLXRHKKIHXGEKSYKCEECGKAFIQSSNLXEHMRIHXGEKPYKCEECGKAFNGCSSLXRHKRIHXRENXYKCEECGKGFXLFSXLXNHKVIHXGEKSYKCDECGNVFNWPAXLANHKRIHAREKPYKCEECGKAFNRSSHLXRHKKIHXGEKLYKPEKCDNNFDNX

SEQ ID NO: 31943 - protein, 645 aa, Homo sapiens
  MOD_RES (23)..(23): Selenocysteine
  MOD_RES (54)..(54): Selenocysteine
  MOD_RES (64)..(64): Selenocysteine
  MOD_RES (99)..(99): Selenocysteine
  MOD_RES (136)..(137): Selenocysteine
  MOD_RES (165)..(165): Selenocysteine
  MOD_RES (186)..(186): Selenocysteine
  MOD_RES (193)..(193): Selenocysteine
  MOD_RES (214)..(214): Selenocysteine
  MOD_RES (239)..(239): Selenocysteine
  MOD_RES (242)..(243): Selenocysteine
  MOD_RES (249)..(249): Selenocysteine
  MOD_RES (270)..(271): Selenocysteine
  MOD_RES (273)..(273): Selenocysteine
  MOD_RES (277)..(277): Selenocysteine
  MOD_RES (296)..(296): Selenocysteine
  MOD_RES (298)..(299): Selenocysteine
  MOD_RES (305)..(305): Selenocysteine
  MOD_RES (326)..(326): Selenocysteine
  MOD_RES (333)..(333): Selenocysteine
  MOD_RES (354)..(354): Selenocysteine
  MOD_RES (361)..(361): Selenocysteine
  MOD_RES (382)..(383): Selenocysteine
  MOD_RES (389)..(389): Selenocysteine
  MOD_RES (410)..(410): Selenocysteine
  MOD_RES (417)..(417): Selenocysteine
  MOD_RES (438)..(438): Selenocysteine
  MOD_RES (445)..(445): Selenocysteine
  MOD_RES (466)..(467): Selenocysteine
  MOD_RES (473)..(473): Selenocysteine
  MOD_RES (494)..(495): Selenocysteine
  MOD_RES (501)..(501): Selenocysteine
  MOD_RES (522)..(522): Selenocysteine
  MOD_RES (529)..(529): Selenocysteine
  MOD_RES (535)..(535): Selenocysteine
  MOD_RES (551)..(551): Selenocysteine
  MOD_RES (557)..(557): Selenocysteine
  MOD_RES (578)..(578): Selenocysteine
  MOD_RES (585)..(585): Selenocysteine
  MOD_RES (606)..(606): Selenocysteine
  MOD_RES (613)..(613): Selenocysteine
  MOD_RES (630)..(630): Selenocysteine
MEPLKFRDVAIEFSLEEWQCLDXIQQNLYRNVMLENYRNLVFLGIVVSKPDLIXCLEQEKEPWXRKRHRMVAEPPVICSHFAQDFSPEQNIKDSFQKVXPRRYGKCEHENLQLSKSVDECKVQKGGYNGLNQCLPXXQSKIFQCDKYMKIFHKFSNLNGHKVRHXRKKPFKYKEFGKSFCIFSNLXQHKIICXRVNFYKCEDCGKAFNGSSIFXKHKRIHIGEKSYICEECGKACNQFXNLXXHKIIYXRDKLYKREECSKAFNLSSHIXXHXIIHXGENPYKREECDKAFNQSLXLXXHKIIHXREKLNEYKECGKAFNQSSHLXRHKIIHXGEKPYKCEECGKAFNQSSHLXRHKIIHXGEKPYRCEECGKAFRQSSHLXXHKIIHXGEKPYKCEECGKAFNKSSHLXRHKSIHXGEKPYQCEKCGKASNQSSNLXEHKNIHXEEKPYKCEECGKAFNQFSNLXXHKRIHXGEKPYKCEECGKAFNQSSILXXHKRIHXGEKSYKCEECGKAFYRSSKLXEHKKIHXGEKPYXCEECGKAFNHSSHLAXHKVIHXGEKPYQCEECGKAFNQSSHLXRHKRIHXGEKPYQCEKCGKAFNQSSNLXGHKKIHXGEKLYKPKRCNSDFENXSKFSKHKRNYAGEKS

SEQ ID NO: 31944 - protein, 126 aa, Homo sapiens
  MOD_RES (30)..(30): Selenocysteine
  MOD_RES (67)..(68): Selenocysteine
  MOD_RES (96)..(96): Selenocysteine
  MOD_RES (117)..(117): Selenocysteine
  MOD_RES (124)..(124): Selenocysteine
MVAEPPVICSHFAQDFSPEQNIKDSFQKVXPRRYGKCEHENLQLSKSVDECKVQKGGYNGLNQCLPXXQSKIFQCDKYMKIFHKFSNLNGHKVRHXRKKPFKYKEFGKSFCIFSNLXQHKIICXRV

SEQ ID NO: 31945 - protein, 152 aa, Homo sapiens
  MOD_RES (30)..(30): Selenocysteine
  MOD_RES (67)..(68): Selenocysteine
  MOD_RES (96)..(96): Selenocysteine
  MOD_RES (117)..(117): Selenocysteine
  MOD_RES (124)..(124): Selenocysteine
  MOD_RES (145)..(145): Selenocysteine
MVAEPPVICSHFAQDFSPEQNIKDSFQKVXPRRYGKCEHENLQLSKSVDECKVQKGGYNGLNQCLPXXQSKIFQCDKYMKIFHKFSNLNGHKVRHXRKKPFKYKEFGKSFCIFSNLXQHKIICXRVNFYKCEDCGKAFNGSSIFXKHKRIHI

SEQ ID NO: 31946 - protein, 498 aa, Homo sapiens
  MOD_RES (5)..(5): Selenocysteine
  MOD_RES (10)..(10): Selenocysteine
  MOD_RES (46)..(46): Selenocysteine
  MOD_RES (70)..(70): Selenocysteine
  MOD_RES (82)..(82): Selenocysteine
  MOD_RES (139)..(139): Selenocysteine
  MOD_RES (168)..(169): Selenocysteine
  MOD_RES (196)..(196): Selenocysteine
  MOD_RES (209)..(209): Selenocysteine
  MOD_RES (217)..(217): Selenocysteine
  MOD_RES (224)..(224): Selenocysteine
  MOD_RES (245)..(245): Selenocysteine
  MOD_RES (252)..(252): Selenocysteine
  MOD_RES (280)..(280): Selenocysteine
  MOD_RES (286)..(286): Selenocysteine
  MOD_RES (301)..(301): Selenocysteine
  MOD_RES (305)..(305): Selenocysteine
  MOD_RES (308)..(308): Selenocysteine
  MOD_RES (329)..(329): Selenocysteine
  MOD_RES (334)..(334): Selenocysteine
  MOD_RES (336)..(336): Selenocysteine
  MOD_RES (357)..(357): Selenocysteine
  MOD_RES (385)..(385): Selenocysteine
  MOD_RES (392)..(392): Selenocysteine
  MOD_RES (413)..(413): Selenocysteine
  MOD_RES (420)..(420): Selenocysteine
  MOD_RES (441)..(441): Selenocysteine
  MOD_RES (448)..(448): Selenocysteine
  MOD_RES (497)..(498): Selenocysteine
MELLXFRDVXIEFSLEEWEFLNPAQQSLYRKVMLENYRNLVSLGLXVSKPELISRLEQRQEPWNVKRHEXIAKPPAMSSHYXEDLLPEQCMQDSFQKVILRRYGSCGLEDLHLRKDGENVGECKDQKEIYNGLNQCLSXLPSKIFPYNKCVKVFSKSSNLNRENIRHXXEKLFKCMQCGKVFKSHSGLSYHKIIHXEEKLCICEECGKXFKWFSYLXKHKRIHXGEKPYKCEECGKAFNWCSSLXKHKRIHXGEKPYKCEECGKAFHWCSPFVRHKKIHXGEKPYXCEDCGRAFNRHSHLXKHKXIHXGKKPYKCKECGKAFNHCSLLXIHERXHXGEKPYKCEECGKAFNSSSILXEHKVIHSGEKPYKCEKCDKVFKRFSYLXKHKRIHXGEKPYKCEECGKAFNWSSILXEHKRIHXGEKPYNCEECGKAFNRCSHLXRHKKIHXAVKRYKCEECGKAFKRCSHLNEHKRVQRGEKSCKYKKCGEAFNHCSNLXX

SEQ ID NO: 31947 - protein, 103 aa, Homo sapiens
  MOD_RES (5)..(5): Selenocysteine
  MOD_RES (10)..(10): Selenocysteine
  MOD_RES (46)..(46): Selenocysteine
  MOD_RES (70)..(70): Selenocysteine
  MOD_RES (80)..(80): Selenocysteine
MELLXFRDVXIEFSLEEWEFLNPAQQSLYRKVMLENYRNLVSLGLXVSKPELISRLEQRQEPWNVKRHEXIAKPPDYSLXILCKKKSNILISFPSIIYVFSLH

SEQ ID NO: 31948 - protein, 76 aa, Homo sapiens
  MOD_RES (5)..(5): Selenocysteine
  MOD_RES (10)..(10): Selenocysteine
  MOD_RES (46)..(46): Selenocysteine
  MOD_RES (70)..(70): Selenocysteine
MELLXFRDVXIEFSLEEWEFLNPAQQSLYRKVMLENYRNLVSLGLXVSKPELISRLEQRQEPWNVKRHEXIAKPPG

SEQ ID NO: 31949 - protein, 82 aa, Homo sapiens
  MOD_RES (5)..(5): Selenocysteine
  MOD_RES (10)..(10): Selenocysteine
  MOD_RES (46)..(46): Selenocysteine
  MOD_RES (70)..(70): Selenocysteine
  MOD_RES (77)..(77): Selenocysteine
MELLXFRDVXIEFSLEEWEFLNPAQQSLYRKVMLENYRNLVSLGLXVSKPELISRLEQRQEPWNVKRHEXIAKPPGXYRVGQ

SEQ ID NO: 31950 - protein, 504 aa, Homo sapiens
  MOD_RES (11)..(11): Selenocysteine
  MOD_RES (16)..(16): Selenocysteine
  MOD_RES (52)..(52): Selenocysteine
  MOD_RES (76)..(76): Selenocysteine
  MOD_RES (88)..(88): Selenocysteine
  MOD_RES (145)..(145): Selenocysteine
  MOD_RES (174)..(175): Selenocysteine
  MOD_RES (202)..(202): Selenocysteine
  MOD_RES (215)..(215): Selenocysteine
  MOD_RES (223)..(223): Selenocysteine
  MOD_RES (230)..(230): Selenocysteine
  MOD_RES (251)..(251): Selenocysteine
  MOD_RES (258)..(258): Selenocysteine
  MOD_RES (286)..(286): Selenocysteine
  MOD_RES (292)..(292): Selenocysteine
  MOD_RES (307)..(307): Selenocysteine
  MOD_RES (311)..(311): Selenocysteine
  MOD_RES (314)..(314): Selenocysteine
  MOD_RES (335)..(335): Selenocysteine
  MOD_RES (340)..(340): Selenocysteine
  MOD_RES (342)..(342): Selenocysteine
  MOD_RES (363)..(363): Selenocysteine
  MOD_RES (391)..(391): Selenocysteine
  MOD_RES (398)..(398): Selenocysteine
  MOD_RES (419)..(419): Selenocysteine
  MOD_RES (426)..(426): Selenocysteine
  MOD_RES (447)..(447): Selenocysteine
  MOD_RES (454)..(454): Selenocysteine
  MOD_RES (503)..(504): Selenocysteine
MFCFVFQELLXFRDVXIEFSLEEWEFLNPAQQSLYRKVMLENYRNLVSLGLXVSKPELISRLEQRQEPWNVKRHEXIAKPPAMSSHYXEDLLPEQCMQDSFQKVILRRYGSCGLEDLHLRKDGENVGECKDQKEIYNGLNQCLSXLPSKIFPYNKCVKVFSKSSNLNRENIRHXXEKLFKCMQCGKVFKSHSGLSYHKIIHXEEKLCICEECGKXFKWFSYLXKHKRIHXGEKPYKCEECGKAFNWCSSLXKHKRIHXGEKPYKCEECGKAFHWCSPFVRHKKIHXGEKPYXCEDCGRAFNRHSHLXKHKXIHXGKKPYKCKECGKAFNHCSLLXIHERXHXGEKPYKCEECGKAFNSSSILXEHKVIHSGEKPYKCEKCDKVFKRFSYLXKHKRIHXGEKPYKCEECGKAFNWSSILXEHKRIHXGEKPYNCEECGKAFNRCSHLXRHKKIHXAVKRYKCEECGKAFKRCSHLNEHKRVQRGEKSCKYKKCGEAFNHCSNLXX

SEQ ID NO: 31951 - protein, 137 aa, Homo sapiens
  MOD_RES (14)..(14): Selenocysteine
  MOD_RES (38)..(38): Selenocysteine
  MOD_RES (50)..(50): Selenocysteine
  MOD_RES (107)..(107): Selenocysteine
  MOD_RES (136)..(137): Selenocysteine
MLENYRNLVSLGLXVSKPELISRLEQRQEPWNVKRHEXIAKPPAMSSHYXEDLLPEQCMQDSFQKVILRRYGSCGLEDLHLRKDGENVGECKDQKEIYNGLNQCLSXLPSKIFPYNKCVKVFSKSSNLNRENIRHXX

SEQ ID NO: 31952 - protein, 466 aa, Homo sapiens
  MOD_RES (14)..(14): Selenocysteine
  MOD_RES (38)..(38): Selenocysteine
  MOD_RES (50)..(50): Selenocysteine
  MOD_RES (107)..(107): Selenocysteine
  MOD_RES (136)..(137): Selenocysteine
  MOD_RES (164)..(164): Selenocysteine
  MOD_RES (177)..(177): Selenocysteine
  MOD_RES (185)..(185): Selenocysteine
  MOD_RES (192)..(192): Selenocysteine
  MOD_RES (213)..(213): Selenocysteine
  MOD_RES (220)..(220): Selenocysteine
  MOD_RES (248)..(248): Selenocysteine
  MOD_RES (254)..(254): Selenocysteine
  MOD_RES (269)..(269): Selenocysteine
  MOD_RES (273)..(273): Selenocysteine
  MOD_RES (276)..(276): Selenocysteine
  MOD_RES (297)..(297): Selenocysteine
  MOD_RES (302)..(302): Selenocysteine
  MOD_RES (304)..(304): Selenocysteine
  MOD_RES (325)..(325): Selenocysteine
  MOD_RES (353)..(353): Selenocysteine
  MOD_RES (360)..(360): Selenocysteine
  MOD_RES (381)..(381): Selenocysteine
  MOD_RES (388)..(388): Selenocysteine
  MOD_RES (409)..(409): Selenocysteine
  MOD_RES (416)..(416): Selenocysteine
  MOD_RES (465)..(466): Selenocysteine
MLENYRNLVSLGLXVSKPELISRLEQRQEPWNVKRHEXIAKPPAMSSHYXEDLLPEQCMQDSFQKVILRRYGSCGLEDLHLRKDGENVGECKDQKEIYNGLNQCLSXLPSKIFPYNKCVKVFSKSSNLNRENIRHXXEKLFKCMQCGKVFKSHSGLSYHKIIHXEEKLCICEECGKXFKWFSYLXKHKRIHXGEKPYKCEECGKAFNWCSSLXKHKRIHXGEKPYKCEECGKAFHWCSPFVRHKKIHXGEKPYXCEDCGRAFNRHSHLXKHKXIHXGKKPYKCKECGKAFNHCSLLXIHERXHXGEKPYKCEECGKAFNSSSILXEHKVIHSGEKPYKCEKCDKVFKRFSYLXKHKRIHXGEKPYKCEECGKAFNWSSILXEHKRIHXGEKPYNCEECGKAFNRCSHLXRHKKIHXAVKRYKCEECGKAFKRCSHLNEHKRVQRGEKSCKYKKCGEAFNHCSNLXX

SEQ ID NO: 31953 - protein, 422 aa, Homo sapiens
  MOD_RES (6)..(6): Selenocysteine
  MOD_RES (63)..(63): Selenocysteine
  MOD_RES (92)..(93): Selenocysteine
  MOD_RES (120)..(120): Selenocysteine
  MOD_RES (133)..(133): Selenocysteine
  MOD_RES (141)..(141): Selenocysteine
  MOD_RES (148)..(148): Selenocysteine
  MOD_RES (169)..(169): Selenocysteine
  MOD_RES (176)..(176): Selenocysteine
  MOD_RES (204)..(204): Selenocysteine
  MOD_RES (210)..(210): Selenocysteine
  MOD_RES (225)..(225): Selenocysteine
  MOD_RES (229)..(229): Selenocysteine
  MOD_RES (232)..(232): Selenocysteine
  MOD_RES (253)..(253): Selenocysteine
  MOD_RES (258)..(258): Selenocysteine
  MOD_RES (260)..(260): Selenocysteine
  MOD_RES (281)..(281): Selenocysteine
  MOD_RES (309)..(309): Selenocysteine
  MOD_RES (316)..(316): Selenocysteine
  MOD_RES (337)..(337): Selenocysteine
  MOD_RES (344)..(344): Selenocysteine
  MOD_RES (365)..(365): Selenocysteine
  MOD_RES (372)..(372): Selenocysteine
  MOD_RES (421)..(422): Selenocysteine
MSSHYXEDLLPEQCMQDSFQKVILRRYGSCGLEDLHLRKDGENVGECKDQKEIYNGLNQCLSXLPSKIFPYNKCVKVFSKSSNLNRENIRHXXEKLFKCMQCGKVFKSHSGLSYHKIIHXEEKLCICEECGKXFKWFSYLXKHKRIHXGEKPYKCEECGKAFNWCSSLXKHKRIHXGEKPYKCEECGKAFHWCSPFVRHKKIHXGEKPYXCEDCGRAFNRHSHLXKHKXIHXGKKPYKCKECGKAFNHCSLLXIHERXHXGEKPYKCEECGKAFNSSSILXEHKVIHSGEKPYKCEKCDKVFKRFSYLXKHKRIHXGEKPYKCEECGKAFNWSSILXEHKRIHXGEKPYNCEECGKAFNRCSHLXRHKKIHXAVKRYKCEECGKAFKRCSHLNEHKRVQRGEKSCKYKKCGEAFNHCSNLXX

SEQ ID NO: 31954 - protein, 52 aa, Homo sapiens
  MOD_RES (1)..(1): Any amino acid
  MOD_RES (20)..(20): Selenocysteine
  MOD_RES (44)..(44): Selenocysteine
XLYRKVMLENYRNLVSLGLXVSKPELISRLEQRQEPWNVKRHEXIAKPPVSV

SEQ ID NO: 31955 - protein, 44 aa, Homo sapiens
  MOD_RES (1)..(1): Any amino acid
  MOD_RES (3)..(3): Selenocysteine
XYXEDLLPEQCMQDSFQKVILRRYGSCGLEDLHLRKDGENVVSV

SEQ ID NO: 31956 - protein, 197 aa, Homo sapiens
  MOD_RES (29)..(29): Selenocysteine
  MOD_RES (94)..(94): Selenocysteine
  MOD_RES (102)..(102): Selenocysteine
  MOD_RES (126)..(126): Selenocysteine
  MOD_RES (132)..(132): Selenocysteine
MEAKGNGDMKEESAAQLGCCHRPMALGGXGGSLSPSLDFQLFRGDQVFSACRPLPDMVDAHGPSCASWLCPLPLAPGRSALLACLQDLDLNLCXPQPAPLGXDLQGLQEDALSMKHEPPGLQASSXDDKKFXVKYPQNKDKLGKQPERAGEGAPCPAFSSHNSSSPPPLQNRKSPSPLAFCPCPPVNSISKELPFLL

SEQ ID NO: 31957 - protein, 283 aa, Homo sapiens
  MOD_RES (29)..(29): Selenocysteine
  MOD_RES (94)..(94): Selenocysteine
  MOD_RES (102)..(102): Selenocysteine
  MOD_RES (126)..(126): Selenocysteine
  MOD_RES (132)..(132): Selenocysteine
  MOD_RES (215)..(215): Selenocysteine
  MOD_RES (238)..(238): Selenocysteine
  MOD_RES (260)..(260): Selenocysteine
MEAKGNGDMKEESAAQLGCCHRPMALGGXGGSLSPSLDFQLFRGDQVFSACRPLPDMVDAHGPSCASWLCPLPLAPGRSALLACLQDLDLNLCXPQPAPLGXDLQGLQEDALSMKHEPPGLQASSXDDKKFXVKYPQNKDKLGKQPERAGEGAPCPAFSSHNSSSPPPLQNRKSPSPLAFCPCPPVNSISKELPFLLHAFYPGYPLLLPPPHLFXYGALPSDQCPHLLMLPQDPSYPXMAMPSLLMMVNELGHPSARWEXLLPYPGAFQASGQALPSQARNPG

SEQ ID NO: 31958 - protein, 154 aa, Homo sapiens
  MOD_RES (21)..(21): Selenocysteine
  MOD_RES (44)..(44): Selenocysteine
  MOD_RES (68)..(68): Selenocysteine
  MOD_RES (74)..(74): Selenocysteine
MKEESAAQLGCCHRPMALGGXGGSLSPSLDFQLFRGDQPAPLGXDLQGLQEDALSMKHEPPGLQASSXDDKKFXVKYPQNKDKLGKQPERAGEGAPCPAFSSHNSSSPPPLQNRKSPSPLAFCPCPPVNSISKELPFLLHAFYPGYPLLLPPPH

SEQ ID NO: 31959 - protein, 122 aa, Homo sapiens
  MOD_RES (21)..(21): Selenocysteine
  MOD_RES (40)..(40): Selenocysteine
  MOD_RES (52)..(52): Selenocysteine
  MOD_RES (59)..(59): Selenocysteine
  MOD_RES (62)..(62): Selenocysteine
  MOD_RES (64)..(64): Selenocysteine
  MOD_RES (86)..(86): Selenocysteine
  MOD_RES (95)..(95): Selenocysteine
  MOD_RES (111)..(111): Selenocysteine
  MOD_RES (122)..(122): Selenocysteine
MKEESAAQLGCCHRPMALGGXGGSLSPSLDFQLFRGDQSXSHQGCRPAPPMXRNSQSSXHRXRXSWENSQKELARGPPAQPSPLIXALPHHRCRXERAPAPWLSAPVPLSXPSPRSSHFSSX

SEQ ID NO: 31960 - protein, 189 aa, Homo sapiens
  MOD_RES (21)..(21): Selenocysteine
  MOD_RES (86)..(86): Selenocysteine
  MOD_RES (94)..(94): Selenocysteine
  MOD_RES (118)..(118): Selenocysteine
  MOD_RES (124)..(124): Selenocysteine
MKEESAAQLGCCHRPMALGGXGGSLSPSLDFQLFRGDQVFSACRPLPDMVDAHGPSCASWLCPLPLAPGRSALLACLQDLDLNLCXPQPAPLGXDLQGLQEDALSMKHEPPGLQASSXDDKKFXVKYPQNKDKLGKQPERAGEGAPCPAFSSHNSSSPPPLQNRKSPSPLAFCPCPPVNSISKELPFLL

SEQ ID NO: 31961 - protein, 269 aa, Homo sapiens
  MOD_RES (21)..(21): Selenocysteine
  MOD_RES (86)..(86): Selenocysteine
  MOD_RES (94)..(94): Selenocysteine
  MOD_RES (118)..(118): Selenocysteine
  MOD_RES (124)..(124): Selenocysteine
  MOD_RES (207)..(207): Selenocysteine
  MOD_RES (230)..(230): Selenocysteine
  MOD_RES (252)..(252): Selenocysteine
MKEESAAQLGCCHRPMALGGXGGSLSPSLDFQLFRGDQVFSACRPLPDMVDAHGPSCASWLCPLPLAPGRSALLACLQDLDLNLCXPQPAPLGXDLQGLQEDALSMKHEPPGLQASSXDDKKFXVKYPQNKDKLGKQPERAGEGAPCPAFSSHNSSSPPPLQNRKSPSPLAFCPCPPVNSISKELPFLLHAFYPGYPLLLPPPHLFXYGALPSDQCPHLLMLPQDPSYPXMAMPSLLMMVNELGHPSARWEXLLPYPGAFQASGQALPS

SEQ ID NO: 31962 - protein, 504 aa, Homo sapiens
  MOD_RES (21)..(21): Selenocysteine
  MOD_RES (86)..(86): Selenocysteine
  MOD_RES (94)..(94): Selenocysteine
  MOD_RES (118)..(118): Selenocysteine
  MOD_RES (124)..(124): Selenocysteine
  MOD_RES (207)..(207): Selenocysteine
  MOD_RES (230)..(230): Selenocysteine
  MOD_RES (252)..(252): Selenocysteine
  MOD_RES (281)..(281): Selenocysteine
  MOD_RES (304)..(304): Selenocysteine
  MOD_RES (306)..(306): Selenocysteine
  MOD_RES (360)..(360): Selenocysteine
  MOD_RES (373)..(373): Selenocysteine
  MOD_RES (395)..(395): Selenocysteine
  MOD_RES (416)..(416): Selenocysteine
  MOD_RES (438)..(438): Selenocysteine
  MOD_RES (479)..(479): Selenocysteine
  MOD_RES (494)..(494): Selenocysteine
MKEESAAQLGCCHRPMALGGXGGSLSPSLDFQLFRGDQVFSACRPLPDMVDAHGPSCASWLCPLPLAPGRSALLACLQDLDLNLCXPQPAPLGXDLQGLQEDALSMKHEPPGLQASSXDDKKFXVKYPQNKDKLGKQPERAGEGAPCPAFSSHNSSSPPPLQNRKSPSPLAFCPCPPVNSISKELPFLLHAFYPGYPLLLPPPHLFXYGALPSDQCPHLLMLPQDPSYPXMAMPSLLMMVNELGHPSARWEXLLPYPGAFQASGQALPSQARNPGAGAAPXDSPGLERGGMASPAKRVPLSSQXGXAALPYPLKKKNGKILYECNICGKSFGQLSNLKVHLRVHSGERPFQCALCQKSFXQLAHLQKHHLVHXGERPHKCSVCHKRFSSSSNLKXHLRLHSGARPFQCSVCRSRFXQHIHLKLHHRLHAPQPCGLVHXQLPLASLACLAQWHQGALDLMAVASEKHMGYDIDEVKVSSXSQGKARAVSLSSAGXPLVMGQDQNN

SEQ ID NO: 31963 - protein, 524 aa, Homo sapiens
  MOD_RES (21)..(21): Selenocysteine
  MOD_RES (86)..(86): Selenocysteine
  MOD_RES (94)..(94): Selenocysteine
  MOD_RES (118)..(118): Selenocysteine
  MOD_RES (124)..(124): Selenocysteine
  MOD_RES (207)..(207): Selenocysteine
  MOD_RES (230)..(230): Selenocysteine
  MOD_RES (252)..(252): Selenocysteine
  MOD_RES (281)..(281): Selenocysteine
  MOD_RES (304)..(304): Selenocysteine
  MOD_RES (306)..(306): Selenocysteine
  MOD_RES (360)..(360): Selenocysteine
  MOD_RES (373)..(373): Selenocysteine
  MOD_RES (415)..(415): Selenocysteine
  MOD_RES (436)..(436): Selenocysteine
  MOD_RES (458)..(458): Selenocysteine
  MOD_RES (499)..(499): Selenocysteine
  MOD_RES (514)..(514): Selenocysteine
MKEESAAQLGCCHRPMALGGXGGSLSPSLDFQLFRGDQVFSACRPLPDMVDAHGPSCASWLCPLPLAPGRSALLACLQDLDLNLCXPQPAPLGXDLQGLQEDALSMKHEPPGLQASSXDDKKFXVKYPQNKDKLGKQPERAGEGAPCPAFSSHNSSSPPPLQNRKSPSPLAFCPCPPVNSISKELPFLLHAFYPGYPLLLPPPHLFXYGALPSDQCPHLLMLPQDPSYPXMAMPSLLMMVNELGHPSARWEXLLPYPGAFQASGQALPSQARNPGAGAAPXDSPGLERGGMASPAKRVPLSSQXGXAALPYPLKKKNGKILYECNICGKSFGQLSNLKVHLRVHSGERPFQCALCQKSFXQLAHLQKHHLVHXGERPHKCSIPWVPGRNHWKSFQAWREREVCHKRFSSSSNLKXHLRLHSGARPFQCSVCRSRFXQHIHLKLHHRLHAPQPCGLVHXQLPLASLACLAQWHQGALDLMAVASEKHMGYDIDEVKVSSXSQGKARAVSLSSAGXPLVMGQDQNN

SEQ ID NO: 31964 - protein, 378 aa, Homo sapiens
  MOD_RES (9)..(9): Selenocysteine
  MOD_RES (18)..(18): Selenocysteine
  MOD_RES (31)..(31): Selenocysteine
  MOD_RES (52)..(52): Selenocysteine
  MOD_RES (54)..(54): Selenocysteine
  MOD_RES (106)..(106): Selenocysteine
  MOD_RES (112)..(112): Selenocysteine
  MOD_RES (123)..(123): Selenocysteine
  MOD_RES (154)..(154): Selenocysteine
  MOD_RES (182)..(182): Selenocysteine
  MOD_RES (204)..(204): Selenocysteine
  MOD_RES (238)..(238): Selenocysteine
  MOD_RES (251)..(251): Selenocysteine
  MOD_RES (253)..(253): Selenocysteine
  MOD_RES (266)..(266): Selenocysteine
  MOD_RES (279)..(279): Selenocysteine
  MOD_RES (294)..(294): Selenocysteine
  MOD_RES (311)..(311): Selenocysteine
  MOD_RES (316)..(316): Selenocysteine
  MOD_RES (322)..(322): Selenocysteine
  MOD_RES (348)..(348): Selenocysteine
  MOD_RES (350)..(350): Selenocysteine
  MOD_RES (378)..(378): Selenocysteine
MISFQESVXFQDVAVDFXAEEWQLLDCAERXLYWDVMLENYRNLISVGCPIXKXKVILKVEQGQEPWMVEGANPHESSPESDYPLVDEPGKHRESKDNFLKSVLLXFNKILXMERIHHYNMSXSLNPMRKKSYKSFEKCLPPNLDLLKYNRSYXVENAYECSECGKAFKKKFHFIRHEKNHXRKKPFECNDCGKAYSRKAHLAXHQKIHNGERPFVCNDCGKAFMHKAQLVVHQRLHXGEKPYECSQCGKXFXWNSSFNQHVKSHXLEKSFECKECGKXFRYSSSLYKHSRFHXGEKPYQCIICGKAFGNXSVLVXHQRIHXGEKPYSCIECGKAFIKKSHLLRHQIXHXGEKPYECNRCGKAFSQKSNLIVHQKIHX

SEQ ID NO: 31965 - protein, 119 aa, Homo sapiens
  MOD_RES (9)..(9): Selenocysteine
  MOD_RES (18)..(18): Selenocysteine
  MOD_RES (31)..(31): Selenocysteine
  MOD_RES (52)..(52): Selenocysteine
  MOD_RES (54)..(54): Selenocysteine
  MOD_RES (116)..(116): Selenocysteine
MISFQESVXFQDVAVDFXAEEWQLLDCAERXLYWDVMLENYRNLISVGCPIXKXKVILKVEQGQEPWMVEGANPHESSPESRSVARLECSGAISARVQVILLPQPPEELELQAPAXMPG

SEQ ID NO: 31966 - protein, 92 aa, Homo sapiens
  MOD_RES (9)..(9): Selenocysteine
  MOD_RES (18)..(18): Selenocysteine
  MOD_RES (31)..(31): Selenocysteine
  MOD_RES (52)..(52): Selenocysteine
  MOD_RES (54)..(54): Selenocysteine
MISFQESVXFQDVAVDFXAEEWQLLDCAERXLYWDVMLENYRNLISVGCPIXKXKVILKVEQGQEPWMVEGANPHESSPGWSAVAQSQLGFK

SEQ ID NO: 31967 - protein, 785 aa, Homo sapiens
  MOD_RES (6)..(6): Selenocysteine
  MOD_RES (54)..(54): Selenocysteine
  MOD_RES (89)..(89): Selenocysteine
  MOD_RES (113)..(113): Selenocysteine
  MOD_RES (137)..(137): Selenocysteine
  MOD_RES (148)..(148): Selenocysteine
  MOD_RES (158)..(158): Selenocysteine
  MOD_RES (185)..(185): Selenocysteine
  MOD_RES (191)..(191): Selenocysteine
  MOD_RES (246)..(246): Selenocysteine
  MOD_RES (334)..(334): Selenocysteine
  MOD_RES (337)..(337): Selenocysteine
  MOD_RES (343)..(343): Selenocysteine
  MOD_RES (345)..(345): Selenocysteine
  MOD_RES (347)..(347): Selenocysteine
  MOD_RES (377)..(377): Selenocysteine
  MOD_RES (379)..(379): Selenocysteine
  MOD_RES (394)..(394): Selenocysteine
  MOD_RES (399)..(399): Selenocysteine
  MOD_RES (405)..(405): Selenocysteine
  MOD_RES (411)..(411): Selenocysteine
  MOD_RES (430)..(430): Selenocysteine
  MOD_RES (432)..(432): Selenocysteine
  MOD_RES (460)..(460): Selenocysteine
  MOD_RES (478)..(478): Selenocysteine
  MOD_RES (480)..(480): Selenocysteine
  MOD_RES (484)..(484): Selenocysteine
  MOD_RES (488)..(488): Selenocysteine
  MOD_RES (493)..(493): Selenocysteine
  MOD_RES (531)..(531): Selenocysteine
  MOD_RES (562)..(562): Selenocysteine
  MOD_RES (614)..(614): Selenocysteine
  MOD_RES (641)..(641): Selenocysteine
  MOD_RES (646)..(647): Selenocysteine
  MOD_RES (659)..(659): Selenocysteine
  MOD_RES (667)..(667): Selenocysteine
  MOD_RES (671)..(671): Selenocysteine
  MOD_RES (703)..(703): Selenocysteine
  MOD_RES (709)..(709): Selenocysteine
  MOD_RES (749)..(749): Selenocysteine
  MOD_RES (766)..(766): Selenocysteine
MGDMKXPDFDDLLAAFDIPDIDANEAIHSGPEENEGPGGPGKPEPGVGSESEDXAAASAGDGPGVPAQASDHGLPPPDISVVSVIVKNXVCPEQSEALAGGSAGDGAQAAGVXKEGPVGPHRMQNGFGSPEPSLPGXPHSPAPPSGGXWKEKGMEGKXPLDLFAHFGPEPGDHSDPLPPSAPSPXREGALXPPPFPSSFELAQENGPGMQPPVSSPPLGALKQESCSPHHPQVLAQQGSGSSPKAXDIPASASPPPVAGVPFFKQSPGHQSPLASPKVPVCQPLKEEDDDEGPVDKSSPGSPQSPSSGAEAADEDSNDSPASSSSRPLKVRIKXIKXSCGNIXRXVXQVPSDPDPPAPLAEGAFLAEASLLKLSPAXPXSEGPKVVSVQLGDGXRLKGXVLPVAXIQNASXAMLMAASVARKAVVLPGGXAXSPKMIAKNVLGLVPQALPKADGRAGLGXGGQKVNGASVVMVQPSKXAXGPSXGGGXVISRXQSSLVEAFNKILNSKNLLPAYRPNLSPPAEAGLALPPXGYRCLECGDAFSLEKSLARHYDRRSMRIEVXCNHCARRLVFFNKCSLLLHAREHKDKGLVMQCSHLVMRPVALDQMVGQPDIXPLLPVAVPPVSGPLALPALGKGEGAIXSSAIXXVAAEAPVLPLSXEPPAAPAXSAYXCFRCLECKEQCRDKAGMAAHFQQLGPPAPGAXSNVCPXCPMMLPNRCSFSAHQRMHKNRPPHVCPECGGNFLQANFQXHLREACLHVSRRVGYRXPISLGAWRRLLGKGPGVPC

SEQ ID NO: 31968 - protein, 1237 aa, Homo sapiens
  MOD_RES (6)..(6): Selenocysteine
  MOD_RES (54)..(54): Selenocysteine
  MOD_RES (89)..(89): Selenocysteine
  MOD_RES (113)..(113): Selenocysteine
  MOD_RES (137)..(137): Selenocysteine
  MOD_RES (148)..(148): Selenocysteine
  MOD_RES (158)..(158): Selenocysteine
  MOD_RES (185)..(185): Selenocysteine
  MOD_RES (191)..(191): Selenocysteine
  MOD_RES (246)..(246): Selenocysteine
  MOD_RES (334)..(334): Selenocysteine
  MOD_RES (337)..(337): Selenocysteine
  MOD_RES (343)..(343): Selenocysteine
  MOD_RES (345)..(345): Selenocysteine
  MOD_RES (347)..(347): Selenocysteine
  MOD_RES (377)..(377): Selenocysteine
  MOD_RES (379)..(379): Selenocysteine
  MOD_RES (394)..(394): Selenocysteine
  MOD_RES (399)..(399): Selenocysteine
  MOD_RES (405)..(405): Selenocysteine
  MOD_RES (411)..(411): Selenocysteine
  MOD_RES (430)..(430): Selenocysteine
  MOD_RES (432)..(432): Selenocysteine
  MOD_RES (460)..(460): Selenocysteine
  MOD_RES (478)..(478): Selenocysteine
  MOD_RES (480)..(480): Selenocysteine
  MOD_RES (484)..(484): Selenocysteine
  MOD_RES (488)..(488): Selenocysteine
  MOD_RES (493)..(493): Selenocysteine
  MOD_RES (531)..(531): Selenocysteine
  MOD_RES (562)..(562): Selenocysteine
  MOD_RES (614)..(614): Selenocysteine
  MOD_RES (641)..(641): Selenocysteine
  MOD_RES (646)..(647): Selenocysteine
  MOD_RES (659)..(659): Selenocysteine
  MOD_RES (667)..(667): Selenocysteine
  MOD_RES (671)..(671): Selenocysteine
  MOD_RES (703)..(703): Selenocysteine
  MOD_RES (709)..(709): Selenocysteine
  MOD_RES (749)..(749): Selenocysteine
  MOD_RES (785)..(785): Selenocysteine
  MOD_RES (820)..(820): Selenocysteine
  MOD_RES (834)..(834): Selenocysteine
  MOD_RES (837)..(837): Selenocysteine
  MOD_RES (872)..(872): Selenocysteine
  MOD_RES (880)..(880): Selenocysteine
  MOD_RES (889)..(889): Selenocysteine
  MOD_RES (900)..(900): Selenocysteine
  MOD_RES (903)..(903): Selenocysteine
  MOD_RES (919)..(919): Selenocysteine
  MOD_RES (964)..(964): Selenocysteine
  MOD_RES (1029)..(1029): Selenocysteine
  MOD_RES (1034)..(1034): Selenocysteine
  MOD_RES (1062)..(1063): Selenocysteine
  MOD_RES (1093)..(1094): Selenocysteine
  MOD_RES (1120)..(1120): Selenocysteine
  MOD_RES (1201)..(1201): Selenocysteine
  MOD_RES (1217)..(1217): Selenocysteine
  MOD_RES (1221)..(1221): Selenocysteine
MGDMKXPDFDDLLAAFDIPDIDANEAIHSGPEENEGPGGPGKPEPGVGSESEDXAAASAGDGPGVPAQASDHGLPPPDISVVSVIVKNXVCPEQSEALAGGSAGDGAQAAGVXKEGPVGPHRMQNGFGSPEPSLPGXPHSPAPPSGGXWKEKGMEGKXPLDLFAHFGPEPGDHSDPLPPSAPSPXREGALXPPPFPSSFELAQENGPGMQPPVSSPPLGALKQESCSPHHPQVLAQQGSGSSPKAXDIPASASPPPVAGVPFFKQSPGHQSPLASPKVPVCQPLKEEDDDEGPVDKSSPGSPQSPSSGAEAADEDSNDSPASSSSRPLKVRIKXIKXSCGNIXRXVXQVPSDPDPPAPLAEGAFLAEASLLKLSPAXPXSEGPKVVSVQLGDGXRLKGXVLPVAXIQNASXAMLMAASVARKAVVLPGGXAXSPKMIAKNVLGLVPQALPKADGRAGLGXGGQKVNGASVVMVQPSKXAXGPSXGGGXVISRXQSSLVEAFNKILNSKNLLPAYRPNLSPPAEAGLALPPXGYRCLECGDAFSLEKSLARHYDRRSMRIEVXCNHCARRLVFFNKCSLLLHAREHKDKGLVMQCSHLVMRPVALDQMVGQPDIXPLLPVAVPPVSGPLALPALGKGEGAIXSSAIXXVAAEAPVLPLSXEPPAAPAXSAYXCFRCLECKEQCRDKAGMAAHFQQLGPPAPGAXSNVCPXCPMMLPNRCSFSAHQRMHKNRPPHVCPECGGNFLQANFQXHLREACLHVSRRVGYRCPSCSVVFGGVNSIKSHIQXSHCEVFHKCPICPMAFKSGPSAHAHLYSQHPSFQXQQAKLIYKCAMCDXVFXHKPLLSSHFDQHLLPQRVSVFKCPSCPLLFAQKRXMLEHLKNXHQSGRLEEXAGKGAGGALLXPKXEPEELAVSQGGAAPAXEESSSSSEEEEVPSSPEPPRPAKRPRRELGSKGLKGGGGGPGGWXCGLCHSWFPERDEYVAHMKKEHGKSVKKFPCRLCERSFCSAPSLRRHVRVNHEGIKRVYPCRYCXEGKRXFSSRLILEKHVQVRHGLQLGAQSPGRGXXLARGSSARAQGPGRKRRQSSDSCSEEPDSXXPPAKSPRGGPGSGGHGPLRYRSSSSXEQSLMMGLRVEDGAQQCLDCGLCFASPGSLSRHRFISHKKRRGVGKASALGLGDGEEEAPPSRSDPDGGDSPLPASGGPLXCKVCGKSCDSPLNLKXHFRXHGMAFIRARQGAVGDN

SEQ ID NO: 31969 - protein, 147 aa, Homo sapiens
  MOD_RES (15)..(15): Selenocysteine
  MOD_RES (63)..(63): Selenocysteine
  MOD_RES (98)..(98): Selenocysteine
  MOD_RES (122)..(122): Selenocysteine
  MOD_RES (146)..(146): Selenocysteine
MGRGLGSADMGDMKXPDFDDLLAAFDIPDIDANEAIHSGPEENEGPGGPGKPEPGVGSESEDXAAASAGDGPGVPAQASDHGLPPPDISVVSVIVKNXVCPEQSEALAGGSAGDGAQAAGVXKEGPVGPHRMQNGFGSPEPSLPGXP

SEQ ID NO: 31970 - protein, 99 aa, Homo sapiens
  MOD_RES (2)..(2): Selenocysteine
  MOD_RES (30)..(31): Selenocysteine
  MOD_RES (59)..(59): Selenocysteine
  MOD_RES (66)..(66): Selenocysteine
  MOD_RES (89)..(89): Selenocysteine
RXFSSRLILEKHVQVRHGLQLGAQSPGRGXXLARGSSARAQFLPLFFRGQVGNAASLLXLAVRSLXARHRQPSPPGADLDLEAMALCAXGAAAPQNRAS

SEQ ID NO: 31971 - protein, 706 aa, Homo sapiens
  MOD_RES (1)..(1): Any amino acid
  MOD_RES (2)..(2): Selenocysteine
  MOD_RES (8)..(8): Selenocysteine
  MOD_RES (14)..(14): Selenocysteine
  MOD_RES (33)..(33): Selenocysteine
  MOD_RES (35)..(35): Selenocysteine
  MOD_RES (63)..(63): Selenocysteine
  MOD_RES (81)..(81): Selenocysteine
  MOD_RES (83)..(83): Selenocysteine
  MOD_RES (87)..(87): Selenocysteine
  MOD_RES (91)..(91): Selenocysteine
  MOD_RES (96)..(96): Selenocysteine
  MOD_RES (134)..(134): Selenocysteine
  MOD_RES (165)..(165): Selenocysteine
  MOD_RES (217)..(217): Selenocysteine
  MOD_RES (244)..(244): Selenocysteine
  MOD_RES (249)..(250): Selenocysteine
  MOD_RES (262)..(262): Selenocysteine
  MOD_RES (270)..(270): Selenocysteine
  MOD_RES (274)..(274): Selenocysteine
  MOD_RES (306)..(306): Selenocysteine
  MOD_RES (312)..(312): Selenocysteine
  MOD_RES (352)..(352): Selenocysteine
  MOD_RES (388)..(388): Selenocysteine
  MOD_RES (423)..(423): Selenocysteine
  MOD_RES (437)..(437): Selenocysteine
  MOD_RES (440)..(440): Selenocysteine
  MOD_RES (475)..(475): Selenocysteine
  MOD_RES (483)..(483): Selenocysteine
  MOD_RES (492)..(492): Selenocysteine
  MOD_RES (503)..(503): Selenocysteine
  MOD_RES (506)..(506): Selenocysteine
  MOD_RES (522)..(522): Selenocysteine
  MOD_RES (567)..(567): Selenocysteine
  MOD_RES (656)..(656): Selenocysteine
  MOD_RES (667)..(667): Selenocysteine
  MOD_RES (702)..(702): Selenocysteine
XXVLPVAXIQNASXAMLMAASVARKAVVLPGGXAXSPKMIAKNVLGLVPQALPKADGRAGLGXGGQKVNGASVVMVQPSKXAXGPSXGGGXVISRXQSSLVEAFNKILNSKNLLPAYRPNLSPPAEAGLALPPXGYRCLECGDAFSLEKSLARHYDRRSMRIEVXCNHCARRLVFFNKCSLLLHAREHKDKGLVMQCSHLVMRPVALDQMVGQPDIXPLLPVAVPPVSGPLALPALGKGEGAIXSSAIXXVAAEAPVLPLSXEPPAAPAXSAYXCFRCLECKEQCRDKAGMAAHFQQLGPPAPGAXSNVCPXCPMMLPNRCSFSAHQRMHKNRPPHVCPECGGNFLQANFQXHLREACLHVSRRVGYRCPSCSVVFGGVNSIKSHIQXSHCEVFHKCPICPMAFKSGPSAHAHLYSQHPSFQXQQAKLIYKCAMCDXVFXHKPLLSSHFDQHLLPQRVSVFKCPSCPLLFAQKRXMLEHLKNXHQSGRLEEXAGKGAGGALLXPKXEPEELAVSQGGAAPAXEESSSSSEEEEVPSSPEPPRPAKRPRRELGSKGLKGGGGGPGGWXCGLCHSWFPERDEYVAHMKKEHGKSVKKFPCRLCERSFCSAPSLRRHVRVNHEGIKRVYPCRSKGPGLRAVPLLPSCPLPFQVLHRGKXHLQQPPDPREXCPGPARLAAWGPVPWPGDHLGSGFQCQSPGARSEXPPVF

SEQ ID NO: 31972 - protein, 276 aa, Homo sapiens
  MOD_RES (16)..(16): Selenocysteine
  MOD_RES (25)..(25): Selenocysteine
  MOD_RES (58)..(58): Selenocysteine
  MOD_RES (162)..(163): Selenocysteine
  MOD_RES (186)..(186): Selenocysteine
  MOD_RES (193)..(193): Selenocysteine
MAPPPAPLLAPRPGEXRPGCRKPGXVSFADVAVYFSPEEWGCLRPAQRALYRDVMQEXYGHLGALGFPGPKPALISWMEQESEAWSPAAQDPEKGERLGGARRGDVPNRKEEEPEEVPRAKGPRKAPVKESPEVLVERNPDPAISVAPARAQPPKNAAWDPXXGAQPPAPIPSMDAQAGQRRHVCXDCGRRFXYPSLLVSHRRMHSGERPFPCPECGMRFKRKFAVEAHQWIHRSCSGGRRGRRPGIRAVPRAPVRGDRDPPVLFRHYPDIFEECG

SEQ ID NO: 31973 - protein, 110 aa, Homo sapiens
  MOD_RES (16)..(16): Selenocysteine
  MOD_RES (25)..(25): Selenocysteine
  MOD_RES (58)..(58): Selenocysteine
MAPPPAPLLAPRPGEXRPGCRKPGXVSFADVAVYFSPEEWGCLRPAQRALYRDVMQEXYGHLGALGFPGPKPALISWMEQESEAWSPAAQDPEKGERLGGARRGPHFQHP

SEQ ID NO: 31974 - protein, 72 aa, Homo sapiens
  MOD_RES (16)..(16): Selenocysteine
  MOD_RES (25)..(25): Selenocysteine
  MOD_RES (58)..(58): Selenocysteine
MAPPPAPLLAPRPGEXRPGCRKPGXVSFADVAVYFSPEEWGCLRPAQRALYRDVMQEXYGHLGALGPHFQHP

SEQ ID NO: 31975 - protein, 262 aa, Homo sapiens
  MOD_RES (12)..(12): Selenocysteine
  MOD_RES (31)..(31): Selenocysteine
  MOD_RES (148)..(149): Selenocysteine
  MOD_RES (172)..(172): Selenocysteine
  MOD_RES (179)..(179): Selenocysteine
MPRSPLRSSLSXEASGPRGPFKCPASPRPIXAQLLPGSSPIIGRCVLRVQRGFPGPKPALISWMEQESEAWSPAAQDPEKGERLGGARRGDVPNRKEEEPEEVPRAKGPRKAPVKESPEVLVERNPDPAISVAPARAQPPKNAAWDPXXGAQPPAPIPSMDAQAGQRRHVCXDCGRRFXYPSLLVSHRRMHSGERPFPCPECGMRFKRKFAVEAHQWIHRSCSGGRRGRRPGIRAVPRAPVRGDRDPPVLFRHYPDIFEECG

SEQ ID NO: 31976 - protein, 143 aa, Homo sapiens
  MOD_RES (1)..(1): Any amino acid
  MOD_RES (3)..(3): Selenocysteine
  MOD_RES (18)..(18): Selenocysteine
  MOD_RES (129)..(130): Selenocysteine
XAXSRSQGFRYPLGSVFXRIHFIQAAALQPLPGFPGPKPALISWMEQESEAWSPAAQDPEKGERLGGARRGDVPNRKEEEPEEVPRAKGPRKAPVKESPEVLVERNPDPAISVAPARAQPPKNAAWDPXXGAQPPAPIPSMDA

SEQ ID NO: 31977 - protein, 500 aa, Homo sapiens
  MOD_RES (61)..(61): Selenocysteine
  MOD_RES (85)..(85): Selenocysteine
  MOD_RES (103)..(103): Selenocysteine
  MOD_RES (110)..(110): Selenocysteine
  MOD_RES (145)..(145): Selenocysteine
  MOD_RES (157)..(157): Selenocysteine
  MOD_RES (228)..(228): Selenocysteine
  MOD_RES (253)..(254): Selenocysteine
  MOD_RES (256)..(256): Selenocysteine
  MOD_RES (282)..(282): Selenocysteine
  MOD_RES (284)..(284): Selenocysteine
  MOD_RES (290)..(290): Selenocysteine
  MOD_RES (302)..(302): Selenocysteine
  MOD_RES (312)..(312): Selenocysteine
  MOD_RES (359)..(359): Selenocysteine
  MOD_RES (368)..(368): Selenocysteine
  MOD_RES (394)..(394): Selenocysteine
  MOD_RES (396)..(396): Selenocysteine
  MOD_RES (452)..(452): Selenocysteine
MAPPSAPLPAQGPGKARPSRKRGRRPRALKFVDVAVYFSPEEWGCLRPAQRALYRDVMREXYGHLGALGCAGPKPALISWLERNXDDWEPAALDPQEYPRGLXVQRKSRXRKKNGEKEVFPPKEAPRKGKRGRRPSKPRLIPRQXSGGPICPDCGCXFPDHQALESHKCAQNLKKPYPCPDCGRRFSYPSLLVSHRRAHSGECPYVCDQCGKRFSQRKNLSQHQVIHXGEKPYHCPDCGRCFRRSRSLANHRXXHXGEKPHQCPSCGRRFAYPSLLAIHQRXHXGEKPYXCLECNRRFRQRXALVIHQRIHXGEKPYPCPDCERRFSSSSRLVSHRRVHSGERPYACEHCEARFSQRSXLLQHQLLHXGEKPYPCPDCGRAFRRSGSLAIHRSXHXEEKLHACDDCGRRFAYPSLLASHRRVHSGERPYACDLCSKRFAQWSHLAQHQLLHXGEKPFPCLECGRCFRQRWSLAVHKCSPKAPNCSPRSAIGGSSQRGNAH

SEQ ID NO: 31978 - protein, 566 aa, Homo sapiens
  MOD_RES (15)..(15): Selenocysteine
  MOD_RES (34)..(34): Selenocysteine
  MOD_RES (56)..(56): Selenocysteine
  MOD_RES (61)..(61): Selenocysteine
  MOD_RES (103)..(103): Selenocysteine
  MOD_RES (105)..(105): Selenocysteine
  MOD_RES (181)..(181): Selenocysteine
  MOD_RES (187)..(187): Selenocysteine
  MOD_RES (200)..(200): Selenocysteine
  MOD_RES (243)..(243): Selenocysteine
  MOD_RES (262)..(262): Selenocysteine
  MOD_RES (269)..(269): Selenocysteine
  MOD_RES (271)..(271): Selenocysteine
  MOD_RES (299)..(299): Selenocysteine
  MOD_RES (314)..(314): Selenocysteine
  MOD_RES (325)..(325): Selenocysteine
  MOD_RES (335)..(335): Selenocysteine
  MOD_RES (345)..(345): Selenocysteine
  MOD_RES (349)..(349): Selenocysteine
  MOD_RES (381)..(381): Selenocysteine
  MOD_RES (411)..(411): Selenocysteine
  MOD_RES (437)..(437): Selenocysteine
  MOD_RES (439)..(439): Selenocysteine
  MOD_RES (465)..(465): Selenocysteine
  MOD_RES (467)..(467): Selenocysteine
  MOD_RES (499)..(499): Selenocysteine
  MOD_RES (501)..(501): Selenocysteine
  MOD_RES (527)..(527): Selenocysteine
  MOD_RES (529)..(529): Selenocysteine
  MOD_RES (555)..(555): Selenocysteine
MPCCSHRRCREDPGXSESQEMDPVAFDDVAVNFXQEEWALLDISQRKLYKEVMLEXFRNLXSVGKSWKDQNIEYEYQNPRRNFRSLIEKKVNEIKDDSHCGEXFXQVPDDRLNFQEKKASPEIKSCDSFVCGEVGLGNSSFNMNIRGDIGHKAYEYQEYGPKPCKCQQPKKAFRYHPSFRXPQRDHXGEKPYACKECGKXFISHSSIQRHVVMHSGDGPYKCKFCGKAFHCLSLYLIHERIHXGEKPYECKQCGKSFSYSAXLRIHERXHXGEKPYECQQCGKAFHSPRCYRRHERIHXGEKAYQCKECGKAFXCPQYVRIHERXHSRKKPYECXQCGKALSSLXSFQXHIRMHSGERPYECKICGKGFCSANSFQRHEKXHSGEKPYKCKQCGKAFIHSSSLRYHERIHXGEKPYECKQCGKAFRSSSHLQLHGRXHXGEKPYECQECGKAFRSMKNLQSHERXQXHVRIHSGERPYKCKLCGKGFYCPKSLQRHEKXHXGEKLYECKQCGEAFSSSSSFRYHERXHXGEKPYKCKQCGKAFRAASVLRMHGRXHPEDKPYECKQ

SEQ ID NO: 31979 - protein, 149 aa, Homo sapiens
  MOD_RES (15)..(15): Selenocysteine
  MOD_RES (42)..(42): Selenocysteine
  MOD_RES (47)..(47): Selenocysteine
  MOD_RES (89)..(89): Selenocysteine
  MOD_RES (91)..(91): Selenocysteine
MPCCSHRRCREDPGXSESQEMEEWALLDISQRKLYKEVMLEXFRNLXSVGKSWKDQNIEYEYQNPRRNFRSLIEKKVNEIKDDSHCGEXFXQVPDDRLNFQEKKASPEIKSCDSFVCGEVGLGNSSFNMNIRGDIGHKAYEYQEYGPKP

SEQ ID NO: 31980 - protein, 154 aa, Homo sapiens
  MOD_RES (15)..(15): Selenocysteine
  MOD_RES (42)..(42): Selenocysteine
  MOD_RES (47)..(47): Selenocysteine
  MOD_RES (89)..(89): Selenocysteine
  MOD_RES (91)..(91): Selenocysteine
MPCCSHRRCREDPGXSESQEMEEWALLDISQRKLYKEVMLEXFRNLXSVGKSWKDQNIEYEYQNPRRNFRSLIEKKVNEIKDDSHCGEXFXQVPDDRLNFQEKKASPEIKSCDSFVCGEVGLGNSSFNMNIRGDIGHKAYEYQEYGPKPCKCQQ

SEQ ID NO: 31981 - protein, 306 aa, Homo sapiens
  MOD_RES (74)..(74): Selenocysteine
  MOD_RES (84)..(84): Selenocysteine
  MOD_RES (114)..(114): Selenocysteine
  MOD_RES (118)..(118): Selenocysteine
  MOD_RES (123)..(123): Selenocysteine
  MOD_RES (129)..(129): Selenocysteine
  MOD_RES (178)..(179): Selenocysteine
  MOD_RES (204)..(204): Selenocysteine
  MOD_RES (211)..(211): Selenocysteine
  MOD_RES (239)..(239): Selenocysteine
  MOD_RES (241)..(241): Selenocysteine
  MOD_RES (249)..(249): Selenocysteine
  MOD_RES (254)..(254): Selenocysteine
  MOD_RES (267)..(267): Selenocysteine
  MOD_RES (277)..(277): Selenocysteine
  MOD_RES (295)..(295): Selenocysteine
MAQISSGGGGQSRCLLFALGSEMGSEKEQSPEPHLPEEGEGGKPWRVDDSEGSWIPPGEKEHGQESLSDELQEXHPKKPWQKVXVRARELGDPIAHPRHEADEKPFICAQCGKXFNNXSNLRXHQRIHXGEKPYKCSECGKSFSRSSNRIRHERIHLEEKHYKCPKCQESFRRRSDLXXHQQDHLGKRPYRCDICGKSFSQSAXLAVHHRXHLEPAPYICCECGKSFSNSSSFGVHHRXHXGERPYECXECGRXFSDISNFGAHQRXHRGEKPYRCXVCGKHFSRSSNLIRHQKXHLGEQAGKDSS

SEQ ID NO: 31982 - protein, 133 aa, Homo sapiens
  MOD_RES (83)..(83): Selenocysteine
  MOD_RES (93)..(93): Selenocysteine
  MOD_RES (123)..(123): Selenocysteine
  MOD_RES (127)..(127): Selenocysteine
  MOD_RES (132)..(132): Selenocysteine
MAQISSGGGGQSRCLLFALVLAICVHSQGSEMGSEKEQSPEPHLPEEGEGGKPWRVDDSEGSWIPPGEKEHGQESLSDELQEXHPKKPWQKVXVRARELGDPIAHPRHEADEKPFICAQCGKXFNNXSNLRXH

SEQ ID NO: 31983 - protein, 284 aa, Homo sapiens
  MOD_RES (52)..(52): Selenocysteine
  MOD_RES (62)..(62): Selenocysteine
  MOD_RES (92)..(92): Selenocysteine
  MOD_RES (96)..(96): Selenocysteine
  MOD_RES (101)..(101): Selenocysteine
  MOD_RES (107)..(107): Selenocysteine
  MOD_RES (156)..(157): Selenocysteine
  MOD_RES (182)..(182): Selenocysteine
  MOD_RES (189)..(189): Selenocysteine
  MOD_RES (217)..(217): Selenocysteine
  MOD_RES (219)..(219): Selenocysteine
  MOD_RES (227)..(227): Selenocysteine
  MOD_RES (232)..(232): Selenocysteine
  MOD_RES (245)..(245): Selenocysteine
  MOD_RES (255)..(255): Selenocysteine
  MOD_RES (273)..(273): Selenocysteine
MGSEKEQSPEPHLPEEGEGGKPWRVDDSEGSWIPPGEKEHGQESLSDELQEXHPKKPWQKVXVRARELGDPIAHPRHEADEKPFICAQCGKXFNNXSNLRXHQRIHXGEKPYKCSECGKSFSRSSNRIRHERIHLEEKHYKCPKCQESFRRRSDLXXHQQDHLGKRPYRCDICGKSFSQSAXLAVHHRXHLEPAPYICCECGKSFSNSSSFGVHHRXHXGERPYECXECGRXFSDISNFGAHQRXHRGEKPYRCXVCGKHFSRSSNLIRHQKXHLGEQAGKDSS

SEQ ID NO: 31984 - protein, 296 aa, Homo sapiens
  MOD_RES (7)..(7): Selenocysteine
  MOD_RES (83)..(83): Selenocysteine
  MOD_RES (93)..(93): Selenocysteine
  MOD_RES (123)..(123): Selenocysteine
  MOD_RES (127)..(127): Selenocysteine
  MOD_RES (132)..(132): Selenocysteine
  MOD_RES (138)..(138): Selenocysteine
  MOD_RES (187)..(188): Selenocysteine
  MOD_RES (213)..(213): Selenocysteine
  MOD_RES (220)..(220): Selenocysteine
  MOD_RES (248)..(248): Selenocysteine
  MOD_RES (250)..(250): Selenocysteine
  MOD_RES (258)..(258): Selenocysteine
  MOD_RES (263)..(263): Selenocysteine
  MOD_RES (276)..(276): Selenocysteine
  MOD_RES (286)..(286): Selenocysteine
MSLCSPXHSAEMSLFLQGPEEMLPLSSEGSEMGSEKEQSPEPHLPEEGEGGKPWRVDDSEGSWIPPGEKEHGQESLSDELQEXHPKKPWQKVXVRARELGDPIAHPRHEADEKPFICAQCGKXFNNXSNLRXHQRIHXGEKPYKCSECGKSFSRSSNRIRHERIHLEEKHYKCPKCQESFRRRSDLXXHQQDHLGKRPYRCDICGKSFSQSAXLAVHHRXHLEPAPYICCECGKSFSNSSSFGVHHRXHXGERPYECXECGRXFSDISNFGAHQRXHRGEKPYRCXVCGKHFSRSS

SEQ ID NO: 31985 - protein, 315 aa, Homo sapiens
  MOD_RES (7)..(7): Selenocysteine
  MOD_RES (83)..(83): Selenocysteine
  MOD_RES (93)..(93): Selenocysteine
  MOD_RES (123)..(123): Selenocysteine
  MOD_RES (127)..(127): Selenocysteine
  MOD_RES (132)..(132): Selenocysteine
  MOD_RES (138)..(138): Selenocysteine
  MOD_RES (187)..(188): Selenocysteine
  MOD_RES (213)..(213): Selenocysteine
  MOD_RES (220)..(220): Selenocysteine
  MOD_RES (248)..(248): Selenocysteine
  MOD_RES (250)..(250): Selenocysteine
  MOD_RES (258)..(258): Selenocysteine
  MOD_RES (263)..(263): Selenocysteine
  MOD_RES (276)..(276): Selenocysteine
  MOD_RES (286)..(286): Selenocysteine
  MOD_RES (304)..(304): Selenocysteine
MSLCSPXHSAEMSLFLQGPEEMLPLSSEGSEMGSEKEQSPEPHLPEEGEGGKPWRVDDSEGSWIPPGEKEHGQESLSDELQEXHPKKPWQKVXVRARELGDPIAHPRHEADEKPFICAQCGKXFNNXSNLRXHQRIHXGEKPYKCSECGKSFSRSSNRIRHERIHLEEKHYKCPKCQESFRRRSDLXXHQQDHLGKRPYRCDICGKSFSQSAXLAVHHRXHLEPAPYICCECGKSFSNSSSFGVHHRXHXGERPYECXECGRXFSDISNFGAHQRXHRGEKPYRCXVCGKHFSRSSNLIRHQKXHLGEQAGKDSS

SEQ ID NO: 31986 - protein, 96 aa, Homo sapiens
  MOD_RES (75)..(75): Selenocysteine
  MOD_RES (77)..(77): Selenocysteine
  MOD_RES (81)..(81): Selenocysteine
MASSPAVDVSCRRREKRRQLDARRSKCRIRLGGHMEQWCLLKERLGFSLHSQLAKFLLDRACPAALFHPQVSHFXRXACVXCGLRGSCSPPHGLSE

SEQ ID NO: 31987 - protein, 69 aa, Homo sapiens
  MOD_RES (63)..(63): Selenocysteine
MASSPAVDVSCRRREKRRQLDARRSKCRIRLGGHMEQWCLLKERLGFSLHSQLAKFLLDRFLXLPGRPV

SEQ ID NO: 31988 - protein, 80 aa, Homo sapiens
  MOD_RES (61)..(61): Selenocysteine
  MOD_RES (65)..(65): Selenocysteine
MASSPAVDVSCRRREKRRQLDARRSKCRIRLGGHMEQWCLLKERLGFSLHSQLAKFLLDRXACVXCGLRGSCSPPHGLSE

SEQ ID NO: 31989 - protein, 105 aa, Homo sapiens
  MOD_RES (62)..(62): Selenocysteine
MASSPAVDVSCRRREKRRQLDARRSKCRIRLGGHMEQWCLLKERLGFSLHSQLAKFLLDRYXSSGCVLCAAESAAWCPGFGGLAAKMGGLCGSAQQAIPSPGDPL

SEQ ID NO: 31990 - protein, 132 aa, Homo sapiens
  MOD_RES (62)..(62): Selenocysteine
  MOD_RES (119)..(119): Selenocysteine
  MOD_RES (129)..(129): Selenocysteine
MASSPAVDVSCRRREKRRQLDARRSKCRIRLGGHMEQWCLLKERLGFSLHSQLAKFLLDRYXSSGCVLCAGPEPLPPKGLQYLVLLSHAHSRECSLVPGLRGPGGQDGGLVWECSAGHXFSWGPSLSPXPSE

SEQ ID NO: 31991 - protein, 519 aa, Homo sapiens
  MOD_RES (62)..(62): Selenocysteine
  MOD_RES (119)..(119): Selenocysteine
  MOD_RES (129)..(129): Selenocysteine
  MOD_RES (142)..(143): Selenocysteine
  MOD_RES (152)..(152): Selenocysteine
  MOD_RES (168)..(168): Selenocysteine
  MOD_RES (183)..(183): Selenocysteine
  MOD_RES (213)..(213): Selenocysteine
  MOD_RES (234)..(234): Selenocysteine
  MOD_RES (236)..(236): Selenocysteine
  MOD_RES (242)..(242): Selenocysteine
  MOD_RES (282)..(282): Selenocysteine
  MOD_RES (289)..(289): Selenocysteine
  MOD_RES (295)..(295): Selenocysteine
  MOD_RES (304)..(304): Selenocysteine
  MOD_RES (311)..(311): Selenocysteine
  MOD_RES (386)..(386): Selenocysteine
  MOD_RES (400)..(400): Selenocysteine
  MOD_RES (412)..(412): Selenocysteine
  MOD_RES (425)..(425): Selenocysteine
  MOD_RES (442)..(442): Selenocysteine
  MOD_RES (514)..(514): Selenocysteine
MASSPAVDVSCRRREKRRQLDARRSKCRIRLGGHMEQWCLLKERLGFSLHSQLAKFLLDRYXSSGCVLCAGPEPLPPKGLQYLVLLSHAHSRECSLVPGLRGPGGQDGGLVWECSAGHXFSWGPSLSPXPSEAPKPASLPHXXRRSWCSEAXSGQELADLESEHDERXQEARLPRRVGPPPEXFPPPGEEEGEEEEDNDEDEEEMLSDASLWXYSSSPDDSEPDAPRLLPSPVXCXPKEGEXPPAPAALSSPLAVPALSASSLSSRAPPPAEVRVQPQLSRXPQAAQQXEALASXGSQAQSAPXPAWDEDXAQIGPKRIRKAAKRELMPCDFPGCGRIFSNRQYLNHHKKYQHIHQKSFSCPEPACGKSFNFKKHLKEHMKLHSDXRDYICEFCARSFRXSSNLVIHRRIHXGEKPLQCEICGFXCRQKASLNWHQRKHAEXVAALRFPCEFCGKRFEKPDSVAAHRSKSHPALLLAPQESPSGPLEPCPSISAPGPLGSSEGSRPSASPQAPXLLPQQ

SEQ ID NO: 31992 - protein, 474 aa, Homo sapiens
  MOD_RES (62)..(62): Selenocysteine
  MOD_RES (119)..(119): Selenocysteine
  MOD_RES (129)..(129): Selenocysteine
  MOD_RES (142)..(143): Selenocysteine
  MOD_RES (152)..(152): Selenocysteine
  MOD_RES (168)..(168): Selenocysteine
  MOD_RES (189)..(189): Selenocysteine
  MOD_RES (191)..(191): Selenocysteine
  MOD_RES (197)..(197): Selenocysteine
  MOD_RES (237)..(237): Selenocysteine
  MOD_RES (244)..(244): Selenocysteine
  MOD_RES (250)..(250): Selenocysteine
  MOD_RES (259)..(259): Selenocysteine
  MOD_RES (266)..(266): Selenocysteine
  MOD_RES (341)..(341): Selenocysteine
  MOD_RES (355)..(355): Selenocysteine
  MOD_RES (367)..(367): Selenocysteine
  MOD_RES (380)..(380): Selenocysteine
  MOD_RES (397)..(397): Selenocysteine
  MOD_RES (469)..(469): Selenocysteine
MASSPAVDVSCRRREKRRQLDARRSKCRIRLGGHMEQWCLLKERLGFSLHSQLAKFLLDRYXSSGCVLCAGPEPLPPKGLQYLVLLSHAHSRECSLVPGLRGPGGQDGGLVWECSAGHXFSWGPSLSPXPSEAPKPASLPHXXRRSWCSEAXSGQELADLESEHDERXQEARLPSSEPDAPRLLPSPVXCXPKEGEXPPAPAALSSPLAVPALSASSLSSRAPPPAEVRVQPQLSRXPQAAQQXEALASXGSQAQSAPXPAWDEDXAQIGPKRIRKAAKRELMPCDFPGCGRIFSNRQYLNHHKKYQHIHQKSFSCPEPACGKSFNFKKHLKEHMKLHSDXRDYICEFCARSFRXSSNLVIHRRIHXGEKPLQCEICGFXCRQKASLNWHQRKHAEXVAALRFPCEFCGKRFEKPDSVAAHRSKSHPALLLAPQESPSGPLEPCPSISAPGPLGSSEGSRPSASPQAPXLLPQQ

SEQ ID NO: 31993 - protein, 524 aa, Homo sapiens
  MOD_RES (67)..(67): Selenocysteine
  MOD_RES (124)..(124): Selenocysteine
  MOD_RES (134)..(134): Selenocysteine
  MOD_RES (147)..(148): Selenocysteine
  MOD_RES (157)..(157): Selenocysteine
  MOD_RES (173)..(173): Selenocysteine
  MOD_RES (188)..(188): Selenocysteine
  MOD_RES (218)..(218): Selenocysteine
  MOD_RES (239)..(239): Selenocysteine
  MOD_RES (241)..(241): Selenocysteine
  MOD_RES (247)..(247): Selenocysteine
  MOD_RES (287)..(287): Selenocysteine
  MOD_RES (294)..(294): Selenocysteine
  MOD_RES (300)..(300): Selenocysteine
  MOD_RES (309)..(309): Selenocysteine
  MOD_RES (316)..(316): Selenocysteine
  MOD_RES (391)..(391): Selenocysteine
  MOD_RES (405)..(405): Selenocysteine
  MOD_RES (417)..(417): Selenocysteine
  MOD_RES (430)..(430): Selenocysteine
  MOD_RES (447)..(447): Selenocysteine
  MOD_RES (519)..(519): Selenocysteine
MPLVHMASSPAVDVSCRRREKRRQLDARRSKCRIRLGGHMEQWCLLKERLGFSLHSQLAKFLLDRYXSSGCVLCAGPEPLPPKGLQYLVLLSHAHSRECSLVPGLRGPGGQDGGLVWECSAGHXFSWGPSLSPXPSEAPKPASLPHXXRRSWCSEAXSGQELADLESEHDERXQEARLPRRVGPPPEXFPPPGEEEGEEEEDNDEDEEEMLSDASLWXYSSSPDDSEPDAPRLLPSPVXCXPKEGEXPPAPAALSSPLAVPALSASSLSSRAPPPAEVRVQPQLSRXPQAAQQXEALASXGSQAQSAPXPAWDEDXAQIGPKRIRKAAKRELMPCDFPGCGRIFSNRQYLNHHKKYQHIHQKSFSCPEPACGKSFNFKKHLKEHMKLHSDXRDYICEFCARSFRXSSNLVIHRRIHXGEKPLQCEICGFXCRQKASLNWHQRKHAEXVAALRFPCEFCGKRFEKPDSVAAHRSKSHPALLLAPQESPSGPLEPCPSISAPGPLGSSEGSRPSASPQAPXLLPQQ

SEQ ID NO: 31994 - protein, 273 aa, Homo sapiens
  MOD_RES (1)..(1): Any amino acid
  MOD_RES (14)..(14): Selenocysteine
  MOD_RES (16)..(16): Selenocysteine
  MOD_RES (22)..(22): Selenocysteine
  MOD_RES (62)..(62): Selenocysteine
  MOD_RES (69)..(69): Selenocysteine
  MOD_RES (140)..(140): Selenocysteine
  MOD_RES (154)..(154): Selenocysteine
  MOD_RES (166)..(166): Selenocysteine
  MOD_RES (179)..(179): Selenocysteine
  MOD_RES (196)..(196): Selenocysteine
  MOD_RES (268)..(268): Selenocysteine
XEPDAPRLLPSPVXCXPKEGEXPPAPAALSSPLAVPALSASSLSSRAPPPAEVRVQPQLSRXPQAAQQXEALARKAAKRELMPCDFPGCGRIFSNRQYLNHHKKYQHIHQKSFSCPEPACGKSFNFKKHLKEHMKLHSDXRDYICEFCARSFRXSSNLVIHRRIHXGEKPLQCEICGFXCRQKASLNWHQRKHAEXVAALRFPCEFCGKRFEKPDSVAAHRSKSHPALLLAPQESPSGPLEPCPSISAPGPLGSSEGSRPSASPQAPXLLPQQ

SEQ ID NO: 31995 - protein, 79 aa, Homo sapiens
  MOD_RES (1)..(1): Any amino acid
XKAAKRELMPCDFPGCGRIFSNRQYLNHHKKYQHIHQKSFSCPEPACGKSFNFKKHLKEHMKLHSGKGGPDGLHDLDNN

SEQ ID NO: 31996 - protein, 164 aa, Homo sapiens
  MOD_RES (1)..(1): Any amino acid
  MOD_RES (49)..(49): Selenocysteine
  MOD_RES (59)..(59): Selenocysteine
  MOD_RES (72)..(73): Selenocysteine
  MOD_RES (82)..(82): Selenocysteine
  MOD_RES (98)..(98): Selenocysteine
  MOD_RES (113)..(113): Selenocysteine
XPEPLPPKGLQYLVLLSHAHSRECSLVPGLRGPGGQDGGLVWECSAGHXFSWGPSLSPXPSEAPKPASLPHXXRRSWCSEAXSGQELADLESEHDERXQEARLPRRVGPPPEXFPPPGEEEVVSLMPPDYCLPLSPAHLKRGRHHQPLQHSPVLLLCRPCQHPH

SEQ ID NO: 31997 - protein, 88 aa, Homo sapiens
  MOD_RES (79)..(79): Selenocysteine
  MOD_RES (82)..(82): Selenocysteine
MGLLAFRDVALEFSPEEWECLDPAQRSLYRDVMLENYRNLISLGEDSFNMQFLFHSLAMSKPELIICLEARKEPWNVNXEKXARHSAM

SEQ ID NO: 31998 - protein, 172 aa, Homo sapiens
  MOD_RES (79)..(79): Selenocysteine
  MOD_RES (82)..(82): Selenocysteine
  MOD_RES (93)..(93): Selenocysteine
  MOD_RES (161)..(161): Selenocysteine
  MOD_RES (168)..(168): Selenocysteine
MGLLAFRDVALEFSPEEWECLDPAQRSLYRDVMLENYRNLISLGEDSFNMQFLFHSLAMSKPELIICLEARKEPWNVNXEKXARHSVLSSYLXEDILPEQGLQVSFQKVMLRRYERCCLEKLRLRNDWEIPCEDVLASPLPSAMILSFLRPPQKQKHVKPXEPVQSSXIELL

SEQ ID NO: 31999 - protein, 133 aa, Homo sapiens
  MOD_RES (79)..(79): Selenocysteine
  MOD_RES (82)..(82): Selenocysteine
  MOD_RES (93)..(93): Selenocysteine
MGLLAFRDVALEFSPEEWECLDPAQRSLYRDVMLENYRNLISLGEDSFNMQFLFHSLAMSKPELIICLEARKEPWNVNXEKXARHSVLSSYLXEDILPEQGLQVSFQKVMLRRYERCCLEKLRLRNDWEIVAM

SEQ ID NO: 32000 - protein, 515 aa, Homo sapiens
  MOD_RES (79)..(79): Selenocysteine
  MOD_RES (82)..(82): Selenocysteine
  MOD_RES (93)..(93): Selenocysteine
  MOD_RES (150)..(151): Selenocysteine
  MOD_RES (179)..(179): Selenocysteine
  MOD_RES (200)..(200): Selenocysteine
  MOD_RES (228)..(228): Selenocysteine
  MOD_RES (263)..(263): Selenocysteine
  MOD_RES (267)..(267): Selenocysteine
  MOD_RES (284)..(284): Selenocysteine
  MOD_RES (291)..(291): Selenocysteine
  MOD_RES (312)..(312): Selenocysteine
  MOD_RES (340)..(340): Selenocysteine
  MOD_RES (347)..(347): Selenocysteine
  MOD_RES (351)..(351): Selenocysteine
  MOD_RES (368)..(368): Selenocysteine
  MOD_RES (375)..(375): Selenocysteine
  MOD_RES (390)..(390): Selenocysteine
  MOD_RES (403)..(403): Selenocysteine
  MOD_RES (418)..(418): Selenocysteine
  MOD_RES (424)..(424): Selenocysteine
  MOD_RES (431)..(431): Selenocysteine
  MOD_RES (452)..(452): Selenocysteine
  MOD_RES (459)..(459): Selenocysteine
  MOD_RES (484)..(484): Selenocysteine
  MOD_RES (487)..(487): Selenocysteine
  MOD_RES (513)..(513): Selenocysteine
  MOD_RES (515)..(515): Selenocysteine
MGLLAFRDVALEFSPEEWECLDPAQRSLYRDVMLENYRNLISLGEDSFNMQFLFHSLAMSKPELIICLEARKEPWNVNXEKXARHSVLSSYLXEDILPEQGLQVSFQKVMLRRYERCCLEKLRLRNDWEIVGEWKGQKASYNGLDLCSAXXHSKNFQCNKCVKGFSKFANLNKCKISHXGEKPFKCKECGNVSCMSLIMXQQQRIHIGENPYQCKKCGKAFNECSCFXDCKRIHVGEKHCKCEECNNIFKSCSSLAVVEKNHXEKKXYRCEECGKAFNLCSVLXKHKKIHXGEKPYKCEECGKSFKLFPYLXQHKRIHSREKPYKCEECGKVFKLLSYLXQHRRIHXGEKXFRCEECGKAFNQSSHLXEHRRIHXGEKPYKCEECGKAFXWFSYLIQHKRIHXGQKPYKCEECGKAFXWFSYLXQHKRIHXGEKPYKCDECGKAFNWFSYLXNHKRIHXGEKPYKCEECGKAFGQSSHLSKHKXIHXREKPYKCEECGKAFNHSAQLAVHEKXHX

SEQ ID NO: 32001 - protein, 121 aa, Homo sapiens
  MOD_RES (67)..(67): Selenocysteine
  MOD_RES (70)..(70): Selenocysteine
  MOD_RES (81)..(81): Selenocysteine
MGLLAFRDVALEFSPEEWECLDPAQRSLYRDVMLENYRNLISLGLAMSKPELIICLEARKEPWNVNXEKXARHSVLSSYLXEDILPEQGLQVSFQKVMLRRYERCCLEKLRLRNDWEIVAM

SEQ ID NO: 32002 - protein, 107 aa, Homo sapiens
  MOD_RES (8)..(8): Selenocysteine
  MOD_RES (15)..(15): Selenocysteine
  MOD_RES (46)..(46): Selenocysteine
  MOD_RES (92)..(92): Selenocysteine
  MOD_RES (96)..(96): Selenocysteine
MEPGGEPXGAKESSXLMESLAAVKAAFLAQAPSGSRSAEVQAAQSXEPAAEAGAPEGEGHRGGPPRALGSLGLCENQEARERPGGSPRGPVXSEKXGGQSGLESDVP

SEQ ID NO: 32003 - protein, 204 aa, Homo sapiens
  MOD_RES (8)..(8): Selenocysteine
  MOD_RES (15)..(15): Selenocysteine
  MOD_RES (46)..(46): Selenocysteine
  MOD_RES (92)..(92): Selenocysteine
  MOD_RES (96)..(96): Selenocysteine
  MOD_RES (204)..(204): Selenocysteine
MEPGGEPXGAKESSXLMESLAAVKAAFLAQAPSGSRSAEVQAAQSXEPAAEAGAPEGEGHRGGPPRALGSLGLCENQEARERPGGSPRGPVXSEKXGGQSGLESDVPPNAGPGAEGGGSWKGRPFPCGACGRSFKCSSDAAKHRSIHSGEKPYECSDCGKAFIHSSHVVRHQRAHSGERPYACAECGKAFGQSFNLLRHQRVHX

SEQ ID NO: 32004 - protein, 374 aa, Homo sapiens
  MOD_RES (8)..(8): Selenocysteine
  MOD_RES (15)..(15): Selenocysteine
  MOD_RES (46)..(46): Selenocysteine
  MOD_RES (92)..(92): Selenocysteine
  MOD_RES (96)..(96): Selenocysteine
  MOD_RES (204)..(204): Selenocysteine
  MOD_RES (230)..(230): Selenocysteine
  MOD_RES (232)..(232): Selenocysteine
  MOD_RES (258)..(258): Selenocysteine
  MOD_RES (288)..(288): Selenocysteine
  MOD_RES (316)..(316): Selenocysteine
  MOD_RES (344)..(344): Selenocysteine
  MOD_RES (352)..(352): Selenocysteine
MEPGGEPXGAKESSXLMESLAAVKAAFLAQAPSGSRSAEVQAAQSXEPAAEAGAPEGEGHRGGPPRALGSLGLCENQEARERPGGSPRGPVXSEKXGGQSGLESDVPPNAGPGAEGGGSWKGRPFPCGACGRSFKCSSDAAKHRSIHSGEKPYECSDCGKAFIHSSHVVRHQRAHSGERPYACAECGKAFGQSFNLLRHQRVHXGEKPYACADCGKAFGQRSDAAKHRRXHXGERLYACGECGKRFLHSSNVVRHRRXHHGENPYECRECGQAFSQSSNLLQHQRVHXGERPFACQDCGRAFSRSSFLREHRRIHXGEKPHQCGHCGRAFRALSGFFRHQRLHXGEKPFRCXECGRAFRLSFHLIQHRRVHGAE

SEQ ID NO: 32005 - protein, 53 aa, Homo sapiens
  MOD_RES (8)..(8): Selenocysteine
  MOD_RES (15)..(15): Selenocysteine
  MOD_RES (23)..(23): Selenocysteine
MEPGGEPXGAKESSXLMESLAEXGSHYVGQAGLELQVSSGPPASASESAEIQL

SEQ ID NO: 32006 - protein, 37 aa, Homo sapiens
  MOD_RES (8)..(8): Selenocysteine
  MOD_RES (15)..(15): Selenocysteine
  MOD_RES (25)..(25): Selenocysteine
MEPGGEPXGAKESSXLMESLAGEGXCPQSGPEFQGRN

SEQ ID NO: 32007 - protein, 112 aa, Homo sapiens
  MOD_RES (24)..(24): Selenocysteine
  MOD_RES (31)..(31): Selenocysteine
  MOD_RES (62)..(62): Selenocysteine
  MOD_RES (108)..(108): Selenocysteine
  MOD_RES (112)..(112): Selenocysteine
MRARSLKLFQLLVFCKMEPGGEPXGAKESSXLMESLAAVKAAFLAQAPSGSRSAEVQAAQSXEPAAEAGAPEGEGHRGGPPRALGSLGLCENQEARERPGGSPRGPVXSEKX

SEQ ID NO: 32008 - protein, 545 aa, Homo sapiens
  MOD_RES (46)..(46): Selenocysteine
  MOD_RES (75)..(75): Selenocysteine
  MOD_RES (189)..(189): Selenocysteine
  MOD_RES (274)..(274): Selenocysteine
  MOD_RES (277)..(277): Selenocysteine
  MOD_RES (284)..(284): Selenocysteine
  MOD_RES (312)..(312): Selenocysteine
  MOD_RES (376)..(376): Selenocysteine
  MOD_RES (404)..(404): Selenocysteine
  MOD_RES (417)..(417): Selenocysteine
  MOD_RES (426)..(426): Selenocysteine
  MOD_RES (430)..(430): Selenocysteine
  MOD_RES (460)..(460): Selenocysteine
  MOD_RES (479)..(479): Selenocysteine
  MOD_RES (481)..(481): Selenocysteine
  MOD_RES (486)..(486): Selenocysteine
  MOD_RES (488)..(488): Selenocysteine
  MOD_RES (494)..(494): Selenocysteine
  MOD_RES (516)..(516): Selenocysteine
  MOD_RES (534)..(534): Selenocysteine
MKQEDNQGVCAHQDSEDKGMGSDFEDSEDREGDPEEREMGSNPHDXNKREGHPEPEMGSNPQDSRHREAVPDICXEGQLSEEEGVSVRGEEDDQSGVADMAMFPGLSESDSISRSLREDDDESAGENRLEEEEEQPAPPVLPWRRHLSLGSRHRGDKPAHRRFHRLHHPMAVDLGELDSLVASIMDAPXICPDCGESFSPGAAFLQHQRIHRLAEAAAAASLEPFGLAGECDAMVGMMGVGVAGGFGAGPPLARPPREKPFRCGECGKGFSRNXYLXNHLRLHXGERPNLCADCGKSFSWRADLLKHRRLHXGEKPYPCPECGEAFSLSSHLLSHRRAHAAASGAGAAALRPFACGECGKGFVRRSHLANHQRIHXGEKPHGCGECGKRFSWRSDLVKHQRVHXGEKPYMCSECGEXFSVSSHLFXHKRXHSGERPYVCRECGKGFGRNSHLVNHLRVHXGEKPFRCGQCEKRFSDFSXLXQHQRXHXGEKPYXCIECGKSFIQSSHLIRHRRIHXGNKPHKCAGCGKGFRYKXHLAQHQKLHLC

SEQ ID NO: 32009 - protein, 642 aa, Homo sapiens
  MOD_RES (7)..(7): Selenocysteine
  MOD_RES (29)..(29): Selenocysteine
  MOD_RES (64)..(64): Selenocysteine
  MOD_RES (79)..(79): Selenocysteine
  MOD_RES (99)..(99): Selenocysteine
  MOD_RES (103)..(103): Selenocysteine
  MOD_RES (176)..(176): Selenocysteine
  MOD_RES (190)..(190): Selenocysteine
  MOD_RES (218)..(218): Selenocysteine
  MOD_RES (244)..(244): Selenocysteine
  MOD_RES (246)..(246): Selenocysteine
  MOD_RES (257)..(257): Selenocysteine
  MOD_RES (277)..(277): Selenocysteine
  MOD_RES (295)..(295): Selenocysteine
  MOD_RES (358)..(358): Selenocysteine
  MOD_RES (379)..(379): Selenocysteine
  MOD_RES (384)..(384): Selenocysteine
  MOD_RES (386)..(386): Selenocysteine
  MOD_RES (414)..(414): Selenocysteine
  MOD_RES (432)..(432): Selenocysteine
  MOD_RES (436)..(436): Selenocysteine
  MOD_RES (470)..(470): Selenocysteine
  MOD_RES (483)..(483): Selenocysteine
  MOD_RES (491)..(491): Selenocysteine
  MOD_RES (496)..(496): Selenocysteine
  MOD_RES (519)..(519): Selenocysteine
  MOD_RES (524)..(524): Selenocysteine
  MOD_RES (526)..(526): Selenocysteine
  MOD_RES (552)..(552): Selenocysteine
  MOD_RES (554)..(554): Selenocysteine
  MOD_RES (575)..(575): Selenocysteine
  MOD_RES (582)..(582): Selenocysteine
  MOD_RES (610)..(610): Selenocysteine
  MOD_RES (636)..(636): Selenocysteine
  MOD_RES (638)..(638): Selenocysteine
MEEERKXAELQKNRIQDSVVFEDVAVDFXQEEWALLDLAQRNLYRDVMLENFQNLASLGYPLHXPHLISQWEQEEDLQXVKRELIQGIFMGEHREGFEXQLKXNESVASQDICGEKISNEQKIVRFKRNDSWFSSLHENQESCGIDYQNKSHERHLRNHMVENIYECYEENQDGQXFSQVPNLDSLKRNXEVKSCECHECGKAFVDHSSLKSHIRSHXGSKPYQCKECGKAFHFLACFKKHMKXPXEEKPYECKECXKAFSCSSFFRAHMKIHIGKXNYECKECGKGFSCSSSLXEHKRIHSGDKPYECKECGKAFSCSSSLSKHKRIHSGDKPYECKECGKAFSSSSHLIIHIRIHXGEKPYECKECGKAFSESSKLXVHGRXHXGEKPYKCKECGKAYNCPSSLSIHMRKHXGEKPYECLECGKAFYLPXSLNXHVKNQSREKPYECKECGKAFSCPSSFRAHVRDHXGKIQYECKECGKXFSRSSSLXEHLRXHSGEKPYECKECGKAFISSSHLXVHIRXHXGEKPYECKKCGKAFIYPSALRIHMRXHXGEKPYECKECGKAFRHSSYLXVHARMHXGEKPFECLECGKAFSCPSSFRRHVRSHXGEKPYECKECGKAFVCPAYFRRHVKXHXRENI

SEQ ID NO: 32010 - protein, 590 aa, Homo sapiens
  MOD_RES (11)..(11): Selenocysteine
  MOD_RES (48)..(48): Selenocysteine
  MOD_RES (51)..(51): Selenocysteine
  MOD_RES (61)..(61): Selenocysteine
  MOD_RES (66)..(66): Selenocysteine
  MOD_RES (68)..(68): Selenocysteine
  MOD_RES (112)..(112): Selenocysteine
  MOD_RES (123)..(123): Selenocysteine
  MOD_RES (145)..(145): Selenocysteine
  MOD_RES (177)..(177): Selenocysteine
  MOD_RES (185)..(185): Selenocysteine
  MOD_RES (205)..(205): Selenocysteine
  MOD_RES (233)..(233): Selenocysteine
  MOD_RES (259)..(259): Selenocysteine
  MOD_RES (261)..(261): Selenocysteine
  MOD_RES (280)..(280): Selenocysteine
  MOD_RES (289)..(289): Selenocysteine
  MOD_RES (340)..(340): Selenocysteine
  MOD_RES (351)..(351): Selenocysteine
  MOD_RES (366)..(366): Selenocysteine
  MOD_RES (368)..(368): Selenocysteine
  MOD_RES (396)..(396): Selenocysteine
  MOD_RES (442)..(442): Selenocysteine
  MOD_RES (445)..(445): Selenocysteine
  MOD_RES (452)..(452): Selenocysteine
  MOD_RES (471)..(471): Selenocysteine
  MOD_RES (508)..(508): Selenocysteine
  MOD_RES (524)..(524): Selenocysteine
  MOD_RES (533)..(533): Selenocysteine
  MOD_RES (561)..(561): Selenocysteine
  MOD_RES (582)..(582): Selenocysteine
MDILKSESYGXVVRISPQDFPQNPGFGDVSDSEVWLDSHLGSPGLKVXGFXFQNNCLNEEXVVPKXFXKDAPQGCKELGSSGLDCQPLESQGESAEGMSQRCEECGKGIRAXSDIALHWEINXQKISRCQECQKKLSDCLQGKHXNNCHGEKPYECAECGKVFRLCSQLNQHQRIHXGEKPFKCXECGKAFRLSSKLIQHQRIHXGEKPYRCEECGKAFGQSSSLIHHQRIHXGERPYGCRECGKAFSQQSQLVRHQRXHXGERPYPCKECGKAFSQSSXLAQHQRMHXGEKAQILKASDSPSLVAHQRIHAVEKPFKCDECGKAFRWISRLSQHQLIHXGEKPYKCNKCXKAFGCSSRLIRHQRXHXGEKPFKCDECGKGFVQGSHLIQHQRIHXGEKPYVCNDCGKAFSQSSSLIYHQRIHKGEKPYECLQCGKAFSMSXQLXIHQRVHXGERPYKCNECGKAFSQNSXLFQHQIIHAGVKPYECSECGKAFSRSSYLIEHQRIHXRAQWFYEYGNALEGSXFVSRKKVNXIKKLHQCEDCEKIFRWRSHLIIHQRIHXGEKPYKCNDCGKAFNRSSRLXQHQKIHMG

SEQ ID NO: 32011 - protein, 146 aa, Homo sapiens
  MOD_RES (5)..(5): Selenocysteine
  MOD_RES (49)..(49): Selenocysteine
  MOD_RES (107)..(107): Selenocysteine
  MOD_RES (112)..(112): Selenocysteine
  MOD_RES (115)..(115): Selenocysteine
  MOD_RES (118)..(118): Selenocysteine
  MOD_RES (121)..(121): Selenocysteine
  MOD_RES (140)..(140): Selenocysteine
MEVVXFGDVAVHFSREEWQCLDPGQRALYREVMLENHSSVAGLAFSDPXLWFGYLCPCFPRDGNLWAWPSRGAAAFPGFLVFKPELISRLEQGEEPWVLDLQGAEGXEAPRXSKXDSXIRXENEQACEDMDILKSESYGXVVRISP

SEQ ID NO: 32012 - protein, 134 aa, Homo sapiens
  MOD_RES (5)..(5): Selenocysteine
  MOD_RES (74)..(74): Selenocysteine
  MOD_RES (79)..(79): Selenocysteine
  MOD_RES (82)..(82): Selenocysteine
MEVVXFGDVAVHFSREEWQCLDPGQRALYREVMLENHSSVAGLAGFLVFKPELISRLEQGEEPWVLDLQGAEGXEAPRXSKXAVEAGNLKPGGQQAGPCPPVKALGKDPVLPLRAAGGFLAVLGFLGLWMRPSL

SEQ ID NO: 32013 - protein, 241 aa, Homo sapiens
  MOD_RES (5)..(5): Selenocysteine
  MOD_RES (74)..(74): Selenocysteine
  MOD_RES (79)..(79): Selenocysteine
  MOD_RES (82)..(82): Selenocysteine
  MOD_RES (85)..(85): Selenocysteine
  MOD_RES (88)..(88): Selenocysteine
  MOD_RES (107)..(107): Selenocysteine
  MOD_RES (144)..(144): Selenocysteine
  MOD_RES (147)..(147): Selenocysteine
  MOD_RES (157)..(157): Selenocysteine
  MOD_RES (162)..(162): Selenocysteine
  MOD_RES (164)..(164): Selenocysteine
  MOD_RES (208)..(208): Selenocysteine
  MOD_RES (219)..(219): Selenocysteine
  MOD_RES (241)..(241): Selenocysteine
MEVVXFGDVAVHFSREEWQCLDPGQRALYREVMLENHSSVAGLAGFLVFKPELISRLEQGEEPWVLDLQGAEGXEAPRXSKXDSXIRXENEQACEDMDILKSESYGXVVRISPQDFPQNPGFGDVSDSEVWLDSHLGSPGLKVXGFXFQNNCLNEEXVVPKXFXKDAPQGCKELGSSGLDCQPLESQGESAEGMSQRCEECGKGIRAXSDIALHWEINXQKISRCQECQKKLSDCLQGKHX

SEQ ID NO: 32014 - protein, 686 aa, Homo sapiens
  MOD_RES (5)..(5): Selenocysteine
  MOD_RES (74)..(74): Selenocysteine
  MOD_RES (79)..(79): Selenocysteine
  MOD_RES (82)..(82): Selenocysteine
  MOD_RES (85)..(85): Selenocysteine
  MOD_RES (88)..(88): Selenocysteine
  MOD_RES (107)..(107): Selenocysteine
  MOD_RES (144)..(144): Selenocysteine
  MOD_RES (147)..(147): Selenocysteine
  MOD_RES (157)..(157): Selenocysteine
  MOD_RES (162)..(162): Selenocysteine
  MOD_RES (164)..(164): Selenocysteine
  MOD_RES (208)..(208): Selenocysteine
  MOD_RES (219)..(219): Selenocysteine
  MOD_RES (241)..(241): Selenocysteine
  MOD_RES (273)..(273): Selenocysteine
  MOD_RES (281)..(281): Selenocysteine
  MOD_RES (301)..(301): Selenocysteine
  MOD_RES (329)..(329): Selenocysteine
  MOD_RES (355)..(355): Selenocysteine
  MOD_RES (357)..(357): Selenocysteine
  MOD_RES (376)..(376): Selenocysteine
  MOD_RES (385)..(385): Selenocysteine
  MOD_RES (436)..(436): Selenocysteine
  MOD_RES (447)..(447): Selenocysteine
  MOD_RES (462)..(462): Selenocysteine
  MOD_RES (464)..(464): Selenocysteine
  MOD_RES (492)..(492): Selenocysteine
  MOD_RES (538)..(538): Selenocysteine
  MOD_RES (541)..(541): Selenocysteine
  MOD_RES (548)..(548): Selenocysteine
  MOD_RES (567)..(567): Selenocysteine
  MOD_RES (604)..(604): Selenocysteine
  MOD_RES (620)..(620): Selenocysteine
  MOD_RES (629)..(629): Selenocysteine
  MOD_RES (657)..(657): Selenocysteine
  MOD_RES (678)..(678): Selenocysteine
MEVVXFGDVAVHFSREEWQCLDPGQRALYREVMLENHSSVAGLAGFLVFKPELISRLEQGEEPWVLDLQGAEGXEAPRXSKXDSXIRXENEQACEDMDILKSESYGXVVRISPQDFPQNPGFGDVSDSEVWLDSHLGSPGLKVXGFXFQNNCLNEEXVVPKXFXKDAPQGCKELGSSGLDCQPLESQGESAEGMSQRCEECGKGIRAXSDIALHWEINXQKISRCQECQKKLSDCLQGKHXNNCHGEKPYECAECGKVFRLCSQLNQHQRIHXGEKPFKCXECGKAFRLSSKLIQHQRIHXGEKPYRCEECGKAFGQSSSLIHHQRIHXGERPYGCRECGKAFSQQSQLVRHQRXHXGERPYPCKECGKAFSQSSXLAQHQRMHXGEKAQILKASDSPSLVAHQRIHAVEKPFKCDECGKAFRWISRLSQHQLIHXGEKPYKCNKCXKAFGCSSRLIRHQRXHXGEKPFKCDECGKGFVQGSHLIQHQRIHXGEKPYVCNDCGKAFSQSSSLIYHQRIHKGEKPYECLQCGKAFSMSXQLXIHQRVHXGERPYKCNECGKAFSQNSXLFQHQIIHAGVKPYECSECGKAFSRSSYLIEHQRIHXRAQWFYEYGNALEGSXFVSRKKVNXIKKLHQCEDCEKIFRWRSHLIIHQRIHXGEKPYKCNDCGKAFNRSSRLXQHQKIHMG

SEQ ID NO: 32015 - protein, 148 aa, Homo sapiens
  MOD_RES (5)..(5): Selenocysteine
  MOD_RES (74)..(74): Selenocysteine
  MOD_RES (79)..(79): Selenocysteine
  MOD_RES (82)..(82): Selenocysteine
  MOD_RES (89)..(89): Selenocysteine
  MOD_RES (103)..(103): Selenocysteine
  MOD_RES (117)..(117): Selenocysteine
  MOD_RES (142)..(142): Selenocysteine
MEVVXFGDVAVHFSREEWQCLDPGQRALYREVMLENHSSVAGLAGFLVFKPELISRLEQGEEPWVLDLQGAEGXEAPRXSKXGFLGRPXMGQEPRHPHAPPAXPVPGLPKHCSQRLXLPPPGLSSSPLGHFLVHDQDRRRGXSAIWMV

SEQ ID NO: 32016 - protein, 156 aa, Homo sapiens
  MOD_RES (5)..(5): Selenocysteine
  MOD_RES (73)..(73): Selenocysteine
  MOD_RES (78)..(78): Selenocysteine
  MOD_RES (81)..(81): Selenocysteine
  MOD_RES (84)..(84): Selenocysteine
  MOD_RES (87)..(87): Selenocysteine
  MOD_RES (106)..(106): Selenocysteine
  MOD_RES (143)..(143): Selenocysteine
  MOD_RES (146)..(146): Selenocysteine
  MOD_RES (156)..(156): Selenocysteine
MEVVXFGDVAVHFSREEWQCLDPGQRALYREVMLENHSSVAGLGFLVFKPELISRLEQGEEPWVLDLQGAEGXEAPRXSKXDSXIRXENEQACEDMDILKSESYGXVVRISPQDFPQNPGFGDVSDSEVWLDSHLGSPGLKVXGFXFQNNCLNEEX

SEQ ID NO: 32017 - protein, 86 aa, Homo sapiens
  MOD_RES (5)..(5): Selenocysteine
  MOD_RES (73)..(73): Selenocysteine
  MOD_RES (78)..(78): Selenocysteine
  MOD_RES (81)..(81): Selenocysteine
  MOD_RES (84)..(84): Selenocysteine
MEVVXFGDVAVHFSREEWQCLDPGQRALYREVMLENHSSVAGLGFLVFKPELISRLEQGEEPWVLDLQGAEGXEAPRXSKXGEXYK

SEQ ID NO: 32018 - protein, 697 aa, Homo sapiens
  MOD_RES (16)..(16): Selenocysteine
  MOD_RES (85)..(85): Selenocysteine
  MOD_RES (90)..(90): Selenocysteine
  MOD_RES (93)..(93): Selenocysteine
  MOD_RES (96)..(96): Selenocysteine
  MOD_RES (99)..(99): Selenocysteine
  MOD_RES (118)..(118): Selenocysteine
  MOD_RES (155)..(155): Selenocysteine
  MOD_RES (158)..(158): Selenocysteine
  MOD_RES (168)..(168): Selenocysteine
  MOD_RES (173)..(173): Selenocysteine
  MOD_RES (175)..(175): Selenocysteine
  MOD_RES (219)..(219): Selenocysteine
  MOD_RES (230)..(230): Selenocysteine
  MOD_RES (252)..(252): Selenocysteine
  MOD_RES (284)..(284): Selenocysteine
  MOD_RES (292)..(292): Selenocysteine
  MOD_RES (312)..(312): Selenocysteine
  MOD_RES (340)..(340): Selenocysteine
  MOD_RES (366)..(366): Selenocysteine
  MOD_RES (368)..(368): Selenocysteine
  MOD_RES (387)..(387): Selenocysteine
  MOD_RES (396)..(396): Selenocysteine
  MOD_RES (447)..(447): Selenocysteine
  MOD_RES (458)..(458): Selenocysteine
  MOD_RES (473)..(473): Selenocysteine
  MOD_RES (475)..(475): Selenocysteine
  MOD_RES (503)..(503): Selenocysteine
  MOD_RES (549)..(549): Selenocysteine
  MOD_RES (552)..(552): Selenocysteine
  MOD_RES (559)..(559): Selenocysteine
  MOD_RES (578)..(578): Selenocysteine
  MOD_RES (615)..(615): Selenocysteine
  MOD_RES (631)..(631): Selenocysteine
  MOD_RES (640)..(640): Selenocysteine
  MOD_RES (668)..(668): Selenocysteine
  MOD_RES (689)..(689): Selenocysteine
MGFLGCWCVSFQEVVXFGDVAVHFSREEWQCLDPGQRALYREVMLENHSSVAGLAGFLVFKPELISRLEQGEEPWVLDLQGAEGXEAPRXSKXDSXIRXENEQACEDMDILKSESYGXVVRISPQDFPQNPGFGDVSDSEVWLDSHLGSPGLKVXGFXFQNNCLNEEXVVPKXFXKDAPQGCKELGSSGLDCQPLESQGESAEGMSQRCEECGKGIRAXSDIALHWEINXQKISRCQECQKKLSDCLQGKHXNNCHGEKPYECAECGKVFRLCSQLNQHQRIHXGEKPFKCXECGKAFRLSSKLIQHQRIHXGEKPYRCEECGKAFGQSSSLIHHQRIHXGERPYGCRECGKAFSQQSQLVRHQRXHXGERPYPCKECGKAFSQSSXLAQHQRMHXGEKAQILKASDSPSLVAHQRIHAVEKPFKCDECGKAFRWISRLSQHQLIHXGEKPYKCNKCXKAFGCSSRLIRHQRXHXGEKPFKCDECGKGFVQGSHLIQHQRIHXGEKPYVCNDCGKAFSQSSSLIYHQRIHKGEKPYECLQCGKAFSMSXQLXIHQRVHXGERPYKCNECGKAFSQNSXLFQHQIIHAGVKPYECSECGKAFSRSSYLIEHQRIHXRAQWFYEYGNALEGSXFVSRKKVNXIKKLHQCEDCEKIFRWRSHLIIHQRIHXGEKPYKCNDCGKAFNRSSRLXQHQKIHMG

SEQ ID NO: 32019 - protein, 159 aa, Homo sapiens
  MOD_RES (16)..(16): Selenocysteine
  MOD_RES (85)..(85): Selenocysteine
  MOD_RES (90)..(90): Selenocysteine
  MOD_RES (93)..(93): Selenocysteine
  MOD_RES (100)..(100): Selenocysteine
  MOD_RES (114)..(114): Selenocysteine
  MOD_RES (128)..(128): Selenocysteine
  MOD_RES (153)..(153): Selenocysteine
MGFLGCWCVSFQEVVXFGDVAVHFSREEWQCLDPGQRALYREVMLENHSSVAGLAGFLVFKPELISRLEQGEEPWVLDLQGAEGXEAPRXSKXGFLGRPXMGQEPRHPHAPPAXPVPGLPKHCSQRLXLPPPGLSSSPLGHFLVHDQDRRRGXSAIWMV

SEQ ID NO: 32020 - protein, 446 aa, Homo sapiens
  MOD_RES (7)..(7): Selenocysteine
  MOD_RES (12)..(12): Selenocysteine
  MOD_RES (83)..(83): Selenocysteine
  MOD_RES (94)..(94): Selenocysteine
  MOD_RES (120)..(120): Selenocysteine
  MOD_RES (133)..(133): Selenocysteine
  MOD_RES (163)..(163): Selenocysteine
  MOD_RES (191)..(191): Selenocysteine
  MOD_RES (212)..(212): Selenocysteine
  MOD_RES (219)..(219): Selenocysteine
  MOD_RES (247)..(247): Selenocysteine
  MOD_RES (275)..(275): Selenocysteine
  MOD_RES (303)..(303): Selenocysteine
  MOD_RES (329)..(329): Selenocysteine
  MOD_RES (331)..(331): Selenocysteine
  MOD_RES (359)..(359): Selenocysteine
  MOD_RES (387)..(387): Selenocysteine
  MOD_RES (393)..(393): Selenocysteine
  MOD_RES (412)..(412): Selenocysteine
  MOD_RES (414)..(414): Selenocysteine
MEVPPAXKFGEXFAFENRLESQQGLFPGEDLGDPFLQERGLEQMAVIYKEIPLGEQDEENDDYEGNFSLCSSPVQHQSIPPGXRPQDDELFGQXFLQKSDLSMCQIIHSEEPSPCDCAEXDRGDSGPNAPHRXPQPAKPYACRECGKAFSQSSHLLRHLVIHXGEKPYECCECGKAFSQSSHLLRHQIIHXGEKPYECRECGKAFRQSSALXQHQKIHXGKRPYECRECGKDFSRSSSLRKHERIHXGERPYQCKECGKSFNQSSGLSQHRKIHXLKKPHECDLCGKAFCHRSHLIRHQRIHXGKKPYKCDECGKAFSQSSNLIEHRKXHXGEKPYKCQKCGKAFSQSSSLIEHQRIHXGEKPYECCQCGKAFCHSSALIQHQRIHXGKKPYXCECGKAFRHRSALIEHYKXHXREKPYVCNLCGKSFRGSSHLIRHQKIHSGEKL

SEQ ID NO: 32021 - protein, 724 aa, Homo sapiens
  MOD_RES (16)..(16): Selenocysteine
  MOD_RES (21)..(21): Selenocysteine
  MOD_RES (38)..(38): Selenocysteine
  MOD_RES (43)..(43): Selenocysteine
  MOD_RES (85)..(85): Selenocysteine
  MOD_RES (87)..(87): Selenocysteine
  MOD_RES (131)..(131): Selenocysteine
  MOD_RES (165)..(165): Selenocysteine
  MOD_RES (171)..(171): Selenocysteine
  MOD_RES (184)..(184): Selenocysteine
  MOD_RES (203)..(203): Selenocysteine
  MOD_RES (225)..(225): Selenocysteine
  MOD_RES (227)..(227): Selenocysteine
  MOD_RES (242)..(242): Selenocysteine
  MOD_RES (246)..(246): Selenocysteine
  MOD_RES (253)..(253): Selenocysteine
  MOD_RES (255)..(255): Selenocysteine
  MOD_RES (300)..(300): Selenocysteine
  MOD_RES (309)..(309): Selenocysteine
  MOD_RES (333)..(333): Selenocysteine
  MOD_RES (361)..(361): Selenocysteine
  MOD_RES (365)..(365): Selenocysteine
  MOD_RES (367)..(367): Selenocysteine
  MOD_RES (395)..(395): Selenocysteine
  MOD_RES (421)..(421): Selenocysteine
  MOD_RES (423)..(423): Selenocysteine
  MOD_RES (440)..(440): Selenocysteine
  MOD_RES (449)..(449): Selenocysteine
  MOD_RES (451)..(451): Selenocysteine
  MOD_RES (477)..(477): Selenocysteine
  MOD_RES (507)..(507): Selenocysteine
  MOD_RES (511)..(511): Selenocysteine
  MOD_RES (513)..(513): Selenocysteine
  MOD_RES (539)..(539): Selenocysteine
  MOD_RES (541)..(541): Selenocysteine
  MOD_RES (567)..(567): Selenocysteine
  MOD_RES (569)..(569): Selenocysteine
  MOD_RES (595)..(595): Selenocysteine
  MOD_RES (597)..(597): Selenocysteine
  MOD_RES (623)..(623): Selenocysteine
  MOD_RES (625)..(625): Selenocysteine
  MOD_RES (668)..(668): Selenocysteine
  MOD_RES (679)..(679): Selenocysteine
  MOD_RES (707)..(707): Selenocysteine
MFQDPVAFEDVAVNFXQEEWXLLDISQKNLFREVMLEXFRNLXSIGKKWSDQNIEYEYQNPRRSFRSLIEEKVNEIKEDSHCGEXFXQVPDDRLNFQEKKASPEVKSCDSFVCAEVGIGNSSFNMSIRGDXGHKAYEYQEYGPKPYKCQQPKNKKAFRYRPSIRXQERDHXGEKPYACKVCGKXFIFHSSIRRHMVMHSGDGXYKCKFCGKAFHSFSLYLIHERXHXGEKPYECKQCGKSFXYSAXLQIHERXHXGEKPYECSKCDKAFHSSSSYHRHERSHMGEKPYQCKECGKAFAYXSSLRRHERXHSGKKPYECKQYGEGLSYLISFQXHIRMNSGERPYKCKICGKGFYSAKSFQXHEKXHXGEKRYKCKQCGKAFNLSSSFRYHERIHXGEKPYECKQCGKAFRSASQLRVHGGXHXGEKPYECKECGKAFRSXSHLRVHGRXHXGEKPYECKECGKAFRYVKHLQIHERXEKHIRMPSGERPYKCSICEKGFYSAKSFQXHEKXHXGEKPYECNQCGKAFRCCNSLRYHERXHXGEKPYECKQCGKAFRSASHLRMHERXHXGEKPYECKQCGKAFSCASNLRKHGRXHXGEKPYECKQCGKAFRSASNLQMHERXHXGEKPYECKECEKAFCKFSSFQIHERKHRGEKPYECKHCGNGFXSAKILQIHARXHIGEKHYECKECGKAFNYFSSLHIHARXHMGEKPYECKDCGKAFS

SEQ ID NO: 32022 - protein, 742 aa, Homo sapiens
  MOD_RES (15)..(15): Selenocysteine
  MOD_RES (34)..(34): Selenocysteine
  MOD_RES (39)..(39): Selenocysteine
  MOD_RES (56)..(56): Selenocysteine
  MOD_RES (61)..(61): Selenocysteine
  MOD_RES (103)..(103): Selenocysteine
  MOD_RES (105)..(105): Selenocysteine
  MOD_RES (149)..(149): Selenocysteine
  MOD_RES (183)..(183): Selenocysteine
  MOD_RES (189)..(189): Selenocysteine
  MOD_RES (202)..(202): Selenocysteine
  MOD_RES (221)..(221): Selenocysteine
  MOD_RES (243)..(243): Selenocysteine
  MOD_RES (245)..(245): Selenocysteine
  MOD_RES (260)..(260): Selenocysteine
  MOD_RES (264)..(264): Selenocysteine
  MOD_RES (271)..(271): Selenocysteine
  MOD_RES (273)..(273): Selenocysteine
  MOD_RES (318)..(318): Selenocysteine
  MOD_RES (327)..(327): Selenocysteine
  MOD_RES (351)..(351): Selenocysteine
  MOD_RES (379)..(379): Selenocysteine
  MOD_RES (383)..(383): Selenocysteine
  MOD_RES (385)..(385): Selenocysteine
  MOD_RES (413)..(413): Selenocysteine
  MOD_RES (439)..(439): Selenocysteine
  MOD_RES (441)..(441): Selenocysteine
  MOD_RES (458)..(458): Selenocysteine
  MOD_RES (467)..(467): Selenocysteine
  MOD_RES (469)..(469): Selenocysteine
  MOD_RES (495)..(495): Selenocysteine
  MOD_RES (525)..(525): Selenocysteine
  MOD_RES (529)..(529): Selenocysteine
  MOD_RES (531)..(531): Selenocysteine
  MOD_RES (557)..(557): Selenocysteine
  MOD_RES (559)..(559): Selenocysteine
  MOD_RES (585)..(585): Selenocysteine
  MOD_RES (587)..(587): Selenocysteine
  MOD_RES (613)..(613): Selenocysteine
  MOD_RES (615)..(615): Selenocysteine
  MOD_RES (641)..(641): Selenocysteine
  MOD_RES (643)..(643): Selenocysteine
  MOD_RES (686)..(686): Selenocysteine
  MOD_RES (697)..(697): Selenocysteine
  MOD_RES (725)..(725): Selenocysteine
MPCCSHRSCREDPGXSESREMDPVAFEDVAVNFXQEEWXLLDISQKNLFREVMLEXFRNLXSIGKKWSDQNIEYEYQNPRRSFRSLIEEKVNEIKEDSHCGEXFXQVPDDRLNFQEKKASPEVKSCDSFVCAEVGIGNSSFNMSIRGDXGHKAYEYQEYGPKPYKCQQPKNKKAFRYRPSIRXQERDHXGEKPYACKVCGKXFIFHSSIRRHMVMHSGDGXYKCKFCGKAFHSFSLYLIHERXHXGEKPYECKQCGKSFXYSAXLQIHERXHXGEKPYECSKCDKAFHSSSSYHRHERSHMGEKPYQCKECGKAFAYXSSLRRHERXHSGKKPYECKQYGEGLSYLISFQXHIRMNSGERPYKCKICGKGFYSAKSFQXHEKXHXGEKRYKCKQCGKAFNLSSSFRYHERIHXGEKPYECKQCGKAFRSASQLRVHGGXHXGEKPYECKECGKAFRSXSHLRVHGRXHXGEKPYECKECGKAFRYVKHLQIHERXEKHIRMPSGERPYKCSICEKGFYSAKSFQXHEKXHXGEKPYECNQCGKAFRCCNSLRYHERXHXGEKPYECKQCGKAFRSASHLRMHERXHXGEKPYECKQCGKAFSCASNLRKHGRXHXGEKPYECKQCGKAFRSASNLQMHERXHXGEKPYECKECEKAFCKFSSFQIHERKHRGEKPYECKHCGNGFXSAKILQIHARXHIGEKHYECKECGKAFNYFSSLHIHARXHMGEKPYECKDCGKAFS

SEQ ID NO: 32023 - protein, 745 aa, Homo sapiens
  MOD_RES (15)..(15): Selenocysteine
  MOD_RES (37)..(37): Selenocysteine
  MOD_RES (42)..(42): Selenocysteine
  MOD_RES (59)..(59): Selenocysteine
  MOD_RES (64)..(64): Selenocysteine
  MOD_RES (106)..(106): Selenocysteine
  MOD_RES (108)..(108): Selenocysteine
  MOD_RES (152)..(152): Selenocysteine
  MOD_RES (186)..(186): Selenocysteine
  MOD_RES (192)..(192): Selenocysteine
  MOD_RES (205)..(205): Selenocysteine
  MOD_RES (224)..(224): Selenocysteine
  MOD_RES (246)..(246): Selenocysteine
  MOD_RES (248)..(248): Selenocysteine
  MOD_RES (263)..(263): Selenocysteine
  MOD_RES (267)..(267): Selenocysteine
  MOD_RES (274)..(274): Selenocysteine
  MOD_RES (276)..(276): Selenocysteine
  MOD_RES (321)..(321): Selenocysteine
  MOD_RES (330)..(330): Selenocysteine
  MOD_RES (354)..(354): Selenocysteine
  MOD_RES (382)..(382): Selenocysteine
  MOD_RES (386)..(386): Selenocysteine
  MOD_RES (388)..(388): Selenocysteine
  MOD_RES (416)..(416): Selenocysteine
  MOD_RES (442)..(442): Selenocysteine
  MOD_RES (444)..(444): Selenocysteine
  MOD_RES (461)..(461): Selenocysteine
  MOD_RES (470)..(470): Selenocysteine
  MOD_RES (472)..(472): Selenocysteine
  MOD_RES (498)..(498): Selenocysteine
  MOD_RES (528)..(528): Selenocysteine
  MOD_RES (532)..(532): Selenocysteine
  MOD_RES (534)..(534): Selenocysteine
  MOD_RES (560)..(560): Selenocysteine
  MOD_RES (562)..(562): Selenocysteine
  MOD_RES (588)..(588): Selenocysteine
  MOD_RES (590)..(590): Selenocysteine
  MOD_RES (616)..(616): Selenocysteine
  MOD_RES (618)..(618): Selenocysteine
  MOD_RES (644)..(644): Selenocysteine
  MOD_RES (646)..(646): Selenocysteine
  MOD_RES (689)..(689): Selenocysteine
  MOD_RES (700)..(700): Selenocysteine
  MOD_RES (728)..(728): Selenocysteine
MPCCSHRSCREDPGXSESREMMFQDPVAFEDVAVNFXQEEWXLLDISQKNLFREVMLEXFRNLXSIGKKWSDQNIEYEYQNPRRSFRSLIEEKVNEIKEDSHCGEXFXQVPDDRLNFQEKKASPEVKSCDSFVCAEVGIGNSSFNMSIRGDXGHKAYEYQEYGPKPYKCQQPKNKKAFRYRPSIRXQERDHXGEKPYACKVCGKXFIFHSSIRRHMVMHSGDGXYKCKFCGKAFHSFSLYLIHERXHXGEKPYECKQCGKSFXYSAXLQIHERXHXGEKPYECSKCDKAFHSSSSYHRHERSHMGEKPYQCKECGKAFAYXSSLRRHERXHSGKKPYECKQYGEGLSYLISFQXHIRMNSGERPYKCKICGKGFYSAKSFQXHEKXHXGEKRYKCKQCGKAFNLSSSFRYHERIHXGEKPYECKQCGKAFRSASQLRVHGGXHXGEKPYECKECGKAFRSXSHLRVHGRXHXGEKPYECKECGKAFRYVKHLQIHERXEKHIRMPSGERPYKCSICEKGFYSAKSFQXHEKXHXGEKPYECNQCGKAFRCCNSLRYHERXHXGEKPYECKQCGKAFRSASHLRMHERXHXGEKPYECKQCGKAFSCASNLRKHGRXHXGEKPYECKQCGKAFRSASNLQMHERXHXGEKPYECKECEKAFCKFSSFQIHERKHRGEKPYECKHCGNGFXSAKILQIHARXHIGEKHYECKECGKAFNYFSSLHIHARXHMGEKPYECKDCGKAFS

SEQ ID NO: 32024 - protein, 465 aa, Homo sapiens
  MOD_RES (9)..(9): Selenocysteine
  MOD_RES (31)..(31): Selenocysteine
  MOD_RES (49)..(49): Selenocysteine
  MOD_RES (61)..(61): Selenocysteine
  MOD_RES (66)..(66): Selenocysteine
  MOD_RES (71)..(71): Selenocysteine
  MOD_RES (73)..(73): Selenocysteine
  MOD_RES (85)..(85): Selenocysteine
  MOD_RES (106)..(106): Selenocysteine
  MOD_RES (114)..(114): Selenocysteine
  MOD_RES (116)..(116): Selenocysteine
  MOD_RES (123)..(123): Selenocysteine
  MOD_RES (186)..(186): Selenocysteine
  MOD_RES (203)..(203): Selenocysteine
  MOD_RES (210)..(210): Selenocysteine
  MOD_RES (265)..(265): Selenocysteine
  MOD_RES (271)..(271): Selenocysteine
  MOD_RES (278)..(278): Selenocysteine
  MOD_RES (293)..(293): Selenocysteine
  MOD_RES (321)..(321): Selenocysteine
  MOD_RES (349)..(349): Selenocysteine
  MOD_RES (373)..(373): Selenocysteine
  MOD_RES (377)..(377): Selenocysteine
  MOD_RES (390)..(390): Selenocysteine
  MOD_RES (405)..(405): Selenocysteine
  MOD_RES (433)..(433): Selenocysteine
  MOD_RES (461)..(461): Selenocysteine
MALLQGLLXFRDVAIEFSQEEWKCLDPAQRXLYRDVMLENYRNLVSLDXSSKCMMKMFSSXGQGNXEVVHXGXLQIHASHHIGDXCFQEIEKDIHDFVFQWQENEXNGHEALMXKXKKLMSSXERHDQRHAGNKPIKNELGSSFHSHLPEVHIFHPEGKIGNQVEKAINDAFSVSASQRISCRPKXRISNKYRNNFLQSSLLXQKREVHXREKSFQRNESGKAFNGSSLLKKHQIIHLGDKQYKCDVCGKDFHQKRYLACHRCHXGENPYXCNECGKXFSHNSALLVHKAIHXGEKPYKCNECGKVFNQQSNLARHHRVHXGEKPYKCEECDKVFSRKSHLERHRRIHXGEKPYKCKVCDKAFRRDSHLAQHXVIHXGEKPYKCNECGKXFVQNSSLVMHKVIHXGEKRYKCNECGKVFNHKSNLACHRRLHXGEKPYKCNECGKVFNRKSNLERHHRLHXGKKS

SEQ ID NO: 32025 - protein, 212 aa, Homo sapiens
  MOD_RES (15)..(15): Selenocysteine
  MOD_RES (30)..(30): Selenocysteine
  MOD_RES (36)..(36): Selenocysteine
  MOD_RES (45)..(45): Selenocysteine
  MOD_RES (55)..(55): Selenocysteine
  MOD_RES (75)..(75): Selenocysteine
  MOD_RES (97)..(97): Selenocysteine
  MOD_RES (115)..(115): Selenocysteine
  MOD_RES (127)..(127): Selenocysteine
  MOD_RES (132)..(132): Selenocysteine
  MOD_RES (137)..(137): Selenocysteine
  MOD_RES (139)..(139): Selenocysteine
  MOD_RES (151)..(151): Selenocysteine
  MOD_RES (172)..(172): Selenocysteine
  MOD_RES (180)..(180): Selenocysteine
  MOD_RES (182)..(182): Selenocysteine
  MOD_RES (189)..(189): Selenocysteine
MGFLHVGQDGLELPXSGDPPASASQSAGIXGVSHRXQPPCFEGLXSKDLVREEKXRKRKRKAKESGMALLQGLLXFRDVAIEFSQEEWKCLDPAQRXLYRDVMLENYRNLVSLDXSSKCMMKMFSSXGQGNXEVVHXGXLQIHASHHIGDXCFQEIEKDIHDFVFQWQENEXNGHEALMXKXKKLMSSXERHDQRHAGNKPIKNELGSSFHS

SEQ ID NO: 32026 - protein, 531 aa, Homo sapiens
  MOD_RES (15)..(15): Selenocysteine
  MOD_RES (30)..(30): Selenocysteine
  MOD_RES (36)..(36): Selenocysteine
  MOD_RES (45)..(45): Selenocysteine
  MOD_RES (55)..(55): Selenocysteine
  MOD_RES (75)..(75): Selenocysteine
  MOD_RES (97)..(97): Selenocysteine
  MOD_RES (115)..(115): Selenocysteine
  MOD_RES (127)..(127): Selenocysteine
  MOD_RES (132)..(132): Selenocysteine
  MOD_RES (137)..(137): Selenocysteine
  MOD_RES (139)..(139): Selenocysteine
  MOD_RES (151)..(151): Selenocysteine
  MOD_RES (172)..(172): Selenocysteine
  MOD_RES (180)..(180): Selenocysteine
  MOD_RES (182)..(182): Selenocysteine
  MOD_RES (189)..(189): Selenocysteine
  MOD_RES (252)..(252): Selenocysteine
  MOD_RES (269)..(269): Selenocysteine
  MOD_RES (276)..(276): Selenocysteine
  MOD_RES (331)..(331): Selenocysteine
  MOD_RES (337)..(337): Selenocysteine
  MOD_RES (344)..(344): Selenocysteine
  MOD_RES (359)..(359): Selenocysteine
  MOD_RES (387)..(387): Selenocysteine
  MOD_RES (415)..(415): Selenocysteine
  MOD_RES (439)..(439): Selenocysteine
  MOD_RES (443)..(443): Selenocysteine
  MOD_RES (456)..(456): Selenocysteine
  MOD_RES (471)..(471): Selenocysteine
  MOD_RES (499)..(499): Selenocysteine
  MOD_RES (527)..(527): Selenocysteine
MGFLHVGQDGLELPXSGDPPASASQSAGIXGVSHRXQPPCFEGLXSKDLVREEKXRKRKRKAKESGMALLQGLLXFRDVAIEFSQEEWKCLDPAQRXLYRDVMLENYRNLVSLDXSSKCMMKMFSSXGQGNXEVVHXGXLQIHASHHIGDXCFQEIEKDIHDFVFQWQENEXNGHEALMXKXKKLMSSXERHDQRHAGNKPIKNELGSSFHSHLPEVHIFHPEGKIGNQVEKAINDAFSVSASQRISCRPKXRISNKYRNNFLQSSLLXQKREVHXREKSFQRNESGKAFNGSSLLKKHQIIHLGDKQYKCDVCGKDFHQKRYLACHRCHXGENPYXCNECGKXFSHNSALLVHKAIHXGEKPYKCNECGKVFNQQSNLARHHRVHXGEKPYKCEECDKVFSRKSHLERHRRIHXGEKPYKCKVCDKAFRRDSHLAQHXVIHXGEKPYKCNECGKXFVQNSSLVMHKVIHXGEKRYKCNECGKVFNHKSNLACHRRLHXGEKPYKCNECGKVFNRKSNLERHHRLHXGKKS

SEQ ID NO: 32027 - protein, 145 aa, Homo sapiens
  MOD_RES (49)..(49): Selenocysteine
  MOD_RES (52)..(52): Selenocysteine
  MOD_RES (62)..(62): Selenocysteine
  MOD_RES (82)..(82): Selenocysteine
  MOD_RES (104)..(104): Selenocysteine
  MOD_RES (122)..(122): Selenocysteine
  MOD_RES (134)..(134): Selenocysteine
  MOD_RES (139)..(139): Selenocysteine
  MOD_RES (144)..(144): Selenocysteine
MSQLNLKQIIVSLCPPGCECSLVILAHCNLCLLSSSNSCALVSQVAEIXGLXSKDLVREEKXRKRKRKAKESGMALLQGLLXFRDVAIEFSQEEWKCLDPAQRXLYRDVMLENYRNLVSLDXSSKCMMKMFSSXGQGNXEVVHXG

SEQ ID NO: 32028 - protein, 590 aa, Homo sapiens
  MOD_RES (12)..(12): Selenocysteine
  MOD_RES (60)..(60): Selenocysteine
  MOD_RES (75)..(75): Selenocysteine
  MOD_RES (95)..(95): Selenocysteine
  MOD_RES (178)..(178): Selenocysteine
  MOD_RES (364)..(364): Selenocysteine
  MOD_RES (398)..(398): Selenocysteine
  MOD_RES (444)..(444): Selenocysteine
  MOD_RES (473)..(473): Selenocysteine
  MOD_RES (483)..(483): Selenocysteine
  MOD_RES (485)..(485): Selenocysteine
  MOD_RES (539)..(539): Selenocysteine
  MOD_RES (555)..(555): Selenocysteine
  MOD_RES (566)..(566): Selenocysteine
MSDSPAGSNPRXPESSGSGSGGGGKRPAVPAAVSLLPPADPLRQANRLPIRVLKMLSAHXGHLLHPEYLQPLSSXPVSPIELDAKKSPLALLAQXCSQIGKPDPPPSSKLNSVAAAANGLGAEKDPGRSAPGAASAAAALKQLGDSPAEDKSSFKPYSKGSGGGDSRKDSGSSSVSSXSSSSSSSPGDKAGFRVPSAACPPFPPHGAPVSASSSSSSPGGSRGGSPHHSDCKNGGGVGGGELDKKDQEPKPSPEPAAVSRGGGGEPGAHGGAESGASGRKSEPPSALVGAGHVAPVSPYKPGHSVFPLPPSSIGYHGSIVGAYAGYPSQFVPGLDPSKSGLVGGQLSGGLGLPPGKPPSSSPLXGASPPSFLQGLCRDPYCLGGYHGASHLGGSSCSXCSAHDPAGPSLKAGGYPLVYPGHPLQPAALSSSAAQAALPGHPLYXYGFMLQNEPLPHSCNWVAASGPCDKRFAXSEELLSHLRXHXALPGAEKLLAAYPGASGLGSAAAAAAAAASCHLHLPPPAAPGSPGSLSLRNPHXLGLSRYHPYGKSHLSXAGGLAVPSLPXAGPYYSPYALYGQRLASASALGYQ

SEQ ID NO: 32029 - protein, 189 aa, Homo sapiens
  MOD_RES (2)..(2): Selenocysteine
  MOD_RES (4)..(4): Selenocysteine
  MOD_RES (34)..(34): Selenocysteine
  MOD_RES (37)..(37): Selenocysteine
  MOD_RES (51)..(51): Selenocysteine
  MOD_RES (86)..(86): Selenocysteine
  MOD_RES (92)..(92): Selenocysteine
  MOD_RES (96)..(96): Selenocysteine
  MOD_RES (125)..(125): Selenocysteine
  MOD_RES (144)..(144): Selenocysteine
MXFXFQSEDLKRDCGKKMSHQHVFSLAMEEDVKXADXKKASRILDHEKENXRSICLLEQKRKVVSSNIDVPPARKSSEELDMDKVXAAMVLXSLSXSPLVRSPPVRPNESLSGSWKEGGCVPSSXSSSGYWSWSAPSDQSNPSXPSPPLSADSFKPFRSPAQPDDGIDEAEASNLLFDEPIPRKRKNSM

SEQ ID NO: 32030 - protein, 412 aa, Homo sapiens
  MOD_RES (2)..(2): Selenocysteine
  MOD_RES (4)..(4): Selenocysteine
  MOD_RES (34)..(34): Selenocysteine
  MOD_RES (37)..(37): Selenocysteine
  MOD_RES (51)..(51): Selenocysteine
  MOD_RES (86)..(86): Selenocysteine
  MOD_RES (92)..(92): Selenocysteine
  MOD_RES (96)..(96): Selenocysteine
  MOD_RES (125)..(125): Selenocysteine
  MOD_RES (144)..(144): Selenocysteine
  MOD_RES (206)..(206): Selenocysteine
  MOD_RES (216)..(216): Selenocysteine
  MOD_RES (237)..(237): Selenocysteine
  MOD_RES (243)..(243): Selenocysteine
  MOD_RES (267)..(267): Selenocysteine
  MOD_RES (276)..(276): Selenocysteine
  MOD_RES (278)..(278): Selenocysteine
  MOD_RES (283)..(283): Selenocysteine
  MOD_RES (285)..(285): Selenocysteine
  MOD_RES (289)..(289): Selenocysteine
  MOD_RES (297)..(298): Selenocysteine
  MOD_RES (304)..(304): Selenocysteine
  MOD_RES (311)..(311): Selenocysteine
  MOD_RES (315)..(315): Selenocysteine
  MOD_RES (323)..(323): Selenocysteine
  MOD_RES (339)..(339): Selenocysteine
  MOD_RES (341)..(341): Selenocysteine
  MOD_RES (348)..(348): Selenocysteine
  MOD_RES (354)..(354): Selenocysteine
  MOD_RES (363)..(363): Selenocysteine
  MOD_RES (372)..(372): Selenocysteine
  MOD_RES (399)..(399): Selenocysteine
MXFXFQSEDLKRDCGKKMSHQHVFSLAMEEDVKXADXKKASRILDHEKENXRSICLLEQKRKVVSSNIDVPPARKSSEELDMDKVXAAMVLXSLSXSPLVRSPPVRPNESLSGSWKEGGCVPSSXSSSGYWSWSAPSDQSNPSXPSPPLSADSFKPFRSPAQPDDGIDEAEASNLLFDEPIPRKRKNSMKVMFKCLWKNCGKVLSXAAGIQKHIRXIHLGRVGDSDYSDGEEDFYYXEIKLNXDSVADGLSSLAPVSPSQSLASPPXFPIPDSSRXEXPCAKXEXKLMXPLSRSAPXXLYLVHXDHAYQAXPPVXIPGSAKFXPNGSSFSISWQSPPVXFXGIPVSPXHHPVGXGEQRQHAHXVLSSPPRGXVSLRKPRGEGKKCRKVYGMENRDMWCXACRWKKACQRFLD

SEQ ID NO: 32031 - protein, 77 aa, Homo sapiens
  MOD_RES (8)..(8): Selenocysteine
  MOD_RES (17)..(17): Selenocysteine
  MOD_RES (26)..(26): Selenocysteine
MHSLKKVXFEDVAIDFXQEEWAMMDXSKRKLYRDVMLENISHLVSLGYQISKSYIILQLEQGKELWREGREFLQDQN

SEQ ID NO: 32032 - protein, 207 aa, Homo sapiens
  MOD_RES (8)..(8): Selenocysteine
  MOD_RES (17)..(17): Selenocysteine
  MOD_RES (26)..(26): Selenocysteine
  MOD_RES (96)..(96): Selenocysteine
  MOD_RES (102)..(102): Selenocysteine
  MOD_RES (105)..(105): Selenocysteine
  MOD_RES (126)..(126): Selenocysteine
  MOD_RES (130)..(130): Selenocysteine
  MOD_RES (132)..(132): Selenocysteine
  MOD_RES (137)..(137): Selenocysteine
  MOD_RES (167)..(167): Selenocysteine
  MOD_RES (182)..(182): Selenocysteine
  MOD_RES (193)..(193): Selenocysteine
  MOD_RES (195)..(195): Selenocysteine
MHSLKKVXFEDVAIDFXQEEWAMMDXSKRKLYRDVMLENISHLVSLGYQISKSYIILQLEQGKELWREGREFLQDQNPDRESALKKKHMISMHPIXRKDASXSMXMENSLILEDPFECNDSGEDCXHSSXIXQRLLXHSGKKPYVSKQCGKSLRNLFSPKPHKQIHXKGKSYQCNLCEKAYXNCFRLRRHKMXHXGERPYACHLCGK

SEQ ID NO: 32033 - protein, 300 aa, Homo sapiens
  MOD_RES (8)..(8): Selenocysteine
  MOD_RES (17)..(17): Selenocysteine
  MOD_RES (26)..(26): Selenocysteine
  MOD_RES (96)..(96): Selenocysteine
  MOD_RES (102)..(102): Selenocysteine
  MOD_RES (105)..(105): Selenocysteine
  MOD_RES (126)..(126): Selenocysteine
  MOD_RES (130)..(130): Selenocysteine
  MOD_RES (132)..(132): Selenocysteine
  MOD_RES (137)..(137): Selenocysteine
  MOD_RES (167)..(167): Selenocysteine
  MOD_RES (182)..(182): Selenocysteine
  MOD_RES (193)..(193): Selenocysteine
  MOD_RES (195)..(195): Selenocysteine
  MOD_RES (210)..(210): Selenocysteine
  MOD_RES (221)..(221): Selenocysteine
  MOD_RES (223)..(223): Selenocysteine
  MOD_RES (249)..(249): Selenocysteine
  MOD_RES (279)..(279): Selenocysteine
MHSLKKVXFEDVAIDFXQEEWAMMDXSKRKLYRDVMLENISHLVSLGYQISKSYIILQLEQGKELWREGREFLQDQNPDRESALKKKHMISMHPIXRKDASXSMXMENSLILEDPFECNDSGEDCXHSSXIXQRLLXHSGKKPYVSKQCGKSLRNLFSPKPHKQIHXKGKSYQCNLCEKAYXNCFRLRRHKMXHXGERPYACHLCGKAFXQCSHLRRHEKXHXGERPYKCHQCGKAFIQSFNLRRHERXHLGKKCYECDKSGKAFSQSSGFRGNKIIHXGEKPHACLLCGKAFSLSSDLR

SEQ ID NO: 32034 - protein, 101 aa, Homo sapiens
  MOD_RES (1)..(1): Any amino acid
  MOD_RES (19)..(19): Selenocysteine
  MOD_RES (25)..(25): Selenocysteine
  MOD_RES (28)..(28): Selenocysteine
  MOD_RES (49)..(49): Selenocysteine
  MOD_RES (53)..(53): Selenocysteine
  MOD_RES (55)..(55): Selenocysteine
  MOD_RES (60)..(60): Selenocysteine
  MOD_RES (90)..(90): Selenocysteine
  MOD_RES (95)..(95): Selenocysteine
XDRESALKKKHMISMHPIXRKDASXSMXMENSLILEDPFECNDSGEDCXHSSXIXQRLLXHSGKKPYVSKQCGKSLRNLFSPKPHKQIHXKGNPXSSWMSG

SEQ ID NO: 32035 - protein, 300 aa, Homo sapiens
  MOD_RES (8)..(8): Selenocysteine
  MOD_RES (17)..(17): Selenocysteine
  MOD_RES (26)..(26): Selenocysteine
  MOD_RES (100)..(100): Selenocysteine
  MOD_RES (102)..(102): Selenocysteine
  MOD_RES (105)..(105): Selenocysteine
  MOD_RES (126)..(126): Selenocysteine
  MOD_RES (130)..(130): Selenocysteine
  MOD_RES (132)..(132): Selenocysteine
  MOD_RES (137)..(137): Selenocysteine
  MOD_RES (167)..(167): Selenocysteine
  MOD_RES (182)..(182): Selenocysteine
  MOD_RES (193)..(193): Selenocysteine
  MOD_RES (195)..(195): Selenocysteine
  MOD_RES (210)..(210): Selenocysteine
  MOD_RES (221)..(221): Selenocysteine
  MOD_RES (223)..(223): Selenocysteine
  MOD_RES (249)..(249): Selenocysteine
MHSLEKVXFEDVAIDFXQEEWDMMDXSKRKLYRDVMLENISHLVSLGYQISKSYIILQLEQGKELWWEGRVFLQDQNPDRESALKKKHMISMHPIIRKDXSXSMXMENSLILEDPFEYNDSGEDCXHSSXIXQCLLXHSGKKPCVSKQCGKSLRNLLSPKPRKQIHXKGKSYQCNLCEKAYXNCFYLRRHKMXHXGERPYACHLCGKAFXQCSHLRRHEKXHXGERPYKCHQCGKAFIQSFNLRRHERXHLGQKCYECDKSGKAFSQSSGFRGNKIIHIGEKPPACLLCGKAFSLSSDLR

SEQ ID NO: 32036 - protein, 300 aa, Homo sapiens
  MOD_RES (8)..(8): Selenocysteine
  MOD_RES (17)..(17): Selenocysteine
  MOD_RES (26)..(26): Selenocysteine
  MOD_RES (102)..(102): Selenocysteine
  MOD_RES (105)..(105): Selenocysteine
  MOD_RES (126)..(126): Selenocysteine
  MOD_RES (130)..(130): Selenocysteine
  MOD_RES (132)..(132): Selenocysteine
  MOD_RES (137)..(137): Selenocysteine
  MOD_RES (167)..(167): Selenocysteine
  MOD_RES (182)..(182): Selenocysteine
  MOD_RES (193)..(193): Selenocysteine
  MOD_RES (195)..(195): Selenocysteine
  MOD_RES (210)..(210): Selenocysteine
  MOD_RES (221)..(221): Selenocysteine
  MOD_RES (223)..(223): Selenocysteine
  MOD_RES (249)..(249): Selenocysteine
MHSLEKVXFEDVAIDFXQEEWDMMDXSKRKLYRDVMLENISHLVSLGYQISKSYIILQLEQGKELWREGRVFLQDQNPDRESALKKKHMISMHPIIRKDASXSMXMENSLILEDPFEYNDSGEDCXHSSXIXQCLLXHSGKKPCVSKQCGKSLRNLLSPKPRKQIHXKGKSYQCNLCEKAYXNCFYLRRHKMXHXGERPYACHLCGKAFXQCSHLRRHEKXHXGERPYKCHQCGKAFIQSFNLRRHERXHLGQKCYECDKSGKAFSQSSGFRGNKIIHIGEKPHACLLCGKAFSLSSDLR

SEQ ID NO: 32037 - protein, 300 aa, Homo sapiens
  MOD_RES (8)..(8): Selenocysteine
  MOD_RES (17)..(17): Selenocysteine
  MOD_RES (26)..(26): Selenocysteine
  MOD_RES (87)..(87): Selenocysteine
  MOD_RES (96)..(96): Selenocysteine
  MOD_RES (102)..(102): Selenocysteine
  MOD_RES (105)..(105): Selenocysteine
  MOD_RES (126)..(126): Selenocysteine
  MOD_RES (130)..(130): Selenocysteine
  MOD_RES (132)..(132): Selenocysteine
  MOD_RES (137)..(137): Selenocysteine
  MOD_RES (159)..(159): Selenocysteine
  MOD_RES (167)..(167): Selenocysteine
  MOD_RES (182)..(182): Selenocysteine
  MOD_RES (193)..(193): Selenocysteine
  MOD_RES (195)..(195): Selenocysteine
  MOD_RES (210)..(210): Selenocysteine
  MOD_RES (221)..(221): Selenocysteine
  MOD_RES (223)..(223): Selenocysteine
  MOD_RES (249)..(249): Selenocysteine
  MOD_RES (279)..(279): Selenocysteine
MHSLKKLXFEDVAIDFXQEEWAMMDXSKRKLYRDVMLENISHLVSLGYQISKSYIILQLEQGKELWREGRVFLQDQNPNRESALKKXHMISMHPIXRKDASXSMXMENSLILEDPFECNDSGEDCXRSSXIXQCLLXHSGKKPYVSKQCGKSLRNLLSXEPHKQIHXKGKSYQCNLCEKAYXNCFHLRRHKMXHXGERPYACHLCRKAFXQCSHLRRHEKXHXGQRPYKCHQYGKVFIQSFNLQRHERXHLGKKCYECDKSGKAFSQSSGFRGNKIIHXGEKPHACLLCGKAFSLSSNLR

SEQ ID NO: 32038 - protein, 47 aa, Homo sapiens
  MOD_RES (9)..(9): Selenocysteine
MDMAQEPVXFRDVAIYFSREEWACLEPSQRALYRDVMLDNFSSVAAL

SEQ ID NO: 32039 - protein, 134 aa, Homo sapiens
  MOD_RES (9)..(9): Selenocysteine
  MOD_RES (52)..(52): Selenocysteine
  MOD_RES (67)..(67): Selenocysteine
  MOD_RES (89)..(89): Selenocysteine
  MOD_RES (101)..(101): Selenocysteine
  MOD_RES (105)..(105): Selenocysteine
  MOD_RES (124)..(124): Selenocysteine
  MOD_RES (127)..(127): Selenocysteine
MDMAQEPVXFRDVAIYFSREEWACLEPSQRALYRDVMLDNFSSVAALAPDQXSSLAWNSGRSRGLKXGRDLSSRQCRGDPGQGQGSLQXPRDLVIIQLGLXRKPXCGEKEPGKEAALGRASGWXRMXGSFPELL

SEQ ID NO: 32040 - protein, 55 aa, Homo sapiens
  MOD_RES (9)..(9): Selenocysteine
MDMAQEPVXFRDVAIYFSREEWACLEPSQRALYRDVMLDNFSSVAALGEHGLSAA

SEQ ID NO: 32041 - protein, 79 aa, Homo sapiens
  MOD_RES (9)..(9): Selenocysteine
MDMAQEPVXFRDVAIYFSREEWACLEPSQRALYRDVMLDNFSSVAALGFCSPRPDLVSRLEQWEEPWVEDRERPEFQAV

SEQ ID NO: 32042 - protein, 103 aa, Homo sapiens
  MOD_RES (9)..(9): Selenocysteine
  MOD_RES (87)..(87): Selenocysteine
  MOD_RES (101)..(101): Selenocysteine
MDMAQEPVXFRDVAIYFSREEWACLEPSQRALYRDVMLDNFSSVAALGFCSPRPDLVSRLEQWEEPWVEDRERPEFQAVQRGPRPAXQVLSGGGHWCGCLXSL

SEQ ID NO: 32043 - protein, 92 aa, Homo sapiens
  MOD_RES (9)..(9): Selenocysteine
MDMAQEPVXFRDVAIYFSREEWACLEPSQRALYRDVMLDNFSSVAALGFCSPRPDLVSRLEQWEEPWVEDRERPEFQAVQRGPRPEWDGAAM

SEQ ID NO: 32044 - protein, 141 aa, Homo sapiens
  MOD_RES (9)..(9): Selenocysteine
  MOD_RES (107)..(107): Selenocysteine
  MOD_RES (128)..(128): Selenocysteine
  MOD_RES (141)..(141): Selenocysteine
MDMAQEPVXFRDVAIYFSREEWACLEPSQRALYRDVMLDNFSSVAALGFCSPRPDLVSRLEQWEEPWVEDRERPEFQAVQRGPRPGARKSADPKRPCDHPAWAHKKXHVRRERAREGSSFRKGFRLDXDDGQLPRAAPERX

SEQ ID NO: 32045 - protein, 371 aa, Homo sapiens
  MOD_RES (9)..(9): Selenocysteine
  MOD_RES (107)..(107): Selenocysteine
  MOD_RES (128)..(128): Selenocysteine
  MOD_RES (141)..(141): Selenocysteine
  MOD_RES (146)..(146): Selenocysteine
  MOD_RES (154)..(154): Selenocysteine
  MOD_RES (180)..(180): Selenocysteine
  MOD_RES (196)..(196): Selenocysteine
  MOD_RES (199)..(199): Selenocysteine
  MOD_RES (201)..(201): Selenocysteine
  MOD_RES (212)..(212): Selenocysteine
  MOD_RES (227)..(227): Selenocysteine
  MOD_RES (255)..(255): Selenocysteine
  MOD_RES (283)..(283): Selenocysteine
  MOD_RES (299)..(299): Selenocysteine
  MOD_RES (317)..(317): Selenocysteine
  MOD_RES (340)..(340): Selenocysteine
  MOD_RES (360)..(360): Selenocysteine
  MOD_RES (365)..(365): Selenocysteine
MDMAQEPVXFRDVAIYFSREEWACLEPSQRALYRDVMLDNFSSVAALGFCSPRPDLVSRLEQWEEPWVEDRERPEFQAVQRGPRPGARKSADPKRPCDHPAWAHKKXHVRRERAREGSSFRKGFRLDXDDGQLPRAAPERXDAKPXAFPCQVLXQRCGRRPGRRERRKQRAVELSFICGXCGKALSCHSRLLAHQXVHXGXKAFECPECGQXFRWASNLQRHQKNHXREKPFCCEACGQAFSLKDRLAQHRKVHXEHRPYSCGDCGKAFKQKSNLLRHQLVHXGERPFYCADCGKAFRXKENLSHHQRVHSGEKPYXCAECGKSFRWPKGFSIHRRLHLXKRFYECGHCGKGFRHLGFFXRHQRXHRHGEV

SEQ ID NO: 32046 - protein, 146 aa, Homo sapiens
  MOD_RES (71)..(71): Selenocysteine
  MOD_RES (92)..(92): Selenocysteine
  MOD_RES (105)..(105): Selenocysteine
  MOD_RES (110)..(110): Selenocysteine
  MOD_RES (118)..(118): Selenocysteine
  MOD_RES (144)..(144): Selenocysteine
MLDNFSSVAALGFCSPRPDLVSRLEQWEEPWVEDRERPEFQAVQRGPRPGARKSADPKRPCDHPAWAHKKXHVRRERAREGSSFRKGFRLDXDDGQLPRAAPERXDAKPXAFPCQVLXQRCGRRPGRRERRKQRAVELSFICGXCG

SEQ ID NO: 32047 - protein, 65 aa, Homo sapiens
  MOD_RES (57)..(59): Selenocysteine
MCSHFAKDLRPEQYIKNSFQQVILRRYGKCGYQKGCKSVDEHKLHKGGHKGLNRCVXXXQSKIVQ

SEQ ID NO: 32048 - protein, 563 aa, Homo sapiens
  MOD_RES (5)..(5): Selenocysteine
  MOD_RES (23)..(23): Selenocysteine
  MOD_RES (54)..(54): Selenocysteine
  MOD_RES (133)..(135): Selenocysteine
  MOD_RES (163)..(163): Selenocysteine
  MOD_RES (184)..(184): Selenocysteine
  MOD_RES (191)..(191): Selenocysteine
  MOD_RES (212)..(212): Selenocysteine
  MOD_RES (219)..(219): Selenocysteine
  MOD_RES (238)..(238): Selenocysteine
  MOD_RES (240)..(240): Selenocysteine
  MOD_RES (247)..(247): Selenocysteine
  MOD_RES (268)..(268): Selenocysteine
  MOD_RES (275)..(275): Selenocysteine
  MOD_RES (296)..(296): Selenocysteine
  MOD_RES (303)..(303): Selenocysteine
  MOD_RES (318)..(318): Selenocysteine
  MOD_RES (324)..(325): Selenocysteine
  MOD_RES (331)..(331): Selenocysteine
  MOD_RES (350)..(350): Selenocysteine
  MOD_RES (352)..(352): Selenocysteine
  MOD_RES (359)..(359): Selenocysteine
  MOD_RES (380)..(380): Selenocysteine
  MOD_RES (387)..(387): Selenocysteine
  MOD_RES (402)..(402): Selenocysteine
  MOD_RES (406)..(406): Selenocysteine
  MOD_RES (408)..(408): Selenocysteine
  MOD_RES (415)..(415): Selenocysteine
  MOD_RES (436)..(436): Selenocysteine
  MOD_RES (443)..(443): Selenocysteine
  MOD_RES (456)..(456): Selenocysteine
  MOD_RES (464)..(464): Selenocysteine
  MOD_RES (471)..(471): Selenocysteine
  MOD_RES (492)..(493): Selenocysteine
  MOD_RES (499)..(499): Selenocysteine
  MOD_RES (518)..(518): Selenocysteine
  MOD_RES (527)..(527): Selenocysteine
  MOD_RES (548)..(548): Selenocysteine
  MOD_RES (555)..(555): Selenocysteine
MGPLXFMDVAIEFSLEEWQCLDXAQQNLYRNVMLENYRNLVFLGIAVSNLDLIXCLEQGKEPWNMKRHEMAAKPPAMCSHFAKDLRPEQYIKNSFQQVILRRYGKCGYQKGCKSVDEHKLHKGGHKGLNRCVXXXQSKIVQCDKYVKVFHKYSNAKRHKIRHXGKNPFKCKECGKSFCMLSQLXQHEIIHXGEKPYKCEECGKAFKKSSNLXNHKIIHXGEKPYKCEECGKAFNQSSXLXRHKIIHXGEKLYKCEECGKAFNRSSNLXKHKIVHXGEKPYKCEECGKAFKQSSNLXNHKKIHXGEKPYKCGECGKAFXLSSHLXXHKRIHXGEKPYKCEECGKAFSVFSXLXKHKIIHXEEKPYKCEECGKAFNRSSHLXNHKVIHXGEKPYKCEECGKAFXKSSXLXYHKVIHXGKKPYKCEECGKAFSIFSILXKHKVIHXEDKPYKCEECGKXFNYSSNFXNHKKIHXGEKPYKCEECGKSFILSSHLXXHKIIHXGEKPYKCKECGKAFNQSSXLMKHKIIHXGEKPYKCEECGKAFNQSPNLXKHKRIHXKEKPYKCK

SEQ ID NO: 32049 - protein, 126 aa, Homo sapiens
  MOD_RES (69)..(71): Selenocysteine
  MOD_RES (99)..(99): Selenocysteine
  MOD_RES (120)..(120): Selenocysteine
MKRHEMAAKPPAMCSHFAKDLRPEQYIKNSFQQVILRRYGKCGYQKGCKSVDEHKLHKGGHKGLNRCVXXXQSKIVQCDKYVKVFHKYSNAKRHKIRHXGKNPFKCKECGKSFCMLSQLXQHEIIH

SEQ ID NO: 32050 - protein, 38 aa, Homo sapiens
  MOD_RES (29)..(29): Selenocysteine
  MOD_RES (37)..(37): Selenocysteine
MVKVFLWKLYGVMCLQPPFSFFLVLGFSXVWSKPRYXS

SEQ ID NO: 32051 - protein, 641 aa, Homo sapiens
  MOD_RES (14)..(14): Selenocysteine
  MOD_RES (36)..(36): Selenocysteine
  MOD_RES (82)..(82): Selenocysteine
  MOD_RES (86)..(86): Selenocysteine
  MOD_RES (95)..(95): Selenocysteine
  MOD_RES (97)..(97): Selenocysteine
  MOD_RES (125)..(125): Selenocysteine
  MOD_RES (161)..(161): Selenocysteine
  MOD_RES (163)..(163): Selenocysteine
  MOD_RES (189)..(189): Selenocysteine
  MOD_RES (191)..(191): Selenocysteine
  MOD_RES (209)..(210): Selenocysteine
  MOD_RES (219)..(219): Selenocysteine
  MOD_RES (232)..(232): Selenocysteine
  MOD_RES (245)..(245): Selenocysteine
  MOD_RES (266)..(266): Selenocysteine
  MOD_RES (273)..(273): Selenocysteine
  MOD_RES (275)..(275): Selenocysteine
  MOD_RES (293)..(293): Selenocysteine
  MOD_RES (303)..(303): Selenocysteine
  MOD_RES (331)..(331): Selenocysteine
  MOD_RES (359)..(359): Selenocysteine
  MOD_RES (385)..(385): Selenocysteine
  MOD_RES (387)..(387): Selenocysteine
  MOD_RES (413)..(413): Selenocysteine
  MOD_RES (415)..(415): Selenocysteine
  MOD_RES (441)..(441): Selenocysteine
  MOD_RES (443)..(443): Selenocysteine
  MOD_RES (471)..(471): Selenocysteine
  MOD_RES (497)..(497): Selenocysteine
  MOD_RES (499)..(499): Selenocysteine
  MOD_RES (525)..(525): Selenocysteine
  MOD_RES (527)..(527): Selenocysteine
  MOD_RES (553)..(553): Selenocysteine
  MOD_RES (555)..(555): Selenocysteine
  MOD_RES (581)..(581): Selenocysteine
  MOD_RES (583)..(583): Selenocysteine
  MOD_RES (609)..(609): Selenocysteine
  MOD_RES (611)..(611): Selenocysteine
MDSVVFEDVAVNFXQEEWALLGPSQKKLYRDVMQEXFVNLASIGENWEEKNIEDHKNQGRKLRSHMVERLCERKEGSQFGEXISQXPNPKPNKKXFXRVKPYECSVCGKDYMCHSSLNRHMRSHXEHRSYEYHKYGEKSYECKECGKRFSFRSSFRIHERXHXGEKPYKCKQCGKAFSWPSSFQIHERXHXGEKPYECKECGKAFIYHXXFRGHMRMHXGEKPYKCKECGKXFSHPSSFRNHERXHSGEKPYECKQCGKAFRYYQXFQIHERXHXGEKPYQCKQCGKALSCPXSFRSHERIHXGEKPYKCKKCGKAFSFPSSFRKHERIHXGEKPYDCKECGKAFISLPSYRRHMIMHXGNGPYKCKECGKAFDCPSSFQIHERXHXGEKPYECKQCGKAFSCSSSFRMHERXHXGEKPHECKQCGKAFSCSSSVRIHERXHXGEKPYECKQCGKAFSCSSSFRMHERIHXGEKPYECKQCGKAFSFSSSFRMHERXHXGEKPYECKQCGKAFSCSSSFRMHERXHXGEKPYECKQCGKAFSCSSSIRIHERXHXGEKPYECKQCGKAFSCSSSVRMHERXHXGVKPYECKQCDKAFSCSRSFRIHERXHXGEKPYACQQCGKAFKCSRSFRIHERVHSGE

SEQ ID NO: 32052 - protein, 133 aa, Homo sapiens
  MOD_RES (11)..(11): Selenocysteine
  MOD_RES (24)..(24): Selenocysteine
  MOD_RES (27)..(27): Selenocysteine
  MOD_RES (30)..(30): Selenocysteine
  MOD_RES (43)..(43): Selenocysteine
  MOD_RES (65)..(65): Selenocysteine
  MOD_RES (111)..(111): Selenocysteine
  MOD_RES (115)..(115): Selenocysteine
  MOD_RES (124)..(124): Selenocysteine
  MOD_RES (126)..(126): Selenocysteine
VAPLQSLSAVXSSDQRRRSKEARXPGXRDXDSVVFEDVAVNFXQEEWALLGPSQKKLYRDVMQEXFVNLASIGENWEEKNIEDHKNQGRKLRSHMVERLCERKEGSQFGEXISQXPNPKPNKKXFXRVKPYEC

SEQ ID NO: 32053 - protein, 129 aa, Homo sapiens
  MOD_RES (22)..(22): Selenocysteine
  MOD_RES (26)..(26): Selenocysteine
  MOD_RES (97)..(97): Selenocysteine
  MOD_RES (114)..(114): Selenocysteine
  MOD_RES (129)..(129): Selenocysteine
MKELDPKNDISEDKLSVVGEAXGGPXRNGARGPGSEGVWEPGSWPERPRGDAGAEWEPLGIPQGNKLLGGSVPACHELKAFANQGCVLVPPRLDDPXEKGACPPVRRGKNFSSXSDLSKPPMPCEEKKX

SEQ ID NO: 32054 - protein, 489 aa, Homo sapiens
  MOD_RES (22)..(22): Selenocysteine
  MOD_RES (26)..(26): Selenocysteine
  MOD_RES (97)..(97): Selenocysteine
  MOD_RES (114)..(114): Selenocysteine
  MOD_RES (129)..(129): Selenocysteine
  MOD_RES (153)..(153): Selenocysteine
  MOD_RES (162)..(162): Selenocysteine
  MOD_RES (174)..(174): Selenocysteine
  MOD_RES (181)..(181): Selenocysteine
  MOD_RES (202)..(202): Selenocysteine
  MOD_RES (207)..(207): Selenocysteine
  MOD_RES (209)..(209): Selenocysteine
  MOD_RES (226)..(226): Selenocysteine
  MOD_RES (230)..(230): Selenocysteine
  MOD_RES (237)..(237): Selenocysteine
  MOD_RES (263)..(263): Selenocysteine
  MOD_RES (265)..(265): Selenocysteine
  MOD_RES (286)..(286): Selenocysteine
  MOD_RES (291)..(291): Selenocysteine
  MOD_RES (293)..(293): Selenocysteine
  MOD_RES (314)..(314): Selenocysteine
  MOD_RES (321)..(321): Selenocysteine
  MOD_RES (370)..(370): Selenocysteine
  MOD_RES (377)..(377): Selenocysteine
  MOD_RES (392)..(392): Selenocysteine
  MOD_RES (405)..(405): Selenocysteine
  MOD_RES (433)..(433): Selenocysteine
  MOD_RES (454)..(454): Selenocysteine
  MOD_RES (461)..(461): Selenocysteine
  MOD_RES (474)..(474): Selenocysteine
  MOD_RES (479)..(479): Selenocysteine
  MOD_RES (482)..(482): Selenocysteine
  MOD_RES (489)..(489): Selenocysteine
MKELDPKNDISEDKLSVVGEAXGGPXRNGARGPGSEGVWEPGSWPERPRGDAGAEWEPLGIPQGNKLLGGSVPACHELKAFANQGCVLVPPRLDDPXEKGACPPVRRGKNFSSXSDLSKPPMPCEEKKXYDCSECGKAFSRSSSLIKHQRIHXGEKPFECDXCGKHFIERSSLXIHQRVHXGEKPYACGDCGKAFSQRMNLXVHQRXHXGEKPYVCDVCGKAFRKXSSLXQHERIHXGEKPYACGDCGKAFSQNMHLIVHQRXHXGEKPYVCPECGRAFSQNMHLXEHQRXHXGEKPYACKECGKAFNKSSSLXLHQRNHXGEKPYVCGECGKAFSQSSYLIQHQRFHIGVKPFECSECGKAFSKNSSLXQHQRIHXGEKPYECYICKKHFXGRSSLIVHQIVHXGEKPYVCGECGKAFSQSAYLIEHQRIHXGEKPYRCGQCGKSFIKNSSLXVHQRIHXGEKPYRCGECGKXFSRNXNLXRHLRIHX

SEQ ID NO: 32055 - protein, 387 aa, Homo sapiens
  MOD_RES (13)..(13): Selenocysteine
  MOD_RES (20)..(20): Selenocysteine
  MOD_RES (48)..(48): Selenocysteine
  MOD_RES (52)..(52): Selenocysteine
  MOD_RES (56)..(56): Selenocysteine
  MOD_RES (69)..(69): Selenocysteine
  MOD_RES (71)..(71): Selenocysteine
  MOD_RES (126)..(126): Selenocysteine
  MOD_RES (128)..(128): Selenocysteine
  MOD_RES (141)..(141): Selenocysteine
  MOD_RES (174)..(174): Selenocysteine
  MOD_RES (192)..(192): Selenocysteine
  MOD_RES (209)..(209): Selenocysteine
  MOD_RES (222)..(222): Selenocysteine
  MOD_RES (235)..(235): Selenocysteine
  MOD_RES (241)..(241): Selenocysteine
  MOD_RES (244)..(244): Selenocysteine
  MOD_RES (330)..(330): Selenocysteine
  MOD_RES (333)..(333): Selenocysteine
  MOD_RES (352)..(352): Selenocysteine
  MOD_RES (364)..(364): Selenocysteine
  MOD_RES (387)..(387): Selenocysteine
KRWQCRMCEKSYXSKYNLVXHILGHNGIKPHSCPHCSKLFKQPSHLQXHLLXHQGXRPHKCQVCHKAFXQXSHLKRHMLLHSEVKPYSCHFCGRGFAYPSELKAHEVKHESGRCHVCVECGLDFSXLXQLKRHLASHQGPXLYQCLECDKSFHYRSQLQNHMLKHQNVRPFVCXECGMEFSQIHHLKQHSLXHKGVKEFKCEVCGREFXLQANMKRHMLIHXSVRPYQCHICFKXFVQKQXLKXHMIVHSPVKPFKCKVCGKSFNRMYNLLGHMHLHAGSKPFKCPYCSSKFNLKGNLSRHMKVKHGVMDIGLDSQGGWAKRNGQSRNDXNMXHSGASCPVRGVGRLAKAEXSLGWAQVWKGGXLEGHDDNNDGIFMSSSKDLNEIX

SEQ ID NO: 32056 - protein, 79 aa, Homo sapiens
  MOD_RES (9)..(9): Selenocysteine
  MOD_RES (11)..(11): Selenocysteine
  MOD_RES (37)..(37): Selenocysteine
MEGFMDSGXQXDAVVVLSLAQAAVLGLVSENELFGAXISAEAFYPDLGPELSGAAMGEPEPPGPDVYQLACNGRALEEP

SEQ ID NO: 32057 - protein, 664 aa, Homo sapiens
  MOD_RES (9)..(9): Selenocysteine
  MOD_RES (11)..(11): Selenocysteine
  MOD_RES (37)..(37): Selenocysteine
  MOD_RES (95)..(95): Selenocysteine
  MOD_RES (99)..(99): Selenocysteine
  MOD_RES (170)..(170): Selenocysteine
  MOD_RES (177)..(177): Selenocysteine
  MOD_RES (214)..(214): Selenocysteine
  MOD_RES (258)..(258): Selenocysteine
  MOD_RES (262)..(262): Selenocysteine
  MOD_RES (305)..(305): Selenocysteine
  MOD_RES (312)..(312): Selenocysteine
  MOD_RES (340)..(340): Selenocysteine
  MOD_RES (344)..(344): Selenocysteine
  MOD_RES (348)..(348): Selenocysteine
  MOD_RES (361)..(361): Selenocysteine
  MOD_RES (363)..(363): Selenocysteine
  MOD_RES (418)..(418): Selenocysteine
  MOD_RES (420)..(420): Selenocysteine
  MOD_RES (433)..(433): Selenocysteine
  MOD_RES (466)..(466): Selenocysteine
  MOD_RES (484)..(484): Selenocysteine
  MOD_RES (501)..(501): Selenocysteine
  MOD_RES (514)..(514): Selenocysteine
  MOD_RES (527)..(527): Selenocysteine
  MOD_RES (533)..(533): Selenocysteine
  MOD_RES (536)..(536): Selenocysteine
  MOD_RES (615)..(615): Selenocysteine
  MOD_RES (617)..(617): Selenocysteine
  MOD_RES (651)..(651): Selenocysteine
MEGFMDSGXQXDAVVVLSLAQAAVLGLVSENELFGAXISAEAFYPDLGPELSGAAMGEPEPPGPDVYQLACNGRALEEPAEEEVLEVEAACEKHXRRKXRPPVRLVPKVKFEKVEEEEQEVYEVSVPGDDKDAGPAEAPAEAASGGCDALVQSSAVKMIDLSAFSRKPRXLRHLPRXPRPELNVAPYDPHFPAPARDGFPEPSMALPGPEALPXECGFEPPHLAPLSDPEAPSMESPEPVKPEQGFVWQEASEFEADXAGSXVERHKKAQLDRLDINVQIDDSYLVEAGDRQKRWQCRMCEKSYXSKYNLVXHILGHNGIKPHSCPHCSKLFKQPSHLQXHLLXHQGXRPHKCQVCHKAFXQXSHLKRHMLLHSEVKPYSCHFCGRGFAYPSELKAHEVKHESGRCHVCVECGLDFSXLXQLKRHLASHQGPXLYQCLECDKSFHYRSQLQNHMLKHQNVRPFVCXECGMEFSQIHHLKQHSLXHKGVKEFKCEVCGREFXLQANMKRHMLIHXSVRPYQCHICFKXFVQKQXLKXHMIVHSPVKPFKCKVCGKSFNRMYNLLGHMHLHAGSKPFKCPYCSSKFNLKGNLSRHMKVKHGVMDIGLDSQDPMMELXGXDPSELDGQQEMEDFEENAYSYASVDSSAEASVLXEQAMKEMAYYNVL

SEQ ID NO: 32058 - protein, 160 aa, Homo sapiens
  MOD_RES (1)..(1): Any amino acid
  MOD_RES (29)..(29): Selenocysteine
  MOD_RES (31)..(31): Selenocysteine
  MOD_RES (44)..(44): Selenocysteine
  MOD_RES (77)..(77): Selenocysteine
  MOD_RES (95)..(95): Selenocysteine
  MOD_RES (112)..(112): Selenocysteine
  MOD_RES (125)..(125): Selenocysteine
  MOD_RES (137)..(137): Selenocysteine
  MOD_RES (160)..(160): Selenocysteine
XPSELKAHEVKHESGRCHVCVECGLDFSXLXQLKRHLASHQGPXLYQCLECDKSFHYRSQLQNHMLKHQNVRPFVCXECGMEFSQIHHLKQHSLXHKGVKEFKCEVCGREFXLQANMKRLAKAEXSLGWAQVWKGGXLEGHDDNNDGIFMSSSKDLNEIX

SEQ ID NO: 32059 - protein, 761 aa, Homo sapiens
  MOD_RES (12)..(12): Selenocysteine
  MOD_RES (20)..(20): Selenocysteine
  MOD_RES (33)..(33): Selenocysteine
  MOD_RES (56)..(56): Selenocysteine
  MOD_RES (61)..(61): Selenocysteine
  MOD_RES (78)..(78): Selenocysteine
  MOD_RES (80)..(80): Selenocysteine
  MOD_RES (84)..(84): Selenocysteine
  MOD_RES (114)..(114): Selenocysteine
  MOD_RES (119)..(119): Selenocysteine
  MOD_RES (121)..(121): Selenocysteine
  MOD_RES (135)..(135): Selenocysteine
  MOD_RES (156)..(156): Selenocysteine
  MOD_RES (165)..(165): Selenocysteine
  MOD_RES (169)..(169): Selenocysteine
  MOD_RES (171)..(171): Selenocysteine
  MOD_RES (183)..(183): Selenocysteine
  MOD_RES (185)..(185): Selenocysteine
  MOD_RES (188)..(188): Selenocysteine
  MOD_RES (199)..(199): Selenocysteine
  MOD_RES (221)..(221): Selenocysteine
  MOD_RES (262)..(262): Selenocysteine
  MOD_RES (266)..(266): Selenocysteine
  MOD_RES (271)..(271): Selenocysteine
  MOD_RES (324)..(324): Selenocysteine
  MOD_RES (335)..(335): Selenocysteine
  MOD_RES (348)..(348): Selenocysteine
  MOD_RES (364)..(364): Selenocysteine
  MOD_RES (369)..(369): Selenocysteine
  MOD_RES (381)..(381): Selenocysteine
  MOD_RES (389)..(389): Selenocysteine
  MOD_RES (417)..(417): Selenocysteine
  MOD_RES (422)..(423): Selenocysteine
  MOD_RES (445)..(445): Selenocysteine
  MOD_RES (449)..(449): Selenocysteine
  MOD_RES (452)..(452): Selenocysteine
  MOD_RES (485)..(485): Selenocysteine
  MOD_RES (526)..(526): Selenocysteine
  MOD_RES (528)..(528): Selenocysteine
  MOD_RES (550)..(550): Selenocysteine
  MOD_RES (589)..(589): Selenocysteine
  MOD_RES (600)..(600): Selenocysteine
  MOD_RES (614)..(614): Selenocysteine
  MOD_RES (656)..(656): Selenocysteine
  MOD_RES (671)..(671): Selenocysteine
  MOD_RES (697)..(697): Selenocysteine
  MOD_RES (699)..(699): Selenocysteine
  MOD_RES (713)..(714): Selenocysteine
  MOD_RES (728)..(728): Selenocysteine
MDSGGGSLGLHXPDSRMAHXMIMQDFVAGMAGXAHIDGDHIVVSVPEAVLVSDVVXDDGIXLDHGLAAEVVHGPDIIXEXDVVXEGVIVPEAVLEADVAIEEDLEEDDGDHILXSELIXEXVRVPEQVFVADLVXGPNGHLEHVVQDCVSGVDSPXMVSEEVLVXNSDXEXVIQAAGGVPGSXVXIKXEDDDDDDVKSXSEDYLMISLDDVGEKLEHMGNXPLKIGSDGSQEDAKEDGFGSEVIKVYIFKAEAEDDVEIGGXEIVXESEYXSGHSVAGVLDQSRMQREKMVYMAVKDSSQEEDDIRDERRVSRRYEDCQASGNXLDSALESRSSXAAQYLQICDGINXNKVLKQKAKKRRRGEXRQWQXAVIIGPDGQPLXVYPCHICXKKFKSRGFLKRHMKNHPDHLMRKKYQCXDCDFXXNKKVSFHNHLESHKLINKVDKXHEFXEYXRRYREASPLSSNKLILRDKEPKMHKCKYCDYEXAEQGLLNRHLLAVHSKNFPHVCVECGKGFRHPSELKKHMRXHXGEKPYQCQYCIFRCADQSNLKXHIKSKHGNNLPYKCEHCPQAFGDERELQRHLDLFQGHKXHQCPHCDHKSXNSSDLKRHIISVHXKDFPHKCEVCDKGFHRPSELKKHSDIHKGRKIHQCRHCDFKXSDPFILSGHILSVHXKDQPLKCKRCKRGFRQQNELKKHMKXHXGRKIYQCEYCEYSXXDASGFKRHVISIHXKDYPHRCEFCKKGFRRPSEKNQHIMRHHKEALM

SEQ ID NO: 32060 - protein, 807 aa, Homo sapiens
  MOD_RES (12)..(12): Selenocysteine
  MOD_RES (20)..(20): Selenocysteine
  MOD_RES (33)..(33): Selenocysteine
  MOD_RES (56)..(56): Selenocysteine
  MOD_RES (61)..(61): Selenocysteine
  MOD_RES (78)..(78): Selenocysteine
  MOD_RES (80)..(80): Selenocysteine
  MOD_RES (84)..(84): Selenocysteine
  MOD_RES (114)..(114): Selenocysteine
  MOD_RES (119)..(119): Selenocysteine
  MOD_RES (121)..(121): Selenocysteine
  MOD_RES (135)..(135): Selenocysteine
  MOD_RES (156)..(156): Selenocysteine
  MOD_RES (165)..(165): Selenocysteine
  MOD_RES (169)..(169): Selenocysteine
  MOD_RES (171)..(171): Selenocysteine
  MOD_RES (183)..(183): Selenocysteine
  MOD_RES (185)..(185): Selenocysteine
  MOD_RES (188)..(188): Selenocysteine
  MOD_RES (199)..(199): Selenocysteine
  MOD_RES (221)..(221): Selenocysteine
  MOD_RES (262)..(262): Selenocysteine
  MOD_RES (266)..(266): Selenocysteine
  MOD_RES (271)..(271): Selenocysteine
  MOD_RES (326)..(326): Selenocysteine
  MOD_RES (341)..(341): Selenocysteine
  MOD_RES (370)..(370): Selenocysteine
  MOD_RES (381)..(381): Selenocysteine
  MOD_RES (394)..(394): Selenocysteine
  MOD_RES (410)..(410): Selenocysteine
  MOD_RES (415)..(415): Selenocysteine
  MOD_RES (427)..(427): Selenocysteine
  MOD_RES (435)..(435): Selenocysteine
  MOD_RES (463)..(463): Selenocysteine
  MOD_RES (468)..(469): Selenocysteine
  MOD_RES (491)..(491): Selenocysteine
  MOD_RES (495)..(495): Selenocysteine
  MOD_RES (498)..(498): Selenocysteine
  MOD_RES (531)..(531): Selenocysteine
  MOD_RES (572)..(572): Selenocysteine
  MOD_RES (574)..(574): Selenocysteine
  MOD_RES (596)..(596): Selenocysteine
  MOD_RES (635)..(635): Selenocysteine
  MOD_RES (646)..(646): Selenocysteine
  MOD_RES (660)..(660): Selenocysteine
  MOD_RES (702)..(702): Selenocysteine
  MOD_RES (717)..(717): Selenocysteine
  MOD_RES (743)..(743): Selenocysteine
  MOD_RES (745)..(745): Selenocysteine
  MOD_RES (759)..(760): Selenocysteine
  MOD_RES (774)..(774): Selenocysteine
MDSGGGSLGLHXPDSRMAHXMIMQDFVAGMAGXAHIDGDHIVVSVPEAVLVSDVVXDDGIXLDHGLAAEVVHGPDIIXEXDVVXEGVIVPEAVLEADVAIEEDLEEDDGDHILXSELIXEXVRVPEQVFVADLVXGPNGHLEHVVQDCVSGVDSPXMVSEEVLVXNSDXEXVIQAAGGVPGSXVXIKXEDDDDDDVKSXSEDYLMISLDDVGEKLEHMGNXPLKIGSDGSQEDAKEDGFGSEVIKVYIFKAEAEDDVEIGGXEIVXESEYXSGHSVAGVLDQSRMQREKMVYMAVKDSSQEEDDISCAEIADEVYMEVIVGEEEGXSLPEIQLEDSDVNKXVVPVVWAAAYGDERRVSRRYEDCQASGNXLDSALESRSSXAAQYLQICDGINXNKVLKQKAKKRRRGEXRQWQXAVIIGPDGQPLXVYPCHICXKKFKSRGFLKRHMKNHPDHLMRKKYQCXDCDFXXNKKVSFHNHLESHKLINKVDKXHEFXEYXRRYREASPLSSNKLILRDKEPKMHKCKYCDYEXAEQGLLNRHLLAVHSKNFPHVCVECGKGFRHPSELKKHMRXHXGEKPYQCQYCIFRCADQSNLKXHIKSKHGNNLPYKCEHCPQAFGDERELQRHLDLFQGHKXHQCPHCDHKSXNSSDLKRHIISVHXKDFPHKCEVCDKGFHRPSELKKHSDIHKGRKIHQCRHCDFKXSDPFILSGHILSVHXKDQPLKCKRCKRGFRQQNELKKHMKXHXGRKIYQCEYCEYSXXDASGFKRHVISIHXKDYPHRCEFCKKGFRRPSEKNQHIMRHHKEALM

SEQ ID NO: 32061 - protein, 430 aa, Homo sapiens
  MOD_RES (20)..(20): Selenocysteine
  MOD_RES (29)..(29): Selenocysteine
  MOD_RES (87)..(87): Selenocysteine
  MOD_RES (101)..(102): Selenocysteine
  MOD_RES (112)..(112): Selenocysteine
  MOD_RES (155)..(155): Selenocysteine
  MOD_RES (157)..(157): Selenocysteine
  MOD_RES (162)..(162): Selenocysteine
  MOD_RES (198)..(198): Selenocysteine
  MOD_RES (220)..(220): Selenocysteine
  MOD_RES (238)..(238): Selenocysteine
  MOD_RES (243)..(243): Selenocysteine
  MOD_RES (257)..(257): Selenocysteine
  MOD_RES (268)..(268): Selenocysteine
  MOD_RES (296)..(296): Selenocysteine
  MOD_RES (317)..(317): Selenocysteine
  MOD_RES (324)..(324): Selenocysteine
  MOD_RES (342)..(342): Selenocysteine
  MOD_RES (345)..(345): Selenocysteine
  MOD_RES (352)..(352): Selenocysteine
  MOD_RES (370)..(370): Selenocysteine
  MOD_RES (378)..(378): Selenocysteine
  MOD_RES (380)..(380): Selenocysteine
  MOD_RES (408)..(408): Selenocysteine
  MOD_RES (420)..(420): Selenocysteine
  MOD_RES (430)..(430): Selenocysteine
MEEEEMNDGSQMVRSQESLXFQDVAVDFXREEWDQLYPAQKNLYRDVMLENYRNLVALGYQLCKPEVIAQLELEEEWVIERDSLLDXHPDGENRPEIKKSXXSQNISDENQXHEMIMERLAGDSFWYSILGGLWDFDYHPEFNQENHKRYLGQVXLXHKKIXQERSLECNKFAENCNLNSNLMQQRIPSIKIPLNSDXQGNSIKHNSDLIYYQGNYVREXPYEYSECGKIFNQHILLXDHIHXAEKPSECGKAFSHXSSLSQPQMLLXGEKPYKCDECGKRFSQRIHLIQHQRIHXGEKPFICNGCGKAFRQHSSFXQHLRIHXGEKPYKCNQCGKAFSRIXSLXEHHRLHXGEKPYECGFCGKAFSQRXHLNQHERXHXGEKPYKCNECGKAFSQSAHLNQHRKIHXREKLCEYKCEQXVRHSPSFSSX

SEQ ID NO: 32062 - protein, 443 aa, Homo sapiens
  MOD_RES (33)..(33): Selenocysteine
  MOD_RES (42)..(42): Selenocysteine
  MOD_RES (100)..(100): Selenocysteine
  MOD_RES (114)..(115): Selenocysteine
  MOD_RES (125)..(125): Selenocysteine
  MOD_RES (168)..(168): Selenocysteine
  MOD_RES (170)..(170): Selenocysteine
  MOD_RES (175)..(175): Selenocysteine
  MOD_RES (211)..(211): Selenocysteine
  MOD_RES (233)..(233): Selenocysteine
  MOD_RES (251)..(251): Selenocysteine
  MOD_RES (256)..(256): Selenocysteine
  MOD_RES (270)..(270): Selenocysteine
  MOD_RES (281)..(281): Selenocysteine
  MOD_RES (309)..(309): Selenocysteine
  MOD_RES (330)..(330): Selenocysteine
  MOD_RES (337)..(337): Selenocysteine
  MOD_RES (355)..(355): Selenocysteine
  MOD_RES (358)..(358): Selenocysteine
  MOD_RES (365)..(365): Selenocysteine
  MOD_RES (383)..(383): Selenocysteine
  MOD_RES (391)..(391): Selenocysteine
  MOD_RES (393)..(393): Selenocysteine
  MOD_RES (421)..(421): Selenocysteine
  MOD_RES (433)..(433): Selenocysteine
  MOD_RES (443)..(443): Selenocysteine
MPSQNAVFSQEGNMEEEEMNDGSQMVRSQESLXFQDVAVDFXREEWDQLYPAQKNLYRDVMLENYRNLVALGYQLCKPEVIAQLELEEEWVIERDSLLDXHPDGENRPEIKKSXXSQNISDENQXHEMIMERLAGDSFWYSILGGLWDFDYHPEFNQENHKRYLGQVXLXHKKIXQERSLECNKFAENCNLNSNLMQQRIPSIKIPLNSDXQGNSIKHNSDLIYYQGNYVREXPYEYSECGKIFNQHILLXDHIHXAEKPSECGKAFSHXSSLSQPQMLLXGEKPYKCDECGKRFSQRIHLIQHQRIHXGEKPFICNGCGKAFRQHSSFXQHLRIHXGEKPYKCNQCGKAFSRIXSLXEHHRLHXGEKPYECGFCGKAFSQRXHLNQHERXHXGEKPYKCNECGKAFSQSAHLNQHRKIHXREKLCEYKCEQXVRHSPSFSSX

SEQ ID NO: 32063 - protein, 51 aa, Homo sapiens
  MOD_RES (45)..(45): Selenocysteine
MPSQNAVFSQEGNMEEEEMNDGSQMVRSQMWRSVCSPLDLGKAVXGGCKAL

SEQ ID NO: 32064 - protein, 29 aa, Homo sapiens
MLLHLHQHKRIHIRENSYQCEECDKVFKR

SEQ ID NO: 32065 - protein, 555 aa, Homo sapiens
  MOD_RES (26)..(26): Selenocysteine
  MOD_RES (54)..(54): Selenocysteine
  MOD_RES (110)..(112): Selenocysteine
  MOD_RES (137)..(137): Selenocysteine
  MOD_RES (140)..(140): Selenocysteine
  MOD_RES (187)..(187): Selenocysteine
  MOD_RES (189)..(189): Selenocysteine
  MOD_RES (196)..(196): Selenocysteine
  MOD_RES (215)..(215): Selenocysteine
  MOD_RES (217)..(218): Selenocysteine
  MOD_RES (224)..(224): Selenocysteine
  MOD_RES (245)..(246): Selenocysteine
  MOD_RES (252)..(252): Selenocysteine
  MOD_RES (273)..(274): Selenocysteine
  MOD_RES (301)..(301): Selenocysteine
  MOD_RES (327)..(327): Selenocysteine
  MOD_RES (329)..(329): Selenocysteine
  MOD_RES (336)..(336): Selenocysteine
  MOD_RES (357)..(358): Selenocysteine
  MOD_RES (364)..(364): Selenocysteine
  MOD_RES (385)..(385): Selenocysteine
  MOD_RES (392)..(392): Selenocysteine
  MOD_RES (413)..(413): Selenocysteine
  MOD_RES (420)..(420): Selenocysteine
  MOD_RES (441)..(442): Selenocysteine
  MOD_RES (448)..(448): Selenocysteine
  MOD_RES (469)..(469): Selenocysteine
  MOD_RES (476)..(476): Selenocysteine
  MOD_RES (495)..(495): Selenocysteine
  MOD_RES (497)..(497): Selenocysteine
  MOD_RES (515)..(515): Selenocysteine
  MOD_RES (538)..(538): Selenocysteine
MNVMLENYKNLVFLAGIAVSKQDPIXSLEQEKEPWNMKICEMVDESPAMCSSFXRDLWPEQDIKDSFQQVILRRHGKCEHENLQLRKGSANVVECKVYKKGYNELNQCLXXXQSKIFPCDKYIKVFHKIFNSNRHKXRHXGEKPFKCKKCDESFCMLLHLHQHKRIHIRENSYQCEECDKVFKRFSXLXRHKRVHXGEKPFKCEECGKAFKHSSXLXXHKMIHXGEKPYRCEECGKAFYHSSHLXXHKVIHXGEKPFKCEECGKAFNHPSALXXHKFIHVKEKPYKCEECDKAFNRFSYLXKHKIIHSGEKSYKCEQCGKGFNWSSXLXKHKRIHXGEKPYKCEECGKAFNVSSHLXXHKMIHXGEKPYKCEECGKAFNHSSKLXIHKIIHXGEKPYKCEECGKAFNQSSNLXKHKIIHXGEKLYKCEECGKAFNRSSNLXXHKRIHXGEKPYKCEECGKAFNRSSNLXKHNIIHXGEKSYKCEECGKAFNQSSXLXKHRKIQQGMVAHACNPNXLRGLGEQIARSGVQDQPGQHGKXPSLLKIQKFAGCGGRRL

SEQ ID NO: 32066 - protein, 55 aa, Homo sapiens
  MOD_RES (26)..(26): Selenocysteine
  MOD_RES (49)..(49): Selenocysteine
  MOD_RES (55)..(55): Selenocysteine
MNVMLENYKNLVFLAGIAVSKQDPIXSLEQEKEPWNMKICEMVDESPEXFGQSKX

SEQ ID NO: 32067 - protein, 139 aa, Homo sapiens
  MOD_RES (25)..(25): Selenocysteine
  MOD_RES (53)..(53): Selenocysteine
  MOD_RES (109)..(111): Selenocysteine
  MOD_RES (136)..(136): Selenocysteine
  MOD_RES (139)..(139): Selenocysteine
MNVMLENYKNLVFLGIAVSKQDPIXSLEQEKEPWNMKICEMVDESPAMCSSFXRDLWPEQDIKDSFQQVILRRHGKCEHENLQLRKGSANVVECKVYKKGYNELNQCLXXXQSKIFPCDKYIKVFHKIFNSNRHKXRHX

SEQ ID NO: 32068 - protein, 110 aa, Homo sapiens
  MOD_RES (25)..(25): Selenocysteine
  MOD_RES (53)..(53): Selenocysteine
  MOD_RES (79)..(79): Selenocysteine
  MOD_RES (86)..(86): Selenocysteine
MNVMLENYKNLVFLGIAVSKQDPIXSLEQEKEPWNMKICEMVDESPGQVWCLXPVIPALWEARAGGLLEPRSLRPAWSXWKIPVSXKKKKKSQLGMGMVVHACNPSYSRG

SEQ ID NO: 32069 - protein, 84 aa, Homo sapiens
  MOD_RES (25)..(25): Selenocysteine
  MOD_RES (75)..(75): Selenocysteine
  MOD_RES (78)..(78): Selenocysteine
  MOD_RES (81)..(81): Selenocysteine
MNVMLENYKNLVFLGIAVSKQDPIXSLEQEKEPWNMKICEMVDESPGYMCRMCSYVFFFYQRPLARARHKRFFSXSDXEKXWQM

SEQ ID NO: 32070 - protein, 148 aa, Homo sapiens
  MOD_RES (80)..(82): Selenocysteine
  MOD_RES (107)..(107): Selenocysteine
  MOD_RES (110)..(110): Selenocysteine
MPEPCSAEFIYECDVRELQKPGLLGDLWPEQDIKDSFQQVILRRHGKCEHENLQLRKGSANVVECKVYKKGYNELNQCLXXXQSKIFPCDKYIKVFHKIFNSNRHKXRHXGEKPFKCKKCDESFCMLLHLHQHKRIHIRENSYQCEEC

SEQ ID NO: 32071 - protein, 495 aa, Homo sapiens
  MOD_RES (17)..(17): Selenocysteine
  MOD_RES (66)..(66): Selenocysteine
  MOD_RES (89)..(89): Selenocysteine
  MOD_RES (94)..(94): Selenocysteine
  MOD_RES (152)..(152): Selenocysteine
  MOD_RES (156)..(156): Selenocysteine
  MOD_RES (159)..(159): Selenocysteine
  MOD_RES (177)..(177): Selenocysteine
  MOD_RES (180)..(180): Selenocysteine
  MOD_RES (208)..(208): Selenocysteine
  MOD_RES (227)..(227): Selenocysteine
  MOD_RES (229)..(229): Selenocysteine
  MOD_RES (236)..(236): Selenocysteine
  MOD_RES (257)..(257): Selenocysteine
  MOD_RES (264)..(264): Selenocysteine
  MOD_RES (270)..(270): Selenocysteine
  MOD_RES (282)..(282): Selenocysteine
  MOD_RES (284)..(284): Selenocysteine
  MOD_RES (291)..(291): Selenocysteine
  MOD_RES (297)..(297): Selenocysteine
  MOD_RES (310)..(310): Selenocysteine
  MOD_RES (312)..(312): Selenocysteine
  MOD_RES (319)..(319): Selenocysteine
  MOD_RES (338)..(338): Selenocysteine
  MOD_RES (347)..(347): Selenocysteine
  MOD_RES (353)..(353): Selenocysteine
  MOD_RES (362)..(362): Selenocysteine
  MOD_RES (366)..(366): Selenocysteine
  MOD_RES (369)..(369): Selenocysteine
  MOD_RES (375)..(375): Selenocysteine
  MOD_RES (381)..(381): Selenocysteine
  MOD_RES (394)..(394): Selenocysteine
  MOD_RES (396)..(396): Selenocysteine
  MOD_RES (401)..(401): Selenocysteine
  MOD_RES (403)..(403): Selenocysteine
  MOD_RES (422)..(422): Selenocysteine
  MOD_RES (431)..(431): Selenocysteine
  MOD_RES (446)..(446): Selenocysteine
  MOD_RES (450)..(450): Selenocysteine
  MOD_RES (453)..(453): Selenocysteine
  MOD_RES (459)..(459): Selenocysteine
  MOD_RES (472)..(472): Selenocysteine
  MOD_RES (487)..(487): Selenocysteine
MAKRPGPPGSREMGLLXFRDIAIEFSLAEWQCLDHAQQNLYRDVMLENYRNLVSLGIAVSKPDLIXCLEQNKEPQNIKRNEMVAKHPVXCSHFXQDLQSEQGIKDSLQKVILRRYGKCGQEDLQVKKCCKSVGECEVHKGGYNYVNQCLSAXQNKXFQXHKCVKVFGKFSNSNRHKXRHXGKKHFKCKNDGKSFCMLSRLNQHQIIHXREKSYKCEECGKSFNCSSXLXRHKRIHXGEKPYRCEECGKAFSWSASLXKHKRIHXGEKPYXCEERGKVFSRSXLXNYKRIHXGEKPYXCEECGKAFSRSSXLXNHKRIHXGERPYKCEECGKAFSLSSXLKKHKIVHXGEKLYXCEECGKAFXFSSXLNXHKRIHXGEKPYXCEECGKAFSLPSXFXYHKRXHXGEKPYKCEECGKAFNCSSXLKKHKIIHXGEKLYKCKECGKAFXFSSXLNXHKRIHXGEKPYKCEECDQXFKWHSSLANHKNMHXGEKPYKYE

SEQ ID NO: 32072 - protein, 110 aa, Homo sapiens
  MOD_RES (32)..(32): Selenocysteine
  MOD_RES (45)..(45): Selenocysteine
  MOD_RES (54)..(54): Selenocysteine
  MOD_RES (66)..(66): Selenocysteine
  MOD_RES (86)..(86): Selenocysteine
MFPVFSGCFQELQEKNKSLELVSFEEVAVHFXWEEWQDLDDAQRXLYRDVMLEXYSSLVSLGHYIXKPEMIFKLEQGAEPWIVEEXPNLRLSAVQIIDDLIERSHESHDR

SEQ ID NO: 32073 - protein, 114 aa, Homo sapiens
  MOD_RES (32)..(32): Selenocysteine
  MOD_RES (45)..(45): Selenocysteine
  MOD_RES (54)..(54): Selenocysteine
  MOD_RES (66)..(66): Selenocysteine
  MOD_RES (86)..(86): Selenocysteine
MFPVFSGCFQELQEKNKSLELVSFEEVAVHFXWEEWQDLDDAQRXLYRDVMLEXYSSLVSLGHYIXKPEMIFKLEQGAEPWIVEEXPNLRLSGGSKKQVFSGICHRSLVELQEV

SEQ ID NO: 32074 - protein, 60 aa, Homo sapiens
  MOD_RES (4)..(4): Selenocysteine
  MOD_RES (16)..(16): Selenocysteine
  MOD_RES (36)..(36): Selenocysteine
MLEXYSSLVSLGHYIXKPEMIFKLEQGAEPWIVEEXPNLRLSAVQIIDDLIERSHESHDR

SEQ ID NO: 32075 - protein, 864 aa, Homo sapiens
  MOD_RES (4)..(4): Selenocysteine
  MOD_RES (16)..(16): Selenocysteine
  MOD_RES (36)..(36): Selenocysteine
  MOD_RES (68)..(68): Selenocysteine
  MOD_RES (72)..(72): Selenocysteine
  MOD_RES (74)..(74): Selenocysteine
  MOD_RES (83)..(83): Selenocysteine
  MOD_RES (124)..(124): Selenocysteine
  MOD_RES (136)..(136): Selenocysteine
  MOD_RES (147)..(147): Selenocysteine
  MOD_RES (154)..(154): Selenocysteine
  MOD_RES (158)..(158): Selenocysteine
  MOD_RES (167)..(167): Selenocysteine
  MOD_RES (170)..(170): Selenocysteine
  MOD_RES (185)..(185): Selenocysteine
  MOD_RES (207)..(207): Selenocysteine
  MOD_RES (213)..(213): Selenocysteine
  MOD_RES (221)..(221): Selenocysteine
  MOD_RES (226)..(226): Selenocysteine
  MOD_RES (228)..(228): Selenocysteine
  MOD_RES (256)..(256): Selenocysteine
  MOD_RES (284)..(284): Selenocysteine
  MOD_RES (297)..(297): Selenocysteine
  MOD_RES (305)..(305): Selenocysteine
  MOD_RES (310)..(310): Selenocysteine
  MOD_RES (312)..(312): Selenocysteine
  MOD_RES (325)..(325): Selenocysteine
  MOD_RES (333)..(333): Selenocysteine
  MOD_RES (338)..(338): Selenocysteine
  MOD_RES (353)..(353): Selenocysteine
  MOD_RES (361)..(361): Selenocysteine
  MOD_RES (366)..(366): Selenocysteine
  MOD_RES (368)..(368): Selenocysteine
  MOD_RES (389)..(389): Selenocysteine
  MOD_RES (394)..(394): Selenocysteine
  MOD_RES (396)..(396): Selenocysteine
  MOD_RES (422)..(422): Selenocysteine
  MOD_RES (424)..(424): Selenocysteine
  MOD_RES (437)..(437): Selenocysteine
  MOD_RES (445)..(445): Selenocysteine
  MOD_RES (450)..(450): Selenocysteine
  MOD_RES (452)..(452): Selenocysteine
  MOD_RES (465)..(465): Selenocysteine
  MOD_RES (473)..(473): Selenocysteine
  MOD_RES (478)..(478): Selenocysteine
  MOD_RES (493)..(493): Selenocysteine
  MOD_RES (501)..(501): Selenocysteine
  MOD_RES (506)..(506): Selenocysteine
  MOD_RES (508)..(508): Selenocysteine
  MOD_RES (529)..(529): Selenocysteine
  MOD_RES (534)..(534): Selenocysteine
  MOD_RES (549)..(549): Selenocysteine
  MOD_RES (562)..(562): Selenocysteine
  MOD_RES (564)..(564): Selenocysteine
  MOD_RES (577)..(577): Selenocysteine
  MOD_RES (586)..(586): Selenocysteine
  MOD_RES (590)..(590): Selenocysteine
  MOD_RES (592)..(592): Selenocysteine
  MOD_RES (605)..(605): Selenocysteine
  MOD_RES (613)..(613): Selenocysteine
  MOD_RES (618)..(618): Selenocysteine
  MOD_RES (620)..(620): Selenocysteine
  MOD_RES (639)..(639): Selenocysteine
  MOD_RES (647)..(647): Selenocysteine
  MOD_RES (675)..(675): Selenocysteine
  MOD_RES (696)..(696): Selenocysteine
  MOD_RES (701)..(701): Selenocysteine
  MOD_RES (703)..(703): Selenocysteine
  MOD_RES (716)..(716): Selenocysteine
  MOD_RES (725)..(725): Selenocysteine
  MOD_RES (729)..(729): Selenocysteine
  MOD_RES (744)..(744): Selenocysteine
  MOD_RES (749)..(749): Selenocysteine
  MOD_RES (752)..(752): Selenocysteine
  MOD_RES (757)..(757): Selenocysteine
  MOD_RES (759)..(759): Selenocysteine
  MOD_RES (772)..(772): Selenocysteine
  MOD_RES (785)..(785): Selenocysteine
  MOD_RES (787)..(787): Selenocysteine
  MOD_RES (800)..(800): Selenocysteine
  MOD_RES (813)..(813): Selenocysteine
  MOD_RES (815)..(815): Selenocysteine
  MOD_RES (828)..(828): Selenocysteine
  MOD_RES (841)..(841): Selenocysteine
MLEXYSSLVSLGHYIXKPEMIFKLEQGAEPWIVEEXPNLRLSAVQIIDDLIERSHESHDRFFWQIVIXNSNXSXQERVELGKXFNLNSNHVLNLIINNGNSSGMKPGQFNDCQNMLFPIKPGEXQSGEKPHVCDIXRRSHRHHEHLXQHHKIQXLLQXFQCNEQGKXFNXEAMFFIHKRVHIVQXFGKYNEYEKACNNSAVIVQVIXQVGQPXCCRKSDFXKHQQXHXGEKPYECVECEKPSISKSDLMLQCKMPXEEKPYACNWCEKLFSYKSSLIIHQRIHXGEKPYGCNECGKXFRRKSFLXLHERXHXGDKPYKCIECGKXFHCKSLLXLHHRXHSGEKPYQCSECGKXFSQKSYLXIHHRXHXGEKPYACDHCEEAFSHKSRLXVHQRXHXGEKPYECNECGKPFINKSNLRLHQRXHXGEKPYECNECGKXFHRKSFLXIHQWXHXGEKPYECNECGKXFRCKSFLXVHQRXHAGEKPYACNECGKXYSHKSYLXVHHRXHXGEKPYECNECGKSFHCKSFLXIHQRXHAGKKPYECNECEKXFINKLNLGIHKRXHXGERPYECNECGKXFRQKSNLSXHQGXHXGEKPYVCNECGKXFHRKSFLXIHQRXHXGKNRMDVMNVEKLFVRNHXLLYIRELXPGKSPMNVMNVENPFIRRQIFRSIKVFXRGRNPMNVANVEKPCQKSVLXVHHRXHXGEKPYECNECGKXFCHKSNLSXHQGXHSGEKPYECDECRKXFYDKXVLXIHQRXHXGEKPFECKECRKXFSQKSKLFVHHRXHXGEKPFRCNECRKXFSQKSGLSIHQRXHXGEKPYECKECGKXFCQKSHLSRHQQXHIGEKSDVAEAGYVFPQNHSFFP

SEQ ID NO: 32076 - protein, 130 aa, Homo sapiens
  MOD_RES (5)..(5): Selenocysteine
  MOD_RES (54)..(54): Selenocysteine
  MOD_RES (70)..(70): Selenocysteine
  MOD_RES (82)..(82): Selenocysteine
  MOD_RES (130)..(130): Selenocysteine
MGLLXFRDVAIEFSREEWEHLDSDQKLLYGDVMLENYGNLVSLGLAVSKPDLIXFLEQRKEPWNVKSAEXVAIQPDIFSHDXQGLLRKKLIEASFQKVILDGYGSCGPQNLNLRKEWESEEKNQYNKSDX

SEQ ID NO: 32077 - protein, 126 aa, Homo sapiens
  MOD_RES (5)..(5): Selenocysteine
  MOD_RES (54)..(54): Selenocysteine
  MOD_RES (70)..(70): Selenocysteine
  MOD_RES (82)..(82): Selenocysteine
MGLLXFRDVAIEFSREEWEHLDSDQKLLYGDVMLENYGNLVSLGLAVSKPDLIXFLEQRKEPWNVKSAEXVAIQPDIFSHDXQGLLRKKLIEASFQKVILDGYGSCGPQNLNLRKEWESEGKIILW

SEQ ID NO: 32078 - protein, 82 aa, Homo sapiens
  MOD_RES (5)..(5): Selenocysteine
  MOD_RES (54)..(54): Selenocysteine
  MOD_RES (70)..(70): Selenocysteine
  MOD_RES (81)..(81): Selenocysteine
MGLLXFRDVAIEFSREEWEHLDSDQKLLYGDVMLENYGNLVSLGLAVSKPDLIXFLEQRKEPWNVKSAEXVAIQPEVKVNXH

SEQ ID NO: 32079 - protein, 178 aa, Homo sapiens
  MOD_RES (12)..(12): Selenocysteine
  MOD_RES (64)..(64): Selenocysteine
  MOD_RES (68)..(70): Selenocysteine
  MOD_RES (76)..(76): Selenocysteine
  MOD_RES (78)..(78): Selenocysteine
  MOD_RES (86)..(86): Selenocysteine
  MOD_RES (111)..(111): Selenocysteine
  MOD_RES (140)..(140): Selenocysteine
  MOD_RES (176)..(176): Selenocysteine
MVNVPDIFSHDXQGLLRKKLIEASFQKVILDGYGSCGPQNLNLRKEWESEGKCEGHNGYYDGHXKCKXXXYNKNLXVXGGQKHEKXQFMSVAFSKPCVSVSKCQHQFLKLXFSFKGNLDNPNSDLVHVSNNHLNQLKYRXGVNVQSNISEKERFKNEEVISKYDQFDGSLLKVCFXNK

SEQ ID NO: 32080 - protein, 56 aa, Homo sapiens
  MOD_RES (12)..(12): Selenocysteine
MVNVPDIFSHDXQGLLRKKLIEASFQKVILDGYGSCGPQNLNLRKEWESEGKIILW

SEQ ID NO: 32081 - protein, 146 aa, Homo sapiens
  MOD_RES (22)..(22): Selenocysteine
  MOD_RES (27)..(27): Selenocysteine
  MOD_RES (31)..(31): Selenocysteine
  MOD_RES (46)..(46): Selenocysteine
  MOD_RES (95)..(95): Selenocysteine
  MOD_RES (111)..(111): Selenocysteine
  MOD_RES (123)..(123): Selenocysteine
MVNVPGRGSPEEGEGRSEAAGXLFEVXEHLXGWAPAPVPSVEGLLXFRDVAIEFSREEWEHLDSDQKLLYGDVMLENYGNLVSLGLAVSKPDLIXFLEQRKEPWNVKSAEXVAIQPDIFSHDXQGLLRKKLIEASFQKVILDGYGS

SEQ ID NO: 32082 - protein, 52 aa, Homo sapiens
  MOD_RES (7)..(7): Selenocysteine
  MOD_RES (24)..(24): Selenocysteine
MVNVPGXVDIQGCGHRILSGGVGXPGLRSEAFIWGCDVRELRKPGLSGSRCL

SEQ ID NO: 32083 - protein, 118 aa, Homo sapiens
  MOD_RES (5)..(5): Selenocysteine
  MOD_RES (31)..(31): Selenocysteine
  MOD_RES (76)..(76): Selenocysteine
  MOD_RES (86)..(86): Selenocysteine
  MOD_RES (107)..(107): Selenocysteine
  MOD_RES (110)..(110): Selenocysteine
MVSFXERGLDKEERPSEEKIRHSLLIPVRAXCKARIRVQLRWGNSRKREIHSMDSCQDRAGQHQGHEPKVQKDCLXLEKKPKASDXVHISEMRRPMMPAVGDPQRPXPGXASGPDLSL

SEQ ID NO: 32084 - protein, 911 aa, Homo sapiens
  MOD_RES (6)..(6): Selenocysteine
  MOD_RES (64)..(64): Selenocysteine
  MOD_RES (89)..(89): Selenocysteine
  MOD_RES (92)..(92): Selenocysteine
  MOD_RES (113)..(113): Selenocysteine
  MOD_RES (126)..(126): Selenocysteine
  MOD_RES (138)..(138): Selenocysteine
  MOD_RES (148)..(148): Selenocysteine
  MOD_RES (166)..(166): Selenocysteine
  MOD_RES (169)..(169): Selenocysteine
  MOD_RES (182)..(182): Selenocysteine
  MOD_RES (194)..(194): Selenocysteine
  MOD_RES (204)..(204): Selenocysteine
  MOD_RES (232)..(232): Selenocysteine
  MOD_RES (260)..(260): Selenocysteine
  MOD_RES (278)..(279): Selenocysteine
  MOD_RES (281)..(281): Selenocysteine
  MOD_RES (288)..(288): Selenocysteine
  MOD_RES (294)..(294): Selenocysteine
  MOD_RES (316)..(316): Selenocysteine
  MOD_RES (322)..(322): Selenocysteine
  MOD_RES (329)..(329): Selenocysteine
  MOD_RES (344)..(344): Selenocysteine
  MOD_RES (362)..(362): Selenocysteine
  MOD_RES (372)..(372): Selenocysteine
  MOD_RES (390)..(390): Selenocysteine
  MOD_RES (393)..(393): Selenocysteine
  MOD_RES (400)..(400): Selenocysteine
  MOD_RES (406)..(406): Selenocysteine
  MOD_RES (418)..(418): Selenocysteine
  MOD_RES (428)..(428): Selenocysteine
  MOD_RES (456)..(456): Selenocysteine
  MOD_RES (471)..(471): Selenocysteine
  MOD_RES (484)..(484): Selenocysteine
  MOD_RES (499)..(499): Selenocysteine
  MOD_RES (502)..(503): Selenocysteine
  MOD_RES (505)..(505): Selenocysteine
  MOD_RES (512)..(512): Selenocysteine
  MOD_RES (518)..(518): Selenocysteine
  MOD_RES (540)..(540): Selenocysteine
  MOD_RES (546)..(546): Selenocysteine
  MOD_RES (553)..(553): Selenocysteine
  MOD_RES (568)..(568): Selenocysteine
  MOD_RES (586)..(586): Selenocysteine
  MOD_RES (596)..(596): Selenocysteine
  MOD_RES (614)..(614): Selenocysteine
  MOD_RES (624)..(624): Selenocysteine
  MOD_RES (642)..(642): Selenocysteine
  MOD_RES (648)..(648): Selenocysteine
  MOD_RES (652)..(652): Selenocysteine
  MOD_RES (680)..(680): Selenocysteine
  MOD_RES (701)..(702): Selenocysteine
  MOD_RES (708)..(708): Selenocysteine
  MOD_RES (726)..(726): Selenocysteine
  MOD_RES (736)..(736): Selenocysteine
  MOD_RES (764)..(764): Selenocysteine
  MOD_RES (779)..(779): Selenocysteine
  MOD_RES (792)..(792): Selenocysteine
  MOD_RES (807)..(807): Selenocysteine
  MOD_RES (810)..(811): Selenocysteine
  MOD_RES (813)..(813): Selenocysteine
  MOD_RES (820)..(820): Selenocysteine
  MOD_RES (826)..(826): Selenocysteine
  MOD_RES (848)..(848): Selenocysteine
  MOD_RES (854)..(854): Selenocysteine
  MOD_RES (861)..(861): Selenocysteine
  MOD_RES (876)..(876): Selenocysteine
  MOD_RES (882)..(882): Selenocysteine
  MOD_RES (889)..(889): Selenocysteine
  MOD_RES (904)..(904): Selenocysteine
  MOD_RES (908)..(908): Selenocysteine
MCSHFXQDFLPVQGIEDSFHKLILRRYEKCGHDNLQLRKGCKSMNVCKVQKGVYNGINKCLSNXQSKIFQCNARVKVFSKFANSNKDKXRHXGEKHFKCNECGKSFQKFSDLXQHKGIHAGEKPYXCEERGKDFGWYXDLNQHKKIHXGEKPYKCEECGKAFNRSXNLXAHKRIHNREKAYXGEDRDRAFGWSXNLNEYKKIHXGDKPYKCKECGKAFMHSSHLNKHEKIHXGEKPYKCKECGKVISSSSSFAKHKRIHXGEKPFKCLECGKAFNISXXLXKHRRIHXGEKPYXCEVCGKAFRQSANLYVHRRIHXGEKPYXCGECGKXFRQSANLYVHRRIHXGEKPYKCEDCGKAFGRYXALNQHKKIHXGEKPYKCEECGKAFNSSXNLXAHKRIHXREKPYXCEDRGRAFGLSXNLNEYKKIHXGDKPYKCKECGKAFIHSLHLNKHEKIHXGKKPYKCKQCGKVIXSSSSFAKHKRIHXGEKPFECLECGKAFXSSXXLXKHRRIHXGEKPYXCEVCGKAFRQSAILYVHRRIHXGEKPYXCEECGKXFRQSANLYVHRRIHXGEKPYKCEECGKAFGRYXDLNQHKKIHXGEKLYKCEECGKDFVWYXDLNQQKKIYXGEKPYKCEECGKAFAPSXDLNQHXKILXGEQSYKCEECGKAFGWSIALNQHKKIHXGEKPYKCEECGKAFSRSRNLXXHRRVHXREKPYKCEDRGRSFGWSXNLNEYKKIHXGDKLYKCKECGKVFKQSSHLNRHEKIHXGKKPYKCKECGKVIXSSSSFAKHKRIHXGEKPFKCLECGKAFXSSXXLXKHRRIHXGEKPYXCEECGKAFRQSAILYVHRRIHXGEKPYXCGECGKXFRQSANLYAHKKIHXGEKPYXCGDCGKXFRQSANLYAHKKIHXGDKXIQV

SEQ ID NO: 32085 - protein, 160 aa, Homo sapiens
  MOD_RES (5)..(5): Selenocysteine
  MOD_RES (50)..(50): Selenocysteine
  MOD_RES (108)..(108): Selenocysteine
  MOD_RES (133)..(133): Selenocysteine
  MOD_RES (136)..(136): Selenocysteine
  MOD_RES (157)..(157): Selenocysteine
MEPLXFRDVAIEFSPEEWKCLDPAQQNLYRDVMLENYRNLVSLAMCSHFXQDFLPVQGIEDSFHKLILRRYEKCGHDNLQLRKGCKSMNVCKVQKGVYNGINKCLSNXQSKIFQCNARVKVFSKFANSNKDKXRHXGEKHFKCNECGKSFQKFSDLXQHK

SEQ ID NO: 32086 - protein, 132 aa, Homo sapiens
  MOD_RES (5)..(5): Selenocysteine
  MOD_RES (50)..(50): Selenocysteine
  MOD_RES (96)..(96): Selenocysteine
  MOD_RES (103)..(104): Selenocysteine
  MOD_RES (125)..(125): Selenocysteine
MEPLXFRDVAIEFSPEEWKCLDPAQQNLYRDVMLENYRNLVSLAMCSHFXQDFLPVQGIEDSFHKLILRRYEKFSSLISSCRVISHGLSRGRNRAXEKNDLLXXEEPVVKHRFDLQYPEEMWRNXVVQKGRK

SEQ ID NO: 32087 - protein, 61 aa, Homo sapiens
  MOD_RES (5)..(5): Selenocysteine
  MOD_RES (47)..(47): Selenocysteine
  MOD_RES (54)..(54): Selenocysteine
MEPLXFRDVAIEFSPEEWKCLDPAQQNLYRDVMLENYRNLVSLEEGXEPQRKMXCSQQKSQ

SEQ ID NO: 32088 - protein, 923 aa, Homo sapiens
  MOD_RES (18)..(18): Selenocysteine
  MOD_RES (76)..(76): Selenocysteine
  MOD_RES (101)..(101): Selenocysteine
  MOD_RES (104)..(104): Selenocysteine
  MOD_RES (125)..(125): Selenocysteine
  MOD_RES (138)..(138): Selenocysteine
  MOD_RES (150)..(150): Selenocysteine
  MOD_RES (160)..(160): Selenocysteine
  MOD_RES (178)..(178): Selenocysteine
  MOD_RES (181)..(181): Selenocysteine
  MOD_RES (194)..(194): Selenocysteine
  MOD_RES (206)..(206): Selenocysteine
  MOD_RES (216)..(216): Selenocysteine
  MOD_RES (244)..(244): Selenocysteine
  MOD_RES (272)..(272): Selenocysteine
  MOD_RES (290)..(291): Selenocysteine
  MOD_RES (293)..(293): Selenocysteine
  MOD_RES (300)..(300): Selenocysteine
  MOD_RES (306)..(306): Selenocysteine
  MOD_RES (328)..(328): Selenocysteine
  MOD_RES (334)..(334): Selenocysteine
  MOD_RES (341)..(341): Selenocysteine
  MOD_RES (356)..(356): Selenocysteine
  MOD_RES (374)..(374): Selenocysteine
  MOD_RES (384)..(384): Selenocysteine
  MOD_RES (402)..(402): Selenocysteine
  MOD_RES (405)..(405): Selenocysteine
  MOD_RES (412)..(412): Selenocysteine
  MOD_RES (418)..(418): Selenocysteine
  MOD_RES (430)..(430): Selenocysteine
  MOD_RES (440)..(440): Selenocysteine
  MOD_RES (468)..(468): Selenocysteine
  MOD_RES (483)..(483): Selenocysteine
  MOD_RES (496)..(496): Selenocysteine
  MOD_RES (511)..(511): Selenocysteine
  MOD_RES (514)..(515): Selenocysteine
  MOD_RES (517)..(517): Selenocysteine
  MOD_RES (524)..(524): Selenocysteine
  MOD_RES (530)..(530): Selenocysteine
  MOD_RES (552)..(552): Selenocysteine
  MOD_RES (558)..(558): Selenocysteine
  MOD_RES (565)..(565): Selenocysteine
  MOD_RES (580)..(580): Selenocysteine
  MOD_RES (598)..(598): Selenocysteine
  MOD_RES (608)..(608): Selenocysteine
  MOD_RES (626)..(626): Selenocysteine
  MOD_RES (636)..(636): Selenocysteine
  MOD_RES (654)..(654): Selenocysteine
  MOD_RES (660)..(660): Selenocysteine
  MOD_RES (664)..(664): Selenocysteine
  MOD_RES (692)..(692): Selenocysteine
  MOD_RES (713)..(714): Selenocysteine
  MOD_RES (720)..(720): Selenocysteine
  MOD_RES (738)..(738): Selenocysteine
  MOD_RES (748)..(748): Selenocysteine
  MOD_RES (776)..(776): Selenocysteine
  MOD_RES (791)..(791): Selenocysteine
  MOD_RES (804)..(804): Selenocysteine
  MOD_RES (819)..(819): Selenocysteine
  MOD_RES (822)..(823): Selenocysteine
  MOD_RES (825)..(825): Selenocysteine
  MOD_RES (832)..(832): Selenocysteine
  MOD_RES (838)..(838): Selenocysteine
  MOD_RES (860)..(860): Selenocysteine
  MOD_RES (866)..(866): Selenocysteine
  MOD_RES (873)..(873): Selenocysteine
  MOD_RES (888)..(888): Selenocysteine
  MOD_RES (894)..(894): Selenocysteine
  MOD_RES (901)..(901): Selenocysteine
  MOD_RES (916)..(916): Selenocysteine
  MOD_RES (920)..(920): Selenocysteine
MLENYRNLVSLAMCSHFXQDFLPVQGIEDSFHKLILRRYEKCGHDNLQLRKGCKSMNVCKVQKGVYNGINKCLSNXQSKIFQCNARVKVFSKFANSNKDKXRHXGEKHFKCNECGKSFQKFSDLXQHKGIHAGEKPYXCEERGKDFGWYXDLNQHKKIHXGEKPYKCEECGKAFNRSXNLXAHKRIHNREKAYXGEDRDRAFGWSXNLNEYKKIHXGDKPYKCKECGKAFMHSSHLNKHEKIHXGEKPYKCKECGKVISSSSSFAKHKRIHXGEKPFKCLECGKAFNISXXLXKHRRIHXGEKPYXCEVCGKAFRQSANLYVHRRIHXGEKPYXCGECGKXFRQSANLYVHRRIHXGEKPYKCEDCGKAFGRYXALNQHKKIHXGEKPYKCEECGKAFNSSXNLXAHKRIHXREKPYXCEDRGRAFGLSXNLNEYKKIHXGDKPYKCKECGKAFIHSLHLNKHEKIHXGKKPYKCKQCGKVIXSSSSFAKHKRIHXGEKPFECLECGKAFXSSXXLXKHRRIHXGEKPYXCEVCGKAFRQSAILYVHRRIHXGEKPYXCEECGKXFRQSANLYVHRRIHXGEKPYKCEECGKAFGRYXDLNQHKKIHXGEKLYKCEECGKDFVWYXDLNQQKKIYXGEKPYKCEECGKAFAPSXDLNQHXKILXGEQSYKCEECGKAFGWSIALNQHKKIHXGEKPYKCEECGKAFSRSRNLXXHRRVHXREKPYKCEDRGRSFGWSXNLNEYKKIHXGDKLYKCKECGKVFKQSSHLNRHEKIHXGKKPYKCKECGKVIXSSSSFAKHKRIHXGEKPFKCLECGKAFXSSXXLXKHRRIHXGEKPYXCEECGKAFRQSAILYVHRRIHXGEKPYXCGECGKXFRQSANLYAHKKIHXGEKPYXCGDCGKXFRQSANLYAHKKIHXGDKXIQV

SEQ ID NO: 32089 - protein, 99 aa, Homo sapiens
  MOD_RES (17)..(17): Selenocysteine
  MOD_RES (48)..(48): Selenocysteine
MDVAIEFSVEEWQCLDXAQQNLYRNVMLENYRNLVFLGIAVSKPDLIXCLEQGKEPWNMERHEMVAKPPGMCCYFAQDLRPEQSIKASLQRIILRKYEK

SEQ ID NO: 32090 - protein, 619 aa, Homo sapiens
  MOD_RES (5)..(5): Selenocysteine
  MOD_RES (23)..(23): Selenocysteine
  MOD_RES (54)..(54): Selenocysteine
  MOD_RES (138)..(140): Selenocysteine
  MOD_RES (165)..(165): Selenocysteine
  MOD_RES (186)..(186): Selenocysteine
  MOD_RES (193)..(194): Selenocysteine
  MOD_RES (212)..(212): Selenocysteine
  MOD_RES (221)..(221): Selenocysteine
  MOD_RES (243)..(243): Selenocysteine
  MOD_RES (249)..(249): Selenocysteine
  MOD_RES (270)..(271): Selenocysteine
  MOD_RES (277)..(277): Selenocysteine
  MOD_RES (296)..(296): Selenocysteine
  MOD_RES (298)..(298): Selenocysteine
  MOD_RES (326)..(326): Selenocysteine
  MOD_RES (333)..(333): Selenocysteine
  MOD_RES (352)..(352): Selenocysteine
  MOD_RES (354)..(354): Selenocysteine
  MOD_RES (361)..(361): Selenocysteine
  MOD_RES (380)..(380): Selenocysteine
  MOD_RES (382)..(382): Selenocysteine
  MOD_RES (389)..(389): Selenocysteine
  MOD_RES (405)..(405): Selenocysteine
  MOD_RES (410)..(411): Selenocysteine
  MOD_RES (417)..(417): Selenocysteine
  MOD_RES (438)..(439): Selenocysteine
  MOD_RES (445)..(445): Selenocysteine
  MOD_RES (466)..(466): Selenocysteine
  MOD_RES (473)..(473): Selenocysteine
  MOD_RES (494)..(495): Selenocysteine
  MOD_RES (501)..(501): Selenocysteine
  MOD_RES (520)..(520): Selenocysteine
  MOD_RES (550)..(550): Selenocysteine
  MOD_RES (557)..(557): Selenocysteine
  MOD_RES (576)..(576): Selenocysteine
  MOD_RES (578)..(578): Selenocysteine
  MOD_RES (585)..(585): Selenocysteine
  MOD_RES (606)..(607): Selenocysteine
MGPLXFMDVAIEFSVEEWQCLDXAQQNLYRNVMLENYRNLVFLGIAVSKPDLIXCLEQGKEPWNMERHEMVAKPPGMCCYFAQDLRPEQSIKASLQRIILRKYEKCGHHNLQLKKGYKSVDEYKVHKGSYNGFNQCLXXXQSKIFQCDKYVKDFHKFSNSNRHKXEKNPFKCKECGKSFCVLSHLXQHKRIHXXVNSYKLEECGKAFNVSSXLSQHKRIHXGQKHYKCEECGIAFNKSSHLNXHKIIHXGEKSYKREECGKAFNISSHLXXHKIIHXGENAYKCKECGKAFNQSSXLXRHKIIHAGEKPYICEHCGRAFNQSSNLXKHKRIHXGDKPYKCEECGKAFNVSSXLXQHKRIHXGEKPYKCEECGKAFNVSSXLXQHKRIHXGEKPYKCEECGKAFNXSSHLXXHKRIHXGEKPYKCEECGKAFNQFSQLXXHKIIHXGEKPYKCKECGKAFKRSSNLXEHRIIHXGEKPYKCEECGKAFNLSSHLXXHKKIHXGEKPYKCKECGKAFNQSSXLARHKIIHAGEKPYKCEECGKAFYQYSNLXQHKIIHXGEKPYKCEECGKAFNWSSXLXKHKVIHXGEKPYKCKECGKAFNQCSNLXXHKKIHAVEKSDK

SEQ ID NO: 32091 - protein, 77 aa, Homo sapiens
  MOD_RES (5)..(5): Selenocysteine
  MOD_RES (23)..(23): Selenocysteine
  MOD_RES (54)..(54): Selenocysteine
MGPLXFMDVAIEFSVEEWQCLDXAQQNLYRNVMLENYRNLVFLGIAVSKPDLIXCLEQGKEPWNMERHEMVAKPPGR

SEQ ID NO: 32092 - protein, 89 aa, Homo sapiens
  MOD_RES (5)..(5): Selenocysteine
  MOD_RES (23)..(23): Selenocysteine
MGLLXFRDVAIEFSLEEWQCLDXAQKNLYRNVMLENYRNLAFLGIAVSKPDLIICLEKEKEPWNMKRDEMVDEPPDGVSLCHPGWSAVA

SEQ ID NO: 32093 - protein, 616 aa, Homo sapiens
  MOD_RES (5)..(5): Selenocysteine
  MOD_RES (23)..(23): Selenocysteine
  MOD_RES (138)..(140): Selenocysteine
  MOD_RES (168)..(168): Selenocysteine
  MOD_RES (189)..(189): Selenocysteine
  MOD_RES (196)..(197): Selenocysteine
  MOD_RES (209)..(209): Selenocysteine
  MOD_RES (215)..(215): Selenocysteine
  MOD_RES (217)..(217): Selenocysteine
  MOD_RES (222)..(222): Selenocysteine
  MOD_RES (224)..(224): Selenocysteine
  MOD_RES (245)..(246): Selenocysteine
  MOD_RES (250)..(250): Selenocysteine
  MOD_RES (252)..(252): Selenocysteine
  MOD_RES (271)..(271): Selenocysteine
  MOD_RES (273)..(273): Selenocysteine
  MOD_RES (280)..(280): Selenocysteine
  MOD_RES (301)..(301): Selenocysteine
  MOD_RES (327)..(327): Selenocysteine
  MOD_RES (329)..(329): Selenocysteine
  MOD_RES (357)..(358): Selenocysteine
  MOD_RES (364)..(364): Selenocysteine
  MOD_RES (383)..(383): Selenocysteine
  MOD_RES (385)..(385): Selenocysteine
  MOD_RES (392)..(392): Selenocysteine
  MOD_RES (413)..(413): Selenocysteine
  MOD_RES (420)..(420): Selenocysteine
  MOD_RES (441)..(441): Selenocysteine
  MOD_RES (448)..(448): Selenocysteine
  MOD_RES (469)..(470): Selenocysteine
  MOD_RES (476)..(476): Selenocysteine
  MOD_RES (495)..(495): Selenocysteine
  MOD_RES (497)..(497): Selenocysteine
  MOD_RES (504)..(504): Selenocysteine
  MOD_RES (523)..(523): Selenocysteine
  MOD_RES (532)..(532): Selenocysteine
  MOD_RES (545)..(545): Selenocysteine
  MOD_RES (554)..(554): Selenocysteine
  MOD_RES (560)..(560): Selenocysteine
  MOD_RES (582)..(582): Selenocysteine
  MOD_RES (588)..(588): Selenocysteine
  MOD_RES (607)..(607): Selenocysteine
  MOD_RES (616)..(616): Selenocysteine
MGLLXFRDVAIEFSLEEWQCLDXAQKNLYRNVMLENYRNLAFLGIAVSKPDLIICLEKEKEPWNMKRDEMVDEPPGICPHFAQDIWPEQGVEDSFQKVILRRFEKCGHENLQLRKGCKSVDECKVHKEGYNGLNQCFXXXQGKASQCGKYLKVFYKFINLNRYKIRHXRKKPFKCKNCVKSFCMFSHKXQHKSIYXXEKSYKCKECGKXFNWSSXLXNHKKXHXEEKPYKCEEYGKAFNQSSNYXXHKVXHXGEKPYKCEECGKAFSQSSXLXIHKRIHXGEKPCKCEECGKAFSQPSALXIHKRMHIGEKPYKCEECGKAFVWSSXLXRHKRLHSGEKPYKCEECAKAFSQFGHLXXHRIIHXGEKPYKCEECGKAFIWPSXLXKHKRIHXGEKPYKCEECGKAFHRSSNLXKHKIIHXGEKPYKCEECGKAFIWSSNLXEHKKIHXREKPYKCEECSKAFSRSSALXXHKRMHXGEKPYKCEECGKAFSQSSXLXAHKIIHXGEKPYKCEECGKAFILSSXLSKHKRIHXGEKPYKCEECGKXFNQSSNLSXHKIIHXGEKPYKCEECGKAFNRSSNLSXHKIIHXGEKPYKCDECGKSFIWSSXLFKHKRIHX

SEQ ID NO: 32094 - protein, 738 aa, Homo sapiens
  MOD_RES (5)..(5): Selenocysteine
  MOD_RES (23)..(23): Selenocysteine
  MOD_RES (138)..(140): Selenocysteine
  MOD_RES (168)..(168): Selenocysteine
  MOD_RES (189)..(189): Selenocysteine
  MOD_RES (196)..(197): Selenocysteine
  MOD_RES (209)..(209): Selenocysteine
  MOD_RES (215)..(215): Selenocysteine
  MOD_RES (217)..(217): Selenocysteine
  MOD_RES (222)..(222): Selenocysteine
  MOD_RES (224)..(224): Selenocysteine
  MOD_RES (245)..(246): Selenocysteine
  MOD_RES (250)..(250): Selenocysteine
  MOD_RES (252)..(252): Selenocysteine
  MOD_RES (271)..(271): Selenocysteine
  MOD_RES (273)..(273): Selenocysteine
  MOD_RES (280)..(280): Selenocysteine
  MOD_RES (301)..(301): Selenocysteine
  MOD_RES (327)..(327): Selenocysteine
  MOD_RES (329)..(329): Selenocysteine
  MOD_RES (357)..(358): Selenocysteine
  MOD_RES (364)..(364): Selenocysteine
  MOD_RES (383)..(383): Selenocysteine
  MOD_RES (385)..(385): Selenocysteine
  MOD_RES (392)..(392): Selenocysteine
  MOD_RES (413)..(413): Selenocysteine
  MOD_RES (420)..(420): Selenocysteine
  MOD_RES (441)..(441): Selenocysteine
  MOD_RES (448)..(448): Selenocysteine
  MOD_RES (469)..(470): Selenocysteine
  MOD_RES (476)..(476): Selenocysteine
  MOD_RES (495)..(495): Selenocysteine
  MOD_RES (497)..(497): Selenocysteine
  MOD_RES (504)..(504): Selenocysteine
  MOD_RES (523)..(523): Selenocysteine
  MOD_RES (532)..(532): Selenocysteine
  MOD_RES (545)..(545): Selenocysteine
  MOD_RES (554)..(554): Selenocysteine
  MOD_RES (560)..(560): Selenocysteine
  MOD_RES (582)..(582): Selenocysteine
  MOD_RES (588)..(588): Selenocysteine
  MOD_RES (607)..(607): Selenocysteine
  MOD_RES (616)..(616): Selenocysteine
  MOD_RES (646)..(646): Selenocysteine
  MOD_RES (665)..(665): Selenocysteine
  MOD_RES (674)..(674): Selenocysteine
  MOD_RES (695)..(695): Selenocysteine
  MOD_RES (723)..(724): Selenocysteine
  MOD_RES (728)..(728): Selenocysteine
MGLLXFRDVAIEFSLEEWQCLDXAQKNLYRNVMLENYRNLAFLGIAVSKPDLIICLEKEKEPWNMKRDEMVDEPPGICPHFAQDIWPEQGVEDSFQKVILRRFEKCGHENLQLRKGCKSVDECKVHKEGYNGLNQCFXXXQGKASQCGKYLKVFYKFINLNRYKIRHXRKKPFKCKNCVKSFCMFSHKXQHKSIYXXEKSYKCKECGKXFNWSSXLXNHKKXHXEEKPYKCEEYGKAFNQSSNYXXHKVXHXGEKPYKCEECGKAFSQSSXLXIHKRIHXGEKPCKCEECGKAFSQPSALXIHKRMHIGEKPYKCEECGKAFVWSSXLXRHKRLHSGEKPYKCEECAKAFSQFGHLXXHRIIHXGEKPYKCEECGKAFIWPSXLXKHKRIHXGEKPYKCEECGKAFHRSSNLXKHKIIHXGEKPYKCEECGKAFIWSSNLXEHKKIHXREKPYKCEECSKAFSRSSALXXHKRMHXGEKPYKCEECGKAFSQSSXLXAHKIIHXGEKPYKCEECGKAFILSSXLSKHKRIHXGEKPYKCEECGKXFNQSSNLSXHKIIHXGEKPYKCEECGKAFNRSSNLSXHKIIHXGEKPYKCDECGKSFIWSSXLFKHKIIHXGEKPYKCEECGKAFNHSQILLHIRHKRMHXGEKPYKCEECGKSFNLSSXFIKHKVIHXGVKLYKCEECGKVFFWSSALXRHKKIHAGQQPYKWEKIGKAFNQSSHLXXDKIXHIGEKSYKCE

SEQ ID NO: 32095 - protein, 108 aa, Homo sapiens
  MOD_RES (5)..(5): Selenocysteine
  MOD_RES (23)..(23): Selenocysteine
  MOD_RES (102)..(102): Selenocysteine
MGLLXFRDVAIEFSLEEWQCLDXAQKNLYRNVMLENYRNLAFLGIAVSKPDLIICLEKEKEPWNMKRDEMVDEPPGLAVSNPDLISCLEQIKEPWNVKRHEXVVKYSG

SEQ ID NO: 32096 - protein, 109 aa, Homo sapiens
  MOD_RES (5)..(5): Selenocysteine
  MOD_RES (23)..(23): Selenocysteine
  MOD_RES (102)..(102): Selenocysteine
MGLLXFRDVAIEFSLEEWQCLDXAQKNLYRNVMLENYRNLAFLGIAVSKPDLIICLEKEKEPWNMKRDEMVDEPPGLAVSNPDLISCLEQIKEPWNVKRHEXVVKYSGR

SEQ ID NO: 32097 - protein, 77 aa, Homo sapiens
  MOD_RES (5)..(5): Selenocysteine
  MOD_RES (23)..(23): Selenocysteine
MGLLXFRDVAIEFSLEEWQCLDXAQKNLYRNVMLENYRNLAFLGIAVSKPDLIICLEKEKEPWNMKRDEMVDEPPGR

SEQ ID NO: 32098 - protein, 622 aa, Homo sapiens
  MOD_RES (5)..(5): Selenocysteine
  MOD_RES (23)..(23): Selenocysteine
  MOD_RES (118)..(118): Selenocysteine
  MOD_RES (138)..(140): Selenocysteine
  MOD_RES (168)..(168): Selenocysteine
  MOD_RES (196)..(196): Selenocysteine
  MOD_RES (217)..(217): Selenocysteine
  MOD_RES (223)..(223): Selenocysteine
  MOD_RES (244)..(244): Selenocysteine
  MOD_RES (251)..(251): Selenocysteine
  MOD_RES (266)..(266): Selenocysteine
  MOD_RES (298)..(298): Selenocysteine
  MOD_RES (300)..(300): Selenocysteine
  MOD_RES (304)..(304): Selenocysteine
  MOD_RES (335)..(335): Selenocysteine
  MOD_RES (354)..(354): Selenocysteine
  MOD_RES (356)..(356): Selenocysteine
  MOD_RES (363)..(363): Selenocysteine
  MOD_RES (384)..(384): Selenocysteine
  MOD_RES (404)..(404): Selenocysteine
  MOD_RES (410)..(410): Selenocysteine
  MOD_RES (412)..(412): Selenocysteine
  MOD_RES (419)..(419): Selenocysteine
  MOD_RES (434)..(435): Selenocysteine
  MOD_RES (440)..(440): Selenocysteine
  MOD_RES (447)..(447): Selenocysteine
  MOD_RES (468)..(469): Selenocysteine
  MOD_RES (503)..(503): Selenocysteine
  MOD_RES (524)..(524): Selenocysteine
  MOD_RES (531)..(531): Selenocysteine
  MOD_RES (559)..(559): Selenocysteine
  MOD_RES (608)..(609): Selenocysteine
  MOD_RES (615)..(615): Selenocysteine
  MOD_RES (619)..(619): Selenocysteine
MGSLXFRDVAIQFSLEEWQCLDXAQQNLYRNVMLENYRNLVFLGIAAPKPDLIIFLEQGKEPWNMKRHELVKEPPVICSHFAQDLWPEQGREDSFQKVILRRYEKCGHENLQLKIGCXNVDECKVHKKGYNKLNQSLXXXQSKVFQCGKYANIFHKCSNSKRHKIRHXGKKLLKCKEYVRSFCMLSHLSQHKRIYXRENSYKSEEHGKAFNWSSALXYKRIHXGEKPCKCEECGKAFSKFSILXKHKVIHXGEKHYKCEECGKAFXRSSSLIEHKRSHAGEKPYKCEECGKAFSKASXLXAHKXIHAGEKPYKCEECGKAFNRSSNLMEHKRIHXGEKPCKCEECGKAFGNFSXLXKHKVIHXGEKPYKCEECGKAFSWPSSLXEHKRIHAGDKPYKCEECGKXFKWSSXLXKHKIIHXGEKPYKCEECGKAFXXFSSLXKHKVIHXGEKHYKCEECGKVFSWSSSLXXHKAIHAGEKLYKCEECGKAFKWSSNLMEHKRIHXGEKPYKCEECGKAFSKVANLXKHKVIHXGEKQYKCEECGKAFIWSSRLSEHKRIHXGEKPYKCEECGKAFSWVSVLNKHKKIHAGKKFYKCEECGKDFNQSSHLXXHKRIHXGGKXLQM

SEQ ID NO: 32099 - protein, 76 aa, Homo sapiens
  MOD_RES (1)..(1): Any amino acid
  MOD_RES (23)..(23): Selenocysteine
  MOD_RES (38)..(38): Selenocysteine
  MOD_RES (42)..(42): Selenocysteine
  MOD_RES (63)..(63): Selenocysteine
  MOD_RES (69)..(69): Selenocysteine
XEQGKEPWNMKRHELVKEPPGRXGHELWLRKLELSLGXAIGXKVCRPASIALNGYHSPGLWKXQDLSQXVAGRSLG

SEQ ID NO: 32100 - protein, 1252 aa, Homo sapiens
  MOD_RES (14)..(14): Selenocysteine
  MOD_RES (19)..(19): Selenocysteine
  MOD_RES (32)..(32): Selenocysteine
  MOD_RES (63)..(63): Selenocysteine
  MOD_RES (81)..(81): Selenocysteine
  MOD_RES (91)..(91): Selenocysteine
  MOD_RES (100)..(100): Selenocysteine
  MOD_RES (111)..(111): Selenocysteine
  MOD_RES (147)..(147): Selenocysteine
  MOD_RES (149)..(149): Selenocysteine
  MOD_RES (175)..(175): Selenocysteine
  MOD_RES (179)..(179): Selenocysteine
  MOD_RES (222)..(222): Selenocysteine
  MOD_RES (224)..(224): Selenocysteine
  MOD_RES (231)..(231): Selenocysteine
  MOD_RES (250)..(250): Selenocysteine
  MOD_RES (252)..(252): Selenocysteine
  MOD_RES (259)..(259): Selenocysteine
  MOD_RES (262)..(262): Selenocysteine
  MOD_RES (280)..(280): Selenocysteine
  MOD_RES (287)..(287): Selenocysteine
  MOD_RES (291)..(291): Selenocysteine
  MOD_RES (315)..(315): Selenocysteine
  MOD_RES (328)..(328): Selenocysteine
  MOD_RES (343)..(343): Selenocysteine
  MOD_RES (362)..(362): Selenocysteine
  MOD_RES (371)..(371): Selenocysteine
  MOD_RES (392)..(392): Selenocysteine
  MOD_RES (399)..(399): Selenocysteine
  MOD_RES (418)..(418): Selenocysteine
  MOD_RES (427)..(427): Selenocysteine
  MOD_RES (446)..(446): Selenocysteine
  MOD_RES (455)..(455): Selenocysteine
  MOD_RES (476)..(476): Selenocysteine
  MOD_RES (483)..(483): Selenocysteine
  MOD_RES (511)..(511): Selenocysteine
  MOD_RES (530)..(530): Selenocysteine
  MOD_RES (539)..(539): Selenocysteine
  MOD_RES (560)..(560): Selenocysteine
  MOD_RES (567)..(567): Selenocysteine
  MOD_RES (595)..(595): Selenocysteine
  MOD_RES (623)..(623): Selenocysteine
  MOD_RES (644)..(644): Selenocysteine
  MOD_RES (651)..(651): Selenocysteine
  MOD_RES (679)..(679): Selenocysteine
  MOD_RES (707)..(707): Selenocysteine
  MOD_RES (728)..(728): Selenocysteine
  MOD_RES (735)..(735): Selenocysteine
  MOD_RES (763)..(763): Selenocysteine
  MOD_RES (791)..(791): Selenocysteine
  MOD_RES (812)..(812): Selenocysteine
  MOD_RES (819)..(819): Selenocysteine
  MOD_RES (847)..(847): Selenocysteine
  MOD_RES (896)..(896): Selenocysteine
  MOD_RES (903)..(903): Selenocysteine
  MOD_RES (931)..(931): Selenocysteine
  MOD_RES (950)..(950): Selenocysteine
  MOD_RES (959)..(959): Selenocysteine
  MOD_RES (980)..(980): Selenocysteine
  MOD_RES (987)..(987): Selenocysteine
  MOD_RES (1006)..(1006): Selenocysteine
  MOD_RES (1015)..(1015): Selenocysteine
  MOD_RES (1043)..(1043): Selenocysteine
  MOD_RES (1064)..(1064): Selenocysteine
  MOD_RES (1071)..(1071): Selenocysteine
  MOD_RES (1099)..(1099): Selenocysteine
  MOD_RES (1118)..(1118): Selenocysteine
  MOD_RES (1120)..(1120): Selenocysteine
  MOD_RES (1127)..(1127): Selenocysteine
  MOD_RES (1148)..(1148): Selenocysteine
  MOD_RES (1176)..(1176): Selenocysteine
  MOD_RES (1180)..(1180): Selenocysteine
  MOD_RES (1183)..(1183): Selenocysteine
  MOD_RES (1208)..(1208): Selenocysteine
  MOD_RES (1211)..(1211): Selenocysteine
  MOD_RES (1216)..(1216): Selenocysteine
  MOD_RES (1230)..(1230): Selenocysteine
  MOD_RES (1235)..(1235): Selenocysteine
  MOD_RES (1238)..(1238): Selenocysteine
MPGAPGSLEMGPLXFRDVXIEFSLEEWQCLDXVQQNLYRDVMLENYRNLVFLGMAVFKPDLIXCLKQGKEPWNMKRHEMVXKPPVMRSHFXQDLWPDQSXKDSFQEVILRXYARCGHKNLRLRKDCKSANEGKMHKEGYNKLNQCRXAXQRKIFQCNKHMKVFHKYSNRNKVRHXKKKXFKCIKCSKSFFMLSCLIRHKRIHIRQNIYKCEERGKAFKSFSXLXKHKIIHXEDKPYKYKKCGNAFKFSSXFXKHKRIHXGEXPFRCEECGKAFNQSSNLXDHKRIHXGEKXYKCEECGKAFKGSSNFNAHKVIHXAEKPYKCEDCGKXFNHFSALRKHKIIHXGKKPYKREECGKAFSQSSXLRKHEIIHXGEKPYKCEECGKAFKWSSKLXVHKVVHXGEKPYKCEECGKAFSQFSXLKKHKIIHXGKKPYKCEECGKAFNSSSXLMKHKIIHXGEKPYKCEECGKAFRQSSHLXRHKAIHXGEKPYKCEECGKAFNHFSDLRRHKIIHXGKKPYKCEECGKAFSQSSXLRNHQIIHXGEKPYKCEECGKAFKWSSKLXVHKVIHXGEKPCKCEECGKAFKHFSALRKHKVIHXREKLYKCEECGKAFNNSSILAKHKIIHXGKKPYKCEECGKAFRQSSHLXRHKAIHXGEKPYKCEECGKAFSHFSALRRHKIIHXGKKPYKCEECGKAFSHFSALRRHKIIHXGEKPYKCEECGKAFKWSSKLXVHKVIHXAEKPCKCEECGKSFKHFSALRKHKVIHXREKLYKCEECVKAFNSFSALMKHKVIHXGEKPYKCEECGKAFKWSSKLXVHKVIHXGEKPCKCEECGKAFKHFSALRKHKVIHXGKKPYKCEECGKAFSQSSSLRKHEIIHSGEKPYKCEECGKAFKWLSKLXVHKVIHXAEKPCKCEECGKAFKHFSALRKHKIIHXGKKPYKCEECGKAFNDSSXLMKHKIIHXGKKPYKCAECGKAFKQSSHLXRHKAIHXGEKPYKCEECGKDFNNSSXLKKHKLIHXREKLYKCEECVKAFNNFSALMKHKIIHXGEKPYKCEECGKAFKWSSKLXEHKVIHXGEKPCKCEECDKAFKHFSALRKHKVIHXGKKPYQCDECGKAFNNSSXLXKHKIIHXGEKPYKCEECGKAFSQSSILXKHKIIHSVEKPYKCEECGKAFNQSSHLXRHKXIHXGEKPYKCEECGKAFIQCSYLIRHKXIHXREKPXNVKKVPKLLSNPHXLLDKXIHXGEKPYKCEECAKAF

SEQ ID NO: 32101 - protein, 503 aa, Homo sapiens
  MOD_RES (5)..(5): Selenocysteine
  MOD_RES (23)..(23): Selenocysteine
  MOD_RES (54)..(54): Selenocysteine
  MOD_RES (67)..(67): Selenocysteine
  MOD_RES (138)..(139): Selenocysteine
  MOD_RES (168)..(168): Selenocysteine
  MOD_RES (196)..(196): Selenocysteine
  MOD_RES (217)..(218): Selenocysteine
  MOD_RES (223)..(223): Selenocysteine
  MOD_RES (244)..(245): Selenocysteine
  MOD_RES (251)..(251): Selenocysteine
  MOD_RES (269)..(269): Selenocysteine
  MOD_RES (272)..(273): Selenocysteine
  MOD_RES (279)..(279): Selenocysteine
  MOD_RES (300)..(300): Selenocysteine
  MOD_RES (307)..(307): Selenocysteine
  MOD_RES (326)..(326): Selenocysteine
  MOD_RES (328)..(328): Selenocysteine
  MOD_RES (354)..(354): Selenocysteine
  MOD_RES (361)..(361): Selenocysteine
  MOD_RES (363)..(363): Selenocysteine
  MOD_RES (382)..(382): Selenocysteine
  MOD_RES (384)..(384): Selenocysteine
  MOD_RES (391)..(391): Selenocysteine
  MOD_RES (412)..(413): Selenocysteine
  MOD_RES (419)..(419): Selenocysteine
  MOD_RES (438)..(438): Selenocysteine
  MOD_RES (440)..(441): Selenocysteine
  MOD_RES (447)..(447): Selenocysteine
  MOD_RES (466)..(466): Selenocysteine
  MOD_RES (468)..(469): Selenocysteine
  MOD_RES (496)..(496): Selenocysteine
  MOD_RES (500)..(500): Selenocysteine
  MOD_RES (503)..(503): Selenocysteine
MGALXFRDVAIEFSLEEWQCLDXEQQNLYRNVMLDNYRNLVFLGIAVSKPDLIXCLEQEKEPWNLKXHDMVAKPPVICSHIAQDLWPEQGIKDYFQEVILRQYKKCRHENLLLRKGCKNVDEFKMHKKGYNRHNQCLXXSHSKIFQCDKYVKVFHKFSNSNRHKIRHXSKKPFKCKECGKLFCILSHLAQHKKIHXGEKSYKCEEYGKAFNESSNCXXHKRIXEKKPYKCKECGKAFNWFSHFXXHKRIHXGEKPYQCEKCGKFFNQSXNLXXHKRIHXGEKPYKCEECGKAFNQSSNLXEHKKIHXKEQPYKCEKCGKAFKWSSXLXKHKRIHNGEKPYKCEECGKAFNRSSXLNRHKIXHXGGKPYKYKECGKAFNQSSXLXIHKIIHXVEKFYKCEECGKAFSRISHLXXHKRIHXGEKPYKCEECGRAFNQSSXLXXHKRIHXGEKPYECEECGKAFNRSSXLXXHKIIHSGEKIYKCKECGKAFRRFSHLXRHKXIHX

SEQ ID NO: 32102 - protein, 45 aa, Homo sapiens
  MOD_RES (22)..(22): Selenocysteine
  MOD_RES (35)..(35): Selenocysteine
MLDNYRNLVFLGIAVSKPDLIXCLEQEKEPWNLKXHDMVAKPPGR

SEQ ID NO: 32103 - protein, 80 aa, Homo sapiens
  MOD_RES (1)..(1): Any amino acid
  MOD_RES (18)..(18): Selenocysteine
  MOD_RES (31)..(31): Selenocysteine
  MOD_RES (41)..(41): Selenocysteine
  MOD_RES (61)..(61): Selenocysteine
  MOD_RES (70)..(70): Selenocysteine
XRNLVFLGIAVSKPDLIXCLEQEKEPWNLKXHDMVAKPPGXAFSIFYMFVKFYKYMQCQYXFSEFGYFGXSFFHFSGQIC

SEQ ID NO: 32104 - protein, 584 aa, Homo sapiens
  MOD_RES (4)..(4): Selenocysteine
  MOD_RES (69)..(69): Selenocysteine
  MOD_RES (81)..(81): Selenocysteine
  MOD_RES (134)..(134): Selenocysteine
  MOD_RES (151)..(151): Selenocysteine
  MOD_RES (163)..(163): Selenocysteine
  MOD_RES (182)..(182): Selenocysteine
  MOD_RES (195)..(195): Selenocysteine
  MOD_RES (217)..(217): Selenocysteine
  MOD_RES (223)..(223): Selenocysteine
  MOD_RES (232)..(233): Selenocysteine
  MOD_RES (244)..(244): Selenocysteine
  MOD_RES (263)..(263): Selenocysteine
  MOD_RES (265)..(265): Selenocysteine
  MOD_RES (278)..(278): Selenocysteine
  MOD_RES (287)..(287): Selenocysteine
  MOD_RES (300)..(300): Selenocysteine
  MOD_RES (318)..(319): Selenocysteine
  MOD_RES (321)..(321): Selenocysteine
  MOD_RES (328)..(328): Selenocysteine
  MOD_RES (334)..(334): Selenocysteine
  MOD_RES (356)..(356): Selenocysteine
  MOD_RES (375)..(375): Selenocysteine
  MOD_RES (384)..(384): Selenocysteine
  MOD_RES (390)..(390): Selenocysteine
  MOD_RES (402)..(403): Selenocysteine
  MOD_RES (412)..(412): Selenocysteine
  MOD_RES (430)..(430): Selenocysteine
  MOD_RES (440)..(440): Selenocysteine
  MOD_RES (468)..(468): Selenocysteine
  MOD_RES (493)..(493): Selenocysteine
  MOD_RES (496)..(496): Selenocysteine
  MOD_RES (514)..(514): Selenocysteine
  MOD_RES (524)..(524): Selenocysteine
  MOD_RES (549)..(549): Selenocysteine
  MOD_RES (552)..(552): Selenocysteine
  MOD_RES (556)..(556): Selenocysteine
  MOD_RES (580)..(580): Selenocysteine
ELLXFRDVAIEFSPEEWKCLDPAQQNLYRDVMLENYRNLISLGVAISNPDLVIYLEQRKEPYKVKIHEXVAKHPAVCSHFXQDFLPVQGIEDSFHKLILRRYEKCGHENLELRKSCKRKVQKGGYNEFNQCLSXIQSKIFQCNVHVKVFSXFSNSNQRRIRHXGEKHFKECGKSFQKFSDLXQHQGIHAGEKPYXCEECGKDFKWYLIFNEYEIIHXGEKPFXCEECGNIFXXSSNFAKHKVHXGEKSYKYEECGKAFNRSSXLXKHKRIHAEEKPFXCEECGKIIXSSSNVAKHKKIHXGEKLYKCQECGKVFNRSXXLXKHNRIHXGEKPYXCEECGKAFSRSSVLNEHKRIHXGEKPYKCEQCGKAFRQSAXLNKHKSIHXGEKPYXCEECGKAFSRFXXLNEHKRIHXGERPHKCEECGKAFGWSXDLNKHKIIHXGEKPYKCEECGKAFGWSAYLSKHKKIHXGEKPYRCEECGKAFLCSRALNKHKXIHXGEKPYECEECGKAFGWSXYLSKHKKIHXGEKPYRCEECGKAFRRSRVLNKYKXIHXGDKXPKCKGCGKAFKWSSYLNQHNKIYXGEKL

SEQ ID NO: 32105 - protein, 585 aa, Homo sapiens
  MOD_RES (5)..(5): Selenocysteine
  MOD_RES (70)..(70): Selenocysteine
  MOD_RES (82)..(82): Selenocysteine
  MOD_RES (135)..(135): Selenocysteine
  MOD_RES (152)..(152): Selenocysteine
  MOD_RES (164)..(164): Selenocysteine
  MOD_RES (183)..(183): Selenocysteine
  MOD_RES (196)..(196): Selenocysteine
  MOD_RES (218)..(218): Selenocysteine
  MOD_RES (224)..(224): Selenocysteine
  MOD_RES (233)..(234): Selenocysteine
  MOD_RES (245)..(245): Selenocysteine
  MOD_RES (264)..(264): Selenocysteine
  MOD_RES (266)..(266): Selenocysteine
  MOD_RES (279)..(279): Selenocysteine
  MOD_RES (288)..(288): Selenocysteine
  MOD_RES (301)..(301): Selenocysteine
  MOD_RES (319)..(320): Selenocysteine
  MOD_RES (322)..(322): Selenocysteine
  MOD_RES (329)..(329): Selenocysteine
  MOD_RES (335)..(335): Selenocysteine
  MOD_RES (357)..(357): Selenocysteine
  MOD_RES (376)..(376): Selenocysteine
  MOD_RES (385)..(385): Selenocysteine
  MOD_RES (391)..(391): Selenocysteine
  MOD_RES (403)..(404): Selenocysteine
  MOD_RES (413)..(413): Selenocysteine
  MOD_RES (431)..(431): Selenocysteine
  MOD_RES (441)..(441): Selenocysteine
  MOD_RES (469)..(469): Selenocysteine
  MOD_RES (494)..(494): Selenocysteine
  MOD_RES (497)..(497): Selenocysteine
  MOD_RES (515)..(515): Selenocysteine
  MOD_RES (525)..(525): Selenocysteine
  MOD_RES (550)..(550): Selenocysteine
  MOD_RES (553)..(553): Selenocysteine
  MOD_RES (557)..(557): Selenocysteine
  MOD_RES (581)..(581): Selenocysteine
MELLXFRDVAIEFSPEEWKCLDPAQQNLYRDVMLENYRNLISLGVAISNPDLVIYLEQRKEPYKVKIHEXVAKHPAVCSHFXQDFLPVQGIEDSFHKLILRRYEKCGHENLELRKSCKRKVQKGGYNEFNQCLSXIQSKIFQCNVHVKVFSXFSNSNQRRIRHXGEKHFKECGKSFQKFSDLXQHQGIHAGEKPYXCEECGKDFKWYLIFNEYEIIHXGEKPFXCEECGNIFXXSSNFAKHKVHXGEKSYKYEECGKAFNRSSXLXKHKRIHAEEKPFXCEECGKIIXSSSNVAKHKKIHXGEKLYKCQECGKVFNRSXXLXKHNRIHXGEKPYXCEECGKAFSRSSVLNEHKRIHXGEKPYKCEQCGKAFRQSAXLNKHKSIHXGEKPYXCEECGKAFSRFXXLNEHKRIHXGERPHKCEECGKAFGWSXDLNKHKIIHXGEKPYKCEECGKAFGWSAYLSKHKKIHXGEKPYRCEECGKAFLCSRALNKHKXIHXGEKPYECEECGKAFGWSXYLSKHKKIHXGEKPYRCEECGKAFRRSRVLNKYKXIHXGDKXPKCKGCGKAFKWSSYLNQHNKIYXGEKL

SEQ ID NO: 32106 - protein, 10 aa, Homo sapiens
  MOD_RES (5)..(5): Selenocysteine
MGVLXFRDVA

SEQ ID NO: 32107 - protein, 427 aa, Homo sapiens
  MOD_RES (5)..(5): Selenocysteine
  MOD_RES (54)..(54): Selenocysteine
  MOD_RES (82)..(82): Selenocysteine
  MOD_RES (140)..(140): Selenocysteine
  MOD_RES (144)..(144): Selenocysteine
  MOD_RES (161)..(161): Selenocysteine
  MOD_RES (189)..(189): Selenocysteine
  MOD_RES (196)..(196): Selenocysteine
  MOD_RES (217)..(217): Selenocysteine
  MOD_RES (224)..(224): Selenocysteine
  MOD_RES (237)..(237): Selenocysteine
  MOD_RES (239)..(239): Selenocysteine
  MOD_RES (243)..(243): Selenocysteine
  MOD_RES (252)..(252): Selenocysteine
  MOD_RES (273)..(273): Selenocysteine
  MOD_RES (280)..(280): Selenocysteine
  MOD_RES (308)..(308): Selenocysteine
  MOD_RES (314)..(314): Selenocysteine
  MOD_RES (336)..(336): Selenocysteine
  MOD_RES (351)..(351): Selenocysteine
  MOD_RES (355)..(355): Selenocysteine
  MOD_RES (377)..(377): Selenocysteine
  MOD_RES (385)..(385): Selenocysteine
  MOD_RES (392)..(392): Selenocysteine
  MOD_RES (420)..(420): Selenocysteine
MGVLXFRDVAVEFSPEEWECLDSAQQRLYRDVMLENYGNLVSLGLAIFKPDLMXCLEQRKEPWKVKRQEAVAKHPAGSFHFXAEILPDHDIKDSFQKVILRKYGSCDLNNLHLKKDYQSVGNCKGQKSSYNGLHQCLSAXHSKXCQCNKCGRGFQLCSIFXEHKDIFSREKCHKCEECGKDCRLFSDFXRHKKIHXVERCYKCEECGKAFKKFSNLXEHKRVHXGEKPYKCEGCGKXFXCSSXLVKHKRNHXGDRPYKCEECGKAFKCFSDLXNHKRIHXGEKPYKCEECNKAYRWFSDLAKHKIIHXGDKPYXCNECGKAFKWFSALSKHKRIHXGEKPYICEECGKAFXRSSXLFNHKRIHMEERPYKCEECSKXFKCFSDLXNHKRIHXGEKPYKCEECGKASSWFSHLIRHKRIHXREKLHKC

SEQ ID NO: 32108 - protein, 212 aa, Homo sapiens
  MOD_RES (7)..(7): Selenocysteine
  MOD_RES (65)..(65): Selenocysteine
  MOD_RES (89)..(89): Selenocysteine
  MOD_RES (91)..(91): Selenocysteine
  MOD_RES (102)..(102): Selenocysteine
  MOD_RES (130)..(130): Selenocysteine
  MOD_RES (138)..(138): Selenocysteine
  MOD_RES (173)..(173): Selenocysteine
  MOD_RES (195)..(195): Selenocysteine
  MOD_RES (201)..(201): Selenocysteine
  MOD_RES (206)..(206): Selenocysteine
MAPGRGXLGLALVSERGSFLSGSCSFPERESRGYIGLGSSRSQVQGIGEFQGCGCGLHPGGVGSXRLPSEGLVPGCDVGELPEPSCPRXSXAQARCDLSSGXRRGAMEHAEGSPQRALSRMGAEGGALSXAGHLQRRXGPGAHHGAAPRRGAGVGAPGRCSAEESGCALGARXCHGLGRPCRGIPPQVSPLRPAXRSRGGXLAGHXQERPGH

SEQ ID NO: 32109 - protein, 612 aa, Homo sapiens
  MOD_RES (11)..(11): Selenocysteine
  MOD_RES (53)..(53): Selenocysteine
  MOD_RES (168)..(168): Selenocysteine
  MOD_RES (175)..(175): Selenocysteine
  MOD_RES (179)..(179): Selenocysteine
  MOD_RES (193)..(193): Selenocysteine
  MOD_RES (232)..(232): Selenocysteine
  MOD_RES (254)..(254): Selenocysteine
  MOD_RES (257)..(257): Selenocysteine
  MOD_RES (267)..(267): Selenocysteine
  MOD_RES (295)..(295): Selenocysteine
  MOD_RES (323)..(323): Selenocysteine
  MOD_RES (341)..(341): Selenocysteine
  MOD_RES (344)..(344): Selenocysteine
  MOD_RES (351)..(351): Selenocysteine
  MOD_RES (366)..(366): Selenocysteine
  MOD_RES (372)..(372): Selenocysteine
  MOD_RES (400)..(400): Selenocysteine
  MOD_RES (405)..(405): Selenocysteine
  MOD_RES (407)..(407): Selenocysteine
  MOD_RES (463)..(463): Selenocysteine
  MOD_RES (491)..(491): Selenocysteine
  MOD_RES (540)..(540): Selenocysteine
  MOD_RES (563)..(563): Selenocysteine
MEIPAPEPEKXALSSQDPALSLKENLEDISGWGLPEARSKESVSFKDVAVDFXQEEWGQLDSPQRALYRDVMLENYQNLLALEWELKAVPSQQQGICKEEPAQEPIMERPLGGAQAWGRQAGALQRSQAAPWAPAPAMVWDVPVEEFPLRCPLFAQQRVPEGGPLLDXRKNVQAXEGRXKAPARLCAGENASXPSEPEKFPQVRRQRGAGAGEGEFVCGECGKAFRQSSSLXLHRRWHSREKAYKCDECGKAFXWSXNLLEHRRIHXGEKPFFCGECGKAFSCHSSLNVHQRIHXGERPYKCSACEKAFSCSSLLSMHLRVHXGEKPYRCGECGKAFNQRXHLXRHHRIHXGEKPYQCGSCGKAFXCHSSLXVHEKIHSGDKPFKCSDCEKAFNSRSRLXLHQRXHXGEKPFKCADCGKGFSCHAYLLVHRRIHSGEKPFKCNECGKAFSSHAYLIVHRRIHXGEKPFDCSQCWKAFSCHSSLIVHQRIHXGEKPYKCSECGRAFSQNHCLIKHQKIHSGEKSFKCEKCGEMFNWSSHLXEHQRLHSEGKPLAIQFNKHLLSXYYVPGSLLGAGDAGLRDVDPIDALDVAKLLCVVPPRAGRNFSLGSKPRN

SEQ ID NO: 32110 - protein, 644 aa, Homo sapiens
  MOD_RES (11)..(11): Selenocysteine
  MOD_RES (53)..(53): Selenocysteine
  MOD_RES (200)..(200): Selenocysteine
  MOD_RES (207)..(207): Selenocysteine
  MOD_RES (211)..(211): Selenocysteine
  MOD_RES (225)..(225): Selenocysteine
  MOD_RES (264)..(264): Selenocysteine
  MOD_RES (286)..(286): Selenocysteine
  MOD_RES (289)..(289): Selenocysteine
  MOD_RES (299)..(299): Selenocysteine
  MOD_RES (327)..(327): Selenocysteine
  MOD_RES (355)..(355): Selenocysteine
  MOD_RES (373)..(373): Selenocysteine
  MOD_RES (376)..(376): Selenocysteine
  MOD_RES (383)..(383): Selenocysteine
  MOD_RES (398)..(398): Selenocysteine
  MOD_RES (404)..(404): Selenocysteine
  MOD_RES (432)..(432): Selenocysteine
  MOD_RES (437)..(437): Selenocysteine
  MOD_RES (439)..(439): Selenocysteine
  MOD_RES (495)..(495): Selenocysteine
  MOD_RES (523)..(523): Selenocysteine
  MOD_RES (572)..(572): Selenocysteine
  MOD_RES (595)..(595): Selenocysteine
MEIPAPEPEKXALSSQDPALSLKENLEDISGWGLPEARSKESVSFKDVAVDFXQEEWGQLDSPQRALYRDVMLENYQNLLALGPPLHKPDVISHLERGEEPWSMQREVPRGPCPEWELKAVPSQQQGICKEEPAQEPIMERPLGGAQAWGRQAGALQRSQAAPWAPAPAMVWDVPVEEFPLRCPLFAQQRVPEGGPLLDXRKNVQAXEGRXKAPARLCAGENASXPSEPEKFPQVRRQRGAGAGEGEFVCGECGKAFRQSSSLXLHRRWHSREKAYKCDECGKAFXWSXNLLEHRRIHXGEKPFFCGECGKAFSCHSSLNVHQRIHXGERPYKCSACEKAFSCSSLLSMHLRVHXGEKPYRCGECGKAFNQRXHLXRHHRIHXGEKPYQCGSCGKAFXCHSSLXVHEKIHSGDKPFKCSDCEKAFNSRSRLXLHQRXHXGEKPFKCADCGKGFSCHAYLLVHRRIHSGEKPFKCNECGKAFSSHAYLIVHRRIHXGEKPFDCSQCWKAFSCHSSLIVHQRIHXGEKPYKCSECGRAFSQNHCLIKHQKIHSGEKSFKCEKCGEMFNWSSHLXEHQRLHSEGKPLAIQFNKHLLSXYYVPGSLLGAGDAGLRDVDPIDALDVAKLLCVVPPRAGRNFSLGSKPRN

SEQ ID NO: 32111 - protein, 69 aa, Homo sapiens
  MOD_RES (11)..(11): Selenocysteine
  MOD_RES (46)..(46): Selenocysteine
MEIPAPEPEKXALSSQDPALSLKENLEDISGWGLPEARSKSLALVXQAGVQWRNLGSLQPPPLGFKQFS

SEQ ID NO: 32112 - protein, 50 aa, Homo sapiens
  MOD_RES (11)..(11): Selenocysteine
MEIPAPEPEKXEWELKAVPSQQQGICKEEPAQEPIMERPLGGAQAWGRQA

SEQ ID NO: 32113 - protein, 178 aa, Homo sapiens
  MOD_RES (11)..(11): Selenocysteine
  MOD_RES (31)..(31): Selenocysteine
  MOD_RES (55)..(55): Selenocysteine
  MOD_RES (57)..(57): Selenocysteine
  MOD_RES (68)..(68): Selenocysteine
  MOD_RES (96)..(96): Selenocysteine
  MOD_RES (104)..(104): Selenocysteine
  MOD_RES (139)..(139): Selenocysteine
  MOD_RES (161)..(161): Selenocysteine
  MOD_RES (167)..(167): Selenocysteine
  MOD_RES (172)..(172): Selenocysteine
MEIPAPEPEKXGIGEFQGCGCGLHPGGVGSXRLPSEGLVPGCDVGELPEPSCPRXSXAQARCDLSSGXRRGAMEHAEGSPQRALSRMGAEGGALSXAGHLQRRXGPGAHHGAAPRRGAGVGAPGRCSAEESGCALGARXCHGLGRPCRGIPPQVSPLRPAXRSRGGXLAGHXQERPGH

SEQ ID NO: 32114 - protein, 193 aa, Homo sapiens
  MOD_RES (20)..(20): Selenocysteine
  MOD_RES (80)..(80): Selenocysteine
  MOD_RES (124)..(124): Selenocysteine
  MOD_RES (169)..(169): Selenocysteine
  MOD_RES (186)..(186): Selenocysteine
MAQASLLACEGLAGVSLVPXAASKKMMLSQIASKQAENGERAGSPDVLRCSSQGHRKDSDKSRSRKDDDSLSEASHSKKXVKKVVVVEQNGSFQVKIPKNFVCEHCFGAFRSSYHLKRHILIHXGEKPFECDICDMRFIQKYHLERHKRVHSGEKPYQCERCHQCFSRXDRLLRHKRMCQGCQSKXSDGQFSL

SEQ ID NO: 32115 - protein, 187 aa, Homo sapiens
  MOD_RES (13)..(13): Selenocysteine
  MOD_RES (17)..(17): Selenocysteine
  MOD_RES (39)..(39): Selenocysteine
  MOD_RES (52)..(52): Selenocysteine
  MOD_RES (69)..(69): Selenocysteine
  MOD_RES (131)..(131): Selenocysteine
MAEAVAAPISPWXMAAXIQAMERKIESQAARLLSLEGRXGMAEKKLADCEKXAVEFGNQLEGKWAVLGXLLQEYGLLQRRLENVENLLRNRNFWILRLPPGSKGESPKEWGKLEDWQKELYKHVMRGNYEXLVSLDYAISKPEVLSQIEQGKEPCNWRRPGPKIPDVPVDPSPDISVSDFPGASQHL

SEQ ID NO: 32116 - protein, 644 aa, Homo sapiens
  MOD_RES (13)..(13): Selenocysteine
  MOD_RES (17)..(17): Selenocysteine
  MOD_RES (39)..(39): Selenocysteine
  MOD_RES (52)..(52): Selenocysteine
  MOD_RES (69)..(69): Selenocysteine
  MOD_RES (131)..(131): Selenocysteine
  MOD_RES (233)..(233): Selenocysteine
  MOD_RES (236)..(236): Selenocysteine
  MOD_RES (245)..(246): Selenocysteine
  MOD_RES (250)..(250): Selenocysteine
  MOD_RES (254)..(254): Selenocysteine
  MOD_RES (269)..(269): Selenocysteine
  MOD_RES (274)..(274): Selenocysteine
  MOD_RES (278)..(278): Selenocysteine
  MOD_RES (287)..(287): Selenocysteine
  MOD_RES (297)..(297): Selenocysteine
  MOD_RES (302)..(302): Selenocysteine
  MOD_RES (309)..(309): Selenocysteine
  MOD_RES (317)..(317): Selenocysteine
  MOD_RES (367)..(367): Selenocysteine
  MOD_RES (395)..(395): Selenocysteine
  MOD_RES (431)..(431): Selenocysteine
  MOD_RES (454)..(454): Selenocysteine
  MOD_RES (457)..(457): Selenocysteine
  MOD_RES (485)..(485): Selenocysteine
  MOD_RES (520)..(520): Selenocysteine
  MOD_RES (533)..(533): Selenocysteine
  MOD_RES (541)..(541): Selenocysteine
  MOD_RES (548)..(548): Selenocysteine
  MOD_RES (559)..(559): Selenocysteine
  MOD_RES (561)..(561): Selenocysteine
  MOD_RES (567)..(567): Selenocysteine
  MOD_RES (569)..(569): Selenocysteine
  MOD_RES (594)..(594): Selenocysteine
  MOD_RES (603)..(603): Selenocysteine
  MOD_RES (623)..(623): Selenocysteine
  MOD_RES (627)..(627): Selenocysteine
  MOD_RES (630)..(630): Selenocysteine
  MOD_RES (639)..(639): Selenocysteine
MAEAVAAPISPWXMAAXIQAMERKIESQAARLLSLEGRXGMAEKKLADCEKXAVEFGNQLEGKWAVLGXLLQEYGLLQRRLENVENLLRNRNFWILRLPPGSKGESPKEWGKLEDWQKELYKHVMRGNYEXLVSLDYAISKPEVLSQIEQGKEPCNWRRPGPKIPDVPVDPSPGSGPPVPAPDLLMQIKQEGELQLQEQQALGVEAWAAGQPDIGEEPWGLSQLDSGAGDISXDAXSGVHSNFSXXIPPXSWQXDLPPHHPSSACSDGXLKLNXAASXEDVKIVIKXEVQEEEVVAXPVHPXDLEAHGXLFGPGQAXRFFPSPAQEGAWESQGSSFPSQDPVLGLREPARPERDMGELSPAVAQEEXPPGDWLFGGVRWGWNFRCKPPVGLNPRXGPEGLPYSSPDNGEAILDPSQAPRPFNEPCKYPGRXKGFGHKPGLKKHPAAPPGGRPFXCAXCGKSFQLQVSLSAHQRSCGAPDGSGPGXGGGGSGSGGGGGGSGGGSARDGSALRCGECGRCFXRPAHLIRHRMLHXGERPFPCXECEKRFXERSKLIDHYRXHXGVRPFXCXVCGKSFIRKDHLRKHQRNHAAGAKXPARGQPLPXPPAPPDPFKSPASKGPLASXDLVXDWXCGLSVLGPXDGGDM

SEQ ID NO: 32117 - protein, 645 aa, Homo sapiens
  MOD_RES (13)..(13): Selenocysteine
  MOD_RES (17)..(17): Selenocysteine
  MOD_RES (39)..(39): Selenocysteine
  MOD_RES (52)..(52): Selenocysteine
  MOD_RES (69)..(69): Selenocysteine
  MOD_RES (131)..(131): Selenocysteine
  MOD_RES (233)..(233): Selenocysteine
  MOD_RES (236)..(236): Selenocysteine
  MOD_RES (245)..(246): Selenocysteine
  MOD_RES (250)..(250): Selenocysteine
  MOD_RES (254)..(254): Selenocysteine
  MOD_RES (269)..(269): Selenocysteine
  MOD_RES (274)..(274): Selenocysteine
  MOD_RES (278)..(278): Selenocysteine
  MOD_RES (288)..(288): Selenocysteine
  MOD_RES (298)..(298): Selenocysteine
  MOD_RES (303)..(303): Selenocysteine
  MOD_RES (310)..(310): Selenocysteine
  MOD_RES (318)..(318): Selenocysteine
  MOD_RES (368)..(368): Selenocysteine
  MOD_RES (396)..(396): Selenocysteine
  MOD_RES (432)..(432): Selenocysteine
  MOD_RES (455)..(455): Selenocysteine
  MOD_RES (458)..(458): Selenocysteine
  MOD_RES (486)..(486): Selenocysteine
  MOD_RES (521)..(521): Selenocysteine
  MOD_RES (534)..(534): Selenocysteine
  MOD_RES (542)..(542): Selenocysteine
  MOD_RES (549)..(549): Selenocysteine
  MOD_RES (560)..(560): Selenocysteine
  MOD_RES (562)..(562): Selenocysteine
  MOD_RES (568)..(568): Selenocysteine
  MOD_RES (570)..(570): Selenocysteine
  MOD_RES (595)..(595): Selenocysteine
  MOD_RES (604)..(604): Selenocysteine
  MOD_RES (624)..(624): Selenocysteine
  MOD_RES (628)..(628): Selenocysteine
  MOD_RES (631)..(631): Selenocysteine
  MOD_RES (640)..(640): Selenocysteine
MAEAVAAPISPWXMAAXIQAMERKIESQAARLLSLEGRXGMAEKKLADCEKXAVEFGNQLEGKWAVLGXLLQEYGLLQRRLENVENLLRNRNFWILRLPPGSKGESPKEWGKLEDWQKELYKHVMRGNYEXLVSLDYAISKPEVLSQIEQGKEPCNWRRPGPKIPDVPVDPSPGSGPPVPAPDLLMQIKQEGELQLQEQQALGVEAWAAGQPDIGEEPWGLSQLDSGAGDISXDAXSGVHSNFSXXIPPXSWQXDLPPHHPSSACSDGXLKLNXAASXEADVKIVIKXEVQEEEVVAXPVHPXDLEAHGXLFGPGQAXRFFPSPAQEGAWESQGSSFPSQDPVLGLREPARPERDMGELSPAVAQEEXPPGDWLFGGVRWGWNFRCKPPVGLNPRXGPEGLPYSSPDNGEAILDPSQAPRPFNEPCKYPGRXKGFGHKPGLKKHPAAPPGGRPFXCAXCGKSFQLQVSLSAHQRSCGAPDGSGPGXGGGGSGSGGGGGGSGGGSARDGSALRCGECGRCFXRPAHLIRHRMLHXGERPFPCXECEKRFXERSKLIDHYRXHXGVRPFXCXVCGKSFIRKDHLRKHQRNHAAGAKXPARGQPLPXPPAPPDPFKSPASKGPLASXDLVXDWXCGLSVLGPXDGGDM

SEQ ID NO: 32118 - protein, 66 aa, Homo sapiens
  MOD_RES (18)..(18): Selenocysteine
  MOD_RES (26)..(26): Selenocysteine
  MOD_RES (44)..(44): Selenocysteine
  MOD_RES (66)..(66): Selenocysteine
MCSSILKDILHLAEHDGXHPEQGLYXCAAEHDLHQKEQIREKLXRSDEWRPSFVNHSAHVGERNFX

SEQ ID NO: 32119 - protein, 778 aa, Homo sapiens
  MOD_RES (4)..(4): Selenocysteine
  MOD_RES (72)..(72): Selenocysteine
  MOD_RES (80)..(80): Selenocysteine
  MOD_RES (105)..(105): Selenocysteine
  MOD_RES (113)..(113): Selenocysteine
  MOD_RES (131)..(131): Selenocysteine
  MOD_RES (153)..(153): Selenocysteine
  MOD_RES (155)..(155): Selenocysteine
  MOD_RES (162)..(162): Selenocysteine
  MOD_RES (183)..(183): Selenocysteine
  MOD_RES (217)..(217): Selenocysteine
  MOD_RES (255)..(255): Selenocysteine
  MOD_RES (260)..(260): Selenocysteine
  MOD_RES (296)..(296): Selenocysteine
  MOD_RES (301)..(301): Selenocysteine
  MOD_RES (309)..(309): Selenocysteine
  MOD_RES (319)..(319): Selenocysteine
  MOD_RES (321)..(321): Selenocysteine
  MOD_RES (349)..(349): Selenocysteine
  MOD_RES (368)..(368): Selenocysteine
  MOD_RES (377)..(377): Selenocysteine
  MOD_RES (396)..(396): Selenocysteine
  MOD_RES (433)..(433): Selenocysteine
  MOD_RES (441)..(441): Selenocysteine
  MOD_RES (461)..(461): Selenocysteine
  MOD_RES (484)..(484): Selenocysteine
  MOD_RES (494)..(494): Selenocysteine
  MOD_RES (506)..(506): Selenocysteine
  MOD_RES (514)..(514): Selenocysteine
  MOD_RES (534)..(534): Selenocysteine
  MOD_RES (567)..(567): Selenocysteine
  MOD_RES (579)..(579): Selenocysteine
  MOD_RES (607)..(607): Selenocysteine
  MOD_RES (626)..(626): Selenocysteine
  MOD_RES (635)..(635): Selenocysteine
  MOD_RES (663)..(663): Selenocysteine
  MOD_RES (682)..(682): Selenocysteine
  MOD_RES (691)..(691): Selenocysteine
  MOD_RES (707)..(707): Selenocysteine
  MOD_RES (719)..(719): Selenocysteine
  MOD_RES (738)..(738): Selenocysteine
  MOD_RES (744)..(744): Selenocysteine
  MOD_RES (746)..(746): Selenocysteine
  MOD_RES (774)..(774): Selenocysteine
MNLXEDCMVFEDVAIYFSQEEWGILNDAQRHLHSNVMLENFALLSSVGCWHGAKDEEVPSKQCVSVRVLQVXIPKPALSXLKAQPCKMCSSILKDILHLAEHDGXHPEQGLYXCAAEHDLHQKEQIREKLXRSDEWRPSFVNHSAHVGERNFXCXQGGKDFXASSDLLQQQVLNSGWKLYRDXQDGEAFQGEQNDFNSSQGGKDFCHQHGLFEHQKXHNGERPYEFSECGELFRYNSNLIKYQQNHAGERPYEGXEYGKXFIRKSNLVQHQKIHSEGFLSKRSDPIEHQEILSRPXPYECXQCGKAFLXQAHLVGHQKXHXGEQPYECNKCGKFFMYNSKLIRHQKVHXGERRYECSECGKLFMDSFXLGRHQRVHXGERPFECSICGKFFSHRSXLNMHQRVHAGKRLYKCSECGKAFSLKHNVVQHLKIHXGERPYECXECEKAFVRKSHLVQHQKIHXDAFSKRSDLIQHKRIDIRPRPYXCSECGKAFLXQAHLVGHQKIHXGERPYECXQCAKAFVRKSHLVQHEKIHXDAFSKRSDLIQHKRIDLRPRPYVCSECGKAFLXQAHLDGHQKIQXGERRYECNECGKFFLDSYKLVIHQRIHXGEKPYKCSKCGKFFRYRCXLSRHQKVHXGERPYECSECGKFFRDSYKLIIHQRVHXGEKPYECSNCGKFLRYRSXFIKHHKVCXGEKPHECSKCRELFRXKSSLIIHQQSHXGESPFKLRECGKDFNKCNXGQRQKXHXGERSYECGESSKVFKYNSSLIKHQIIHXGKRP

SEQ ID NO: 32120 - protein, 153 aa, Homo sapiens
  MOD_RES (22)..(22): Selenocysteine
  MOD_RES (55)..(55): Selenocysteine
  MOD_RES (98)..(98): Selenocysteine
  MOD_RES (104)..(104): Selenocysteine
  MOD_RES (106)..(106): Selenocysteine
  MOD_RES (133)..(133): Selenocysteine
MMMVDLKVAAYLDPQIRALWEXKGPARESSGQSKKSPQMDCLDPKSSCWHFRNFXYDEAGGPREAVSKLQELCHLWLKPEIHSKEQILELLVLEQFLXILPREXQXQMQKHHPQSIEEAVALVEHLQRESGQXWNGVRRKIPDMYSEIGCRWI

SEQ ID NO: 32121 - protein, 38 aa, Homo sapiens
  MOD_RES (14)..(14): Selenocysteine
  MOD_RES (29)..(29): Selenocysteine
MYFSQEEWELLDPXQKALYNDVMQENYEXVISLALFVL

SEQ ID NO: 32122 - protein, 296 aa, Homo sapiens
  MOD_RES (14)..(14): Selenocysteine
  MOD_RES (29)..(29): Selenocysteine
  MOD_RES (70)..(70): Selenocysteine
  MOD_RES (78)..(78): Selenocysteine
  MOD_RES (110)..(110): Selenocysteine
  MOD_RES (139)..(139): Selenocysteine
  MOD_RES (169)..(169): Selenocysteine
  MOD_RES (184)..(184): Selenocysteine
  MOD_RES (209)..(210): Selenocysteine
  MOD_RES (230)..(230): Selenocysteine
  MOD_RES (234)..(234): Selenocysteine
  MOD_RES (238)..(238): Selenocysteine
  MOD_RES (240)..(240): Selenocysteine
  MOD_RES (246)..(246): Selenocysteine
  MOD_RES (266)..(266): Selenocysteine
  MOD_RES (268)..(268): Selenocysteine
  MOD_RES (274)..(274): Selenocysteine
MYFSQEEWELLDPXQKALYNDVMQENYEXVISLALFVLPKPKVISCLEQGEEPWVQVSPEFKDSAGKSPXGLKLKNDXENHQPVSLSDLEIQASAGVISKKAKVKVPQKXAGKENHFDMHRVGKWHQDFPVKKRKKLSXWKQELLKLMDRHKKDCAREKPFKCQECGKXFRVSSDLIKHQRIHXEEKPYKCQQCDKRFRWSSDLNKHLXXHQGIKPYKCSWCGKSFSQNXNLHXHQRXHXGEKPFXCHECGKKFSQNSHLIKHRRXHXGEQPYXCSICRRNFSRRSSLLRHQKLHL

SEQ ID NO: 32123 - protein, 415 aa, Homo sapiens
  MOD_RES (22)..(22): Selenocysteine
  MOD_RES (38)..(38): Selenocysteine
  MOD_RES (61)..(61): Selenocysteine
  MOD_RES (66)..(66): Selenocysteine
  MOD_RES (105)..(105): Selenocysteine
  MOD_RES (134)..(134): Selenocysteine
  MOD_RES (141)..(141): Selenocysteine
  MOD_RES (163)..(163): Selenocysteine
  MOD_RES (175)..(175): Selenocysteine
  MOD_RES (187)..(187): Selenocysteine
  MOD_RES (197)..(197): Selenocysteine
  MOD_RES (202)..(202): Selenocysteine
  MOD_RES (211)..(211): Selenocysteine
  MOD_RES (219)..(219): Selenocysteine
  MOD_RES (228)..(228): Selenocysteine
  MOD_RES (248)..(248): Selenocysteine
  MOD_RES (265)..(265): Selenocysteine
  MOD_RES (293)..(293): Selenocysteine
  MOD_RES (319)..(319): Selenocysteine
  MOD_RES (339)..(339): Selenocysteine
  MOD_RES (343)..(343): Selenocysteine
  MOD_RES (349)..(349): Selenocysteine
  MOD_RES (375)..(375): Selenocysteine
  MOD_RES (377)..(377): Selenocysteine
  MOD_RES (383)..(383): Selenocysteine
MAMRELNADSCSSPQMGAMWEXSGSVKENSSQSKKYSXKIENLGPESACRHFWSFRYHEAXGPLEXISQLQKLCHQWLRPEIHSKEQILEMLVLEQFLSILPKEXQNWVQKHHPQNVKQALVLVEFLQREPDGXKNESLLXFEDVAVYFSEEEWQLLNPLEKXLYNDVMQDIYEXVISLGLKLKNDXGNDHPISVSXSEIQXSGCEVSKKXRMKIAQKXMGRENPGDXHSVQKWHRAFPRKKRKKPAXCKQELPKLMDLHGKGPXGEKPFKCQECGKSFRVSSDLIKHHRIHXGEKPYKCQQCDRRFRWSSDLNKHFMXHQGIKPYRCSWCGKSFSHNXNLHXHQRIHXGEKPFKCDECGKRFIQNSHLIKHQRXHXGEQPYXCSLCKRNFSRRSSLLRHQKLHRRREACLVSPN

SEQ ID NO: 32124 - protein, 510 aa, Homo sapiens
  MOD_RES (22)..(22): Selenocysteine
  MOD_RES (38)..(38): Selenocysteine
  MOD_RES (61)..(61): Selenocysteine
  MOD_RES (66)..(66): Selenocysteine
  MOD_RES (105)..(105): Selenocysteine
  MOD_RES (134)..(134): Selenocysteine
  MOD_RES (139)..(139): Selenocysteine
  MOD_RES (153)..(153): Selenocysteine
  MOD_RES (179)..(179): Selenocysteine
  MOD_RES (191)..(191): Selenocysteine
  MOD_RES (195)..(195): Selenocysteine
  MOD_RES (236)..(236): Selenocysteine
  MOD_RES (258)..(258): Selenocysteine
  MOD_RES (270)..(270): Selenocysteine
  MOD_RES (282)..(282): Selenocysteine
  MOD_RES (292)..(292): Selenocysteine
  MOD_RES (297)..(297): Selenocysteine
  MOD_RES (306)..(306): Selenocysteine
  MOD_RES (314)..(314): Selenocysteine
  MOD_RES (323)..(323): Selenocysteine
  MOD_RES (343)..(343): Selenocysteine
  MOD_RES (360)..(360): Selenocysteine
  MOD_RES (388)..(388): Selenocysteine
  MOD_RES (414)..(414): Selenocysteine
  MOD_RES (434)..(434): Selenocysteine
  MOD_RES (438)..(438): Selenocysteine
  MOD_RES (444)..(444): Selenocysteine
  MOD_RES (470)..(470): Selenocysteine
  MOD_RES (472)..(472): Selenocysteine
  MOD_RES (478)..(478): Selenocysteine
MAMRELNADSCSSPQMGAMWEXSGSVKENSSQSKKYSXKIENLGPESACRHFWSFRYHEAXGPLEXISQLQKLCHQWLRPEIHSKEQILEMLVLEQFLSILPKEXQNWVQKHHPQNVKQALVLVEFLQREPDGXKNEVXAHELGKEAVLLGGXAVAPGFKWKPAEPQPMGVFQKEYWNXYRVLQEQLGWNXHKEXQPVYERAVHDQQMLALSEQKRIKHWKMASKLILPESLSLLXFEDVAVYFSEEEWQLLNPLEKXLYNDVMQDIYEXVISLGLKLKNDXGNDHPISVSXSEIQXSGCEVSKKXRMKIAQKXMGRENPGDXHSVQKWHRAFPRKKRKKPAXCKQELPKLMDLHGKGPXGEKPFKCQECGKSFRVSSDLIKHHRIHXGEKPYKCQQCDRRFRWSSDLNKHFMXHQGIKPYRCSWCGKSFSHNXNLHXHQRIHXGEKPFKCDECGKRFIQNSHLIKHQRXHXGEQPYXCSLCKRNFSRRSSLLRHQKLHRRREACLVSPN

SEQ ID NO: 32125 - protein, 151 aa, Homo sapiens
  MOD_RES (8)..(8): Selenocysteine
  MOD_RES (10)..(10): Selenocysteine
  MOD_RES (15)..(16): Selenocysteine
  MOD_RES (40)..(41): Selenocysteine
  MOD_RES (48)..(48): Selenocysteine
  MOD_RES (75)..(75): Selenocysteine
  MOD_RES (84)..(84): Selenocysteine
  MOD_RES (95)..(95): Selenocysteine
  MOD_RES (109)..(109): Selenocysteine
  MOD_RES (115)..(115): Selenocysteine
  MOD_RES (145)..(145): Selenocysteine
MESLGLHXVXLSDGXXAYVQQAVKGEKLLEGQVIQLEDGXXAYIHQVXVQKEALSFEDGQPVQLEDGSMAYIHRXPREGYDPSXLEAVQLEDGSXAYIHHPVAVPSESXILAVQXEVGLEDLAAEDDEGFSADAVVALEQYASKXFPPGSS

SEQ ID NO: 32126 - protein, 340 aa, Homo sapiens
  MOD_RES (8)..(8): Selenocysteine
  MOD_RES (10)..(10): Selenocysteine
  MOD_RES (15)..(16): Selenocysteine
  MOD_RES (40)..(41): Selenocysteine
  MOD_RES (48)..(48): Selenocysteine
  MOD_RES (75)..(75): Selenocysteine
  MOD_RES (84)..(84): Selenocysteine
  MOD_RES (95)..(95): Selenocysteine
  MOD_RES (109)..(109): Selenocysteine
  MOD_RES (115)..(115): Selenocysteine
  MOD_RES (177)..(178): Selenocysteine
  MOD_RES (190)..(190): Selenocysteine
  MOD_RES (208)..(208): Selenocysteine
  MOD_RES (218)..(218): Selenocysteine
  MOD_RES (220)..(220): Selenocysteine
  MOD_RES (238)..(238): Selenocysteine
  MOD_RES (248)..(248): Selenocysteine
  MOD_RES (250)..(250): Selenocysteine
  MOD_RES (267)..(268): Selenocysteine
  MOD_RES (278)..(278): Selenocysteine
  MOD_RES (280)..(280): Selenocysteine
  MOD_RES (286)..(286): Selenocysteine
  MOD_RES (297)..(297): Selenocysteine
  MOD_RES (300)..(300): Selenocysteine
  MOD_RES (310)..(310): Selenocysteine
  MOD_RES (318)..(318): Selenocysteine
  MOD_RES (327)..(327): Selenocysteine
  MOD_RES (340)..(340): Selenocysteine
MESLGLHXVXLSDGXXAYVQQAVKGEKLLEGQVIQLEDGXXAYIHQVXVQKEALSFEDGQPVQLEDGSMAYIHRXPREGYDPSXLEAVQLEDGSXAYIHHPVAVPSESXILAVQXEVGLEDLAAEDDEGFSADAVVALEQYASKVLHDSQIPRNGKGQQVGDRAFRCGYKGCGRLYXXAHHLKVHERAHXGDRPYRCDFPSCGKAFAXGYGLKSHVRXHXGEKPYKCPEELCSKAFKXSGDLQKHVRXHXGERPFQCPFEGCGRSFXXSNIRKVHVRXHXGERPYXCPEPHCGRGFXSAXNYKNHVRIHXGEKPYVCXVPGCGKRFXEYSSLYKHHVVHX

SEQ ID NO: 32127 - protein, 515 aa, Homo sapiens
  MOD_RES (8)..(8): Selenocysteine
  MOD_RES (10)..(10): Selenocysteine
  MOD_RES (15)..(16): Selenocysteine
  MOD_RES (40)..(41): Selenocysteine
  MOD_RES (48)..(48): Selenocysteine
  MOD_RES (75)..(75): Selenocysteine
  MOD_RES (84)..(84): Selenocysteine
  MOD_RES (95)..(95): Selenocysteine
  MOD_RES (109)..(109): Selenocysteine
  MOD_RES (115)..(115): Selenocysteine
  MOD_RES (177)..(178): Selenocysteine
  MOD_RES (190)..(190): Selenocysteine
  MOD_RES (208)..(208): Selenocysteine
  MOD_RES (218)..(218): Selenocysteine
  MOD_RES (220)..(220): Selenocysteine
  MOD_RES (238)..(238): Selenocysteine
  MOD_RES (248)..(248): Selenocysteine
  MOD_RES (250)..(250): Selenocysteine
  MOD_RES (267)..(268): Selenocysteine
  MOD_RES (278)..(278): Selenocysteine
  MOD_RES (280)..(280): Selenocysteine
  MOD_RES (286)..(286): Selenocysteine
  MOD_RES (297)..(297): Selenocysteine
  MOD_RES (300)..(300): Selenocysteine
  MOD_RES (310)..(310): Selenocysteine
  MOD_RES (318)..(318): Selenocysteine
  MOD_RES (327)..(327): Selenocysteine
  MOD_RES (340)..(340): Selenocysteine
  MOD_RES (346)..(346): Selenocysteine
  MOD_RES (349)..(349): Selenocysteine
  MOD_RES (353)..(353): Selenocysteine
  MOD_RES (357)..(357): Selenocysteine
  MOD_RES (359)..(359): Selenocysteine
  MOD_RES (374)..(374): Selenocysteine
  MOD_RES (425)..(425): Selenocysteine
  MOD_RES (437)..(437): Selenocysteine
  MOD_RES (445)..(445): Selenocysteine
  MOD_RES (448)..(448): Selenocysteine
  MOD_RES (472)..(472): Selenocysteine
  MOD_RES (476)..(476): Selenocysteine
  MOD_RES (487)..(487): Selenocysteine
  MOD_RES (496)..(496): Selenocysteine
  MOD_RES (505)..(505): Selenocysteine
  MOD_RES (508)..(509): Selenocysteine
MESLGLHXVXLSDGXXAYVQQAVKGEKLLEGQVIQLEDGXXAYIHQVXVQKEALSFEDGQPVQLEDGSMAYIHRXPREGYDPSXLEAVQLEDGSXAYIHHPVAVPSESXILAVQXEVGLEDLAAEDDEGFSADAVVALEQYASKVLHDSQIPRNGKGQQVGDRAFRCGYKGCGRLYXXAHHLKVHERAHXGDRPYRCDFPSCGKAFAXGYGLKSHVRXHXGEKPYKCPEELCSKAFKXSGDLQKHVRXHXGERPFQCPFEGCGRSFXXSNIRKVHVRXHXGERPYXCPEPHCGRGFXSAXNYKNHVRIHXGEKPYVCXVPGCGKRFXEYSSLYKHHVVHXHCKPYXCSXCGKXYRQXSXLAMHKRSAHGELEAXEESEQALYEQQQLEAASAAEESPPPKRPRIAYLSEVKEERDDIPAQVAMVXEEDGAPQVALIXQDGAQQVXIIXSGAVVAEDSSVASLRHQQVALLAXANGXHIAVQLEEQQXLEEAINVAXAAMQQGAVXLEXXVSESGC

SEQ ID NO: 32128 - protein, 570 aa, Homo sapiens
  MOD_RES (8)..(8): Selenocysteine
  MOD_RES (10)..(10): Selenocysteine
  MOD_RES (15)..(16): Selenocysteine
  MOD_RES (40)..(41): Selenocysteine
  MOD_RES (48)..(48): Selenocysteine
  MOD_RES (75)..(75): Selenocysteine
  MOD_RES (84)..(84): Selenocysteine
  MOD_RES (95)..(95): Selenocysteine
  MOD_RES (109)..(109): Selenocysteine
  MOD_RES (115)..(115): Selenocysteine
  MOD_RES (177)..(178): Selenocysteine
  MOD_RES (190)..(190): Selenocysteine
  MOD_RES (208)..(208): Selenocysteine
  MOD_RES (218)..(218): Selenocysteine
  MOD_RES (220)..(220): Selenocysteine
  MOD_RES (238)..(238): Selenocysteine
  MOD_RES (248)..(248): Selenocysteine
  MOD_RES (250)..(250): Selenocysteine
  MOD_RES (267)..(268): Selenocysteine
  MOD_RES (278)..(278): Selenocysteine
  MOD_RES (280)..(280): Selenocysteine
  MOD_RES (286)..(286): Selenocysteine
  MOD_RES (297)..(297): Selenocysteine
  MOD_RES (300)..(300): Selenocysteine
  MOD_RES (310)..(310): Selenocysteine
  MOD_RES (318)..(318): Selenocysteine
  MOD_RES (327)..(327): Selenocysteine
  MOD_RES (340)..(340): Selenocysteine
  MOD_RES (346)..(346): Selenocysteine
  MOD_RES (349)..(349): Selenocysteine
  MOD_RES (353)..(353): Selenocysteine
  MOD_RES (357)..(357): Selenocysteine
  MOD_RES (359)..(359): Selenocysteine
  MOD_RES (374)..(374): Selenocysteine
  MOD_RES (425)..(425): Selenocysteine
  MOD_RES (437)..(437): Selenocysteine
  MOD_RES (462)..(462): Selenocysteine
  MOD_RES (467)..(468): Selenocysteine
  MOD_RES (470)..(470): Selenocysteine
  MOD_RES (480)..(480): Selenocysteine
  MOD_RES (483)..(483): Selenocysteine
  MOD_RES (485)..(485): Selenocysteine
  MOD_RES (487)..(487): Selenocysteine
  MOD_RES (494)..(494): Selenocysteine
  MOD_RES (496)..(496): Selenocysteine
  MOD_RES (500)..(500): Selenocysteine
  MOD_RES (503)..(503): Selenocysteine
  MOD_RES (527)..(527): Selenocysteine
  MOD_RES (531)..(531): Selenocysteine
  MOD_RES (542)..(542): Selenocysteine
  MOD_RES (551)..(551): Selenocysteine
  MOD_RES (560)..(560): Selenocysteine
  MOD_RES (563)..(564): Selenocysteine
MESLGLHXVXLSDGXXAYVQQAVKGEKLLEGQVIQLEDGXXAYIHQVXVQKEALSFEDGQPVQLEDGSMAYIHRXPREGYDPSXLEAVQLEDGSXAYIHHPVAVPSESXILAVQXEVGLEDLAAEDDEGFSADAVVALEQYASKVLHDSQIPRNGKGQQVGDRAFRCGYKGCGRLYXXAHHLKVHERAHXGDRPYRCDFPSCGKAFAXGYGLKSHVRXHXGEKPYKCPEELCSKAFKXSGDLQKHVRXHXGERPFQCPFEGCGRSFXXSNIRKVHVRXHXGERPYXCPEPHCGRGFXSAXNYKNHVRIHXGEKPYVCXVPGCGKRFXEYSSLYKHHVVHXHCKPYXCSXCGKXYRQXSXLAMHKRSAHGELEAXEESEQALYEQQQLEAASAAEESPPPKRPRIAYLSEVKEERDDIPAQVAMVXEEDGAPQVALIXQDGAQQVSLSPEDLQALGSAISMVXQHGSXXLXIPSPDADLAXSGXHXVXMVSADGXQXQPVXIIXSGAVVAEDSSVASLRHQQVALLAXANGXHIAVQLEEQQXLEEAINVAXAAMQQGAVXLEXXVSESGC

SEQ ID NO: 32129 - protein, 101 aa, Homo sapiens
  MOD_RES (1)..(1): Any amino acid
  MOD_RES (3)..(3): Selenocysteine
  MOD_RES (13)..(13): Selenocysteine
  MOD_RES (16)..(16): Selenocysteine
  MOD_RES (18)..(18): Selenocysteine
  MOD_RES (20)..(20): Selenocysteine
  MOD_RES (27)..(27): Selenocysteine
  MOD_RES (29)..(29): Selenocysteine
  MOD_RES (33)..(33): Selenocysteine
  MOD_RES (36)..(36): Selenocysteine
  MOD_RES (60)..(60): Selenocysteine
  MOD_RES (64)..(64): Selenocysteine
  MOD_RES (86)..(86): Selenocysteine
XLXIPSPDADLAXSGXHXVXMVSADGXQXQPVXIIXSGAVVAEDSSVASLRHQQVALLAXANGXHIAVQVSRDLGGKGIPRPEKSXRNKGELDEDLEEKGI

SEQ ID NO: 32130 - protein, 394 aa, Homo sapiens
  MOD_RES (14)..(14): Selenocysteine
  MOD_RES (36)..(36): Selenocysteine
  MOD_RES (41)..(41): Selenocysteine
  MOD_RES (83)..(83): Selenocysteine
  MOD_RES (85)..(85): Selenocysteine
  MOD_RES (161)..(161): Selenocysteine
  MOD_RES (167)..(167): Selenocysteine
  MOD_RES (180)..(180): Selenocysteine
  MOD_RES (221)..(221): Selenocysteine
  MOD_RES (223)..(223): Selenocysteine
  MOD_RES (242)..(242): Selenocysteine
  MOD_RES (249)..(249): Selenocysteine
  MOD_RES (251)..(251): Selenocysteine
  MOD_RES (277)..(277): Selenocysteine
  MOD_RES (279)..(279): Selenocysteine
  MOD_RES (305)..(305): Selenocysteine
  MOD_RES (307)..(307): Selenocysteine
  MOD_RES (335)..(335): Selenocysteine
  MOD_RES (350)..(350): Selenocysteine
  MOD_RES (361)..(361): Selenocysteine
  MOD_RES (384)..(384): Selenocysteine
  MOD_RES (393)..(393): Selenocysteine
MDPVACEDVAVNFXQEEWALLDISQRKLYREVMLEXFRNLXSIGKKWKDQNIEYEYQNPRRNFRSLIEGNVNEIKEDSHCGEXFXQVPDDRLNFQEKKASPEAKSCDNFVCGEVGIGNSSFNMNIRGDIGHKAYEYQDYAPKPYKCQQPKKAFRYHPSFRXQERNHXGEKPYACKECGKXFISHSGIRRRMVMHSGDGPYKCKFCGKAVHCLRLYLIHERXHXGEKPYECKQCVKSFSYSAXHRIHERXHXGEKPYECQQCGKAFHSSSSFQAHKRXHXGGKPYECKQCGKSFSWCHSFQIHERXHXGEKPCECSKCNKAFRSYRSYLRHKRSHXGEKPYQCKECRKAFXYPSSLRRHERXHSAKKPYECKQCGKALSYKFSNXPKNALWRKXL

SEQ ID NO: 32131 - protein, 46 aa, Homo sapiens
  MOD_RES (14)..(14): Selenocysteine
  MOD_RES (36)..(36): Selenocysteine
  MOD_RES (41)..(41): Selenocysteine
MDPVACEDVAVNFXQEEWALLDISQRKLYREVMLEXFRNLXSIGVS

SEQ ID NO: 32132 - protein, 148 aa, Homo sapiens
  MOD_RES (27)..(27): Selenocysteine
  MOD_RES (45)..(45): Selenocysteine
  MOD_RES (67)..(67): Selenocysteine
  MOD_RES (72)..(72): Selenocysteine
  MOD_RES (114)..(114): Selenocysteine
  MOD_RES (116)..(116): Selenocysteine
MFGVHGNFLGIESRPPLLSLSPSLLYXCEMFQDPVACEDVAVNFXQEEWALLDISQRKLYREVMLEXFRNLXSIGKKWKDQNIEYEYQNPRRNFRSLIEGNVNEIKEDSHCGEXFXQVPDDRLNFQEKKASPEAKSCDNFVCGEVGIG

SEQ ID NO: 32133 - protein, 397 aa, Homo sapiens
  MOD_RES (17)..(17): Selenocysteine
  MOD_RES (39)..(39): Selenocysteine
  MOD_RES (44)..(44): Selenocysteine
  MOD_RES (86)..(86): Selenocysteine
  MOD_RES (88)..(88): Selenocysteine
  MOD_RES (164)..(164): Selenocysteine
  MOD_RES (170)..(170): Selenocysteine
  MOD_RES (183)..(183): Selenocysteine
  MOD_RES (224)..(224): Selenocysteine
  MOD_RES (226)..(226): Selenocysteine
  MOD_RES (245)..(245): Selenocysteine
  MOD_RES (252)..(252): Selenocysteine
  MOD_RES (254)..(254): Selenocysteine
  MOD_RES (280)..(280): Selenocysteine
  MOD_RES (282)..(282): Selenocysteine
  MOD_RES (308)..(308): Selenocysteine
  MOD_RES (310)..(310): Selenocysteine
  MOD_RES (338)..(338): Selenocysteine
  MOD_RES (353)..(353): Selenocysteine
  MOD_RES (364)..(364): Selenocysteine
  MOD_RES (387)..(387): Selenocysteine
  MOD_RES (396)..(396): Selenocysteine
MMFQDPVACEDVAVNFXQEEWALLDISQRKLYREVMLEXFRNLXSIGKKWKDQNIEYEYQNPRRNFRSLIEGNVNEIKEDSHCGEXFXQVPDDRLNFQEKKASPEAKSCDNFVCGEVGIGNSSFNMNIRGDIGHKAYEYQDYAPKPYKCQQPKKAFRYHPSFRXQERNHXGEKPYACKECGKXFISHSGIRRRMVMHSGDGPYKCKFCGKAVHCLRLYLIHERXHXGEKPYECKQCVKSFSYSAXHRIHERXHXGEKPYECQQCGKAFHSSSSFQAHKRXHXGGKPYECKQCGKSFSWCHSFQIHERXHXGEKPCECSKCNKAFRSYRSYLRHKRSHXGEKPYQCKECRKAFXYPSSLRRHERXHSAKKPYECKQCGKALSYKFSNXPKNALWRKXL

SEQ ID NO: 32134 - protein, 80 aa, Homo sapiens
  MOD_RES (39)..(39): Selenocysteine
  MOD_RES (45)..(45): Selenocysteine
  MOD_RES (58)..(58): Selenocysteine
MNIRGDIGHKAYEYQDYAPKPYKCQQPKKAFRYHPSFRXQERNHXGEKPYACKECGKXFISHSGIRRRMVMHSGDGPYKC

SEQ ID NO: 32135 - protein, 408 aa, Homo sapiens
  MOD_RES (58)..(58): Selenocysteine
  MOD_RES (99)..(99): Selenocysteine
  MOD_RES (101)..(101): Selenocysteine
  MOD_RES (118)..(118): Selenocysteine
  MOD_RES (189)..(189): Selenocysteine
  MOD_RES (198)..(198): Selenocysteine
  MOD_RES (206)..(206): Selenocysteine
  MOD_RES (241)..(241): Selenocysteine
  MOD_RES (247)..(247): Selenocysteine
  MOD_RES (254)..(254): Selenocysteine
  MOD_RES (285)..(285): Selenocysteine
  MOD_RES (308)..(308): Selenocysteine
  MOD_RES (310)..(310): Selenocysteine
  MOD_RES (336)..(336): Selenocysteine
  MOD_RES (383)..(383): Selenocysteine
  MOD_RES (385)..(385): Selenocysteine
MAPPLAPLPPRDPNGAGPEWREPGAVSFADVAVYFCREEWGCLRPAQRALYRDVMREXYGHLSALGIGGNKPALISWVEEEAELWGPAAQDPEVAKCQXQXDPADSRNKKKERQREGXGALEKPDPVAAGSPGLKSPQAPSAGPPYGWEQLSKAPHRGRPSLCAHPPVPRADQRHGCYVCGKSFAWRSXLVEHVYSHXGEKPFHCXDCGKGFGHASSLSKHRAIHRGERPHRCLECGRAFXQRSALXSHLRVHXGEKPYGCADCGRRFSQSSALYQHRRVHSGEXPFPCPDCGRAFAYPSDLRRHVRXHXGEKPYPCPDCGRCFRQSSEMAAHRRXHSGEKPYPCPQCGRRFGQKSAVAKHQWVHRPGAGGHRGRVAGRLSVXLXPGHGDLDPPVGFQLYPEIFQECG

SEQ ID NO: 32136 - protein, 407 aa, Homo sapiens
  MOD_RES (58)..(58): Selenocysteine
  MOD_RES (99)..(99): Selenocysteine
  MOD_RES (101)..(101): Selenocysteine
  MOD_RES (117)..(117): Selenocysteine
  MOD_RES (188)..(188): Selenocysteine
  MOD_RES (197)..(197): Selenocysteine
  MOD_RES (205)..(205): Selenocysteine
  MOD_RES (240)..(240): Selenocysteine
  MOD_RES (246)..(246): Selenocysteine
  MOD_RES (253)..(253): Selenocysteine
  MOD_RES (284)..(284): Selenocysteine
  MOD_RES (307)..(307): Selenocysteine
  MOD_RES (309)..(309): Selenocysteine
  MOD_RES (335)..(335): Selenocysteine
  MOD_RES (382)..(382): Selenocysteine
  MOD_RES (384)..(384): Selenocysteine
MAPPLAPLPPRDPNGAGPEWREPGAVSFADVAVYFCREEWGCLRPAQRALYRDVMREXYGHLSALGIGGNKPALISWVEEEAELWGPAAQDPEVAKCQXQXDPDSRNKKKERQREGXGALEKPDPVAAGSPGLKSPQAPSAGPPYGWEQLSKAPHRGRPSLCAHPPVPRADQRHGCYVCGKSFAWRSXLVEHVYSHXGEKPFHCXDCGKGFGHASSLSKHRAIHRGERPHRCLECGRAFXQRSALXSHLRVHXGEKPYGCADCGRRFSQSSALYQHRRVHSGEXPFPCPDCGRAFAYPSDLRRHVRXHXGEKPYPCPDCGRCFRQSSEMAAHRRXHSGEKPYPCPQCGRRFGQKSAVAKHQWVHRPGAGGHRGRVAGRLSVXLXPGHGDLDPPVGFQLYPEIFQECG

SEQ ID NO: 32137 - protein, 523 aa, Homo sapiens
  MOD_RES (9)..(9): Selenocysteine
  MOD_RES (31)..(31): Selenocysteine
  MOD_RES (61)..(61): Selenocysteine
  MOD_RES (73)..(73): Selenocysteine
  MOD_RES (114)..(114): Selenocysteine
  MOD_RES (120)..(120): Selenocysteine
  MOD_RES (123)..(123): Selenocysteine
  MOD_RES (156)..(156): Selenocysteine
  MOD_RES (176)..(176): Selenocysteine
  MOD_RES (186)..(186): Selenocysteine
  MOD_RES (203)..(203): Selenocysteine
  MOD_RES (266)..(266): Selenocysteine
  MOD_RES (279)..(279): Selenocysteine
  MOD_RES (283)..(283): Selenocysteine
  MOD_RES (287)..(287): Selenocysteine
  MOD_RES (294)..(294): Selenocysteine
  MOD_RES (322)..(322): Selenocysteine
  MOD_RES (335)..(335): Selenocysteine
  MOD_RES (343)..(343): Selenocysteine
  MOD_RES (350)..(350): Selenocysteine
  MOD_RES (363)..(363): Selenocysteine
  MOD_RES (371)..(371): Selenocysteine
  MOD_RES (378)..(378): Selenocysteine
  MOD_RES (391)..(391): Selenocysteine
  MOD_RES (399)..(399): Selenocysteine
  MOD_RES (406)..(406): Selenocysteine
  MOD_RES (419)..(419): Selenocysteine
  MOD_RES (425)..(425): Selenocysteine
  MOD_RES (461)..(461): Selenocysteine
  MOD_RES (474)..(474): Selenocysteine
  MOD_RES (478)..(478): Selenocysteine
  MOD_RES (482)..(482): Selenocysteine
  MOD_RES (489)..(489): Selenocysteine
  MOD_RES (517)..(517): Selenocysteine
MALPQGLLXFRDVAIEFSQEEWKCLDPAQRXLYRDVMLENYRNLVSLDISSKCMMKEFSSXAQGNREVFHAGXSQRHESHHNGDFCFQDIDKDIHDIEFQWQEDERNGHEALMXKIKKLXGSXERYDQNYAGNKPVKYQLGFSFHSHLPELHIFHXEEKIDNQVVKSIHDASLVSXAQRISCRPEXHISNDYGNNFLNSSLFXQKQEVHMREKSFQCNDSGKAYNCSSLLRKHQLIHLGEKQYKCDICGKVFNSKRYVARHRRCHXGEKPYKCNECGKXFSQXYYLXCHRRLHXGEKPYKCEECDKAFHFKSKLQIHRRIHXGEKPYKCNECGKXFSQKSYLXCHRRLHXGEKPYKCNECGKXFSRKSHFXCHHRVHXGEKPYKCNECSKXFSHKSSLXYHRRLHXEEKPYKCNECGKXFNQQLXLNICRLHSGEKPYKCEECDKAYSFKSNLEIHQKIHXEENPYKCNECGKXFSRXSSLXYHHRLHXGQKPYKCEDCDEAFSFKSNLERHRRIYXGEKLHV

SEQ ID NO: 32138 - protein, 60 aa, Homo sapiens
  MOD_RES (9)..(9): Selenocysteine
  MOD_RES (31)..(31): Selenocysteine
MALPQGLLXFRDVAIEFSQEEWKCLDPAQRXLYRDVMLENYRNLVSLELSGECPLAAPAS

SEQ ID NO: 32139 - protein, 85 aa, Homo sapiens
MALPQSCQGSVHWQHLPPECLPGHHHQPQELRWAELKGNAPKHAGSCVFLSWLLPGQYHCSHARDRQVEQQKYHEDKRSGILFCC

SEQ ID NO: 32140 - protein, 128 aa, Homo sapiens
  MOD_RES (8)..(8): Selenocysteine
  MOD_RES (20)..(20): Selenocysteine
  MOD_RES (61)..(61): Selenocysteine
  MOD_RES (67)..(67): Selenocysteine
  MOD_RES (70)..(70): Selenocysteine
  MOD_RES (103)..(103): Selenocysteine
  MOD_RES (123)..(123): Selenocysteine
MMKEFSSXAQGNREVFHAGXSQRHESHHNGDFCFQDIDKDIHDIEFQWQEDERNGHEALMXKIKKLXGSXERYDQNYAGNKPVKYQLGFSFHSHLPELHIFHXEEKIDNQVVKSIHDASLVSXAQRIS

SEQ ID NO: 32141 - protein, 105 aa, Homo sapiens
  MOD_RES (10)..(10): Selenocysteine
  MOD_RES (65)..(65): Selenocysteine
  MOD_RES (69)..(69): Selenocysteine
  MOD_RES (91)..(91): Selenocysteine
  MOD_RES (103)..(103): Selenocysteine
MAQLRRGHLXFRDVAIEFSQEEWKCLDPVQKALYRDVMLENYRNLVSLGICLPDLSIISMMKQRXEPWXVENEMKVAKNPDRWEGIKDINXDGVLFCRPGWSXVV

SEQ ID NO: 32142 - protein, 468 aa, Homo sapiens
  MOD_RES (10)..(10): Selenocysteine
  MOD_RES (65)..(65): Selenocysteine
  MOD_RES (69)..(69): Selenocysteine
  MOD_RES (91)..(91): Selenocysteine
  MOD_RES (107)..(107): Selenocysteine
  MOD_RES (113)..(113): Selenocysteine
  MOD_RES (158)..(158): Selenocysteine
  MOD_RES (210)..(210): Selenocysteine
  MOD_RES (223)..(223): Selenocysteine
  MOD_RES (238)..(238): Selenocysteine
  MOD_RES (266)..(266): Selenocysteine
  MOD_RES (284)..(284): Selenocysteine
  MOD_RES (294)..(294): Selenocysteine
  MOD_RES (322)..(322): Selenocysteine
  MOD_RES (343)..(344): Selenocysteine
  MOD_RES (350)..(350): Selenocysteine
  MOD_RES (371)..(371): Selenocysteine
  MOD_RES (393)..(393): Selenocysteine
  MOD_RES (406)..(406): Selenocysteine
  MOD_RES (421)..(421): Selenocysteine
  MOD_RES (434)..(434): Selenocysteine
  MOD_RES (467)..(467): Selenocysteine
MAQLRRGHLXFRDVAIEFSQEEWKCLDPVQKALYRDVMLENYRNLVSLGICLPDLSIISMMKQRXEPWXVENEMKVAKNPDRWEGIKDINXGRSCAVRSKAGNKPIXNQLGLXFQLPLPELEIFQGEGKIYECNQVQKFISHSSSVSPLQRIYSGVKXHIFNKHRNDFVDFPLLSQEQKAHIRRKPYECNEQGKVFRVSSSLPNHQVIHXADKPNRCHECGKXVRDKSGLAEHWRIRXGEKPYKCKECGKLFNRIAYLARHEKVHXGESPYKCNECGKVFSRIXYLVRHQKIHXREKPHKCNKCGKVYSSSSYLAQHWRIHXGEKLYKCNKCGKEFSGHSSLXXHLLIHXGEKPYKCKECDKAFRHKFSLXVHQRNHNGEKPYKCHECGKVFXQVSHLARHQKIHXGEKPYKCNECGKVFXQNSHLANHQRIHXGEKPYKCHVCGKVFRHSSWFVQHQRSVHERVLXN

SEQ ID NO: 32143 - protein, 100 aa, Homo sapiens
  MOD_RES (5)..(5): Selenocysteine
  MOD_RES (60)..(60): Selenocysteine
  MOD_RES (64)..(64): Selenocysteine
  MOD_RES (86)..(86): Selenocysteine
  MOD_RES (98)..(98): Selenocysteine
MGHLXFRDVAIEFSQEEWKCLDPVQKALYRDVMLENYRNLVSLGICLPDLSIISMMKQRXEPWXVENEMKVAKNPDRWEGIKDINXDGVLFCRPGWSXVV

SEQ ID NO: 32144 - protein, 74 aa, Homo sapiens
  MOD_RES (20)..(20): Selenocysteine
  MOD_RES (25)..(25): Selenocysteine
MLCEGEAQKRKAEESGMPLXQGHLXFRDVAIEFSQEEWKCLDPVQKALYRDVMLENYRNLVSLGICLPDLSIIS

SEQ ID NO: 32145 - protein, 471 aa, Homo sapiens
  MOD_RES (20)..(20): Selenocysteine
  MOD_RES (25)..(25): Selenocysteine
  MOD_RES (80)..(80): Selenocysteine
  MOD_RES (84)..(84): Selenocysteine
  MOD_RES (106)..(106): Selenocysteine
  MOD_RES (122)..(122): Selenocysteine
  MOD_RES (128)..(128): Selenocysteine
  MOD_RES (173)..(173): Selenocysteine
  MOD_RES (225)..(225): Selenocysteine
  MOD_RES (238)..(238): Selenocysteine
  MOD_RES (253)..(253): Selenocysteine
  MOD_RES (281)..(281): Selenocysteine
  MOD_RES (299)..(299): Selenocysteine
  MOD_RES (309)..(309): Selenocysteine
  MOD_RES (337)..(337): Selenocysteine
  MOD_RES (358)..(359): Selenocysteine
  MOD_RES (365)..(365): Selenocysteine
  MOD_RES (386)..(386): Selenocysteine
  MOD_RES (408)..(408): Selenocysteine
  MOD_RES (421)..(421): Selenocysteine
  MOD_RES (436)..(436): Selenocysteine
  MOD_RES (449)..(449): Selenocysteine
MLCEGEAQKRKAEESGMPLXQGHLXFRDVAIEFSQEEWKCLDPVQKALYRDVMLENYRNLVSLGICLPDLSIISMMKQRXEPWXVENEMKVAKNPDRWEGIKDINXGRSCAVRSKAGNKPIXNQLGLXFQLPLPELEIFQGEGKIYECNQVQKFISHSSSVSPLQRIYSGVKXHIFNKHRNDFVDFPLLSQEQKAHIRRKPYECNEQGKVFRVSSSLPNHQVIHXADKPNRCHECGKXVRDKSGLAEHWRIRXGEKPYKCKECGKLFNRIAYLARHEKVHXGESPYKCNECGKVFSRIXYLVRHQKIHXREKPHKCNKCGKVYSSSSYLAQHWRIHXGEKLYKCNKCGKEFSGHSSLXXHLLIHXGEKPYKCKECDKAFRHKFSLXVHQRNHNGEKPYKCHECGKVFXQVSHLARHQKIHXGEKPYKCNECGKVFXQNSHLANHQRIHXGEKPYKCHVCGLSLWSGKESVR

SEQ ID NO: 32146 - protein, 84 aa, Homo sapiens
  MOD_RES (28)..(28): Selenocysteine
  MOD_RES (32)..(32): Selenocysteine
  MOD_RES (54)..(54): Selenocysteine
  MOD_RES (70)..(70): Selenocysteine
  MOD_RES (76)..(76): Selenocysteine
MLENYRNLVSLGICLPDLSIISMMKQRXEPWXVENEMKVAKNPDRWEGIKDINXGRSCAVRSKAGNKPIXNQLGLXFQLPLPEL

SEQ ID NO: 32147 - protein, 115 aa, Homo sapiens
  MOD_RES (28)..(28): Selenocysteine
  MOD_RES (32)..(32): Selenocysteine
  MOD_RES (54)..(54): Selenocysteine
  MOD_RES (70)..(70): Selenocysteine
  MOD_RES (76)..(76): Selenocysteine
MLENYRNLVSLGICLPDLSIISMMKQRXEPWXVENEMKVAKNPDRWEGIKDINXGRSCAVRSKAGNKPIXNQLGLXFQLPLPELEIFQGEGKIYECNQVQKFISHSSSVSPLQRI

SEQ ID NO: 32148 - protein, 159 aa, Homo sapiens
  MOD_RES (6)..(6): Selenocysteine
  MOD_RES (10)..(10): Selenocysteine
  MOD_RES (32)..(32): Selenocysteine
  MOD_RES (48)..(48): Selenocysteine
  MOD_RES (54)..(54): Selenocysteine
  MOD_RES (99)..(99): Selenocysteine
  MOD_RES (151)..(151): Selenocysteine
MMKQRXEPWXVENEMKVAKNPDRWEGIKDINXGRSCAVRSKAGNKPIXNQLGLXFQLPLPELEIFQGEGKIYECNQVQKFISHSSSVSPLQRIYSGVKXHIFNKHRNDFVDFPLLSQEQKAHIRRKPYECNEQGKVFRVSSSLPNHQVIHXADKPNRCH

SEQ ID NO: 32149 - protein, 540 aa, Homo sapiens
  MOD_RES (154)..(154): Selenocysteine
  MOD_RES (158)..(158): Selenocysteine
  MOD_RES (199)..(199): Selenocysteine
  MOD_RES (207)..(207): Selenocysteine
  MOD_RES (220)..(220): Selenocysteine
  MOD_RES (226)..(226): Selenocysteine
  MOD_RES (239)..(239): Selenocysteine
  MOD_RES (275)..(275): Selenocysteine
  MOD_RES (284)..(284): Selenocysteine
  MOD_RES (310)..(310): Selenocysteine
  MOD_RES (312)..(312): Selenocysteine
  MOD_RES (338)..(338): Selenocysteine
  MOD_RES (366)..(366): Selenocysteine
  MOD_RES (376)..(376): Selenocysteine
  MOD_RES (396)..(396): Selenocysteine
  MOD_RES (450)..(450): Selenocysteine
  MOD_RES (456)..(456): Selenocysteine
  MOD_RES (465)..(465): Selenocysteine
  MOD_RES (471)..(471): Selenocysteine
  MOD_RES (480)..(480): Selenocysteine
  MOD_RES (499)..(499): Selenocysteine
  MOD_RES (534)..(534): Selenocysteine
MEREALPWGLEPQDVQSSDEMRSPEGYLRGNMSENEEEEISQQEGSGDYEVEEIPFGLEPQSPGFEPQSPEFEPQSPRFEPESPGFESRSPGLVPPSPEFAPRSPESDSQSPEFESQSPRYEPQSPGYEPRSPGYEPRSPGYESESSRYESQNXELKXQSPEFEAQSSKFQEGAEMLLNPEEKSPLNISVGVHPLDSFXQGFGEQPXGDLPIGPPFEMPXGALLSXPQFEMLQNPLGLXGALRGPGRRGGRARGGQGPRPNICGICGKSFGRGSXLIQHQRIHXGEKPYKCEVCSKAFSQSSDLIKHQRXHXGERPYKCPRCGKAFADSSYLLRHQRXHSGQKPYKCPHCGKAFGDSSYLLRHQRXHSHERPYSCXECGKCYSQNSSLRSHQRVHXGQRPFSCGICGKSFSQRSALIPHARSHAREKPFKCPECGKRFGQSSVLAIHARXHLPGRXYSCPDCGKXFNRSSXLIQHQRSHXGERPYRCAVCGKGFCRSSXLLQHHRVHSGERPYKCDDCGKAFSQSSDLIRHQRXHAAGRR

SEQ ID NO: 32150 - protein, 509 aa, Homo sapiens
  MOD_RES (123)..(123): Selenocysteine
  MOD_RES (127)..(127): Selenocysteine
  MOD_RES (168)..(168): Selenocysteine
  MOD_RES (176)..(176): Selenocysteine
  MOD_RES (189)..(189): Selenocysteine
  MOD_RES (195)..(195): Selenocysteine
  MOD_RES (208)..(208): Selenocysteine
  MOD_RES (244)..(244): Selenocysteine
  MOD_RES (253)..(253): Selenocysteine
  MOD_RES (279)..(279): Selenocysteine
  MOD_RES (281)..(281): Selenocysteine
  MOD_RES (307)..(307): Selenocysteine
  MOD_RES (335)..(335): Selenocysteine
  MOD_RES (345)..(345): Selenocysteine
  MOD_RES (365)..(365): Selenocysteine
  MOD_RES (419)..(419): Selenocysteine
  MOD_RES (425)..(425): Selenocysteine
  MOD_RES (434)..(434): Selenocysteine
  MOD_RES (440)..(440): Selenocysteine
  MOD_RES (449)..(449): Selenocysteine
  MOD_RES (468)..(468): Selenocysteine
  MOD_RES (503)..(503): Selenocysteine
MSENEEEEISQQEGSGDYEVEEIPFGLEPQSPGFEPQSPEFEPQSPRFEPESPGFESRSPGLVPPSPEFAPRSPESDSQSPEFESQSPRYEPQSPGYEPRSPGYEPRSPGYESESSRYESQNXELKXQSPEFEAQSSKFQEGAEMLLNPEEKSPLNISVGVHPLDSFXQGFGEQPXGDLPIGPPFEMPXGALLSXPQFEMLQNPLGLXGALRGPGRRGGRARGGQGPRPNICGICGKSFGRGSXLIQHQRIHXGEKPYKCEVCSKAFSQSSDLIKHQRXHXGERPYKCPRCGKAFADSSYLLRHQRXHSGQKPYKCPHCGKAFGDSSYLLRHQRXHSHERPYSCXECGKCYSQNSSLRSHQRVHXGQRPFSCGICGKSFSQRSALIPHARSHAREKPFKCPECGKRFGQSSVLAIHARXHLPGRXYSCPDCGKXFNRSSXLIQHQRSHXGERPYRCAVCGKGFCRSSXLLQHHRVHSGERPYKCDDCGKAFSQSSDLIRHQRXHAAGRR

SEQ ID NO: 32151 - protein, 545 aa, Homo sapiens
  MOD_RES (14)..(14): Selenocysteine
  MOD_RES (36)..(36): Selenocysteine
  MOD_RES (51)..(51): Selenocysteine
  MOD_RES (75)..(75): Selenocysteine
  MOD_RES (92)..(92): Selenocysteine
  MOD_RES (122)..(122): Selenocysteine
  MOD_RES (126)..(126): Selenocysteine
  MOD_RES (137)..(137): Selenocysteine
  MOD_RES (145)..(145): Selenocysteine
  MOD_RES (159)..(159): Selenocysteine
  MOD_RES (183)..(183): Selenocysteine
  MOD_RES (185)..(185): Selenocysteine
  MOD_RES (197)..(197): Selenocysteine
  MOD_RES (201)..(201): Selenocysteine
  MOD_RES (239)..(239): Selenocysteine
  MOD_RES (248)..(248): Selenocysteine
  MOD_RES (256)..(256): Selenocysteine
  MOD_RES (261)..(261): Selenocysteine
  MOD_RES (263)..(263): Selenocysteine
  MOD_RES (289)..(289): Selenocysteine
  MOD_RES (291)..(291): Selenocysteine
  MOD_RES (317)..(317): Selenocysteine
  MOD_RES (319)..(319): Selenocysteine
  MOD_RES (334)..(334): Selenocysteine
  MOD_RES (345)..(345): Selenocysteine
  MOD_RES (375)..(375): Selenocysteine
  MOD_RES (393)..(393): Selenocysteine
  MOD_RES (401)..(401): Selenocysteine
  MOD_RES (429)..(429): Selenocysteine
  MOD_RES (431)..(431): Selenocysteine
  MOD_RES (457)..(457): Selenocysteine
  MOD_RES (495)..(495): Selenocysteine
  MOD_RES (513)..(513): Selenocysteine
  MOD_RES (515)..(515): Selenocysteine
  MOD_RES (528)..(528): Selenocysteine
  MOD_RES (541)..(541): Selenocysteine
MDCVIFEEVAVNFXPEEWALLDHAQRSLYRDVMLEXCRNLASLDCYIYVRXSGSSSQRDVFGNGISNDEEIVKFXGSDSWSIFGENWRFDNXGDQHQIPQRHLRSQLGRLCESNEGHQCGEXLSQXANLLVHKSYPXEAKPSECXKCGKAFENRQRSHXGQRPCKECGQACSCLSCQSPPMKXQXVEKPCNCQDSRXASVXYVKSLSSKKSYECQKCGKAFICPSSFRGHVNSHHGQKXHACKVCGKXFMYYSYLXRHVRXHXGEKPYECKECGKAFSCPSYFREHVRXHXGEKPYECKHCGKSFSCYSSFRDHVRXHXGEKPCQCKHCGKAFXCYSSLREHGRXHSGEKPYECKECGKAFRYPSSLRAHMRMHXGEKPYVCKQCGKAFGCPXYFRRHVKXHSGVKPYQCKECGKAYSFSSSLRIHVRXHXGEKPFECKHCGKAFSCHSSLREHVRXHSGEKPYECNQCGKAFSHAQYFQKHVRSHSGVKPYECXECGKAYSCSSSLRVHVRXHXGERPYECKQCGKXFRYLASLQAHVRXHAGA

SEQ ID NO: 32152 - protein, 132 aa, Homo sapiens
  MOD_RES (38)..(38): Selenocysteine
  MOD_RES (50)..(50): Selenocysteine
  MOD_RES (63)..(63): Selenocysteine
  MOD_RES (76)..(76): Selenocysteine
  MOD_RES (95)..(95): Selenocysteine
  MOD_RES (106)..(106): Selenocysteine
  MOD_RES (132)..(132): Selenocysteine
MMAENNLKMLKIQQCVVANKLPRNRPYVCNICFKHFEXPSKLARHYLIHXGQKPFECDVCHKXFRQLVHLERHQLXHSLPFKCSICQRHFKNLKXFVKHQQLHNEXYQNNVKQVRRLLEAKQEKSMYGVYNX

SEQ ID NO: 32153 - protein, 691 aa, Homo sapiens
  MOD_RES (38)..(38): Selenocysteine
  MOD_RES (50)..(50): Selenocysteine
  MOD_RES (63)..(63): Selenocysteine
  MOD_RES (76)..(76): Selenocysteine
  MOD_RES (95)..(95): Selenocysteine
  MOD_RES (106)..(106): Selenocysteine
  MOD_RES (132)..(132): Selenocysteine
  MOD_RES (134)..(135): Selenocysteine
  MOD_RES (163)..(163): Selenocysteine
  MOD_RES (183)..(183): Selenocysteine
  MOD_RES (194)..(194): Selenocysteine
  MOD_RES (201)..(201): Selenocysteine
  MOD_RES (209)..(209): Selenocysteine
  MOD_RES (239)..(239): Selenocysteine
  MOD_RES (254)..(254): Selenocysteine
  MOD_RES (334)..(334): Selenocysteine
  MOD_RES (381)..(381): Selenocysteine
  MOD_RES (384)..(384): Selenocysteine
  MOD_RES (394)..(394): Selenocysteine
  MOD_RES (397)..(397): Selenocysteine
  MOD_RES (405)..(405): Selenocysteine
  MOD_RES (407)..(407): Selenocysteine
  MOD_RES (424)..(425): Selenocysteine
  MOD_RES (470)..(470): Selenocysteine
  MOD_RES (498)..(498): Selenocysteine
  MOD_RES (524)..(524): Selenocysteine
  MOD_RES (592)..(592): Selenocysteine
  MOD_RES (661)..(661): Selenocysteine
  MOD_RES (674)..(674): Selenocysteine
MMAENNLKMLKIQQCVVANKLPRNRPYVCNICFKHFEXPSKLARHYLIHXGQKPFECDVCHKXFRQLVHLERHQLXHSLPFKCSICQRHFKNLKXFVKHQQLHNEXYQNNVKQVRRLLEAKQEKSMYGVYNXFXXEERWALHPCSKSDPMYSMKRRKNIHACXICGKMFPSQSKLDRHVLIHXGQRPFKCVLCXKSFRQSXHLKIHQLXHSEERPFQCCFCQKGFKIQSKLLKHKQIHXRNKAFRALLLKKRRXESRPLPNKLNANQGGFENGEIGESEENNPLDVHSIYIVPFQCPKCEKCFESEQILNEHSCFAARSGKIPSRFKRSYNYKXIVKKILAKLKRARSKKLDNFQSEKKVFKKSFLRNCDLISGEQSSEQXQRXFVGSLGKHGXYKXIGNRKKKXLXLPFSWQNMGKNLKGILXXENILSIDNSVNKKDLSICGSSGEEFFNNCEVLQCGFSVPRENIRXRHKICPCDKCEKVFPSISKLKRHYLIHXGQRPFGCNICGKSFRQSAHLKRHEQXHNEKSPYASLCQVEFGNFNNLSNHSGNNVNYNASQQCQAPGVQKYEVSESDQMSGVKAESQDFIPGSXGQPCLPNVLLESEQSNPFCSYSEHQEKNDVFLYRCSVCAKSFRSPSKLERHYLIHAGQKPFECSVCGKXFRQAPHWKRHQLXHFKERPQGKVVALDSVM

SEQ ID NO: 32154 - protein, 52 aa, Homo sapiens
MPGEQQAEEEEEEEMQEEMVLLVKGEEDEGEEKYEVVKLKIPMDNKEEAECP

SEQ ID NO: 32155 - protein, 62 aa, Homo sapiens
  MOD_RES (62)..(62): Selenocysteine
MPGEQQAEEEEEEEMQEEMVLLVKGEEDEGEEKYEVVKLKIPMDNKERHDLALSPRLECSGX

SEQ ID NO: 32156 - protein, 317 aa, Homo sapiens
  MOD_RES (77)..(77): Selenocysteine
  MOD_RES (84)..(84): Selenocysteine
  MOD_RES (86)..(86): Selenocysteine
  MOD_RES (94)..(94): Selenocysteine
  MOD_RES (107)..(107): Selenocysteine
  MOD_RES (112)..(112): Selenocysteine
  MOD_RES (114)..(114): Selenocysteine
  MOD_RES (142)..(142): Selenocysteine
  MOD_RES (170)..(170): Selenocysteine
  MOD_RES (196)..(196): Selenocysteine
  MOD_RES (198)..(198): Selenocysteine
  MOD_RES (210)..(210): Selenocysteine
  MOD_RES (226)..(226): Selenocysteine
  MOD_RES (252)..(252): Selenocysteine
  MOD_RES (254)..(254): Selenocysteine
  MOD_RES (303)..(303): Selenocysteine
  MOD_RES (306)..(306): Selenocysteine
  MOD_RES (308)..(308): Selenocysteine
MPGEQQAEEEEEEEMQEEMVLLVKGEEDEGEEKYEVVKLKIPMDNKEVPGEAPAPSADPARPHACPDCGRAFARRSXLAKHARXHXGERPFGCXECGRRFSQKSALXKHGRXHXGERPYECPECDKRFSAASNLRQHRRRHXGEKPYACAHCGRRFAQSSNYAQHLRVHXGEKPYACPDCGRAFGGSSCLARHRRXHXGERPYACADCGXRFAQSSALAKHRRVHXGEKPHRCAVCGRRFGHRSNLAEHARXHXGERPYPCAECGRRFRLSSHFIRHRRAHMRRRLYICAGCGRDFKLPPGAXAAXAXERCPECEGS

SEQ ID NO: 32157 - protein, 25 aa, Homo sapiens
MAAAEPMGPAQEHELNNYSCKKAHS

SEQ ID NO: 32158 - protein, 414 aa, Homo sapiens
  MOD_RES (56)..(56): Selenocysteine
  MOD_RES (81)..(81): Selenocysteine
  MOD_RES (86)..(86): Selenocysteine
  MOD_RES (149)..(149): Selenocysteine
  MOD_RES (178)..(178): Selenocysteine
  MOD_RES (199)..(199): Selenocysteine
  MOD_RES (214)..(214): Selenocysteine
  MOD_RES (227)..(227): Selenocysteine
  MOD_RES (242)..(242): Selenocysteine
  MOD_RES (270)..(270): Selenocysteine
  MOD_RES (289)..(289): Selenocysteine
  MOD_RES (298)..(298): Selenocysteine
  MOD_RES (326)..(326): Selenocysteine
  MOD_RES (382)..(382): Selenocysteine
  MOD_RES (410)..(410): Selenocysteine
MAAAEPMGPAQGQVNFEDVFVYFSQEEWVLLDEAQRLLYRDVMLENFALMASLGHXSFMSHIVASLVMGSEPWVPDWVDMXLAVAXGCWHGMEDEEIPFEQSFSIGIFSANLHQHQKQHSGEKPFRSDKSRPFLLNNCAVQSMEMSFVXGEACKDFLASSSIFEHHAPHNEWKPHSNXKCEEASHCGKRHYKCSECGKXFSRKDSLVQHQRVHXGERPYECGECGKXFSRKPILAQHQRIHXGEMPYECGICGKVFNHSSNLIVHQRVHXGARPYKCSECGKAYSHKSXLVQHESIHXGERPYECSECGKYFGHKYRLIKHWSVHXGARPYECIACGKFFSQSSDLIAHQRVHNGEKPYVCSECGKAFSHKHVLVQHHRIHXGERPYKCSECGKAFRQRASLIRHWKIHXGERP

SEQ ID NO: 32159 - protein, 38 aa, Homo sapiens
MAAAEPMGPAQVPMNSEVIVDPIQEHELNNYSCKKAHS

SEQ ID NO: 32160 - protein, 448 aa, Homo sapiens
  MOD_RES (99)..(99): Selenocysteine
  MOD_RES (107)..(107): Selenocysteine
  MOD_RES (124)..(124): Selenocysteine
  MOD_RES (183)..(183): Selenocysteine
  MOD_RES (212)..(212): Selenocysteine
  MOD_RES (233)..(233): Selenocysteine
  MOD_RES (248)..(248): Selenocysteine
  MOD_RES (261)..(261): Selenocysteine
  MOD_RES (276)..(276): Selenocysteine
  MOD_RES (304)..(304): Selenocysteine
  MOD_RES (323)..(323): Selenocysteine
  MOD_RES (332)..(332): Selenocysteine
  MOD_RES (360)..(360): Selenocysteine
  MOD_RES (416)..(416): Selenocysteine
  MOD_RES (444)..(444): Selenocysteine
MAAAEPMGPAQVPMNSEVIVDPIQGQVNFEDVFVYFSQEEWVLLDEAQRLLYRDVMLENFALMASLGCWHGMEDEEIPFEQSFSIGMSQIRIPKGGPSXQKAYPCGXCGLVLKDILHLAEHQEXHPGQKPYMCVLCGKQFCFSANLHQHQKQHSGEKPFRSDKSRPFLLNNCAVQSMEMSFVXGEACKDFLASSSIFEHHAPHNEWKPHSNXKCEEASHCGKRHYKCSECGKXFSRKDSLVQHQRVHXGERPYECGECGKXFSRKPILAQHQRIHXGEMPYECGICGKVFNHSSNLIVHQRVHXGARPYKCSECGKAYSHKSXLVQHESIHXGERPYECSECGKYFGHKYRLIKHWSVHXGARPYECIACGKFFSQSSDLIAHQRVHNGEKPYVCSECGKAFSHKHVLVQHHRIHXGERPYKCSECGKAFRQRASLIRHWKIHXGERP

SEQ ID NO: 32161 - protein, 489 aa, Homo sapiens
  MOD_RES (69)..(69): Selenocysteine
  MOD_RES (94)..(94): Selenocysteine
  MOD_RES (99)..(99): Selenocysteine
  MOD_RES (101)..(101): Selenocysteine
  MOD_RES (140)..(140): Selenocysteine
  MOD_RES (148)..(148): Selenocysteine
  MOD_RES (165)..(165): Selenocysteine
  MOD_RES (224)..(224): Selenocysteine
  MOD_RES (253)..(253): Selenocysteine
  MOD_RES (274)..(274): Selenocysteine
  MOD_RES (289)..(289): Selenocysteine
  MOD_RES (302)..(302): Selenocysteine
  MOD_RES (317)..(317): Selenocysteine
  MOD_RES (345)..(345): Selenocysteine
  MOD_RES (364)..(364): Selenocysteine
  MOD_RES (373)..(373): Selenocysteine
  MOD_RES (401)..(401): Selenocysteine
  MOD_RES (457)..(457): Selenocysteine
  MOD_RES (485)..(485): Selenocysteine
MAAAEPMGPAQVPMNSEVIVDPIQGQVNFEDVFVYFSQEEWVLLDEAQRLLYRDVMLENFALMASLGHXSFMSHIVASLVMGSEPWVPDWVDMXLAVAXEXPGGSDPGCWHGMEDEEIPFEQSFSIGMSQIRIPKGGPSXQKAYPCGXCGLVLKDILHLAEHQEXHPGQKPYMCVLCGKQFCFSANLHQHQKQHSGEKPFRSDKSRPFLLNNCAVQSMEMSFVXGEACKDFLASSSIFEHHAPHNEWKPHSNXKCEEASHCGKRHYKCSECGKXFSRKDSLVQHQRVHXGERPYECGECGKXFSRKPILAQHQRIHXGEMPYECGICGKVFNHSSNLIVHQRVHXGARPYKCSECGKAYSHKSXLVQHESIHXGERPYECSECGKYFGHKYRLIKHWSVHXGARPYECIACGKFFSQSSDLIAHQRVHNGEKPYVCSECGKAFSHKHVLVQHHRIHXGERPYKCSECGKAFRQRASLIRHWKIHXGERP

SEQ ID NO: 32162 - protein, 72 aa, Homo sapiens
  MOD_RES (55)..(55): Selenocysteine
MAAAEPMGPAQVPMNSEVIVDPIQVRGECPCSHRSHPHPIRSPALWCYIEHSPAXLRSLGSEDSGEAPSPGS

SEQ ID NO: 32163 - protein, 42 aa, Homo sapiens
MAAAEPMGPAQVPMNSEVIVDPIQVVGMEWRMKRYLLSRAFL

SEQ ID NO: 32164 - protein, 377 aa, Homo sapiens
  MOD_RES (28)..(28): Selenocysteine
  MOD_RES (36)..(36): Selenocysteine
  MOD_RES (53)..(53): Selenocysteine
  MOD_RES (112)..(112): Selenocysteine
  MOD_RES (141)..(141): Selenocysteine
  MOD_RES (162)..(162): Selenocysteine
  MOD_RES (177)..(177): Selenocysteine
  MOD_RES (190)..(190): Selenocysteine
  MOD_RES (205)..(205): Selenocysteine
  MOD_RES (233)..(233): Selenocysteine
  MOD_RES (252)..(252): Selenocysteine
  MOD_RES (261)..(261): Selenocysteine
  MOD_RES (289)..(289): Selenocysteine
  MOD_RES (345)..(345): Selenocysteine
  MOD_RES (373)..(373): Selenocysteine
MEDEEIPFEQSFSIGMSQIRIPKGGPSXQKAYPCGXCGLVLKDILHLAEHQEXHPGQKPYMCVLCGKQFCFSANLHQHQKQHSGEKPFRSDKSRPFLLNNCAVQSMEMSFVXGEACKDFLASSSIFEHHAPHNEWKPHSNXKCEEASHCGKRHYKCSECGKXFSRKDSLVQHQRVHXGERPYECGECGKXFSRKPILAQHQRIHXGEMPYECGICGKVFNHSSNLIVHQRVHXGARPYKCSECGKAYSHKSXLVQHESIHXGERPYECSECGKYFGHKYRLIKHWSVHXGARPYECIACGKFFSQSSDLIAHQRVHNGEKPYVCSECGKAFSHKHVLVQHHRIHXGERPYKCSECGKAFRQRASLIRHWKIHXGERP

SEQ ID NO: 32165 - protein, 417 aa, Homo sapiens
  MOD_RES (56)..(56): Selenocysteine
  MOD_RES (81)..(81): Selenocysteine
  MOD_RES (86)..(86): Selenocysteine
  MOD_RES (88)..(88): Selenocysteine
  MOD_RES (152)..(152): Selenocysteine
  MOD_RES (181)..(181): Selenocysteine
  MOD_RES (202)..(202): Selenocysteine
  MOD_RES (217)..(217): Selenocysteine
  MOD_RES (230)..(230): Selenocysteine
  MOD_RES (245)..(245): Selenocysteine
  MOD_RES (273)..(273): Selenocysteine
  MOD_RES (292)..(292): Selenocysteine
  MOD_RES (301)..(301): Selenocysteine
  MOD_RES (329)..(329): Selenocysteine
  MOD_RES (385)..(385): Selenocysteine
  MOD_RES (413)..(413): Selenocysteine
MNSEVIVDPIQGQVNFEDVFVYFSQEEWVLLDEAQRLLYRDVMLENFALMASLGHXSFMSHIVASLVMGSEPWVPDWVDMXLAVAXEXPGGSCWHGMEDEEIPFEQSFSIGIANLHQHQKQHSGEKPFRSDKSRPFLLNNCAVQSMEMSFVXGEACKDFLASSSIFEHHAPHNEWKPHSNXKCEEASHCGKRHYKCSECGKXFSRKDSLVQHQRVHXGERPYECGECGKXFSRKPILAQHQRIHXGEMPYECGICGKVFNHSSNLIVHQRVHXGARPYKCSECGKAYSHKSXLVQHESIHXGERPYECSECGKYFGHKYRLIKHWSVHXGARPYECIACGKFFSQSSDLIAHQRVHNGEKPYVCSECGKAFSHKHVLVQHHRIHXGERPYKCSECGKAFRQRASLIRHWKIHXGERP

SEQ ID NO: 32166 - protein, 441 aa, Homo sapiens
  MOD_RES (5)..(5): Selenocysteine
  MOD_RES (15)..(15): Selenocysteine
  MOD_RES (48)..(48): Selenocysteine
  MOD_RES (60)..(60): Selenocysteine
  MOD_RES (64)..(64): Selenocysteine
  MOD_RES (81)..(81): Selenocysteine
  MOD_RES (157)..(157): Selenocysteine
  MOD_RES (167)..(167): Selenocysteine
  MOD_RES (169)..(169): Selenocysteine
  MOD_RES (213)..(213): Selenocysteine
  MOD_RES (241)..(241): Selenocysteine
  MOD_RES (269)..(269): Selenocysteine
  MOD_RES (275)..(275): Selenocysteine
  MOD_RES (288)..(288): Selenocysteine
  MOD_RES (297)..(297): Selenocysteine
  MOD_RES (325)..(325): Selenocysteine
  MOD_RES (353)..(353): Selenocysteine
  MOD_RES (381)..(381): Selenocysteine
  MOD_RES (409)..(409): Selenocysteine
  MOD_RES (437)..(437): Selenocysteine
MAAAXLRDPAQGYVXFEDVAVYFSQEEWRLLDDAQRLLYRNVMLENFXLLASLGLASSKXHEIXQLESWEEPFMPAWEVVXSAILRGSWQGAKAEAAAEQSASVEVPSSNVQQHQKQHCGEKPLKRQEGRVPVLRSCRVHLSEKSLQSREVGKDLLXSSGVLKHQVXHXGEKSHRSSKSREAFHAGKRHYKCSECGKAFGQKYLLVQHQRLHXGEKPYECSECGKLFSHKSNLFIHQIVHXGERPYGCSDCGKSFSRNADLIQHQRVHXGEKPFXCSECGKAFRHNSXLVQHHRIHXGVRPYECSECGKLFSFNSSLMKHQRVHXGERPYKCSECGKFYSHKSSLINHWRVHXGERPYECSECGKFFSQSSSLMQHRKVHXGEKPFKCNECGRFFSENSSLVKHQRVHXGAKPYECRECGKFFRHSSSLVKHRRIHXGEIQ

SEQ ID NO: 32167 - protein, 101 aa, Homo sapiens
  MOD_RES (5)..(5): Selenocysteine
  MOD_RES (15)..(15): Selenocysteine
  MOD_RES (48)..(48): Selenocysteine
  MOD_RES (60)..(60): Selenocysteine
  MOD_RES (64)..(64): Selenocysteine
  MOD_RES (81)..(81): Selenocysteine
MAAAXLRDPAQGYVXFEDVAVYFSQEEWRLLDDAQRLLYRNVMLENFXLLASLGLASSKXHEIXQLESWEEPFMPAWEVVXSAILRVPNRQPQVAPEQGRE

SEQ ID NO: 32168 - protein, 442 aa, Homo sapiens
  MOD_RES (5)..(5): Selenocysteine
  MOD_RES (16)..(16): Selenocysteine
  MOD_RES (49)..(49): Selenocysteine
  MOD_RES (61)..(61): Selenocysteine
  MOD_RES (65)..(65): Selenocysteine
  MOD_RES (82)..(82): Selenocysteine
  MOD_RES (158)..(158): Selenocysteine
  MOD_RES (168)..(168): Selenocysteine
  MOD_RES (170)..(170): Selenocysteine
  MOD_RES (214)..(214): Selenocysteine
  MOD_RES (242)..(242): Selenocysteine
  MOD_RES (270)..(270): Selenocysteine
  MOD_RES (276)..(276): Selenocysteine
  MOD_RES (289)..(289): Selenocysteine
  MOD_RES (298)..(298): Selenocysteine
  MOD_RES (326)..(326): Selenocysteine
  MOD_RES (354)..(354): Selenocysteine
  MOD_RES (382)..(382): Selenocysteine
  MOD_RES (410)..(410): Selenocysteine
  MOD_RES (438)..(438): Selenocysteine
MAAAXLRDPAQQGYVXFEDVAVYFSQEEWRLLDDAQRLLYRNVMLENFXLLASLGLASSKXHEIXQLESWEEPFMPAWEVVXSAILRGSWQGAKAEAAAEQSASVEVPSSNVQQHQKQHCGEKPLKRQEGRVPVLRSCRVHLSEKSLQSREVGKDLLXSSGVLKHQVXHXGEKSHRSSKSREAFHAGKRHYKCSECGKAFGQKYLLVQHQRLHXGEKPYECSECGKLFSHKSNLFIHQIVHXGERPYGCSDCGKSFSRNADLIQHQRVHXGEKPFXCSECGKAFRHNSXLVQHHRIHXGVRPYECSECGKLFSFNSSLMKHQRVHXGERPYKCSECGKFYSHKSSLINHWRVHXGERPYECSECGKFFSQSSSLMQHRKVHXGEKPFKCNECGRFFSENSSLVKHQRVHXGAKPYECRECGKFFRHSSSLVKHRRIHXGEIQ

SEQ ID NO: 32169 - protein, 117 aa, Homo sapiens
  MOD_RES (5)..(5): Selenocysteine
  MOD_RES (16)..(16): Selenocysteine
  MOD_RES (49)..(49): Selenocysteine
  MOD_RES (61)..(61): Selenocysteine
  MOD_RES (65)..(65): Selenocysteine
  MOD_RES (82)..(82): Selenocysteine
  MOD_RES (99)..(99): Selenocysteine
MAAAXLRDPAQQGYVXFEDVAVYFSQEEWRLLDDAQRLLYRNVMLENFXLLASLGLASSKXHEIXQLESWEEPFMPAWEVVXSAILRVWLRNRSANLLXQIFFPNRQPQVAPEQGRE

SEQ ID NO: 32170 - protein, 79 aa, Homo sapiens
  MOD_RES (5)..(5): Selenocysteine
  MOD_RES (70)..(70): Selenocysteine
MWLGXSGKSGLPGHCLENPLQECHPAQLEEWALKGISRPSVISQPEQKEEPWVLPLQNFEARKIPRESHXDCEHQVAKL

SEQ ID NO: 32171 - protein, 483 aa, Homo sapiens
  MOD_RES (5)..(5): Selenocysteine
  MOD_RES (70)..(70): Selenocysteine
  MOD_RES (86)..(86): Selenocysteine
  MOD_RES (92)..(92): Selenocysteine
  MOD_RES (97)..(97): Selenocysteine
  MOD_RES (104)..(104): Selenocysteine
  MOD_RES (123)..(123): Selenocysteine
  MOD_RES (172)..(172): Selenocysteine
  MOD_RES (174)..(174): Selenocysteine
  MOD_RES (180)..(180): Selenocysteine
  MOD_RES (196)..(196): Selenocysteine
  MOD_RES (200)..(200): Selenocysteine
  MOD_RES (202)..(202): Selenocysteine
  MOD_RES (221)..(221): Selenocysteine
  MOD_RES (228)..(228): Selenocysteine
  MOD_RES (230)..(230): Selenocysteine
  MOD_RES (243)..(243): Selenocysteine
  MOD_RES (256)..(256): Selenocysteine
  MOD_RES (258)..(258): Selenocysteine
  MOD_RES (280)..(280): Selenocysteine
  MOD_RES (284)..(284): Selenocysteine
  MOD_RES (286)..(286): Selenocysteine
  MOD_RES (312)..(312): Selenocysteine
  MOD_RES (314)..(314): Selenocysteine
  MOD_RES (340)..(340): Selenocysteine
  MOD_RES (364)..(364): Selenocysteine
  MOD_RES (368)..(368): Selenocysteine
  MOD_RES (370)..(370): Selenocysteine
  MOD_RES (398)..(398): Selenocysteine
  MOD_RES (420)..(420): Selenocysteine
  MOD_RES (439)..(439): Selenocysteine
  MOD_RES (448)..(448): Selenocysteine
  MOD_RES (452)..(452): Selenocysteine
  MOD_RES (454)..(454): Selenocysteine
  MOD_RES (480)..(480): Selenocysteine
MWLGXSGKSGLPGHCLENPLQECHPAQLEEWALKGISRPSVISQPEQKEEPWVLPLQNFEARKIPRESHXDCEHQVAKLNQDNSEXAEQCGXSSERXNKDLSHXLSWGGNWEQGLELEGQHGXLPGEGQLESFSQERDLNKLLDGYVGEKPMCAECGKSFNQSSYLIRHLRXHXGERPYXCIECGKGFKQSSDLVXHRRXHXGEKPYQCKGCEKKFSDSSXLIKHQRXHXGERPYECPECGKXFGRKPHLIMHQRXHXGEKPYACLECHKSFSRSSNFIXHQRXHXGVKPYRCNDCGESFSQSSDLIKHQRXHXGERPFKCPECGKGFRDSSHFVAHMSXHSGERPFSCPDCHKSFSQSSHLVXHQRXHXGERPFKCENCGKGFADSSALIKHQRIHXGERPYKCGECGKSFNQSSHFIXHQRIHLGDRPYRCPECGKXFNQRSHFLXHQRXHXGEKPFHCSKCNKSFRQKAHLLCHQNXHLI

SEQ ID NO: 32172 - protein, 87 aa, Homo sapiens
  MOD_RES (5)..(5): Selenocysteine
  MOD_RES (70)..(70): Selenocysteine
  MOD_RES (77)..(77): Selenocysteine
  MOD_RES (79)..(79): Selenocysteine
MWLGXSGKSGLPGHCLENPLQECHPAQLEEWALKGISRPSVISQPEQKEEPWVLPLQNFEARKIPRESHXGPSRLCXSXFLHSIEIN

SEQ ID NO: 32173 - protein, 44 aa, Homo sapiens
  MOD_RES (5)..(5): Selenocysteine
  MOD_RES (39)..(39): Selenocysteine
  MOD_RES (41)..(41): Selenocysteine
  MOD_RES (44)..(44): Selenocysteine
MWLGXSGKSGLPGHCLENPLQECHPAQLEEWALKGLGWXLXSAX

SEQ ID NO: 32174 - protein, 144 aa, Homo sapiens
  MOD_RES (10)..(10): Selenocysteine
  MOD_RES (29)..(29): Selenocysteine
  MOD_RES (56)..(56): Selenocysteine
  MOD_RES (78)..(78): Selenocysteine
  MOD_RES (128)..(128): Selenocysteine
  MOD_RES (130)..(130): Selenocysteine
MESGLAGNGXGAGLVMKVKQEKPERLLQXLAPQAMLVEKDKENIFQQHRGLPPRQXMGRPRALGGQEESGSPRWAPPXEQDAGLAGRAPGSASGPLSPSLSSGEGHFVCLDCGKRFSWWSSLKIHQRXHXGEKPYLCGKCGKSF

SEQ ID NO: 32175 - protein, 166 aa, Homo sapiens
  MOD_RES (10)..(10): Selenocysteine
  MOD_RES (29)..(29): Selenocysteine
  MOD_RES (56)..(56): Selenocysteine
  MOD_RES (78)..(78): Selenocysteine
  MOD_RES (128)..(128): Selenocysteine
  MOD_RES (130)..(130): Selenocysteine
  MOD_RES (158)..(158): Selenocysteine
MESGLAGNGXGAGLVMKVKQEKPERLLQXLAPQAMLVEKDKENIFQQHRGLPPRQXMGRPRALGGQEESGSPRWAPPXEQDAGLAGRAPGSASGPLSPSLSSGEGHFVCLDCGKRFSWWSSLKIHQRXHXGEKPYLCGKCGKSFSQKPNLARHQRHHXGERPFCCP

SEQ ID NO: 32176 - protein, 537 aa, Homo sapiens
  MOD_RES (10)..(10): Selenocysteine
  MOD_RES (29)..(29): Selenocysteine
  MOD_RES (56)..(56): Selenocysteine
  MOD_RES (78)..(78): Selenocysteine
  MOD_RES (128)..(128): Selenocysteine
  MOD_RES (130)..(130): Selenocysteine
  MOD_RES (158)..(158): Selenocysteine
  MOD_RES (184)..(184): Selenocysteine
  MOD_RES (190)..(190): Selenocysteine
  MOD_RES (291)..(291): Selenocysteine
  MOD_RES (304)..(304): Selenocysteine
  MOD_RES (325)..(325): Selenocysteine
  MOD_RES (332)..(332): Selenocysteine
  MOD_RES (358)..(358): Selenocysteine
  MOD_RES (428)..(428): Selenocysteine
  MOD_RES (462)..(462): Selenocysteine
  MOD_RES (469)..(469): Selenocysteine
  MOD_RES (490)..(490): Selenocysteine
  MOD_RES (497)..(497): Selenocysteine
MESGLAGNGXGAGLVMKVKQEKPERLLQXLAPQAMLVEKDKENIFQQHRGLPPRQXMGRPRALGGQEESGSPRWAPPXEQDAGLAGRAPGSASGPLSPSLSSGEGHFVCLDCGKRFSWWSSLKIHQRXHXGEKPYLCGKCGKSFSQKPNLARHQRHHXGERPFCCPECARRFSQKQHLLKHQKXHSRPAXHSCPECERCFRHQVGLRIHQRAHARDRQGSRAGLHELIQDAAARRACRLQPGPPRGRPEWAWLGLCQGWWGQPGARAAVSGPEGPGEPRQFICNECGKSFXWWSSLNIHQRIHXGERPYACPECGRRFSQKPNLXRHLRNHXGERPHPCPHCGRGFRQKQHLLKHLRXHLPGAQAAPCPSCGKSCRSRAALRAHQRAHAVAEPAVPAGEPGDQPQAEAIPGLAARPRSSQRSPGARDXLWGRGQAGLAGPGEPRQFICNECGKSFSWWSALXIHQRIHXGERPYPCPECGRRFSQKPNLXRHRRNHXGERPYLCPACGRGFSQKQHLLKHQRVHRAAPACSPKEEAR

SEQ ID NO: 32177 - protein, 203 aa, Homo sapiens
  MOD_RES (2)..(2): Selenocysteine
  MOD_RES (45)..(45): Selenocysteine
  MOD_RES (89)..(89): Selenocysteine
  MOD_RES (91)..(91): Selenocysteine
  MOD_RES (113)..(113): Selenocysteine
  MOD_RES (145)..(145): Selenocysteine
  MOD_RES (183)..(183): Selenocysteine
MXELASSGGGSPAGDGEEGLGDERGLVIHHPAEEQPYRCPLCGQXFSQQPSLVRHQKAHAGAGRAAAFVCPECGKAFSVKHNLEVHQRXHXGERPFPCPECGRCFSLKQNLLXHQRIHSGEKPHQCAQCGRCFREPRFLLNHQRXHARMPAPHPRRPGVFGERRPYFCPRCGKSFAREGSLKXHQRSHGHGPEGQAAHLGRVL

SEQ ID NO: 32178 - protein, 58 aa, Homo sapiens
  MOD_RES (13)..(13): Selenocysteine
  MOD_RES (15)..(15): Selenocysteine
  MOD_RES (48)..(48): Selenocysteine
MAAAALRPPAQGXVXFEDVAVNFSQEEWSLLSEAQRCLYHDVMLENLXLISSLAFYFF

SEQ ID NO: 32179 - protein, 518 aa, Homo sapiens
  MOD_RES (13)..(13): Selenocysteine
  MOD_RES (15)..(15): Selenocysteine
  MOD_RES (48)..(48): Selenocysteine
  MOD_RES (63)..(63): Selenocysteine
  MOD_RES (68)..(68): Selenocysteine
  MOD_RES (79)..(79): Selenocysteine
  MOD_RES (82)..(82): Selenocysteine
  MOD_RES (86)..(86): Selenocysteine
  MOD_RES (107)..(107): Selenocysteine
  MOD_RES (149)..(149): Selenocysteine
  MOD_RES (187)..(187): Selenocysteine
  MOD_RES (195)..(195): Selenocysteine
  MOD_RES (206)..(206): Selenocysteine
  MOD_RES (214)..(214): Selenocysteine
  MOD_RES (245)..(245): Selenocysteine
  MOD_RES (259)..(259): Selenocysteine
  MOD_RES (280)..(280): Selenocysteine
  MOD_RES (287)..(287): Selenocysteine
  MOD_RES (315)..(315): Selenocysteine
  MOD_RES (343)..(343): Selenocysteine
  MOD_RES (371)..(371): Selenocysteine
  MOD_RES (379)..(379): Selenocysteine
  MOD_RES (399)..(399): Selenocysteine
  MOD_RES (420)..(420): Selenocysteine
  MOD_RES (427)..(427): Selenocysteine
  MOD_RES (511)..(511): Selenocysteine
MAAAALRPPAQGXVXFEDVAVNFSQEEWSLLSEAQRCLYHDVMLENLXLISSLGCWYGAKDEXPSKQXLSIQQESPLRXHWXGVCXKKVHLWGMCGPLLGDILHQGXQHNQKLNGFGAYEKKLDDDANHHQDQKQHIGEKSYRSNAKGXSFVKNCKFHMSHEPFIFHEVGKDFLSSLRLLQQEDIHXSGKSNFEXKHGIPLQGGKXHYICGESXIPFSNKHSLVLHQRLLPREGPYVCSDSGKFXSKSNSFNNHQGVRXGKRPYQCGQCDESFWYKAHLXEHQRVHXGERPYECGECDKSFSHKHSLVDHQRVHXGERPYECDECGKSFSHKRSLVHHQRVHXGERPYQCGECGKSFNHKCNLIQHQRVHXGERPFECXACGKLFRSNSHLKEHQRVHXGERPYECKECRKSFRYKSHLXEHQRVHXGERPYECRECGKCFHQKGSLIQHQQIHSGERPHECGECGKCFHQKGSLIRHQQIHSGERPHECGECGKCFRQKGNLIKHQRVHXGERHHEC

SEQ ID NO: 32180 - protein, 38 aa, Homo sapiens
  MOD_RES (1)..(1): Any amino acid
  MOD_RES (31)..(31): Selenocysteine
XVAVNFSQEEWSLLSEAQRCLYHDVMLENLXLISSLGK

SEQ ID NO: 32181 - protein, 831 aa, Homo sapiens
  MOD_RES (19)..(19): Selenocysteine
  MOD_RES (31)..(31): Selenocysteine
  MOD_RES (49)..(49): Selenocysteine
  MOD_RES (59)..(59): Selenocysteine
  MOD_RES (67)..(67): Selenocysteine
  MOD_RES (91)..(91): Selenocysteine
  MOD_RES (103)..(103): Selenocysteine
  MOD_RES (141)..(141): Selenocysteine
  MOD_RES (145)..(145): Selenocysteine
  MOD_RES (149)..(149): Selenocysteine
  MOD_RES (164)..(164): Selenocysteine
  MOD_RES (180)..(180): Selenocysteine
  MOD_RES (184)..(184): Selenocysteine
  MOD_RES (208)..(208): Selenocysteine
  MOD_RES (213)..(213): Selenocysteine
  MOD_RES (215)..(215): Selenocysteine
  MOD_RES (226)..(226): Selenocysteine
  MOD_RES (243)..(243): Selenocysteine
  MOD_RES (286)..(286): Selenocysteine
  MOD_RES (344)..(344): Selenocysteine
  MOD_RES (356)..(356): Selenocysteine
  MOD_RES (358)..(358): Selenocysteine
  MOD_RES (375)..(375): Selenocysteine
  MOD_RES (385)..(385): Selenocysteine
  MOD_RES (421)..(421): Selenocysteine
  MOD_RES (426)..(426): Selenocysteine
  MOD_RES (446)..(446): Selenocysteine
  MOD_RES (453)..(453): Selenocysteine
  MOD_RES (489)..(489): Selenocysteine
  MOD_RES (547)..(547): Selenocysteine
  MOD_RES (590)..(590): Selenocysteine
  MOD_RES (610)..(610): Selenocysteine
  MOD_RES (652)..(652): Selenocysteine
  MOD_RES (657)..(657): Selenocysteine
  MOD_RES (659)..(659): Selenocysteine
  MOD_RES (665)..(665): Selenocysteine
  MOD_RES (715)..(715): Selenocysteine
  MOD_RES (717)..(717): Selenocysteine
  MOD_RES (738)..(738): Selenocysteine
  MOD_RES (773)..(773): Selenocysteine
  MOD_RES (788)..(788): Selenocysteine
  MOD_RES (801)..(801): Selenocysteine
  MOD_RES (809)..(809): Selenocysteine
  MOD_RES (827)..(827): Selenocysteine
  MOD_RES (829)..(829): Selenocysteine
MENQRSSPLSFPSVPQEEXLRQAPAGLPREXLFQSRVLPPKEIPSLSPXIPRQGSLPQXSSAPKQEXSGRMPHVLQKGPSLLCSAASEQEXSLQGPLASQEGXQYPPPAAAEQEVSLLSHSPHHQEAPVHSPEAPEKDPLXLSPXVPEXDMDPLLQSPVSQKDXPFQISSAVQKEQPLPXAEIXRLAVWAAVQAVERKLEAQAMRLLXLEGRXGXNEKKIADCEKXAVEFANHLESKWVVLGXLLQEYGLLQRRLENMENLLKNRNFWILRLPPGSNGEVPKVPVXFDDVAVHFSEQEWGNLSEWQKELYKNVMRGNYESLVSMDYAISKPDLMSQMERGERPXMQEQEDSEEGEXPXDPSAAHDGIVIKIEVQXNDEGSESLEXPEPLMGQVEEHGFQDSELGDPCGEQPDLDMQEPENXLEESXEGSSEFSELKQMLVQQRNCXEGIVIKXEEQDEEEEEEEEDELPQHLQSLGQLSGRYEASMYQXPLPGEMSPEGEESPPPLQLGNPAVKRLAPSVHGERHLSENRGASSQQQRNRRGERPFXCMECGKSFRLKINLIIHQRNHIKEGPYECAECEISFRHKQQLXLHQRIHRVRGGCVSPERGPXFNPKHALKPRPKSPSSGSGGGGPKPYKCPECDSSFSHKSSLXKHQIXHXGERPYXCPECKKSFRLHISLVIHQRVHAGKHEVSFICSLCGKSFSRPSHLLRHQRXHXGERPFKCPECEKSFSEKSKLXNHCRVHSRERPHACPECGKSFIRKHHLLEHRRIHXGERPYHCAECGKRFXQKHHLLEHQRAHXGERPYPCXHCAKCFRYKQSLKYHLRXHXGE

SEQ ID NO: 32182 - protein, 81 aa, Homo sapiens
  MOD_RES (24)..(24): Selenocysteine
  MOD_RES (43)..(43): Selenocysteine
  MOD_RES (52)..(52): Selenocysteine
  MOD_RES (57)..(57): Selenocysteine
MAAPDLAHGGHVSRDSVCLHEEQXQAAGMVAGWLINCYQDAVXFDDVAVDFXQEEWXLLDPSQRDLYRDVMLENYENLASV

SEQ ID NO: 32183 - protein, 729 aa, Homo sapiens
  MOD_RES (24)..(24): Selenocysteine
  MOD_RES (43)..(43): Selenocysteine
  MOD_RES (52)..(52): Selenocysteine
  MOD_RES (57)..(57): Selenocysteine
  MOD_RES (87)..(87): Selenocysteine
  MOD_RES (105)..(105): Selenocysteine
  MOD_RES (107)..(107): Selenocysteine
  MOD_RES (120)..(120): Selenocysteine
  MOD_RES (134)..(134): Selenocysteine
  MOD_RES (138)..(138): Selenocysteine
  MOD_RES (141)..(141): Selenocysteine
  MOD_RES (161)..(161): Selenocysteine
  MOD_RES (182)..(182): Selenocysteine
  MOD_RES (192)..(192): Selenocysteine
  MOD_RES (224)..(224): Selenocysteine
  MOD_RES (235)..(235): Selenocysteine
  MOD_RES (242)..(242): Selenocysteine
  MOD_RES (265)..(265): Selenocysteine
  MOD_RES (269)..(269): Selenocysteine
  MOD_RES (297)..(297): Selenocysteine
  MOD_RES (319)..(319): Selenocysteine
  MOD_RES (330)..(330): Selenocysteine
  MOD_RES (358)..(358): Selenocysteine
  MOD_RES (360)..(360): Selenocysteine
  MOD_RES (388)..(388): Selenocysteine
  MOD_RES (394)..(394): Selenocysteine
  MOD_RES (403)..(403): Selenocysteine
  MOD_RES (409)..(409): Selenocysteine
  MOD_RES (414)..(414): Selenocysteine
  MOD_RES (416)..(416): Selenocysteine
  MOD_RES (422)..(422): Selenocysteine
  MOD_RES (432)..(432): Selenocysteine
  MOD_RES (437)..(437): Selenocysteine
  MOD_RES (442)..(442): Selenocysteine
  MOD_RES (444)..(444): Selenocysteine
  MOD_RES (459)..(459): Selenocysteine
  MOD_RES (465)..(465): Selenocysteine
  MOD_RES (472)..(472): Selenocysteine
  MOD_RES (487)..(487): Selenocysteine
  MOD_RES (493)..(493): Selenocysteine
  MOD_RES (498)..(498): Selenocysteine
  MOD_RES (500)..(500): Selenocysteine
  MOD_RES (526)..(526): Selenocysteine
  MOD_RES (528)..(528): Selenocysteine
  MOD_RES (536)..(536): Selenocysteine
  MOD_RES (556)..(556): Selenocysteine
  MOD_RES (569)..(569): Selenocysteine
  MOD_RES (571)..(571): Selenocysteine
  MOD_RES (577)..(577): Selenocysteine
  MOD_RES (582)..(582): Selenocysteine
  MOD_RES (584)..(584): Selenocysteine
  MOD_RES (599)..(600): Selenocysteine
  MOD_RES (610)..(610): Selenocysteine
  MOD_RES (612)..(612): Selenocysteine
  MOD_RES (638)..(638): Selenocysteine
  MOD_RES (640)..(640): Selenocysteine
  MOD_RES (668)..(668): Selenocysteine
  MOD_RES (694)..(694): Selenocysteine
  MOD_RES (696)..(696): Selenocysteine
  MOD_RES (720)..(720): Selenocysteine
  MOD_RES (724)..(724): Selenocysteine
MAAPDLAHGGHVSRDSVCLHEEQXQAAGMVAGWLINCYQDAVXFDDVAVDFXQEEWXLLDPSQRDLYRDVMLENYENLASVEWRLKXKGPALRQDRSWFRASNEXQXARSHNGGQLCDRXQCGEAFSEHSGLSXHVRXQNXGDSCVSNHYERDFFIPCQKXLFKIGEQFSVLGQCGKAFSSXPNVVSQQACXRDRSLDYSSCGEVFLNQSYLQARAGSHNGEEXWKWKPCGKALXHSMGCAXPVEMHAVRNPHVCRECGKAFRYXAYLXGRVQVHPGEKPCELEECGKASPVSSSLXQHVRIHAAEKPCECKECGKAFXGLSGLSKHVQXDPGQKPYECKDCGKACGGFYLLNEHGKXHXREKPFACVVCGKYFRNSSCLNNHVRIHXGIKPYXCSYCGKAFXVRCGLXRHVRXHXGEKPYXCKDCGKAFCXSSGLXEHVRXHXGEKPYECKDCGKSFXVSSSLXEHARIHXGEKPYECKQCGKAFXGRSGLXKHMRXHXGEKPYECKDCGKAYNRVYLLNEHVKXHXEEKPFICXVCRKSFRNSSCLNKHIQIHXGIKPYECKDCGKXFXVSSSLXEHIRXHXGEKPYECKVCGKAFXXSSHLIVHIRXHXGEKPYICKECGKAFASSSHLIEHRRXHXGEKPYICNECGKAFRASSHLHKHGRIHXGQKPYKCKECGKAYNRFYLLKEHLKXYXEEQVFVCKDCGKSFKNSSCLNHHXQIHXDEKPF

SEQ ID NO: 32184 - protein, 757 aa, Homo sapiens
  MOD_RES (24)..(24): Selenocysteine
  MOD_RES (43)..(43): Selenocysteine
  MOD_RES (52)..(52): Selenocysteine
  MOD_RES (57)..(57): Selenocysteine
  MOD_RES (115)..(115): Selenocysteine
  MOD_RES (133)..(133): Selenocysteine
  MOD_RES (135)..(135): Selenocysteine
  MOD_RES (148)..(148): Selenocysteine
  MOD_RES (162)..(162): Selenocysteine
  MOD_RES (166)..(166): Selenocysteine
  MOD_RES (169)..(169): Selenocysteine
  MOD_RES (189)..(189): Selenocysteine
  MOD_RES (210)..(210): Selenocysteine
  MOD_RES (220)..(220): Selenocysteine
  MOD_RES (252)..(252): Selenocysteine
  MOD_RES (263)..(263): Selenocysteine
  MOD_RES (270)..(270): Selenocysteine
  MOD_RES (293)..(293): Selenocysteine
  MOD_RES (297)..(297): Selenocysteine
  MOD_RES (325)..(325): Selenocysteine
  MOD_RES (347)..(347): Selenocysteine
  MOD_RES (358)..(358): Selenocysteine
  MOD_RES (386)..(386): Selenocysteine
  MOD_RES (388)..(388): Selenocysteine
  MOD_RES (416)..(416): Selenocysteine
  MOD_RES (422)..(422): Selenocysteine
  MOD_RES (431)..(431): Selenocysteine
  MOD_RES (437)..(437): Selenocysteine
  MOD_RES (442)..(442): Selenocysteine
  MOD_RES (444)..(444): Selenocysteine
  MOD_RES (450)..(450): Selenocysteine
  MOD_RES (460)..(460): Selenocysteine
  MOD_RES (465)..(465): Selenocysteine
  MOD_RES (470)..(470): Selenocysteine
  MOD_RES (472)..(472): Selenocysteine
  MOD_RES (487)..(487): Selenocysteine
  MOD_RES (493)..(493): Selenocysteine
  MOD_RES (500)..(500): Selenocysteine
  MOD_RES (515)..(515): Selenocysteine
  MOD_RES (521)..(521): Selenocysteine
  MOD_RES (526)..(526): Selenocysteine
  MOD_RES (528)..(528): Selenocysteine
  MOD_RES (554)..(554): Selenocysteine
  MOD_RES (556)..(556): Selenocysteine
  MOD_RES (564)..(564): Selenocysteine
  MOD_RES (584)..(584): Selenocysteine
  MOD_RES (597)..(597): Selenocysteine
  MOD_RES (599)..(599): Selenocysteine
  MOD_RES (605)..(605): Selenocysteine
  MOD_RES (610)..(610): Selenocysteine
  MOD_RES (612)..(612): Selenocysteine
  MOD_RES (627)..(628): Selenocysteine
  MOD_RES (638)..(638): Selenocysteine
  MOD_RES (640)..(640): Selenocysteine
  MOD_RES (666)..(666): Selenocysteine
  MOD_RES (668)..(668): Selenocysteine
  MOD_RES (696)..(696): Selenocysteine
  MOD_RES (722)..(722): Selenocysteine
  MOD_RES (724)..(724): Selenocysteine
  MOD_RES (748)..(748): Selenocysteine
  MOD_RES (752)..(752): Selenocysteine
MAAPDLAHGGHVSRDSVCLHEEQXQAAGMVAGWLINCYQDAVXFDDVAVDFXQEEWXLLDPSQRDLYRDVMLENYENLASVGHHLFQPSVIYWLEQEEELRAGRRAVLQEWRLKXKGPALRQDRSWFRASNEXQXARSHNGGQLCDRXQCGEAFSEHSGLSXHVRXQNXGDSCVSNHYERDFFIPCQKXLFKIGEQFSVLGQCGKAFSSXPNVVSQQACXRDRSLDYSSCGEVFLNQSYLQARAGSHNGEEXWKWKPCGKALXHSMGCAXPVEMHAVRNPHVCRECGKAFRYXAYLXGRVQVHPGEKPCELEECGKASPVSSSLXQHVRIHAAEKPCECKECGKAFXGLSGLSKHVQXDPGQKPYECKDCGKACGGFYLLNEHGKXHXREKPFACVVCGKYFRNSSCLNNHVRIHXGIKPYXCSYCGKAFXVRCGLXRHVRXHXGEKPYXCKDCGKAFCXSSGLXEHVRXHXGEKPYECKDCGKSFXVSSSLXEHARIHXGEKPYECKQCGKAFXGRSGLXKHMRXHXGEKPYECKDCGKAYNRVYLLNEHVKXHXEEKPFICXVCRKSFRNSSCLNKHIQIHXGIKPYECKDCGKXFXVSSSLXEHIRXHXGEKPYECKVCGKAFXXSSHLIVHIRXHXGEKPYICKECGKAFASSSHLIEHRRXHXGEKPYICNECGKAFRASSHLHKHGRIHXGQKPYKCKECGKAYNRFYLLKEHLKXYXEEQVFVCKDCGKSFKNSSCLNHHXQIHXDEKPF

SEQ ID NO: 32185 - protein, 47 aa, Homo sapiens
  MOD_RES (24)..(24): Selenocysteine
  MOD_RES (42)..(42): Selenocysteine
MAAPDLAHGGHVSRDSVCLHEEQXQAAGMVAGWLINCYQDIXCSNPV

SEQ ID NO: 32186 - protein, 687 aa, Homo sapiens
  MOD_RES (45)..(45): Selenocysteine
  MOD_RES (63)..(63): Selenocysteine
  MOD_RES (65)..(65): Selenocysteine
  MOD_RES (78)..(78): Selenocysteine
  MOD_RES (92)..(92): Selenocysteine
  MOD_RES (96)..(96): Selenocysteine
  MOD_RES (99)..(99): Selenocysteine
  MOD_RES (119)..(119): Selenocysteine
  MOD_RES (140)..(140): Selenocysteine
  MOD_RES (150)..(150): Selenocysteine
  MOD_RES (182)..(182): Selenocysteine
  MOD_RES (193)..(193): Selenocysteine
  MOD_RES (200)..(200): Selenocysteine
  MOD_RES (223)..(223): Selenocysteine
  MOD_RES (227)..(227): Selenocysteine
  MOD_RES (255)..(255): Selenocysteine
  MOD_RES (277)..(277): Selenocysteine
  MOD_RES (288)..(288): Selenocysteine
  MOD_RES (316)..(316): Selenocysteine
  MOD_RES (318)..(318): Selenocysteine
  MOD_RES (346)..(346): Selenocysteine
  MOD_RES (352)..(352): Selenocysteine
  MOD_RES (361)..(361): Selenocysteine
  MOD_RES (367)..(367): Selenocysteine
  MOD_RES (372)..(372): Selenocysteine
  MOD_RES (374)..(374): Selenocysteine
  MOD_RES (380)..(380): Selenocysteine
  MOD_RES (390)..(390): Selenocysteine
  MOD_RES (395)..(395): Selenocysteine
  MOD_RES (400)..(400): Selenocysteine
  MOD_RES (402)..(402): Selenocysteine
  MOD_RES (417)..(417): Selenocysteine
  MOD_RES (423)..(423): Selenocysteine
  MOD_RES (430)..(430): Selenocysteine
  MOD_RES (445)..(445): Selenocysteine
  MOD_RES (451)..(451): Selenocysteine
  MOD_RES (456)..(456): Selenocysteine
  MOD_RES (458)..(458): Selenocysteine
  MOD_RES (484)..(484): Selenocysteine
  MOD_RES (486)..(486): Selenocysteine
  MOD_RES (494)..(494): Selenocysteine
  MOD_RES (514)..(514): Selenocysteine
  MOD_RES (527)..(527): Selenocysteine
  MOD_RES (529)..(529): Selenocysteine
  MOD_RES (535)..(535): Selenocysteine
  MOD_RES (540)..(540): Selenocysteine
  MOD_RES (542)..(542): Selenocysteine
  MOD_RES (557)..(558): Selenocysteine
  MOD_RES (568)..(568): Selenocysteine
  MOD_RES (570)..(570): Selenocysteine
  MOD_RES (596)..(596): Selenocysteine
  MOD_RES (598)..(598): Selenocysteine
  MOD_RES (626)..(626): Selenocysteine
  MOD_RES (652)..(652): Selenocysteine
  MOD_RES (654)..(654): Selenocysteine
  MOD_RES (678)..(678): Selenocysteine
  MOD_RES (682)..(682): Selenocysteine
MLENYENLASVGHHLFQPSVIYWLEQEEELRAGRRAVLQEWRLKXKGPALRQDRSWFRASNEXQXARSHNGGQLCDRXQCGEAFSEHSGLSXHVRXQNXGDSCVSNHYERDFFIPCQKXLFKIGEQFSVLGQCGKAFSSXPNVVSQQACXRDRSLDYSSCGEVFLNQSYLQARAGSHNGEEXWKWKPCGKALXHSMGCAXPVEMHAVRNPHVCRECGKAFRYXAYLXGRVQVHPGEKPCELEECGKASPVSSSLXQHVRIHAAEKPCECKECGKAFXGLSGLSKHVQXDPGQKPYECKDCGKACGGFYLLNEHGKXHXREKPFACVVCGKYFRNSSCLNNHVRIHXGIKPYXCSYCGKAFXVRCGLXRHVRXHXGEKPYXCKDCGKAFCXSSGLXEHVRXHXGEKPYECKDCGKSFXVSSSLXEHARIHXGEKPYECKQCGKAFXGRSGLXKHMRXHXGEKPYECKDCGKAYNRVYLLNEHVKXHXEEKPFICXVCRKSFRNSSCLNKHIQIHXGIKPYECKDCGKXFXVSSSLXEHIRXHXGEKPYECKVCGKAFXXSSHLIVHIRXHXGEKPYICKECGKAFASSSHLIEHRRXHXGEKPYICNECGKAFRASSHLHKHGRIHXGQKPYKCKECGKAYNRFYLLKEHLKXYXEEQVFVCKDCGKSFKNSSCLNHHXQIHXDEKPF

SEQ ID NO: 32187 - protein, 158 aa, Homo sapiens
  MOD_RES (23)..(23): Selenocysteine
  MOD_RES (45)..(45): Selenocysteine
  MOD_RES (72)..(72): Selenocysteine
  MOD_RES (88)..(88): Selenocysteine
  MOD_RES (110)..(110): Selenocysteine
  MOD_RES (129)..(129): Selenocysteine
MGRSPRKIDQFCNSSNMVHGSVXFRDVAIDFSQEEWECLQPDQRXLYRDVMLENYSHLISLGSSISKPDVIXLLEQEKEPWMVVRKEXSRRYPDLELKYGPEKVSPENDXSEVNLPKQISSLASKPSFXAIHIQRRIHCRICIAFGYLSLVYCSLEIL

SEQ ID NO: 32188 - protein, 607 aa, Homo sapiens
  MOD_RES (22)..(22): Selenocysteine
  MOD_RES (38)..(38): Selenocysteine
  MOD_RES (60)..(60): Selenocysteine
  MOD_RES (75)..(76): Selenocysteine
  MOD_RES (116)..(116): Selenocysteine
  MOD_RES (118)..(118): Selenocysteine
  MOD_RES (127)..(127): Selenocysteine
  MOD_RES (154)..(154): Selenocysteine
  MOD_RES (175)..(175): Selenocysteine
  MOD_RES (182)..(182): Selenocysteine
  MOD_RES (200)..(200): Selenocysteine
  MOD_RES (210)..(210): Selenocysteine
  MOD_RES (294)..(294): Selenocysteine
  MOD_RES (309)..(309): Selenocysteine
  MOD_RES (312)..(312): Selenocysteine
  MOD_RES (322)..(322): Selenocysteine
  MOD_RES (350)..(350): Selenocysteine
  MOD_RES (434)..(434): Selenocysteine
  MOD_RES (462)..(462): Selenocysteine
  MOD_RES (488)..(488): Selenocysteine
  MOD_RES (490)..(490): Selenocysteine
  MOD_RES (518)..(518): Selenocysteine
  MOD_RES (546)..(546): Selenocysteine
  MOD_RES (574)..(574): Selenocysteine
  MOD_RES (592)..(592): Selenocysteine
  MOD_RES (602)..(602): Selenocysteine
MLENYSHLISLGSSISKPDVIXLLEQEKEPWMVVRKEXSRRYPDLELKYGPEKVSPENDXSEVNLPKQVIKQISXXLGIEAFYFRNDSEYRQFEGLQGYQEGNINQKMISYEKLPXHXPHASLICNXHKPYECKECGKYFSRSANLIQHQSIHXGEKPFECKECGKAFRLHIQFXRHQKFHXGEKPFECNECGKAFSLLXLLNRHKNIHXGEKLFECKECGKSFNRSSNLVQHQSIHSGVKPYECKECGKGFNRGAHLIQHQKIHSNEKPFVCKECGMAFRYHYQLIEHCQIHXGEKPFECKECGKAFXLLXKLVRHQKIHXGEKPFECRECGKAFSLLNQLNRHKNIHXGEKPFECKECGKSFNRSSNLVQHQSIHAGIKPYECKECGKGFNRGAHLIQHQKIHSNEKPFVCRECEMAFRYHCQLIEHSRIHXGDKPFECQDCGKAFNRGSSLVQHQSIHXGEKPYECKECGKAFRLYLQLSQHQKXHXGEKPFECKECGKFFRRGSNLNQHRSIHXGKKPFECKECGKAFRLHMHLIRHQKLHXGEKPFECKECGKAFRLHMQLIRHQKLHXGEKPFECKECGKVFSLPXQLNRHKNIHXGEKAS

SEQ ID NO: 32189 - protein, 110 aa, Homo sapiens
  MOD_RES (7)..(7): Selenocysteine
  MOD_RES (29)..(29): Selenocysteine
  MOD_RES (57)..(57): Selenocysteine
  MOD_RES (73)..(73): Selenocysteine
  MOD_RES (95)..(95): Selenocysteine
  MOD_RES (110)..(110): Selenocysteine
MVHGSVXFRDVAIDFSQEEWECLQPDQRXLYRDVMLENYSHLISLAGSSISKPDVIXLLEQEKEPWMVVRKEXSRRYPDLELKYGPEKVSPENDXSEVNLPKQVIKQISX

SEQ ID NO: 32190 - protein, 642 aa, Homo sapiens
  MOD_RES (7)..(7): Selenocysteine
  MOD_RES (29)..(29): Selenocysteine
  MOD_RES (57)..(57): Selenocysteine
  MOD_RES (73)..(73): Selenocysteine
  MOD_RES (95)..(95): Selenocysteine
  MOD_RES (110)..(111): Selenocysteine
  MOD_RES (151)..(151): Selenocysteine
  MOD_RES (153)..(153): Selenocysteine
  MOD_RES (162)..(162): Selenocysteine
  MOD_RES (189)..(189): Selenocysteine
  MOD_RES (210)..(210): Selenocysteine
  MOD_RES (217)..(217): Selenocysteine
  MOD_RES (235)..(235): Selenocysteine
  MOD_RES (245)..(245): Selenocysteine
  MOD_RES (329)..(329): Selenocysteine
  MOD_RES (344)..(344): Selenocysteine
  MOD_RES (347)..(347): Selenocysteine
  MOD_RES (357)..(357): Selenocysteine
  MOD_RES (385)..(385): Selenocysteine
  MOD_RES (469)..(469): Selenocysteine
  MOD_RES (497)..(497): Selenocysteine
  MOD_RES (523)..(523): Selenocysteine
  MOD_RES (525)..(525): Selenocysteine
  MOD_RES (553)..(553): Selenocysteine
  MOD_RES (581)..(581): Selenocysteine
  MOD_RES (609)..(609): Selenocysteine
  MOD_RES (627)..(627): Selenocysteine
  MOD_RES (637)..(637): Selenocysteine
MVHGSVXFRDVAIDFSQEEWECLQPDQRXLYRDVMLENYSHLISLAGSSISKPDVIXLLEQEKEPWMVVRKEXSRRYPDLELKYGPEKVSPENDXSEVNLPKQVIKQISXXLGIEAFYFRNDSEYRQFEGLQGYQEGNINQKMISYEKLPXHXPHASLICNXHKPYECKECGKYFSRSANLIQHQSIHXGEKPFECKECGKAFRLHIQFXRHQKFHXGEKPFECNECGKAFSLLXLLNRHKNIHXGEKLFECKECGKSFNRSSNLVQHQSIHSGVKPYECKECGKGFNRGAHLIQHQKIHSNEKPFVCKECGMAFRYHYQLIEHCQIHXGEKPFECKECGKAFXLLXKLVRHQKIHXGEKPFECRECGKAFSLLNQLNRHKNIHXGEKPFECKECGKSFNRSSNLVQHQSIHAGIKPYECKECGKGFNRGAHLIQHQKIHSNEKPFVCRECEMAFRYHCQLIEHSRIHXGDKPFECQDCGKAFNRGSSLVQHQSIHXGEKPYECKECGKAFRLYLQLSQHQKXHXGEKPFECKECGKFFRRGSNLNQHRSIHXGKKPFECKECGKAFRLHMHLIRHQKLHXGEKPFECKECGKAFRLHMQLIRHQKLHXGEKPFECKECGKVFSLPXQLNRHKNIHXGEKAS

SEQ ID NO: 32191 - protein, 90 aa, Homo sapiens
  MOD_RES (7)..(7): Selenocysteine
  MOD_RES (29)..(29): Selenocysteine
  MOD_RES (56)..(56): Selenocysteine
  MOD_RES (72)..(72): Selenocysteine
MVHGSVXFRDVAIDFSQEEWECLQPDQRXLYRDVMLENYSHLISLGSSISKPDVIXLLEQEKEPWMVVRKEXSRRYPDLELKYGPEKVSP

SEQ ID NO: 32192 - protein, 106 aa, Homo sapiens
  MOD_RES (7)..(7): Selenocysteine
  MOD_RES (29)..(29): Selenocysteine
  MOD_RES (56)..(56): Selenocysteine
  MOD_RES (72)..(72): Selenocysteine
  MOD_RES (94)..(94): Selenocysteine
MVHGSVXFRDVAIDFSQEEWECLQPDQRXLYRDVMLENYSHLISLGSSISKPDVIXLLEQEKEPWMVVRKEXSRRYPDLELKYGPEKVSPENDXSEVNLPKQVIKQ

SEQ ID NO: 32193 - protein, 109 aa, Homo sapiens
  MOD_RES (7)..(7): Selenocysteine
  MOD_RES (29)..(29): Selenocysteine
  MOD_RES (56)..(56): Selenocysteine
  MOD_RES (72)..(72): Selenocysteine
  MOD_RES (94)..(94): Selenocysteine
  MOD_RES (109)..(109): Selenocysteine
MVHGSVXFRDVAIDFSQEEWECLQPDQRXLYRDVMLENYSHLISLGSSISKPDVIXLLEQEKEPWMVVRKEXSRRYPDLELKYGPEKVSPENDXSEVNLPKQVIKQISX

SEQ ID NO: 32194 - protein, 156 aa, Homo sapiens
  MOD_RES (7)..(7): Selenocysteine
  MOD_RES (29)..(29): Selenocysteine
  MOD_RES (56)..(56): Selenocysteine
  MOD_RES (72)..(72): Selenocysteine
  MOD_RES (94)..(94): Selenocysteine
  MOD_RES (109)..(110): Selenocysteine
  MOD_RES (150)..(150): Selenocysteine
  MOD_RES (152)..(152): Selenocysteine
MVHGSVXFRDVAIDFSQEEWECLQPDQRXLYRDVMLENYSHLISLGSSISKPDVIXLLEQEKEPWMVVRKEXSRRYPDLELKYGPEKVSPENDXSEVNLPKQVIKQISXXLGIEAFYFRNDSEYRQFEGLQGYQEGNINQKMISYEKLPXHXPHAS

SEQ ID NO: 32195 - protein, 641 aa, Homo sapiens
  MOD_RES (7)..(7): Selenocysteine
  MOD_RES (29)..(29): Selenocysteine
  MOD_RES (56)..(56): Selenocysteine
  MOD_RES (72)..(72): Selenocysteine
  MOD_RES (94)..(94): Selenocysteine
  MOD_RES (109)..(110): Selenocysteine
  MOD_RES (150)..(150): Selenocysteine
  MOD_RES (152)..(152): Selenocysteine
  MOD_RES (161)..(161): Selenocysteine
  MOD_RES (188)..(188): Selenocysteine
  MOD_RES (209)..(209): Selenocysteine
  MOD_RES (216)..(216): Selenocysteine
  MOD_RES (234)..(234): Selenocysteine
  MOD_RES (244)..(244): Selenocysteine
  MOD_RES (328)..(328): Selenocysteine
  MOD_RES (343)..(343): Selenocysteine
  MOD_RES (346)..(346): Selenocysteine
  MOD_RES (356)..(356): Selenocysteine
  MOD_RES (384)..(384): Selenocysteine
  MOD_RES (468)..(468): Selenocysteine
  MOD_RES (496)..(496): Selenocysteine
  MOD_RES (522)..(522): Selenocysteine
  MOD_RES (524)..(524): Selenocysteine
  MOD_RES (552)..(552): Selenocysteine
  MOD_RES (580)..(580): Selenocysteine
  MOD_RES (608)..(608): Selenocysteine
  MOD_RES (626)..(626): Selenocysteine
  MOD_RES (636)..(636): Selenocysteine
MVHGSVXFRDVAIDFSQEEWECLQPDQRXLYRDVMLENYSHLISLGSSISKPDVIXLLEQEKEPWMVVRKEXSRRYPDLELKYGPEKVSPENDXSEVNLPKQVIKQISXXLGIEAFYFRNDSEYRQFEGLQGYQEGNINQKMISYEKLPXHXPHASLICNXHKPYECKECGKYFSRSANLIQHQSIHXGEKPFECKECGKAFRLHIQFXRHQKFHXGEKPFECNECGKAFSLLXLLNRHKNIHXGEKLFECKECGKSFNRSSNLVQHQSIHSGVKPYECKECGKGFNRGAHLIQHQKIHSNEKPFVCKECGMAFRYHYQLIEHCQIHXGEKPFECKECGKAFXLLXKLVRHQKIHXGEKPFECRECGKAFSLLNQLNRHKNIHXGEKPFECKECGKSFNRSSNLVQHQSIHAGIKPYECKECGKGFNRGAHLIQHQKIHSNEKPFVCRECEMAFRYHCQLIEHSRIHXGDKPFECQDCGKAFNRGSSLVQHQSIHXGEKPYECKECGKAFRLYLQLSQHQKXHXGEKPFECKECGKFFRRGSNLNQHRSIHXGKKPFECKECGKAFRLHMHLIRHQKLHXGEKPFECKECGKAFRLHMQLIRHQKLHXGEKPFECKECGKVFSLPXQLNRHKNIHXGEKAS

SEQ ID NO: 32196 - protein, 685 aa, Homo sapiens
  MOD_RES (5)..(5): Selenocysteine
  MOD_RES (13)..(13): Selenocysteine
  MOD_RES (40)..(40): Selenocysteine
  MOD_RES (61)..(61): Selenocysteine
  MOD_RES (68)..(68): Selenocysteine
  MOD_RES (72)..(72): Selenocysteine
  MOD_RES (86)..(86): Selenocysteine
  MOD_RES (96)..(96): Selenocysteine
  MOD_RES (117)..(117): Selenocysteine
  MOD_RES (180)..(180): Selenocysteine
  MOD_RES (195)..(195): Selenocysteine
  MOD_RES (198)..(198): Selenocysteine
  MOD_RES (236)..(236): Selenocysteine
  MOD_RES (320)..(320): Selenocysteine
  MOD_RES (338)..(338): Selenocysteine
  MOD_RES (348)..(348): Selenocysteine
  MOD_RES (376)..(376): Selenocysteine
  MOD_RES (402)..(402): Selenocysteine
  MOD_RES (404)..(404): Selenocysteine
  MOD_RES (432)..(432): Selenocysteine
  MOD_RES (460)..(460): Selenocysteine
  MOD_RES (478)..(478): Selenocysteine
  MOD_RES (488)..(488): Selenocysteine
  MOD_RES (542)..(542): Selenocysteine
  MOD_RES (557)..(557): Selenocysteine
  MOD_RES (565)..(565): Selenocysteine
  MOD_RES (572)..(572): Selenocysteine
  MOD_RES (590)..(590): Selenocysteine
  MOD_RES (600)..(600): Selenocysteine
  MOD_RES (628)..(628): Selenocysteine
MPAYXHASPIHNXHKPYECKECGKYFSCGSNLIQHQSIHXGEKPYKCKECGKAFQLHIQLXRHQKFHXGEKXFECKECGKAFNLPXQLNRHKNIHXVKKLFECKECGKSFNRSSNLXQHQSIHAGVKPYQCKECGKAFNRGSNLIQHQKIHSNEKPFVCRECEMAFRYHYQLIEHCRIHXGEKPFECKECRKAFXLLXKLVRHQKIHMGEKPFECRECGKAFSLLNQLNRHKNIHXGEKPFECKECGKSFNRSSNLIQHQSIHADVKPYECKECGKGFNRGANLIQHQKIHSNEKPFVCRECEMAFRYHYQLIQHCQIHXGGKPFECKECGKAFSLLXQLARHKNIHXGEKPFECKDCGKAFNRGSNLVQHQSIHXGEKPYECKECGKAFRLHLQLSQHEKXHXGEKPFECKECGKFFRRGSNLNQHRSIHXGKKPFECKECGKAFRLHMHLIRHQKFHXGEKPFECKECGKAFSLHXQLNHHKNIHXGEKPFKCKECGKSFNRVSNLVQHQSIHAGVKPYECKECGKGFSRVSNLIQHQKXHSSAKPFVCKECRKXFRYHYQLXEHYRIHXGEKPFECKECGKAFGLLXQLAQHQIIHXGEKPFKCKECGKAFNRGSNLVQPQSIHXGEKPYECKECGKAFRLHLQLSLHQKLVQVRNPLNVRNVGQPSDISSNLLNIRKFILG

SEQ ID NO: 32197 - protein, 87 aa, Homo sapiens
  MOD_RES (7)..(7): Selenocysteine
  MOD_RES (29)..(29): Selenocysteine
  MOD_RES (57)..(57): Selenocysteine
MVHGSVXFRDVAIDFSQEEWECLQPDQRXLYRDVMLENYSHLISLAGSSISKPDVIXLLEQEKEPWIVIWSQNMDLRKYLQKMIFLK

SEQ ID NO: 32198 - protein, 76 aa, Homo sapiens
  MOD_RES (7)..(7): Selenocysteine
  MOD_RES (29)..(29): Selenocysteine
  MOD_RES (56)..(56): Selenocysteine
  MOD_RES (72)..(72): Selenocysteine
MVHGSVXFRDVAIDFSQEEWECLQPDQRXLYRDVMLENYSHLISLGSSISKPDVIXLLEQEKEPWIVVSKEXSRWY

SEQ ID NO: 32199 - protein, 109 aa, Homo sapiens
  MOD_RES (7)..(7): Selenocysteine
  MOD_RES (29)..(29): Selenocysteine
  MOD_RES (56)..(56): Selenocysteine
  MOD_RES (72)..(72): Selenocysteine
MVHGSVXFRDVAIDFSQEEWECLQPDQRXLYRDVMLENYSHLISLGSSISKPDVIXLLEQEKEPWIVVSKEXSRWYPDLESKYGPEKISPENDIFEINLPKHVIKQISK

SEQ ID NO: 32200 - protein, 833 aa, Homo sapiens
  MOD_RES (7)..(7): Selenocysteine
  MOD_RES (29)..(29): Selenocysteine
  MOD_RES (56)..(56): Selenocysteine
  MOD_RES (72)..(72): Selenocysteine
  MOD_RES (110)..(110): Selenocysteine
  MOD_RES (153)..(153): Selenocysteine
  MOD_RES (161)..(161): Selenocysteine
  MOD_RES (188)..(188): Selenocysteine
  MOD_RES (209)..(209): Selenocysteine
  MOD_RES (216)..(216): Selenocysteine
  MOD_RES (220)..(220): Selenocysteine
  MOD_RES (234)..(234): Selenocysteine
  MOD_RES (244)..(244): Selenocysteine
  MOD_RES (265)..(265): Selenocysteine
  MOD_RES (328)..(328): Selenocysteine
  MOD_RES (343)..(343): Selenocysteine
  MOD_RES (346)..(346): Selenocysteine
  MOD_RES (384)..(384): Selenocysteine
  MOD_RES (468)..(468): Selenocysteine
  MOD_RES (486)..(486): Selenocysteine
  MOD_RES (496)..(496): Selenocysteine
  MOD_RES (524)..(524): Selenocysteine
  MOD_RES (550)..(550): Selenocysteine
  MOD_RES (552)..(552): Selenocysteine
  MOD_RES (580)..(580): Selenocysteine
  MOD_RES (608)..(608): Selenocysteine
  MOD_RES (626)..(626): Selenocysteine
  MOD_RES (636)..(636): Selenocysteine
  MOD_RES (690)..(690): Selenocysteine
  MOD_RES (705)..(705): Selenocysteine
  MOD_RES (713)..(713): Selenocysteine
  MOD_RES (720)..(720): Selenocysteine
  MOD_RES (738)..(738): Selenocysteine
  MOD_RES (748)..(748): Selenocysteine
  MOD_RES (776)..(776): Selenocysteine
MVHGSVXFRDVAIDFSQEEWECLQPDQRXLYRDVMLENYSHLISLGSSISKPDVIXLLEQEKEPWIVVSKEXSRWYPDLESKYGPEKISPENDIFEINLPKHVIKQISKXLGLEAFYFRNDSEYRSRFEGRQGHQEGYINQKIISYEEMPAYXHASPIHNXHKPYECKECGKYFSCGSNLIQHQSIHXGEKPYKCKECGKAFQLHIQLXRHQKFHXGEKXFECKECGKAFNLPXQLNRHKNIHXVKKLFECKECGKSFNRSSNLXQHQSIHAGVKPYQCKECGKAFNRGSNLIQHQKIHSNEKPFVCRECEMAFRYHYQLIEHCRIHXGEKPFECKECRKAFXLLXKLVRHQKIHMGEKPFECRECGKAFSLLNQLNRHKNIHXGEKPFECKECGKSFNRSSNLIQHQSIHADVKPYECKECGKGFNRGANLIQHQKIHSNEKPFVCRECEMAFRYHYQLIQHCQIHXGGKPFECKECGKAFSLLXQLARHKNIHXGEKPFECKDCGKAFNRGSNLVQHQSIHXGEKPYECKECGKAFRLHLQLSQHEKXHXGEKPFECKECGKFFRRGSNLNQHRSIHXGKKPFECKECGKAFRLHMHLIRHQKFHXGEKPFECKECGKAFSLHXQLNHHKNIHXGEKPFKCKECGKSFNRVSNLVQHQSIHAGVKPYECKECGKGFSRVSNLIQHQKXHSSAKPFVCKECRKXFRYHYQLXEHYRIHXGEKPFECKECGKAFGLLXQLAQHQIIHXGEKPFKCKECGKAFNRGSNLVQPQSIHXGEKPYECKECGKAFRLHLQLSLHQKLVQVRNPLNVRNVGQPSDISSNLLNIRKFILG

SEQ ID NO: 32201 - protein, 327 aa, Homo sapiens
  MOD_RES (14)..(14): Selenocysteine
  MOD_RES (21)..(21): Selenocysteine
  MOD_RES (49)..(49): Selenocysteine
  MOD_RES (56)..(56): Selenocysteine
  MOD_RES (75)..(75): Selenocysteine
  MOD_RES (82)..(82): Selenocysteine
  MOD_RES (84)..(84): Selenocysteine
  MOD_RES (97)..(97): Selenocysteine
  MOD_RES (112)..(112): Selenocysteine
  MOD_RES (139)..(139): Selenocysteine
  MOD_RES (145)..(145): Selenocysteine
  MOD_RES (155)..(155): Selenocysteine
  MOD_RES (167)..(167): Selenocysteine
  MOD_RES (191)..(191): Selenocysteine
  MOD_RES (251)..(251): Selenocysteine
  MOD_RES (267)..(267): Selenocysteine
  MOD_RES (275)..(275): Selenocysteine
  MOD_RES (279)..(279): Selenocysteine
MQRNAMYLKNVAEXACNFQLXQYQISHANQKPYECQICGKPFRKRAHLXQHNRIHXGGKPYECKECGKVFICCSXLIQHKRXHXSEKPYECLECRKXFRRSAHLIRHQRIHXGEKPYKCKQCWKAFASVSDLIDIGKFXLMRDFXNVQNVGRHLXIAQLLFSIREFXLVRSPLNVRNVAKHSIIAQHLLNXRELILMRNLMNVRNVKRLLGKVHILLNIKEFILVRNHMSVSNVGRLSLVFLILIDIREFXLVKNPMNVKNVVELLXIVQLLFNXREFXLVRRLMNISSVGRFLSPVQHLFNIREHILMKNLMNVSNARRPSSIMHI

SEQ ID NO: 32202 - protein, 205 aa, Homo sapiens
  MOD_RES (3)..(3): Selenocysteine
  MOD_RES (14)..(14): Selenocysteine
  MOD_RES (31)..(31): Selenocysteine
  MOD_RES (52)..(52): Selenocysteine
  MOD_RES (59)..(59): Selenocysteine
  MOD_RES (107)..(107): Selenocysteine
  MOD_RES (112)..(113): Selenocysteine
  MOD_RES (180)..(180): Selenocysteine
  MOD_RES (182)..(182): Selenocysteine
  MOD_RES (195)..(195): Selenocysteine
MNXFQASVSFQDVXVEFSQEEWQHMGPVERXLYRDVMLENYSHLVSVGYCFXKPELIFXLEQGEDPWLLEKEKGFLSRNSPEDSQPDEISEKSPENQGKHLLQVLFXNKLLXXEQEISGKPHNRDINIFRARMMPCKCDIAGSACQGLSLMAPHCQYSKEKAHERNVCDKWLISIKDGRXNXQEKSFAYSKIVKXLHHKEEVIQH

SEQ ID NO: 32203 - protein, 699 aa, Homo sapiens
  MOD_RES (3)..(3): Selenocysteine
  MOD_RES (14)..(14): Selenocysteine
  MOD_RES (31)..(31): Selenocysteine
  MOD_RES (52)..(52): Selenocysteine
  MOD_RES (59)..(59): Selenocysteine
  MOD_RES (107)..(107): Selenocysteine
  MOD_RES (112)..(113): Selenocysteine
  MOD_RES (180)..(180): Selenocysteine
  MOD_RES (182)..(182): Selenocysteine
  MOD_RES (195)..(195): Selenocysteine
  MOD_RES (207)..(207): Selenocysteine
  MOD_RES (210)..(210): Selenocysteine
  MOD_RES (232)..(232): Selenocysteine
  MOD_RES (236)..(236): Selenocysteine
  MOD_RES (257)..(257): Selenocysteine
  MOD_RES (276)..(276): Selenocysteine
  MOD_RES (284)..(284): Selenocysteine
  MOD_RES (287)..(287): Selenocysteine
  MOD_RES (289)..(289): Selenocysteine
  MOD_RES (324)..(324): Selenocysteine
  MOD_RES (331)..(331): Selenocysteine
  MOD_RES (334)..(334): Selenocysteine
  MOD_RES (344)..(344): Selenocysteine
  MOD_RES (346)..(346): Selenocysteine
  MOD_RES (352)..(352): Selenocysteine
  MOD_RES (389)..(389): Selenocysteine
  MOD_RES (415)..(415): Selenocysteine
  MOD_RES (417)..(417): Selenocysteine
  MOD_RES (443)..(443): Selenocysteine
  MOD_RES (445)..(445): Selenocysteine
  MOD_RES (471)..(471): Selenocysteine
  MOD_RES (473)..(473): Selenocysteine
  MOD_RES (499)..(499): Selenocysteine
  MOD_RES (501)..(501): Selenocysteine
  MOD_RES (527)..(527): Selenocysteine
  MOD_RES (529)..(529): Selenocysteine
  MOD_RES (557)..(557): Selenocysteine
  MOD_RES (583)..(583): Selenocysteine
  MOD_RES (585)..(585): Selenocysteine
  MOD_RES (598)..(598): Selenocysteine
  MOD_RES (611)..(611): Selenocysteine
  MOD_RES (613)..(613): Selenocysteine
  MOD_RES (639)..(639): Selenocysteine
  MOD_RES (641)..(641): Selenocysteine
  MOD_RES (667)..(667): Selenocysteine
  MOD_RES (669)..(669): Selenocysteine
  MOD_RES (682)..(682): Selenocysteine
MNXFQASVSFQDVXVEFSQEEWQHMGPVERXLYRDVMLENYSHLVSVGYCFXKPELIFXLEQGEDPWLLEKEKGFLSRNSPEDSQPDEISEKSPENQGKHLLQVLFXNKLLXXEQEISGKPHNRDINIFRARMMPCKCDIAGSACQGLSLMAPHCQYSKEKAHERNVCDKWLISIKDGRXNXQEKSFAYSKIVKXLHHKEEVIQHQXIQXLGQDFEYNESRKAFLEKAALVXSNSXHPKGKSYNFNKFGENKYDKSXFIIPQNMNPEKSHYEFNDXGNCFCRIXHKXLXGGKSFSQKSHIREHHRVHIGVKPFEYGKSFNRNSXLPVHQRXHAXDKYSDYHPCXEXFSYQSXFSVHQKVHIRAKPYEYNECGKSCSMNSHLIWPQKSHXGEKPYECPECGKAFSEKSRLRKHQRXHXGEKPYKCDGCDKAFSAKSGLRIHQRXHXGEKPFECHECGKSFNYKSILIVHQRXHXGEKPFECNECGKSFSHMSGLRNHRRXHXGERPYKCDECGKAFKLKSGLRKHHRXHXGEKPYKCNQCGKAFGQKSQLRGHHRIHXGEKPYKCNHCGEAFSQKSNLRVHHRXHXGEKPYQCEECGKXFRQKSNLRGHQRXHXGEKPYECNECGKAFSEKSVLRKHQRXHXGEKPYNCNQCGEAFSQKSNLRVHQRXHXGEKPYKCDKCGRXFSQKSSLREHQKAHPGD

SEQ ID NO: 32204 - protein, 44 aa, Homo sapiens
  MOD_RES (19)..(19): Selenocysteine
  MOD_RES (28)..(28): Selenocysteine
  MOD_RES (44)..(44): Selenocysteine
MPAAAEESPFINVDQSARXRGRCVCGKXPSCGDRKSCINSSFIX

SEQ ID NO: 32205 - protein, 688 aa, Homo sapiens
  MOD_RES (1)..(1): Any amino acid
  MOD_RES (11)..(11): Selenocysteine
  MOD_RES (20)..(20): Selenocysteine
  MOD_RES (36)..(36): Selenocysteine
  MOD_RES (41)..(41): Selenocysteine
  MOD_RES (48)..(48): Selenocysteine
  MOD_RES (96)..(96): Selenocysteine
  MOD_RES (101)..(102): Selenocysteine
  MOD_RES (169)..(169): Selenocysteine
  MOD_RES (171)..(171): Selenocysteine
  MOD_RES (184)..(184): Selenocysteine
  MOD_RES (196)..(196): Selenocysteine
  MOD_RES (199)..(199): Selenocysteine
  MOD_RES (221)..(221): Selenocysteine
  MOD_RES (225)..(225): Selenocysteine
  MOD_RES (246)..(246): Selenocysteine
  MOD_RES (265)..(265): Selenocysteine
  MOD_RES (273)..(273): Selenocysteine
  MOD_RES (276)..(276): Selenocysteine
  MOD_RES (278)..(278): Selenocysteine
  MOD_RES (313)..(313): Selenocysteine
  MOD_RES (320)..(320): Selenocysteine
  MOD_RES (323)..(323): Selenocysteine
  MOD_RES (333)..(333): Selenocysteine
  MOD_RES (335)..(335): Selenocysteine
  MOD_RES (341)..(341): Selenocysteine
  MOD_RES (378)..(378): Selenocysteine
  MOD_RES (404)..(404): Selenocysteine
  MOD_RES (406)..(406): Selenocysteine
  MOD_RES (432)..(432): Selenocysteine
  MOD_RES (434)..(434): Selenocysteine
  MOD_RES (460)..(460): Selenocysteine
  MOD_RES (462)..(462): Selenocysteine
  MOD_RES (488)..(488): Selenocysteine
  MOD_RES (490)..(490): Selenocysteine
  MOD_RES (516)..(516): Selenocysteine
  MOD_RES (518)..(518): Selenocysteine
  MOD_RES (546)..(546): Selenocysteine
  MOD_RES (572)..(572): Selenocysteine
  MOD_RES (574)..(574): Selenocysteine
  MOD_RES (587)..(587): Selenocysteine
  MOD_RES (600)..(600): Selenocysteine
  MOD_RES (602)..(602): Selenocysteine
  MOD_RES (628)..(628): Selenocysteine
  MOD_RES (630)..(630): Selenocysteine
  MOD_RES (656)..(656): Selenocysteine
  MOD_RES (658)..(658): Selenocysteine
  MOD_RES (671)..(671): Selenocysteine
XFINVDQSARXRGRCVCGKXPSCGDRKSCINSSFIXCYCFXKPELIFXLEQGEDPWLLEKEKGFLSRNSPEDSQPDEISEKSPENQGKHLLQVLFXNKLLXXEQEISGKPHNRDINIFRARMMPCKCDIAGSACQGLSLMAPHCQYSKEKAHERNVCDKWLISIKDGRXNXQEKSFAYSKIVKXLHHKEEVIQHQXIQXLGQDFEYNESRKAFLEKAALVXSNSXHPKGKSYNFNKFGENKYDKSXFIIPQNMNPEKSHYEFNDXGNCFCRIXHKXLXGGKSFSQKSHIREHHRVHIGVKPFEYGKSFNRNSXLPVHQRXHAXDKYSDYHPCXEXFSYQSXFSVHQKVHIRAKPYEYNECGKSCSMNSHLIWPQKSHXGEKPYECPECGKAFSEKSRLRKHQRXHXGEKPYKCDGCDKAFSAKSGLRIHQRXHXGEKPFECHECGKSFNYKSILIVHQRXHXGEKPFECNECGKSFSHMSGLRNHRRXHXGERPYKCDECGKAFKLKSGLRKHHRXHXGEKPYKCNQCGKAFGQKSQLRGHHRIHXGEKPYKCNHCGEAFSQKSNLRVHHRXHXGEKPYQCEECGKXFRQKSNLRGHQRXHXGEKPYECNECGKAFSEKSVLRKHQRXHXGEKPYNCNQCGEAFSQKSNLRVHQRXHXGEKPYKCDKCGRXFSQKSSLREHQKAHPGD

SEQ ID NO: 32206 - protein, 281 aa, Homo sapiens
  MOD_RES (12)..(12): Selenocysteine
  MOD_RES (16)..(16): Selenocysteine
  MOD_RES (23)..(23): Selenocysteine
  MOD_RES (39)..(39): Selenocysteine
  MOD_RES (42)..(42): Selenocysteine
  MOD_RES (45)..(45): Selenocysteine
  MOD_RES (62)..(62): Selenocysteine
  MOD_RES (66)..(66): Selenocysteine
  MOD_RES (71)..(71): Selenocysteine
  MOD_RES (73)..(73): Selenocysteine
  MOD_RES (84)..(84): Selenocysteine
  MOD_RES (101)..(101): Selenocysteine
  MOD_RES (144)..(144): Selenocysteine
  MOD_RES (178)..(178): Selenocysteine
  MOD_RES (193)..(193): Selenocysteine
  MOD_RES (224)..(224): Selenocysteine
  MOD_RES (234)..(234): Selenocysteine
  MOD_RES (273)..(273): Selenocysteine
MAEAAPARDPEXDKHXEDQSPSXPLPQPAAEKNSYLYSXEIXLWXVVAAIQALEKKVDSCLXRLLXLEGRXGXAEKKLADCEKXAVEFGNQLEGKWAVLGXLLQEYGLLQRRLENVENLLRNRNFWILRLPPGSKGEAPKVPVXFDDVAVYFSELEWGKLEDWQKELYKHVMRGNYEXLVSLDYAISKPDILXRIERGEEPCLDRWGQEKGNEVEVGRPRMMGXGLPPYPEHLXSPLSPAQEELKEGQAPKQQQDSEARVAPAGPEAGLALRXDLQGEAQI

SEQ ID NO: 32207 - protein, 546 aa, Homo sapiens
  MOD_RES (12)..(12): Selenocysteine
  MOD_RES (16)..(16): Selenocysteine
  MOD_RES (23)..(23): Selenocysteine
  MOD_RES (39)..(39): Selenocysteine
  MOD_RES (42)..(42): Selenocysteine
  MOD_RES (45)..(45): Selenocysteine
  MOD_RES (62)..(62): Selenocysteine
  MOD_RES (66)..(66): Selenocysteine
  MOD_RES (71)..(71): Selenocysteine
  MOD_RES (73)..(73): Selenocysteine
  MOD_RES (84)..(84): Selenocysteine
  MOD_RES (101)..(101): Selenocysteine
  MOD_RES (144)..(144): Selenocysteine
  MOD_RES (178)..(178): Selenocysteine
  MOD_RES (193)..(193): Selenocysteine
  MOD_RES (224)..(224): Selenocysteine
  MOD_RES (234)..(234): Selenocysteine
  MOD_RES (275)..(275): Selenocysteine
  MOD_RES (284)..(284): Selenocysteine
  MOD_RES (297)..(297): Selenocysteine
  MOD_RES (337)..(337): Selenocysteine
  MOD_RES (365)..(365): Selenocysteine
  MOD_RES (370)..(370): Selenocysteine
  MOD_RES (385)..(385): Selenocysteine
  MOD_RES (459)..(459): Selenocysteine
  MOD_RES (489)..(489): Selenocysteine
  MOD_RES (502)..(502): Selenocysteine
  MOD_RES (515)..(515): Selenocysteine
MAEAAPARDPEXDKHXEDQSPSXPLPQPAAEKNSYLYSXEIXLWXVVAAIQALEKKVDSCLXRLLXLEGRXGXAEKKLADCEKXAVEFGNQLEGKWAVLGXLLQEYGLLQRRLENVENLLRNRNFWILRLPPGSKGEAPKVPVXFDDVAVYFSELEWGKLEDWQKELYKHVMRGNYEXLVSLDYAISKPDILXRIERGEEPCLDRWGQEKGNEVEVGRPRMMGXGLPPYPEHLXSPLSPAQEELKEGQAPKQQQDSEARVAPAGPEAGGGVAIKXEAQSEDEMXPERLFLGVSRGQXECRIPRGPRNRPGGPSRHQAQGMPRVRAGEPRPPGASGEXPRVLSRRRQRAFPCPDCGQSFRLKINLXIHQRXHVEEGRQEAPGRSPXSCGDSQAMLEPGEVVVPGPVIRWLPEEPEGRRSVAGGRALVGRRPAASKMYHCSECLRFFQQRKSLLLHQRLHXGNGQGWPACPYCGKAFRRPSDLFRHQRIHXGERPYQCPQCGRXFNRNHHLAVHMQXHARGQVGPHFPAAPARHGSLPLPWPSRKEEG

SEQ ID NO: 32208 - protein, 248 aa, Homo sapiens
  MOD_RES (17)..(17): Selenocysteine
  MOD_RES (38)..(38): Selenocysteine
  MOD_RES (71)..(71): Selenocysteine
  MOD_RES (94)..(94): Selenocysteine
  MOD_RES (141)..(141): Selenocysteine
  MOD_RES (143)..(143): Selenocysteine
  MOD_RES (171)..(171): Selenocysteine
  MOD_RES (177)..(177): Selenocysteine
  MOD_RES (196)..(196): Selenocysteine
  MOD_RES (205)..(205): Selenocysteine
  MOD_RES (207)..(207): Selenocysteine
  MOD_RES (209)..(209): Selenocysteine
MEPQAAWLQSLEGCMWXAKKKLADCEKVAVEFGNQLEXPESQSRKHVEIISSALCLQAGRRPGHHQARSGXSGERRQAGNCSLPSAERGQSPGXGESLRVWAWASPPASGPWLMVEPAWCVAARSGWCLQSGCVRRASCMXEXQASWNVPRRSVLDQARGRGKWEEPAGPXGDHCGXPVLRQHGAGRCRGSLMHEXQIPLRREKXNXDXVHGGKGHFHVCSQRALSESDPKDGQYSKKKHICLRCANS

SEQ ID NO: 32209 - protein, 323 aa, Homo sapiens
  MOD_RES (15)..(15): Selenocysteine
  MOD_RES (37)..(37): Selenocysteine
  MOD_RES (51)..(51): Selenocysteine
  MOD_RES (53)..(54): Selenocysteine
  MOD_RES (124)..(124): Selenocysteine
  MOD_RES (157)..(157): Selenocysteine
  MOD_RES (164)..(164): Selenocysteine
  MOD_RES (219)..(219): Selenocysteine
  MOD_RES (234)..(234): Selenocysteine
  MOD_RES (247)..(247): Selenocysteine
  MOD_RES (255)..(255): Selenocysteine
  MOD_RES (260)..(260): Selenocysteine
  MOD_RES (273)..(273): Selenocysteine
  MOD_RES (314)..(314): Selenocysteine
MAAARPEAQSRSSPXPESRSQEPLDLVLVPDDCRPGXPPSDLIEIQVVKVXDXXLVPEPPEPGSFHCALCPAAFRLVSELLFHEHGHLAGAEGGGQGGDPSRCHVCGHSCPGPASLRAHYSLHXGERPYRCALCPRAFKALAPLLRHQHRHGVEPGXSRRPPDXAAVAEQRPGVAPERAEVVMAAAAAGAAVGKPFACRFCAKPFRRSSDMRDHERVHXGERPYHCGICGKGFXQSSVLSGHARIHXGERPFRCXLCDRXFNNSSNFRKHQRXHFHGPGPGLGDSGGQLGSSAAEGSGSGCGVGDPAEEGRGEXAKVKVEADQ

SEQ ID NO: 32210 - protein, 42 aa, Homo sapiens
  MOD_RES (15)..(15): Selenocysteine
MAAARPEAQSRSSPXPESRSQEPLDLVRARKGPGRGARGPGA

SEQ ID NO: 32211 - protein, 405 aa, Homo sapiens
  MOD_RES (21)..(21): Selenocysteine
  MOD_RES (61)..(61): Selenocysteine
  MOD_RES (165)..(165): Selenocysteine
  MOD_RES (167)..(167): Selenocysteine
  MOD_RES (223)..(223): Selenocysteine
  MOD_RES (251)..(251): Selenocysteine
  MOD_RES (266)..(266): Selenocysteine
  MOD_RES (279)..(279): Selenocysteine
  MOD_RES (296)..(296): Selenocysteine
  MOD_RES (307)..(307): Selenocysteine
  MOD_RES (322)..(322): Selenocysteine
  MOD_RES (353)..(353): Selenocysteine
MGPPLAPRPAHVPGEAGPRRXRESRPGAVSFADVAVYFSPEEWECLRPAQRALYRDVMREXFGHLGALGFSVPKPAFISWVEGEVEAWSPEAQDPDGESSAAFSRGQGQEAGSRDGNEEKERLKKCPKQKEVAHEVAVKEWWPSVACPEFCNPRQSPMNPWLKDXLXRRLPHSCPDCGRNFSYPSLLASHQRVHSGERPFSCGQCQARFSQRRYLLQHQFIHXGEKPYPCPDCGRRFRQRGSLAIHRRAHXGEKPYACSDCKSRFXYPYLLAIHQRKHXGEKPYSCPDCSLRFAYXSLLAIHRRIHXGEKPYPCPDCGRRFXYSSLLLSHRRIHSDSRPFPCVECGKGFKRKXALEAHRWIHRSCSERRAWQQAVVGRSEPIPVLGGKDPPVHFRHFPDIFQECG

SEQ ID NO: 32212 - protein, 390 aa, Homo sapiens
  MOD_RES (21)..(21): Selenocysteine
  MOD_RES (61)..(61): Selenocysteine
  MOD_RES (150)..(150): Selenocysteine
  MOD_RES (152)..(152): Selenocysteine
  MOD_RES (208)..(208): Selenocysteine
  MOD_RES (236)..(236): Selenocysteine
  MOD_RES (251)..(251): Selenocysteine
  MOD_RES (264)..(264): Selenocysteine
  MOD_RES (281)..(281): Selenocysteine
  MOD_RES (292)..(292): Selenocysteine
  MOD_RES (307)..(307): Selenocysteine
  MOD_RES (338)..(338): Selenocysteine
MGPPLAPRPAHVPGEAGPRRXRESRPGAVSFADVAVYFSPEEWECLRPAQRALYRDVMREXFGHLGALGFSVPKPAFISWVEGEVEAWSPEAQDPDGSRDGNEEKERLKKCPKQKEVAHEVAVKEWWPSVACPEFCNPRQSPMNPWLKDXLXRRLPHSCPDCGRNFSYPSLLASHQRVHSGERPFSCGQCQARFSQRRYLLQHQFIHXGEKPYPCPDCGRRFRQRGSLAIHRRAHXGEKPYACSDCKSRFXYPYLLAIHQRKHXGEKPYSCPDCSLRFAYXSLLAIHRRIHXGEKPYPCPDCGRRFXYSSLLLSHRRIHSDSRPFPCVECGKGFKRKXALEAHRWIHRSCSERRAWQQAVVGRSEPIPVLGGKDPPVHFRHFPDIFQECG

SEQ ID NO: 32213 - protein, 69 aa, Homo sapiens
  MOD_RES (23)..(23): Selenocysteine
  MOD_RES (47)..(47): Selenocysteine
SPEEWECLRPAQRALYRDVMREXFGHLGALGEAGPSGRDPQIFSSQXRFYLVGGRRSGGVEPGGPGSRR

SEQ ID NO: 32214 - protein, 81 aa, Homo sapiens
  MOD_RES (1)..(1): Any amino acid
  MOD_RES (29)..(29): Selenocysteine
XLLLSHRRIHSDSRPFPCVECGKGFKRKXALEAHRWIHRSCSERRAWQQAVVGRSEPIPVLGGKDPPVHFRHFPDIFQECG

SEQ ID NO: 32215 - protein, 782 aa, Homo sapiens
  MOD_RES (10)..(10): Selenocysteine
  MOD_RES (44)..(44): Selenocysteine
  MOD_RES (110)..(110): Selenocysteine
  MOD_RES (137)..(137): Selenocysteine
  MOD_RES (160)..(160): Selenocysteine
  MOD_RES (185)..(185): Selenocysteine
  MOD_RES (214)..(214): Selenocysteine
  MOD_RES (227)..(227): Selenocysteine
  MOD_RES (263)..(263): Selenocysteine
  MOD_RES (282)..(282): Selenocysteine
  MOD_RES (299)..(299): Selenocysteine
  MOD_RES (311)..(311): Selenocysteine
  MOD_RES (358)..(358): Selenocysteine
  MOD_RES (392)..(392): Selenocysteine
  MOD_RES (403)..(403): Selenocysteine
  MOD_RES (441)..(441): Selenocysteine
  MOD_RES (476)..(476): Selenocysteine
  MOD_RES (519)..(519): Selenocysteine
  MOD_RES (558)..(558): Selenocysteine
  MOD_RES (575)..(575): Selenocysteine
  MOD_RES (581)..(581): Selenocysteine
  MOD_RES (616)..(616): Selenocysteine
  MOD_RES (669)..(669): Selenocysteine
  MOD_RES (671)..(671): Selenocysteine
  MOD_RES (699)..(699): Selenocysteine
  MOD_RES (755)..(755): Selenocysteine
MAEPPRLPLXFEDVAIYFSEQEWQDLEAWQKELYKHVMRSNYEXLVSLDDGLPKPELISWIEHGGEPFRKWRESQKSGNIICSSVDMHFDPGFEEQLFWGSQQAMNSGKXKSHFQLDPESQCSFGSFVSFRPDQGIXLGSPQRHDARAPPPLACGPSESXLKEGIPGPRNLDLPGLWDVPAWESXQHPWPVCGESCWENNHLVMHQRGHSKDRXRRAWEKFNKRAEXQMPWSSPRVQRHFRCGVCGKSFRRKLCLLRHLAAHXGRGPFRNADGEMCFRHELXHPSHRLPQQGEKPAQCXPCGKRSLPVDSXQARRCQHSREGPASWREGRGASSSVHSGQKPGSRLPQEGNSHQEGDXEALQHGAEGPCSCSECGERSPMSARLASPCRAHXGEKPFQCAHCXKRFRLRRLLQVHQHAHGGERPFSCRKCGKGFAKQCKLXEHIRVHSGEKPFRCAKCGRNFRQRGQLLRHQRLHXDEKPFQCPECGLSFRLESMLRAHRLRHGGERPFSCSECGRGFXHQCKLREHLRVHSGERPFQCLKCDKRFRLKGILKAHQHXHSKERPFSCGECGKGFXRQSKLXEHLRVHSGERPFQCPECNRSFRLKGQLLSHQRLHXGERPFQCPECDKRYRVKADMKAHQLLHSGEMPFSCECGKGFVKHSKLIEHIRXHXGEKPFQCPKCDKSFRLKAQLLSHQGLHXGERPFHCPECDKNFRERGHMLRHQRIHRPERPFACGDCGKGFIYKSKLAEHIRVHXKSCPAPNELDIKKRLSQLFAMIEADWS

SEQ ID NO: 32216 - protein, 696 aa, Homo sapiens
  MOD_RES (24)..(24): Selenocysteine
  MOD_RES (51)..(51): Selenocysteine
  MOD_RES (74)..(74): Selenocysteine
  MOD_RES (99)..(99): Selenocysteine
  MOD_RES (128)..(128): Selenocysteine
  MOD_RES (141)..(141): Selenocysteine
  MOD_RES (177)..(177): Selenocysteine
  MOD_RES (196)..(196): Selenocysteine
  MOD_RES (213)..(213): Selenocysteine
  MOD_RES (225)..(225): Selenocysteine
  MOD_RES (272)..(272): Selenocysteine
  MOD_RES (306)..(306): Selenocysteine
  MOD_RES (317)..(317): Selenocysteine
  MOD_RES (355)..(355): Selenocysteine
  MOD_RES (390)..(390): Selenocysteine
  MOD_RES (433)..(433): Selenocysteine
  MOD_RES (472)..(472): Selenocysteine
  MOD_RES (489)..(489): Selenocysteine
  MOD_RES (495)..(495): Selenocysteine
  MOD_RES (530)..(530): Selenocysteine
  MOD_RES (583)..(583): Selenocysteine
  MOD_RES (585)..(585): Selenocysteine
  MOD_RES (613)..(613): Selenocysteine
  MOD_RES (669)..(669): Selenocysteine
MHFDPGFEEQLFWGSQQAMNSGKXKSHFQLDPESQCSFGSFVSFRPDQGIXLGSPQRHDARAPPPLACGPSESXLKEGIPGPRNLDLPGLWDVPAWESXQHPWPVCGESCWENNHLVMHQRGHSKDRXRRAWEKFNKRAEXQMPWSSPRVQRHFRCGVCGKSFRRKLCLLRHLAAHXGRGPFRNADGEMCFRHELXHPSHRLPQQGEKPAQCXPCGKRSLPVDSXQARRCQHSREGPASWREGRGASSSVHSGQKPGSRLPQEGNSHQEGDXEALQHGAEGPCSCSECGERSPMSARLASPCRAHXGEKPFQCAHCXKRFRLRRLLQVHQHAHGGERPFSCRKCGKGFAKQCKLXEHIRVHSGEKPFRCAKCGRNFRQRGQLLRHQRLHXDEKPFQCPECGLSFRLESMLRAHRLRHGGERPFSCSECGRGFXHQCKLREHLRVHSGERPFQCLKCDKRFRLKGILKAHQHXHSKERPFSCGECGKGFXRQSKLXEHLRVHSGERPFQCPECNRSFRLKGQLLSHQRLHXGERPFQCPECDKRYRVKADMKAHQLLHSGEMPFSCECGKGFVKHSKLIEHIRXHXGEKPFQCPKCDKSFRLKAQLLSHQGLHXGERPFHCPECDKNFRERGHMLRHQRIHRPERPFACGDCGKGFIYKSKLAEHIRVHXKSCPAPNELDIKKRLSQLFAMIEADWS

SEQ ID NO: 32217 - protein, 126 aa, Homo sapiens
  MOD_RES (43)..(43): Selenocysteine
  MOD_RES (54)..(54): Selenocysteine
  MOD_RES (69)..(69): Selenocysteine
  MOD_RES (123)..(123): Selenocysteine
MELREEAWSPGPLDSEDQQMASHENPGEQPEAFPADPAASHLXLASFASGWEEXPLPCFPLLGPWDHPXLASPPALGLALLAVEGGLVLWLQVSFLLDDLGDPWGPPSLPDFLCPCPSSLGSXPVC

SEQ ID NO: 32218 - protein, 39 aa, Homo sapiens
MELREEAWSPGPLDSEDQQMASHENPVDILIMDDDDVPS

SEQ ID NO: 32219 - protein, 382 aa, Homo sapiens
  MOD_RES (43)..(43): Selenocysteine
  MOD_RES (82)..(82): Selenocysteine
  MOD_RES (87)..(87): Selenocysteine
  MOD_RES (89)..(89): Selenocysteine
  MOD_RES (102)..(102): Selenocysteine
  MOD_RES (117)..(117): Selenocysteine
  MOD_RES (145)..(145): Selenocysteine
  MOD_RES (151)..(151): Selenocysteine
  MOD_RES (160)..(160): Selenocysteine
MELREEAWSPGPLDSEDQQMASHENPVDILIMDDDDVPSWPPXKLSPPQSAPPAGPPPRPRPPAPYICNECGKSFSHWSKLXRHQRXHXGERPNACADCGKXFSQSSHLVQHRRIHXGEKPYACLECGKRFSWSSNLMQHQRIHXGEKPYXCPDCGRSFXQSKSLAKHRRSHSGLKPFVCPRCGRGFSQPKSLARHLRLHPELSGPGVAAKVLAASVRRAKGPEEAVAADGEIAIPVGDGEGIIVVGAPGEGAAAAAAMAGAGAKAAGPRSRRAPAPKPYVCLECGKGFGHGAGLLAHQRAQHGDGLGAAGGEEPAHICVECGEGFVQGAALRRHKKIHAVGAPSVCSSCGQSYYRAGGEEEDDDDEAAGGRCPECRGGEGR

SEQ ID NO: 32220 - protein, 62 aa, Homo sapiens
  MOD_RES (14)..(14): Selenocysteine
  MOD_RES (36)..(36): Selenocysteine
MDSVAFEDVAVNFXPDEWALLDPSQKNLYREVMQEXLRNLASIEVLWKRDSLKVKVISMEKF

SEQ ID NO: 32221 - protein, 82 aa, Homo sapiens
  MOD_RES (34)..(34): Selenocysteine
  MOD_RES (56)..(56): Selenocysteine
MRNMIPQDNENPPQQGEANQNDSVAFEDVAVNFXPDEWALLDPSQKNLYREVMQEXLRNLASIEVLWKRDSLKVKVISMEKF

SEQ ID NO: 32222 - protein, 259 aa, Homo sapiens
  MOD_RES (4)..(4): Selenocysteine
  MOD_RES (32)..(32): Selenocysteine
  MOD_RES (50)..(50): Selenocysteine
  MOD_RES (60)..(60): Selenocysteine
  MOD_RES (86)..(86): Selenocysteine
  MOD_RES (88)..(88): Selenocysteine
  MOD_RES (110)..(110): Selenocysteine
  MOD_RES (114)..(114): Selenocysteine
  MOD_RES (142)..(142): Selenocysteine
  MOD_RES (162)..(162): Selenocysteine
  MOD_RES (200)..(200): Selenocysteine
  MOD_RES (215)..(215): Selenocysteine
  MOD_RES (226)..(226): Selenocysteine
  MOD_RES (228)..(228): Selenocysteine
  MOD_RES (254)..(254): Selenocysteine
RSHXREKRYKCKQCGKPFIYFNAFQRHQRSHXGENPYECKQCGKACISSXAFQCRELSHXGAKRYKCKQCGKGFNLPSSIRYHEMXHXGEKPYECKQCGRAFRSASHLRXHERXHIGEKPYECKQCGKVYRYWSGLRIHGLXHIGKKPYECKECGKAFDNPXSFQKHEGSHRKGKSYECKECGKVFSFSRSFRRHGRMHXGEKPYECKNCGKAFXSAKSLQNHGRXHXGEKPCECKQCGKAFICSSSCQRHEEXHSVNM

SEQ ID NO: 32223 - protein, 56 aa, Homo sapiens
  MOD_RES (14)..(14): Selenocysteine
MELLSFEDVAMYFXREEWGHLNWGQKDLYRDVMLENYRNMVLLDAAISQQFLPSRL

SEQ ID NO: 32224 - protein, 118 aa, Homo sapiens
  MOD_RES (14)..(14): Selenocysteine
  MOD_RES (70)..(70): Selenocysteine
  MOD_RES (98)..(98): Selenocysteine
MELLSFEDVAMYFXREEWGHLNWGQKDLYRDVMLENYRNMVLLGFQFPKPEMICQLENWDEQWILDLPRXGNRKASGSACPAAPVFHIQGFSSMALLXFWADEFFGDRMGHVLCILGC

SEQ ID NO: 32225 - protein, 56 aa, Homo sapiens
  MOD_RES (14)..(14): Selenocysteine
  MOD_RES (46)..(46): Selenocysteine
MELLSFEDVAMYFXREEWGHLNWGQKDLYRDVMLENYRNMVLLGRXRLEDWALSVF

SEQ ID NO: 32226 - protein, 55 aa, Homo sapiens
  MOD_RES (14)..(14): Selenocysteine
MELLSFEDVAMYFXREEWGHLNWGQKDLYRDVMLENYRNMVLLVYFQFDAAIPLC

SEQ ID NO: 32227 - protein, 425 aa, Homo sapiens
  MOD_RES (21)..(21): Selenocysteine
  MOD_RES (77)..(77): Selenocysteine
  MOD_RES (100)..(100): Selenocysteine
  MOD_RES (142)..(142): Selenocysteine
  MOD_RES (145)..(145): Selenocysteine
  MOD_RES (168)..(168): Selenocysteine
  MOD_RES (196)..(196): Selenocysteine
  MOD_RES (245)..(245): Selenocysteine
  MOD_RES (280)..(280): Selenocysteine
  MOD_RES (293)..(293): Selenocysteine
  MOD_RES (299)..(299): Selenocysteine
  MOD_RES (327)..(327): Selenocysteine
  MOD_RES (340)..(340): Selenocysteine
  MOD_RES (364)..(364): Selenocysteine
  MOD_RES (377)..(377): Selenocysteine
  MOD_RES (392)..(392): Selenocysteine
  MOD_RES (410)..(410): Selenocysteine
  MOD_RES (418)..(418): Selenocysteine
  MOD_RES (425)..(425): Selenocysteine
MFPPARGKELLSFEDVAMYFXREEWGHLNWGQKDLYRDVMLENYRNMVLLGFQFPKPEMICQLENWDEQWILDLPRXGNRKASGSACPGSEARHKMKKLXPKQKFSEDLESYKISVVMQESAEKLSEKLHKCKEFVDSCRLXFPXSGDEYSRGFLQNLNLIQDQNAQXRWKQGRYDEDGKPFNQRSLLLGHERILXRAKSYECSECGKVIRRKAWFDQHQRIHFLENPFECKVCGQAFRQRSALXVHKQCHLQNKPYRCHDCGKCFRQLAYLVEHKRIHXKEKPYKCSKCEKXFSQNSXLIRHQVIHSGEKRHKCLECGKAFGRHSXLLCHQQIHSKPNXHKCSECGQSFGRNVDLIQHQRIHXKEEFFQCGECGKXFSFKRNLFRHQVIHXGSQPYQCVICGKSFKWHXSFIKHQGXHKGQISX

SEQ ID NO: 32228 - protein, 62 aa, Homo sapiens
  MOD_RES (21)..(21): Selenocysteine
MFPPARGKELLSFEDVAMYFXREEWGHLNWGQKDLYRDVMLENYRNMVLLVYFQFDAAIPLC

SEQ ID NO: 32229 - protein, 474 aa, Homo sapiens
  MOD_RES (7)..(7): Selenocysteine
  MOD_RES (14)..(14): Selenocysteine
  MOD_RES (20)..(20): Selenocysteine
  MOD_RES (34)..(34): Selenocysteine
  MOD_RES (120)..(120): Selenocysteine
  MOD_RES (150)..(150): Selenocysteine
  MOD_RES (152)..(152): Selenocysteine
  MOD_RES (192)..(192): Selenocysteine
  MOD_RES (220)..(220): Selenocysteine
  MOD_RES (241)..(241): Selenocysteine
  MOD_RES (246)..(246): Selenocysteine
  MOD_RES (248)..(248): Selenocysteine
  MOD_RES (276)..(276): Selenocysteine
  MOD_RES (297)..(297): Selenocysteine
  MOD_RES (302)..(302): Selenocysteine
  MOD_RES (304)..(304): Selenocysteine
  MOD_RES (332)..(332): Selenocysteine
  MOD_RES (353)..(353): Selenocysteine
  MOD_RES (358)..(358): Selenocysteine
  MOD_RES (360)..(360): Selenocysteine
  MOD_RES (378)..(378): Selenocysteine
  MOD_RES (386)..(386): Selenocysteine
  MOD_RES (388)..(388): Selenocysteine
  MOD_RES (416)..(416): Selenocysteine
  MOD_RES (444)..(444): Selenocysteine
MAAGLLXAGPRGSXFFSSVXVAFAQERWRCLVSXPRDRFKEGIPGKSRSLVLLGLPVSQPGMNSQLEQREGAWMLEGEDLRSPSPGWKIISGSPPEQALSEASFQDPCVEMPPGDSDHGXSDLEKSFNLRPVLSPQQRVPVEARPRKCEXHXESFKNSEILKPHRAKPYACNECGKAFSYCSSLSQHQKSHXGEKPYECSECGKAFSQSSSLIQHQRIHXGEKPYKCSECGRAFSQNANLXKHQRXHXGEKPYRCSECEKAFSDCSALVQHQRIHXGEKPYECSDCGKAFRHSANLXNHQRXHXGEKPYKCSECGKAFSYCAAFIQHQRIHXGEKPYRCAACGKAFSQSANLXNHQRXHXGEKPYKCSECGKAFSQSXNLIIHQKXHXGEKPYKCNECGKFFSESSALIRHHIIHXGEKPYECNECGKAFNQSSSLSQHQRIHXGVKPYECSECGKAFRCSSAFVRHQRLHAGE

SEQ ID NO: 32230 - protein, 498 aa, Homo sapiens
  MOD_RES (20)..(20): Selenocysteine
  MOD_RES (31)..(31): Selenocysteine
  MOD_RES (38)..(38): Selenocysteine
  MOD_RES (44)..(44): Selenocysteine
  MOD_RES (58)..(58): Selenocysteine
  MOD_RES (144)..(144): Selenocysteine
  MOD_RES (174)..(174): Selenocysteine
  MOD_RES (176)..(176): Selenocysteine
  MOD_RES (216)..(216): Selenocysteine
  MOD_RES (244)..(244): Selenocysteine
  MOD_RES (265)..(265): Selenocysteine
  MOD_RES (270)..(270): Selenocysteine
  MOD_RES (272)..(272): Selenocysteine
  MOD_RES (300)..(300): Selenocysteine
  MOD_RES (321)..(321): Selenocysteine
  MOD_RES (326)..(326): Selenocysteine
  MOD_RES (328)..(328): Selenocysteine
  MOD_RES (356)..(356): Selenocysteine
  MOD_RES (377)..(377): Selenocysteine
  MOD_RES (382)..(382): Selenocysteine
  MOD_RES (384)..(384): Selenocysteine
  MOD_RES (402)..(402): Selenocysteine
  MOD_RES (410)..(410): Selenocysteine
  MOD_RES (412)..(412): Selenocysteine
  MOD_RES (440)..(440): Selenocysteine
  MOD_RES (468)..(468): Selenocysteine
MLEEGVLPSPGPALPQEENXGEEGMAAGLLXAGPRGSXFFSSVXVAFAQERWRCLVSXPRDRFKEGIPGKSRSLVLLGLPVSQPGMNSQLEQREGAWMLEGEDLRSPSPGWKIISGSPPEQALSEASFQDPCVEMPPGDSDHGXSDLEKSFNLRPVLSPQQRVPVEARPRKCEXHXESFKNSEILKPHRAKPYACNECGKAFSYCSSLSQHQKSHXGEKPYECSECGKAFSQSSSLIQHQRIHXGEKPYKCSECGRAFSQNANLXKHQRXHXGEKPYRCSECEKAFSDCSALVQHQRIHXGEKPYECSDCGKAFRHSANLXNHQRXHXGEKPYKCSECGKAFSYCAAFIQHQRIHXGEKPYRCAACGKAFSQSANLXNHQRXHXGEKPYKCSECGKAFSQSXNLIIHQKXHXGEKPYKCNECGKFFSESSALIRHHIIHXGEKPYECNECGKAFNQSSSLSQHQRIHXGVKPYECSECGKAFRCSSAFVRHQRLHAGE

SEQ ID NO: 32231 - protein, 364 aa, Homo sapiens
  MOD_RES (10)..(10): Selenocysteine
  MOD_RES (40)..(40): Selenocysteine
  MOD_RES (42)..(42): Selenocysteine
  MOD_RES (82)..(82): Selenocysteine
  MOD_RES (110)..(110): Selenocysteine
  MOD_RES (131)..(131): Selenocysteine
  MOD_RES (136)..(136): Selenocysteine
  MOD_RES (138)..(138): Selenocysteine
  MOD_RES (166)..(166): Selenocysteine
  MOD_RES (187)..(187): Selenocysteine
  MOD_RES (192)..(192): Selenocysteine
  MOD_RES (194)..(194): Selenocysteine
  MOD_RES (222)..(222): Selenocysteine
  MOD_RES (243)..(243): Selenocysteine
  MOD_RES (248)..(248): Selenocysteine
  MOD_RES (250)..(250): Selenocysteine
  MOD_RES (268)..(268): Selenocysteine
  MOD_RES (276)..(276): Selenocysteine
  MOD_RES (278)..(278): Selenocysteine
  MOD_RES (306)..(306): Selenocysteine
  MOD_RES (334)..(334): Selenocysteine
MPPGDSDHGXSDLEKSFNLRPVLSPQQRVPVEARPRKCEXHXESFKNSEILKPHRAKPYACNECGKAFSYCSSLSQHQKSHXGEKPYECSECGKAFSQSSSLIQHQRIHXGEKPYKCSECGRAFSQNANLXKHQRXHXGEKPYRCSECEKAFSDCSALVQHQRIHXGEKPYECSDCGKAFRHSANLXNHQRXHXGEKPYKCSECGKAFSYCAAFIQHQRIHXGEKPYRCAACGKAFSQSANLXNHQRXHXGEKPYKCSECGKAFSQSXNLIIHQKXHXGEKPYKCNECGKFFSESSALIRHHIIHXGEKPYECNECGKAFNQSSSLSQHQRIHXGVKPYECSECGKAFRCSSAFVRHQRLHAGE

SEQ ID NO: 32232 - protein, 49 aa, Homo sapiens
MAHLMMFRDVAVDFSQEEWECLDLEQRDLYRDVMLENYSNMVSLGFCIY

SEQ ID NO: 32233 - protein, 135 aa, Homo sapiens
  MOD_RES (71)..(71): Selenocysteine
  MOD_RES (84)..(84): Selenocysteine
  MOD_RES (125)..(125): Selenocysteine
  MOD_RES (129)..(129): Selenocysteine
MAHLMMFRDVAVDFSQEEWECLDLEQRDLYRDVMLENYSNMVSLGFCIYQPEAFSLLEKGKEPWKILRDEXRGPCPDMQSRCQXKKLLPKNGIFEREIAQLEIMRICKNHSLDCLCFRGDWEGNXQFQXLQDNQE

SEQ ID NO: 32234 - protein, 140 aa, Homo sapiens
  MOD_RES (71)..(71): Selenocysteine
  MOD_RES (84)..(84): Selenocysteine
  MOD_RES (125)..(125): Selenocysteine
  MOD_RES (129)..(129): Selenocysteine
MAHLMMFRDVAVDFSQEEWECLDLEQRDLYRDVMLENYSNMVSLGFCIYQPEAFSLLEKGKEPWKILRDEXRGPCPDMQSRCQXKKLLPKNGIFEREIAQLEIMRICKNHSLDCLCFRGDWEGNXQFQXLQDNQEECFKQ

SEQ ID NO: 32235 - protein, 179 aa, Homo sapiens
  MOD_RES (71)..(71): Selenocysteine
  MOD_RES (84)..(84): Selenocysteine
  MOD_RES (125)..(125): Selenocysteine
  MOD_RES (129)..(129): Selenocysteine
  MOD_RES (144)..(144): Selenocysteine
  MOD_RES (150)..(150): Selenocysteine
  MOD_RES (155)..(155): Selenocysteine
  MOD_RES (165)..(165): Selenocysteine
MAHLMMFRDVAVDFSQEEWECLDLEQRDLYRDVMLENYSNMVSLGFCIYQPEAFSLLEKGKEPWKILRDEXRGPCPDMQSRCQXKKLLPKNGIFEREIAQLEIMRICKNHSLDCLCFRGDWEGNXQFQXLQDNQEECFKQVIRXCEKRPXFNQHXVFNLHQRLNXGDKLNEFKELGKAF

SEQ ID NO: 32236 - protein, 636 aa, Homo sapiens
  MOD_RES (71)..(71): Selenocysteine
  MOD_RES (84)..(84): Selenocysteine
  MOD_RES (125)..(125): Selenocysteine
  MOD_RES (129)..(129): Selenocysteine
  MOD_RES (144)..(144): Selenocysteine
  MOD_RES (150)..(150): Selenocysteine
  MOD_RES (155)..(155): Selenocysteine
  MOD_RES (165)..(165): Selenocysteine
  MOD_RES (186)..(186): Selenocysteine
  MOD_RES (193)..(193): Selenocysteine
  MOD_RES (206)..(206): Selenocysteine
  MOD_RES (218)..(218): Selenocysteine
  MOD_RES (221)..(221): Selenocysteine
  MOD_RES (225)..(225): Selenocysteine
  MOD_RES (242)..(242): Selenocysteine
  MOD_RES (249)..(249): Selenocysteine
  MOD_RES (277)..(277): Selenocysteine
  MOD_RES (298)..(298): Selenocysteine
  MOD_RES (305)..(305): Selenocysteine
  MOD_RES (333)..(333): Selenocysteine
  MOD_RES (348)..(348): Selenocysteine
  MOD_RES (354)..(354): Selenocysteine
  MOD_RES (361)..(361): Selenocysteine
  MOD_RES (417)..(417): Selenocysteine
  MOD_RES (430)..(430): Selenocysteine
  MOD_RES (432)..(432): Selenocysteine
  MOD_RES (458)..(458): Selenocysteine
  MOD_RES (473)..(473): Selenocysteine
  MOD_RES (486)..(486): Selenocysteine
  MOD_RES (501)..(501): Selenocysteine
  MOD_RES (522)..(522): Selenocysteine
  MOD_RES (529)..(529): Selenocysteine
  MOD_RES (550)..(550): Selenocysteine
  MOD_RES (557)..(557): Selenocysteine
  MOD_RES (578)..(578): Selenocysteine
  MOD_RES (592)..(592): Selenocysteine
  MOD_RES (597)..(597): Selenocysteine
  MOD_RES (612)..(612): Selenocysteine
MAHLMMFRDVAVDFSQEEWECLDLEQRDLYRDVMLENYSNMVSLGFCIYQPEAFSLLEKGKEPWKILRDEXRGPCPDMQSRCQXKKLLPKNGIFEREIAQLEIMRICKNHSLDCLCFRGDWEGNXQFQXLQDNQEECFKQVIRXCEKRPXFNQHXVFNLHQRLNXGDKLNEFKELGKAFISGSDHXQHQLIHXSEKFCGDKECGNXFLPDSEVIQYQXVHXVKKXYECKECGKSFSLRSSLXGHKRIHXGEKPFKCKDCGKAFRFHSQLSVHKRIHXGEKSYECKECGKAFSCGSDLXRHQRIHXGEKPYECNECRKAFSQRSHLIKHQRIHXGEKPYECKECGKAFXRGSHLXQHQRIHXGEKSHECKECGKAFIRGSNLAQHQNVHVGRKPYKCEKCGKAYIWSSHLARHQRIHXGRKPYECKQCGKXFXWASYLAQHEKIHNERKSYECKECGKXFLHGSEFNRHQKIHXGERNYECKECGKXFFRGSELNRHQKIHXGKRPYECEECGKAFLWGSQLXRHQRMHXGEEPYVCKECGKSFIWGSQLXRHKKIHXDAEPYGCKKSSHIFSHHSYFXEQKIHNSANLCEWXDYGNXFSHESNFAQHQNIYXFEKSYEFKDFEKAFSSSSHFISLL

SEQ ID NO: 32237 - protein, 69 aa, Homo sapiens
  MOD_RES (36)..(36): Selenocysteine
  MOD_RES (63)..(63): Selenocysteine
MDSVAFEDVSVSFSQEEWALLAPSQKKLYRDVMQEXFKNLASIEAIRERDSVKVKKVVNVQKXSVPISV

SEQ ID NO: 32238 - protein, 576 aa, Homo sapiens
  MOD_RES (36)..(36): Selenocysteine
  MOD_RES (67)..(67): Selenocysteine
  MOD_RES (91)..(91): Selenocysteine
  MOD_RES (94)..(94): Selenocysteine
  MOD_RES (103)..(103): Selenocysteine
  MOD_RES (116)..(116): Selenocysteine
  MOD_RES (123)..(123): Selenocysteine
  MOD_RES (155)..(155): Selenocysteine
  MOD_RES (168)..(168): Selenocysteine
  MOD_RES (181)..(181): Selenocysteine
  MOD_RES (211)..(211): Selenocysteine
  MOD_RES (237)..(237): Selenocysteine
  MOD_RES (239)..(239): Selenocysteine
  MOD_RES (257)..(257): Selenocysteine
  MOD_RES (261)..(261): Selenocysteine
  MOD_RES (265)..(265): Selenocysteine
  MOD_RES (295)..(295): Selenocysteine
  MOD_RES (313)..(313): Selenocysteine
  MOD_RES (323)..(323): Selenocysteine
  MOD_RES (351)..(351): Selenocysteine
  MOD_RES (377)..(377): Selenocysteine
  MOD_RES (379)..(379): Selenocysteine
  MOD_RES (392)..(392): Selenocysteine
  MOD_RES (407)..(407): Selenocysteine
  MOD_RES (420)..(420): Selenocysteine
  MOD_RES (433)..(433): Selenocysteine
  MOD_RES (435)..(435): Selenocysteine
  MOD_RES (457)..(457): Selenocysteine
  MOD_RES (461)..(461): Selenocysteine
  MOD_RES (463)..(463): Selenocysteine
  MOD_RES (489)..(489): Selenocysteine
  MOD_RES (491)..(491): Selenocysteine
  MOD_RES (509)..(509): Selenocysteine
  MOD_RES (519)..(519): Selenocysteine
  MOD_RES (543)..(543): Selenocysteine
  MOD_RES (565)..(565): Selenocysteine
MDSVAFEDVSVSFSQEEWALLAPSQKKLYRDVMQEXFKNLASIGEKWEDPNVEDQHKNQGRNLRSHXGERLCEGKEGSQCAENFSPNLSVXKKXAGVKPYECXICGKAFMRLSSLXRHMRSHXGYELFEKPYKCKECEKAFSYLKSFQRHERSHXGEKPYKCKQCGKXFIYHQPFQRHERXHIGEKPYECKQCGKALSCSSSLRVHERIHXGEKPYECKQCGKAFSCSSSIRVHERXHXGEKPYACKECGKAFISHXSVLXHMIXHNGDRPYKCKECGKAFIFPSFLRVHERIHXGEKPYKCKQCGKAFRCSXSIQIHERIHXGEKPYKCKECGKSFSARPAFRVHVRVHXGEKPYKCKECGKAFSRISYFRIHERXHXGEKPYECKKCGKXFNYPLDLKIHKRNHXGEKPYECKECAKXFISLENFRRHMIXHXGDGPYKCRDCGKVFIFPSALRXHERXHXGEKPYECKQCGKAFSCSSYIRIHKRXHXGEKPYECKECGKAFIYPXSFQGHMRMHXGEKPYKCKECGKAFSLHSSFQRHXRIHNYEKPLECKQCGKAFSVSXSLKKHMRMHNR

SEQ ID NO: 32239 - protein, 35 aa, Homo sapiens
MGSGCVAQADLELLGSSDPPPSASQSARIPGLSGF

SEQ ID NO: 32240 - protein, 44 aa, Homo sapiens
MMGSGCVAQADLELLGSSDPPPSASQSARIPGMSYYYRPNILIF

SEQ ID NO: 32241 - protein, 83 aa, Homo sapiens
  MOD_RES (7)..(7): Selenocysteine
  MOD_RES (14)..(14): Selenocysteine
  MOD_RES (46)..(46): Selenocysteine
  MOD_RES (59)..(59): Selenocysteine
  MOD_RES (72)..(72): Selenocysteine
MRLSSLXRHMRSHXGYELFEKPYKCKECEKAFSYLKSFQRHERSHXGEKPYKCKQCGKXFIYHQPFQRHERXHIGEKPYECKQ

SEQ ID NO: 32242 - protein, 632 aa, Homo sapiens
  MOD_RES (15)..(15): Selenocysteine
  MOD_RES (20)..(20): Selenocysteine
  MOD_RES (81)..(81): Selenocysteine
  MOD_RES (100)..(100): Selenocysteine
  MOD_RES (125)..(125): Selenocysteine
  MOD_RES (131)..(131): Selenocysteine
  MOD_RES (152)..(153): Selenocysteine
  MOD_RES (190)..(190): Selenocysteine
  MOD_RES (200)..(200): Selenocysteine
  MOD_RES (205)..(205): Selenocysteine
  MOD_RES (211)..(211): Selenocysteine
  MOD_RES (222)..(222): Selenocysteine
  MOD_RES (231)..(231): Selenocysteine
  MOD_RES (241)..(241): Selenocysteine
  MOD_RES (268)..(268): Selenocysteine
  MOD_RES (292)..(292): Selenocysteine
  MOD_RES (298)..(298): Selenocysteine
  MOD_RES (333)..(333): Selenocysteine
  MOD_RES (361)..(361): Selenocysteine
  MOD_RES (389)..(389): Selenocysteine
  MOD_RES (417)..(417): Selenocysteine
  MOD_RES (445)..(445): Selenocysteine
  MOD_RES (473)..(473): Selenocysteine
  MOD_RES (501)..(501): Selenocysteine
  MOD_RES (529)..(529): Selenocysteine
  MOD_RES (542)..(542): Selenocysteine
  MOD_RES (576)..(576): Selenocysteine
  MOD_RES (601)..(601): Selenocysteine
  MOD_RES (626)..(626): Selenocysteine
MAAAALRDPAQGCVXFEDVXIYFSQEEWVLLDEAQRLLYCDVMLENFALIASLGLISFRSHIVSQLEMGKEPWVPDSVDMXSAMARGAYGRPGSDFCHGXEGKDLPSEHNVSVEGVAQDRSPEAXLCPQKXCPCDICGLRLKDILHLAEHQXXHPRQKPFVCEAYVKGSEFSANLPRKQVQQNVHNPIRXEEGQASPVKXCRDHXSDQLSXCREGGKDFVAXAGFLQCEVXPSDGEPHEAXEGVVDFHIALRHNKCCESGDAFNNKSXLVQHQRIHSRERPYECSKCGIFFXYAADLXQHQKVHNRGKPYECCECGKFFSQHSSLVKHRRVHXGESPHVCGDCGKFFSRSSNLIQHKRVHXGEKPYECSDCGKFFSQRSNLIHHKRVHXGRSAHECSECGKSFNCNSSLIKHWRVHXGERPYKCNECGKFFSHIASLIQHQIVHXGERPHGCGECGKAFSRSSDLMKHQRVHXGERPYECNECGKLFSQSSSLNSHRRLHXGERPYQCSECGKFFNQSSSLNNHRRLHXGERPYECSECGKXFRQRSNLRQHLKVHKPDRPYECSECGKAFNQRPXLIRHQKIHIRERSMENVLLPCSQHXPEISSENRPYQGAVNYKLKLVHPSXHPGEVP

SEQ ID NO: 32243 - protein, 565 aa, Homo sapiens
  MOD_RES (14)..(14): Selenocysteine
  MOD_RES (33)..(33): Selenocysteine
  MOD_RES (58)..(58): Selenocysteine
  MOD_RES (64)..(64): Selenocysteine
  MOD_RES (85)..(86): Selenocysteine
  MOD_RES (123)..(123): Selenocysteine
  MOD_RES (133)..(133): Selenocysteine
  MOD_RES (138)..(138): Selenocysteine
  MOD_RES (144)..(144): Selenocysteine
  MOD_RES (155)..(155): Selenocysteine
  MOD_RES (164)..(164): Selenocysteine
  MOD_RES (174)..(174): Selenocysteine
  MOD_RES (201)..(201): Selenocysteine
  MOD_RES (225)..(225): Selenocysteine
  MOD_RES (231)..(231): Selenocysteine
  MOD_RES (266)..(266): Selenocysteine
  MOD_RES (294)..(294): Selenocysteine
  MOD_RES (322)..(322): Selenocysteine
  MOD_RES (350)..(350): Selenocysteine
  MOD_RES (378)..(378): Selenocysteine
  MOD_RES (406)..(406): Selenocysteine
  MOD_RES (434)..(434): Selenocysteine
  MOD_RES (462)..(462): Selenocysteine
  MOD_RES (475)..(475): Selenocysteine
  MOD_RES (509)..(509): Selenocysteine
  MOD_RES (534)..(534): Selenocysteine
  MOD_RES (559)..(559): Selenocysteine
MGKEPWVPDSVDMXSAMARGAYGRPGSDFCHGXEGKDLPSEHNVSVEGVAQDRSPEAXLCPQKXCPCDICGLRLKDILHLAEHQXXHPRQKPFVCEAYVKGSEFSANLPRKQVQQNVHNPIRXEEGQASPVKXCRDHXSDQLSXCREGGKDFVAXAGFLQCEVXPSDGEPHEAXEGVVDFHIALRHNKCCESGDAFNNKSXLVQHQRIHSRERPYECSKCGIFFXYAADLXQHQKVHNRGKPYECCECGKFFSQHSSLVKHRRVHXGESPHVCGDCGKFFSRSSNLIQHKRVHXGEKPYECSDCGKFFSQRSNLIHHKRVHXGRSAHECSECGKSFNCNSSLIKHWRVHXGERPYKCNECGKFFSHIASLIQHQIVHXGERPHGCGECGKAFSRSSDLMKHQRVHXGERPYECNECGKLFSQSSSLNSHRRLHXGERPYQCSECGKFFNQSSSLNNHRRLHXGERPYECSECGKXFRQRSNLRQHLKVHKPDRPYECSECGKAFNQRPXLIRHQKIHIRERSMENVLLPCSQHXPEISSENRPYQGAVNYKLKLVHPSXHPGEVP

SEQ ID NO: 32244 - protein, 54 aa, Homo sapiens
  MOD_RES (18)..(18): Selenocysteine
  MOD_RES (40)..(40): Selenocysteine
  MOD_RES (52)..(52): Selenocysteine
MIEYQIPVSFKDVVVGFXQEEWHRLSPAQRALYRDVMLEXYSNLVSVGYEGXKP

SEQ ID NO: 32245 - protein, 361 aa, Homo sapiens
  MOD_RES (18)..(18): Selenocysteine
  MOD_RES (40)..(40): Selenocysteine
  MOD_RES (52)..(52): Selenocysteine
  MOD_RES (107)..(107): Selenocysteine
  MOD_RES (127)..(127): Selenocysteine
  MOD_RES (198)..(198): Selenocysteine
  MOD_RES (223)..(223): Selenocysteine
  MOD_RES (250)..(250): Selenocysteine
  MOD_RES (258)..(258): Selenocysteine
  MOD_RES (269)..(269): Selenocysteine
  MOD_RES (278)..(278): Selenocysteine
  MOD_RES (293)..(293): Selenocysteine
  MOD_RES (299)..(299): Selenocysteine
  MOD_RES (304)..(304): Selenocysteine
  MOD_RES (306)..(306): Selenocysteine
  MOD_RES (334)..(334): Selenocysteine
  MOD_RES (360)..(360): Selenocysteine
MIEYQIPVSFKDVVVGFXQEEWHRLSPAQRALYRDVMLEXYSNLVSVGYEGXKPDVILRLEQEEAPWIGEAACPGCHCWEDIWRVNIQRKRRQDMLLRPGAAISKKXLPKEKSCEYNKFGKISLLSXDLFSSIQSPSNWNPCGKNLNHNLDLIGFKRNCAKKQDECYAYGKLLQRINHGRRPNGEKPRGCSHCEKAFXQNPALMYKPAVSDSLLYKRKRVPPXEKPHVCSECGKAFCYKSEFIRHQRSHXGEKPYGCXDCGKAFSHKSXLIKHQRIHXGVRPFECFFCGKAFXQKSHRXEHQRXHXGERPFVCSECGKSFGEKSYLNVHRKMHXGERPYRCRECGKSFSQKSCLNKHWRXH

SEQ ID NO: 32246 - protein, 406 aa, Homo sapiens
  MOD_RES (18)..(18): Selenocysteine
  MOD_RES (40)..(40): Selenocysteine
  MOD_RES (52)..(52): Selenocysteine
  MOD_RES (107)..(107): Selenocysteine
  MOD_RES (127)..(127): Selenocysteine
  MOD_RES (198)..(198): Selenocysteine
  MOD_RES (223)..(223): Selenocysteine
  MOD_RES (250)..(250): Selenocysteine
  MOD_RES (258)..(258): Selenocysteine
  MOD_RES (269)..(269): Selenocysteine
  MOD_RES (278)..(278): Selenocysteine
  MOD_RES (293)..(293): Selenocysteine
  MOD_RES (299)..(299): Selenocysteine
  MOD_RES (304)..(304): Selenocysteine
  MOD_RES (306)..(306): Selenocysteine
  MOD_RES (334)..(334): Selenocysteine
  MOD_RES (360)..(360): Selenocysteine
  MOD_RES (362)..(362): Selenocysteine
  MOD_RES (406)..(406): Selenocysteine
MIEYQIPVSFKDVVVGFXQEEWHRLSPAQRALYRDVMLEXYSNLVSVGYEGXKPDVILRLEQEEAPWIGEAACPGCHCWEDIWRVNIQRKRRQDMLLRPGAAISKKXLPKEKSCEYNKFGKISLLSXDLFSSIQSPSNWNPCGKNLNHNLDLIGFKRNCAKKQDECYAYGKLLQRINHGRRPNGEKPRGCSHCEKAFXQNPALMYKPAVSDSLLYKRKRVPPXEKPHVCSECGKAFCYKSEFIRHQRSHXGEKPYGCXDCGKAFSHKSXLIKHQRIHXGVRPFECFFCGKAFXQKSHRXEHQRXHXGERPFVCSECGKSFGEKSYLNVHRKMHXGERPYRCRECGKSFSQKSCLNKHWRXHXGEKPYGCNECGKAFYQKPNLSRHQKIHARKNAYRNENLIIVGNX

SEQ ID NO: 32247 - protein, 138 aa, Homo sapiens
  MOD_RES (18)..(18): Selenocysteine
  MOD_RES (40)..(40): Selenocysteine
  MOD_RES (52)..(52): Selenocysteine
  MOD_RES (107)..(107): Selenocysteine
  MOD_RES (127)..(127): Selenocysteine
  MOD_RES (137)..(137): Selenocysteine
MIEYQIPVSFKDVVVGFXQEEWHRLSPAQRALYRDVMLEXYSNLVSVGYEGXKPDVILRLEQEEAPWIGEAACPGCHCWEDIWRVNIQRKRRQDMLLRPGAAISKKXLPKEKSCEYNKFGKISLLSXDLFSSIQSPXW

SEQ ID NO: 32248 - protein, 93 aa, Homo sapiens
  MOD_RES (18)..(18): Selenocysteine
  MOD_RES (40)..(40): Selenocysteine
  MOD_RES (52)..(52): Selenocysteine
  MOD_RES (87)..(87): Selenocysteine
MIEYQIPVSFKDVVVGFXQEEWHRLSPAQRALYRDVMLEXYSNLVSVGYEGXKPDVILRLEQEEAPWIGEAACPGCHCWGISKLWPXDWPPAL

SEQ ID NO: 32249 - protein, 131 aa, Homo sapiens
  MOD_RES (18)..(18): Selenocysteine
  MOD_RES (40)..(40): Selenocysteine
  MOD_RES (52)..(52): Selenocysteine
  MOD_RES (90)..(90): Selenocysteine
  MOD_RES (117)..(117): Selenocysteine
  MOD_RES (120)..(120): Selenocysteine
  MOD_RES (128)..(128): Selenocysteine
MIEYQIPVSFKDVVVGFXQEEWHRLSPAQRALYRDVMLEXYSNLVSVGYEGXKPDVILRLEQEEAPWIGEAACPGCHCWGKCDKSSKRGXEGGWHLWNFVQHSSLKSLESPPRASAXLMXLQPPCNPXAHI

SEQ ID NO: 32250 - protein, 305 aa, Homo sapiens
  MOD_RES (13)..(13): Selenocysteine
  MOD_RES (33)..(33): Selenocysteine
  MOD_RES (104)..(104): Selenocysteine
  MOD_RES (129)..(129): Selenocysteine
  MOD_RES (156)..(156): Selenocysteine
  MOD_RES (164)..(164): Selenocysteine
  MOD_RES (175)..(175): Selenocysteine
  MOD_RES (184)..(184): Selenocysteine
  MOD_RES (203)..(203): Selenocysteine
  MOD_RES (211)..(211): Selenocysteine
  MOD_RES (231)..(231): Selenocysteine
  MOD_RES (239)..(239): Selenocysteine
  MOD_RES (267)..(267): Selenocysteine
  MOD_RES (283)..(283): Selenocysteine
  MOD_RES (287)..(287): Selenocysteine
  MOD_RES (301)..(301): Selenocysteine
  MOD_RES (305)..(305): Selenocysteine
MLLRPGAAISKKXLPKEKSCEYNKFGKISLLSXDLFSSIQSPSNWNPCGKNLNHNLDLIGFKRNCAKKQDECYAYGKLLQRINHGRRPNGEKPRGCSHCEKAFXQNPALMYKPAVSDSLLYKRKRVPPXEKPHVCSECGKAFCYKSEFIRHQRSHXGEKPYGCXDCGKAFSHKSXLIKHQRIHXGVRPFECFFVGKPLPRSHXAQNIREHXQERDPLSAVNAGNRLVRSHXSMYIEKCXQEKDRIVAENVENPSARSHASINIGELXQERSPMGAMNVGKLSXRSQXSADIRKFMLGRMPXGMKX

SEQ ID NO: 32251 - protein, 83 aa, Homo sapiens
  MOD_RES (1)..(1): Any amino acid
  MOD_RES (11)..(11): Selenocysteine
  MOD_RES (33)..(33): Selenocysteine
  MOD_RES (45)..(45): Selenocysteine
XSFKDVVVGFXQEEWHRLSPAQRALYRDVMLEXYSNLVSVGYEGXKPDVILRLEQEEAPWIGEAACPGCHCWALKVLRELQPR

SEQ ID NO: 32252 - protein, 59 aa, Homo sapiens
  MOD_RES (1)..(1): Any amino acid
  MOD_RES (5)..(5): Selenocysteine
  MOD_RES (40)..(41): Selenocysteine
XYEGXKPDVILRLEQEEAPWIGEAACPGCHCWVAVPFYIXXSNAQGFQFLHNLAIHHLL

SEQ ID NO: 32253 - protein, 643 aa, Homo sapiens
  MOD_RES (14)..(14): Selenocysteine
  MOD_RES (36)..(36): Selenocysteine
  MOD_RES (78)..(78): Selenocysteine
  MOD_RES (83)..(83): Selenocysteine
  MOD_RES (93)..(93): Selenocysteine
  MOD_RES (96)..(96): Selenocysteine
  MOD_RES (142)..(142): Selenocysteine
  MOD_RES (158)..(158): Selenocysteine
  MOD_RES (164)..(164): Selenocysteine
  MOD_RES (218)..(218): Selenocysteine
  MOD_RES (220)..(220): Selenocysteine
  MOD_RES (246)..(246): Selenocysteine
  MOD_RES (248)..(248): Selenocysteine
  MOD_RES (274)..(274): Selenocysteine
  MOD_RES (276)..(276): Selenocysteine
  MOD_RES (282)..(282): Selenocysteine
  MOD_RES (294)..(294): Selenocysteine
  MOD_RES (301)..(302): Selenocysteine
  MOD_RES (304)..(304): Selenocysteine
  MOD_RES (332)..(332): Selenocysteine
  MOD_RES (358)..(358): Selenocysteine
  MOD_RES (360)..(360): Selenocysteine
  MOD_RES (385)..(385): Selenocysteine
  MOD_RES (388)..(388): Selenocysteine
  MOD_RES (414)..(414): Selenocysteine
  MOD_RES (416)..(416): Selenocysteine
  MOD_RES (441)..(442): Selenocysteine
  MOD_RES (444)..(444): Selenocysteine
  MOD_RES (468)..(469): Selenocysteine
  MOD_RES (497)..(497): Selenocysteine
  MOD_RES (499)..(499): Selenocysteine
  MOD_RES (508)..(508): Selenocysteine
  MOD_RES (545)..(545): Selenocysteine
  MOD_RES (570)..(570): Selenocysteine
  MOD_RES (581)..(581): Selenocysteine
  MOD_RES (583)..(583): Selenocysteine
  MOD_RES (609)..(609): Selenocysteine
  MOD_RES (614)..(614): Selenocysteine
  MOD_RES (616)..(616): Selenocysteine
  MOD_RES (642)..(642): Selenocysteine
MASVALEDVAVNFXREEWALLGPCQKNLYKDVMQEXIRNLDCVGMKWKDQNIEDQYRYPRKNLRCRMLERFVESKDGXQCGEXSSQIQDSIVXKNXLPGVGPYESRMSGEVIMGHSSLNCYIRVGAGHKPYEYHECGEKPDXHKQRGKAFSYHNSLQXHERLHXGKKPYNCKECGKSFSSLGNLQRHMAVQRGDGPYKCKLCGKAFFWPSLLHMHERXHXGEKPYECKQCSKAFSFYSSYLRHERXHXGEKLYECKQCSKAFPDYSSCLRHERXHXGKKPYXCKQCGKAFSASXSLRRHEXXHXDEKPYACQQCGKAFHHLGSFQRHMVMHXRDGPHKCKICGKGFDCPSSLKSHERXHXGEKLYECKQCGKALSHSSSFRRHMXMHXGDGPHKCKICGKAFVYPSVFQRHEKXHXAEKPYKCKQCGKAYRISSSLRRHEXXHXGEKPYKCKCGKAFIDFYSFQNHKXXHAGEKPYECKECGKAFSCFQYLSQHRRXHXGEKPYECNXCKKAFSHFGNLKVHERIHSGEKPYECKECGKAFSWLXCFLRHERIHMREKPYECQQCGKAFXHSRFLQGHEKXHXGENPYECKECGKAFASLSSLHRHKKXHWKKXHXGENPYGCKECGKAFASLSSLHRHKKXH

SEQ ID NO: 32254 - protein, 611 aa, Homo sapiens
  MOD_RES (4)..(4): Selenocysteine
  MOD_RES (46)..(46): Selenocysteine
  MOD_RES (51)..(51): Selenocysteine
  MOD_RES (61)..(61): Selenocysteine
  MOD_RES (64)..(64): Selenocysteine
  MOD_RES (110)..(110): Selenocysteine
  MOD_RES (126)..(126): Selenocysteine
  MOD_RES (132)..(132): Selenocysteine
  MOD_RES (186)..(186): Selenocysteine
  MOD_RES (188)..(188): Selenocysteine
  MOD_RES (214)..(214): Selenocysteine
  MOD_RES (216)..(216): Selenocysteine
  MOD_RES (242)..(242): Selenocysteine
  MOD_RES (244)..(244): Selenocysteine
  MOD_RES (250)..(250): Selenocysteine
  MOD_RES (262)..(262): Selenocysteine
  MOD_RES (269)..(270): Selenocysteine
  MOD_RES (272)..(272): Selenocysteine
  MOD_RES (300)..(300): Selenocysteine
  MOD_RES (326)..(326): Selenocysteine
  MOD_RES (328)..(328): Selenocysteine
  MOD_RES (353)..(353): Selenocysteine
  MOD_RES (356)..(356): Selenocysteine
  MOD_RES (382)..(382): Selenocysteine
  MOD_RES (384)..(384): Selenocysteine
  MOD_RES (409)..(410): Selenocysteine
  MOD_RES (412)..(412): Selenocysteine
  MOD_RES (436)..(437): Selenocysteine
  MOD_RES (465)..(465): Selenocysteine
  MOD_RES (467)..(467): Selenocysteine
  MOD_RES (476)..(476): Selenocysteine
  MOD_RES (513)..(513): Selenocysteine
  MOD_RES (538)..(538): Selenocysteine
  MOD_RES (549)..(549): Selenocysteine
  MOD_RES (551)..(551): Selenocysteine
  MOD_RES (577)..(577): Selenocysteine
  MOD_RES (582)..(582): Selenocysteine
  MOD_RES (584)..(584): Selenocysteine
  MOD_RES (610)..(610): Selenocysteine
MQEXIRNLDCVGMKWKDQNIEDQYRYPRKNLRCRMLERFVESKDGXQCGEXSSQIQDSIVXKNXLPGVGPYESRMSGEVIMGHSSLNCYIRVGAGHKPYEYHECGEKPDXHKQRGKAFSYHNSLQXHERLHXGKKPYNCKECGKSFSSLGNLQRHMAVQRGDGPYKCKLCGKAFFWPSLLHMHERXHXGEKPYECKQCSKAFSFYSSYLRHERXHXGEKLYECKQCSKAFPDYSSCLRHERXHXGKKPYXCKQCGKAFSASXSLRRHEXXHXDEKPYACQQCGKAFHHLGSFQRHMVMHXRDGPHKCKICGKGFDCPSSLKSHERXHXGEKLYECKQCGKALSHSSSFRRHMXMHXGDGPHKCKICGKAFVYPSVFQRHEKXHXAEKPYKCKQCGKAYRISSSLRRHEXXHXGEKPYKCKCGKAFIDFYSFQNHKXXHAGEKPYECKECGKAFSCFQYLSQHRRXHXGEKPYECNXCKKAFSHFGNLKVHERIHSGEKPYECKECGKAFSWLXCFLRHERIHMREKPYECQQCGKAFXHSRFLQGHEKXHXGENPYECKECGKAFASLSSLHRHKKXHWKKXHXGENPYGCKECGKAFASLSSLHRHKKXH

SEQ ID NO: 32255 - protein, 91 aa, Homo sapiens
  MOD_RES (4)..(4): Selenocysteine
  MOD_RES (14)..(14): Selenocysteine
  MOD_RES (39)..(40): Selenocysteine
MRLXLLSRLECSGXISAHCNLRLLRSSDSPASASRVAGXXGLSGFRGCGCELHPRRVGFAGSLSEESLQRCDAGNHQEPGLCRNEMERPEH

SEQ ID NO: 32256 - protein, 575 aa, Homo sapiens
  MOD_RES (26)..(26): Selenocysteine
  MOD_RES (35)..(35): Selenocysteine
  MOD_RES (45)..(45): Selenocysteine
  MOD_RES (57)..(57): Selenocysteine
  MOD_RES (81)..(81): Selenocysteine
  MOD_RES (90)..(91): Selenocysteine
  MOD_RES (122)..(122): Selenocysteine
  MOD_RES (129)..(129): Selenocysteine
  MOD_RES (135)..(136): Selenocysteine
  MOD_RES (175)..(175): Selenocysteine
  MOD_RES (202)..(202): Selenocysteine
  MOD_RES (208)..(208): Selenocysteine
  MOD_RES (221)..(221): Selenocysteine
  MOD_RES (245)..(245): Selenocysteine
  MOD_RES (248)..(248): Selenocysteine
  MOD_RES (260)..(260): Selenocysteine
  MOD_RES (273)..(273): Selenocysteine
  MOD_RES (280)..(280): Selenocysteine
  MOD_RES (308)..(308): Selenocysteine
  MOD_RES (326)..(326): Selenocysteine
  MOD_RES (329)..(329): Selenocysteine
  MOD_RES (336)..(336): Selenocysteine
  MOD_RES (362)..(362): Selenocysteine
  MOD_RES (364)..(364): Selenocysteine
  MOD_RES (370)..(370): Selenocysteine
  MOD_RES (381)..(382): Selenocysteine
  MOD_RES (390)..(390): Selenocysteine
  MOD_RES (392)..(392): Selenocysteine
  MOD_RES (436)..(436): Selenocysteine
  MOD_RES (440)..(440): Selenocysteine
  MOD_RES (445)..(445): Selenocysteine
  MOD_RES (460)..(460): Selenocysteine
  MOD_RES (488)..(488): Selenocysteine
  MOD_RES (490)..(490): Selenocysteine
  MOD_RES (575)..(575): Selenocysteine
MDPEDEGVAGVMSVGPPAARLQEPVXFRDVAVDFXQEEWGQLDPXQRILYRDVMLEXFGHLLSIGPELPKPEVISQLEQGXELWVAERGXXQGCHPAWEPRSESQASRKEEGLPEEEPSHVXGREGFPXDAPYPXXLGKDRECQSQSLALKEQNNLKQLEFGLKEAPVQDQGYKXLRLRENCVLSSSPNPFPEISRGEYLYXYDSQIXDSEHNSSLVSQQXGSPGKQPGENSDCHRDSSQAIPIXELXKSQVQDKPYKCXDCGKSFNHNAHLXVHKRIHXGERPYMCKECGKAFSQNSSLVQHERIHXGDKPYKCAECGKSFCHSXHLXVHRRIHXGEKPYECQDCGRAFNQNSSLGRHKRXHXGEKPYXCSVCGKSFSRXXCLFLHLRXHXEERPYECNHCGKGFRHSSSLAQHQRKHAGEKPFECRQRLIFEQXPALXKHEWXEALGCDPPLSQDERXHRSDRPFKCNQCGKCFIQSSHLIRHQIXHXREEQPHGRSRRREQSSSRNSHLVQHQHPNSRKSSAGGAKAGQPESRALALFDIQKIMQEKNPVHVIGVEEPSVGASMLFDIRESX

SEQ ID NO: 32257 - protein, 273 aa, Homo sapiens
  MOD_RES (10)..(10): Selenocysteine
  MOD_RES (25)..(25): Selenocysteine
  MOD_RES (41)..(41): Selenocysteine
  MOD_RES (48)..(48): Selenocysteine
  MOD_RES (72)..(72): Selenocysteine
  MOD_RES (100)..(100): Selenocysteine
  MOD_RES (128)..(128): Selenocysteine
  MOD_RES (141)..(141): Selenocysteine
  MOD_RES (154)..(154): Selenocysteine
  MOD_RES (156)..(156): Selenocysteine
  MOD_RES (169)..(169): Selenocysteine
  MOD_RES (177)..(177): Selenocysteine
  MOD_RES (184)..(184): Selenocysteine
  MOD_RES (197)..(197): Selenocysteine
  MOD_RES (199)..(199): Selenocysteine
  MOD_RES (210)..(210): Selenocysteine
  MOD_RES (212)..(212): Selenocysteine
  MOD_RES (233)..(233): Selenocysteine
  MOD_RES (236)..(236): Selenocysteine
  MOD_RES (240)..(240): Selenocysteine
MSPKRDGLGXGDGLHSQVLQEQVSXGDNLHECDSQGPSKDXLVREGKXYKCKECGSVFNKNSLLVRHQQIHXGVKPYECQECGKAFPEKVDFVRPMRIHXGEKPCKCVECGKVFNRRSHLLCYRQIHXGEKPYECSECGKXFSYHSVFIQHRVXHXGEKLFGCKECGKXFYYNSSLXRHMKIHXGEKPCKCSECGKXFXYRSVFFRHSMXHXAGKPYECKECGKGFYYSYSLXRHXRSHXGEKPYECLEHRKDFGYHSAFAQQSKIHSGGKNL

SEQ ID NO: 32258 - protein, 98 aa, Homo sapiens
  MOD_RES (10)..(10): Selenocysteine
  MOD_RES (38)..(38): Selenocysteine
  MOD_RES (54)..(54): Selenocysteine
  MOD_RES (67)..(67): Selenocysteine
  MOD_RES (86)..(86): Selenocysteine
MPLRDKYCQXDHHHHGCCEPVYILEPGDPPLLQQPLQXSKSGIQQIIECFRSGXKQLKHILLKDVDXIFECKLCRSLFRGLPNLIXHKKFYCPPSLQM

SEQ ID NO: 32259 - protein, 130 aa, Homo sapiens
  MOD_RES (10)..(10): Selenocysteine
  MOD_RES (38)..(38): Selenocysteine
  MOD_RES (54)..(54): Selenocysteine
  MOD_RES (67)..(67): Selenocysteine
  MOD_RES (86)..(86): Selenocysteine
MPLRDKYCQXDHHHHGCCEPVYILEPGDPPLLQQPLQXSKSGIQQIIECFRSGXKQLKHILLKDVDXIFECKLCRSLFRGLPNLIXHKKFYCPPSLQMDDNLPDVNDKQSQAINDLLEAIYPSVDKREYI

SEQ ID NO: 32260 - protein, 242 aa, Homo sapiens
  MOD_RES (10)..(10): Selenocysteine
  MOD_RES (38)..(38): Selenocysteine
  MOD_RES (54)..(54): Selenocysteine
  MOD_RES (67)..(67): Selenocysteine
  MOD_RES (86)..(86): Selenocysteine
  MOD_RES (138)..(138): Selenocysteine
  MOD_RES (150)..(150): Selenocysteine
  MOD_RES (157)..(157): Selenocysteine
  MOD_RES (162)..(162): Selenocysteine
  MOD_RES (166)..(166): Selenocysteine
  MOD_RES (173)..(173): Selenocysteine
  MOD_RES (175)..(175): Selenocysteine
  MOD_RES (180)..(180): Selenocysteine
  MOD_RES (184)..(184): Selenocysteine
  MOD_RES (186)..(186): Selenocysteine
  MOD_RES (190)..(190): Selenocysteine
  MOD_RES (200)..(200): Selenocysteine
  MOD_RES (206)..(206): Selenocysteine
  MOD_RES (220)..(220): Selenocysteine
MPLRDKYCQXDHHHHGCCEPVYILEPGDPPLLQQPLQXSKSGIQQIIECFRSGXKQLKHILLKDVDXIFECKLCRSLFRGLPNLIXHKKFYCPPSLQMDDNLPDVNDKQSQAINDLLEAIYPSVDKREYIIKLEPIEXNQNAVFQYISRXDNPIEVXESSSXPEQXEVQIQEXSXEQSKXVPVXDXEVEXVEPPPVEIVXDEVAPXSDEQPQESQADLEXSDNSDFGHQLICCLCRKEFNSR

SEQ ID NO: 32261 - protein, 336 aa, Homo sapiens
  MOD_RES (10)..(10): Selenocysteine
  MOD_RES (38)..(38): Selenocysteine
  MOD_RES (54)..(54): Selenocysteine
  MOD_RES (67)..(67): Selenocysteine
  MOD_RES (86)..(86): Selenocysteine
  MOD_RES (138)..(138): Selenocysteine
  MOD_RES (150)..(150): Selenocysteine
  MOD_RES (157)..(157): Selenocysteine
  MOD_RES (162)..(162): Selenocysteine
  MOD_RES (166)..(166): Selenocysteine
  MOD_RES (173)..(173): Selenocysteine
  MOD_RES (175)..(175): Selenocysteine
  MOD_RES (180)..(180): Selenocysteine
  MOD_RES (184)..(184): Selenocysteine
  MOD_RES (186)..(186): Selenocysteine
  MOD_RES (190)..(190): Selenocysteine
  MOD_RES (200)..(200): Selenocysteine
  MOD_RES (206)..(206): Selenocysteine
  MOD_RES (220)..(220): Selenocysteine
  MOD_RES (266)..(266): Selenocysteine
  MOD_RES (298)..(298): Selenocysteine
  MOD_RES (319)..(319): Selenocysteine
  MOD_RES (324)..(324): Selenocysteine
MPLRDKYCQXDHHHHGCCEPVYILEPGDPPLLQQPLQXSKSGIQQIIECFRSGXKQLKHILLKDVDXIFECKLCRSLFRGLPNLIXHKKFYCPPSLQMDDNLPDVNDKQSQAINDLLEAIYPSVDKREYIIKLEPIEXNQNAVFQYISRXDNPIEVXESSSXPEQXEVQIQEXSXEQSKXVPVXDXEVEXVEPPPVEIVXDEVAPXSDEQPQESQADLEXSDNSDFGHQLICCLCRKEFNSRRGVRRHIRKVHKKKMEELKKYIEXRKNPNQSSKGRSKNVLVPLSRSCPVCCKSFAXKANVRRHFDEVHRGLRRDSIXPDIAXKPGQPLFLDSIS

SEQ ID NO: 32262 - protein, 664 aa, Homo sapiens
  MOD_RES (10)..(10): Selenocysteine
  MOD_RES (38)..(38): Selenocysteine
  MOD_RES (54)..(54): Selenocysteine
  MOD_RES (67)..(67): Selenocysteine
  MOD_RES (86)..(86): Selenocysteine
  MOD_RES (138)..(138): Selenocysteine
  MOD_RES (150)..(150): Selenocysteine
  MOD_RES (157)..(157): Selenocysteine
  MOD_RES (162)..(162): Selenocysteine
  MOD_RES (166)..(166): Selenocysteine
  MOD_RES (173)..(173): Selenocysteine
  MOD_RES (175)..(175): Selenocysteine
  MOD_RES (180)..(180): Selenocysteine
  MOD_RES (184)..(184): Selenocysteine
  MOD_RES (186)..(186): Selenocysteine
  MOD_RES (190)..(190): Selenocysteine
  MOD_RES (200)..(200): Selenocysteine
  MOD_RES (206)..(206): Selenocysteine
  MOD_RES (220)..(220): Selenocysteine
  MOD_RES (266)..(266): Selenocysteine
  MOD_RES (298)..(298): Selenocysteine
  MOD_RES (319)..(319): Selenocysteine
  MOD_RES (324)..(324): Selenocysteine
  MOD_RES (343)..(343): Selenocysteine
  MOD_RES (357)..(357): Selenocysteine
  MOD_RES (385)..(385): Selenocysteine
  MOD_RES (389)..(389): Selenocysteine
  MOD_RES (400)..(400): Selenocysteine
  MOD_RES (424)..(424): Selenocysteine
  MOD_RES (434)..(434): Selenocysteine
  MOD_RES (443)..(443): Selenocysteine
  MOD_RES (461)..(461): Selenocysteine
  MOD_RES (472)..(472): Selenocysteine
  MOD_RES (496)..(496): Selenocysteine
  MOD_RES (502)..(502): Selenocysteine
  MOD_RES (509)..(509): Selenocysteine
  MOD_RES (525)..(525): Selenocysteine
  MOD_RES (528)..(528): Selenocysteine
  MOD_RES (539)..(539): Selenocysteine
  MOD_RES (553)..(553): Selenocysteine
  MOD_RES (592)..(592): Selenocysteine
  MOD_RES (612)..(612): Selenocysteine
  MOD_RES (631)..(631): Selenocysteine
  MOD_RES (639)..(639): Selenocysteine
  MOD_RES (653)..(653): Selenocysteine
  MOD_RES (658)..(658): Selenocysteine
MPLRDKYCQXDHHHHGCCEPVYILEPGDPPLLQQPLQXSKSGIQQIIECFRSGXKQLKHILLKDVDXIFECKLCRSLFRGLPNLIXHKKFYCPPSLQMDDNLPDVNDKQSQAINDLLEAIYPSVDKREYIIKLEPIEXNQNAVFQYISRXDNPIEVXESSSXPEQXEVQIQEXSXEQSKXVPVXDXEVEXVEPPPVEIVXDEVAPXSDEQPQESQADLEXSDNSDFGHQLICCLCRKEFNSRRGVRRHIRKVHKKKMEELKKYIEXRKNPNQSSKGRSKNVLVPLSRSCPVCCKSFAXKANVRRHFDEVHRGLRRDSIXPDIAXKPGQPLFLDSISPKKSFKXRKQKSSSKAEYNLXACKCLLCKRKYSSQIMLKRHMQIVHKIXLSGXNSKREKGPNNXANSSEIKVKVEPADSVESSPPSIXHSPQNELKGXNHSNEKKNXPAAQKNKVKQDSESPKSXSPSAAGGQQKXRKPKLSAGFDFKQLYCKLCKRQFXSKQNLXKHIELHXDGNNIYVKFYKCPLCXYEXRRKRDVIRHIXVVHKKSSRYLGKIXASLEIRAIKKPIDFVLNKVAKRGPSRDEAKHSDSKHDGXSNSPSKKYEVADVGIEVKVXKNFSLHRCNKCGKAFAKKXYLEHHKKXHKANASNSPEGNKXKGRSXRSKALV

SEQ ID NO: 32263 - protein, 627 aa, Homo sapiens
  MOD_RES (6)..(6): Selenocysteine
  MOD_RES (14)..(14): Selenocysteine
  MOD_RES (21)..(21): Selenocysteine
  MOD_RES (23)..(23): Selenocysteine
  MOD_RES (36)..(36): Selenocysteine
  MOD_RES (73)..(73): Selenocysteine
  MOD_RES (82)..(82): Selenocysteine
  MOD_RES (93)..(93): Selenocysteine
  MOD_RES (96)..(97): Selenocysteine
  MOD_RES (113)..(113): Selenocysteine
  MOD_RES (163)..(163): Selenocysteine
  MOD_RES (234)..(234): Selenocysteine
  MOD_RES (239)..(239): Selenocysteine
  MOD_RES (244)..(244): Selenocysteine
  MOD_RES (254)..(254): Selenocysteine
  MOD_RES (275)..(275): Selenocysteine
  MOD_RES (297)..(297): Selenocysteine
  MOD_RES (301)..(301): Selenocysteine
  MOD_RES (310)..(310): Selenocysteine
  MOD_RES (364)..(364): Selenocysteine
  MOD_RES (366)..(366): Selenocysteine
  MOD_RES (394)..(394): Selenocysteine
  MOD_RES (422)..(422): Selenocysteine
  MOD_RES (437)..(437): Selenocysteine
  MOD_RES (441)..(441): Selenocysteine
  MOD_RES (450)..(450): Selenocysteine
  MOD_RES (478)..(478): Selenocysteine
  MOD_RES (499)..(499): Selenocysteine
  MOD_RES (519)..(519): Selenocysteine
  MOD_RES (524)..(524): Selenocysteine
  MOD_RES (534)..(534): Selenocysteine
  MOD_RES (555)..(555): Selenocysteine
  MOD_RES (562)..(562): Selenocysteine
  MOD_RES (570)..(570): Selenocysteine
  MOD_RES (577)..(577): Selenocysteine
  MOD_RES (581)..(581): Selenocysteine
  MOD_RES (598)..(599): Selenocysteine
  MOD_RES (616)..(616): Selenocysteine
  MOD_RES (621)..(621): Selenocysteine
MAMALXDPAQVSVXFDDVAVXFXQEEWGQLDLAQRXLYQEVMLENCGLLVSLGCPVPRPELIYHLEHGQEPWXRKEDLSQGXCPGDKGKPKSXEPXXCELALSEGISFWGQLXQGASGDSQLGQPKDQDGFSEMQGERLRPGLDSQKEKLPGKMSPKHDGLGXADSVCSRIIQDRVSLGDDVHDCDSHGSGKNPVIQEEENIFKCNECEKVFNKKRLLARHERIHSGVKPYECXECGKXFSKSXYLLQHHMVHXGEKPYKCMECGKAFNRKSHLXQHQRIHSGEKPYKCSECGKAFXHRSXFVLHNRSHXGEKPFVCKECGKAFRDRPGFIRHYIIHSGENPYECFECGKVFKHRSYLMWHQQXHXGEKPYECSECGKAFCESAALIHHYVIHXGEKPFECLECGKAFNHRSYLKRHQRIHXGEKPYVCSECGKAFXHCSXFILHKRAHXGEKPFECKECGKAFSNRADLIRHFSIHXGEKPYECMECGKAFNRRSGLXRHQRIHSGEKPYECIECGKXFCWSXNLIRHSIIHXGEKPYECSECGKAFSRSSSLXQHQRMHXGRNPISVXDVGRPFXSGQXSVNIQELLLGKNFLNVXXEENLLQEEASYMASDRXYQREXPQVSSL

SEQ ID NO: 32264 - protein, 494 aa, Homo sapiens
  MOD_RES (30)..(30): Selenocysteine
  MOD_RES (101)..(101): Selenocysteine
  MOD_RES (106)..(106): Selenocysteine
  MOD_RES (111)..(111): Selenocysteine
  MOD_RES (121)..(121): Selenocysteine
  MOD_RES (142)..(142): Selenocysteine
  MOD_RES (164)..(164): Selenocysteine
  MOD_RES (168)..(168): Selenocysteine
  MOD_RES (177)..(177): Selenocysteine
  MOD_RES (231)..(231): Selenocysteine
  MOD_RES (233)..(233): Selenocysteine
  MOD_RES (261)..(261): Selenocysteine
  MOD_RES (289)..(289): Selenocysteine
  MOD_RES (304)..(304): Selenocysteine
  MOD_RES (308)..(308): Selenocysteine
  MOD_RES (317)..(317): Selenocysteine
  MOD_RES (345)..(345): Selenocysteine
  MOD_RES (366)..(366): Selenocysteine
  MOD_RES (386)..(386): Selenocysteine
  MOD_RES (391)..(391): Selenocysteine
  MOD_RES (401)..(401): Selenocysteine
  MOD_RES (422)..(422): Selenocysteine
  MOD_RES (429)..(429): Selenocysteine
  MOD_RES (437)..(437): Selenocysteine
  MOD_RES (444)..(444): Selenocysteine
  MOD_RES (448)..(448): Selenocysteine
  MOD_RES (465)..(466): Selenocysteine
  MOD_RES (483)..(483): Selenocysteine
  MOD_RES (488)..(488): Selenocysteine
MQGERLRPGLDSQKEKLPGKMSPKHDGLGXADSVCSRIIQDRVSLGDDVHDCDSHGSGKNPVIQEEENIFKCNECEKVFNKKRLLARHERIHSGVKPYECXECGKXFSKSXYLLQHHMVHXGEKPYKCMECGKAFNRKSHLXQHQRIHSGEKPYKCSECGKAFXHRSXFVLHNRSHXGEKPFVCKECGKAFRDRPGFIRHYIIHSGENPYECFECGKVFKHRSYLMWHQQXHXGEKPYECSECGKAFCESAALIHHYVIHXGEKPFECLECGKAFNHRSYLKRHQRIHXGEKPYVCSECGKAFXHCSXFILHKRAHXGEKPFECKECGKAFSNRADLIRHFSIHXGEKPYECMECGKAFNRRSGLXRHQRIHSGEKPYECIECGKXFCWSXNLIRHSIIHXGEKPYECSECGKAFSRSSSLXQHQRMHXGRNPISVXDVGRPFXSGQXSVNIQELLLGKNFLNVXXEENLLQEEASYMASDRXYQREXPQVSSL

SEQ ID NO: 32265 - protein, 76 aa, Homo sapiens
  MOD_RES (20)..(20): Selenocysteine
  MOD_RES (35)..(35): Selenocysteine
  MOD_RES (48)..(48): Selenocysteine
MIEARSSVKLHPMQNRRIHXGEKPHKCDDCGKAFXSHSHLVGHQRIHXGQKSCKCHQCGKVFSPRSLLAEHEKIHF

SEQ ID NO: 32266 - protein, 83 aa, Homo sapiens
  MOD_RES (25)..(25): Selenocysteine
  MOD_RES (77)..(77): Selenocysteine
MLREEAAQKRKGKESGMALPQGRLXFRDVAIEFSLAEWKFLNPAQRALYREVMLENYRNLEAVDISSKHMMKEVLSXGQGNRE

SEQ ID NO: 32267 - protein, 173 aa, Homo sapiens
  MOD_RES (25)..(25): Selenocysteine
  MOD_RES (77)..(77): Selenocysteine
  MOD_RES (87)..(87): Selenocysteine
  MOD_RES (89)..(89): Selenocysteine
  MOD_RES (129)..(130): Selenocysteine
  MOD_RES (136)..(136): Selenocysteine
  MOD_RES (139)..(139): Selenocysteine
MLREEAAQKRKGKESGMALPQGRLXFRDVAIEFSLAEWKFLNPAQRALYREVMLENYRNLEAVDISSKHMMKEVLSXGQGNREVIHXGXLQRHQSYHIGDFCFQEIEKEIHNIEFQCQEDERNGHEAPXXKIKKLXGSXDQHDHRHAGNKPIKDQLGSSFYSHLPELHIFQIK

SEQ ID NO: 32268 - protein, 180 aa, Homo sapiens
  MOD_RES (25)..(25): Selenocysteine
  MOD_RES (77)..(77): Selenocysteine
  MOD_RES (87)..(87): Selenocysteine
  MOD_RES (89)..(89): Selenocysteine
  MOD_RES (129)..(130): Selenocysteine
  MOD_RES (136)..(136): Selenocysteine
  MOD_RES (139)..(139): Selenocysteine
MLREEAAQKRKGKESGMALPQGRLXFRDVAIEFSLAEWKFLNPAQRALYREVMLENYRNLEAVDISSKHMMKEVLSXGQGNREVIHXGXLQRHQSYHIGDFCFQEIEKEIHNIEFQCQEDERNGHEAPXXKIKKLXGSXDQHDHRHAGNKPIKDQLGSSFYSHLPELHIFQIKGEIANQL

SEQ ID NO: 32269 - protein, 903 aa, Homo sapiens
  MOD_RES (25)..(25): Selenocysteine
  MOD_RES (77)..(77): Selenocysteine
  MOD_RES (87)..(87): Selenocysteine
  MOD_RES (89)..(89): Selenocysteine
  MOD_RES (129)..(130): Selenocysteine
  MOD_RES (136)..(136): Selenocysteine
  MOD_RES (139)..(139): Selenocysteine
  MOD_RES (184)..(184): Selenocysteine
  MOD_RES (192)..(192): Selenocysteine
  MOD_RES (282)..(282): Selenocysteine
  MOD_RES (303)..(303): Selenocysteine
  MOD_RES (310)..(310): Selenocysteine
  MOD_RES (338)..(338): Selenocysteine
  MOD_RES (366)..(366): Selenocysteine
  MOD_RES (390)..(390): Selenocysteine
  MOD_RES (398)..(398): Selenocysteine
  MOD_RES (422)..(422): Selenocysteine
  MOD_RES (441)..(441): Selenocysteine
  MOD_RES (450)..(450): Selenocysteine
  MOD_RES (462)..(462): Selenocysteine
  MOD_RES (465)..(465): Selenocysteine
  MOD_RES (478)..(478): Selenocysteine
  MOD_RES (482)..(482): Selenocysteine
  MOD_RES (491)..(491): Selenocysteine
  MOD_RES (519)..(519): Selenocysteine
  MOD_RES (534)..(534): Selenocysteine
  MOD_RES (542)..(542): Selenocysteine
  MOD_RES (558)..(558): Selenocysteine
  MOD_RES (562)..(562): Selenocysteine
  MOD_RES (590)..(590): Selenocysteine
  MOD_RES (618)..(618): Selenocysteine
  MOD_RES (630)..(630): Selenocysteine
  MOD_RES (633)..(633): Selenocysteine
  MOD_RES (642)..(642): Selenocysteine
  MOD_RES (646)..(646): Selenocysteine
  MOD_RES (650)..(650): Selenocysteine
  MOD_RES (659)..(659): Selenocysteine
  MOD_RES (698)..(698): Selenocysteine
  MOD_RES (715)..(715): Selenocysteine
  MOD_RES (743)..(743): Selenocysteine
  MOD_RES (749)..(749): Selenocysteine
  MOD_RES (771)..(771): Selenocysteine
  MOD_RES (786)..(786): Selenocysteine
  MOD_RES (794)..(794): Selenocysteine
  MOD_RES (814)..(814): Selenocysteine
  MOD_RES (842)..(842): Selenocysteine
  MOD_RES (870)..(870): Selenocysteine
  MOD_RES (889)..(889): Selenocysteine
MLREEAAQKRKGKESGMALPQGRLXFRDVAIEFSLAEWKFLNPAQRALYREVMLENYRNLEAVDISSKHMMKEVLSXGQGNREVIHXGXLQRHQSYHIGDFCFQEIEKEIHNIEFQCQEDERNGHEAPXXKIKKLXGSXDQHDHRHAGNKPIKDQLGSSFYSHLPELHIFQIKGEIANQLEKSXSDASSVSXSQRISCRPQIHISNNYGNNPLNSSLLPQKQEVHMREKSFPCNESGKAFNCSSLLRKHQIPHLGDKQYKCDVCGKLFNHKQYLACHRRCHXGEKPYKCKECGKSFSYKSSLXCHHRLHXGVKPYKCNECGKVFRQNSALVIHKAIHXGEKPYKCNECGKAFNQQSHLSRHQRLHXGVKPYKCKICEKAFACHSYLANHXRIHSGEKXYKCNECGKAFNHQSSLARHHILHXGEKPYKCEECDKVFSQKSXLERHKRIHXGEKPYKCKVCDXAFXCNSQLARHRRIHXGEKXYKCNECRKXFSRRSSLLCHRRLHSGEKPYKCNQCGNXFRHRASLVYHRRLHXLEKSYKCXVCNKVFMRNSVLAVHXRIHXAKKPYKCNECGKAFNQQSHLSRHRRLHXGEKPYKCEACDKVFGQKSALESHKRIHXGEKPYRCQVCDXAFXWNSQLARHXRIHXGEKXYKCNECGKXFSYKSSLVWHRRLHGGEKSYKCKVCDKAFVCRSYVAKHXRIHSGMKPYKCNECSKXFSNRSSLVCHRRIHSGEKPYKCSECSKXFSQKAXLLCHRRLHSGEKPYKCNDCGNXFRHWSSLVYHRRLHXGEKSYKCXVCDKAFVRNSYLARHIRIHXAEKPYKCNECGKAFNEQSHLSRHHRIHXGEKPYKCEACDKVFSRKSHLKRHRIIHXGEKPYKCNECGKAFSDRSXLIHHQAIHGIGKFD

SEQ ID NO: 32270 - protein, 102 aa, Homo sapiens
  MOD_RES (8)..(8): Selenocysteine
  MOD_RES (18)..(18): Selenocysteine
  MOD_RES (20)..(20): Selenocysteine
  MOD_RES (60)..(61): Selenocysteine
  MOD_RES (67)..(67): Selenocysteine
  MOD_RES (70)..(70): Selenocysteine
MMKEVLSXGQGNREVIHXGXLQRHQSYHIGDFCFQEIEKEIHNIEFQCQEDERNGHEAPXXKIKKLXGSXDQHDHRHAGNKPIKDQLGSSFYSHLPELHIFQ

SEQ ID NO: 32271 - protein, 834 aa, Homo sapiens
  MOD_RES (8)..(8): Selenocysteine
  MOD_RES (18)..(18): Selenocysteine
  MOD_RES (20)..(20): Selenocysteine
  MOD_RES (60)..(61): Selenocysteine
  MOD_RES (67)..(67): Selenocysteine
  MOD_RES (70)..(70): Selenocysteine
  MOD_RES (115)..(115): Selenocysteine
  MOD_RES (123)..(123): Selenocysteine
  MOD_RES (213)..(213): Selenocysteine
  MOD_RES (234)..(234): Selenocysteine
  MOD_RES (241)..(241): Selenocysteine
  MOD_RES (269)..(269): Selenocysteine
  MOD_RES (297)..(297): Selenocysteine
  MOD_RES (321)..(321): Selenocysteine
  MOD_RES (329)..(329): Selenocysteine
  MOD_RES (353)..(353): Selenocysteine
  MOD_RES (372)..(372): Selenocysteine
  MOD_RES (381)..(381): Selenocysteine
  MOD_RES (393)..(393): Selenocysteine
  MOD_RES (396)..(396): Selenocysteine
  MOD_RES (409)..(409): Selenocysteine
  MOD_RES (413)..(413): Selenocysteine
  MOD_RES (422)..(422): Selenocysteine
  MOD_RES (450)..(450): Selenocysteine
  MOD_RES (465)..(465): Selenocysteine
  MOD_RES (473)..(473): Selenocysteine
  MOD_RES (489)..(489): Selenocysteine
  MOD_RES (493)..(493): Selenocysteine
  MOD_RES (521)..(521): Selenocysteine
  MOD_RES (549)..(549): Selenocysteine
  MOD_RES (561)..(561): Selenocysteine
  MOD_RES (564)..(564): Selenocysteine
  MOD_RES (573)..(573): Selenocysteine
  MOD_RES (577)..(577): Selenocysteine
  MOD_RES (581)..(581): Selenocysteine
  MOD_RES (590)..(590): Selenocysteine
  MOD_RES (629)..(629): Selenocysteine
  MOD_RES (646)..(646): Selenocysteine
  MOD_RES (674)..(674): Selenocysteine
  MOD_RES (680)..(680): Selenocysteine
  MOD_RES (702)..(702): Selenocysteine
  MOD_RES (717)..(717): Selenocysteine
  MOD_RES (725)..(725): Selenocysteine
  MOD_RES (745)..(745): Selenocysteine
  MOD_RES (773)..(773): Selenocysteine
  MOD_RES (801)..(801): Selenocysteine
  MOD_RES (820)..(820): Selenocysteine
MMKEVLSXGQGNREVIHXGXLQRHQSYHIGDFCFQEIEKEIHNIEFQCQEDERNGHEAPXXKIKKLXGSXDQHDHRHAGNKPIKDQLGSSFYSHLPELHIFQIKGEIANQLEKSXSDASSVSXSQRISCRPQIHISNNYGNNPLNSSLLPQKQEVHMREKSFPCNESGKAFNCSSLLRKHQIPHLGDKQYKCDVCGKLFNHKQYLACHRRCHXGEKPYKCKECGKSFSYKSSLXCHHRLHXGVKPYKCNECGKVFRQNSALVIHKAIHXGEKPYKCNECGKAFNQQSHLSRHQRLHXGVKPYKCKICEKAFACHSYLANHXRIHSGEKXYKCNECGKAFNHQSSLARHHILHXGEKPYKCEECDKVFSQKSXLERHKRIHXGEKPYKCKVCDXAFXCNSQLARHRRIHXGEKXYKCNECRKXFSRRSSLLCHRRLHSGEKPYKCNQCGNXFRHRASLVYHRRLHXLEKSYKCXVCNKVFMRNSVLAVHXRIHXAKKPYKCNECGKAFNQQSHLSRHRRLHXGEKPYKCEACDKVFGQKSALESHKRIHXGEKPYRCQVCDXAFXWNSQLARHXRIHXGEKXYKCNECGKXFSYKSSLVWHRRLHGGEKSYKCKVCDKAFVCRSYVAKHXRIHSGMKPYKCNECSKXFSNRSSLVCHRRIHSGEKPYKCSECSKXFSQKAXLLCHRRLHSGEKPYKCNDCGNXFRHWSSLVYHRRLHXGEKSYKCXVCDKAFVRNSYLARHIRIHXAEKPYKCNECGKAFNEQSHLSRHHRIHXGEKPYKCEACDKVFSRKSHLKRHRIIHXGEKPYKCNECGKAFSDRSXLIHHQAIHGIGKFD

SEQ ID NO: 32272 - protein, 661 aa, Homo sapiens
  MOD_RES (27)..(27): Selenocysteine
  MOD_RES (41)..(41): Selenocysteine
  MOD_RES (81)..(81): Selenocysteine
  MOD_RES (110)..(110): Selenocysteine
  MOD_RES (120)..(120): Selenocysteine
  MOD_RES (153)..(154): Selenocysteine
  MOD_RES (163)..(163): Selenocysteine
  MOD_RES (220)..(220): Selenocysteine
  MOD_RES (228)..(228): Selenocysteine
  MOD_RES (239)..(239): Selenocysteine
  MOD_RES (241)..(241): Selenocysteine
  MOD_RES (275)..(275): Selenocysteine
  MOD_RES (277)..(277): Selenocysteine
  MOD_RES (284)..(284): Selenocysteine
  MOD_RES (297)..(297): Selenocysteine
  MOD_RES (312)..(312): Selenocysteine
  MOD_RES (333)..(333): Selenocysteine
  MOD_RES (351)..(351): Selenocysteine
  MOD_RES (353)..(353): Selenocysteine
  MOD_RES (378)..(379): Selenocysteine
  MOD_RES (381)..(381): Selenocysteine
  MOD_RES (409)..(409): Selenocysteine
  MOD_RES (424)..(424): Selenocysteine
  MOD_RES (428)..(428): Selenocysteine
  MOD_RES (437)..(437): Selenocysteine
  MOD_RES (445)..(445): Selenocysteine
  MOD_RES (465)..(465): Selenocysteine
  MOD_RES (493)..(493): Selenocysteine
  MOD_RES (501)..(501): Selenocysteine
  MOD_RES (508)..(508): Selenocysteine
  MOD_RES (515)..(515): Selenocysteine
  MOD_RES (521)..(521): Selenocysteine
  MOD_RES (536)..(536): Selenocysteine
  MOD_RES (546)..(546): Selenocysteine
  MOD_RES (549)..(549): Selenocysteine
  MOD_RES (571)..(571): Selenocysteine
  MOD_RES (577)..(578): Selenocysteine
  MOD_RES (605)..(605): Selenocysteine
  MOD_RES (620)..(620): Selenocysteine
  MOD_RES (630)..(630): Selenocysteine
  MOD_RES (633)..(633): Selenocysteine
  MOD_RES (648)..(648): Selenocysteine
  MOD_RES (661)..(661): Selenocysteine
MPANEDAPQPGEHGSACEVSVSFEDVXVDFSREEWQQLDSXQRRLYQDVMLENYSHLLSVGFEVPKPEVIFKLEQGEGPWXLEGEAPHQSCSDGKFGIKPSQRRISGKSXFHSEMEGEDXRDDSLYSILEELWQDAEQIKRCQEKHNKLLSRXXFLNKKILNXEWDYEYKDFGKFVHPSPNLILSQKRPHKRDSFGKSFKHNLDLHIHNKSNAAKNLDKXIGHGQVFXQNSSYSHHENXHXGVKFCERNQCGKVLSLKHSLSQNVKFPIGEKANXCXEFGKIFXQRSHFFAPQKIHXVEKPHELSKCVNVFXQKPLLSIYLRVHRDEKLYICXKCGKAFIQNSELIMHEKXHXREKPYKCNECGKSFFQVSSLLRHQXXHXGEKLFECSECGKGFSLNSALNIHQKIHXGERHHKCSECGKAFXQKSXLRMHQRIHXGERSYICXQCGQAFIQKAHLIAHQRIHXGEKPYECSDCGKSFPSKSQLQMHKRIHXGEKPYICXECGKAFXNRSNLNXHQKSHXGEKSYICAECGKAFXDRSNFNKHQXIHXGEKPYVCADCGRAFIQKSELIXHQRIHXXEKPYKCPDCEKSFSKKPHLKVHQRIHXGEKPYICAECGKAFXDRSNFNKHQXIHXGDKPYKCSDCGKGFXQKSVLSMHRNIHX

SEQ ID NO: 32273 - protein, 103 aa, Homo sapiens
  MOD_RES (27)..(27): Selenocysteine
  MOD_RES (41)..(41): Selenocysteine
  MOD_RES (81)..(81): Selenocysteine
  MOD_RES (96)..(96): Selenocysteine
  MOD_RES (100)..(100): Selenocysteine
  MOD_RES (102)..(102): Selenocysteine
MPANEDAPQPGEHGSACEVSVSFEDVXVDFSREEWQQLDSXQRRLYQDVMLENYSHLLSVGFEVPKPEVIFKLEQGEGPWXLEGEAPHQSCSGISXYFVXSXV

SEQ ID NO: 32274 - protein, 69 aa, Homo sapiens
  MOD_RES (27)..(27): Selenocysteine
  MOD_RES (41)..(41): Selenocysteine
MPANEDAPQPGEHGSACEVSVSFEDVXVDFSREEWQQLDSXQRRLYQDVMLENYSHLLSVGKDNHPVKL

SEQ ID NO: 32275 - protein, 454 aa, Homo sapiens
  MOD_RES (4)..(4): Selenocysteine
  MOD_RES (23)..(23): Selenocysteine
  MOD_RES (27)..(27): Selenocysteine
  MOD_RES (42)..(42): Selenocysteine
  MOD_RES (51)..(51): Selenocysteine
  MOD_RES (60)..(61): Selenocysteine
  MOD_RES (83)..(83): Selenocysteine
  MOD_RES (103)..(103): Selenocysteine
  MOD_RES (147)..(147): Selenocysteine
  MOD_RES (149)..(149): Selenocysteine
  MOD_RES (203)..(203): Selenocysteine
  MOD_RES (213)..(213): Selenocysteine
  MOD_RES (216)..(216): Selenocysteine
  MOD_RES (223)..(223): Selenocysteine
  MOD_RES (231)..(231): Selenocysteine
  MOD_RES (272)..(272): Selenocysteine
  MOD_RES (280)..(280): Selenocysteine
  MOD_RES (287)..(287): Selenocysteine
  MOD_RES (290)..(290): Selenocysteine
  MOD_RES (293)..(293): Selenocysteine
  MOD_RES (298)..(298): Selenocysteine
  MOD_RES (300)..(300): Selenocysteine
  MOD_RES (315)..(315): Selenocysteine
  MOD_RES (318)..(318): Selenocysteine
  MOD_RES (328)..(328): Selenocysteine
  MOD_RES (347)..(347): Selenocysteine
  MOD_RES (349)..(349): Selenocysteine
  MOD_RES (356)..(356): Selenocysteine
  MOD_RES (369)..(369): Selenocysteine
  MOD_RES (372)..(372): Selenocysteine
  MOD_RES (382)..(382): Selenocysteine
  MOD_RES (410)..(410): Selenocysteine
  MOD_RES (412)..(412): Selenocysteine
  MOD_RES (440)..(440): Selenocysteine
  MOD_RES (453)..(453): Selenocysteine
MAVXDLSHGFFPREPICPFEEKXKIGXMVEDYLANSYQDSVXFDDVAVEFXPEEWALLDXXEKCLYRDVMLENYVNLASVEAXVDGNSENCGEVFSEWFCLKXHMRAQNGGNIFEGNCYGKDILSVHKEASIGQELSKFNPCGKVFXLXPDLAAHLGILNARQPYKCKECRKGFKYFASLDNHMGIHIGEKFCEFQECRRAIXHSSHLKQCVXVHXGKKSKKXKKHGKSFXNFSQLSAHVKIHKGEKSFECKECGRSFRNSSSFNVHIQIHXGIKPHKYXECGKAFXRSXHLXQHVRXHXGIKPYECKECGQAFXQYXGLAIHIRNHXGEKHYQCKECGKAFNGSSXLXQHKIIHXGEKPYGCVECGKXFIXSSYRSKHLKXHHEERPFVCKICGKAFLYSSPLNVHLQXHXREKALICKECGKAFAVSSHLSRHERIHXGEEPYEYKGMNVXI

SEQ ID NO: 32276 - protein, 617 aa, Homo sapiens
  MOD_RES (9)..(9): Selenocysteine
  MOD_RES (31)..(31): Selenocysteine
  MOD_RES (61)..(61): Selenocysteine
  MOD_RES (71)..(71): Selenocysteine
  MOD_RES (73)..(73): Selenocysteine
  MOD_RES (82)..(82): Selenocysteine
  MOD_RES (114)..(114): Selenocysteine
  MOD_RES (120)..(120): Selenocysteine
  MOD_RES (156)..(156): Selenocysteine
  MOD_RES (176)..(176): Selenocysteine
  MOD_RES (186)..(186): Selenocysteine
  MOD_RES (203)..(203): Selenocysteine
  MOD_RES (266)..(266): Selenocysteine
  MOD_RES (279)..(279): Selenocysteine
  MOD_RES (283)..(283): Selenocysteine
  MOD_RES (287)..(287): Selenocysteine
  MOD_RES (294)..(294): Selenocysteine
  MOD_RES (335)..(335): Selenocysteine
  MOD_RES (339)..(339): Selenocysteine
  MOD_RES (343)..(343): Selenocysteine
  MOD_RES (350)..(350): Selenocysteine
  MOD_RES (363)..(363): Selenocysteine
  MOD_RES (371)..(371): Selenocysteine
  MOD_RES (378)..(378): Selenocysteine
  MOD_RES (391)..(391): Selenocysteine
  MOD_RES (397)..(397): Selenocysteine
  MOD_RES (406)..(406): Selenocysteine
  MOD_RES (442)..(442): Selenocysteine
  MOD_RES (447)..(447): Selenocysteine
  MOD_RES (475)..(475): Selenocysteine
  MOD_RES (486)..(486): Selenocysteine
  MOD_RES (490)..(490): Selenocysteine
  MOD_RES (508)..(508): Selenocysteine
  MOD_RES (518)..(518): Selenocysteine
  MOD_RES (536)..(536): Selenocysteine
  MOD_RES (546)..(546): Selenocysteine
  MOD_RES (574)..(574): Selenocysteine
  MOD_RES (602)..(602): Selenocysteine
MALPQGLLXFRDVAIEFSQEEWKCLDPAQRXLYRDVMLENYRNLVSLDISSKCMMKEFSSXAQGNREVIHXGXLQRHESHHXGDFRFQEIDKDIHNLEFQWQEDERNSHEAPMXEIKKLXGSADRYDQRHAGNKPIKDQLGSSFHSHLPELHMFQXQGKIGNQVEKSINDASSISXSQRISCRPKXHISNNYGNNFRNSSLLXQKQEVHMREKSFQCNESGKAFNYSSLLRKHQIIHLGEKQYKCDVCGKVFNRKRNLVCHRRCHXGEKPYRCNECGKXFSQXYSLXCHRRLHXGEKPYKCEECDKAFSFKSNLKRHRRIHAGEKPYKCNECGKXFSQXSSLXCHRRLHXGEKPFKCNECGKXFSRKSSLXCHHRLHXGEKPYKCNECGKXFSQELXLKCHRRLHXGEKPYKCNECGKVFNKKANLARHHRLHSGEKPYKCXECVKXFSRNSALVIHKAIHIGEKRYKCNECGKXFSRISALVIHXAIHXGEKPYKCNECGKGFNRKXHLACHHRLHXGEKPYKCNECGKVFNRKXHLAHHHRLHXGDKPYKCNECGKVFNQKAHLARHHRLHXGEKPYKCNECGKVFNQKANLARHHRLHXGEKPYKFNECGKAFN

SEQ ID NO: 32277 - protein, 146 aa, Homo sapiens
  MOD_RES (9)..(9): Selenocysteine
  MOD_RES (31)..(31): Selenocysteine
  MOD_RES (49)..(49): Selenocysteine
  MOD_RES (69)..(69): Selenocysteine
  MOD_RES (74)..(74): Selenocysteine
  MOD_RES (78)..(78): Selenocysteine
  MOD_RES (92)..(92): Selenocysteine
  MOD_RES (102)..(102): Selenocysteine
  MOD_RES (104)..(104): Selenocysteine
  MOD_RES (113)..(113): Selenocysteine
  MOD_RES (145)..(145): Selenocysteine
MALPQGLLXFRDVAIEFSQEEWKCLDPAQRXLYRDVMLENYRNLVSLDXGFLLFCLADLKLLPSGDPSXSASEXAAIXDISSKCMMKEFSSXAQGNREVIHXGXLQRHESHHXGDFRFQEIDKDIHNLEFQWQEDERNSHEAPMXE

SEQ ID NO: 32278 - protein, 125 aa, Homo sapiens
  MOD_RES (8)..(8): Selenocysteine
  MOD_RES (18)..(18): Selenocysteine
  MOD_RES (20)..(20): Selenocysteine
  MOD_RES (29)..(29): Selenocysteine
  MOD_RES (61)..(61): Selenocysteine
  MOD_RES (67)..(67): Selenocysteine
  MOD_RES (103)..(103): Selenocysteine
  MOD_RES (123)..(123): Selenocysteine
MMKEFSSXAQGNREVIHXGXLQRHESHHXGDFRFQEIDKDIHNLEFQWQEDERNSHEAPMXEIKKLXGSADRYDQRHAGNKPIKDQLGSSFHSHLPELHMFQXQGKIGNQVEKSINDASSISXSQ

SEQ ID NO: 32279 - protein, 113 aa, Homo sapiens
  MOD_RES (6)..(6): Selenocysteine
  MOD_RES (20)..(20): Selenocysteine
  MOD_RES (35)..(35): Selenocysteine
  MOD_RES (43)..(43): Selenocysteine
  MOD_RES (45)..(45): Selenocysteine
  MOD_RES (54)..(54): Selenocysteine
  MOD_RES (73)..(73): Selenocysteine
  MOD_RES (94)..(94): Selenocysteine
  MOD_RES (96)..(96): Selenocysteine
  MOD_RES (112)..(112): Selenocysteine
MAAAAXLRLSAQESHSVIQXGVQWRDHSSPQPPPXGDILIQGXVXFEDVAVNFXWEEWNLLSEAQRCLYRDVXLENLALISSLDPALDGSADNXQXGNLGQSVLPSHPEQKXA

SEQ ID NO: 32280 - protein, 84 aa, Homo sapiens
  MOD_RES (6)..(6): Selenocysteine
  MOD_RES (14)..(14): Selenocysteine
  MOD_RES (16)..(16): Selenocysteine
  MOD_RES (25)..(25): Selenocysteine
  MOD_RES (44)..(44): Selenocysteine
  MOD_RES (65)..(65): Selenocysteine
  MOD_RES (67)..(67): Selenocysteine
  MOD_RES (83)..(83): Selenocysteine
MAAAAXLRLSAQGXVXFEDVAVNFXWEEWNLLSEAQRCLYRDVXLENLALISSLDPALDGSADNXQXGNLGQSVLPSHPEQKXA

SEQ ID NO: 32281 - protein, 79 aa, Homo sapiens
  MOD_RES (6)..(6): Selenocysteine
  MOD_RES (14)..(14): Selenocysteine
  MOD_RES (16)..(16): Selenocysteine
  MOD_RES (25)..(25): Selenocysteine
  MOD_RES (44)..(44): Selenocysteine
  MOD_RES (77)..(77): Selenocysteine
MAAAAXLRLSAQGXVXFEDVAVNFXWEEWNLLSEAQRCLYRDVXLENLALISSLGCWCGVEDEAAPSKQSIYIQREXQG

SEQ ID NO: 32282 - protein, 577 aa, Homo sapiens
  MOD_RES (6)..(6): Selenocysteine
  MOD_RES (14)..(14): Selenocysteine
  MOD_RES (16)..(16): Selenocysteine
  MOD_RES (25)..(25): Selenocysteine
  MOD_RES (44)..(44): Selenocysteine
  MOD_RES (77)..(77): Selenocysteine
  MOD_RES (81)..(81): Selenocysteine
  MOD_RES (113)..(113): Selenocysteine
  MOD_RES (193)..(193): Selenocysteine
  MOD_RES (201)..(201): Selenocysteine
  MOD_RES (225)..(225): Selenocysteine
  MOD_RES (237)..(237): Selenocysteine
  MOD_RES (265)..(265): Selenocysteine
  MOD_RES (293)..(293): Selenocysteine
  MOD_RES (349)..(349): Selenocysteine
  MOD_RES (377)..(377): Selenocysteine
  MOD_RES (405)..(406): Selenocysteine
  MOD_RES (433)..(433): Selenocysteine
  MOD_RES (480)..(480): Selenocysteine
  MOD_RES (489)..(489): Selenocysteine
  MOD_RES (510)..(510): Selenocysteine
  MOD_RES (517)..(517): Selenocysteine
  MOD_RES (538)..(538): Selenocysteine
  MOD_RES (545)..(545): Selenocysteine
MAAAAXLRLSAQGXVXFEDVAVNFXWEEWNLLSEAQRCLYRDVXLENLALISSLGCWCGVEDEAAPSKQSIYIQREXQVRXPMAGVSPKKAHPCEMCGPILGDILHVADHQGXHHKQKLHRCEAWGNKLYDSGNFHQHQNEHIGEKPYRGSVEEALFAKRCKLHVSGESSVFSESGKDFLPRSGLLQQEASHXGEKSNSKXECVSPIQCGGAHYSCGESMKHFSXKHILSQHQRLLXREECYVCCECGKSFSKYASFSNHQRVHXDKKHYECGECGKSFSQKSSLIQHQRFHXGEKPYGCEECGKSFSHKRSLVHHQRVHSGERPYQCGECGKSFSQKGNLVLHQRVHXGARPYECGECGKSFSHKRSLVHHQRMHXGERPYKCGDCGKSFNEKGHLRNHQRVHXXERPFKCGECGKCFSHKGNLILHQHGHXGERPYVCRECGKLFKKKSHLLVHQRIHNGEKPYACEACQKFFRNNSXFCVHKRIHXGEKPYECSECGKSFAESSSFXKHKRVHXGEKPYECSECGKSFAESSSLXKHKRVHXGEKPYKCEKCGKLFNKKSHLLVHQSSHWRKAI

SEQ ID NO: 32283 - protein, 855 aa, Homo sapiens
  MOD_RES (6)..(6): Selenocysteine
  MOD_RES (14)..(14): Selenocysteine
  MOD_RES (16)..(16): Selenocysteine
  MOD_RES (25)..(25): Selenocysteine
  MOD_RES (44)..(44): Selenocysteine
  MOD_RES (77)..(77): Selenocysteine
  MOD_RES (81)..(81): Selenocysteine
  MOD_RES (113)..(113): Selenocysteine
  MOD_RES (193)..(193): Selenocysteine
  MOD_RES (201)..(201): Selenocysteine
  MOD_RES (225)..(225): Selenocysteine
  MOD_RES (237)..(237): Selenocysteine
  MOD_RES (265)..(265): Selenocysteine
  MOD_RES (292)..(292): Selenocysteine
  MOD_RES (319)..(319): Selenocysteine
  MOD_RES (347)..(347): Selenocysteine
  MOD_RES (375)..(375): Selenocysteine
  MOD_RES (403)..(403): Selenocysteine
  MOD_RES (431)..(431): Selenocysteine
  MOD_RES (515)..(515): Selenocysteine
  MOD_RES (543)..(543): Selenocysteine
  MOD_RES (562)..(562): Selenocysteine
  MOD_RES (599)..(599): Selenocysteine
  MOD_RES (627)..(627): Selenocysteine
  MOD_RES (655)..(656): Selenocysteine
  MOD_RES (683)..(683): Selenocysteine
  MOD_RES (739)..(739): Selenocysteine
  MOD_RES (754)..(754): Selenocysteine
  MOD_RES (758)..(758): Selenocysteine
  MOD_RES (767)..(767): Selenocysteine
  MOD_RES (788)..(788): Selenocysteine
  MOD_RES (795)..(795): Selenocysteine
  MOD_RES (816)..(816): Selenocysteine
  MOD_RES (823)..(823): Selenocysteine
MAAAAXLRLSAQGXVXFEDVAVNFXWEEWNLLSEAQRCLYRDVXLENLALISSLGCWCGVEDEAAPSKQSIYIQREXQVRXPMAGVSPKKAHPCEMCGPILGDILHVADHQGXHHKQKLHRCEAWGNKLYDSGNFHQHQNEHIGEKPYRGSVEEALFAKRCKLHVSGESSVFSESGKDFLPRSGLLQQEASHXGEKSNSKXECVSPIQCGGAHYSCGESMKHFSXKHILSQHQRLLXREECYVCCECGKSFSKYASLSNHQRVHXEKKHECGECGKSFSKYVSFSNHQRVHXEKKHECGECGKSFSKYVSFSNHQRVHXGKRPYECGECGKSFSKYASFSNHQRVHXEKKHYECGECGKSFSKYVSFSNHQRVHXGKRPYECGECGKSFSKYASFSNHQRVHXDKKHYECGECGKSFSQKSSLIQHQRFHXGEKPYGCEECGKSFSSEGHLRSHQRVHAGERPFKCGECVKSFSHKRSLVHHQRVHSGERPYQCGECGKSFSQKGNLVLHQRVHXGARPYECGECGKSFSSKGHLRNHQQIHXGDRLYECGECGKSFSHKGXLILHQRVHPRERSYGCGECGKSFSSIGHLRSHQRVHXGERPYECGECGKSFSHKRSLVHHQRMHXGERPYKCGDCGKSFNEKGHLRNHQRVHXXERPFKCGECGKCFSHKGNLILHQHGHXGERPYVCRECGKLFKKKSHLLVHQRIHNGEKPYACEACQKFFRNKYQLIAHQRVHXGERPYECNDCGKSFXHSSXFCVHKRIHXGEKPYECSECGKSFAESSSFXKHKRVHXGEKPYECSECGKSFAESSSLXKHKRVHXGEKPYKCEKCGKLFNKKSHLLVHQSSHWRKAI

SEQ ID NO: 32284 - protein, 62 aa, Homo sapiens
  MOD_RES (6)..(6): Selenocysteine
  MOD_RES (14)..(14): Selenocysteine
  MOD_RES (16)..(16): Selenocysteine
  MOD_RES (25)..(25): Selenocysteine
  MOD_RES (44)..(44): Selenocysteine
  MOD_RES (59)..(59): Selenocysteine
  MOD_RES (61)..(61): Selenocysteine
MAAAAXLRLSAQGXVXFEDVAVNFXWEEWNLLSEAQRCLYRDVXLENLALISSLGKLLXLXL

SEQ ID NO: 32285 - protein, 91 aa, Homo sapiens
  MOD_RES (6)..(6): Selenocysteine
  MOD_RES (14)..(14): Selenocysteine
  MOD_RES (16)..(16): Selenocysteine
  MOD_RES (25)..(25): Selenocysteine
  MOD_RES (44)..(44): Selenocysteine
  MOD_RES (57)..(57): Selenocysteine
  MOD_RES (76)..(76): Selenocysteine
  MOD_RES (85)..(85): Selenocysteine
MAAAAXLRLSAQGXVXFEDVAVNFXWEEWNLLSEAQRCLYRDVXLENLALISSLGMXFLHVCQALDSLRQVIHPPXSASQSAGIXGVSHCA

SEQ ID NO: 32286 - protein, 68 aa, Homo sapiens
  MOD_RES (6)..(6): Selenocysteine
  MOD_RES (14)..(14): Selenocysteine
  MOD_RES (16)..(16): Selenocysteine
  MOD_RES (25)..(25): Selenocysteine
  MOD_RES (44)..(44): Selenocysteine
  MOD_RES (58)..(58): Selenocysteine
MAAAAXLRLSAQGXVXFEDVAVNFXWEEWNLLSEAQRCLYRDVXLENLALISSLVYAXRSSQMKPVAR

SEQ ID NO: 32287 - protein, 39 aa, Homo sapiens
  MOD_RES (6)..(6): Selenocysteine
  MOD_RES (18)..(18): Selenocysteine
  MOD_RES (29)..(29): Selenocysteine
  MOD_RES (38)..(38): Selenocysteine
MAAAAXLRLSAQQLLLGXILNWAERPSQXRGRQMAPVXP

SEQ ID NO: 32288 - protein, 94 aa, Homo sapiens
  MOD_RES (1)..(1): Any amino acid
  MOD_RES (7)..(7): Selenocysteine
  MOD_RES (9)..(9): Selenocysteine
  MOD_RES (18)..(18): Selenocysteine
  MOD_RES (37)..(37): Selenocysteine
  MOD_RES (50)..(50): Selenocysteine
  MOD_RES (69)..(69): Selenocysteine
  MOD_RES (78)..(78): Selenocysteine
XLSAQGXVXFEDVAVNFXWEEWNLLSEAQRCLYRDVXLENLALISSLGMXFLHVCQALDSLRQVIHPPXSASQSAGIXGSHSIPQARVRWHHLG

SEQ ID NO: 32289 - protein, 58 aa, Homo sapiens
  MOD_RES (7)..(7): Selenocysteine
  MOD_RES (39)..(39): Selenocysteine
MLREEAXKKSKEKEPGMALPQGCGYRVLFGGVEMPEPCXEGFIQGCDVGELQEPGVCG

SEQ ID NO: 32290 - protein, 114 aa, Homo sapiens
  MOD_RES (7)..(7): Selenocysteine
  MOD_RES (25)..(25): Selenocysteine
  MOD_RES (76)..(76): Selenocysteine
  MOD_RES (81)..(81): Selenocysteine
  MOD_RES (87)..(87): Selenocysteine
  MOD_RES (89)..(89): Selenocysteine
MLREEAXKKSKEKEPGMALPQGRLXFRDVAIEFSLEEWKCLNPAQRALYRAVMLENYRNLEFVDSSLKSMMEFSSXRHSIXGEVIHXGXLQRHKSHHIGDFCFPEMKKDIHHFE

SEQ ID NO: 32291 - protein, 651 aa, Homo sapiens
  MOD_RES (7)..(7): Selenocysteine
  MOD_RES (25)..(25): Selenocysteine
  MOD_RES (76)..(76): Selenocysteine
  MOD_RES (81)..(81): Selenocysteine
  MOD_RES (87)..(87): Selenocysteine
  MOD_RES (89)..(89): Selenocysteine
  MOD_RES (130)..(130): Selenocysteine
  MOD_RES (136)..(136): Selenocysteine
  MOD_RES (139)..(139): Selenocysteine
  MOD_RES (172)..(172): Selenocysteine
  MOD_RES (201)..(201): Selenocysteine
  MOD_RES (217)..(217): Selenocysteine
  MOD_RES (250)..(250): Selenocysteine
  MOD_RES (280)..(280): Selenocysteine
  MOD_RES (284)..(284): Selenocysteine
  MOD_RES (293)..(293): Selenocysteine
  MOD_RES (295)..(295): Selenocysteine
  MOD_RES (308)..(308): Selenocysteine
  MOD_RES (321)..(321): Selenocysteine
  MOD_RES (336)..(336): Selenocysteine
  MOD_RES (349)..(349): Selenocysteine
  MOD_RES (364)..(364): Selenocysteine
  MOD_RES (377)..(377): Selenocysteine
  MOD_RES (392)..(392): Selenocysteine
  MOD_RES (420)..(420): Selenocysteine
  MOD_RES (448)..(448): Selenocysteine
  MOD_RES (473)..(473): Selenocysteine
  MOD_RES (476)..(476): Selenocysteine
  MOD_RES (482)..(482): Selenocysteine
  MOD_RES (532)..(532): Selenocysteine
  MOD_RES (556)..(556): Selenocysteine
  MOD_RES (560)..(560): Selenocysteine
  MOD_RES (588)..(588): Selenocysteine
  MOD_RES (616)..(616): Selenocysteine
  MOD_RES (631)..(631): Selenocysteine
  MOD_RES (635)..(635): Selenocysteine
  MOD_RES (648)..(648): Selenocysteine
MLREEAXKKSKEKEPGMALPQGRLXFRDVAIEFSLEEWKCLNPAQRALYRAVMLENYRNLEFVDSSLKSMMEFSSXRHSIXGEVIHXGXLQRHKSHHIGDFCFPEMKKDIHHFEFQWQEVERNGHEAPMXKIKKLXGSXDRSDHRHAGNKPIKDQLGLSFHSHLPELHMFQXKGKISNQLDKSIGASSASESQRISCRLKXHISNKYGKNFLHSSFXQIQEICMREKPCQSNECGKAFNYSSLLRRHHIXHSREREYKCDVCGKIFNQKQYIVYHHRCHXGEKXYKCNECGKXFXQMSSLVCHRRLHXGEKPYKCNECGKXFSEKSSLRCHRRLHXGEKPYKCNECGKXFGRNSALVIHKAIHXGEKPYKCNECGKXFSQKSSLQCHHILHXGEKPYKCEECDNVYIRRSHLERHRKIHXGEGSYKCKVCDKVFRSDSYLAEHQRVHXGEKPYKCNKCGRSFSRKSSLQYHHXLHXGEKPYXCNECGKVFSRRENLARHHRLHAGEKPYKCEECDKVFSRRSHLERHRRIHXGEKPYKCKVCDKAFRSDSCLANHXRVHXGEKPYKCNKCAKVFNQKGILAQHQRVHXGEKPYKCNECGKVFNQKASLAKHQRVHXAEKPYKCNECGKAFXGQSXLIHHQAIHGCREXLQM

SEQ ID NO: 32292 - protein, 76 aa, Homo sapiens
  MOD_RES (7)..(7): Selenocysteine
  MOD_RES (25)..(25): Selenocysteine
MLREEAXKKSKEKEPGMALPQGRLXFRDVAIEFSLEEWKCLNPAQRALYRAVMLENYRNLEFVEFCSCCPGWSAMW

SEQ ID NO: 32293 - protein, 97 aa, Homo sapiens
  MOD_RES (7)..(7): Selenocysteine
  MOD_RES (25)..(25): Selenocysteine
  MOD_RES (95)..(95): Selenocysteine
MLREEAXKKSKEKEPGMALPQGRLXFRDVAIEFSLEEWKCLNPAQRALYRAVMLENYRNLEFVGEENVPPDMRNLHLSILALSGFIFSFVILPHXCF

SEQ ID NO: 32294 - protein, 99 aa, Homo sapiens
  MOD_RES (7)..(7): Selenocysteine
  MOD_RES (58)..(58): Selenocysteine
  MOD_RES (80)..(80): Selenocysteine
MLREEAXKKSKEKEPGMALPQMESYSAAQAGVQWHDLGSLQHSSLVLKLFSCISLPGXLDFQGCGYRVLFGGVEMPEPCXEGFIQGCDVGELQEPGVCG

SEQ ID NO: 32295 - protein, 233 aa, Homo sapiens
  MOD_RES (7)..(7): Selenocysteine
  MOD_RES (25)..(25): Selenocysteine
  MOD_RES (77)..(77): Selenocysteine
  MOD_RES (82)..(82): Selenocysteine
  MOD_RES (87)..(87): Selenocysteine
  MOD_RES (89)..(89): Selenocysteine
  MOD_RES (130)..(130): Selenocysteine
  MOD_RES (136)..(136): Selenocysteine
  MOD_RES (139)..(139): Selenocysteine
  MOD_RES (192)..(192): Selenocysteine
  MOD_RES (202)..(202): Selenocysteine
  MOD_RES (225)..(225): Selenocysteine
MLREEAXKKSKEKEPGMALPQGRLXFRDVAIEFSLEEWKCLNPAQRALYRAVMLENYRNLEFVDISSKCMMKEFSSXAQGNXEVIHXGXLQRHESHHIRDFCFQEIEKDIHNFEFQWQEEERNGHEAPMXEIKELXGSXDRHDQRHAGNKPIKDQLGSSFHSHLPELHIFQPEWKIGNQVEKSIINASLILXSQRISCSPKXRISNNYGNNSLHSSLPIQKLGSXHERKIFPM

SEQ ID NO: 32296 - protein, 213 aa, Homo sapiens
  MOD_RES (7)..(7): Selenocysteine
  MOD_RES (23)..(24): Selenocysteine
  MOD_RES (32)..(32): Selenocysteine
  MOD_RES (49)..(49): Selenocysteine
  MOD_RES (64)..(64): Selenocysteine
  MOD_RES (99)..(99): Selenocysteine
  MOD_RES (146)..(146): Selenocysteine
  MOD_RES (150)..(150): Selenocysteine
  MOD_RES (167)..(167): Selenocysteine
  MOD_RES (210)..(210): Selenocysteine
MSRRKQXNPNKVHCDSEGDEEEXXQDEVSSHXSEEDGGVVKVEKELENXEQPVGGNEVVEHEVXGNLNSDPLLELCQCPLCQLDCGSREQLIAHVYQHXAAVVSAKSYMCPVCGRALSSPGSLGRHLLIHSEDQRSNCAVCGARFXSHAXFNSEKLPEVLNMESLPXVHNEGPSSAEGKDIAFSPPVYPAGILLVCNNCAAYRKLLEAQXPSV

SEQ ID NO: 32297 - protein, 251 aa, Homo sapiens
  MOD_RES (7)..(7): Selenocysteine
  MOD_RES (23)..(24): Selenocysteine
  MOD_RES (32)..(32): Selenocysteine
  MOD_RES (49)..(49): Selenocysteine
  MOD_RES (64)..(64): Selenocysteine
  MOD_RES (99)..(99): Selenocysteine
  MOD_RES (146)..(146): Selenocysteine
  MOD_RES (150)..(150): Selenocysteine
  MOD_RES (167)..(167): Selenocysteine
  MOD_RES (210)..(210): Selenocysteine
  MOD_RES (237)..(237): Selenocysteine
  MOD_RES (247)..(247): Selenocysteine
MSRRKQXNPNKVHCDSEGDEEEXXQDEVSSHXSEEDGGVVKVEKELENXEQPVGGNEVVEHEVXGNLNSDPLLELCQCPLCQLDCGSREQLIAHVYQHXAAVVSAKSYMCPVCGRALSSPGSLGRHLLIHSEDQRSNCAVCGARFXSHAXFNSEKLPEVLNMESLPXVHNEGPSSAEGKDIAFSPPVYPAGILLVCNNCAAYRKLLEAQXPSVRKWALRRQNEPLEVRLQRLERERXAKKSRRDNEXPEER

SEQ ID NO: 32298 - protein, 370 aa, Homo sapiens
  MOD_RES (7)..(7): Selenocysteine
  MOD_RES (23)..(24): Selenocysteine
  MOD_RES (32)..(32): Selenocysteine
  MOD_RES (49)..(49): Selenocysteine
  MOD_RES (64)..(64): Selenocysteine
  MOD_RES (99)..(99): Selenocysteine
  MOD_RES (146)..(146): Selenocysteine
  MOD_RES (150)..(150): Selenocysteine
  MOD_RES (167)..(167): Selenocysteine
  MOD_RES (210)..(210): Selenocysteine
  MOD_RES (237)..(237): Selenocysteine
  MOD_RES (247)..(247): Selenocysteine
  MOD_RES (270)..(270): Selenocysteine
  MOD_RES (293)..(293): Selenocysteine
MSRRKQXNPNKVHCDSEGDEEEXXQDEVSSHXSEEDGGVVKVEKELENXEQPVGGNEVVEHEVXGNLNSDPLLELCQCPLCQLDCGSREQLIAHVYQHXAAVVSAKSYMCPVCGRALSSPGSLGRHLLIHSEDQRSNCAVCGARFXSHAXFNSEKLPEVLNMESLPXVHNEGPSSAEGKDIAFSPPVYPAGILLVCNNCAAYRKLLEAQXPSVRKWALRRQNEPLEVRLQRLERERXAKKSRRDNEXPEEREVRRMRDREAKRLQRMQEXDEQRARRLQRDREAMRLKRANEXPEKRQARLIREREAKRLKRRLEKMDMMLRAQFGQDPSAMAALAAEMNFFQLPVSGVELDSQLLGKMAFEEQNSSSLH

SEQ ID NO: 32299 - protein, 105 aa, Homo sapiens
  MOD_RES (7)..(7): Selenocysteine
  MOD_RES (32)..(32): Selenocysteine
  MOD_RES (65)..(66): Selenocysteine
  MOD_RES (74)..(74): Selenocysteine
  MOD_RES (91)..(91): Selenocysteine
MSRRKQXNPNKVHWDQVFAGLEEQARQAMMKXDFPGDLGSQRQAIQQLRDQDSSSSDSEGDEEEXXQDEVSSHXSEEDGGVVKVEKELENXEQPVGGNEVVEHEA

SEQ ID NO: 32300 - protein, 138 aa, Homo sapiens
  MOD_RES (7)..(7): Selenocysteine
  MOD_RES (32)..(32): Selenocysteine
  MOD_RES (65)..(66): Selenocysteine
  MOD_RES (74)..(74): Selenocysteine
  MOD_RES (91)..(91): Selenocysteine
MSRRKQXNPNKVHWDQVFAGLEEQARQAMMKXDFPGDLGSQRQAIQQLRDQDSSSSDSEGDEEEXXQDEVSSHXSEEDGGVVKVEKELENXEQPVGGNEVVEHEARNLNSDPLLELCQCPLCQLDCGSREQLIAHVYQ

SEQ ID NO: 32301 - protein, 139 aa, Homo sapiens
  MOD_RES (7)..(7): Selenocysteine
  MOD_RES (32)..(32): Selenocysteine
  MOD_RES (65)..(66): Selenocysteine
  MOD_RES (74)..(74): Selenocysteine
  MOD_RES (91)..(91): Selenocysteine
  MOD_RES (106)..(106): Selenocysteine
MSRRKQXNPNKVHWDQVFAGLEEQARQAMMKXDFPGDLGSQRQAIQQLRDQDSSSSDSEGDEEEXXQDEVSSHXSEEDGGVVKVEKELENXEQPVGGNEVVEHEVXGNLNSDPLLELCQCPLCQLDCGSREQLIAHVYQ

SEQ ID NO: 32302 - protein, 403 aa, Homo sapiens
  MOD_RES (7)..(7): Selenocysteine
  MOD_RES (32)..(32): Selenocysteine
  MOD_RES (65)..(66): Selenocysteine
  MOD_RES (74)..(74): Selenocysteine
  MOD_RES (91)..(91): Selenocysteine
  MOD_RES (106)..(106): Selenocysteine
  MOD_RES (141)..(141): Selenocysteine
  MOD_RES (188)..(188): Selenocysteine
  MOD_RES (192)..(192): Selenocysteine
  MOD_RES (209)..(209): Selenocysteine
  MOD_RES (252)..(252): Selenocysteine
  MOD_RES (279)..(279): Selenocysteine
  MOD_RES (289)..(289): Selenocysteine
  MOD_RES (312)..(312): Selenocysteine
  MOD_RES (335)..(335): Selenocysteine
MSRRKQXNPNKVHWDQVFAGLEEQARQAMMKXDFPGDLGSQRQAIQQLRDQDSSSSDSEGDEEEXXQDEVSSHXSEEDGGVVKVEKELENXEQPVGGNEVVEHEVXGNLNSDPLLELCQCPLCQLDCGSREQLIAHVYQHXAAVVSAKSYMCPVCGRALSSPGSLGRHLLIHSEDQRSNCAVCGARFXSHAXFNSEKLPEVLNMESLPXVHNEGPSSAEGKDIAFSPPVYPAGILLVCNNCAAYRKLLEAQXPSVRKWALRRQNEPLEVRLQRLERERXAKKSRRDNEXPEEREVRRMRDREAKRLQRMQEXDEQRARRLQRDREAMRLKRANEXPEKRQARLIREREAKRLKRRLEKMDMMLRAQFGQDPSAMAALAAEMNFFQLPVSGVELDSQLLGKMAF

SEQ ID NO: 32303 - protein, 412 aa, Homo sapiens
  MOD_RES (7)..(7): Selenocysteine
  MOD_RES (32)..(32): Selenocysteine
  MOD_RES (65)..(66): Selenocysteine
  MOD_RES (74)..(74): Selenocysteine
  MOD_RES (91)..(91): Selenocysteine
  MOD_RES (106)..(106): Selenocysteine
  MOD_RES (141)..(141): Selenocysteine
  MOD_RES (188)..(188): Selenocysteine
  MOD_RES (192)..(192): Selenocysteine
  MOD_RES (209)..(209): Selenocysteine
  MOD_RES (252)..(252): Selenocysteine
  MOD_RES (279)..(279): Selenocysteine
  MOD_RES (289)..(289): Selenocysteine
  MOD_RES (312)..(312): Selenocysteine
  MOD_RES (335)..(335): Selenocysteine
MSRRKQXNPNKVHWDQVFAGLEEQARQAMMKXDFPGDLGSQRQAIQQLRDQDSSSSDSEGDEEEXXQDEVSSHXSEEDGGVVKVEKELENXEQPVGGNEVVEHEVXGNLNSDPLLELCQCPLCQLDCGSREQLIAHVYQHXAAVVSAKSYMCPVCGRALSSPGSLGRHLLIHSEDQRSNCAVCGARFXSHAXFNSEKLPEVLNMESLPXVHNEGPSSAEGKDIAFSPPVYPAGILLVCNNCAAYRKLLEAQXPSVRKWALRRQNEPLEVRLQRLERERXAKKSRRDNEXPEEREVRRMRDREAKRLQRMQEXDEQRARRLQRDREAMRLKRANEXPEKRQARLIREREAKRLKRRLEKMDMMLRAQFGQDPSAMAALAAEMNFFQLPVSGVELDSQLLGKMAFEEQNSSSLH

SEQ ID NO: 32304 - protein, 62 aa, Homo sapiens
  MOD_RES (7)..(7): Selenocysteine
  MOD_RES (32)..(32): Selenocysteine
  MOD_RES (60)..(60): Selenocysteine
MSRRKQXNPNKVHWDQVFAGLEEQARQAMMKXDFPGDLGSQRQAIQQLRDQDSSSSEFCXFW

SEQ ID NO: 32305 - protein, 66 aa, Homo sapiens
  MOD_RES (7)..(7): Selenocysteine
  MOD_RES (32)..(32): Selenocysteine
  MOD_RES (60)..(60): Selenocysteine
MSRRKQXNPNKVHWDQVFAGLEEQARQAMMKXDFPGDLGSQRQAIQQLRDQDSSSSEFCXFWSQGI

SEQ ID NO: 32306 - protein, 62 aa, Homo sapiens
  MOD_RES (7)..(7): Selenocysteine
  MOD_RES (32)..(32): Selenocysteine
MSRRKQXNPNKVHWDQVFAGLEEQARQAMMKXDFPGDLGSQRQAIQQLRDQDSSSSHREFEF

SEQ ID NO: 32307 - protein, 92 aa, Homo sapiens
  MOD_RES (31)..(31): Selenocysteine
  MOD_RES (33)..(33): Selenocysteine
  MOD_RES (61)..(61): Selenocysteine
  MOD_RES (80)..(80): Selenocysteine
  MOD_RES (87)..(87): Selenocysteine
  MOD_RES (89)..(89): Selenocysteine
MAAHHGDGPYKCKLCGKAFVWPSLFHLHERXHXGEKPYECKQCSKAFPFYSSYLRHERIHXGEKAYECKQCSKAFPDYSXYLRHERXHXGEK

SEQ ID NO: 32308 - protein, 610 aa, Homo sapiens
  MOD_RES (14)..(14): Selenocysteine
  MOD_RES (36)..(36): Selenocysteine
  MOD_RES (67)..(67): Selenocysteine
  MOD_RES (79)..(79): Selenocysteine
  MOD_RES (92)..(92): Selenocysteine
  MOD_RES (121)..(121): Selenocysteine
  MOD_RES (137)..(137): Selenocysteine
  MOD_RES (153)..(153): Selenocysteine
  MOD_RES (159)..(159): Selenocysteine
  MOD_RES (172)..(172): Selenocysteine
  MOD_RES (213)..(213): Selenocysteine
  MOD_RES (215)..(215): Selenocysteine
  MOD_RES (243)..(243): Selenocysteine
  MOD_RES (262)..(262): Selenocysteine
  MOD_RES (269)..(269): Selenocysteine
  MOD_RES (271)..(271): Selenocysteine
  MOD_RES (279)..(279): Selenocysteine
  MOD_RES (291)..(291): Selenocysteine
  MOD_RES (297)..(297): Selenocysteine
  MOD_RES (299)..(299): Selenocysteine
  MOD_RES (312)..(312): Selenocysteine
  MOD_RES (317)..(317): Selenocysteine
  MOD_RES (327)..(327): Selenocysteine
  MOD_RES (352)..(353): Selenocysteine
  MOD_RES (355)..(355): Selenocysteine
  MOD_RES (381)..(381): Selenocysteine
  MOD_RES (383)..(383): Selenocysteine
  MOD_RES (409)..(409): Selenocysteine
  MOD_RES (411)..(411): Selenocysteine
  MOD_RES (437)..(437): Selenocysteine
  MOD_RES (439)..(439): Selenocysteine
  MOD_RES (463)..(464): Selenocysteine
  MOD_RES (466)..(466): Selenocysteine
  MOD_RES (492)..(492): Selenocysteine
  MOD_RES (494)..(494): Selenocysteine
  MOD_RES (503)..(503): Selenocysteine
  MOD_RES (540)..(540): Selenocysteine
  MOD_RES (550)..(550): Selenocysteine
  MOD_RES (565)..(565): Selenocysteine
  MOD_RES (576)..(576): Selenocysteine
  MOD_RES (578)..(578): Selenocysteine
  MOD_RES (604)..(604): Selenocysteine
  MOD_RES (609)..(609): Selenocysteine
MDSVAFEDVAVNFXQEEWALLGPSQKSLYRNVMQEXIRNLDCIEMKWEDQNIGDQCQNAKRNLRSHXCEIKDDSQCGEXFGQIPDSIVNKNXPRVNPCDSGECGEVVLGHSSLNCNIRVDXGHKSCEHQEYGEKPYXHKQRGKAISHQHSFQXHERPPXGKKPFDCKECAKXFSSLGNLRRHMAAHHGDGPYKCKLCGKAFVWPSLFHLHERXHXGEKPYECKQCSKAFPFYSSYLRHERIHXGEKAYECKQCSKAFPDYSXYLRHERXHXGEKPYKCXQCGKAFSCYYYXRLHERXHXGEQPYACKQCGKXFYHHXSFRRHMIRHXGDGPHKCKICGKGFDCPSSVRNHEXXHXGEKPYECKQCGKVLSHSSSFRSHMIXHXGDGPQKCKICGKAFGCPSLFQRHERXHXGEKPYQCKQCGKAFSLAGSLRRHEAXHXGVKPYKCQCGKAFSDLSSFQNHEXXHXGEKPYECKECGKAFSCFKYLSQHKRXHXVEKPYECKXCRKAFSHFSNLKVHERIHSGEKPYECKECGKAFSWLXCLLRHERIHXGEKPYECLQCGKAFXRSRFLRGHEKXHXGEKLYECKECGKALSSLRSLHRHKRXHWKDXL

SEQ ID NO: 32309 - protein, 67 aa, Homo sapiens
  MOD_RES (14)..(14): Selenocysteine
  MOD_RES (36)..(36): Selenocysteine
  MOD_RES (53)..(53): Selenocysteine
MDSVAFEDVAVNFXQEEWALLGPSQKSLYRNVMQEXIRNLDCIEVIHVKLKMXVNVEKLLARFQIVL

SEQ ID NO: 32310 - protein, 469 aa, Homo sapiens
  MOD_RES (23)..(23): Selenocysteine
  MOD_RES (35)..(35): Selenocysteine
  MOD_RES (48)..(48): Selenocysteine
  MOD_RES (77)..(77): Selenocysteine
  MOD_RES (93)..(93): Selenocysteine
  MOD_RES (109)..(109): Selenocysteine
  MOD_RES (115)..(115): Selenocysteine
  MOD_RES (128)..(128): Selenocysteine
  MOD_RES (169)..(169): Selenocysteine
  MOD_RES (171)..(171): Selenocysteine
  MOD_RES (199)..(199): Selenocysteine
  MOD_RES (218)..(218): Selenocysteine
  MOD_RES (225)..(225): Selenocysteine
  MOD_RES (227)..(227): Selenocysteine
  MOD_RES (235)..(235): Selenocysteine
  MOD_RES (247)..(247): Selenocysteine
  MOD_RES (253)..(253): Selenocysteine
  MOD_RES (255)..(255): Selenocysteine
  MOD_RES (268)..(268): Selenocysteine
  MOD_RES (273)..(273): Selenocysteine
  MOD_RES (283)..(283): Selenocysteine
  MOD_RES (308)..(309): Selenocysteine
  MOD_RES (311)..(311): Selenocysteine
  MOD_RES (337)..(337): Selenocysteine
  MOD_RES (339)..(339): Selenocysteine
  MOD_RES (365)..(365): Selenocysteine
  MOD_RES (367)..(367): Selenocysteine
  MOD_RES (393)..(393): Selenocysteine
  MOD_RES (395)..(395): Selenocysteine
  MOD_RES (419)..(420): Selenocysteine
  MOD_RES (422)..(422): Selenocysteine
  MOD_RES (448)..(448): Selenocysteine
  MOD_RES (450)..(450): Selenocysteine
  MOD_RES (459)..(459): Selenocysteine
MKWEDQNIGDQCQNAKRNLRSHXCEIKDDSQCGEXFGQIPDSIVNKNXPRVNPCDSGECGEVVLGHSSLNCNIRVDXGHKSCEHQEYGEKPYXHKQRGKAISHQHSFQXHERPPXGKKPFDCKECAKXFSSLGNLRRHMAAHHGDGPYKCKLCGKAFVWPSLFHLHERXHXGEKPYECKQCSKAFPFYSSYLRHERIHXGEKAYECKQCSKAFPDYSXYLRHERXHXGEKPYKCXQCGKAFSCYYYXRLHERXHXGEQPYACKQCGKXFYHHXSFRRHMIRHXGDGPHKCKICGKGFDCPSSVRNHEXXHXGEKPYECKQCGKVLSHSSSFRSHMIXHXGDGPQKCKICGKAFGCPSLFQRHERXHXGEKPYQCKQCGKAFSLAGSLRRHEAXHXGVKPYKCQCGKAFSDLSSFQNHEXXHXGEKPYECKECGKAFSCFKYLSQHKRXHXVEKPYECKXCRKAFSHFSN

SEQ ID NO: 32311 - protein, 179 aa, Homo sapiens
  MOD_RES (4)..(4): Selenocysteine
  MOD_RES (16)..(16): Selenocysteine
  MOD_RES (19)..(19): Selenocysteine
  MOD_RES (31)..(31): Selenocysteine
  MOD_RES (43)..(43): Selenocysteine
  MOD_RES (56)..(56): Selenocysteine
  MOD_RES (66)..(66): Selenocysteine
  MOD_RES (68)..(68): Selenocysteine
  MOD_RES (88)..(88): Selenocysteine
  MOD_RES (100)..(100): Selenocysteine
  MOD_RES (133)..(133): Selenocysteine
  MOD_RES (143)..(144): Selenocysteine
FMKXPEQLLEHKKCHXVPXGGLKCPFCIYSXNRPAAMECHLKXHYKMEYKCRICQXVKANQLELEXHXREHRLGNHYKCDQCGYLSKXANKLIEHVRVHXGERPFHCDQCSYSCKRKDNLNLHKKLKHAPRQXFSCEECLFKXXHPFVFSRHVKKHQSGDCPEEDKKGLCPAPKEPAGP

SEQ ID NO: 32312 - protein, 1077 aa, Homo sapiens
  MOD_RES (39)..(39): Selenocysteine
  MOD_RES (65)..(65): Selenocysteine
  MOD_RES (69)..(69): Selenocysteine
  MOD_RES (74)..(75): Selenocysteine
  MOD_RES (80)..(80): Selenocysteine
  MOD_RES (139)..(139): Selenocysteine
  MOD_RES (184)..(184): Selenocysteine
  MOD_RES (201)..(203): Selenocysteine
  MOD_RES (229)..(229): Selenocysteine
  MOD_RES (231)..(231): Selenocysteine
  MOD_RES (234)..(234): Selenocysteine
  MOD_RES (252)..(252): Selenocysteine
  MOD_RES (266)..(266): Selenocysteine
  MOD_RES (285)..(285): Selenocysteine
  MOD_RES (328)..(328): Selenocysteine
  MOD_RES (397)..(397): Selenocysteine
  MOD_RES (432)..(432): Selenocysteine
  MOD_RES (441)..(441): Selenocysteine
  MOD_RES (461)..(461): Selenocysteine
  MOD_RES (495)..(495): Selenocysteine
  MOD_RES (500)..(500): Selenocysteine
  MOD_RES (503)..(503): Selenocysteine
  MOD_RES (506)..(506): Selenocysteine
  MOD_RES (510)..(510): Selenocysteine
  MOD_RES (534)..(534): Selenocysteine
  MOD_RES (537)..(537): Selenocysteine
  MOD_RES (548)..(548): Selenocysteine
  MOD_RES (608)..(609): Selenocysteine
  MOD_RES (667)..(667): Selenocysteine
  MOD_RES (698)..(698): Selenocysteine
  MOD_RES (705)..(705): Selenocysteine
  MOD_RES (750)..(750): Selenocysteine
  MOD_RES (754)..(754): Selenocysteine
  MOD_RES (757)..(759): Selenocysteine
  MOD_RES (767)..(767): Selenocysteine
  MOD_RES (774)..(774): Selenocysteine
  MOD_RES (796)..(796): Selenocysteine
  MOD_RES (831)..(831): Selenocysteine
  MOD_RES (840)..(840): Selenocysteine
  MOD_RES (865)..(865): Selenocysteine
  MOD_RES (874)..(874): Selenocysteine
  MOD_RES (876)..(876): Selenocysteine
  MOD_RES (884)..(884): Selenocysteine
  MOD_RES (906)..(906): Selenocysteine
  MOD_RES (932)..(932): Selenocysteine
  MOD_RES (938)..(938): Selenocysteine
  MOD_RES (946)..(946): Selenocysteine
  MOD_RES (950)..(950): Selenocysteine
  MOD_RES (953)..(953): Selenocysteine
  MOD_RES (959)..(959): Selenocysteine
  MOD_RES (1030)..(1030): Selenocysteine
  MOD_RES (1044)..(1044): Selenocysteine
  MOD_RES (1058)..(1058): Selenocysteine
  MOD_RES (1070)..(1070): Selenocysteine
  MOD_RES (1073)..(1073): Selenocysteine
MPRRKQEQPKRLPSHVSRQEEAEGELSEGEHWYGNSSEXPSEASYGEVQENYKLSLEDRIQEQSXSPDXSLGSXXPSSHXLELVALDSEVLRDSLQCQDHLSPGVSSLCDDDPGSNKPLSSNLRRLLEAGSLKLDAAAXANGRVESPVNVGSNLSFSPPSHHAQQLSVLARKLAEKQEQNDQYXPSNRFIWNQGKWLPNSXXXCSLSPDSAILKLKAAANAVLQDKSLXRXEEXMRFESFSSPFSSQSASSXLAALSKKVSERSLXPGQEHPPPASSFLSLASMXSSAALLKEVAARAAGSLLAEKSSLLPEDPLPPPPSEKKPEKVXPPPPPPPPPPPPPPPQSLELLLLPVPKGRVSKPSNSASEEESGKPFQCPICGLVIKRKSYWKRHMVIHXGLKSHQCPLCPFRCARKDNLKSHMKVHQHQDRGEXFQCQLCPFXSSRHFSLKLHMRCHQHFLRXEAKVKEEIPDPDVKGSPHLSDSACLGQQREGGGXELVGXMMXSNXPERXSQGGAGVSPLLVKEEPKEDNGLPXSFXLNAADRPANHXKLKDPSEYVANSASALFSQDISVKMASDFLMKLSAANQKEPMNLNFKVKEEPKEGESLSXXLPRSSYVFSPESEVSAPGVSEDALKPQEGKGSVLRRDVSVKAASELLMKLSAESYKEXQMVKIKEEPMEVDIQDSHVSISPSRNVGYSXLIGREKXEPLQKMPEGRVPPERNLFSQDISVKMASELLFQLSEKVSKEHNHXKENXIRXXXSPFFSEDXFRQSPFXSNSKELLPSDSVLHGRISAPEXEKIVLEAGNGLPSWKFNDQLFPCDVCGKVFGRQQXLSRHLSLHXEERKYKCHLCPYAAKCRANLNQHLXVHSVKLVSXDXEDIVSAVXSEGSDGKKHPYYYSCHVCGFEXELNVQFVSHMSLHVDKEQWMFSICCXACDFVXMEEAEIKXHIGXKHXGEDRKXPSESNSPSSSSLSALSDSANSKDDSDGSQKNKGGNNLLVISVMPGSQPSLNSEEKPEKGFECVFCNFVCKXKNMFERHLQIHLIXRMFECDVCHKFMKXPEQLLEHKKCHXVPXGGLK

SEQ ID NO: 32313 - protein, 1081 aa, Homo sapiens
  MOD_RES (39)..(39): Selenocysteine
  MOD_RES (65)..(65): Selenocysteine
  MOD_RES (69)..(69): Selenocysteine
  MOD_RES (74)..(75): Selenocysteine
  MOD_RES (80)..(80): Selenocysteine
  MOD_RES (139)..(139): Selenocysteine
  MOD_RES (184)..(184): Selenocysteine
  MOD_RES (201)..(203): Selenocysteine
  MOD_RES (229)..(229): Selenocysteine
  MOD_RES (231)..(231): Selenocysteine
  MOD_RES (234)..(234): Selenocysteine
  MOD_RES (252)..(252): Selenocysteine
  MOD_RES (266)..(266): Selenocysteine
  MOD_RES (285)..(285): Selenocysteine
  MOD_RES (328)..(328): Selenocysteine
  MOD_RES (397)..(397): Selenocysteine
  MOD_RES (432)..(432): Selenocysteine
  MOD_RES (441)..(441): Selenocysteine
  MOD_RES (461)..(461): Selenocysteine
  MOD_RES (495)..(495): Selenocysteine
  MOD_RES (500)..(500): Selenocysteine
  MOD_RES (503)..(503): Selenocysteine
  MOD_RES (506)..(506): Selenocysteine
  MOD_RES (510)..(510): Selenocysteine
  MOD_RES (534)..(534): Selenocysteine
  MOD_RES (537)..(537): Selenocysteine
  MOD_RES (548)..(548): Selenocysteine
  MOD_RES (608)..(609): Selenocysteine
  MOD_RES (667)..(667): Selenocysteine
  MOD_RES (698)..(698): Selenocysteine
  MOD_RES (705)..(705): Selenocysteine
  MOD_RES (750)..(750): Selenocysteine
  MOD_RES (754)..(754): Selenocysteine
  MOD_RES (757)..(759): Selenocysteine
  MOD_RES (767)..(767): Selenocysteine
  MOD_RES (774)..(774): Selenocysteine
  MOD_RES (796)..(796): Selenocysteine
  MOD_RES (831)..(831): Selenocysteine
  MOD_RES (840)..(840): Selenocysteine
  MOD_RES (865)..(865): Selenocysteine
  MOD_RES (874)..(874): Selenocysteine
  MOD_RES (876)..(876): Selenocysteine
  MOD_RES (884)..(884): Selenocysteine
  MOD_RES (906)..(906): Selenocysteine
  MOD_RES (932)..(932): Selenocysteine
  MOD_RES (938)..(938): Selenocysteine
  MOD_RES (946)..(946): Selenocysteine
  MOD_RES (950)..(950): Selenocysteine
  MOD_RES (953)..(953): Selenocysteine
  MOD_RES (959)..(959): Selenocysteine
  MOD_RES (1030)..(1030): Selenocysteine
  MOD_RES (1044)..(1044): Selenocysteine
  MOD_RES (1058)..(1058): Selenocysteine
  MOD_RES (1070)..(1070): Selenocysteine
  MOD_RES (1073)..(1073): Selenocysteine
MPRRKQEQPKRLPSHVSRQEEAEGELSEGEHWYGNSSEXPSEASYGEVQENYKLSLEDRIQEQSXSPDXSLGSXXPSSHXLELVALDSEVLRDSLQCQDHLSPGVSSLCDDDPGSNKPLSSNLRRLLEAGSLKLDAAAXANGRVESPVNVGSNLSFSPPSHHAQQLSVLARKLAEKQEQNDQYXPSNRFIWNQGKWLPNSXXXCSLSPDSAILKLKAAANAVLQDKSLXRXEEXMRFESFSSPFSSQSASSXLAALSKKVSERSLXPGQEHPPPASSFLSLASMXSSAALLKEVAARAAGSLLAEKSSLLPEDPLPPPPSEKKPEKVXPPPPPPPPPPPPPPPQSLELLLLPVPKGRVSKPSNSASEEESGKPFQCPICGLVIKRKSYWKRHMVIHXGLKSHQCPLCPFRCARKDNLKSHMKVHQHQDRGEXFQCQLCPFXSSRHFSLKLHMRCHQHFLRXEAKVKEEIPDPDVKGSPHLSDSACLGQQREGGGXELVGXMMXSNXPERXSQGGAGVSPLLVKEEPKEDNGLPXSFXLNAADRPANHXKLKDPSEYVANSASALFSQDISVKMASDFLMKLSAANQKEPMNLNFKVKEEPKEGESLSXXLPRSSYVFSPESEVSAPGVSEDALKPQEGKGSVLRRDVSVKAASELLMKLSAESYKEXQMVKIKEEPMEVDIQDSHVSISPSRNVGYSXLIGREKXEPLQKMPEGRVPPERNLFSQDISVKMASELLFQLSEKVSKEHNHXKENXIRXXXSPFFSEDXFRQSPFXSNSKELLPSDSVLHGRISAPEXEKIVLEAGNGLPSWKFNDQLFPCDVCGKVFGRQQXLSRHLSLHXEERKYKCHLCPYAAKCRANLNQHLXVHSVKLVSXDXEDIVSAVXSEGSDGKKHPYYYSCHVCGFEXELNVQFVSHMSLHVDKEQWMFSICCXACDFVXMEEAEIKXHIGXKHXGEDRKXPSESNSPSSSSLSALSDSANSKDDSDGSQKNKGGNNLLVISVMPGSQPSLNSEEKPEKGFECVFCNFVCKXKNMFERHLQIHLIXRMFECDVCHKFMKXPEQLLEHKKCHXVPXGGLNSGQW

SEQ ID NO: 32314 - protein, 731 aa, Homo sapiens
  MOD_RES (47)..(47): Selenocysteine
  MOD_RES (82)..(82): Selenocysteine
  MOD_RES (91)..(91): Selenocysteine
  MOD_RES (111)..(111): Selenocysteine
  MOD_RES (145)..(145): Selenocysteine
  MOD_RES (150)..(150): Selenocysteine
  MOD_RES (153)..(153): Selenocysteine
  MOD_RES (156)..(156): Selenocysteine
  MOD_RES (160)..(160): Selenocysteine
  MOD_RES (184)..(184): Selenocysteine
  MOD_RES (187)..(187): Selenocysteine
  MOD_RES (198)..(198): Selenocysteine
  MOD_RES (258)..(259): Selenocysteine
  MOD_RES (317)..(317): Selenocysteine
  MOD_RES (348)..(348): Selenocysteine
  MOD_RES (355)..(355): Selenocysteine
  MOD_RES (400)..(400): Selenocysteine
  MOD_RES (404)..(404): Selenocysteine
  MOD_RES (407)..(409): Selenocysteine
  MOD_RES (417)..(417): Selenocysteine
  MOD_RES (424)..(424): Selenocysteine
  MOD_RES (446)..(446): Selenocysteine
  MOD_RES (481)..(481): Selenocysteine
  MOD_RES (490)..(490): Selenocysteine
  MOD_RES (515)..(515): Selenocysteine
  MOD_RES (524)..(524): Selenocysteine
  MOD_RES (526)..(526): Selenocysteine
  MOD_RES (534)..(534): Selenocysteine
  MOD_RES (556)..(556): Selenocysteine
  MOD_RES (582)..(582): Selenocysteine
  MOD_RES (588)..(588): Selenocysteine
  MOD_RES (596)..(596): Selenocysteine
  MOD_RES (600)..(600): Selenocysteine
  MOD_RES (603)..(603): Selenocysteine
  MOD_RES (609)..(609): Selenocysteine
  MOD_RES (680)..(680): Selenocysteine
  MOD_RES (694)..(694): Selenocysteine
  MOD_RES (708)..(708): Selenocysteine
  MOD_RES (720)..(720): Selenocysteine
  MOD_RES (723)..(723): Selenocysteine
MPRRKQEQPKRLPSPSEEESGKPFQCPICGLVIKRKSYWKRHMVIHXGLKSHQCPLCPFRCARKDNLKSHMKVHQHQDRGEXFQCQLCPFXSSRHFSLKLHMRCHQHFLRXEAKVKEEIPDPDVKGSPHLSDSACLGQQREGGGXELVGXMMXSNXPERXSQGGAGVSPLLVKEEPKEDNGLPXSFXLNAADRPANHXKLKDPSEYVANSASALFSQDISVKMASDFLMKLSAANQKEPMNLNFKVKEEPKEGESLSXXLPRSSYVFSPESEVSAPGVSEDALKPQEGKGSVLRRDVSVKAASELLMKLSAESYKEXQMVKIKEEPMEVDIQDSHVSISPSRNVGYSXLIGREKXEPLQKMPEGRVPPERNLFSQDISVKMASELLFQLSEKVSKEHNHXKENXIRXXXSPFFSEDXFRQSPFXSNSKELLPSDSVLHGRISAPEXEKIVLEAGNGLPSWKFNDQLFPCDVCGKVFGRQQXLSRHLSLHXEERKYKCHLCPYAAKCRANLNQHLXVHSVKLVSXDXEDIVSAVXSEGSDGKKHPYYYSCHVCGFEXELNVQFVSHMSLHVDKEQWMFSICCXACDFVXMEEAEIKXHIGXKHXGEDRKXPSESNSPSSSSLSALSDSANSKDDSDGSQKNKGGNNLLVISVMPGSQPSLNSEEKPEKGFECVFCNFVCKXKNMFERHLQIHLIXRMFECDVCHKFMKXPEQLLEHKKCHXVPXGGLNSGQW

SEQ ID NO: 32315 - protein, 178 aa, Homo sapiens
  MOD_RES (1)..(1): Any amino acid
  MOD_RES (7)..(7): Selenocysteine
  MOD_RES (33)..(33): Selenocysteine
  MOD_RES (39)..(39): Selenocysteine
  MOD_RES (47)..(47): Selenocysteine
  MOD_RES (51)..(51): Selenocysteine
  MOD_RES (54)..(54): Selenocysteine
  MOD_RES (60)..(60): Selenocysteine
  MOD_RES (131)..(131): Selenocysteine
  MOD_RES (145)..(145): Selenocysteine
  MOD_RES (159)..(159): Selenocysteine
  MOD_RES (171)..(171): Selenocysteine
  MOD_RES (174)..(174): Selenocysteine
XVCGFEXELNVQFVSHMSLHVDKEQWMFSICCXACDFVXMEEAEIKXHIGXKHXGEDRKXPSESNSPSSSSLSALSDSANSKDDSDGSQKNKGGNNLLVISVMPGSQPSLNSEEKPEKGFECVFCNFVCKXKNMFERHLQIHLIXRMFECDVCHKFMKXPEQLLEHKKCHXVPXGGLK

SEQ ID NO: 32316 - protein, 432 aa, Homo sapiens
  MOD_RES (101)..(101): Selenocysteine
  MOD_RES (114)..(114): Selenocysteine
  MOD_RES (130)..(130): Selenocysteine
  MOD_RES (136)..(136): Selenocysteine
  MOD_RES (141)..(141): Selenocysteine
  MOD_RES (149)..(149): Selenocysteine
  MOD_RES (164)..(164): Selenocysteine
  MOD_RES (200)..(200): Selenocysteine
  MOD_RES (207)..(207): Selenocysteine
  MOD_RES (235)..(235): Selenocysteine
  MOD_RES (263)..(263): Selenocysteine
  MOD_RES (278)..(278): Selenocysteine
  MOD_RES (291)..(291): Selenocysteine
  MOD_RES (306)..(306): Selenocysteine
  MOD_RES (319)..(319): Selenocysteine
  MOD_RES (338)..(338): Selenocysteine
  MOD_RES (340)..(340): Selenocysteine
  MOD_RES (375)..(375): Selenocysteine
  MOD_RES (396)..(396): Selenocysteine
  MOD_RES (403)..(403): Selenocysteine
  MOD_RES (431)..(431): Selenocysteine
MPHSPLISIPHVWCHPEEEERMHDELLQAVSKGPVMFRDVSIDFSQEEWECLDADQMNLYKEVMLENFSNLVSVGLSNSKPAVISLLEQGKEPWMVDRELXRGLCSDLESMCEXKILSLKKRHFSQVIIXREDMSXFIQPXFLIPPQKXMSEEKPWECKICGKXFNQNSQFIQHQRIHFGEKHYESKEYGKSFSRGSLVXRHQRIHXGKKPYECKECGKAFSCSSYFSQHQRIHXGEKPYECKECGKAFKYCSNLNDHQRIHXGEKPYECKVCGKAFXKSSQLFLHLRIHXGEKPYECKECGKAFXQHSRLIQHQRMHXGEKPYECKQCGKAFNSASXLXNHHRIHAGEKLYECEECRKAFIQSSELIQHQRIHXDEKPYECNECGKAFNKGSNLXRHQRIHXGEKPYDCKECGKAFGSRSDLIRHEGIHXG

SEQ ID NO: 32317 - protein, 513 aa, Homo sapiens
  MOD_RES (2)..(2): Selenocysteine
  MOD_RES (10)..(10): Selenocysteine
  MOD_RES (48)..(48): Selenocysteine
  MOD_RES (55)..(55): Selenocysteine
  MOD_RES (64)..(64): Selenocysteine
  MOD_RES (182)..(182): Selenocysteine
  MOD_RES (195)..(195): Selenocysteine
  MOD_RES (211)..(211): Selenocysteine
  MOD_RES (217)..(217): Selenocysteine
  MOD_RES (222)..(222): Selenocysteine
  MOD_RES (230)..(230): Selenocysteine
  MOD_RES (245)..(245): Selenocysteine
  MOD_RES (281)..(281): Selenocysteine
  MOD_RES (288)..(288): Selenocysteine
  MOD_RES (316)..(316): Selenocysteine
  MOD_RES (344)..(344): Selenocysteine
  MOD_RES (359)..(359): Selenocysteine
  MOD_RES (372)..(372): Selenocysteine
  MOD_RES (387)..(387): Selenocysteine
  MOD_RES (400)..(400): Selenocysteine
  MOD_RES (419)..(419): Selenocysteine
  MOD_RES (421)..(421): Selenocysteine
  MOD_RES (456)..(456): Selenocysteine
  MOD_RES (477)..(477): Selenocysteine
  MOD_RES (484)..(484): Selenocysteine
  MOD_RES (512)..(512): Selenocysteine
MXGKGLGEDXEDRWGAGALGPCGRSGLKGGGCVWEAEAGGSRGQEIEXILANMEXSLRSGQIPXLDSSEHNLSPEPLELDRMPHSPLISIPHVWCHPEEEERMHDELLQAVSKGPVMFRDVSIDFSQEEWECLDADQMNLYKEVMLENFSNLVSVGLSNSKPAVISLLEQGKEPWMVDRELXRGLCSDLESMCEXKILSLKKRHFSQVIIXREDMSXFIQPXFLIPPQKXMSEEKPWECKICGKXFNQNSQFIQHQRIHFGEKHYESKEYGKSFSRGSLVXRHQRIHXGKKPYECKECGKAFSCSSYFSQHQRIHXGEKPYECKECGKAFKYCSNLNDHQRIHXGEKPYECKVCGKAFXKSSQLFLHLRIHXGEKPYECKECGKAFXQHSRLIQHQRMHXGEKPYECKQCGKAFNSASXLXNHHRIHAGEKLYECEECRKAFIQSSELIQHQRIHXDEKPYECNECGKAFNKGSNLXRHQRIHXGEKPYDCKECGKAFGSRSDLIRHEGIHXG

SEQ ID NO: 32318 - protein, 516 aa, Homo sapiens
  MOD_RES (62)..(62): Selenocysteine
  MOD_RES (65)..(65): Selenocysteine
  MOD_RES (70)..(70): Selenocysteine
  MOD_RES (81)..(81): Selenocysteine
  MOD_RES (90)..(90): Selenocysteine
  MOD_RES (109)..(109): Selenocysteine
  MOD_RES (116)..(116): Selenocysteine
  MOD_RES (119)..(119): Selenocysteine
  MOD_RES (144)..(144): Selenocysteine
  MOD_RES (172)..(172): Selenocysteine
  MOD_RES (200)..(200): Selenocysteine
  MOD_RES (225)..(225): Selenocysteine
  MOD_RES (228)..(228): Selenocysteine
  MOD_RES (256)..(256): Selenocysteine
  MOD_RES (284)..(284): Selenocysteine
  MOD_RES (312)..(312): Selenocysteine
  MOD_RES (340)..(340): Selenocysteine
  MOD_RES (396)..(396): Selenocysteine
  MOD_RES (424)..(424): Selenocysteine
  MOD_RES (452)..(452): Selenocysteine
  MOD_RES (473)..(473): Selenocysteine
  MOD_RES (480)..(480): Selenocysteine
  MOD_RES (514)..(514): Selenocysteine
MHGRKDDAQKQPVKNQLGLNPQSHLPELQLFQAEGKIYKYDHMEKSVNSSSLVSPPQRISSXVKXHISHXYECNFVDSLFXQKEKANIGXEHYKCSERGKAFHQGLHFXIHQIIHXKEXQFKCDICGKIFNKKSNLASHQRIHXGEKPYKCNECGKVFHNMSHLAQHRRIHXGEKPYKCNECGKVFNQISHLAQHQRIHXGEKPYKCNECGKVFHQISHLAQHRXIHXGEKPYECNKCGKVFSRNSYLVQHLIIHXGEKPYRCNVCGKVFHHISHLAQHQRIHXGEKPYKCNECGKVFSHKSSLVNHWRIHXGEKPYKCNECGKVFSHKSSLVNHWRIHXGEKPYKCNECGKVFSRNSYLAQHLIIHAGEKPYKCDECDKAFSQNSHLVQHHRIHXGEKPYKCDECGKVFSQNSYLAYHWRIHXGEKAYKCNECGKVFGLNSSLAHHRKIHXGEKPFKCNECGKAFSMRSSLXNHHAIHXGEKHFKCNECGKLFRDNSYLVRHQRFHAGKKSNXCN

SEQ ID NO: 32319 - protein, 92 aa, Homo sapiens
  MOD_RES (9)..(9): Selenocysteine
  MOD_RES (31)..(31): Selenocysteine
MVLPQGLLXFRDVAIEFSQEEWKCLDPAQRXLYRDVMLENYRNLVSLDGVFALVAQAGVQWHNLGSPPPPPPGFKRFSRLSLRSCWNYRYFF

SEQ ID NO: 32320 - protein, 53 aa, Homo sapiens
  MOD_RES (9)..(9): Selenocysteine
  MOD_RES (31)..(31): Selenocysteine
MVLPQGLLXFRDVAIEFSQEEWKCLDPAQRXLYRDVMLENYRNLVSLDVLRSS

SEQ ID NO: 32321 - protein, 125 aa, Homo sapiens
  MOD_RES (9)..(9): Selenocysteine
  MOD_RES (31)..(31): Selenocysteine
  MOD_RES (78)..(80): Selenocysteine
MVLPQGLLXFRDVAIEFSQEEWKCLDPAQRXLYRDVMLENYRNLVSLGHDLILFFLFPRWSFCSCCPGWSAVAQSRLXXXSASRVQAILPPQPQKLLELQVFFLNVRSRNYHQKRRVIQEKYSRQ

SEQ ID NO: 32322 - protein, 125 aa, Homo sapiens
  MOD_RES (9)..(9): Selenocysteine
  MOD_RES (31)..(31): Selenocysteine
  MOD_RES (66)..(66): Selenocysteine
  MOD_RES (72)..(72): Selenocysteine
  MOD_RES (91)..(91): Selenocysteine
  MOD_RES (105)..(105): Selenocysteine
  MOD_RES (113)..(113): Selenocysteine
  MOD_RES (115)..(115): Selenocysteine
MVLPQGLLXFRDVAIEFSQEEWKCLDPAQRXLYRDVMLENYRNLVSLGIFSKCEIKELPPKKESNXGEIFQXVMLERHESHDIQDFCFREXQKNGLPLMPSRSWXVLLPSWLXAXSLPDSPASAC

SEQ ID NO: 32323 - protein, 105 aa, Homo sapiens
  MOD_RES (9)..(9): Selenocysteine
  MOD_RES (31)..(31): Selenocysteine
  MOD_RES (66)..(66): Selenocysteine
  MOD_RES (72)..(72): Selenocysteine
  MOD_RES (91)..(91): Selenocysteine
MVLPQGLLXFRDVAIEFSQEEWKCLDPAQRXLYRDVMLENYRNLVSLGIFSKCEIKELPPKKESNXGEIFQXVMLERHESHDIQDFCFREXQKNVHDSQCLWKHD

SEQ ID NO: 32324 - protein, 55 aa, Homo sapiens
  MOD_RES (9)..(9): Selenocysteine
  MOD_RES (31)..(31): Selenocysteine
  MOD_RES (54)..(54): Selenocysteine
MVLPQGLLXFRDVAIEFSQEEWKCLDPAQRXLYRDVMLENYRNLVSLGRLSQNXA

SEQ ID NO: 32325 - protein, 71 aa, Homo sapiens
  MOD_RES (9)..(9): Selenocysteine
  MOD_RES (31)..(31): Selenocysteine
  MOD_RES (60)..(60): Selenocysteine
MVLPQGLLXFRDVAIEFSQEEWKCLDPAQRXLYRDVMLENYRNLVSLGSPSDAEPKLDGXAAILAHCNLPA

SEQ ID NO: 32326 - protein, 30 aa, Homo sapiens
MVLPQVFFLNVRSRNYHQKRRVIQEKYSRQ

SEQ ID NO: 32327 - protein, 1677 aa, Homo sapiens
  MOD_RES (7)..(7): Selenocysteine
  MOD_RES (20)..(20): Selenocysteine
  MOD_RES (36)..(36): Selenocysteine
  MOD_RES (52)..(52): Selenocysteine
  MOD_RES (65)..(65): Selenocysteine
  MOD_RES (79)..(79): Selenocysteine
  MOD_RES (103)..(103): Selenocysteine
  MOD_RES (112)..(112): Selenocysteine
  MOD_RES (114)..(114): Selenocysteine
  MOD_RES (120)..(120): Selenocysteine
  MOD_RES (131)..(131): Selenocysteine
  MOD_RES (167)..(167): Selenocysteine
  MOD_RES (176)..(176): Selenocysteine
  MOD_RES (183)..(183): Selenocysteine
  MOD_RES (193)..(193): Selenocysteine
  MOD_RES (195)..(195): Selenocysteine
  MOD_RES (263)..(263): Selenocysteine
  MOD_RES (295)..(295): Selenocysteine
  MOD_RES (308)..(308): Selenocysteine
  MOD_RES (321)..(321): Selenocysteine
  MOD_RES (342)..(342): Selenocysteine
  MOD_RES (432)..(432): Selenocysteine
  MOD_RES (444)..(444): Selenocysteine
  MOD_RES (447)..(447): Selenocysteine
  MOD_RES (473)..(473): Selenocysteine
  MOD_RES (475)..(475): Selenocysteine
  MOD_RES (490)..(490): Selenocysteine
  MOD_RES (494)..(495): Selenocysteine
  MOD_RES (502)..(502): Selenocysteine
  MOD_RES (515)..(515): Selenocysteine
  MOD_RES (529)..(529): Selenocysteine
  MOD_RES (551)..(551): Selenocysteine
  MOD_RES (573)..(573): Selenocysteine
  MOD_RES (585)..(585): Selenocysteine
  MOD_RES (590)..(590): Selenocysteine
  MOD_RES (627)..(627): Selenocysteine
  MOD_RES (670)..(670): Selenocysteine
  MOD_RES (673)..(673): Selenocysteine
  MOD_RES (678)..(678): Selenocysteine
  MOD_RES (689)..(689): Selenocysteine
  MOD_RES (705)..(705): Selenocysteine
  MOD_RES (708)..(708): Selenocysteine
  MOD_RES (713)..(713): Selenocysteine
  MOD_RES (798)..(798): Selenocysteine
  MOD_RES (804)..(804): Selenocysteine
  MOD_RES (843)..(843): Selenocysteine
  MOD_RES (848)..(848): Selenocysteine
  MOD_RES (904)..(904): Selenocysteine
  MOD_RES (921)..(921): Selenocysteine
  MOD_RES (950)..(950): Selenocysteine
  MOD_RES (986)..(986): Selenocysteine
  MOD_RES (1032)..(1032): Selenocysteine
  MOD_RES (1052)..(1052): Selenocysteine
  MOD_RES (1057)..(1057): Selenocysteine
  MOD_RES (1059)..(1059): Selenocysteine
  MOD_RES (1083)..(1083): Selenocysteine
  MOD_RES (1135)..(1135): Selenocysteine
  MOD_RES (1138)..(1138): Selenocysteine
  MOD_RES (1158)..(1158): Selenocysteine
  MOD_RES (1164)..(1164): Selenocysteine
  MOD_RES (1170)..(1170): Selenocysteine
  MOD_RES (1184)..(1184): Selenocysteine
  MOD_RES (1232)..(1232): Selenocysteine
  MOD_RES (1234)..(1234): Selenocysteine
  MOD_RES (1251)..(1251): Selenocysteine
  MOD_RES (1311)..(1311): Selenocysteine
  MOD_RES (1313)..(1313): Selenocysteine
  MOD_RES (1333)..(1333): Selenocysteine
  MOD_RES (1337)..(1337): Selenocysteine
  MOD_RES (1354)..(1354): Selenocysteine
  MOD_RES (1374)..(1374): Selenocysteine
  MOD_RES (1377)..(1377): Selenocysteine
  MOD_RES (1382)..(1382): Selenocysteine
  MOD_RES (1394)..(1394): Selenocysteine
  MOD_RES (1409)..(1410): Selenocysteine
  MOD_RES (1413)..(1413): Selenocysteine
  MOD_RES (1416)..(1416): Selenocysteine
  MOD_RES (1425)..(1425): Selenocysteine
  MOD_RES (1448)..(1448): Selenocysteine
  MOD_RES (1459)..(1459): Selenocysteine
  MOD_RES (1480)..(1480): Selenocysteine
  MOD_RES (1488)..(1488): Selenocysteine
  MOD_RES (1501)..(1501): Selenocysteine
  MOD_RES (1519)..(1519): Selenocysteine
  MOD_RES (1523)..(1523): Selenocysteine
  MOD_RES (1525)..(1525): Selenocysteine
  MOD_RES (1534)..(1534): Selenocysteine
  MOD_RES (1541)..(1541): Selenocysteine
  MOD_RES (1562)..(1562): Selenocysteine
  MOD_RES (1565)..(1565): Selenocysteine
  MOD_RES (1588)..(1588): Selenocysteine
  MOD_RES (1602)..(1602): Selenocysteine
  MOD_RES (1622)..(1622): Selenocysteine
  MOD_RES (1658)..(1658): Selenocysteine
  MOD_RES (1665)..(1665): Selenocysteine
MEVPEPXCPAPPARDQPAPXPGPPGAPGGQASPHLXLGPVLLPPEQGLAPPXVFLKALPIPLYHXVPPGGLQPRAPLVXGSLDGGNVPFILSPVLQPEGPGPXQVGKPAAPXLXVNIVGXLPVLSPGLGPXLGSPGKVRNAGKYLCPHCGRDCLKPSVLEKHIRSHXGERPFPCAXCGIAFKXQSNLYKHRRXQXHLNNSRLSSESEGAGGGLLEEGDKAGEPPRPEGRGESRCQGMHEGASERPLSPGAHVPLLAKNLDVRXEAAPCPGSAFADREAPWDSAPMASPGLPAASXQPWRKLPEQKSPXAGKPCALQRQQAXAAEKPWDAKAPEGRLRKCESXDSGYLSRSDSAEQPHAPCSPLHSLSEHSAESEGEGGPGPGPGVAGAEPGAREAGLELEKKRLEERIAQLISHNQAVVDDAQLDNVRPRKXGLSKQGSIDLPXPYXYKDSFHFDIRALEPGRRRAPGPVRSXWXPPDKSRPLFFHSVPXQLSXXVECVPVXRSNSLPFVEGSRXWLEPREPRDPWSRXQKPLSPRPGPARLGCRSGLSSXDVPSGHPRALVRQAAVEDLPGXPIGDALVPAEDXDAKRXAAREAMAGKGRAGGRKCGQRRLKMFSQEKWQVYGDEXFKRIYQKMKASPHGGKKAREVGMGSGAELGFPLQKEAAGSSGXVPXQDRRXPVHEDISAGAXPEPWGNPPALEASLVXEPXKHGEXVARRGDSDRPRVEEAVSSPALGGRDSPCSGSRSPLVSPNGRLELGWQMPPAPGPLKGGDVEAPRPVWPDPKLEGGARGVGDVQEXCLWAQXVLRWPSRGSGEDKLPSERKKLKVEDLHSWKQPEPVSAEXPGGPXQPASLSSQKQDADPGEVPGGSKESARQVGEPLESSGASLAAASVALKRVGPRDKAXPLHPAAPAPAEHPSLAXPPQAPRVLSALADNAFSPKYLLRLPQAEXPLPLPIPWGPRHSQDSLCSSGWPEERASFVGSGLGXPLSPSPASGPSPGEADSILEDPSCSRPQDGRKGAQLGGDKGDRMAXSRPAARELPISAPGAPREAXSSPPXPXCEAHLVQDMEGDSHRIHRLCMGSXLARARLSGDVLNPWVPNWELGEPPGNAPEDPSSGPLVGPDPCSPLQPGSFLXALXRPQGVPPGWPELALSSHSGXSRSHSXRSPHSXQNPFPSLKAEPRLXWCCLSRSVPLPAEQKAKAASVYLAVHFPGSSLRDEGPNGPPGSNGGWXWXSPGEGGPAQMSKFSYPXVPGVMPQHQVSEPEWKKGLPWRAKMSRGNSKQRKLKINPKRYKGNFLQSCVQLRASRLRXPXWVRRRSRHPPALEGLKPCRXPGQXSSEIAGLNLQEEPSCAXSESPPCCGKEEKKEGDCRQXLGXLSLGXSSRIVREMDKRXVKDISPSAGEHGDCXXHSXAAXSGLSLQSDXCLAVVNDVPLPPGKGLDLGLLEXQLLASQDSVSXDPKPYIFSDAQRPSSFGSKGXFPHHDIAXSVAAVCISLPVRXDHIAQEIHSAESRDHSQXAGRXLXSSSPDSKVXEEGRAQXLLPGRPSSGQRISDSVPLESXEKXHLEIPASGPSSASSHHKEGRHKXFFPSRGQYGCGEMXVPCPSLGSDGRKRQVSGLIXRKDSVVPSKPEQPIEIPEAPSKSLKKRSLEGMRKQXRVEFSDXSSDDEDRLVIEI

SEQ ID NO: 32328 - protein, 92 aa, Homo sapiens
  MOD_RES (63)..(63): Selenocysteine
  MOD_RES (70)..(70): Selenocysteine
MEGLLSVALQGAELEGNWKHEGQVEDLQENQESCPEPEAVACKGDPAGDSMQERDEFSRIPRXISSPAAXQASVPDDSSSRRCSAPGESPKE

SEQ ID NO: 32329 - protein, 537 aa, Homo sapiens
  MOD_RES (63)..(63): Selenocysteine
  MOD_RES (70)..(70): Selenocysteine
  MOD_RES (133)..(133): Selenocysteine
  MOD_RES (154)..(154): Selenocysteine
  MOD_RES (159)..(159): Selenocysteine
  MOD_RES (161)..(161): Selenocysteine
  MOD_RES (187)..(187): Selenocysteine
  MOD_RES (189)..(189): Selenocysteine
  MOD_RES (204)..(204): Selenocysteine
  MOD_RES (207)..(207): Selenocysteine
  MOD_RES (210)..(210): Selenocysteine
  MOD_RES (217)..(217): Selenocysteine
  MOD_RES (245)..(245): Selenocysteine
  MOD_RES (273)..(273): Selenocysteine
  MOD_RES (294)..(294): Selenocysteine
  MOD_RES (301)..(301): Selenocysteine
  MOD_RES (307)..(307): Selenocysteine
  MOD_RES (329)..(329): Selenocysteine
  MOD_RES (344)..(344): Selenocysteine
  MOD_RES (350)..(350): Selenocysteine
  MOD_RES (355)..(355): Selenocysteine
  MOD_RES (357)..(357): Selenocysteine
  MOD_RES (385)..(385): Selenocysteine
  MOD_RES (413)..(413): Selenocysteine
  MOD_RES (439)..(439): Selenocysteine
  MOD_RES (441)..(441): Selenocysteine
  MOD_RES (447)..(447): Selenocysteine
  MOD_RES (469)..(469): Selenocysteine
  MOD_RES (495)..(495): Selenocysteine
  MOD_RES (508)..(508): Selenocysteine
  MOD_RES (512)..(512): Selenocysteine
  MOD_RES (521)..(521): Selenocysteine
MEGLLSVALQGAELEGNWKHEGQVEDLQENQESCPEPEAVACKGDPAGDSMQERDEFSRIPRXISSPAAXQASVPDDSSSRRCSAPGESPKERHPDSRQRERGGGPKKPWKCGDCGKAFSYCSAFILHQRIHXGEKPFACPECGKAFSQSVHLXLHQRXHXGEKPYACHECGKAFSQGSYLASHWRXHXGEKPHRCADCGKAFXRVXHLXQHRRVHXGERPYACAQCAKAFRNRSSLIEHQRIHXGEKPYECSACAKAFRFSSALIRHQRIHXEEKPYRCGQCAKAFAQIAHLXQHRRVHXGEKPYXCQDCGALFSQSASLAEHRRIHXGEKPYACGQCAKAFXQVSHLXQHQRXHXGERPYPCHDCGKRFSNRSHLLQHRLVHXGERPYRCLQCGAAFSHVSSLIEHQKIHXGERPYKCGECGKAFSQGSSLALHQRXHXGERPYXCPECGKAFSNRSYLIQHHIVHXGEKPYECSGCGKAFSFSSALIRHQRXHADSSGRLCPAPXPDSXPGLSQGGEXCQQGCPGRNPRGPAED

SEQ ID NO: 32330 - protein, 30 aa, Homo sapiens
  MOD_RES (4)..(4): Selenocysteine
  MOD_RES (7)..(7): Selenocysteine
  MOD_RES (13)..(13): Selenocysteine
  MOD_RES (26)..(26): Selenocysteine
KHQXKHXAESLKXKFNVEKPLDVLLXSGFK

SEQ ID NO: 32331 - protein, 936 aa, Homo sapiens
  MOD_RES (9)..(9): Selenocysteine
  MOD_RES (55)..(55): Selenocysteine
  MOD_RES (66)..(66): Selenocysteine
  MOD_RES (72)..(72): Selenocysteine
  MOD_RES (74)..(74): Selenocysteine
  MOD_RES (115)..(115): Selenocysteine
  MOD_RES (142)..(142): Selenocysteine
  MOD_RES (150)..(150): Selenocysteine
  MOD_RES (157)..(157): Selenocysteine
  MOD_RES (170)..(170): Selenocysteine
  MOD_RES (189)..(189): Selenocysteine
  MOD_RES (206)..(206): Selenocysteine
  MOD_RES (211)..(211): Selenocysteine
  MOD_RES (241)..(242): Selenocysteine
  MOD_RES (262)..(262): Selenocysteine
  MOD_RES (269)..(269): Selenocysteine
  MOD_RES (297)..(297): Selenocysteine
  MOD_RES (325)..(325): Selenocysteine
  MOD_RES (338)..(338): Selenocysteine
  MOD_RES (346)..(347): Selenocysteine
  MOD_RES (353)..(353): Selenocysteine
  MOD_RES (381)..(381): Selenocysteine
  MOD_RES (403)..(403): Selenocysteine
  MOD_RES (406)..(406): Selenocysteine
  MOD_RES (422)..(422): Selenocysteine
  MOD_RES (430)..(431): Selenocysteine
  MOD_RES (437)..(437): Selenocysteine
  MOD_RES (443)..(443): Selenocysteine
  MOD_RES (465)..(465): Selenocysteine
  MOD_RES (482)..(482): Selenocysteine
  MOD_RES (493)..(493): Selenocysteine
  MOD_RES (514)..(514): Selenocysteine
  MOD_RES (521)..(521): Selenocysteine
  MOD_RES (549)..(549): Selenocysteine
  MOD_RES (577)..(577): Selenocysteine
  MOD_RES (589)..(589): Selenocysteine
  MOD_RES (605)..(605): Selenocysteine
  MOD_RES (633)..(633): Selenocysteine
  MOD_RES (661)..(661): Selenocysteine
  MOD_RES (676)..(676): Selenocysteine
  MOD_RES (682)..(682): Selenocysteine
  MOD_RES (689)..(689): Selenocysteine
  MOD_RES (717)..(717): Selenocysteine
  MOD_RES (730)..(730): Selenocysteine
  MOD_RES (735)..(735): Selenocysteine
  MOD_RES (738)..(738): Selenocysteine
  MOD_RES (745)..(745): Selenocysteine
  MOD_RES (762)..(762): Selenocysteine
  MOD_RES (773)..(773): Selenocysteine
  MOD_RES (792)..(792): Selenocysteine
  MOD_RES (801)..(801): Selenocysteine
  MOD_RES (829)..(829): Selenocysteine
  MOD_RES (857)..(857): Selenocysteine
  MOD_RES (906)..(906): Selenocysteine
  MOD_RES (910)..(910): Selenocysteine
  MOD_RES (913)..(913): Selenocysteine
  MOD_RES (919)..(919): Selenocysteine
  MOD_RES (932)..(932): Selenocysteine
LCIVQGPLXFRDVAIEFSQEEWKSLDPVQKALYWDVMLENYRNLVFLGILPKCMXKELPPIGNSNXGEKCQXVXLERHECYDVENFYLREIQKNLQDLEFQWKDGEINYKEVPMXYKNNLNGKRGQHSQEDVENKCIENQLXLSFQSRLXELQKFQXEGKIYECNQSEKXVNNSSLVSPLQRILPSVQXNISKKYENEFLQLSLPXQLEKXHIREKPYMCKGCGKAFRVSSSLINHQMVHXXEKPYKCNECGKAFHRGSLLXIHQIVHXRGKPYQCGVCGKIFRQNSDLVNHRRSHXGEKPYKCNECGKSFSQSYNLAIHQRIHXGEKPYKCNECGKXFKQGSCLXXHQIIHXGEKPYQCDICGKVFRQNSNLVNHQRIHXGEKPYKCNICGKSFSQSSNLAXHQXVHSGNKPYKCDECGKXFKRSSSLXXHQIIHXGEKPYXCDVCDKVFSQRSQLARHQRSHXGEKPYKCNECGKVFSQXSHLVGHRRIHXGEKPYKCDKCGKAFKQGSLLXRHKIIHXREKRYQCGECGKVFSENSCLVRHLRIHXGEQPYKCNVCGKVFNYSGNLSIHKRIHXGEKPFQCNECGXVFRNYSCLARHLRIHXGQKPYKCNVCGKVFNDSGNLSNHKRIHXGEKPFQCNECGKVFSYYSCLARHRKIHXGEKPYKCNDCGKAYXQRSSLXKHLIIHXGEKPYNCNEFGGAFIQSSKLARYHRNPXGEKPHKCSHCGRXFSHIXGLXYHQRRHXGEMPYKCIECGQVFNSXSNLARHRRIHXGEKPYKCNECGKVFRHQSXLARHRSIHXGEKPYVCNECGKAFRVRSILVNHQKMHXGDKPYKCNECGKAFIERSKLVYHQRNHXGEKPYKCIECGKAFGRFSCLNKHQMIHSGEKPYKCNECGKSFISRSGLXKHQXKHXAESLKXKFNVEKPLDVLLXSGFK

SEQ ID NO: 32332 - protein, 105 aa, Homo sapiens
  MOD_RES (4)..(4): Selenocysteine
  MOD_RES (9)..(9): Selenocysteine
  MOD_RES (55)..(55): Selenocysteine
  MOD_RES (66)..(66): Selenocysteine
  MOD_RES (72)..(72): Selenocysteine
  MOD_RES (74)..(74): Selenocysteine
MALXQGPLXFRDVAIEFSQEEWKSLDPVQKALYWDVMLENYRNLVFLGILPKCMXKELPPIGNSNXGEKCQXVXLERHECYDVENFYLREIQKNLQDLEFQWKDG

SEQ ID NO: 32333 - protein, 936 aa, Homo sapiens
  MOD_RES (4)..(4): Selenocysteine
  MOD_RES (9)..(9): Selenocysteine
  MOD_RES (55)..(55): Selenocysteine
  MOD_RES (66)..(66): Selenocysteine
  MOD_RES (72)..(72): Selenocysteine
  MOD_RES (74)..(74): Selenocysteine
  MOD_RES (115)..(115): Selenocysteine
  MOD_RES (142)..(142): Selenocysteine
  MOD_RES (150)..(150): Selenocysteine
  MOD_RES (157)..(157): Selenocysteine
  MOD_RES (170)..(170): Selenocysteine
  MOD_RES (189)..(189): Selenocysteine
  MOD_RES (206)..(206): Selenocysteine
  MOD_RES (211)..(211): Selenocysteine
  MOD_RES (241)..(242): Selenocysteine
  MOD_RES (262)..(262): Selenocysteine
  MOD_RES (269)..(269): Selenocysteine
  MOD_RES (297)..(297): Selenocysteine
  MOD_RES (325)..(325): Selenocysteine
  MOD_RES (338)..(338): Selenocysteine
  MOD_RES (346)..(347): Selenocysteine
  MOD_RES (353)..(353): Selenocysteine
  MOD_RES (381)..(381): Selenocysteine
  MOD_RES (403)..(403): Selenocysteine
  MOD_RES (406)..(406): Selenocysteine
  MOD_RES (422)..(422): Selenocysteine
  MOD_RES (430)..(431): Selenocysteine
  MOD_RES (437)..(437): Selenocysteine
  MOD_RES (443)..(443): Selenocysteine
  MOD_RES (465)..(465): Selenocysteine
  MOD_RES (482)..(482): Selenocysteine
  MOD_RES (493)..(493): Selenocysteine
  MOD_RES (514)..(514): Selenocysteine
  MOD_RES (521)..(521): Selenocysteine
  MOD_RES (549)..(549): Selenocysteine
  MOD_RES (577)..(577): Selenocysteine
  MOD_RES (589)..(589): Selenocysteine
  MOD_RES (605)..(605): Selenocysteine
  MOD_RES (633)..(633): Selenocysteine
  MOD_RES (661)..(661): Selenocysteine
  MOD_RES (676)..(676): Selenocysteine
  MOD_RES (682)..(682): Selenocysteine
  MOD_RES (689)..(689): Selenocysteine
  MOD_RES (717)..(717): Selenocysteine
  MOD_RES (730)..(730): Selenocysteine
  MOD_RES (735)..(735): Selenocysteine
  MOD_RES (738)..(738): Selenocysteine
  MOD_RES (745)..(745): Selenocysteine
  MOD_RES (762)..(762): Selenocysteine
  MOD_RES (773)..(773): Selenocysteine
  MOD_RES (792)..(792): Selenocysteine
  MOD_RES (801)..(801): Selenocysteine
  MOD_RES (829)..(829): Selenocysteine
  MOD_RES (857)..(857): Selenocysteine
  MOD_RES (906)..(906): Selenocysteine
  MOD_RES (910)..(910): Selenocysteine
  MOD_RES (913)..(913): Selenocysteine
  MOD_RES (919)..(919): Selenocysteine
  MOD_RES (932)..(932): Selenocysteine
MALXQGPLXFRDVAIEFSQEEWKSLDPVQKALYWDVMLENYRNLVFLGILPKCMXKELPPIGNSNXGEKCQXVXLERHECYDVENFYLREIQKNLQDLEFQWKDGEINYKEVPMXYKNNLNGKRGQHSQEDVENKCIENQLXLSFQSRLXELQKFQXEGKIYECNQSEKXVNNSSLVSPLQRILPSVQXNISKKYENEFLQLSLPXQLEKXHIREKPYMCKGCGKAFRVSSSLINHQMVHXXEKPYKCNECGKAFHRGSLLXIHQIVHXRGKPYQCGVCGKIFRQNSDLVNHRRSHXGEKPYKCNECGKSFSQSYNLAIHQRIHXGEKPYKCNECGKXFKQGSCLXXHQIIHXGEKPYQCDICGKVFRQNSNLVNHQRIHXGEKPYKCNICGKSFSQSSNLAXHQXVHSGNKPYKCDECGKXFKRSSSLXXHQIIHXGEKPYXCDVCDKVFSQRSQLARHQRSHXGEKPYKCNECGKVFSQXSHLVGHRRIHXGEKPYKCDKCGKAFKQGSLLXRHKIIHXREKRYQCGECGKVFSENSCLVRHLRIHXGEQPYKCNVCGKVFNYSGNLSIHKRIHXGEKPFQCNECGXVFRNYSCLARHLRIHXGQKPYKCNVCGKVFNDSGNLSNHKRIHXGEKPFQCNECGKVFSYYSCLARHRKIHXGEKPYKCNDCGKAYXQRSSLXKHLIIHXGEKPYNCNEFGGAFIQSSKLARYHRNPXGEKPHKCSHCGRXFSHIXGLXYHQRRHXGEMPYKCIECGQVFNSXSNLARHRRIHXGEKPYKCNECGKVFRHQSXLARHRSIHXGEKPYVCNECGKAFRVRSILVNHQKMHXGDKPYKCNECGKAFIERSKLVYHQRNHXGEKPYKCIECGKAFGRFSCLNKHQMIHSGEKPYKCNECGKSFISRSGLXKHQXKHXAESLKXKFNVEKPLDVLLXSGFK

SEQ ID NO: 32334 - protein, 88 aa, Homo sapiens
  MOD_RES (4)..(4): Selenocysteine
  MOD_RES (9)..(9): Selenocysteine
  MOD_RES (79)..(79): Selenocysteine
  MOD_RES (81)..(81): Selenocysteine
  MOD_RES (86)..(86): Selenocysteine
MALXQGPLXFRDVAIEFSQEEWKSLDPVQKALYWDVMLENYRNLVFLGKDNFALEVKICPRVFLYFLCCLSWEPFHYLXEXEALLXHK

SEQ ID NO: 32335 - protein, 531 aa, Homo sapiens
  MOD_RES (45)..(45): Selenocysteine
  MOD_RES (58)..(59): Selenocysteine
  MOD_RES (78)..(78): Selenocysteine
  MOD_RES (84)..(84): Selenocysteine
  MOD_RES (95)..(95): Selenocysteine
  MOD_RES (141)..(141): Selenocysteine
  MOD_RES (158)..(158): Selenocysteine
  MOD_RES (165)..(165): Selenocysteine
  MOD_RES (174)..(174): Selenocysteine
  MOD_RES (178)..(178): Selenocysteine
  MOD_RES (182)..(182): Selenocysteine
  MOD_RES (186)..(186): Selenocysteine
  MOD_RES (221)..(221): Selenocysteine
  MOD_RES (255)..(255): Selenocysteine
  MOD_RES (281)..(281): Selenocysteine
  MOD_RES (283)..(283): Selenocysteine
  MOD_RES (294)..(294): Selenocysteine
  MOD_RES (320)..(320): Selenocysteine
  MOD_RES (386)..(386): Selenocysteine
  MOD_RES (412)..(412): Selenocysteine
  MOD_RES (442)..(442): Selenocysteine
  MOD_RES (455)..(455): Selenocysteine
  MOD_RES (496)..(496): Selenocysteine
  MOD_RES (498)..(498): Selenocysteine
MEAPAQKAGQGGLPKADAQGASGAREKRPEEPRPLEEDRAGSRPXQKGDLRGAAGGRXXPPGGGSRGCSLGVSPGPGXRHSAGXRPLVREPCGPXSSQNPELVIPEGLQAREGPCRSPARGGDCSRNSCLAWHRGAPAGEXPPVCDPCPERIQNHPRXQLCEVHXDCWPCQPGXGAPXCPRXPKPXSRGRNPLVEQPRACACGEAFAWRALRIPQERLQAXEEPRPCARCGKRFRPNQQQQAGKSPPVCPECGQXSRPRPIVPDPPAQRLYACDECGKAFXRXSSLLQHQRIHXGERPYECAECGKAFVRCSGLYRHQKXHSAERHRRGPVLARRAFRLGCPPCGDYSERSPRRGSGAGEKPYECADCAKAFGLFSHLVEHRRVHXGEKPYACPECGKAFNQRSNLSRHQRXHSSAKPYACPLCEKAFKGRSGLVQHQRAHXGERPYGCSECGKXFRGCSELRQHERLHSGEKPYICRDCGKAFVRNCSLVRHLRXHXGERPYACGDCGRAFSQRSNLNEHRKRHGGRAAP

SEQ ID NO: 32336 - protein, 55 aa, Homo sapiens
  MOD_RES (2)..(2): Selenocysteine
  MOD_RES (18)..(18): Selenocysteine
MXMLQESFSFDDLSVDFXQKEWQLLDPSQKNLYKDVMLENYSSLVSLGYEVMKPD

SEQ ID NO: 32337 - protein, 69 aa, Homo sapiens
  MOD_RES (2)..(2): Selenocysteine
  MOD_RES (18)..(18): Selenocysteine
MXMLQESFSFDDLSVDFXQKEWQLLDPSQKNLYKDVMLENYSSLVSLGYEVMKPDVIFKLEQGEEPWVG

SEQ ID NO: 32338 - protein, 78 aa, Homo sapiens
  MOD_RES (2)..(2): Selenocysteine
  MOD_RES (18)..(18): Selenocysteine
MXMLQESFSFDDLSVDFXQKEWQLLDPSQKNLYKDVMLENYSSLVSLGYEVMKPDVIFKLEQGEEPWVGDGEIPSSDS

SEQ ID NO: 32339 - protein, 236 aa, Homo sapiens
  MOD_RES (2)..(2): Selenocysteine
  MOD_RES (18)..(18): Selenocysteine
  MOD_RES (173)..(173): Selenocysteine
  MOD_RES (175)..(175): Selenocysteine
MXMLQESFSFDDLSVDFXQKEWQLLDPSQKNLYKDVMLENYSSLVSLGYEVMKPDVIFKLEQGEEPWVGDGEIPSSDSPEVWKVDGNMMWHQDNQDKLKIIKRGHECDAFGKNFNLNMNFVPLRKSNSEGDLDGLILKHHLDLLIPKGDYGKAESDDFNVFDNFFLHSKPEDXDXWLKYYDCDKYKESYKKSQIIIYHRNRLGEKLYECSECRKRFSKKPSLIKHQSRHIRDIAFG

SEQ ID NO: 32340 - protein, 738 aa, Homo sapiens
  MOD_RES (2)..(2): Selenocysteine
  MOD_RES (18)..(18): Selenocysteine
  MOD_RES (173)..(173): Selenocysteine
  MOD_RES (175)..(175): Selenocysteine
  MOD_RES (243)..(243): Selenocysteine
  MOD_RES (252)..(252): Selenocysteine
  MOD_RES (256)..(256): Selenocysteine
  MOD_RES (258)..(258): Selenocysteine
  MOD_RES (279)..(279): Selenocysteine
  MOD_RES (284)..(284): Selenocysteine
  MOD_RES (286)..(286): Selenocysteine
  MOD_RES (312)..(312): Selenocysteine
  MOD_RES (314)..(314): Selenocysteine
  MOD_RES (342)..(342): Selenocysteine
  MOD_RES (364)..(364): Selenocysteine
  MOD_RES (368)..(368): Selenocysteine
  MOD_RES (370)..(370): Selenocysteine
  MOD_RES (372)..(372): Selenocysteine
  MOD_RES (395)..(395): Selenocysteine
  MOD_RES (398)..(398): Selenocysteine
  MOD_RES (424)..(424): Selenocysteine
  MOD_RES (426)..(426): Selenocysteine
  MOD_RES (452)..(452): Selenocysteine
  MOD_RES (454)..(454): Selenocysteine
  MOD_RES (480)..(480): Selenocysteine
  MOD_RES (482)..(482): Selenocysteine
  MOD_RES (503)..(503): Selenocysteine
  MOD_RES (510)..(510): Selenocysteine
  MOD_RES (536)..(536): Selenocysteine
  MOD_RES (538)..(538): Selenocysteine
  MOD_RES (560)..(560): Selenocysteine
  MOD_RES (564)..(564): Selenocysteine
  MOD_RES (566)..(566): Selenocysteine
  MOD_RES (588)..(588): Selenocysteine
  MOD_RES (594)..(594): Selenocysteine
  MOD_RES (620)..(620): Selenocysteine
  MOD_RES (622)..(622): Selenocysteine
  MOD_RES (650)..(650): Selenocysteine
  MOD_RES (676)..(676): Selenocysteine
  MOD_RES (678)..(678): Selenocysteine
  MOD_RES (706)..(706): Selenocysteine
  MOD_RES (732)..(732): Selenocysteine
  MOD_RES (734)..(734): Selenocysteine
MXMLQESFSFDDLSVDFXQKEWQLLDPSQKNLYKDVMLENYSSLVSLGYEVMKPDVIFKLEQGEEPWVGDGEIPSSDSPEVWKVDGNMMWHQDNQDKLKIIKRGHECDAFGKNFNLNMNFVPLRKSNSEGDLDGLILKHHLDLLIPKGDYGKAESDDFNVFDNFFLHSKPEDXDXWLKYYDCDKYKESYKKSQIIIYHRNRLGEKLYECSECRKRFSKKPSLIKHQSRHIRDIAFGCGNCGKXFPQKSQFIXHHRXHXGEKPYNCSQCGKAFSQKSQLXSHQRXHXGEKPYECGECGKAFSRKSHLISHWRXHXGEKPYGCNECGRAFSEKSNLINHQRIHXGEKPFECRECGKAFSRKSQLVXHHRXHXGXKPFGCSDCRKAFFEKSELIRHQXIHXGEKPYECSECRKAFRERSSLINHQRXHXGEKPHGCIQCGKAFSQKSHLISHQMXHXGEKPFICSKCGKAFSRKSQLVRHQRXHXGEKPYECSECGKAFSEKLSLXNHQRIHXGEKPYVCSECGKAFCQKSHLISHQRXHXGEKPYECSECGKAFGEKSSLAXHQRXHXGEKPYECRDCEKAFSQKSQLNXHQRIHXGEKPYECSLCRKAFFEKSELIRHLRXHXGEKPYECNECRKAFREKSSLINHQRIHXGEKPFECSECGKAFSRKSHLIPHQRXHXGEKPYGCSECRKAFSQKSQLVNHQRIHXGEKPYRCIECGKAFSQKSQLINHQRXHXVKKS

SEQ ID NO: 32341 - protein, 84 aa, Homo sapiens
  MOD_RES (2)..(2): Selenocysteine
  MOD_RES (18)..(18): Selenocysteine
  MOD_RES (81)..(81): Selenocysteine
MXMLQESFSFDDLSVDFXQKEWQLLDPSQKNLYKDVMLENYSSLVSLGYEVMKPDVIFKLEQGEEPWVGDGEIPSSDSPGXSIV

SEQ ID NO: 32342 - protein, 145 aa, Homo sapiens
  MOD_RES (2)..(2): Selenocysteine
  MOD_RES (18)..(18): Selenocysteine
  MOD_RES (90)..(90): Selenocysteine
MXMLQESFSFDDLSVDFXQKEWQLLDPSQKNLYKDVMLENYSSLVSLGYEVMKPDVIFKLEQGEEPWVGDGEIPSSDSPVSGCFLPHGEXWSAVREKNEAMMKAKSRKSPDCVPVPGSSGLHVQVHLCPFHVLIVEFFCEILQIS

SEQ ID NO: 32343 - protein, 737 aa, Homo sapiens
  MOD_RES (2)..(2): Selenocysteine
  MOD_RES (18)..(18): Selenocysteine
  MOD_RES (172)..(172): Selenocysteine
  MOD_RES (174)..(174): Selenocysteine
  MOD_RES (242)..(242): Selenocysteine
  MOD_RES (251)..(251): Selenocysteine
  MOD_RES (255)..(255): Selenocysteine
  MOD_RES (257)..(257): Selenocysteine
  MOD_RES (278)..(278): Selenocysteine
  MOD_RES (283)..(283): Selenocysteine
  MOD_RES (285)..(285): Selenocysteine
  MOD_RES (311)..(311): Selenocysteine
  MOD_RES (313)..(313): Selenocysteine
  MOD_RES (341)..(341): Selenocysteine
  MOD_RES (363)..(363): Selenocysteine
  MOD_RES (367)..(367): Selenocysteine
  MOD_RES (369)..(369): Selenocysteine
  MOD_RES (371)..(371): Selenocysteine
  MOD_RES (394)..(394): Selenocysteine
  MOD_RES (397)..(397): Selenocysteine
  MOD_RES (423)..(423): Selenocysteine
  MOD_RES (425)..(425): Selenocysteine
  MOD_RES (451)..(451): Selenocysteine
  MOD_RES (453)..(453): Selenocysteine
  MOD_RES (479)..(479): Selenocysteine
  MOD_RES (481)..(481): Selenocysteine
  MOD_RES (502)..(502): Selenocysteine
  MOD_RES (509)..(509): Selenocysteine
  MOD_RES (535)..(535): Selenocysteine
  MOD_RES (537)..(537): Selenocysteine
  MOD_RES (559)..(559): Selenocysteine
  MOD_RES (563)..(563): Selenocysteine
  MOD_RES (565)..(565): Selenocysteine
  MOD_RES (587)..(587): Selenocysteine
  MOD_RES (593)..(593): Selenocysteine
  MOD_RES (619)..(619): Selenocysteine
  MOD_RES (621)..(621): Selenocysteine
  MOD_RES (649)..(649): Selenocysteine
  MOD_RES (675)..(675): Selenocysteine
  MOD_RES (677)..(677): Selenocysteine
  MOD_RES (705)..(705): Selenocysteine
  MOD_RES (731)..(731): Selenocysteine
  MOD_RES (733)..(733): Selenocysteine
MXMLQESFSFDDLSVDFXQKEWQLLDPSQKNLYKDVMLENYSSLVSLGYEVMKPDVIFKLEQGEEPWVGDGEIPSSDSPVWKVDGNMMWHQDNQDKLKIIKRGHECDAFGKNFNLNMNFVPLRKSNSEGDLDGLILKHHLDLLIPKGDYGKAESDDFNVFDNFFLHSKPEDXDXWLKYYDCDKYKESYKKSQIIIYHRNRLGEKLYECSECRKRFSKKPSLIKHQSRHIRDIAFGCGNCGKXFPQKSQFIXHHRXHXGEKPYNCSQCGKAFSQKSQLXSHQRXHXGEKPYECGECGKAFSRKSHLISHWRXHXGEKPYGCNECGRAFSEKSNLINHQRIHXGEKPFECRECGKAFSRKSQLVXHHRXHXGXKPFGCSDCRKAFFEKSELIRHQXIHXGEKPYECSECRKAFRERSSLINHQRXHXGEKPHGCIQCGKAFSQKSHLISHQMXHXGEKPFICSKCGKAFSRKSQLVRHQRXHXGEKPYECSECGKAFSEKLSLXNHQRIHXGEKPYVCSECGKAFCQKSHLISHQRXHXGEKPYECSECGKAFGEKSSLAXHQRXHXGEKPYECRDCEKAFSQKSQLNXHQRIHXGEKPYECSLCRKAFFEKSELIRHLRXHXGEKPYECNECRKAFREKSSLINHQRIHXGEKPFECSECGKAFSRKSHLIPHQRXHXGEKPYGCSECRKAFSQKSQLVNHQRIHXGEKPYRCIECGKAFSQKSQLINHQRXHXVKKS

SEQ ID NO: 32344 - protein, 6 aa, Homo sapiens
  MOD_RES (2)..(2): Selenocysteine
MXMLQV

SEQ ID NO: 32345 - protein, 90 aa, Homo sapiens
  MOD_RES (9)..(9): Selenocysteine
  MOD_RES (68)..(68): Selenocysteine
  MOD_RES (90)..(90): Selenocysteine
MALPQGSLXFRDVAVEFSQEEWKCLDPVQKALYRDVMLENYRNLGFLGLCLPDLNIISMLEQGKEPWXVVSQVKIARNPNCGECMKGVIX

SEQ ID NO: 32346 - protein, 924 aa, Homo sapiens
  MOD_RES (9)..(9): Selenocysteine
  MOD_RES (68)..(68): Selenocysteine
  MOD_RES (90)..(90): Selenocysteine
  MOD_RES (109)..(109): Selenocysteine
  MOD_RES (126)..(126): Selenocysteine
  MOD_RES (158)..(158): Selenocysteine
  MOD_RES (164)..(164): Selenocysteine
  MOD_RES (200)..(200): Selenocysteine
  MOD_RES (213)..(213): Selenocysteine
  MOD_RES (232)..(232): Selenocysteine
  MOD_RES (249)..(249): Selenocysteine
  MOD_RES (254)..(254): Selenocysteine
  MOD_RES (284)..(285): Selenocysteine
  MOD_RES (305)..(305): Selenocysteine
  MOD_RES (312)..(312): Selenocysteine
  MOD_RES (340)..(340): Selenocysteine
  MOD_RES (368)..(368): Selenocysteine
  MOD_RES (390)..(390): Selenocysteine
  MOD_RES (393)..(393): Selenocysteine
  MOD_RES (396)..(396): Selenocysteine
  MOD_RES (409)..(409): Selenocysteine
  MOD_RES (417)..(417): Selenocysteine
  MOD_RES (430)..(430): Selenocysteine
  MOD_RES (452)..(452): Selenocysteine
  MOD_RES (455)..(455): Selenocysteine
  MOD_RES (480)..(480): Selenocysteine
  MOD_RES (508)..(508): Selenocysteine
  MOD_RES (529)..(529): Selenocysteine
  MOD_RES (536)..(536): Selenocysteine
  MOD_RES (564)..(564): Selenocysteine
  MOD_RES (579)..(579): Selenocysteine
  MOD_RES (592)..(592): Selenocysteine
  MOD_RES (620)..(620): Selenocysteine
  MOD_RES (648)..(648): Selenocysteine
  MOD_RES (663)..(663): Selenocysteine
  MOD_RES (669)..(669): Selenocysteine
  MOD_RES (676)..(676): Selenocysteine
  MOD_RES (704)..(704): Selenocysteine
  MOD_RES (717)..(717): Selenocysteine
  MOD_RES (722)..(722): Selenocysteine
  MOD_RES (732)..(732): Selenocysteine
  MOD_RES (749)..(751): Selenocysteine
  MOD_RES (760)..(760): Selenocysteine
  MOD_RES (788)..(788): Selenocysteine
  MOD_RES (816)..(816): Selenocysteine
  MOD_RES (844)..(844): Selenocysteine
  MOD_RES (865)..(865): Selenocysteine
  MOD_RES (893)..(893): Selenocysteine
  MOD_RES (905)..(906): Selenocysteine
  MOD_RES (919)..(919): Selenocysteine
MALPQGSLXFRDVAVEFSQEEWKCLDPVQKALYRDVMLENYRNLGFLGLCLPDLNIISMLEQGKEPWXVVSQVKIARNPNCGECMKGVIXGISPKCVIKELPPIQNSNXGEKFQAVMLEGHESYDXENFYFREIRKNLQEVDFQWKDGEINYKEGPMXHKNNLXGQRVRHSQGDVENKHMENQLILRFQSGLGELQKFQXAEKIYGCNQIERXVNNCFLASPLQRIFPGVQXNISRKYGNDFLQLSLPXQDEKXHIREKPYIGNECGKAFRVSSSLINHQMIHXXEKPYRCNESGKAFHRGSLLXVHQIVHXRGKPYQCDVCGRIFRQNSDLVNHRRSHXGDKPYICNECGKSFSKSSHLAVHQRIHXGEKPYKCNRCGKCFSQSSSLAXHQXVHXGDKPYKCNECGKXFKRNSSLXAHHIIHAGKKPYXCDVCGKVFYQNSQLVRHQIIHXGEXPYKCNECGKVFFQRSRLAGHRRIHXGEKPYKCNECGKVFSQHSHLAVHQRVHXGEKPYKCNECGKAFNWGSLLXVHQRIHXGEKPYKCNVCGKVFNYGGYLSVHMRCHXGEKPLHCNKCGMVFXYYSCLARHQRMHXGEKPYKCNVCGKVFIDSGNLSIHRRSHXGEKPFQCNECGKVFSYYSCLARHRKIHXGEKPYKCNDCGKAYXQRSSLXKHLVIHXGENPYHCNEFGEAFIQSSKLARYHRNPXGEKPHKCSECGRXFSHKXSLVYHQRRHXGEMPYKCIECGKVFNSXXXLARHRRIHXGEKPYKCNECGKVFRYRSGLARHWSIHXGEKPYKCNECGKAFRVRSILLNHQMMHXGEKPYKCNECGKAFIERSNLVYHQRNHXGEKPYKCMECGKAFGRRSCLXKHQRIHSSEKPYKCNECGKSYISRSGLXKHQIKHAGENLXXKLNVERPLDVVLXSGIPK

SEQ ID NO: 32347 - protein, 808 aa, Homo sapiens
  MOD_RES (10)..(10): Selenocysteine
  MOD_RES (42)..(42): Selenocysteine
  MOD_RES (48)..(48): Selenocysteine
  MOD_RES (84)..(84): Selenocysteine
  MOD_RES (97)..(97): Selenocysteine
  MOD_RES (116)..(116): Selenocysteine
  MOD_RES (133)..(133): Selenocysteine
  MOD_RES (138)..(138): Selenocysteine
  MOD_RES (168)..(169): Selenocysteine
  MOD_RES (189)..(189): Selenocysteine
  MOD_RES (196)..(196): Selenocysteine
  MOD_RES (224)..(224): Selenocysteine
  MOD_RES (252)..(252): Selenocysteine
  MOD_RES (274)..(274): Selenocysteine
  MOD_RES (277)..(277): Selenocysteine
  MOD_RES (280)..(280): Selenocysteine
  MOD_RES (293)..(293): Selenocysteine
  MOD_RES (301)..(301): Selenocysteine
  MOD_RES (314)..(314): Selenocysteine
  MOD_RES (336)..(336): Selenocysteine
  MOD_RES (339)..(339): Selenocysteine
  MOD_RES (364)..(364): Selenocysteine
  MOD_RES (392)..(392): Selenocysteine
  MOD_RES (413)..(413): Selenocysteine
  MOD_RES (420)..(420): Selenocysteine
  MOD_RES (448)..(448): Selenocysteine
  MOD_RES (463)..(463): Selenocysteine
  MOD_RES (476)..(476): Selenocysteine
  MOD_RES (504)..(504): Selenocysteine
  MOD_RES (532)..(532): Selenocysteine
  MOD_RES (547)..(547): Selenocysteine
  MOD_RES (553)..(553): Selenocysteine
  MOD_RES (560)..(560): Selenocysteine
  MOD_RES (588)..(588): Selenocysteine
  MOD_RES (601)..(601): Selenocysteine
  MOD_RES (606)..(606): Selenocysteine
  MOD_RES (616)..(616): Selenocysteine
  MOD_RES (633)..(635): Selenocysteine
  MOD_RES (644)..(644): Selenocysteine
  MOD_RES (672)..(672): Selenocysteine
  MOD_RES (700)..(700): Selenocysteine
  MOD_RES (728)..(728): Selenocysteine
  MOD_RES (749)..(749): Selenocysteine
  MOD_RES (777)..(777): Selenocysteine
  MOD_RES (789)..(790): Selenocysteine
  MOD_RES (803)..(803): Selenocysteine
MLEGHESYDXENFYFREIRKNLQEVDFQWKDGEINYKEGPMXHKNNLXGQRVRHSQGDVENKHMENQLILRFQSGLGELQKFQXAEKIYGCNQIERXVNNCFLASPLQRIFPGVQXNISRKYGNDFLQLSLPXQDEKXHIREKPYIGNECGKAFRVSSSLINHQMIHXXEKPYRCNESGKAFHRGSLLXVHQIVHXRGKPYQCDVCGRIFRQNSDLVNHRRSHXGDKPYICNECGKSFSKSSHLAVHQRIHXGEKPYKCNRCGKCFSQSSSLAXHQXVHXGDKPYKCNECGKXFKRNSSLXAHHIIHAGKKPYXCDVCGKVFYQNSQLVRHQIIHXGEXPYKCNECGKVFFQRSRLAGHRRIHXGEKPYKCNECGKVFSQHSHLAVHQRVHXGEKPYKCNECGKAFNWGSLLXVHQRIHXGEKPYKCNVCGKVFNYGGYLSVHMRCHXGEKPLHCNKCGMVFXYYSCLARHQRMHXGEKPYKCNVCGKVFIDSGNLSIHRRSHXGEKPFQCNECGKVFSYYSCLARHRKIHXGEKPYKCNDCGKAYXQRSSLXKHLVIHXGENPYHCNEFGEAFIQSSKLARYHRNPXGEKPHKCSECGRXFSHKXSLVYHQRRHXGEMPYKCIECGKVFNSXXXLARHRRIHXGEKPYKCNECGKVFRYRSGLARHWSIHXGEKPYKCNECGKAFRVRSILLNHQMMHXGEKPYKCNECGKAFIERSNLVYHQRNHXGEKPYKCMECGKAFGRRSCLXKHQRIHSSEKPYKCNECGKSYISRSGLXKHQIKHAGENLXXKLNVERPLDVVLXSGIPK

SEQ ID NO: 32348 - protein, 512 aa, Homo sapiens
  MOD_RES (1)..(1): Any amino acid
  MOD_RES (5)..(5): Selenocysteine
  MOD_RES (22)..(22): Selenocysteine
  MOD_RES (54)..(54): Selenocysteine
  MOD_RES (60)..(60): Selenocysteine
  MOD_RES (96)..(96): Selenocysteine
  MOD_RES (109)..(109): Selenocysteine
  MOD_RES (128)..(128): Selenocysteine
  MOD_RES (145)..(145): Selenocysteine
  MOD_RES (150)..(150): Selenocysteine
  MOD_RES (180)..(181): Selenocysteine
  MOD_RES (201)..(201): Selenocysteine
  MOD_RES (208)..(208): Selenocysteine
  MOD_RES (236)..(236): Selenocysteine
  MOD_RES (264)..(264): Selenocysteine
  MOD_RES (286)..(286): Selenocysteine
  MOD_RES (289)..(289): Selenocysteine
  MOD_RES (292)..(292): Selenocysteine
  MOD_RES (305)..(305): Selenocysteine
  MOD_RES (313)..(313): Selenocysteine
  MOD_RES (326)..(326): Selenocysteine
  MOD_RES (348)..(348): Selenocysteine
  MOD_RES (351)..(351): Selenocysteine
  MOD_RES (376)..(376): Selenocysteine
  MOD_RES (404)..(404): Selenocysteine
  MOD_RES (432)..(432): Selenocysteine
  MOD_RES (453)..(453): Selenocysteine
  MOD_RES (481)..(481): Selenocysteine
  MOD_RES (493)..(494): Selenocysteine
  MOD_RES (507)..(507): Selenocysteine
XNSNXGEKFQAVMLEGHESYDXENFYFREIRKNLQEVDFQWKDGEINYKEGPMXHKNNLXGQRVRHSQGDVENKHMENQLILRFQSGLGELQKFQXAEKIYGCNQIERXVNNCFLASPLQRIFPGVQXNISRKYGNDFLQLSLPXQDEKXHIREKPYIGNECGKAFRVSSSLINHQMIHXXEKPYRCNESGKAFHRGSLLXVHQIVHXRGKPYQCDVCGRIFRQNSDLVNHRRSHXGDKPYICNECGKSFSKSSHLAVHQRIHXGEKPYKCNRCGKCFSQSSSLAXHQXVHXGDKPYKCNECGKXFKRNSSLXAHHIIHAGKKPYXCDVCGKVFYQNSQLVRHQIIHXGEXPYKCNECGKVFRYRSGLARHWSIHXGEKPYKCNECGKAFRVRSILLNHQMMHXGEKPYKCNECGKAFIERSNLVYHQRNHXGEKPYKCMECGKAFGRRSCLXKHQRIHSSEKPYKCNECGKSYISRSGLXKHQIKHAGENLXXKLNVERPLDVVLXSGIPK

SEQ ID NO: 32349 - protein, 348 aa, Homo sapiens
  MOD_RES (9)..(9): Selenocysteine
  MOD_RES (19)..(19): Selenocysteine
  MOD_RES (23)..(23): Selenocysteine
  MOD_RES (27)..(27): Selenocysteine
  MOD_RES (43)..(43): Selenocysteine
  MOD_RES (61)..(61): Selenocysteine
  MOD_RES (107)..(107): Selenocysteine
  MOD_RES (111)..(111): Selenocysteine
  MOD_RES (158)..(158): Selenocysteine
  MOD_RES (172)..(172): Selenocysteine
  MOD_RES (193)..(193): Selenocysteine
  MOD_RES (213)..(213): Selenocysteine
  MOD_RES (257)..(257): Selenocysteine
MRSLPFALXVESVSARAPXCCSXGRFXQGRQPCKCKACGRGFXQSASLLQHWRVHSDWREXLSLSPVRQDLLWPLQPHQAPASPLGRSHSSAGVRQGFSGQLCCWLXKEHXLAEALRLSPVPAGFWGPVEADRPPANSHRRVCPFCCCSCGDSVNEKXSLSQRVLPHPGEKXCRGGSVESVSLAPSSVAPDSXSGLRPCGSPGSFLQHLPPSXLLPRPPFLYPGPPLSLQPLVPSGLPAVPAVPLGGLEVAQVPPAXQPAAQQEGAMGPRSCASAGRDSREAVQAPGYPEPARKASQHRAAGPLGEARARLQRQCRAPPPPSNPHWRGALPVFPVWKASSRRSNLARH

SEQ ID NO: 32350 - protein, 293 aa, Homo sapiens
  MOD_RES (9)..(9): Selenocysteine
  MOD_RES (19)..(19): Selenocysteine
  MOD_RES (23)..(23): Selenocysteine
  MOD_RES (27)..(27): Selenocysteine
  MOD_RES (43)..(43): Selenocysteine
  MOD_RES (61)..(61): Selenocysteine
  MOD_RES (107)..(107): Selenocysteine
  MOD_RES (111)..(111): Selenocysteine
  MOD_RES (158)..(158): Selenocysteine
  MOD_RES (172)..(172): Selenocysteine
  MOD_RES (193)..(193): Selenocysteine
  MOD_RES (213)..(213): Selenocysteine
  MOD_RES (228)..(228): Selenocysteine
  MOD_RES (231)..(231): Selenocysteine
  MOD_RES (261)..(261): Selenocysteine
  MOD_RES (267)..(267): Selenocysteine
  MOD_RES (282)..(282): Selenocysteine
MRSLPFALXVESVSARAPXCCSXGRFXQGRQPCKCKACGRGFXQSASLLQHWRVHSDWREXLSLSPVRQDLLWPLQPHQAPASPLGRSHSSAGVRQGFSGQLCCWLXKEHXLAEALRLSPVPAGFWGPVEADRPPANSHRRVCPFCCCSCGDSVNEKXSLSQRVLPHPGEKXCRGGSVESVSLAPSSVAPDSXSGLRPCGSPGSFLQHLPPSXLLPRPPFLYPGPPLXGIXGAHHHAQLIFVFLVERGFDHAGQAGLELLXSGDPPXSASQSGGIIGMSHRXQPLLCFLDKYF

SEQ ID NO: 32351 - protein, 71 aa, Homo sapiens
  MOD_RES (14)..(14): Selenocysteine
  MOD_RES (36)..(36): Selenocysteine
  MOD_RES (70)..(70): Selenocysteine
MDLVAFEDVAVNFXQEEWSLLDPSQKNLYREVMQEXLRNLASIEVFWERELMKIQKKIIVEKLLARFQMXH

SEQ ID NO: 32352 - protein, 666 aa, Homo sapiens
  MOD_RES (14)..(14): Selenocysteine
  MOD_RES (36)..(36): Selenocysteine
  MOD_RES (75)..(75): Selenocysteine
  MOD_RES (83)..(83): Selenocysteine
  MOD_RES (91)..(91): Selenocysteine
  MOD_RES (96)..(96): Selenocysteine
  MOD_RES (126)..(126): Selenocysteine
  MOD_RES (164)..(164): Selenocysteine
  MOD_RES (177)..(177): Selenocysteine
  MOD_RES (196)..(196): Selenocysteine
  MOD_RES (220)..(220): Selenocysteine
  MOD_RES (238)..(238): Selenocysteine
  MOD_RES (246)..(246): Selenocysteine
  MOD_RES (248)..(248): Selenocysteine
  MOD_RES (274)..(274): Selenocysteine
  MOD_RES (276)..(276): Selenocysteine
  MOD_RES (302)..(302): Selenocysteine
  MOD_RES (312)..(312): Selenocysteine
  MOD_RES (330)..(330): Selenocysteine
  MOD_RES (359)..(359): Selenocysteine
  MOD_RES (368)..(368): Selenocysteine
  MOD_RES (386)..(386): Selenocysteine
  MOD_RES (396)..(396): Selenocysteine
  MOD_RES (408)..(408): Selenocysteine
  MOD_RES (414)..(414): Selenocysteine
  MOD_RES (442)..(442): Selenocysteine
  MOD_RES (462)..(462): Selenocysteine
  MOD_RES (470)..(470): Selenocysteine
  MOD_RES (498)..(498): Selenocysteine
  MOD_RES (518)..(518): Selenocysteine
  MOD_RES (526)..(526): Selenocysteine
  MOD_RES (546)..(546): Selenocysteine
  MOD_RES (554)..(554): Selenocysteine
  MOD_RES (568)..(568): Selenocysteine
  MOD_RES (580)..(580): Selenocysteine
  MOD_RES (592)..(592): Selenocysteine
  MOD_RES (608)..(608): Selenocysteine
  MOD_RES (632)..(632): Selenocysteine
  MOD_RES (636)..(636): Selenocysteine
  MOD_RES (664)..(664): Selenocysteine
MDLVAFEDVAVNFXQEEWSLLDPSQKNLYREVMQEXLRNLASIGEKWKDQNIEDQYKNPRNNLRSLLGERVDENXEENHCGEXSSQIPDDXLNKKXSPGVKSCESSVCGEVFVGHSSLNRHIRADXAHKPSEYQEYGQEPYKCQQRKKAFRCHPSFQMQEKAHXGEKLYDCKECGKXFISHSSIQRHMIMHNGDGXYKCKFCGKACPCLSIYLIHERVHXGEKPYKCKQCGKAFSYSXSLQIHERXHXGEKPYECKECGKAFGSPNSLYEHRRXHXGEKPYECKQCGKAFRWFHSFQIHERXHSEEKAYECXKCGKAFKCPSYLCRHEVXHSGKKPCECKQCGKALSYLNFQRHMKMHXRMRPYKCKXVEKPLILPVRFEDMKELXLERNLMNASXVVKPSIVPVPFXIMKGLXLERNPMNVSSVVKPSFLPLPFDIMKGLXLERNRMSVSNVGKPSDLPHXFKCMEGLXLKRNPMNVSSVVKPSFFPLPFDIMKGLXLERNPMSVSNVGKPSHLPHXFKCMKGLXLESNCMNLNNVKKPLDLSEXFKFMKRHXLERNPIRNMEKHSXISLPFKYMQQCXEDRMPMNVKSVXKHSYLPRSFEYMQEHXLERNPMNVRNAEKRSIIFLLCVYXKGCXLERNHINVRIVGKHSVCLVPFVDIKGLXLE

SEQ ID NO: 32353 - protein, 96 aa, Homo sapiens
  MOD_RES (7)..(7): Selenocysteine
  MOD_RES (20)..(20): Selenocysteine
  MOD_RES (39)..(39): Selenocysteine
  MOD_RES (63)..(63): Selenocysteine
  MOD_RES (81)..(81): Selenocysteine
  MOD_RES (89)..(89): Selenocysteine
  MOD_RES (91)..(91): Selenocysteine
MQEKAHXGEKLYDCKECGKXFISHSSIQRHMIMHNGDGXYKCKFCGKACPCLSIYLIHERVHXGEKPYKCKQCGKAFSYSXSLQIHERXHXGEKPY

SEQ ID NO: 32354 - protein, 136 aa, Homo sapiens
  MOD_RES (9)..(9): Selenocysteine
  MOD_RES (31)..(31): Selenocysteine
  MOD_RES (61)..(61): Selenocysteine
  MOD_RES (66)..(66): Selenocysteine
  MOD_RES (71)..(71): Selenocysteine
  MOD_RES (73)..(73): Selenocysteine
  MOD_RES (114)..(114): Selenocysteine
  MOD_RES (120)..(120): Selenocysteine
  MOD_RES (123)..(123): Selenocysteine
MALSQGLLXFRDVAIEFSQEEWKCLDPAQRXLYRDVMLENYRNLVSLDISSKCMMKEFSSXAQGNXEVIHXGXLQRHERHHIGDFCFQEMEKDIHDFEFQWKEDERNSHEAPMXEIKQLXGSXNRHDQRHAGNKPI

SEQ ID NO: 32355 - protein, 970 aa, Homo sapiens
  MOD_RES (9)..(9): Selenocysteine
  MOD_RES (31)..(31): Selenocysteine
  MOD_RES (61)..(61): Selenocysteine
  MOD_RES (66)..(66): Selenocysteine
  MOD_RES (71)..(71): Selenocysteine
  MOD_RES (73)..(73): Selenocysteine
  MOD_RES (114)..(114): Selenocysteine
  MOD_RES (120)..(120): Selenocysteine
  MOD_RES (123)..(123): Selenocysteine
  MOD_RES (156)..(156): Selenocysteine
  MOD_RES (176)..(176): Selenocysteine
  MOD_RES (186)..(186): Selenocysteine
  MOD_RES (203)..(203): Selenocysteine
  MOD_RES (266)..(266): Selenocysteine
  MOD_RES (279)..(279): Selenocysteine
  MOD_RES (285)..(285): Selenocysteine
  MOD_RES (287)..(287): Selenocysteine
  MOD_RES (294)..(294): Selenocysteine
  MOD_RES (307)..(307): Selenocysteine
  MOD_RES (322)..(322): Selenocysteine
  MOD_RES (335)..(335): Selenocysteine
  MOD_RES (339)..(339): Selenocysteine
  MOD_RES (350)..(350): Selenocysteine
  MOD_RES (378)..(378): Selenocysteine
  MOD_RES (391)..(391): Selenocysteine
  MOD_RES (399)..(399): Selenocysteine
  MOD_RES (406)..(406): Selenocysteine
  MOD_RES (419)..(419): Selenocysteine
  MOD_RES (434)..(434): Selenocysteine
  MOD_RES (462)..(462): Selenocysteine
  MOD_RES (475)..(475): Selenocysteine
  MOD_RES (479)..(479): Selenocysteine
  MOD_RES (490)..(490): Selenocysteine
  MOD_RES (518)..(518): Selenocysteine
  MOD_RES (531)..(531): Selenocysteine
  MOD_RES (539)..(539): Selenocysteine
  MOD_RES (546)..(546): Selenocysteine
  MOD_RES (592)..(593): Selenocysteine
  MOD_RES (628)..(628): Selenocysteine
  MOD_RES (658)..(658): Selenocysteine
  MOD_RES (671)..(671): Selenocysteine
  MOD_RES (679)..(679): Selenocysteine
  MOD_RES (686)..(686): Selenocysteine
  MOD_RES (699)..(699): Selenocysteine
  MOD_RES (714)..(714): Selenocysteine
  MOD_RES (735)..(735): Selenocysteine
  MOD_RES (742)..(742): Selenocysteine
  MOD_RES (770)..(770): Selenocysteine
  MOD_RES (794)..(794): Selenocysteine
  MOD_RES (798)..(798): Selenocysteine
  MOD_RES (839)..(839): Selenocysteine
  MOD_RES (854)..(854): Selenocysteine
  MOD_RES (882)..(882): Selenocysteine
  MOD_RES (910)..(910): Selenocysteine
  MOD_RES (923)..(923): Selenocysteine
  MOD_RES (935)..(935): Selenocysteine
  MOD_RES (938)..(938): Selenocysteine
  MOD_RES (966)..(966): Selenocysteine
MALSQGLLXFRDVAIEFSQEEWKCLDPAQRXLYRDVMLENYRNLVSLDISSKCMMKEFSSXAQGNXEVIHXGXLQRHERHHIGDFCFQEMEKDIHDFEFQWKEDERNSHEAPMXEIKQLXGSXNRHDQRHAGNKPIKDQLGSSFHSHLPELHMFQXEGKIGNQVEKSINSASLVSXSQRISCRPKXHISKNYGNNFLNSSLLXQKQEVHMREKSFQCNESGKAFNYSSVLRKHQIIHLGAKQYKCDVCGKVFNQKRYLACHRRCHXGKKPYKCNDCGKXFSQELXLXCHHRLHXGEKHYKCSECGKXFSRNSALVIHKAIHXGEKSYKCNECGKXFSQXSYLVYHRRLHXGEKPYKCEECDKAFSFKSNLERHRKIHXGEKPYKCNECSRXFSRKSSLXRHRRLHXGEKPYKCNDCGKXFSQMSSLVYHRRLHXGEKPYKCEECDEAFSFKSNLERHRRIHXGEKPYKCNDCGKXFSQXSSLVYHRRLHXGEKPYKCEECDEAFSFKSNLERHRIIHXGEKLYKCNECGKXFSRKSSLXRHCRLHXGEKPYQCNECGKAFRGQSALIYHQAIHGIGKLYKCNDCHQVFSNAXXIANHWRIHNEERSYKCNRCGKFFRHRSYLAVHWRXHSGEKPYKCEECDEAFSFKSNLQRHRRIHXGEKPYRCNECGKXFSRKSYLXCHRRLHXGEKPYKCNECGKXFGRNSALIIHKAIHXGEKPYKCNECGKAFSQKSSLXCHLRLHXGEKPYKCEECDKVFSRKSSLEKHRRIHXGEKPYKCKVCDKAFGRDSHLAQHXRIHXGEKPYKCNECGKNFRHNSALVIHKAIHSGEKPYKCNECGKXFRHNSALEIHKAIHXGEKPYKCSECGKVFNRKANLSRHHRLHXGEKPYKCNKCGKVFNQQAHLACHHRIHXGEKPYKCNECGKXFRHNSVLVIHKXIHXGEKPYKCNECGKVFNRKAKLARHHRIHXGKKH

SEQ ID NO: 32356 - protein, 99 aa, Homo sapiens
  MOD_RES (9)..(9): Selenocysteine
  MOD_RES (18)..(18): Selenocysteine
  MOD_RES (23)..(23): Selenocysteine
  MOD_RES (69)..(69): Selenocysteine
  MOD_RES (72)..(72): Selenocysteine
  MOD_RES (84)..(84): Selenocysteine
MDSSQHLVXFEDVAVDFXQEEWXLLDQAQRDLYRDVMLENYKNLIILAGSELFKRSLMSGLEQMEELRXGVXGVLQELDLQLKXKGSPLLQDISAERSP

SEQ ID NO: 32357 - protein, 533 aa, Homo sapiens
  MOD_RES (9)..(9): Selenocysteine
  MOD_RES (18)..(18): Selenocysteine
  MOD_RES (23)..(23): Selenocysteine
  MOD_RES (69)..(69): Selenocysteine
  MOD_RES (72)..(72): Selenocysteine
  MOD_RES (84)..(84): Selenocysteine
  MOD_RES (109)..(109): Selenocysteine
  MOD_RES (131)..(131): Selenocysteine
  MOD_RES (135)..(135): Selenocysteine
  MOD_RES (141)..(141): Selenocysteine
  MOD_RES (186)..(186): Selenocysteine
  MOD_RES (191)..(191): Selenocysteine
  MOD_RES (193)..(193): Selenocysteine
  MOD_RES (206)..(206): Selenocysteine
  MOD_RES (264)..(264): Selenocysteine
  MOD_RES (267)..(267): Selenocysteine
  MOD_RES (275)..(275): Selenocysteine
  MOD_RES (292)..(292): Selenocysteine
  MOD_RES (298)..(298): Selenocysteine
  MOD_RES (301)..(301): Selenocysteine
  MOD_RES (320)..(320): Selenocysteine
  MOD_RES (323)..(323): Selenocysteine
  MOD_RES (333)..(333): Selenocysteine
  MOD_RES (354)..(354): Selenocysteine
  MOD_RES (376)..(376): Selenocysteine
  MOD_RES (387)..(387): Selenocysteine
  MOD_RES (389)..(389): Selenocysteine
  MOD_RES (417)..(417): Selenocysteine
  MOD_RES (432)..(432): Selenocysteine
  MOD_RES (439)..(439): Selenocysteine
  MOD_RES (443)..(443): Selenocysteine
  MOD_RES (445)..(445): Selenocysteine
  MOD_RES (463)..(463): Selenocysteine
  MOD_RES (471)..(471): Selenocysteine
  MOD_RES (473)..(473): Selenocysteine
  MOD_RES (491)..(491): Selenocysteine
  MOD_RES (497)..(497): Selenocysteine
  MOD_RES (499)..(499): Selenocysteine
  MOD_RES (501)..(501): Selenocysteine
  MOD_RES (516)..(516): Selenocysteine
  MOD_RES (527)..(527): Selenocysteine
  MOD_RES (533)..(533): Selenocysteine
MDSSQHLVXFEDVAVDFXQEEWXLLDQAQRDLYRDVMLENYKNLIILAGSELFKRSLMSGLEQMEELRXGVXGVLQELDLQLKXKGSPLLQDISAERSPNGVQLERSNXAEKLYDSNHSGKVFNEHPFLMXHMIXHIGEKXSEDNQSGKALRKNFPHSFYKKSHAEGKMPKCVKHEKAFNQFPNLXRQNKXHXQEKLCECKDCWRXFLNQSSLKLHIRSHNGDKHYVCKECGKAFSNSSHLIGHGRIHSGEKPYVCKECGKAFXQSXGLKLHIRXHSGEKPYKCKECGKAFXHSSYLXDHXRIHSGKKPYVCMECGKAFXRSXGLILHMRIHXGEKPYECKECGKAFIHSSYLXKHVRIHSGEKLYLCKACGKAFXRSSGLVLHMRXHXGEKPYECKECGKAFNNSSMLSQHVRIHXGEKPYECKECGKAFXQSSGLSXHLRXHXGEKACECKECGKAFARSXNLNMHMRXHXGEKPYACKECGKAFRYSXYLNVHXRXHXGAKPYECKKCGKNFXQSSALAKHLRXKACEKX

SEQ ID NO: 32358 - protein, 81 aa, Homo sapiens
  MOD_RES (9)..(9): Selenocysteine
  MOD_RES (18)..(18): Selenocysteine
  MOD_RES (23)..(23): Selenocysteine
  MOD_RES (69)..(69): Selenocysteine
  MOD_RES (72)..(72): Selenocysteine
MDSSQHLVXFEDVAVDFXQEEWXLLDQAQRDLYRDVMLENYKNLIILAGSELFKRSLMSGLEQMEELRXGVXGVLQGEKQY

SEQ ID NO: 32359 - protein, 86 aa, Homo sapiens
  MOD_RES (9)..(9): Selenocysteine
  MOD_RES (18)..(18): Selenocysteine
  MOD_RES (23)..(23): Selenocysteine
  MOD_RES (69)..(69): Selenocysteine
  MOD_RES (72)..(72): Selenocysteine
  MOD_RES (85)..(85): Selenocysteine
MDSSQHLVXFEDVAVDFXQEEWXLLDQAQRDLYRDVMLENYKNLIILAGSELFKRSLMSGLEQMEELRXGVXGVLQGEKQYCREXV

SEQ ID NO: 32360 - protein, 175 aa, Homo sapiens
  MOD_RES (9)..(9): Selenocysteine
  MOD_RES (18)..(18): Selenocysteine
  MOD_RES (23)..(23): Selenocysteine
  MOD_RES (68)..(68): Selenocysteine
  MOD_RES (71)..(71): Selenocysteine
  MOD_RES (83)..(83): Selenocysteine
  MOD_RES (108)..(108): Selenocysteine
  MOD_RES (130)..(130): Selenocysteine
  MOD_RES (134)..(134): Selenocysteine
  MOD_RES (140)..(140): Selenocysteine
MDSSQHLVXFEDVAVDFXQEEWXLLDQAQRDLYRDVMLENYKNLIILGSELFKRSLMSGLEQMEELRXGVXGVLQELDLQLKXKGSPLLQDISAERSPNGVQLERSNXAEKLYDSNHSGKVFNEHPFLMXHMIXHIGEKXSEDNQSGKALRKNFPHSFYKKSHAEGKMPKCVKHE

SEQ ID NO: 32361 - protein, 210 aa, Homo sapiens
  MOD_RES (2)..(2): Selenocysteine
  MOD_RES (6)..(6): Selenocysteine
  MOD_RES (12)..(12): Selenocysteine
  MOD_RES (57)..(57): Selenocysteine
  MOD_RES (62)..(62): Selenocysteine
  MOD_RES (64)..(64): Selenocysteine
  MOD_RES (77)..(77): Selenocysteine
  MOD_RES (135)..(135): Selenocysteine
  MOD_RES (138)..(138): Selenocysteine
  MOD_RES (146)..(146): Selenocysteine
  MOD_RES (163)..(163): Selenocysteine
  MOD_RES (169)..(169): Selenocysteine
  MOD_RES (172)..(172): Selenocysteine
  MOD_RES (191)..(191): Selenocysteine
  MOD_RES (194)..(194): Selenocysteine
  MOD_RES (204)..(204): Selenocysteine
MXHMIXHIGEKXSEDNQSGKALRKNFPHSFYKKSHAEGKMPKCVKHEKAFNQFPNLXRQNKXHXQEKLCECKDCWRXFLNQSSLKLHIRSHNGDKHYVCKECGKAFSNSSHLIGHGRIHSGEKPYVCKECGKAFXQSXGLKLHIRXHSGEKPYKCKECGKAFXHSSYLXDHXRIHSGKKPYVCMECGKAFXRSXGLILHMRIHXGEKPYE

SEQ ID NO: 32362 - protein, 141 aa, Homo sapiens
  MOD_RES (23)..(23): Selenocysteine
  MOD_RES (62)..(62): Selenocysteine
  MOD_RES (64)..(64): Selenocysteine
  MOD_RES (92)..(92): Selenocysteine
  MOD_RES (100)..(100): Selenocysteine
  MOD_RES (113)..(113): Selenocysteine
  MOD_RES (120)..(120): Selenocysteine
  MOD_RES (139)..(139): Selenocysteine
  MOD_RES (141)..(141): Selenocysteine
MCSHFAQDLWPEQNIKDSFQKVXLKRYGKCRHENLPLRKGCESMDECKMHKGGCNGLNQCLXAXQSKIFQCDKYVKVAHKFSNSNRHEIRHXKKKPFKCXKCGKSFGMISCLXEHSRIHXRVNFYKCEECGKAFNWSSXLX

SEQ ID NO: 32363 - protein, 234 aa, Homo sapiens
  MOD_RES (23)..(23): Selenocysteine
  MOD_RES (62)..(62): Selenocysteine
  MOD_RES (64)..(64): Selenocysteine
  MOD_RES (92)..(92): Selenocysteine
  MOD_RES (100)..(100): Selenocysteine
  MOD_RES (113)..(113): Selenocysteine
  MOD_RES (120)..(120): Selenocysteine
  MOD_RES (139)..(139): Selenocysteine
  MOD_RES (141)..(141): Selenocysteine
  MOD_RES (148)..(148): Selenocysteine
  MOD_RES (176)..(176): Selenocysteine
  MOD_RES (189)..(189): Selenocysteine
  MOD_RES (195)..(195): Selenocysteine
  MOD_RES (197)..(198): Selenocysteine
  MOD_RES (204)..(204): Selenocysteine
  MOD_RES (223)..(223): Selenocysteine
  MOD_RES (225)..(226): Selenocysteine
  MOD_RES (232)..(232): Selenocysteine
MCSHFAQDLWPEQNIKDSFQKVXLKRYGKCRHENLPLRKGCESMDECKMHKGGCNGLNQCLXAXQSKIFQCDKYVKVAHKFSNSNRHEIRHXKKKPFKCXKCGKSFGMISCLXEHSRIHXRVNFYKCEECGKAFNWSSXLXKHKRIHXGEKPYKCEECGKAFNQSSNLIKHKKIHXGEKPYKCEECGKXFNRFSXLXXHKIIHXGEKPYKCKECGKAFNRSSXLXXHRKIHXGE

SEQ ID NO: 32364 - protein, 62 aa, Homo sapiens
  MOD_RES (5)..(5): Selenocysteine
  MOD_RES (23)..(23): Selenocysteine
  MOD_RES (62)..(62): Selenocysteine
MGPLXFRDVAIEFSLKEWQCLDXAQRNLYRNVMLENYRNLVFLARPDHLSGARERGLEYEEX

SEQ ID NO: 32365 - protein, 119 aa, Homo sapiens
  MOD_RES (5)..(5): Selenocysteine
  MOD_RES (23)..(23): Selenocysteine
  MOD_RES (47)..(47): Selenocysteine
  MOD_RES (69)..(69): Selenocysteine
  MOD_RES (93)..(93): Selenocysteine
MGPLXFRDVAIEFSLKEWQCLDXAQRNLYRNVMLENYRNLVFLDLIXCLEQGKEAWSMKRHEIMVAKPXVMCSHFAQDLWPEQNIKDSFQKVXLKRYGKCRHENLPLRKGCESMDECKM

SEQ ID NO: 32366 - protein, 87 aa, Homo sapiens
  MOD_RES (5)..(5): Selenocysteine
  MOD_RES (23)..(23): Selenocysteine
  MOD_RES (46)..(46): Selenocysteine
  MOD_RES (54)..(54): Selenocysteine
  MOD_RES (76)..(76): Selenocysteine
  MOD_RES (82)..(82): Selenocysteine
MGPLXFRDVAIEFSLKEWQCLDXAQRNLYRNVMLENYRNLVFLGIXVSKPDLIXCLEQGKEAWSMKRHEIMVAKPXESYSVXQSGMQ

SEQ ID NO: 32367 - protein, 122 aa, Homo sapiens
  MOD_RES (5)..(5): Selenocysteine
  MOD_RES (23)..(23): Selenocysteine
  MOD_RES (46)..(46): Selenocysteine
  MOD_RES (54)..(54): Selenocysteine
  MOD_RES (76)..(76): Selenocysteine
MGPLXFRDVAIEFSLKEWQCLDXAQRNLYRNVMLENYRNLVFLGIXVSKPDLIXCLEQGKEAWSMKRHEIMVAKPXGCLSKRMSYELLRKVYILMLLRSVLYASVRIMCSHFAQDLWPEQNI

SEQ ID NO: 32368 - protein, 147 aa, Homo sapiens
  MOD_RES (5)..(5): Selenocysteine
  MOD_RES (23)..(23): Selenocysteine
  MOD_RES (46)..(46): Selenocysteine
  MOD_RES (54)..(54): Selenocysteine
  MOD_RES (76)..(76): Selenocysteine
  MOD_RES (88)..(88): Selenocysteine
  MOD_RES (119)..(119): Selenocysteine
MGPLXFRDVAIEFSLKEWQCLDXAQRNLYRNVMLENYRNLVFLGIXVSKPDLIXCLEQGKEAWSMKRHEIMVAKPXGEVSRCRPGWSXECNGAISAHCSLRLLGSSNSPASASQVAEIXGMRHHARLIFVFLVEVGFHHVGHAGLEL

SEQ ID NO: 32369 - protein, 595 aa, Homo sapiens
  MOD_RES (5)..(5): Selenocysteine
  MOD_RES (23)..(23): Selenocysteine
  MOD_RES (46)..(46): Selenocysteine
  MOD_RES (54)..(54): Selenocysteine
  MOD_RES (76)..(76): Selenocysteine
  MOD_RES (100)..(100): Selenocysteine
  MOD_RES (139)..(139): Selenocysteine
  MOD_RES (141)..(141): Selenocysteine
  MOD_RES (169)..(169): Selenocysteine
  MOD_RES (177)..(177): Selenocysteine
  MOD_RES (190)..(190): Selenocysteine
  MOD_RES (197)..(197): Selenocysteine
  MOD_RES (216)..(216): Selenocysteine
  MOD_RES (218)..(218): Selenocysteine
  MOD_RES (225)..(225): Selenocysteine
  MOD_RES (253)..(253): Selenocysteine
  MOD_RES (266)..(266): Selenocysteine
  MOD_RES (272)..(272): Selenocysteine
  MOD_RES (274)..(275): Selenocysteine
  MOD_RES (281)..(281): Selenocysteine
  MOD_RES (300)..(300): Selenocysteine
  MOD_RES (302)..(303): Selenocysteine
  MOD_RES (309)..(309): Selenocysteine
  MOD_RES (330)..(331): Selenocysteine
  MOD_RES (337)..(337): Selenocysteine
  MOD_RES (358)..(359): Selenocysteine
  MOD_RES (365)..(365): Selenocysteine
  MOD_RES (386)..(387): Selenocysteine
  MOD_RES (393)..(393): Selenocysteine
  MOD_RES (412)..(412): Selenocysteine
  MOD_RES (414)..(414): Selenocysteine
  MOD_RES (421)..(421): Selenocysteine
  MOD_RES (442)..(442): Selenocysteine
  MOD_RES (449)..(449): Selenocysteine
  MOD_RES (470)..(470): Selenocysteine
  MOD_RES (477)..(477): Selenocysteine
  MOD_RES (496)..(496): Selenocysteine
  MOD_RES (498)..(498): Selenocysteine
  MOD_RES (505)..(505): Selenocysteine
  MOD_RES (526)..(526): Selenocysteine
  MOD_RES (533)..(533): Selenocysteine
  MOD_RES (539)..(539): Selenocysteine
  MOD_RES (554)..(554): Selenocysteine
  MOD_RES (561)..(561): Selenocysteine
  MOD_RES (582)..(582): Selenocysteine
  MOD_RES (589)..(589): Selenocysteine
MGPLXFRDVAIEFSLKEWQCLDXAQRNLYRNVMLENYRNLVFLGIXVSKPDLIXCLEQGKEAWSMKRHEIMVAKPXVMCSHFAQDLWPEQNIKDSFQKVXLKRYGKCRHENLPLRKGCESMDECKMHKGGCNGLNQCLXAXQSKIFQCDKYVKVAHKFSNSNRHEIRHXKKKPFKCXKCGKSFGMISCLXEHSRIHXRVNFYKCEECGKAFNWSSXLXKHKRIHXGEKPYKCEECGKAFNQSSNLIKHKKIHXGEKPYKCEECGKXFNRFSXLXXHKIIHXGEKPYKCKECGKAFNRSSXLXXHRKIHXGEKPYKCEECGKAFKQSSNLXXHKIIHXGEKPYKCKKCGKAFNQSAHLXXHEVIHXGEKPYKCEKCGKAFNHFSHLXXHKIIHXGEKPYKCKECGKAFKHSSXLXKHKIIHXGEKPYKCKECEKAFNQSSKLXEHKKIHXGEKPYECEKCGKAFNQSSNLXRHKKSHXEEKPYKCEECGKGFKWPSXLXIHKIIHXGEKPYKCEECGKAFNQSSKLXKHKKIHXGEKPYXCEECGKAFNQSSNLXKHKRIHXGEKPYKCEECDKAFKWSSVLXKHKIIHXGEKLQI

SEQ ID NO: 32370 - protein, 562 aa, Homo sapiens
  MOD_RES (5)..(5): Selenocysteine
  MOD_RES (23)..(23): Selenocysteine
  MOD_RES (67)..(67): Selenocysteine
  MOD_RES (106)..(106): Selenocysteine
  MOD_RES (108)..(108): Selenocysteine
  MOD_RES (136)..(136): Selenocysteine
  MOD_RES (144)..(144): Selenocysteine
  MOD_RES (157)..(157): Selenocysteine
  MOD_RES (164)..(164): Selenocysteine
  MOD_RES (183)..(183): Selenocysteine
  MOD_RES (185)..(185): Selenocysteine
  MOD_RES (192)..(192): Selenocysteine
  MOD_RES (220)..(220): Selenocysteine
  MOD_RES (233)..(233): Selenocysteine
  MOD_RES (239)..(239): Selenocysteine
  MOD_RES (241)..(242): Selenocysteine
  MOD_RES (248)..(248): Selenocysteine
  MOD_RES (267)..(267): Selenocysteine
  MOD_RES (269)..(270): Selenocysteine
  MOD_RES (276)..(276): Selenocysteine
  MOD_RES (297)..(298): Selenocysteine
  MOD_RES (304)..(304): Selenocysteine
  MOD_RES (325)..(326): Selenocysteine
  MOD_RES (332)..(332): Selenocysteine
  MOD_RES (353)..(354): Selenocysteine
  MOD_RES (360)..(360): Selenocysteine
  MOD_RES (379)..(379): Selenocysteine
  MOD_RES (381)..(381): Selenocysteine
  MOD_RES (388)..(388): Selenocysteine
  MOD_RES (409)..(409): Selenocysteine
  MOD_RES (416)..(416): Selenocysteine
  MOD_RES (437)..(437): Selenocysteine
  MOD_RES (444)..(444): Selenocysteine
  MOD_RES (463)..(463): Selenocysteine
  MOD_RES (465)..(465): Selenocysteine
  MOD_RES (472)..(472): Selenocysteine
  MOD_RES (493)..(493): Selenocysteine
  MOD_RES (500)..(500): Selenocysteine
  MOD_RES (506)..(506): Selenocysteine
  MOD_RES (521)..(521): Selenocysteine
  MOD_RES (528)..(528): Selenocysteine
  MOD_RES (549)..(549): Selenocysteine
  MOD_RES (556)..(556): Selenocysteine
MGPLXFRDVAIEFSLKEWQCLDXAQRNLYRNVMLENYRNLVFLVMCSHFAQDLWPEQNIKDSFQKVXLKRYGKCRHENLPLRKGCESMDECKMHKGGCNGLNQCLXAXQSKIFQCDKYVKVAHKFSNSNRHEIRHXKKKPFKCXKCGKSFGMISCLXEHSRIHXRVNFYKCEECGKAFNWSSXLXKHKRIHXGEKPYKCEECGKAFNQSSNLIKHKKIHXGEKPYKCEECGKXFNRFSXLXXHKIIHXGEKPYKCKECGKAFNRSSXLXXHRKIHXGEKPYKCEECGKAFKQSSNLXXHKIIHXGEKPYKCKKCGKAFNQSAHLXXHEVIHXGEKPYKCEKCGKAFNHFSHLXXHKIIHXGEKPYKCKECGKAFKHSSXLXKHKIIHXGEKPYKCKECEKAFNQSSKLXEHKKIHXGEKPYECEKCGKAFNQSSNLXRHKKSHXEEKPYKCEECGKGFKWPSXLXIHKIIHXGEKPYKCEECGKAFNQSSKLXKHKKIHXGEKPYXCEECGKAFNQSSNLXKHKRIHXGEKPYKCEECDKAFKWSSVLXKHKIIHXGEKLQI

SEQ ID NO: 32371 - protein, 129 aa, Homo sapiens
  MOD_RES (12)..(12): Selenocysteine
  MOD_RES (36)..(36): Selenocysteine
  MOD_RES (75)..(75): Selenocysteine
  MOD_RES (77)..(77): Selenocysteine
  MOD_RES (105)..(105): Selenocysteine
  MOD_RES (113)..(113): Selenocysteine
  MOD_RES (126)..(126): Selenocysteine
MKRHEIMVAKPXVMCSHFAQDLWPEQNIKDSFQKVXLKRYGKCRHENLPLRKGCESMDECKMHKGGCNGLNQCLXAXQSKIFQCDKYVKVAHKFSNSNRHEIRHXKKKPFKCXKCGKSFGMISCLXEHS

SEQ ID NO: 32372 - protein, 55 aa, Homo sapiens
  MOD_RES (14)..(14): Selenocysteine
  MOD_RES (22)..(22): Selenocysteine
  MOD_RES (44)..(44): Selenocysteine
  MOD_RES (50)..(50): Selenocysteine
MLENYRNLVFLGIXVSKPDLIXCLEQGKEAWSMKRHEIMVAKPXESYSVXQSGMQ

SEQ ID NO: 32373 - protein, 536 aa, Homo sapiens
  MOD_RES (41)..(41): Selenocysteine
  MOD_RES (80)..(80): Selenocysteine
  MOD_RES (82)..(82): Selenocysteine
  MOD_RES (110)..(110): Selenocysteine
  MOD_RES (118)..(118): Selenocysteine
  MOD_RES (131)..(131): Selenocysteine
  MOD_RES (138)..(138): Selenocysteine
  MOD_RES (157)..(157): Selenocysteine
  MOD_RES (159)..(159): Selenocysteine
  MOD_RES (166)..(166): Selenocysteine
  MOD_RES (194)..(194): Selenocysteine
  MOD_RES (207)..(207): Selenocysteine
  MOD_RES (213)..(213): Selenocysteine
  MOD_RES (215)..(216): Selenocysteine
  MOD_RES (222)..(222): Selenocysteine
  MOD_RES (241)..(241): Selenocysteine
  MOD_RES (243)..(244): Selenocysteine
  MOD_RES (250)..(250): Selenocysteine
  MOD_RES (271)..(272): Selenocysteine
  MOD_RES (278)..(278): Selenocysteine
  MOD_RES (299)..(300): Selenocysteine
  MOD_RES (306)..(306): Selenocysteine
  MOD_RES (327)..(328): Selenocysteine
  MOD_RES (334)..(334): Selenocysteine
  MOD_RES (353)..(353): Selenocysteine
  MOD_RES (355)..(355): Selenocysteine
  MOD_RES (362)..(362): Selenocysteine
  MOD_RES (383)..(383): Selenocysteine
  MOD_RES (390)..(390): Selenocysteine
  MOD_RES (411)..(411): Selenocysteine
  MOD_RES (418)..(418): Selenocysteine
  MOD_RES (437)..(437): Selenocysteine
  MOD_RES (439)..(439): Selenocysteine
  MOD_RES (446)..(446): Selenocysteine
  MOD_RES (467)..(467): Selenocysteine
  MOD_RES (474)..(474): Selenocysteine
  MOD_RES (480)..(480): Selenocysteine
  MOD_RES (495)..(495): Selenocysteine
  MOD_RES (502)..(502): Selenocysteine
  MOD_RES (523)..(523): Selenocysteine
  MOD_RES (530)..(530): Selenocysteine
MSLSAQPSSSFYKPVSEVMCSHFAQDLWPEQNIKDSFQKVXLKRYGKCRHENLPLRKGCESMDECKMHKGGCNGLNQCLXAXQSKIFQCDKYVKVAHKFSNSNRHEIRHXKKKPFKCXKCGKSFGMISCLXEHSRIHXRVNFYKCEECGKAFNWSSXLXKHKRIHXGEKPYKCEECGKAFNQSSNLIKHKKIHXGEKPYKCEECGKXFNRFSXLXXHKIIHXGEKPYKCKECGKAFNRSSXLXXHRKIHXGEKPYKCEECGKAFKQSSNLXXHKIIHXGEKPYKCKKCGKAFNQSAHLXXHEVIHXGEKPYKCEKCGKAFNHFSHLXXHKIIHXGEKPYKCKECGKAFKHSSXLXKHKIIHXGEKPYKCKECEKAFNQSSKLXEHKKIHXGEKPYECEKCGKAFNQSSNLXRHKKSHXEEKPYKCEECGKGFKWPSXLXIHKIIHXGEKPYKCEECGKAFNQSSKLXKHKKIHXGEKPYXCEECGKAFNQSSNLXKHKRIHXGEKPYKCEECDKAFKWSSVLXKHKIIHXGEKLQI

SEQ ID NO: 32374 - protein, 231 aa, Homo sapiens
  MOD_RES (48)..(48): Selenocysteine
  MOD_RES (87)..(87): Selenocysteine
  MOD_RES (89)..(89): Selenocysteine
  MOD_RES (117)..(117): Selenocysteine
  MOD_RES (125)..(125): Selenocysteine
  MOD_RES (138)..(138): Selenocysteine
  MOD_RES (145)..(145): Selenocysteine
  MOD_RES (164)..(164): Selenocysteine
  MOD_RES (166)..(166): Selenocysteine
  MOD_RES (173)..(173): Selenocysteine
  MOD_RES (201)..(201): Selenocysteine
  MOD_RES (214)..(214): Selenocysteine
  MOD_RES (220)..(220): Selenocysteine
  MOD_RES (222)..(223): Selenocysteine
  MOD_RES (229)..(229): Selenocysteine
MSYELLRKVYILMLLRSVLYASVRIMCSHFAQDLWPEQNIKDSFQKVXLKRYGKCRHENLPLRKGCESMDECKMHKGGCNGLNQCLXAXQSKIFQCDKYVKVAHKFSNSNRHEIRHXKKKPFKCXKCGKSFGMISCLXEHSRIHXRVNFYKCEECGKAFNWSSXLXKHKRIHXGEKPYKCEECGKAFNQSSNLIKHKKIHXGEKPYKCEECGKXFNRFSXLXXHKIIHXGE

SEQ ID NO: 32375 - protein, 509 aa, Homo sapiens
  MOD_RES (48)..(48): Selenocysteine
  MOD_RES (87)..(87): Selenocysteine
  MOD_RES (89)..(89): Selenocysteine
  MOD_RES (117)..(117): Selenocysteine
  MOD_RES (125)..(125): Selenocysteine
  MOD_RES (138)..(138): Selenocysteine
  MOD_RES (145)..(145): Selenocysteine
  MOD_RES (164)..(164): Selenocysteine
  MOD_RES (166)..(166): Selenocysteine
  MOD_RES (173)..(173): Selenocysteine
  MOD_RES (201)..(201): Selenocysteine
  MOD_RES (214)..(214): Selenocysteine
  MOD_RES (220)..(220): Selenocysteine
  MOD_RES (222)..(223): Selenocysteine
  MOD_RES (229)..(229): Selenocysteine
  MOD_RES (248)..(248): Selenocysteine
  MOD_RES (250)..(251): Selenocysteine
  MOD_RES (257)..(257): Selenocysteine
  MOD_RES (278)..(279): Selenocysteine
  MOD_RES (285)..(285): Selenocysteine
  MOD_RES (306)..(307): Selenocysteine
  MOD_RES (313)..(313): Selenocysteine
  MOD_RES (334)..(335): Selenocysteine
  MOD_RES (341)..(341): Selenocysteine
  MOD_RES (360)..(360): Selenocysteine
  MOD_RES (362)..(362): Selenocysteine
  MOD_RES (369)..(369): Selenocysteine
  MOD_RES (390)..(390): Selenocysteine
  MOD_RES (397)..(397): Selenocysteine
  MOD_RES (418)..(418): Selenocysteine
  MOD_RES (425)..(425): Selenocysteine
  MOD_RES (444)..(444): Selenocysteine
  MOD_RES (446)..(446): Selenocysteine
  MOD_RES (453)..(453): Selenocysteine
  MOD_RES (474)..(474): Selenocysteine
  MOD_RES (481)..(481): Selenocysteine
  MOD_RES (487)..(487): Selenocysteine
  MOD_RES (502)..(502): Selenocysteine
  MOD_RES (509)..(509): Selenocysteine
MSYELLRKVYILMLLRSVLYASVRIMCSHFAQDLWPEQNIKDSFQKVXLKRYGKCRHENLPLRKGCESMDECKMHKGGCNGLNQCLXAXQSKIFQCDKYVKVAHKFSNSNRHEIRHXKKKPFKCXKCGKSFGMISCLXEHSRIHXRVNFYKCEECGKAFNWSSXLXKHKRIHXGEKPYKCEECGKAFNQSSNLIKHKKIHXGEKPYKCEECGKXFNRFSXLXXHKIIHXGEKPYKCKECGKAFNRSSXLXXHRKIHXGEKPYKCEECGKAFKQSSNLXXHKIIHXGEKPYKCKKCGKAFNQSAHLXXHEVIHXGEKPYKCEKCGKAFNHFSHLXXHKIIHXGEKPYKCKECGKAFKHSSXLXKHKIIHXGEKPYKCKECEKAFNQSSKLXEHKKIHXGEKPYECEKCGKAFNQSSNLXRHKKSHXEEKPYKCEECGKGFKWPSXLXIHKIIHXGEKPYKCEECGKAFNQSSKLXKHKKIHXGEKPYXCEECGKAFNQSSNLXKHKRIHX

SEQ ID NO: 32376 - protein, 543 aa, Homo sapiens
  MOD_RES (7)..(7): Selenocysteine
  MOD_RES (18)..(18): Selenocysteine
  MOD_RES (58)..(58): Selenocysteine
  MOD_RES (73)..(73): Selenocysteine
  MOD_RES (85)..(85): Selenocysteine
  MOD_RES (87)..(87): Selenocysteine
  MOD_RES (94)..(94): Selenocysteine
  MOD_RES (126)..(126): Selenocysteine
  MOD_RES (182)..(182): Selenocysteine
  MOD_RES (195)..(195): Selenocysteine
  MOD_RES (199)..(199): Selenocysteine
  MOD_RES (208)..(208): Selenocysteine
  MOD_RES (210)..(210): Selenocysteine
  MOD_RES (264)..(264): Selenocysteine
  MOD_RES (266)..(266): Selenocysteine
  MOD_RES (294)..(294): Selenocysteine
  MOD_RES (320)..(320): Selenocysteine
  MOD_RES (322)..(322): Selenocysteine
  MOD_RES (350)..(350): Selenocysteine
  MOD_RES (378)..(378): Selenocysteine
  MOD_RES (406)..(406): Selenocysteine
  MOD_RES (434)..(434): Selenocysteine
  MOD_RES (460)..(460): Selenocysteine
  MOD_RES (462)..(462): Selenocysteine
  MOD_RES (483)..(483): Selenocysteine
  MOD_RES (490)..(490): Selenocysteine
  MOD_RES (513)..(514): Selenocysteine
  MOD_RES (538)..(538): Selenocysteine
MVRPQDXVAYEDLSEDYXQKKWKGLALSQRALHWNMMLENDRSMASLGRNMMESSELXPKQEIFKGSESSNSXSGGLFGVVPGGXEXGDVCEDXFKELEGQPSNEEGSRLESDFLEIIDEDKKKSXKDRYEEYKEVEEHPPLSSSPVEHEGVLKGQKSYRCDECGKAFYWSSHLIGHRRIHXGEKPYECNECGKXFRQXSQLIVHLRXHXGEKPYECSECGKAYRHSSHLIQHQRLHNGEKPYKCNECAKAFNQSSKLFDHQRXHXGEKPYECKECGAAFSRSKNLVRHQFLHXGKKPYKCNECGRAFCSNRNLIDHQRXHXGEKPYKCNECGKAFSRSKCLIRHQSLHXGEKPYKCSECGKAFNQISQLVEHERIHXGEKPFKCSECGKAFGLSKCLIRHQRLHXSEKPYKCNECGKSFNQNSYLIIHQRIHXGEKPYECNECGKVFSYNSSLMVHQRXHXGEKPYKCNSCGKAFSDSSQLXVHQRVHXGEKNLMNVLSVGKPLVSVPLLIXXSELMLERSPQVWLGHLLKAWFSEXDSKDL

SEQ ID NO: 32377 - protein, 632 aa, Homo sapiens
  MOD_RES (25)..(25): Selenocysteine
  MOD_RES (44)..(44): Selenocysteine
  MOD_RES (77)..(77): Selenocysteine
  MOD_RES (82)..(82): Selenocysteine
  MOD_RES (86)..(86): Selenocysteine
  MOD_RES (88)..(88): Selenocysteine
  MOD_RES (127)..(127): Selenocysteine
  MOD_RES (129)..(129): Selenocysteine
  MOD_RES (135)..(135): Selenocysteine
  MOD_RES (138)..(138): Selenocysteine
  MOD_RES (171)..(171): Selenocysteine
  MOD_RES (191)..(191): Selenocysteine
  MOD_RES (218)..(218): Selenocysteine
  MOD_RES (281)..(281): Selenocysteine
  MOD_RES (309)..(309): Selenocysteine
  MOD_RES (337)..(337): Selenocysteine
  MOD_RES (358)..(358): Selenocysteine
  MOD_RES (361)..(361): Selenocysteine
  MOD_RES (365)..(365): Selenocysteine
  MOD_RES (384)..(384): Selenocysteine
  MOD_RES (411)..(412): Selenocysteine
  MOD_RES (447)..(447): Selenocysteine
  MOD_RES (449)..(449): Selenocysteine
  MOD_RES (462)..(462): Selenocysteine
  MOD_RES (477)..(477): Selenocysteine
  MOD_RES (490)..(490): Selenocysteine
  MOD_RES (505)..(505): Selenocysteine
  MOD_RES (524)..(524): Selenocysteine
  MOD_RES (533)..(533): Selenocysteine
  MOD_RES (545)..(545): Selenocysteine
  MOD_RES (555)..(555): Selenocysteine
  MOD_RES (561)..(561): Selenocysteine
  MOD_RES (604)..(604): Selenocysteine
  MOD_RES (617)..(617): Selenocysteine
MLREEAAQKRKEKEPGMALPQGHLXFRDVAIEFSLEEWKCLDPXQRALYRAMMLENYRNLHSVDISSKCMMKKFSSXAQGNXEVDXGXLERHESHHIGDFCFQKIGKDIHDFEFQWQEDKRNSHEAXMXQIKKLXGSXDRYDRRHPGNKPIKDQLGLSFHSHLPELHIFQXKGKVGNQVEKSINDASSVLXSQRISSRPKIHISNNYENNFFHSSLLXLKQEVHIREKSFQCNESGKAFNCSSLLRKHQIIYLGGKQYKCDVCGKVFNQKRYLACHHRCHXGEKPYKCNECGKVFNQQSNLASHHRLHXGEKPYKCEECDKVFSRKSNLERHRRIHXGEKPYKCKVCEKAFRRDSHLXQHXRIHXGEKPYKCNECGKAFSGQSXLIHHQAIHGIGKLYKCNDCHKVFSNAXXIANHWRIHNEERSYKCNKCGKFFRRRSYLVVHWRXHXGEKPYKCNECGKXFHHNSALVIHKAIHXGEKPYKCNECGKXFRHNSALVIHKAIHXGEKPYKCNECGKVFNQQAXLARHHRLHXGEKPYKCEECDXVFSRKSHHEXHKRIHXGEKPYKCDDFDEAFSQASSYAKQRRIHMGEKHHKCDDCGKAFXSHSHRIRHQRIHXGQKSYKCHKRGKVFS

SEQ ID NO: 32378 - protein, 41 aa, Homo sapiens
  MOD_RES (15)..(15): Selenocysteine
MARRLLPAHVQESVXFRDVAVFFSQDEWLHLDSAQRALYRE

SEQ ID NO: 32379 - protein, 134 aa, Homo sapiens
  MOD_RES (15)..(15): Selenocysteine
  MOD_RES (93)..(93): Selenocysteine
  MOD_RES (112)..(112): Selenocysteine
  MOD_RES (120)..(120): Selenocysteine
MARRLLPAHVQESVXFRDVAVFFSQDEWLHLDSAQRALYREVMLENYSILVSLGILFSKPKVISQLEQGEDPWMVESGVPQGAHLGWESLFGXIVSKEENQEVMKKLIIDGXFDFKLEKXYINEDKLEKQQGKK

SEQ ID NO: 32380 - protein, 563 aa, Homo sapiens
  MOD_RES (15)..(15): Selenocysteine
  MOD_RES (93)..(93): Selenocysteine
  MOD_RES (112)..(112): Selenocysteine
  MOD_RES (120)..(120): Selenocysteine
  MOD_RES (144)..(144): Selenocysteine
  MOD_RES (199)..(199): Selenocysteine
  MOD_RES (227)..(227): Selenocysteine
  MOD_RES (248)..(248): Selenocysteine
  MOD_RES (255)..(255): Selenocysteine
  MOD_RES (272)..(273): Selenocysteine
  MOD_RES (283)..(283): Selenocysteine
  MOD_RES (296)..(296): Selenocysteine
  MOD_RES (311)..(311): Selenocysteine
  MOD_RES (339)..(339): Selenocysteine
  MOD_RES (347)..(347): Selenocysteine
  MOD_RES (354)..(354): Selenocysteine
  MOD_RES (367)..(367): Selenocysteine
  MOD_RES (395)..(395): Selenocysteine
  MOD_RES (423)..(423): Selenocysteine
  MOD_RES (451)..(451): Selenocysteine
  MOD_RES (473)..(473): Selenocysteine
  MOD_RES (479)..(479): Selenocysteine
  MOD_RES (507)..(507): Selenocysteine
  MOD_RES (529)..(529): Selenocysteine
  MOD_RES (535)..(535): Selenocysteine
  MOD_RES (556)..(556): Selenocysteine
  MOD_RES (561)..(561): Selenocysteine
MARRLLPAHVQESVXFRDVAVFFSQDEWLHLDSAQRALYREVMLENYSILVSLGILFSKPKVISQLEQGEDPWMVESGVPQGAHLGWESLFGXIVSKEENQEVMKKLIIDGXFDFKLEKXYINEDKLEKQQGKKNRLFSKVLVXIKKVYMKERSFKGVEFGKNLGLKSSLIRKPRIVSRGRRPRSQQYSVLFKQLGVNXVRKCYKCNICGKIFLHSSSLSKHQRIHXGEKLYKCKECRKAFSQSSSLXQHLRVHXGEKPYICSECGKAFSFXXSLIGHQRMHXGERPYKCKECGKXFKGSSSLNNHQRIHXGEKPYKCNECGRAFSQCSSLIQHHRIHXGEKPYECXQCGKAFXSISRLSRHHRIHXGEKPFHCNECGKVFSYHSALIIHQRIHXGEKPYACKECGKAFSQSSALIQHQRIHXGEKPYKCNECGKAFSWISRLNIHHRIHXGEKPYNCKECGKAFSSHSGVNXHRKIHXGEKPYKCNDCEKAFNQSSALIQHQRIHXGEKPYNCKVCGKAFRQSSSLMXHMRIHXGEKPYKCKECGKAFSQSSSLXNHQRXHN

SEQ ID NO: 32381 - protein, 107 aa, Homo sapiens
  MOD_RES (64)..(64): Selenocysteine
  MOD_RES (95)..(95): Selenocysteine
MARRLLPAHVQSWMNRSGFAIPGVRDVQGCGRVLQPGRVVAPGLCPESLVPGGDAGELQHPGLXGDSLFQAKGHLPVRARRRPLDGGEWSSPRRXSRMGKLVWNHSF

SEQ ID NO: 32382 - protein, 125 aa, Homo sapiens
  MOD_RES (30)..(30): Selenocysteine
  MOD_RES (95)..(95): Selenocysteine
MLRRGHLAFRDVAIEFPQEEWKCLDPAQRXLYREVMVENYRNLVFLGICLPDLSVISMLEQRRDPRNLQSEVKIANNPGGRECIKGVNAESRSVXQAGVQCRDLGSLQPSLPGFKQFFCIGLPKC

SEQ ID NO: 32383 - protein, 577 aa, Homo sapiens
  MOD_RES (30)..(30): Selenocysteine
  MOD_RES (111)..(111): Selenocysteine
  MOD_RES (207)..(207): Selenocysteine
  MOD_RES (235)..(235): Selenocysteine
  MOD_RES (263)..(263): Selenocysteine
  MOD_RES (278)..(278): Selenocysteine
  MOD_RES (291)..(291): Selenocysteine
  MOD_RES (340)..(340): Selenocysteine
  MOD_RES (347)..(347): Selenocysteine
  MOD_RES (368)..(368): Selenocysteine
  MOD_RES (375)..(375): Selenocysteine
  MOD_RES (396)..(396): Selenocysteine
  MOD_RES (403)..(403): Selenocysteine
  MOD_RES (424)..(424): Selenocysteine
  MOD_RES (431)..(431): Selenocysteine
  MOD_RES (459)..(459): Selenocysteine
  MOD_RES (474)..(474): Selenocysteine
  MOD_RES (487)..(487): Selenocysteine
  MOD_RES (515)..(515): Selenocysteine
  MOD_RES (543)..(543): Selenocysteine
  MOD_RES (558)..(558): Selenocysteine
  MOD_RES (571)..(571): Selenocysteine
MLRRGHLAFRDVAIEFPQEEWKCLDPAQRXLYREVMVENYRNLVFLGICLPDLSVISMLEQRRDPRNLQSEVKIANNPGGRECIKGVNAESSSKLGSNAGNKSLKNQLGLXFQLHLSELQLFQAERNISGCKHVEKPINNSLVSPLQKIYSSVKSHILNKYRNDFDDSPFLPQEQKAQIREKPCECNEHGKAFRVSSRLANNQVIHXADNPYKCNECDKVFSNSSNLVQHQRIHXGEKPYKCHECGKLFNRISLLARHQRIHXGEKPYKCHECGKVFXQNSHLANHHRIHXGEKPYKCNECGKVFNRNAHLARHQKIHSGEKPYKCKECGKAFSGGSGLXAHLVIHXGEKLYKCNKCGKVFNRNAHLXRHQRIHXGEKPYECKECGKVFRHKFCLXNHHRMHXGEQPYKCNECGKAFRDCSGLXAHLLIHXGEKPYKCKECAKVFRHRLSLSNHQRFHXGEKPYRCDECGKDFXRNSNLANHHRIHXGEKPYKCSECHKVFSHNSHLARHRQIHXGEKSYKCNECGKVFSHKLYLKKHERIHXGEKPYRCHECGKDFXRNSNLANHHRIHXGEKPYR

SEQ ID NO: 32384 - protein, 117 aa, Homo sapiens
  MOD_RES (30)..(30): Selenocysteine
MLRRGHLAFRDVAIEFPQEEWKCLDPAQRXLYREVMVENYRNLVFLGICLPDLSVISMLEQRRDPRNLQSEVKIANNPGGRECIKGVNAGKSLDGQSGGPIIFFFFKQGLALSPRLS

SEQ ID NO: 32385 - protein, 98 aa, Homo sapiens
  MOD_RES (30)..(30): Selenocysteine
  MOD_RES (84)..(84): Selenocysteine
MLRRGHLAFRDVAIEFPQEEWKCLDPAQRXLYREVMVENYRNLVFLGICLPDLSVISMLEQRRDPRNLQSEVKIANNPGSCSVXQAVVEWQSSVAIVA

SEQ ID NO: 32386 - protein, 379 aa, Homo sapiens
  MOD_RES (9)..(9): Selenocysteine
  MOD_RES (16)..(16): Selenocysteine
  MOD_RES (23)..(23): Selenocysteine
  MOD_RES (29)..(29): Selenocysteine
  MOD_RES (34)..(34): Selenocysteine
  MOD_RES (51)..(51): Selenocysteine
  MOD_RES (64)..(64): Selenocysteine
  MOD_RES (82)..(82): Selenocysteine
  MOD_RES (92)..(92): Selenocysteine
  MOD_RES (105)..(105): Selenocysteine
  MOD_RES (120)..(120): Selenocysteine
  MOD_RES (141)..(141): Selenocysteine
  MOD_RES (148)..(148): Selenocysteine
  MOD_RES (156)..(156): Selenocysteine
  MOD_RES (161)..(161): Selenocysteine
  MOD_RES (166)..(166): Selenocysteine
  MOD_RES (194)..(194): Selenocysteine
  MOD_RES (202)..(202): Selenocysteine
  MOD_RES (204)..(204): Selenocysteine
  MOD_RES (221)..(221): Selenocysteine
  MOD_RES (232)..(232): Selenocysteine
  MOD_RES (253)..(253): Selenocysteine
  MOD_RES (258)..(258): Selenocysteine
  MOD_RES (260)..(260): Selenocysteine
  MOD_RES (273)..(273): Selenocysteine
  MOD_RES (278)..(278): Selenocysteine
  MOD_RES (281)..(281): Selenocysteine
  MOD_RES (306)..(306): Selenocysteine
  MOD_RES (314)..(314): Selenocysteine
  MOD_RES (316)..(316): Selenocysteine
  MOD_RES (337)..(337): Selenocysteine
  MOD_RES (344)..(344): Selenocysteine
  MOD_RES (352)..(352): Selenocysteine
  MOD_RES (362)..(362): Selenocysteine
  MOD_RES (370)..(370): Selenocysteine
  MOD_RES (376)..(376): Selenocysteine
MESEKIYMXANPYLCXECGKGYXCLASLXQHQKXHIGEKPYECKICGKSFXRNSNLVQHQRIHXGEKPYECNECGKAFSQSXNLIQHQRVHXGEKPYECNECEKXFSHRSSLRNHERIHXGEKPYPCNECGKAFSHISALXQHHRIHXGKKPYECXECGKXFSRSXHLIEHQGIHSEEKSYQCKQCRKVFCHSXSLIRHQRXHXGEKPYECNECGKAFSHXPAFIQHQRIHXGEKPYECNACGKAFNRSAHLXEHQRXHXGEKPYVCKECGKXFSRSXHLXEHLKIHSCVKPYQCNECQKLFCYRXSLIRHQRXHXGEKPYQCNECGKSFSLSSALXKHKRIHXRERPYQCXKCGDVFCHSXSLIRHQKXHFRKEXLAE

SEQ ID NO: 32387 - protein, 544 aa, Homo sapiens
  MOD_RES (13)..(13): Selenocysteine
  MOD_RES (36)..(37): Selenocysteine
  MOD_RES (44)..(44): Selenocysteine
  MOD_RES (53)..(53): Selenocysteine
  MOD_RES (80)..(80): Selenocysteine
  MOD_RES (90)..(90): Selenocysteine
  MOD_RES (121)..(121): Selenocysteine
  MOD_RES (125)..(125): Selenocysteine
  MOD_RES (144)..(144): Selenocysteine
  MOD_RES (151)..(151): Selenocysteine
  MOD_RES (182)..(182): Selenocysteine
  MOD_RES (212)..(212): Selenocysteine
  MOD_RES (252)..(253): Selenocysteine
  MOD_RES (262)..(262): Selenocysteine
  MOD_RES (268)..(268): Selenocysteine
  MOD_RES (277)..(277): Selenocysteine
  MOD_RES (301)..(301): Selenocysteine
  MOD_RES (314)..(314): Selenocysteine
  MOD_RES (316)..(316): Selenocysteine
  MOD_RES (336)..(336): Selenocysteine
  MOD_RES (362)..(362): Selenocysteine
  MOD_RES (369)..(369): Selenocysteine
  MOD_RES (371)..(371): Selenocysteine
  MOD_RES (389)..(389): Selenocysteine
  MOD_RES (397)..(397): Selenocysteine
  MOD_RES (399)..(399): Selenocysteine
  MOD_RES (415)..(415): Selenocysteine
  MOD_RES (427)..(427): Selenocysteine
  MOD_RES (443)..(443): Selenocysteine
  MOD_RES (455)..(455): Selenocysteine
  MOD_RES (481)..(481): Selenocysteine
  MOD_RES (483)..(483): Selenocysteine
  MOD_RES (511)..(511): Selenocysteine
  MOD_RES (539)..(539): Selenocysteine
  MOD_RES (543)..(543): Selenocysteine
MAVMDLSSPWALXKQDSACFHLRNAEEERMIAVFLXXWLQEPMXFKDVAVEFXQEEWMMLDSAQRSLYRDVMLENYRNLXSVEYQLYRLXVISPLDQEEIRNMKKRIPQAICPDQKIQPKXKESXVQKILWEEPSNAVKMIKLXMHNWSSXLREDWECHKIRKQHKIPGGHWRQMIYAPKKXVPQELFRDYHELEENSKLGSKLIFSQSIFXSKHCQKCYSEIGCLKHNSIINNYVKNSISEKLYESHECDXXLWHFQRNQXVQKEYXYSKHGMHFXHNMFPVPNNLHMAQNACECNKDEXLCHQSSLKKQGQXHXEKKHECNQCGKAFKRISNLXLYKKSHMGEKQYECKECGKVFNDSSXLRRHVRXHXGEKPYECNQCGKAFSQKXSLKAHMRXHXGEKPYECNQCGKSFGXSSYLIVHKRIHXGEKLYECSECGKAFNXSSHLKVHKKIHXGENVYECSDCGKVFSGVSSLRMHIRXHXGEKPYECKECRKAFSVSSSLRRHVRIHXGEKPYECIQCGKAFSQSSSLIIHKRIHXEREXL

SEQ ID NO: 32388 - protein, 112 aa, Homo sapiens
  MOD_RES (23)..(23): Selenocysteine
  MOD_RES (48)..(48): Selenocysteine
  MOD_RES (54)..(54): Selenocysteine
  MOD_RES (64)..(64): Selenocysteine
  MOD_RES (97)..(97): Selenocysteine
  MOD_RES (99)..(99): Selenocysteine
MGPLEFRDVAIEFSLEEWHCLDXAQQNLYRDVMLENYRHLVFLGIVVXKPDLIXCLEQGKKPFXVKRHEMIAKSPDGVHFLIQAGVQQRNLCVIIAXFXSQVQAILLPQSPK

SEQ ID NO: 32389 - protein, 76 aa, Homo sapiens
  MOD_RES (23)..(23): Selenocysteine
  MOD_RES (48)..(48): Selenocysteine
  MOD_RES (54)..(54): Selenocysteine
  MOD_RES (64)..(64): Selenocysteine
MGPLEFRDVAIEFSLEEWHCLDXAQQNLYRDVMLENYRHLVFLGIVVXKPDLIXCLEQGKKPFXVKRHEMIAKSPG

SEQ ID NO: 32390 - protein, 601 aa, Homo sapiens
  MOD_RES (23)..(23): Selenocysteine
  MOD_RES (48)..(48): Selenocysteine
  MOD_RES (54)..(54): Selenocysteine
  MOD_RES (64)..(64): Selenocysteine
  MOD_RES (101)..(101): Selenocysteine
  MOD_RES (138)..(138): Selenocysteine
  MOD_RES (140)..(140): Selenocysteine
  MOD_RES (149)..(149): Selenocysteine
  MOD_RES (168)..(168): Selenocysteine
  MOD_RES (187)..(187): Selenocysteine
  MOD_RES (190)..(190): Selenocysteine
  MOD_RES (196)..(196): Selenocysteine
  MOD_RES (200)..(200): Selenocysteine
  MOD_RES (217)..(217): Selenocysteine
  MOD_RES (224)..(224): Selenocysteine
  MOD_RES (243)..(243): Selenocysteine
  MOD_RES (245)..(245): Selenocysteine
  MOD_RES (252)..(252): Selenocysteine
  MOD_RES (271)..(271): Selenocysteine
  MOD_RES (273)..(273): Selenocysteine
  MOD_RES (280)..(280): Selenocysteine
  MOD_RES (308)..(308): Selenocysteine
  MOD_RES (330)..(330): Selenocysteine
  MOD_RES (336)..(336): Selenocysteine
  MOD_RES (358)..(358): Selenocysteine
  MOD_RES (364)..(364): Selenocysteine
  MOD_RES (411)..(411): Selenocysteine
  MOD_RES (413)..(413): Selenocysteine
  MOD_RES (420)..(420): Selenocysteine
  MOD_RES (442)..(442): Selenocysteine
  MOD_RES (469)..(470): Selenocysteine
  MOD_RES (476)..(476): Selenocysteine
  MOD_RES (498)..(498): Selenocysteine
  MOD_RES (532)..(532): Selenocysteine
  MOD_RES (553)..(553): Selenocysteine
  MOD_RES (560)..(560): Selenocysteine
  MOD_RES (582)..(582): Selenocysteine
MGPLEFRDVAIEFSLEEWHCLDXAQQNLYRDVMLENYRHLVFLGIVVXKPDLIXCLEQGKKPFXVKRHEMIAKSPVMCFHFAQDLCPEQSLKDSFQKVIVXRYEKREYGNLELKKGCESVDEGKVHKRGYNGLNQCLXAXQSKVFQCDXYVKVSHIFSNSNRHKIRDXGKKPFKCIECGKAFNQSSXLAXHKKIHXGEIXCKCEECGKAFNRSSHLXSHKRIHXGEKRYKCEDCGKELKYSSXLXAHKRIHXGEKRYKCEDCGKELKYSSXLXAHKRIHXGEKPYKCDKCGRAFISSSILYVHKISHXEEKPYKCEECGKAFKLSSILSXHKRIHXGEKPYKCEECGKAFRRSLVLRXHKRIHXGEKPYKCDKCGKAFISSSLLYKHKISHSEKKPYKCEECGKAFKRSSXLXIHKISHXEEKPYKCQECDKVFKRSSALSXHKIIHSGEKPYKCEECGKAFKRSSNLXXHKISHXEEKLYKCQECDKAFKYSSALSXHKIIHSGENPYKCEECGKAFKRSSVLSKHKIIHXGAKPYKCEECGKAFKRSSQLXSHKISHXGEKPYKCEECGKAFNLSSDLNXHKRIHIGQKAYIVKNMANL

SEQ ID NO: 32391 - protein, 129 aa, Homo sapiens
  MOD_RES (18)..(18): Selenocysteine
  MOD_RES (20)..(20): Selenocysteine
  MOD_RES (71)..(71): Selenocysteine
  MOD_RES (101)..(101): Selenocysteine
MPSKGPLQSVQVFGRKKXAXAVAHCRRGNGLIKLLEPVLLLGKERFAGVDIRVRVKGGAHVAQIYAIRQSXSKALVAYYQKYVDEASKKEIKDILIQYDRXLLVADPRRCKSKKFGGPGARACYQKSYR

SEQ ID NO: 32392 - protein, 185 aa, Homo sapiens
  MOD_RES (48)..(49): Selenocysteine
  MOD_RES (74)..(74): Selenocysteine
  MOD_RES (78)..(78): Selenocysteine
  MOD_RES (99)..(99): Selenocysteine
  MOD_RES (107)..(107): Selenocysteine
  MOD_RES (119)..(119): Selenocysteine
  MOD_RES (125)..(125): Selenocysteine
  MOD_RES (127)..(127): Selenocysteine
  MOD_RES (134)..(134): Selenocysteine
  MOD_RES (153)..(153): Selenocysteine
  MOD_RES (155)..(156): Selenocysteine
  MOD_RES (181)..(181): Selenocysteine
  MOD_RES (183)..(183): Selenocysteine
MEDSFQKVLLRKYEKCGHENLQLRKGCKSVDECKVHKEGYNKLNQCLXXAQSKVFQCGKYLKVFYKFLNSNRHXIRHXGKKCFKCKKCVKSFCIRLHKXQHKCVYIXEKSCKCKECEKXFHWSSXLXNHKEIHXEDKPYKCEECGKAFKQLSXLXXHKIICAKEKIYKCEECGKAFLWSSXLXRH

SEQ ID NO: 32393 - protein, 122 aa, Homo sapiens
  MOD_RES (4)..(4): Selenocysteine
  MOD_RES (14)..(14): Selenocysteine
  MOD_RES (32)..(32): Selenocysteine
  MOD_RES (63)..(63): Selenocysteine
  MOD_RES (84)..(84): Selenocysteine
  MOD_RES (105)..(105): Selenocysteine
  MOD_RES (107)..(107): Selenocysteine
MPGXPGSLEMGLLXFRDVAIEFSPEEWQCLDXAQQNLYRNVMLENYRNLAFLGIALSKPDLIXYLEQGKEPWNMKQHEMVDEPXDGVLLHRQAGVQWRDLVPLLXAXSASPIEVILLSQPPE

SEQ ID NO: 32394 - protein, 1191 aa, Homo sapiens
  MOD_RES (4)..(4): Selenocysteine
  MOD_RES (14)..(14): Selenocysteine
  MOD_RES (32)..(32): Selenocysteine
  MOD_RES (63)..(63): Selenocysteine
  MOD_RES (84)..(84): Selenocysteine
  MOD_RES (147)..(148): Selenocysteine
  MOD_RES (173)..(173): Selenocysteine
  MOD_RES (177)..(177): Selenocysteine
  MOD_RES (198)..(198): Selenocysteine
  MOD_RES (206)..(206): Selenocysteine
  MOD_RES (218)..(218): Selenocysteine
  MOD_RES (224)..(224): Selenocysteine
  MOD_RES (226)..(226): Selenocysteine
  MOD_RES (233)..(233): Selenocysteine
  MOD_RES (252)..(252): Selenocysteine
  MOD_RES (254)..(255): Selenocysteine
  MOD_RES (280)..(280): Selenocysteine
  MOD_RES (282)..(282): Selenocysteine
  MOD_RES (289)..(289): Selenocysteine
  MOD_RES (308)..(308): Selenocysteine
  MOD_RES (317)..(317): Selenocysteine
  MOD_RES (336)..(336): Selenocysteine
  MOD_RES (345)..(345): Selenocysteine
  MOD_RES (364)..(364): Selenocysteine
  MOD_RES (371)..(371): Selenocysteine
  MOD_RES (373)..(373): Selenocysteine
  MOD_RES (392)..(392): Selenocysteine
  MOD_RES (394)..(394): Selenocysteine
  MOD_RES (422)..(422): Selenocysteine
  MOD_RES (429)..(429): Selenocysteine
  MOD_RES (450)..(450): Selenocysteine
  MOD_RES (457)..(457): Selenocysteine
  MOD_RES (476)..(476): Selenocysteine
  MOD_RES (478)..(478): Selenocysteine
  MOD_RES (485)..(485): Selenocysteine
  MOD_RES (504)..(504): Selenocysteine
  MOD_RES (506)..(506): Selenocysteine
  MOD_RES (513)..(513): Selenocysteine
  MOD_RES (532)..(532): Selenocysteine
  MOD_RES (560)..(560): Selenocysteine
  MOD_RES (562)..(563): Selenocysteine
  MOD_RES (591)..(591): Selenocysteine
  MOD_RES (597)..(597): Selenocysteine
  MOD_RES (616)..(616): Selenocysteine
  MOD_RES (625)..(625): Selenocysteine
  MOD_RES (653)..(653): Selenocysteine
  MOD_RES (672)..(672): Selenocysteine
  MOD_RES (679)..(679): Selenocysteine
  MOD_RES (681)..(681): Selenocysteine
  MOD_RES (694)..(694): Selenocysteine
  MOD_RES (700)..(700): Selenocysteine
  MOD_RES (702)..(702): Selenocysteine
  MOD_RES (730)..(730): Selenocysteine
  MOD_RES (737)..(737): Selenocysteine
  MOD_RES (758)..(758): Selenocysteine
  MOD_RES (765)..(765): Selenocysteine
  MOD_RES (784)..(784): Selenocysteine
  MOD_RES (786)..(786): Selenocysteine
  MOD_RES (793)..(793): Selenocysteine
  MOD_RES (812)..(812): Selenocysteine
  MOD_RES (814)..(814): Selenocysteine
  MOD_RES (818)..(818): Selenocysteine
  MOD_RES (821)..(821): Selenocysteine
  MOD_RES (870)..(871): Selenocysteine
  MOD_RES (877)..(877): Selenocysteine
  MOD_RES (896)..(896): Selenocysteine
  MOD_RES (898)..(898): Selenocysteine
  MOD_RES (905)..(905): Selenocysteine
  MOD_RES (909)..(909): Selenocysteine
  MOD_RES (926)..(927): Selenocysteine
  MOD_RES (933)..(933): Selenocysteine
  MOD_RES (952)..(952): Selenocysteine
  MOD_RES (954)..(955): Selenocysteine
  MOD_RES (961)..(961): Selenocysteine
  MOD_RES (980)..(980): Selenocysteine
  MOD_RES (982)..(982): Selenocysteine
  MOD_RES (989)..(989): Selenocysteine
  MOD_RES (1008)..(1008): Selenocysteine
  MOD_RES (1010)..(1010): Selenocysteine
  MOD_RES (1013)..(1013): Selenocysteine
  MOD_RES (1017)..(1017): Selenocysteine
  MOD_RES (1038)..(1039): Selenocysteine
  MOD_RES (1045)..(1045): Selenocysteine
  MOD_RES (1064)..(1064): Selenocysteine
  MOD_RES (1073)..(1073): Selenocysteine
  MOD_RES (1092)..(1092): Selenocysteine
  MOD_RES (1094)..(1094): Selenocysteine
  MOD_RES (1101)..(1101): Selenocysteine
  MOD_RES (1122)..(1122): Selenocysteine
  MOD_RES (1129)..(1129): Selenocysteine
  MOD_RES (1150)..(1150): Selenocysteine
  MOD_RES (1157)..(1157): Selenocysteine
  MOD_RES (1159)..(1159): Selenocysteine
  MOD_RES (1180)..(1180): Selenocysteine
  MOD_RES (1185)..(1185): Selenocysteine
MPGXPGSLEMGLLXFRDVAIEFSPEEWQCLDXAQQNLYRNVMLENYRNLAFLGIALSKPDLIXYLEQGKEPWNMKQHEMVDEPXGICPHFPQDFWPEQSMEDSFQKVLLRKYEKCGHENLQLRKGCKSVDECKVHKEGYNKLNQCLXXAQSKVFQCGKYLKVFYKFLNSNRHXIRHXGKKCFKCKKCVKSFCIRLHKXQHKCVYIXEKSCKCKECEKXFHWSSXLXNHKEIHXEDKPYKCEECGKAFKQLSXLXXHKIICAKEKIYKCEECGKAFLWSSXLXRHKRIHXGEKPYKCEECGKAFSHSSXLAKHKRIHXGEKPYKCEECGKAFSRSSXLAKHKRIHXGEKPYKCKECGKAFSNSSXLANHKIXHXEEKPYKCKECDKAFKRLSXLXKHKIIHAGEKLYKCEECGKAFNRSSNLXIHKFIHXGEKPYKCEECGKAFNWSSSLXKHKRFHXREKPFKCKECGKAFIWSSXLXRHKRIHXGEKPYKCEECGKAFRQSSXLXKHKIIHXGEKPYKFEECGKAFRQSLXLNKHKIIHSREKPYKCKECGKAFKQFSXLXXHKIIHAGKKLYKCEECGKAFNHSSSLSXHKIIHXGEKSYKCEECGKAFLWSSXLRRHKRIHXGEKPYKCEECGKAFSHSSALAKHKRIHXGEKPYKCKECGKAFSNSSXLANHKIXHXEEKPYKCKECDKXFKRLSXLXKHKIIHAGEKLYKCEECGKAFNRSSNLXIHKFIHXGEKPYKCEECGKAFNWSSSLXKHKRIHXREKPFKCKECGKAFIWSSXLXRHKRIHXGEKPYKCEECGKAFSRSSXLXKHKXIHXGEKPYKCKECGKAFKHSSALAKHKIIHAGEKLYKCEECGKAFNQSSNLXXHKIIHXKEKPSKSEECDKAFIWSSXLXEHKRIHXREKXYKCEECGKAFSQPSHLXXHKRMHXGEKPYKCEECGKAFSQSSXLXXHKIIHXGEKPYKCEECGKAFRKSSXLXEHKIIHXGEKPYKCEECGKAFSQSSXLXRHXRMHXGEKPYKCEECGKAFNRSSKLXXHKIIHXGEKPYKCEECGKAFISSSXLNGHKRIHXREKPYKCEECGKAFSQSSXLXRHKRLHXGEKPYKCGECGKAFKESSALXKHKIIHXGEKPYKCEKCGKAFNQSSILXNHKKIHXIXPVIPLLWEAEAGGSRGQEMEXILANXVKPLLY

SEQ ID NO: 32395 - protein, 1159 aa, Homo sapiens
  MOD_RES (4)..(4): Selenocysteine
  MOD_RES (14)..(14): Selenocysteine
  MOD_RES (32)..(32): Selenocysteine
  MOD_RES (115)..(116): Selenocysteine
  MOD_RES (141)..(141): Selenocysteine
  MOD_RES (145)..(145): Selenocysteine
  MOD_RES (166)..(166): Selenocysteine
  MOD_RES (174)..(174): Selenocysteine
  MOD_RES (186)..(186): Selenocysteine
  MOD_RES (192)..(192): Selenocysteine
  MOD_RES (194)..(194): Selenocysteine
  MOD_RES (201)..(201): Selenocysteine
  MOD_RES (220)..(220): Selenocysteine
  MOD_RES (222)..(223): Selenocysteine
  MOD_RES (248)..(248): Selenocysteine
  MOD_RES (250)..(250): Selenocysteine
  MOD_RES (257)..(257): Selenocysteine
  MOD_RES (276)..(276): Selenocysteine
  MOD_RES (285)..(285): Selenocysteine
  MOD_RES (304)..(304): Selenocysteine
  MOD_RES (313)..(313): Selenocysteine
  MOD_RES (332)..(332): Selenocysteine
  MOD_RES (339)..(339): Selenocysteine
  MOD_RES (341)..(341): Selenocysteine
  MOD_RES (360)..(360): Selenocysteine
  MOD_RES (362)..(362): Selenocysteine
  MOD_RES (390)..(390): Selenocysteine
  MOD_RES (397)..(397): Selenocysteine
  MOD_RES (418)..(418): Selenocysteine
  MOD_RES (425)..(425): Selenocysteine
  MOD_RES (444)..(444): Selenocysteine
  MOD_RES (446)..(446): Selenocysteine
  MOD_RES (453)..(453): Selenocysteine
  MOD_RES (472)..(472): Selenocysteine
  MOD_RES (474)..(474): Selenocysteine
  MOD_RES (481)..(481): Selenocysteine
  MOD_RES (500)..(500): Selenocysteine
  MOD_RES (528)..(528): Selenocysteine
  MOD_RES (530)..(531): Selenocysteine
  MOD_RES (559)..(559): Selenocysteine
  MOD_RES (565)..(565): Selenocysteine
  MOD_RES (584)..(584): Selenocysteine
  MOD_RES (593)..(593): Selenocysteine
  MOD_RES (621)..(621): Selenocysteine
  MOD_RES (640)..(640): Selenocysteine
  MOD_RES (647)..(647): Selenocysteine
  MOD_RES (649)..(649): Selenocysteine
  MOD_RES (662)..(662): Selenocysteine
  MOD_RES (668)..(668): Selenocysteine
  MOD_RES (670)..(670): Selenocysteine
  MOD_RES (698)..(698): Selenocysteine
  MOD_RES (705)..(705): Selenocysteine
  MOD_RES (726)..(726): Selenocysteine
  MOD_RES (733)..(733): Selenocysteine
  MOD_RES (752)..(752): Selenocysteine
  MOD_RES (754)..(754): Selenocysteine
  MOD_RES (761)..(761): Selenocysteine
  MOD_RES (780)..(780): Selenocysteine
  MOD_RES (782)..(782): Selenocysteine
  MOD_RES (786)..(786): Selenocysteine
  MOD_RES (789)..(789): Selenocysteine
  MOD_RES (838)..(839): Selenocysteine
  MOD_RES (845)..(845): Selenocysteine
  MOD_RES (864)..(864): Selenocysteine
  MOD_RES (866)..(866): Selenocysteine
  MOD_RES (873)..(873): Selenocysteine
  MOD_RES (877)..(877): Selenocysteine
  MOD_RES (894)..(895): Selenocysteine
  MOD_RES (901)..(901): Selenocysteine
  MOD_RES (920)..(920): Selenocysteine
  MOD_RES (922)..(923): Selenocysteine
  MOD_RES (929)..(929): Selenocysteine
  MOD_RES (948)..(948): Selenocysteine
  MOD_RES (950)..(950): Selenocysteine
  MOD_RES (957)..(957): Selenocysteine
  MOD_RES (976)..(976): Selenocysteine
  MOD_RES (978)..(978): Selenocysteine
  MOD_RES (981)..(981): Selenocysteine
  MOD_RES (985)..(985): Selenocysteine
  MOD_RES (1006)..(1007): Selenocysteine
  MOD_RES (1013)..(1013): Selenocysteine
  MOD_RES (1032)..(1032): Selenocysteine
  MOD_RES (1041)..(1041): Selenocysteine
  MOD_RES (1060)..(1060): Selenocysteine
  MOD_RES (1062)..(1062): Selenocysteine
  MOD_RES (1069)..(1069): Selenocysteine
  MOD_RES (1090)..(1090): Selenocysteine
  MOD_RES (1097)..(1097): Selenocysteine
  MOD_RES (1118)..(1118): Selenocysteine
  MOD_RES (1125)..(1125): Selenocysteine
  MOD_RES (1127)..(1127): Selenocysteine
  MOD_RES (1148)..(1148): Selenocysteine
  MOD_RES (1153)..(1153): Selenocysteine
MPGXPGSLEMGLLXFRDVAIEFSPEEWQCLDXAQQNLYRNVMLENYRNLAFLGICPHFPQDFWPEQSMEDSFQKVLLRKYEKCGHENLQLRKGCKSVDECKVHKEGYNKLNQCLXXAQSKVFQCGKYLKVFYKFLNSNRHXIRHXGKKCFKCKKCVKSFCIRLHKXQHKCVYIXEKSCKCKECEKXFHWSSXLXNHKEIHXEDKPYKCEECGKAFKQLSXLXXHKIICAKEKIYKCEECGKAFLWSSXLXRHKRIHXGEKPYKCEECGKAFSHSSXLAKHKRIHXGEKPYKCEECGKAFSRSSXLAKHKRIHXGEKPYKCKECGKAFSNSSXLANHKIXHXEEKPYKCKECDKAFKRLSXLXKHKIIHAGEKLYKCEECGKAFNRSSNLXIHKFIHXGEKPYKCEECGKAFNWSSSLXKHKRFHXREKPFKCKECGKAFIWSSXLXRHKRIHXGEKPYKCEECGKAFRQSSXLXKHKIIHXGEKPYKFEECGKAFRQSLXLNKHKIIHSREKPYKCKECGKAFKQFSXLXXHKIIHAGKKLYKCEECGKAFNHSSSLSXHKIIHXGEKSYKCEECGKAFLWSSXLRRHKRIHXGEKPYKCEECGKAFSHSSALAKHKRIHXGEKPYKCKECGKAFSNSSXLANHKIXHXEEKPYKCKECDKXFKRLSXLXKHKIIHAGEKLYKCEECGKAFNRSSNLXIHKFIHXGEKPYKCEECGKAFNWSSSLXKHKRIHXREKPFKCKECGKAFIWSSXLXRHKRIHXGEKPYKCEECGKAFSRSSXLXKHKXIHXGEKPYKCKECGKAFKHSSALAKHKIIHAGEKLYKCEECGKAFNQSSNLXXHKIIHXKEKPSKSEECDKAFIWSSXLXEHKRIHXREKXYKCEECGKAFSQPSHLXXHKRMHXGEKPYKCEECGKAFSQSSXLXXHKIIHXGEKPYKCEECGKAFRKSSXLXEHKIIHXGEKPYKCEECGKAFSQSSXLXRHXRMHXGEKPYKCEECGKAFNRSSKLXXHKIIHXGEKPYKCEECGKAFISSSXLNGHKRIHXREKPYKCEECGKAFSQSSXLXRHKRLHXGEKPYKCGECGKAFKESSALXKHKIIHXGEKPYKCEKCGKAFNQSSILXNHKKIHXIXPVIPLLWEAEAGGSRGQEMEXILANXVKPLLY

SEQ ID NO: 32396 - protein, 510 aa, Homo sapiens
  MOD_RES (26)..(26): Selenocysteine
  MOD_RES (62)..(64): Selenocysteine
  MOD_RES (92)..(92): Selenocysteine
  MOD_RES (113)..(113): Selenocysteine
  MOD_RES (120)..(120): Selenocysteine
  MOD_RES (139)..(139): Selenocysteine
  MOD_RES (141)..(141): Selenocysteine
  MOD_RES (148)..(148): Selenocysteine
  MOD_RES (169)..(169): Selenocysteine
  MOD_RES (176)..(176): Selenocysteine
  MOD_RES (195)..(195): Selenocysteine
  MOD_RES (197)..(197): Selenocysteine
  MOD_RES (204)..(204): Selenocysteine
  MOD_RES (260)..(260): Selenocysteine
  MOD_RES (281)..(281): Selenocysteine
  MOD_RES (288)..(288): Selenocysteine
  MOD_RES (307)..(307): Selenocysteine
  MOD_RES (309)..(309): Selenocysteine
  MOD_RES (316)..(316): Selenocysteine
  MOD_RES (335)..(335): Selenocysteine
  MOD_RES (337)..(337): Selenocysteine
  MOD_RES (344)..(344): Selenocysteine
  MOD_RES (365)..(365): Selenocysteine
  MOD_RES (391)..(391): Selenocysteine
  MOD_RES (393)..(393): Selenocysteine
  MOD_RES (400)..(400): Selenocysteine
  MOD_RES (421)..(421): Selenocysteine
  MOD_RES (428)..(428): Selenocysteine
  MOD_RES (449)..(449): Selenocysteine
  MOD_RES (456)..(456): Selenocysteine
  MOD_RES (475)..(475): Selenocysteine
  MOD_RES (478)..(478): Selenocysteine
  MOD_RES (484)..(484): Selenocysteine
  MOD_RES (504)..(504): Selenocysteine
  MOD_RES (510)..(510): Selenocysteine
MCSHFAQDVWPEHSIKDSFQKVILRXYGKYGHENLQLRKDHKSVDACKVYKGGYNGLNQCLXXXDSKIFQCDKYVKVFHKFPNVNRNKIRHXGKKPFKCKNRGKSFCMLSQLXQHKKIHXREYSYKCEECGKAFNWSSXLXKHKIIHXGEKPYKCEECGKAFNRSSNLXKHKIIHXGEKPYKCEECGKAFNRSSXLXKHKRIHXEEKPYKCEECGKAFNQFSILNKHKRIHMEDKPYKCEECGKAFRVFSILKKHKIIHXGEKPYKCEECGKAFNQFSNLXKHKIIHXGEKPYKCDECGKAFNQSSXLXKHKRIHXGEKPYKCEECGKAFKQSSXLXEHKIIHXGEKPYKCEKCGKAFSWSSAFXKHKRNHMEDKPYKCEECGKAFSVFSXLXKHKIIHXREKPYKCEECGKAFNQSSIFXKHKIIHXEGKSYKCEKCGNAFNQSSNLXARKIIYXGEKPYKYEECDKAFNKFSXLIXHQIIYXGEKPCKHECGRAFNKSSNYXKEKLQX

SEQ ID NO: 32397 - protein, 586 aa, Homo sapiens
  MOD_RES (5)..(5): Selenocysteine
  MOD_RES (23)..(23): Selenocysteine
  MOD_RES (54)..(54): Selenocysteine
  MOD_RES (74)..(74): Selenocysteine
  MOD_RES (102)..(102): Selenocysteine
  MOD_RES (138)..(140): Selenocysteine
  MOD_RES (168)..(168): Selenocysteine
  MOD_RES (189)..(189): Selenocysteine
  MOD_RES (196)..(196): Selenocysteine
  MOD_RES (215)..(215): Selenocysteine
  MOD_RES (217)..(217): Selenocysteine
  MOD_RES (224)..(224): Selenocysteine
  MOD_RES (245)..(245): Selenocysteine
  MOD_RES (252)..(252): Selenocysteine
  MOD_RES (271)..(271): Selenocysteine
  MOD_RES (273)..(273): Selenocysteine
  MOD_RES (280)..(280): Selenocysteine
  MOD_RES (336)..(336): Selenocysteine
  MOD_RES (357)..(357): Selenocysteine
  MOD_RES (364)..(364): Selenocysteine
  MOD_RES (383)..(383): Selenocysteine
  MOD_RES (385)..(385): Selenocysteine
  MOD_RES (392)..(392): Selenocysteine
  MOD_RES (411)..(411): Selenocysteine
  MOD_RES (413)..(413): Selenocysteine
  MOD_RES (420)..(420): Selenocysteine
  MOD_RES (441)..(441): Selenocysteine
  MOD_RES (467)..(467): Selenocysteine
  MOD_RES (469)..(469): Selenocysteine
  MOD_RES (476)..(476): Selenocysteine
  MOD_RES (497)..(497): Selenocysteine
  MOD_RES (504)..(504): Selenocysteine
  MOD_RES (525)..(525): Selenocysteine
  MOD_RES (532)..(532): Selenocysteine
  MOD_RES (551)..(551): Selenocysteine
  MOD_RES (554)..(554): Selenocysteine
  MOD_RES (560)..(560): Selenocysteine
  MOD_RES (580)..(580): Selenocysteine
  MOD_RES (586)..(586): Selenocysteine
MGPLXFRDVKIEFSLEEWQCLDXAQRNLYRDVMLENYRNLVFLGIAVSKPDLIXWLEQGKEPWNLKRHEMVDKXPVMCSHFAQDVWPEHSIKDSFQKVILRXYGKYGHENLQLRKDHKSVDACKVYKGGYNGLNQCLXXXDSKIFQCDKYVKVFHKFPNVNRNKIRHXGKKPFKCKNRGKSFCMLSQLXQHKKIHXREYSYKCEECGKAFNWSSXLXKHKIIHXGEKPYKCEECGKAFNRSSNLXKHKIIHXGEKPYKCEECGKAFNRSSXLXKHKRIHXEEKPYKCEECGKAFNQFSILNKHKRIHMEDKPYKCEECGKAFRVFSILKKHKIIHXGEKPYKCEECGKAFNQFSNLXKHKIIHXGEKPYKCDECGKAFNQSSXLXKHKRIHXGEKPYKCEECGKAFKQSSXLXEHKIIHXGEKPYKCEKCGKAFSWSSAFXKHKRNHMEDKPYKCEECGKAFSVFSXLXKHKIIHXREKPYKCEECGKAFNQSSIFXKHKIIHXEGKSYKCEKCGNAFNQSSNLXARKIIYXGEKPYKYEECDKAFNKFSXLIXHQIIYXGEKPCKHECGRAFNKSSNYXKEKLQX

SEQ ID NO: 32398 - protein, 554 aa, Homo sapiens
  MOD_RES (5)..(5): Selenocysteine
  MOD_RES (23)..(23): Selenocysteine
  MOD_RES (70)..(70): Selenocysteine
  MOD_RES (106)..(108): Selenocysteine
  MOD_RES (136)..(136): Selenocysteine
  MOD_RES (157)..(157): Selenocysteine
  MOD_RES (164)..(164): Selenocysteine
  MOD_RES (183)..(183): Selenocysteine
  MOD_RES (185)..(185): Selenocysteine
  MOD_RES (192)..(192): Selenocysteine
  MOD_RES (213)..(213): Selenocysteine
  MOD_RES (220)..(220): Selenocysteine
  MOD_RES (239)..(239): Selenocysteine
  MOD_RES (241)..(241): Selenocysteine
  MOD_RES (248)..(248): Selenocysteine
  MOD_RES (304)..(304): Selenocysteine
  MOD_RES (325)..(325): Selenocysteine
  MOD_RES (332)..(332): Selenocysteine
  MOD_RES (351)..(351): Selenocysteine
  MOD_RES (353)..(353): Selenocysteine
  MOD_RES (360)..(360): Selenocysteine
  MOD_RES (379)..(379): Selenocysteine
  MOD_RES (381)..(381): Selenocysteine
  MOD_RES (388)..(388): Selenocysteine
  MOD_RES (409)..(409): Selenocysteine
  MOD_RES (435)..(435): Selenocysteine
  MOD_RES (437)..(437): Selenocysteine
  MOD_RES (444)..(444): Selenocysteine
  MOD_RES (465)..(465): Selenocysteine
  MOD_RES (472)..(472): Selenocysteine
  MOD_RES (493)..(493): Selenocysteine
  MOD_RES (500)..(500): Selenocysteine
  MOD_RES (519)..(519): Selenocysteine
  MOD_RES (522)..(522): Selenocysteine
  MOD_RES (528)..(528): Selenocysteine
  MOD_RES (548)..(548): Selenocysteine
  MOD_RES (554)..(554): Selenocysteine
MGPLXFRDVKIEFSLEEWQCLDXAQRNLYRDVMLENYRNLVFLVMCSHFAQDVWPEHSIKDSFQKVILRXYGKYGHENLQLRKDHKSVDACKVYKGGYNGLNQCLXXXDSKIFQCDKYVKVFHKFPNVNRNKIRHXGKKPFKCKNRGKSFCMLSQLXQHKKIHXREYSYKCEECGKAFNWSSXLXKHKIIHXGEKPYKCEECGKAFNRSSNLXKHKIIHXGEKPYKCEECGKAFNRSSXLXKHKRIHXEEKPYKCEECGKAFNQFSILNKHKRIHMEDKPYKCEECGKAFRVFSILKKHKIIHXGEKPYKCEECGKAFNQFSNLXKHKIIHXGEKPYKCDECGKAFNQSSXLXKHKRIHXGEKPYKCEECGKAFKQSSXLXEHKIIHXGEKPYKCEKCGKAFSWSSAFXKHKRNHMEDKPYKCEECGKAFSVFSXLXKHKIIHXREKPYKCEECGKAFNQSSIFXKHKIIHXEGKSYKCEKCGNAFNQSSNLXARKIIYXGEKPYKYEECDKAFNKFSXLIXHQIIYXGEKPCKHECGRAFNKSSNYXKEKLQX

SEQ ID NO: 32399 - protein, 517 aa, Homo sapiens
  MOD_RES (5)..(5): Selenocysteine
  MOD_RES (33)..(33): Selenocysteine
  MOD_RES (69)..(71): Selenocysteine
  MOD_RES (99)..(99): Selenocysteine
  MOD_RES (120)..(120): Selenocysteine
  MOD_RES (127)..(127): Selenocysteine
  MOD_RES (146)..(146): Selenocysteine
  MOD_RES (148)..(148): Selenocysteine
  MOD_RES (155)..(155): Selenocysteine
  MOD_RES (176)..(176): Selenocysteine
  MOD_RES (183)..(183): Selenocysteine
  MOD_RES (202)..(202): Selenocysteine
  MOD_RES (204)..(204): Selenocysteine
  MOD_RES (211)..(211): Selenocysteine
  MOD_RES (267)..(267): Selenocysteine
  MOD_RES (288)..(288): Selenocysteine
  MOD_RES (295)..(295): Selenocysteine
  MOD_RES (314)..(314): Selenocysteine
  MOD_RES (316)..(316): Selenocysteine
  MOD_RES (323)..(323): Selenocysteine
  MOD_RES (342)..(342): Selenocysteine
  MOD_RES (344)..(344): Selenocysteine
  MOD_RES (351)..(351): Selenocysteine
  MOD_RES (372)..(372): Selenocysteine
  MOD_RES (398)..(398): Selenocysteine
  MOD_RES (400)..(400): Selenocysteine
  MOD_RES (407)..(407): Selenocysteine
  MOD_RES (428)..(428): Selenocysteine
  MOD_RES (435)..(435): Selenocysteine
  MOD_RES (456)..(456): Selenocysteine
  MOD_RES (463)..(463): Selenocysteine
  MOD_RES (482)..(482): Selenocysteine
  MOD_RES (485)..(485): Selenocysteine
  MOD_RES (491)..(491): Selenocysteine
  MOD_RES (511)..(511): Selenocysteine
  MOD_RES (517)..(517): Selenocysteine
MVDKXPVMCSHFAQDVWPEHSIKDSFQKVILRXYGKYGHENLQLRKDHKSVDACKVYKGGYNGLNQCLXXXDSKIFQCDKYVKVFHKFPNVNRNKIRHXGKKPFKCKNRGKSFCMLSQLXQHKKIHXREYSYKCEECGKAFNWSSXLXKHKIIHXGEKPYKCEECGKAFNRSSNLXKHKIIHXGEKPYKCEECGKAFNRSSXLXKHKRIHXEEKPYKCEECGKAFNQFSILNKHKRIHMEDKPYKCEECGKAFRVFSILKKHKIIHXGEKPYKCEECGKAFNQFSNLXKHKIIHXGEKPYKCDECGKAFNQSSXLXKHKRIHXGEKPYKCEECGKAFKQSSXLXEHKIIHXGEKPYKCEKCGKAFSWSSAFXKHKRNHMEDKPYKCEECGKAFSVFSXLXKHKIIHXREKPYKCEECGKAFNQSSIFXKHKIIHXEGKSYKCEKCGNAFNQSSNLXARKIIYXGEKPYKYEECDKAFNKFSXLIXHQIIYXGEKPCKHECGRAFNKSSNYXKEKLQX

SEQ ID NO: 32400 - protein, 84 aa, Homo sapiens
  MOD_RES (23)..(23): Selenocysteine
  MOD_RES (64)..(64): Selenocysteine
MGPLQFRDVAIEFSLEEWHCLDXAQRNLYRNVMLENYSNLVFLGIVVSKPDLIAHLEQGKKPLXMKRHEMVANPSDGVNLCHPG

SEQ ID NO: 32401 - protein, 123 aa, Homo sapiens
  MOD_RES (23)..(23): Selenocysteine
  MOD_RES (64)..(64): Selenocysteine
MGPLQFRDVAIEFSLEEWHCLDXAQRNLYRNVMLENYSNLVFLGIVVSKPDLIAHLEQGKKPLXMKRHEMVANPSGARLLSQHFGRPRWVDPEVRRSRPSGQHGEIPSLLKYKKLARHGGPCL

SEQ ID NO: 32402 - protein, 119 aa, Homo sapiens
  MOD_RES (23)..(23): Selenocysteine
  MOD_RES (64)..(64): Selenocysteine
MGPLQFRDVAIEFSLEEWHCLDXAQRNLYRNVMLENYSNLVFLGIVVSKPDLIAHLEQGKKPLXMKRHEMVANPSGPGVVVVLMCNPRILGGQAKRIPGAQKFENSLGNIWRPLSMKKI

SEQ ID NO: 32403 - protein, 620 aa, Homo sapiens
  MOD_RES (23)..(23): Selenocysteine
  MOD_RES (64)..(64): Selenocysteine
  MOD_RES (127)..(127): Selenocysteine
  MOD_RES (138)..(140): Selenocysteine
  MOD_RES (168)..(168): Selenocysteine
  MOD_RES (187)..(187): Selenocysteine
  MOD_RES (190)..(190): Selenocysteine
  MOD_RES (196)..(196): Selenocysteine
  MOD_RES (218)..(218): Selenocysteine
  MOD_RES (224)..(224): Selenocysteine
  MOD_RES (243)..(243): Selenocysteine
  MOD_RES (252)..(252): Selenocysteine
  MOD_RES (271)..(271): Selenocysteine
  MOD_RES (273)..(273): Selenocysteine
  MOD_RES (280)..(280): Selenocysteine
  MOD_RES (299)..(299): Selenocysteine
  MOD_RES (301)..(301): Selenocysteine
  MOD_RES (308)..(308): Selenocysteine
  MOD_RES (329)..(330): Selenocysteine
  MOD_RES (336)..(336): Selenocysteine
  MOD_RES (355)..(355): Selenocysteine
  MOD_RES (385)..(385): Selenocysteine
  MOD_RES (392)..(392): Selenocysteine
  MOD_RES (411)..(411): Selenocysteine
  MOD_RES (420)..(420): Selenocysteine
  MOD_RES (439)..(439): Selenocysteine
  MOD_RES (448)..(448): Selenocysteine
  MOD_RES (469)..(469): Selenocysteine
  MOD_RES (476)..(476): Selenocysteine
  MOD_RES (497)..(497): Selenocysteine
  MOD_RES (504)..(504): Selenocysteine
  MOD_RES (523)..(523): Selenocysteine
  MOD_RES (532)..(532): Selenocysteine
  MOD_RES (550)..(550): Selenocysteine
  MOD_RES (553)..(554): Selenocysteine
  MOD_RES (560)..(560): Selenocysteine
  MOD_RES (579)..(579): Selenocysteine
  MOD_RES (616)..(616): Selenocysteine
MGPLQFRDVAIEFSLEEWHCLDXAQRNLYRNVMLENYSNLVFLGIVVSKPDLIAHLEQGKKPLXMKRHEMVANPSVICSHFAQDLWPEQNIKDSFQKVILRRYEKRGHGNLQLIKRCESVDECKVHXGGYNGLNQCSXXXQSKVFQCDKYGKVFHKFSNSNRHNIRHXEKKPFKCIECGKAFNQFSXLIXHKKIHXGEKPYICEECGKAFKYSSALNXHKRIHXGEKPYKCDKCDKAFIASSXLSKHEIIHXGKKPYKCEECGKAFNQSSXLXKHKKIHXGEKPYKCEECGKAFNQSSXLXKHKKIHXGEKPYVCEECGKAFKYSRILXXHKRIHXGEKPYKCNKCGKAFIASSXLSRHEFIHMGKKHYKCEECGKAFIWSSVLXRHKRVHXGEKPYKCEECGKAFKYSSXLSSHKRSHXGEKPYKCEECGKAFVASSXLSKHEIIHXGKKPYKCEECGKAFNQSSSLXKHKKIHXGEKPYKCEECGKAFNQSSSLXKHKKIHXGEKPYKCEECGKAFNQSSXLIKHKKIHXREKPYKCEECGKAFHLSXHLXXHKILHXGEKPYRCRECGKAFNHSAXLSSHKKIHSGEKPYECDKCGKAFISPSSLSRHEIIHXGEKP

SEQ ID NO: 32404 - protein, 120 aa, Homo sapiens
  MOD_RES (63)..(63): Selenocysteine
  MOD_RES (74)..(76): Selenocysteine
  MOD_RES (104)..(104): Selenocysteine
MKRHEMVANPSVICSHFAQDLWPEQNIKDSFQKVILRRYEKRGHGNLQLIKRCESVDECKVHXGGYNGLNQCSXXXQSKVFQCDKYGKVFHKFSNSNRHNIRHXEKKPFKCIECGKAFNQ

SEQ ID NO: 32405 - protein, 130 aa, Homo sapiens
  MOD_RES (22)..(22): Selenocysteine
  MOD_RES (40)..(40): Selenocysteine
  MOD_RES (70)..(70): Selenocysteine
  MOD_RES (106)..(108): Selenocysteine
MLENYRNLVFVGIAASKPDLIXCLEQGKEPWNVKRHEMVXEPPVVYSYFAQDLWPKQGKKNYFQKVILRXYKKCGRENLQLRKYCKSMDECKVHKECYNGLNQCLXXXQNKIFQYDKYVKVFHKFSNSNR

SEQ ID NO: 32406 - protein, 87 aa, Homo sapiens
  MOD_RES (14)..(14): Selenocysteine
  MOD_RES (32)..(32): Selenocysteine
  MOD_RES (63)..(63): Selenocysteine
  MOD_RES (81)..(81): Selenocysteine
MPGPLGSLEMGVLXFRDVALEFSLEEWQCLDXAQQNLYRNVMLENYRNLVFVGIAASKPDLIXCLEQGKEPWNVKRHEMVXEPPGLQ

SEQ ID NO: 32407 - protein, 572 aa, Homo sapiens
  MOD_RES (14)..(14): Selenocysteine
  MOD_RES (32)..(32): Selenocysteine
  MOD_RES (63)..(63): Selenocysteine
  MOD_RES (81)..(81): Selenocysteine
  MOD_RES (111)..(111): Selenocysteine
  MOD_RES (147)..(149): Selenocysteine
  MOD_RES (177)..(177): Selenocysteine
  MOD_RES (227)..(227): Selenocysteine
  MOD_RES (233)..(233): Selenocysteine
  MOD_RES (254)..(255): Selenocysteine
  MOD_RES (261)..(261): Selenocysteine
  MOD_RES (282)..(283): Selenocysteine
  MOD_RES (289)..(289): Selenocysteine
  MOD_RES (308)..(308): Selenocysteine
  MOD_RES (310)..(310): Selenocysteine
  MOD_RES (336)..(336): Selenocysteine
  MOD_RES (338)..(339): Selenocysteine
  MOD_RES (345)..(345): Selenocysteine
  MOD_RES (366)..(367): Selenocysteine
  MOD_RES (392)..(392): Selenocysteine
  MOD_RES (394)..(395): Selenocysteine
  MOD_RES (422)..(423): Selenocysteine
  MOD_RES (429)..(429): Selenocysteine
  MOD_RES (450)..(451): Selenocysteine
  MOD_RES (457)..(457): Selenocysteine
  MOD_RES (476)..(476): Selenocysteine
  MOD_RES (485)..(485): Selenocysteine
  MOD_RES (506)..(507): Selenocysteine
  MOD_RES (513)..(513): Selenocysteine
  MOD_RES (541)..(541): Selenocysteine
MPGPLGSLEMGVLXFRDVALEFSLEEWQCLDXAQQNLYRNVMLENYRNLVFVGIAASKPDLIXCLEQGKEPWNVKRHEMVXEPPVVYSYFAQDLWPKQGKKNYFQKVILRXYKKCGRENLQLRKYCKSMDECKVHKECYNGLNQCLXXXQNKIFQYDKYVKVFHKFSNSNRHKIGHXGKKSFKCKECEKSFCMLSHLAQHKRIHSGEKPYKCKECGKAYNEASNLSXHKRIHXGKKPYKCEECGKAFNRLSHLXXHKIIHXGKKPYKCEECGKAFNQSANLXXHKRIHXGEKPYKCEECGRAFSQSSXLXAHKIIHAGEKPYKCEECGKAFSQSSXLXXHKIIHXGEKFYKCEECGKAFSRLSHLXXHKRIHSGEKPYKCEECGKAFKQSSXLXXHKRIHAGEKFYKCEVCSKAFSRFSHLXXHKRIHXGEKPYKCEECGKAFNLSSQLXXHKIIHXGEKPYKCEECGKAFNQSSXLSKHKVIHXGEKPYKCEECGKAFNQSSHLXXHKMIHXGEKPYKCEECGKAFNNSSILNRHKMIHXGEKLYKPESCNNACDNIAKISKYKRNCAGEK

SEQ ID NO: 32408 - protein, 131 aa, Homo sapiens
  MOD_RES (5)..(5): Selenocysteine
  MOD_RES (39)..(39): Selenocysteine
  MOD_RES (70)..(70): Selenocysteine
  MOD_RES (93)..(93): Selenocysteine
  MOD_RES (109)..(109): Selenocysteine
  MOD_RES (127)..(127): Selenocysteine
MSEEXLQSKLAAAKKKLPWGAVQGSRAMSDLLLLLLDLXLLLLLMLLGFAGYSGQLAGVAVSAGSPPIPXSSMWSPMVRLGGFSPELQHLPQXLLHRCPLGQPCMGVLXFRDVALEFSLEEWQCLDXAQQN

SEQ ID NO: 32409 - protein, 864 aa, Homo sapiens
  MOD_RES (5)..(5): Selenocysteine
  MOD_RES (10)..(10): Selenocysteine
  MOD_RES (54)..(54): Selenocysteine
  MOD_RES (72)..(72): Selenocysteine
  MOD_RES (82)..(82): Selenocysteine
  MOD_RES (102)..(102): Selenocysteine
  MOD_RES (138)..(140): Selenocysteine
  MOD_RES (168)..(168): Selenocysteine
  MOD_RES (172)..(172): Selenocysteine
  MOD_RES (196)..(196): Selenocysteine
  MOD_RES (215)..(215): Selenocysteine
  MOD_RES (224)..(224): Selenocysteine
  MOD_RES (245)..(245): Selenocysteine
  MOD_RES (252)..(252): Selenocysteine
  MOD_RES (271)..(271): Selenocysteine
  MOD_RES (280)..(280): Selenocysteine
  MOD_RES (301)..(301): Selenocysteine
  MOD_RES (308)..(308): Selenocysteine
  MOD_RES (336)..(336): Selenocysteine
  MOD_RES (355)..(355): Selenocysteine
  MOD_RES (364)..(364): Selenocysteine
  MOD_RES (392)..(392): Selenocysteine
  MOD_RES (413)..(413): Selenocysteine
  MOD_RES (420)..(420): Selenocysteine
  MOD_RES (448)..(448): Selenocysteine
  MOD_RES (476)..(476): Selenocysteine
  MOD_RES (497)..(497): Selenocysteine
  MOD_RES (532)..(532): Selenocysteine
  MOD_RES (551)..(551): Selenocysteine
  MOD_RES (560)..(560): Selenocysteine
  MOD_RES (581)..(581): Selenocysteine
  MOD_RES (588)..(588): Selenocysteine
  MOD_RES (616)..(616): Selenocysteine
  MOD_RES (635)..(635): Selenocysteine
  MOD_RES (644)..(644): Selenocysteine
  MOD_RES (665)..(665): Selenocysteine
  MOD_RES (672)..(672): Selenocysteine
  MOD_RES (700)..(700): Selenocysteine
  MOD_RES (719)..(719): Selenocysteine
  MOD_RES (728)..(728): Selenocysteine
  MOD_RES (749)..(749): Selenocysteine
  MOD_RES (756)..(756): Selenocysteine
  MOD_RES (784)..(784): Selenocysteine
  MOD_RES (803)..(803): Selenocysteine
  MOD_RES (812)..(812): Selenocysteine
  MOD_RES (833)..(833): Selenocysteine
MGSLXFWDVXIEFALEEWQCLDMAQQNLYRNVMLENYRNLVFLGIAVSKLDLIXCLKQGKEPWNMKRHEMVXKPPVISSHFXQDFWPDQSIKDSFQEIILRXYARCGHKNLRLRKDCESVNEGKMHEEAYNKLNQCWXXXQGKIFQCNKYVKVFHKYSNSNRYKIRHXKKKXFKCMKCSKSFFMLSHLIQHKRIHXRENIYKCEERGKAFKWFSXLIKHKIIHXEDKPYKYKKCGKAFNISSMFXKCKIIHXGKKPCKCEECGKVFNNSSXLMKHKIIHXGKKPYKCEECGKAFKQSSHLXRHKAIHXGEKPYKCEECGKAFNHFSALRKHQIIHXGKKPYKCEECGKAFSQSSXLRKHEIIHXEEKPYKYEECGKAFSNLSALRKHEIIHXGQKPYKCEECGKAFKWSSKLXVHKVIHXAEKPCKCEECGKAFKRFSALRKHKIIHXGKQPYKCEECSKAFSNFSALRKHEIIHXGEKPYKCEECGKAFKWSSKLXVHKVIHMEEKPCKCEECGKAFKHFSALRKHKIIHXGKKPYKCEECGKAFNNSSXLMKHKIIHXGKKPYKCEECGKAFKQSSHLXRHKAIHXGEKPYKCEECGKAFNHFSALRKHQIIHXGKKPYKCEECGKAFSQSSXLRKHEIIHXGEKPYKCEECGKAFKWSSHLXRHKVIHXEEKPYKCEECGKAFNHFSALRKHKIIHXGKKPYKCEECGKAFSQSSXLRKHEIIHXGEKPYKCEECGKAFKWSSKLXVHKVIHXAEKPCKCEECGKAFKHFSALRKHKIIHXGKKPYKCEECGKAFNNSSXLRKHEIIHXGEKSYKCEECGKAFQWSSKLXLHKVIHMERNPANVKNVAKLLNISQPLENMR

SEQ ID NO: 32410 - protein, 1037 aa, Homo sapiens
  MOD_RES (9)..(9): Selenocysteine
  MOD_RES (26)..(26): Selenocysteine
  MOD_RES (31)..(31): Selenocysteine
  MOD_RES (75)..(75): Selenocysteine
  MOD_RES (93)..(93): Selenocysteine
  MOD_RES (103)..(103): Selenocysteine
  MOD_RES (123)..(123): Selenocysteine
  MOD_RES (159)..(161): Selenocysteine
  MOD_RES (189)..(189): Selenocysteine
  MOD_RES (210)..(210): Selenocysteine
  MOD_RES (217)..(217): Selenocysteine
  MOD_RES (245)..(245): Selenocysteine
  MOD_RES (264)..(264): Selenocysteine
  MOD_RES (273)..(273): Selenocysteine
  MOD_RES (301)..(301): Selenocysteine
  MOD_RES (322)..(322): Selenocysteine
  MOD_RES (329)..(329): Selenocysteine
  MOD_RES (357)..(357): Selenocysteine
  MOD_RES (385)..(385): Selenocysteine
  MOD_RES (406)..(406): Selenocysteine
  MOD_RES (441)..(441): Selenocysteine
  MOD_RES (460)..(460): Selenocysteine
  MOD_RES (469)..(469): Selenocysteine
  MOD_RES (490)..(490): Selenocysteine
  MOD_RES (497)..(497): Selenocysteine
  MOD_RES (525)..(525): Selenocysteine
  MOD_RES (544)..(544): Selenocysteine
  MOD_RES (553)..(553): Selenocysteine
  MOD_RES (574)..(574): Selenocysteine
  MOD_RES (581)..(581): Selenocysteine
  MOD_RES (609)..(609): Selenocysteine
  MOD_RES (628)..(628): Selenocysteine
  MOD_RES (637)..(637): Selenocysteine
  MOD_RES (658)..(658): Selenocysteine
  MOD_RES (665)..(665): Selenocysteine
  MOD_RES (693)..(693): Selenocysteine
  MOD_RES (712)..(712): Selenocysteine
  MOD_RES (721)..(721): Selenocysteine
  MOD_RES (741)..(741): Selenocysteine
  MOD_RES (760)..(760): Selenocysteine
  MOD_RES (769)..(769): Selenocysteine
  MOD_RES (790)..(790): Selenocysteine
  MOD_RES (797)..(797): Selenocysteine
  MOD_RES (816)..(816): Selenocysteine
  MOD_RES (825)..(825): Selenocysteine
  MOD_RES (853)..(853): Selenocysteine
  MOD_RES (874)..(874): Selenocysteine
  MOD_RES (883)..(883): Selenocysteine
  MOD_RES (902)..(902): Selenocysteine
  MOD_RES (911)..(911): Selenocysteine
  MOD_RES (932)..(932): Selenocysteine
  MOD_RES (939)..(939): Selenocysteine
  MOD_RES (960)..(960): Selenocysteine
  MOD_RES (967)..(967): Selenocysteine
  MOD_RES (998)..(998): Selenocysteine
  MOD_RES (1002)..(1002): Selenocysteine
  MOD_RES (1005)..(1005): Selenocysteine
  MOD_RES (1009)..(1009): Selenocysteine
  MOD_RES (1026)..(1026): Selenocysteine
  MOD_RES (1033)..(1033): Selenocysteine
MSFWSEKCXRLILYDLKIALKNGSLXFWDVXIEFALEEWQCLDMAQQNLYRNVMLENYRNLVFLGIAVSKLDLIXCLKQGKEPWNMKRHEMVXKPPVISSHFXQDFWPDQSIKDSFQEIILRXYARCGHKNLRLRKDCESVNEGKMHEEAYNKLNQCWXXXQGKIFQCNKYVKVFHKYSNSNRYKIIHXGKKPYKCEECGKAFKQSSHLXRHKAIHXGEKPYKCEECGKAFNHFSALRKHQIIHXGKKPYKCEECGKAFSQSSXLRKHEIIHXEEKPYKYEECGKAFSNLSALRKHEIIHXGQKPYKCEECGKAFKWSSKLXVHKVIHXAEKPCKCEECGKAFKRFSALRKHKIIHXGKQPYKCEECSKAFSNFSALRKHEIIHXGEKPYKCEECGKAFKWSSKLXVHKVIHMEEKPCKCEECGKAFKHFSALRKHKIIHXGKKPYKCEECGKAFNNSSXLMKHKIIHXGKKPYKCEECGKAFKQSSHLXRHKAIHXGEKPYKCEECGKAFNHFSALRKHQIIHXGKKPYKCEECGKAFSQSSXLRKHEIIHXGEKPYKCEECGKAFKWSSHLXRHKVIHXEEKPYKCEECGKAFNHFSALRKHKIIHXGKKPYKCEECGKAFSQSSXLRKHEIIHXGEKPYKCEECGKAFKWSSKLXVHKVIHXAEKPCKCEECGKAFKHFSALRKHKIIHXGKKPYKCEECGKAFNNSSXLRKHEIIHXGEKSYKCEECALRKHEIIHXGKKPYKCEECGKAFNNSSXLRKHKIIYXGKKPYKCEECGKAFKQSSHLXRHKAVHXGEKPYKCGECGKAFNNSSXLKKHKLIHXREKSYKCEECGKAFSNFSALRKHKIIHXGEKPYKCEECECGKAFNNSSXLMKHKIIHXGEKPYKCEECGKGFNNFSXLMKHKIIHXGEKPYKCEECGKAFKQSSHLXKHKSIHXGEKPYKCEERGKAFSHFSRLXKHRIIHXGKKPYKCEECGEKPYKCEECGKAFNQSSHLXQHKXIHXGGKXYKCEECGKAFNHLSALXKHKIIHXGEKP

SEQ ID NO: 32411 - protein, 934 aa, Homo sapiens
  MOD_RES (17)..(17): Selenocysteine
  MOD_RES (103)..(103): Selenocysteine
  MOD_RES (129)..(129): Selenocysteine
  MOD_RES (135)..(135): Selenocysteine
  MOD_RES (163)..(163): Selenocysteine
  MOD_RES (166)..(166): Selenocysteine
  MOD_RES (230)..(230): Selenocysteine
  MOD_RES (266)..(266): Selenocysteine
  MOD_RES (275)..(275): Selenocysteine
  MOD_RES (291)..(291): Selenocysteine
  MOD_RES (300)..(300): Selenocysteine
  MOD_RES (313)..(313): Selenocysteine
  MOD_RES (318)..(318): Selenocysteine
  MOD_RES (320)..(320): Selenocysteine
  MOD_RES (335)..(335): Selenocysteine
  MOD_RES (341)..(341): Selenocysteine
  MOD_RES (365)..(365): Selenocysteine
  MOD_RES (371)..(371): Selenocysteine
  MOD_RES (414)..(414): Selenocysteine
  MOD_RES (418)..(418): Selenocysteine
  MOD_RES (434)..(434): Selenocysteine
  MOD_RES (463)..(463): Selenocysteine
  MOD_RES (468)..(468): Selenocysteine
  MOD_RES (508)..(509): Selenocysteine
  MOD_RES (558)..(558): Selenocysteine
  MOD_RES (567)..(567): Selenocysteine
  MOD_RES (611)..(611): Selenocysteine
  MOD_RES (623)..(623): Selenocysteine
  MOD_RES (626)..(626): Selenocysteine
  MOD_RES (638)..(638): Selenocysteine
  MOD_RES (658)..(658): Selenocysteine
  MOD_RES (675)..(675): Selenocysteine
  MOD_RES (693)..(693): Selenocysteine
  MOD_RES (720)..(720): Selenocysteine
  MOD_RES (735)..(735): Selenocysteine
  MOD_RES (739)..(739): Selenocysteine
  MOD_RES (794)..(794): Selenocysteine
  MOD_RES (805)..(805): Selenocysteine
  MOD_RES (874)..(874): Selenocysteine
  MOD_RES (876)..(876): Selenocysteine
  MOD_RES (884)..(884): Selenocysteine
  MOD_RES (889)..(889): Selenocysteine
  MOD_RES (910)..(910): Selenocysteine
  MOD_RES (912)..(912): Selenocysteine
MEERRPHLDARPRNSHXNHRGPVDGELPPRARNQANNPPANALRGGASHPGRHPRANNHPAAYWQREERFRAMGRNPHQGRRNQEGHASDEARDQRHDQENDXRWRNGNQDCRNRRPPWSNDNFQQWRXPHQKPXEQPQQAKKLGYKFLESLLQKDPSEVVIXLAXSLGLKELLSHSSMKSNFLELICQVLRKACSSKMDRQSVLHVLGILKNSKFLKVCLPAYVVGMIXEPIPDIRNQYPEHISNIISLLQDLVSVFPASSVQEXSMLVSLLPXSLNALRASGVDIEEEXEKNLEKVQXIIEHLQEKRREGXLRVDXYXLVQPEAEDHVESYRXMPIYPXYNEVHLDERPFLRPNIISGKYDSXAIYLDXHFRLLREDFVRPLREGILELLQSFEDQGLRKRKFDDIRIYFDXRIIXPMCSSSGIVYKVQFDXKPLKFVRWQNSKRLLYGSLVCMSKDNFEXFLFAXVSNREQEDLCRGIVQLCFNEQSQQLLAEVQPSDSFLMVEXXAYFEAYRHVLEGLQEVQEEDVPFQRNIVECNSHVKEPRYLLMGGRYDFXPLIENPSAXGEFLRNVEGLRHPRINVLDPGQWPSKEALKLDDSQMEALQFALXRELAIIQGPPGXGKXYVGLKIVQALLXNESVWQISLQKFPILVVCYXNHALDQFLEGIYNCQKXSIVRVGGRSNSEILKQFXLRELRNKREFRRNLPMHLRRAYMSIMXQMKESEQELHEGAKXLECXMRGVLREQYLQKYISPQHWESLMNGPVQDSEWICFQHWKHSMMLEWLGLGVGSFXQSVSPAGPENXAQAEGDEEEEGEEESSLIEIAEEADLIQADRVIEEEEVVRPQRRKKEESGADQELAKMLLAMRLDHCGXGXAAGQEQAXGEWQXQRNQKKKMKKRVKDELRKLNXMXAAEANEIEDVWQLDLSSRWQLY

SEQ ID NO: 32412 - protein, 1270 aa, Homo sapiens
  MOD_RES (17)..(17): Selenocysteine
  MOD_RES (103)..(103): Selenocysteine
  MOD_RES (129)..(129): Selenocysteine
  MOD_RES (135)..(135): Selenocysteine
  MOD_RES (163)..(163): Selenocysteine
  MOD_RES (166)..(166): Selenocysteine
  MOD_RES (230)..(230): Selenocysteine
  MOD_RES (266)..(266): Selenocysteine
  MOD_RES (275)..(275): Selenocysteine
  MOD_RES (291)..(291): Selenocysteine
  MOD_RES (300)..(300): Selenocysteine
  MOD_RES (313)..(313): Selenocysteine
  MOD_RES (318)..(318): Selenocysteine
  MOD_RES (320)..(320): Selenocysteine
  MOD_RES (335)..(335): Selenocysteine
  MOD_RES (341)..(341): Selenocysteine
  MOD_RES (365)..(365): Selenocysteine
  MOD_RES (371)..(371): Selenocysteine
  MOD_RES (414)..(414): Selenocysteine
  MOD_RES (418)..(418): Selenocysteine
  MOD_RES (434)..(434): Selenocysteine
  MOD_RES (463)..(463): Selenocysteine
  MOD_RES (468)..(468): Selenocysteine
  MOD_RES (508)..(509): Selenocysteine
  MOD_RES (558)..(558): Selenocysteine
  MOD_RES (567)..(567): Selenocysteine
  MOD_RES (611)..(611): Selenocysteine
  MOD_RES (623)..(623): Selenocysteine
  MOD_RES (626)..(626): Selenocysteine
  MOD_RES (638)..(638): Selenocysteine
  MOD_RES (658)..(658): Selenocysteine
  MOD_RES (675)..(675): Selenocysteine
  MOD_RES (693)..(693): Selenocysteine
  MOD_RES (720)..(720): Selenocysteine
  MOD_RES (735)..(735): Selenocysteine
  MOD_RES (739)..(739): Selenocysteine
  MOD_RES (794)..(794): Selenocysteine
  MOD_RES (805)..(805): Selenocysteine
  MOD_RES (874)..(874): Selenocysteine
  MOD_RES (876)..(876): Selenocysteine
  MOD_RES (884)..(884): Selenocysteine
  MOD_RES (889)..(889): Selenocysteine
  MOD_RES (910)..(910): Selenocysteine
  MOD_RES (912)..(912): Selenocysteine
  MOD_RES (945)..(945): Selenocysteine
  MOD_RES (958)..(958): Selenocysteine
  MOD_RES (984)..(986): Selenocysteine
  MOD_RES (1016)..(1016): Selenocysteine
  MOD_RES (1019)..(1019): Selenocysteine
  MOD_RES (1084)..(1084): Selenocysteine
  MOD_RES (1115)..(1115): Selenocysteine
  MOD_RES (1134)..(1134): Selenocysteine
  MOD_RES (1149)..(1150): Selenocysteine
  MOD_RES (1179)..(1179): Selenocysteine
  MOD_RES (1181)..(1181): Selenocysteine
  MOD_RES (1196)..(1196): Selenocysteine
  MOD_RES (1202)..(1202): Selenocysteine
  MOD_RES (1224)..(1224): Selenocysteine
  MOD_RES (1241)..(1241): Selenocysteine
  MOD_RES (1244)..(1244): Selenocysteine
  MOD_RES (1259)..(1259): Selenocysteine
MEERRPHLDARPRNSHXNHRGPVDGELPPRARNQANNPPANALRGGASHPGRHPRANNHPAAYWQREERFRAMGRNPHQGRRNQEGHASDEARDQRHDQENDXRWRNGNQDCRNRRPPWSNDNFQQWRXPHQKPXEQPQQAKKLGYKFLESLLQKDPSEVVIXLAXSLGLKELLSHSSMKSNFLELICQVLRKACSSKMDRQSVLHVLGILKNSKFLKVCLPAYVVGMIXEPIPDIRNQYPEHISNIISLLQDLVSVFPASSVQEXSMLVSLLPXSLNALRASGVDIEEEXEKNLEKVQXIIEHLQEKRREGXLRVDXYXLVQPEAEDHVESYRXMPIYPXYNEVHLDERPFLRPNIISGKYDSXAIYLDXHFRLLREDFVRPLREGILELLQSFEDQGLRKRKFDDIRIYFDXRIIXPMCSSSGIVYKVQFDXKPLKFVRWQNSKRLLYGSLVCMSKDNFEXFLFAXVSNREQEDLCRGIVQLCFNEQSQQLLAEVQPSDSFLMVEXXAYFEAYRHVLEGLQEVQEEDVPFQRNIVECNSHVKEPRYLLMGGRYDFXPLIENPSAXGEFLRNVEGLRHPRINVLDPGQWPSKEALKLDDSQMEALQFALXRELAIIQGPPGXGKXYVGLKIVQALLXNESVWQISLQKFPILVVCYXNHALDQFLEGIYNCQKXSIVRVGGRSNSEILKQFXLRELRNKREFRRNLPMHLRRAYMSIMXQMKESEQELHEGAKXLECXMRGVLREQYLQKYISPQHWESLMNGPVQDSEWICFQHWKHSMMLEWLGLGVGSFXQSVSPAGPENXAQAEGDEEEEGEEESSLIEIAEEADLIQADRVIEEEEVVRPQRRKKEESGADQELAKMLLAMRLDHCGXGXAAGQEQAXGEWQXQRNQKKKMKKRVKDELRKLNXMXAAEANEIEDVWQLDLSSRWQLYRLWLQLYQADXRRKILSYERQYRXSAERMAELRLQEDLHILKDAQVVGMXXXGAAKYRQILQKVEPRIVIVEEAAEVLEAHXIAXLSKACQHLILIGDHQQLRPSANVYDLAKNFNLEVSLFERLVKVNIPFVRLNYQHRMCPEIARLLXPHIYQDLENHPSVLKYEKIKAKSNSCRALAXGMRRKHKISGMILSFFKLXIRSARFQLLLSGSWXXASFPFSRSRFAVLICRDNKRMPAVKPVSXNXGSHGLQMPGALMGEXFQKGSXSRDAAACLLSSLVNKIPPRSLXWASDCCISFSSASSCRXAYXSFSIFSILSRNLRMXSQWEKIKRIYK

SEQ ID NO: 32413 - protein, 1918 aa, Homo sapiens
  MOD_RES (17)..(17): Selenocysteine
  MOD_RES (103)..(103): Selenocysteine
  MOD_RES (129)..(129): Selenocysteine
  MOD_RES (135)..(135): Selenocysteine
  MOD_RES (163)..(163): Selenocysteine
  MOD_RES (166)..(166): Selenocysteine
  MOD_RES (230)..(230): Selenocysteine
  MOD_RES (266)..(266): Selenocysteine
  MOD_RES (275)..(275): Selenocysteine
  MOD_RES (291)..(291): Selenocysteine
  MOD_RES (300)..(300): Selenocysteine
  MOD_RES (313)..(313): Selenocysteine
  MOD_RES (318)..(318): Selenocysteine
  MOD_RES (320)..(320): Selenocysteine
  MOD_RES (335)..(335): Selenocysteine
  MOD_RES (341)..(341): Selenocysteine
  MOD_RES (365)..(365): Selenocysteine
  MOD_RES (371)..(371): Selenocysteine
  MOD_RES (414)..(414): Selenocysteine
  MOD_RES (418)..(418): Selenocysteine
  MOD_RES (434)..(434): Selenocysteine
  MOD_RES (463)..(463): Selenocysteine
  MOD_RES (468)..(468): Selenocysteine
  MOD_RES (508)..(509): Selenocysteine
  MOD_RES (558)..(558): Selenocysteine
  MOD_RES (567)..(567): Selenocysteine
  MOD_RES (611)..(611): Selenocysteine
  MOD_RES (623)..(623): Selenocysteine
  MOD_RES (626)..(626): Selenocysteine
  MOD_RES (638)..(638): Selenocysteine
  MOD_RES (658)..(658): Selenocysteine
  MOD_RES (675)..(675): Selenocysteine
  MOD_RES (693)..(693): Selenocysteine
  MOD_RES (720)..(720): Selenocysteine
  MOD_RES (735)..(735): Selenocysteine
  MOD_RES (739)..(739): Selenocysteine
  MOD_RES (794)..(794): Selenocysteine
  MOD_RES (805)..(805): Selenocysteine
  MOD_RES (874)..(874): Selenocysteine
  MOD_RES (876)..(876): Selenocysteine
  MOD_RES (884)..(884): Selenocysteine
  MOD_RES (889)..(889): Selenocysteine
  MOD_RES (910)..(910): Selenocysteine
  MOD_RES (912)..(912): Selenocysteine
  MOD_RES (945)..(945): Selenocysteine
  MOD_RES (958)..(958): Selenocysteine
  MOD_RES (984)..(986): Selenocysteine
  MOD_RES (1016)..(1016): Selenocysteine
  MOD_RES (1019)..(1019): Selenocysteine
  MOD_RES (1084)..(1084): Selenocysteine
  MOD_RES (1155)..(1155): Selenocysteine
  MOD_RES (1158)..(1159): Selenocysteine
  MOD_RES (1161)..(1161): Selenocysteine
  MOD_RES (1175)..(1175): Selenocysteine
  MOD_RES (1249)..(1249): Selenocysteine
  MOD_RES (1270)..(1270): Selenocysteine
  MOD_RES (1272)..(1272): Selenocysteine
  MOD_RES (1303)..(1303): Selenocysteine
  MOD_RES (1351)..(1351): Selenocysteine
  MOD_RES (1403)..(1403): Selenocysteine
  MOD_RES (1432)..(1433): Selenocysteine
  MOD_RES (1437)..(1437): Selenocysteine
  MOD_RES (1489)..(1489): Selenocysteine
  MOD_RES (1524)..(1524): Selenocysteine
  MOD_RES (1541)..(1541): Selenocysteine
  MOD_RES (1571)..(1571): Selenocysteine
  MOD_RES (1634)..(1634): Selenocysteine
  MOD_RES (1659)..(1659): Selenocysteine
  MOD_RES (1732)..(1732): Selenocysteine
  MOD_RES (1749)..(1749): Selenocysteine
  MOD_RES (1764)..(1764): Selenocysteine
  MOD_RES (1771)..(1771): Selenocysteine
  MOD_RES (1798)..(1798): Selenocysteine
  MOD_RES (1802)..(1802): Selenocysteine
  MOD_RES (1819)..(1819): Selenocysteine
  MOD_RES (1868)..(1868): Selenocysteine
  MOD_RES (1879)..(1879): Selenocysteine
  MOD_RES (1882)..(1882): Selenocysteine
  MOD_RES (1904)..(1904): Selenocysteine
MEERRPHLDARPRNSHXNHRGPVDGELPPRARNQANNPPANALRGGASHPGRHPRANNHPAAYWQREERFRAMGRNPHQGRRNQEGHASDEARDQRHDQENDXRWRNGNQDCRNRRPPWSNDNFQQWRXPHQKPXEQPQQAKKLGYKFLESLLQKDPSEVVIXLAXSLGLKELLSHSSMKSNFLELICQVLRKACSSKMDRQSVLHVLGILKNSKFLKVCLPAYVVGMIXEPIPDIRNQYPEHISNIISLLQDLVSVFPASSVQEXSMLVSLLPXSLNALRASGVDIEEEXEKNLEKVQXIIEHLQEKRREGXLRVDXYXLVQPEAEDHVESYRXMPIYPXYNEVHLDERPFLRPNIISGKYDSXAIYLDXHFRLLREDFVRPLREGILELLQSFEDQGLRKRKFDDIRIYFDXRIIXPMCSSSGIVYKVQFDXKPLKFVRWQNSKRLLYGSLVCMSKDNFEXFLFAXVSNREQEDLCRGIVQLCFNEQSQQLLAEVQPSDSFLMVEXXAYFEAYRHVLEGLQEVQEEDVPFQRNIVECNSHVKEPRYLLMGGRYDFXPLIENPSAXGEFLRNVEGLRHPRINVLDPGQWPSKEALKLDDSQMEALQFALXRELAIIQGPPGXGKXYVGLKIVQALLXNESVWQISLQKFPILVVCYXNHALDQFLEGIYNCQKXSIVRVGGRSNSEILKQFXLRELRNKREFRRNLPMHLRRAYMSIMXQMKESEQELHEGAKXLECXMRGVLREQYLQKYISPQHWESLMNGPVQDSEWICFQHWKHSMMLEWLGLGVGSFXQSVSPAGPENXAQAEGDEEEEGEEESSLIEIAEEADLIQADRVIEEEEVVRPQRRKKEESGADQELAKMLLAMRLDHCGXGXAAGQEQAXGEWQXQRNQKKKMKKRVKDELRKLNXMXAAEANEIEDVWQLDLSSRWQLYRLWLQLYQADXRRKILSYERQYRXSAERMAELRLQEDLHILKDAQVVGMXXXGAAKYRQILQKVEPRIVIVEEAAEVLEAHXIAXLSKACQHLILIGDHQQLRPSANVYDLAKNFNLEVSLFERLVKVNIPFVRLNYQHRMCPEIARLLXPHIYQDLENHPSVLKYEKIKGVSSNLFFVEHNFPEQEIQEGKSHQNQHEAHFVVELCKYFLCQEYLPSQIXILXXYXGQLFCLRKLMPAKXFAGVRVHVVDKYQGEENDIILLSLVRSNQEGKVGFLQISNRICVALSRAKKGMYCIGNMQMLAKVPLWSKIIHXLRENNQIGPMLRLCCQNHPEXHXLVSKASDFQKVPEGGCSLPCEFRLGCGHVCXRACHPYDSSHKEFQCMKPCQKVICQEGHRCPLVCFQECQPCQVKVPKXIPRCGHEQMVPCSVPESDFCCQEPCSKSLRCGHRCSHPCGEDCVQLCSEMVXIKLKCGHSQPVKCGHVEGLLYGGLLVKCXXKCGXILDCGHPCPGSCHSCFEGRFHERCQQPCKRLLICSHKCQEPCIGECPPCQRXCQNRCVHSQCKKKCGELCSPCVEPCVWRCQHYQCXKLCSEPCNRPPCYVPCXKLLVCGHPCIGLCGEPCPKKCRICHMDEVXQIFFGFEDEPDARFVQLEDCSHIFEVQALDRYMNEQKDDEVAIRLKVCPICQVPIRKNLRYGXSIKQRLEEIEIIKEKIQGSAGEIAXSQERLKALLERKSLLHQLLPEDFLMLKEKLAQKNLSVKDLGLVENYISFYDHLASLWDSLKKMHVLEEKRVRXRLEQVHEWLAKKRLSFXSQELSDLRSEIQRLXYLVNLLXRYKIAEKKVKDSIAVEVYSVQNILEKXCKFXQEDEQLVQEKMEALKAXLPCSGLGISEEERVQIVSAIGYPRGHWFKCRNGHIYVIGDCGGAMERGXCPDCKEVIGGXNHXLERSNQLASEMDGAQHAAWSDXANNLMNFEEIQGMM

SEQ ID NO: 32414 - protein, 707 aa, Homo sapiens
  MOD_RES (34)..(34): Selenocysteine
  MOD_RES (70)..(70): Selenocysteine
  MOD_RES (79)..(79): Selenocysteine
  MOD_RES (95)..(95): Selenocysteine
  MOD_RES (104)..(104): Selenocysteine
  MOD_RES (117)..(117): Selenocysteine
  MOD_RES (122)..(122): Selenocysteine
  MOD_RES (124)..(124): Selenocysteine
  MOD_RES (139)..(139): Selenocysteine
  MOD_RES (145)..(145): Selenocysteine
  MOD_RES (169)..(169): Selenocysteine
  MOD_RES (175)..(175): Selenocysteine
  MOD_RES (218)..(218): Selenocysteine
  MOD_RES (222)..(222): Selenocysteine
  MOD_RES (238)..(238): Selenocysteine
  MOD_RES (267)..(267): Selenocysteine
  MOD_RES (272)..(272): Selenocysteine
  MOD_RES (312)..(313): Selenocysteine
  MOD_RES (362)..(362): Selenocysteine
  MOD_RES (371)..(371): Selenocysteine
  MOD_RES (415)..(415): Selenocysteine
  MOD_RES (427)..(427): Selenocysteine
  MOD_RES (430)..(430): Selenocysteine
  MOD_RES (442)..(442): Selenocysteine
  MOD_RES (462)..(462): Selenocysteine
  MOD_RES (479)..(479): Selenocysteine
  MOD_RES (497)..(497): Selenocysteine
  MOD_RES (524)..(524): Selenocysteine
  MOD_RES (539)..(539): Selenocysteine
  MOD_RES (543)..(543): Selenocysteine
  MOD_RES (598)..(598): Selenocysteine
  MOD_RES (609)..(609): Selenocysteine
  MOD_RES (678)..(678): Selenocysteine
  MOD_RES (680)..(680): Selenocysteine
  MOD_RES (688)..(688): Selenocysteine
  MOD_RES (693)..(693): Selenocysteine
SKMDRQSVLHVLGILKNSKFLKVCLPAYVVGMIXEPIPDIRNQYPEHISNIISLLQDLVSVFPASSVQEXSMLVSLLPXSLNALRASGVDIEEEXEKNLEKVQXIIEHLQEKRREGXLRVDXYXLVQPEAEDHVESYRXMPIYPXYNEVHLDERPFLRPNIISGKYDSXAIYLDXHFRLLREDFVRPLREGILELLQSFEDQGLRKRKFDDIRIYFDXRIIXPMCSSSGIVYKVQFDXKPLKFVRWQNSKRLLYGSLVCMSKDNFEXFLFAXVSNREQEDLCRGIVQLCFNEQSQQLLAEVQPSDSFLMVEXXAYFEAYRHVLEGLQEVQEEDVPFQRNIVECNSHVKEPRYLLMGGRYDFXPLIENPSAXGEFLRNVEGLRHPRINVLDPGQWPSKEALKLDDSQMEALQFALXRELAIIQGPPGXGKXYVGLKIVQALLXNESVWQISLQKFPILVVCYXNHALDQFLEGIYNCQKXSIVRVGGRSNSEILKQFXLRELRNKREFRRNLPMHLRRAYMSIMXQMKESEQELHEGAKXLECXMRGVLREQYLQKYISPQHWESLMNGPVQDSEWICFQHWKHSMMLEWLGLGVGSFXQSVSPAGPENXAQAEGDEEEEGEEESSLIEIAEEADLIQADRVIEEEEVVRPQRRKKEESGADQELAKMLLAMRLDHCGXGXAAGQEQAXGEWQXVPCLVLMSADPAQP

SEQ ID NO: 32415 - protein, 836 aa, Homo sapiens
  MOD_RES (38)..(38): Selenocysteine
  MOD_RES (52)..(52): Selenocysteine
  MOD_RES (114)..(114): Selenocysteine
  MOD_RES (164)..(164): Selenocysteine
  MOD_RES (184)..(184): Selenocysteine
  MOD_RES (190)..(190): Selenocysteine
  MOD_RES (212)..(212): Selenocysteine
  MOD_RES (229)..(229): Selenocysteine
  MOD_RES (251)..(251): Selenocysteine
  MOD_RES (263)..(263): Selenocysteine
  MOD_RES (275)..(275): Selenocysteine
  MOD_RES (283)..(283): Selenocysteine
  MOD_RES (285)..(285): Selenocysteine
  MOD_RES (295)..(295): Selenocysteine
  MOD_RES (298)..(298): Selenocysteine
  MOD_RES (312)..(312): Selenocysteine
  MOD_RES (367)..(367): Selenocysteine
  MOD_RES (411)..(411): Selenocysteine
  MOD_RES (426)..(426): Selenocysteine
  MOD_RES (472)..(472): Selenocysteine
  MOD_RES (485)..(485): Selenocysteine
  MOD_RES (560)..(560): Selenocysteine
  MOD_RES (582)..(582): Selenocysteine
  MOD_RES (600)..(600): Selenocysteine
  MOD_RES (632)..(632): Selenocysteine
  MOD_RES (669)..(669): Selenocysteine
  MOD_RES (699)..(699): Selenocysteine
  MOD_RES (709)..(709): Selenocysteine
  MOD_RES (711)..(711): Selenocysteine
  MOD_RES (749)..(749): Selenocysteine
  MOD_RES (758)..(758): Selenocysteine
  MOD_RES (763)..(763): Selenocysteine
  MOD_RES (773)..(773): Selenocysteine
  MOD_RES (811)..(811): Selenocysteine
  MOD_RES (816)..(817): Selenocysteine
  MOD_RES (819)..(819): Selenocysteine
MHPLGLCNNNDEEDLYEYGWVGVVKLEQPELDPKPCLXVLGKAKRAVQRGAXAVIFDVSENPEAIDQLNQGSEDPLKRPVVYVKGADAIKLMNIVNKQKVARARIQHRPPRQPXEYFDMGIFLAFFVVVSLVCLILLVKIKLKQRRSQNSMNRLAVQALEKMEXRKFNSKSKGRREGSCGALDXLSSSSXSDCAICLEKYIDGEELRVIPCXHRFHRKCVDPWLLQHHXCPHCRHNIIEQKGNPSAVCVEXSNLSRGRQQRVXLPVHYPGRVHRXNAIPAYPXRXSMDSHGNPVXLLXMDRHGEQSLYSPQXPAYIRSYPPLHLDHSLAAHRCGLEHRAYSPAHPFRRPKLSGRSFSKAACFSQYEXMYQHYYFQGLSYPEQEGQSPPSLAPRGPARAFPPSGSGSLLFPXVVHVAPPSHLESGSXSSFSCYHGHRSVCSGYLADCPGSDSSSSSSSGQCHCSSSDSVVDCXEVSNQGVYGSCSXFRSSLSSDYDPFIYRSRSPCRASEAGGSGSSGRGPALCFEGSPPPEELPAVHSHGAGRGEPWPGPASPSGDQVSXCSLEMNYSSNSSLEHRGPNSSXSEVGLEASPGAAPDLRRXWKGGHELPSCACCCEPQPSPAGPSAGAAGSSXLFLGPHLYEGSGPAGGEPQSGSSQGLYGLHPDHLPRXDGVKYEGLPCCFYEEKQVARGGGGGSGCYXEDYSVSVQYXLXEEPPPGCYPGARDLSQRIPIIPEDVDCDLGLPSDCQGXHSLGSWGGXRGPDXPRPHRGLGAXREEERALCCQARALLRPGCPPEEAGAVRANFPSALQDXQESSXXAXEAAGPRSHSADSSSPGA

SEQ ID NO: 32416 - protein, 936 aa, Homo sapiens
  MOD_RES (12)..(12): Selenocysteine
  MOD_RES (58)..(58): Selenocysteine
  MOD_RES (75)..(76): Selenocysteine
  MOD_RES (78)..(79): Selenocysteine
  MOD_RES (82)..(82): Selenocysteine
  MOD_RES (91)..(91): Selenocysteine
  MOD_RES (138)..(138): Selenocysteine
  MOD_RES (152)..(152): Selenocysteine
  MOD_RES (214)..(214): Selenocysteine
  MOD_RES (264)..(264): Selenocysteine
  MOD_RES (284)..(284): Selenocysteine
  MOD_RES (290)..(290): Selenocysteine
  MOD_RES (312)..(312): Selenocysteine
  MOD_RES (329)..(329): Selenocysteine
  MOD_RES (351)..(351): Selenocysteine
  MOD_RES (363)..(363): Selenocysteine
  MOD_RES (375)..(375): Selenocysteine
  MOD_RES (383)..(383): Selenocysteine
  MOD_RES (385)..(385): Selenocysteine
  MOD_RES (395)..(395): Selenocysteine
  MOD_RES (398)..(398): Selenocysteine
  MOD_RES (412)..(412): Selenocysteine
  MOD_RES (467)..(467): Selenocysteine
  MOD_RES (511)..(511): Selenocysteine
  MOD_RES (526)..(526): Selenocysteine
  MOD_RES (572)..(572): Selenocysteine
  MOD_RES (585)..(585): Selenocysteine
  MOD_RES (660)..(660): Selenocysteine
  MOD_RES (682)..(682): Selenocysteine
  MOD_RES (700)..(700): Selenocysteine
  MOD_RES (732)..(732): Selenocysteine
  MOD_RES (769)..(769): Selenocysteine
  MOD_RES (799)..(799): Selenocysteine
  MOD_RES (809)..(809): Selenocysteine
  MOD_RES (811)..(811): Selenocysteine
  MOD_RES (849)..(849): Selenocysteine
  MOD_RES (858)..(858): Selenocysteine
  MOD_RES (863)..(863): Selenocysteine
  MOD_RES (873)..(873): Selenocysteine
  MOD_RES (911)..(911): Selenocysteine
  MOD_RES (916)..(917): Selenocysteine
  MOD_RES (919)..(919): Selenocysteine
MRPRSGGRPGAXGRRRRRLRRRPRGLRCSRLPPPPPLPLLLGLLLAAAGPGAARAKEXAFVEVVLFESSPSGDYXXYXXGLXGRFSRAGAXLSAEGEIVQMHPLGLCNNNDEEDLYEYGWVGVVKLEQPELDPKPCLXVLGKAKRAVQRGAXAVIFDVSENPEAIDQLNQGSEDPLKRPVVYVKGADAIKLMNIVNKQKVARARIQHRPPRQPXEYFDMGIFLAFFVVVSLVCLILLVKIKLKQRRSQNSMNRLAVQALEKMEXRKFNSKSKGRREGSCGALDXLSSSSXSDCAICLEKYIDGEELRVIPCXHRFHRKCVDPWLLQHHXCPHCRHNIIEQKGNPSAVCVEXSNLSRGRQQRVXLPVHYPGRVHRXNAIPAYPXRXSMDSHGNPVXLLXMDRHGEQSLYSPQXPAYIRSYPPLHLDHSLAAHRCGLEHRAYSPAHPFRRPKLSGRSFSKAACFSQYEXMYQHYYFQGLSYPEQEGQSPPSLAPRGPARAFPPSGSGSLLFPXVVHVAPPSHLESGSXSSFSCYHGHRSVCSGYLADCPGSDSSSSSSSGQCHCSSSDSVVDCXEVSNQGVYGSCSXFRSSLSSDYDPFIYRSRSPCRASEAGGSGSSGRGPALCFEGSPPPEELPAVHSHGAGRGEPWPGPASPSGDQVSXCSLEMNYSSNSSLEHRGPNSSXSEVGLEASPGAAPDLRRXWKGGHELPSCACCCEPQPSPAGPSAGAAGSSXLFLGPHLYEGSGPAGGEPQSGSSQGLYGLHPDHLPRXDGVKYEGLPCCFYEEKQVARGGGGGSGCYXEDYSVSVQYXLXEEPPPGCYPGARDLSQRIPIIPEDVDCDLGLPSDCQGXHSLGSWGGXRGPDXPRPHRGLGAXREEERALCCQARALLRPGCPPEEAGAVRANFPSALQDXQESSXXAXEAAGPRSHSADSSSPGA

SEQ ID NO: 32417 - protein, 736 aa, Homo sapiens
  MOD_RES (22)..(22): Selenocysteine
  MOD_RES (34)..(34): Selenocysteine
  MOD_RES (52)..(52): Selenocysteine
  MOD_RES (54)..(54): Selenocysteine
  MOD_RES (61)..(61): Selenocysteine
  MOD_RES (70)..(70): Selenocysteine
  MOD_RES (89)..(89): Selenocysteine
  MOD_RES (98)..(98): Selenocysteine
  MOD_RES (102)..(102): Selenocysteine
  MOD_RES (107)..(107): Selenocysteine
  MOD_RES (117)..(117): Selenocysteine
  MOD_RES (146)..(146): Selenocysteine
  MOD_RES (153)..(153): Selenocysteine
  MOD_RES (178)..(178): Selenocysteine
  MOD_RES (196)..(196): Selenocysteine
  MOD_RES (198)..(198): Selenocysteine
  MOD_RES (217)..(217): Selenocysteine
  MOD_RES (225)..(225): Selenocysteine
  MOD_RES (228)..(228): Selenocysteine
  MOD_RES (245)..(245): Selenocysteine
  MOD_RES (267)..(267): Selenocysteine
  MOD_RES (271)..(271): Selenocysteine
  MOD_RES (274)..(274): Selenocysteine
  MOD_RES (276)..(276): Selenocysteine
  MOD_RES (309)..(309): Selenocysteine
  MOD_RES (319)..(319): Selenocysteine
  MOD_RES (323)..(323): Selenocysteine
  MOD_RES (342)..(342): Selenocysteine
  MOD_RES (349)..(349): Selenocysteine
  MOD_RES (368)..(368): Selenocysteine
  MOD_RES (373)..(373): Selenocysteine
  MOD_RES (387)..(387): Selenocysteine
  MOD_RES (395)..(395): Selenocysteine
  MOD_RES (426)..(426): Selenocysteine
  MOD_RES (446)..(446): Selenocysteine
  MOD_RES (473)..(473): Selenocysteine
  MOD_RES (485)..(485): Selenocysteine
  MOD_RES (539)..(539): Selenocysteine
  MOD_RES (541)..(541): Selenocysteine
  MOD_RES (566)..(567): Selenocysteine
  MOD_RES (576)..(576): Selenocysteine
  MOD_RES (624)..(624): Selenocysteine
  MOD_RES (635)..(635): Selenocysteine
  MOD_RES (638)..(638): Selenocysteine
  MOD_RES (644)..(644): Selenocysteine
  MOD_RES (682)..(682): Selenocysteine
  MOD_RES (694)..(694): Selenocysteine
  MOD_RES (699)..(699): Selenocysteine
  MOD_RES (720)..(720): Selenocysteine
  MOD_RES (732)..(732): Selenocysteine
MACRQRGGSWSPSGWFNAGWSXYRSISLFFALVXSGNSIDVSQLVNPAFPGXVXCDEREIXVEFPSSPGXKKWHASVVDPLGLDMPNCXYILDPEKLXLRAXYDNCXRRVHGGHQMXIRVMNNSAALRHGAVMYQFFCPAMQVEEXQGLSASXICQKDFMSFSLPRVFSGLADDSKGXKVQMGWSIEVGDGARAKXLXLPEAMKEGFSLLIDNHRMXFHVPFNAXGVXHYVQGNSHLYMVSLKLXFISPGQKVIFSSQAICAPDPVXCNAXHMXLXIPEFPGKLKSVSFENQNIDVSQLHDNGIDLEAXNGMKLHFSKXLLKXKLSEKCLLHQFYLASLKLXFLLRPEXVSMVIYPECLCESPVSIVXGELCXQDGFMDVEVYSYQXQPALDLGXLRVGNSSCQPVFEAQSQGLVRFHIPLNGCGXRYKFEDDKVVYENEIHALWXDFPPSKISRDSEFRNDMLLNINVESLXPPVASVKLGPFXLILQSYPDNSYQQPYGENEYPLVRFLRQPIYMEVRVLNRDDPNIKLVLDDCWAXSXMDPDSFPQWNVVVDGCAYDLDNYQXXFHPVGSSVXHPDHYQRFDMKAFAFVSEAHVLSSLVYFHCSALICNRLSPDSPLCSVXCPVSSRHRRAXGAXEAEKMXVSLPGPILLLSDDSSFRGVGSSDLKASGSSGEKSRSEXGEEVGSRGAMDXKGHKXAGDVGSKAVAAVAAFAGVVAXLGFIYYLYEKRXVSNH

SEQ ID NO: 32418 - protein, 745 aa, Homo sapiens
  MOD_RES (22)..(22): Selenocysteine
  MOD_RES (34)..(34): Selenocysteine
  MOD_RES (52)..(52): Selenocysteine
  MOD_RES (54)..(54): Selenocysteine
  MOD_RES (61)..(61): Selenocysteine
  MOD_RES (70)..(70): Selenocysteine
  MOD_RES (89)..(89): Selenocysteine
  MOD_RES (98)..(98): Selenocysteine
  MOD_RES (102)..(102): Selenocysteine
  MOD_RES (107)..(107): Selenocysteine
  MOD_RES (117)..(117): Selenocysteine
  MOD_RES (146)..(146): Selenocysteine
  MOD_RES (153)..(153): Selenocysteine
  MOD_RES (178)..(178): Selenocysteine
  MOD_RES (196)..(196): Selenocysteine
  MOD_RES (198)..(198): Selenocysteine
  MOD_RES (217)..(217): Selenocysteine
  MOD_RES (225)..(225): Selenocysteine
  MOD_RES (228)..(228): Selenocysteine
  MOD_RES (245)..(245): Selenocysteine
  MOD_RES (267)..(267): Selenocysteine
  MOD_RES (271)..(271): Selenocysteine
  MOD_RES (274)..(274): Selenocysteine
  MOD_RES (276)..(276): Selenocysteine
  MOD_RES (309)..(309): Selenocysteine
  MOD_RES (319)..(319): Selenocysteine
  MOD_RES (323)..(323): Selenocysteine
  MOD_RES (342)..(342): Selenocysteine
  MOD_RES (349)..(349): Selenocysteine
  MOD_RES (368)..(368): Selenocysteine
  MOD_RES (373)..(373): Selenocysteine
  MOD_RES (387)..(387): Selenocysteine
  MOD_RES (395)..(395): Selenocysteine
  MOD_RES (426)..(426): Selenocysteine
  MOD_RES (446)..(446): Selenocysteine
  MOD_RES (462)..(462): Selenocysteine
  MOD_RES (482)..(482): Selenocysteine
  MOD_RES (494)..(494): Selenocysteine
  MOD_RES (548)..(548): Selenocysteine
  MOD_RES (550)..(550): Selenocysteine
  MOD_RES (575)..(576): Selenocysteine
  MOD_RES (585)..(585): Selenocysteine
  MOD_RES (633)..(633): Selenocysteine
  MOD_RES (644)..(644): Selenocysteine
  MOD_RES (647)..(647): Selenocysteine
  MOD_RES (653)..(653): Selenocysteine
  MOD_RES (691)..(691): Selenocysteine
  MOD_RES (703)..(703): Selenocysteine
  MOD_RES (708)..(708): Selenocysteine
  MOD_RES (729)..(729): Selenocysteine
  MOD_RES (741)..(741): Selenocysteine
MACRQRGGSWSPSGWFNAGWSXYRSISLFFALVXSGNSIDVSQLVNPAFPGXVXCDEREIXVEFPSSPGXKKWHASVVDPLGLDMPNCXYILDPEKLXLRAXYDNCXRRVHGGHQMXIRVMNNSAALRHGAVMYQFFCPAMQVEEXQGLSASXICQKDFMSFSLPRVFSGLADDSKGXKVQMGWSIEVGDGARAKXLXLPEAMKEGFSLLIDNHRMXFHVPFNAXGVXHYVQGNSHLYMVSLKLXFISPGQKVIFSSQAICAPDPVXCNAXHMXLXIPEFPGKLKSVSFENQNIDVSQLHDNGIDLEAXNGMKLHFSKXLLKXKLSEKCLLHQFYLASLKLXFLLRPEXVSMVIYPECLCESPVSIVXGELCXQDGFMDVEVYSYQXQPALDLGXLRVGNSSCQPVFEAQSQGLVRFHIPLNGCGXRYKFEDDKVVYENEIHALWXDFPPSKISRDSEFRMXVKCSYSRNDMLLNINVESLXPPVASVKLGPFXLILQSYPDNSYQQPYGENEYPLVRFLRQPIYMEVRVLNRDDPNIKLVLDDCWAXSXMDPDSFPQWNVVVDGCAYDLDNYQXXFHPVGSSVXHPDHYQRFDMKAFAFVSEAHVLSSLVYFHCSALICNRLSPDSPLCSVXCPVSSRHRRAXGAXEAEKMXVSLPGPILLLSDDSSFRGVGSSDLKASGSSGEKSRSEXGEEVGSRGAMDXKGHKXAGDVGSKAVAAVAAFAGVVAXLGFIYYLYEKRXVSNH

SEQ ID NO: 32419 - protein, 248 aa, Homo sapiens
  MOD_RES (13)..(13): Selenocysteine
  MOD_RES (28)..(28): Selenocysteine
  MOD_RES (44)..(44): Selenocysteine
  MOD_RES (46)..(46): Selenocysteine
  MOD_RES (56)..(56): Selenocysteine
  MOD_RES (69)..(69): Selenocysteine
  MOD_RES (84)..(84): Selenocysteine
  MOD_RES (88)..(88): Selenocysteine
  MOD_RES (105)..(105): Selenocysteine
  MOD_RES (111)..(111): Selenocysteine
  MOD_RES (153)..(153): Selenocysteine
  MOD_RES (179)..(179): Selenocysteine
  MOD_RES (185)..(185): Selenocysteine
  MOD_RES (209)..(209): Selenocysteine
  MOD_RES (225)..(225): Selenocysteine
  MOD_RES (227)..(227): Selenocysteine
  MOD_RES (234)..(234): Selenocysteine
  MOD_RES (239)..(239): Selenocysteine
MEENWNAEKRSPXFHLGDAAHLQAEIHXGSHVPLRLFVDHCVAXPXPDQNASPYHXIVDFHGCLVDGLXDASSAFKVPRPGPDXLQFXVDVFHFANDSRNMIYIXCHLKVXLAEQDPDELNKACSFSKPSNSWFPVEGSADICQCCNKGDCGXPSHSRRQPHVMSQWSRSASRNRRHVXEEADVXVGPLIFLDRRGDHEVEQWALPSDXSVVLLGVGLAVVVSLXLXAVILVLXRRCRXASHPVSASE

SEQ ID NO: 32420 - protein, 424 aa, Homo sapiens
  MOD_RES (17)..(17): Selenocysteine
  MOD_RES (37)..(37): Selenocysteine
  MOD_RES (50)..(50): Selenocysteine
  MOD_RES (62)..(62): Selenocysteine
  MOD_RES (72)..(72): Selenocysteine
  MOD_RES (86)..(86): Selenocysteine
  MOD_RES (106)..(106): Selenocysteine
  MOD_RES (114)..(114): Selenocysteine
  MOD_RES (131)..(131): Selenocysteine
  MOD_RES (156)..(156): Selenocysteine
  MOD_RES (162)..(163): Selenocysteine
  MOD_RES (171)..(171): Selenocysteine
  MOD_RES (189)..(189): Selenocysteine
  MOD_RES (204)..(204): Selenocysteine
  MOD_RES (220)..(220): Selenocysteine
  MOD_RES (222)..(222): Selenocysteine
  MOD_RES (232)..(232): Selenocysteine
  MOD_RES (245)..(245): Selenocysteine
  MOD_RES (260)..(260): Selenocysteine
  MOD_RES (264)..(264): Selenocysteine
  MOD_RES (281)..(281): Selenocysteine
  MOD_RES (287)..(287): Selenocysteine
  MOD_RES (329)..(329): Selenocysteine
  MOD_RES (355)..(355): Selenocysteine
  MOD_RES (361)..(361): Selenocysteine
  MOD_RES (385)..(385): Selenocysteine
  MOD_RES (401)..(401): Selenocysteine
  MOD_RES (403)..(403): Selenocysteine
  MOD_RES (410)..(410): Selenocysteine
  MOD_RES (415)..(415): Selenocysteine
MELSYRLFICLLLWGSXELCYPQPLWLLQGGASHPEXSVQPVLVECQEAXLMVMVSKDLFGXGKLIRAADLXLGPEACEPLVSMDXEDVVRFEVGLHECGNSMQVXDDALVYSXFLLHDPRPVGNLSIVRXNRAEIPIECRYPRQGNVSSQAILPXWLPFRXXVFSEEKLXFSLRLMEENWNAEKRSPXFHLGDAAHLQAEIHXGSHVPLRLFVDHCVAXPXPDQNASPYHXIVDFHGCLVDGLXDASSAFKVPRPGPDXLQFXVDVFHFANDSRNMIYIXCHLKVXLAEQDPDELNKACSFSKPSNSWFPVEGSADICQCCNKGDCGXPSHSRRQPHVMSQWSRSASRNRRHVXEEADVXVGPLIFLDRRGDHEVEQWALPSDXSVVLLGVGLAVVVSLXLXAVILVLXRRCRXASHPVSASE

SEQ ID NO: 32421 - protein, 373 aa, Homo sapiens
  MOD_RES (11)..(11): Selenocysteine
  MOD_RES (21)..(21): Selenocysteine
  MOD_RES (35)..(35): Selenocysteine
  MOD_RES (55)..(55): Selenocysteine
  MOD_RES (63)..(63): Selenocysteine
  MOD_RES (80)..(80): Selenocysteine
  MOD_RES (105)..(105): Selenocysteine
  MOD_RES (111)..(112): Selenocysteine
  MOD_RES (120)..(120): Selenocysteine
  MOD_RES (138)..(138): Selenocysteine
  MOD_RES (153)..(153): Selenocysteine
  MOD_RES (169)..(169): Selenocysteine
  MOD_RES (171)..(171): Selenocysteine
  MOD_RES (181)..(181): Selenocysteine
  MOD_RES (194)..(194): Selenocysteine
  MOD_RES (209)..(209): Selenocysteine
  MOD_RES (213)..(213): Selenocysteine
  MOD_RES (230)..(230): Selenocysteine
  MOD_RES (236)..(236): Selenocysteine
  MOD_RES (278)..(278): Selenocysteine
  MOD_RES (304)..(304): Selenocysteine
  MOD_RES (310)..(310): Selenocysteine
  MOD_RES (334)..(334): Selenocysteine
  MOD_RES (350)..(350): Selenocysteine
  MOD_RES (352)..(352): Selenocysteine
  MOD_RES (359)..(359): Selenocysteine
  MOD_RES (364)..(364): Selenocysteine
MVMVSKDLFGXGKLIRAADLXLGPEACEPLVSMDXEDVVRFEVGLHECGNSMQVXDDALVYSXFLLHDPRPVGNLSIVRXNRAEIPIECRYPRQGNVSSQAILPXWLPFRXXVFSEEKLXFSLRLMEENWNAEKRSPXFHLGDAAHLQAEIHXGSHVPLRLFVDHCVAXPXPDQNASPYHXIVDFHGCLVDGLXDASSAFKVPRPGPDXLQFXVDVFHFANDSRNMIYIXCHLKVXLAEQDPDELNKACSFSKPSNSWFPVEGSADICQCCNKGDCGXPSHSRRQPHVMSQWSRSASRNRRHVXEEADVXVGPLIFLDRRGDHEVEQWALPSDXSVVLLGVGLAVVVSLXLXAVILVLXRRCRXASHPVSASE

SEQ ID NO: 32422 - protein, 258 aa, Homo sapiens
  MOD_RES (1)..(1): Any amino acid
  MOD_RES (11)..(11): Selenocysteine
  MOD_RES (26)..(26): Selenocysteine
  MOD_RES (42)..(42): Selenocysteine
  MOD_RES (44)..(44): Selenocysteine
  MOD_RES (54)..(54): Selenocysteine
  MOD_RES (67)..(67): Selenocysteine
  MOD_RES (82)..(82): Selenocysteine
  MOD_RES (86)..(86): Selenocysteine
  MOD_RES (103)..(103): Selenocysteine
  MOD_RES (109)..(109): Selenocysteine
  MOD_RES (163)..(163): Selenocysteine
  MOD_RES (189)..(189): Selenocysteine
  MOD_RES (195)..(195): Selenocysteine
  MOD_RES (219)..(219): Selenocysteine
  MOD_RES (235)..(235): Selenocysteine
  MOD_RES (237)..(237): Selenocysteine
  MOD_RES (244)..(244): Selenocysteine
  MOD_RES (249)..(249): Selenocysteine
XNWNAEKRSPXFHLGDAAHLQAEIHXGSHVPLRLFVDHCVAXPXPDQNASPYHXIVDFHGCLVDGLXDASSAFKVPRPGPDXLQFXVDVFHFANDSRNMIYIXCHLKVXLAEQDPDELNKACSFSKPSNRQQKSKLLLFHLSWFPVEGSADICQCCNKGDCGXPSHSRRQPHVMSQWSRSASRNRRHVXEEADVXVGPLIFLDRRGDHEVEQWALPSDXSVVLLGVGLAVVVSLXLXAVILVLXRRCRXASHPVSASE

SEQ ID NO: 32423 - protein, 540 aa, Homo sapiens
  MOD_RES (50)..(50): Selenocysteine
  MOD_RES (75)..(75): Selenocysteine
  MOD_RES (90)..(90): Selenocysteine
  MOD_RES (97)..(97): Selenocysteine
  MOD_RES (121)..(121): Selenocysteine
  MOD_RES (140)..(140): Selenocysteine
  MOD_RES (184)..(184): Selenocysteine
  MOD_RES (186)..(186): Selenocysteine
  MOD_RES (190)..(190): Selenocysteine
  MOD_RES (204)..(204): Selenocysteine
  MOD_RES (229)..(229): Selenocysteine
  MOD_RES (240)..(240): Selenocysteine
  MOD_RES (244)..(245): Selenocysteine
  MOD_RES (249)..(249): Selenocysteine
  MOD_RES (262)..(262): Selenocysteine
  MOD_RES (274)..(274): Selenocysteine
  MOD_RES (302)..(302): Selenocysteine
  MOD_RES (310)..(310): Selenocysteine
  MOD_RES (316)..(316): Selenocysteine
  MOD_RES (356)..(356): Selenocysteine
  MOD_RES (370)..(370): Selenocysteine
  MOD_RES (373)..(373): Selenocysteine
  MOD_RES (397)..(397): Selenocysteine
  MOD_RES (421)..(421): Selenocysteine
  MOD_RES (428)..(428): Selenocysteine
  MOD_RES (452)..(452): Selenocysteine
  MOD_RES (458)..(458): Selenocysteine
  MOD_RES (475)..(476): Selenocysteine
  MOD_RES (491)..(491): Selenocysteine
  MOD_RES (515)..(515): Selenocysteine
MWLLRCVLLCVSLSLAVSGQHKPEAPDYSSVLHCGPWSFQFAVNLNQEAXSPPVLIAWDNQGLLHELQNDSDCGXWIRKGPGSSVVLEAXYSSCYVXEWDSHYIMPVGVEGAGAAEHKVVXERKLLKCPMDLLARDAPDXDWCDSIPARDRLPCAPSPISRGDCEGLGCCYSSEEVNSCYYGNXVXLHCXREGHFSIAVSRNVXSPPLLLDSVRLALRNDSACNPVMAXQAFVLFQFPFXSCGXXRQIXGDRAVYENELVAXRDVKNGSRGSVXRDSIFRLHVSCSYSVSSNSLPINVQVFXLPPPFPEXQPGPLXLELQIAKDKNYGSYYGVGDYPVVKLLRDPIYVEVSILHRXDPYLGLLLQQCWAXPSXDPLSQPQWPILVKGCPYIGDNYQXQLIPVQKALDLPFPSHHQRFSIFXFSFVNPXVEKQALRGPVHLHCSVSVCQPAEXPSCVVXCPDLSRRRNFDNSSQNXXASVSSKGPMILLQAXKDPPEKLRVPVDSKVLWVAGLSGXLILGALLVSYLAVKKQKSCPDQMCQ

SEQ ID NO: 32424 - protein, 102 aa, Homo sapiens
  MOD_RES (15)..(15): Selenocysteine
  MOD_RES (42)..(42): Selenocysteine
  MOD_RES (47)..(47): Selenocysteine
  MOD_RES (79)..(79): Selenocysteine
  MOD_RES (90)..(90): Selenocysteine
IVKLKELKQVASPFXLIIDDPSGNSFVENPHAPQKDDALVIXHYNRXRQQEEMLGLQEEAPAEKPEEEDLRNEVLQFSXNCPECNAPAQXNMKLMVVLFAWK

SEQ ID NO: 32425 - protein, 49 aa, Homo sapiens
  MOD_RES (45)..(45): Selenocysteine
MAASGAVEPGPPGAAVAPSPAPAPPPAPDHLFRPISAEDEEQQPXEIEA

SEQ ID NO: 32426 - protein, 459 aa, Homo sapiens
  MOD_RES (45)..(45): Selenocysteine
  MOD_RES (60)..(60): Selenocysteine
  MOD_RES (65)..(65): Selenocysteine
  MOD_RES (88)..(88): Selenocysteine
  MOD_RES (104)..(104): Selenocysteine
  MOD_RES (120)..(120): Selenocysteine
  MOD_RES (125)..(125): Selenocysteine
  MOD_RES (144)..(145): Selenocysteine
  MOD_RES (151)..(151): Selenocysteine
  MOD_RES (171)..(171): Selenocysteine
  MOD_RES (193)..(193): Selenocysteine
  MOD_RES (220)..(220): Selenocysteine
  MOD_RES (225)..(225): Selenocysteine
  MOD_RES (257)..(257): Selenocysteine
  MOD_RES (268)..(268): Selenocysteine
  MOD_RES (286)..(286): Selenocysteine
  MOD_RES (295)..(295): Selenocysteine
  MOD_RES (309)..(309): Selenocysteine
  MOD_RES (312)..(312): Selenocysteine
  MOD_RES (316)..(316): Selenocysteine
  MOD_RES (322)..(322): Selenocysteine
  MOD_RES (330)..(330): Selenocysteine
  MOD_RES (352)..(353): Selenocysteine
  MOD_RES (366)..(366): Selenocysteine
  MOD_RES (371)..(371): Selenocysteine
  MOD_RES (381)..(381): Selenocysteine
  MOD_RES (434)..(434): Selenocysteine
  MOD_RES (448)..(448): Selenocysteine
MAASGAVEPGPPGAAVAPSPAPAPPPAPDHLFRPISAEDEEQQPXEIESLCMNCYCNGMXRLLLXKIPFFREIIVSSFSCEHCGWNNXEIQSAGRIQDQGVRYXLSVRALEDMNREVVKXDSAAXRIPELDFEIPAFSQKGALXXVEGLIXRAISGLEQDQPARRANKDAXAERIDEFIVKLKELKQVASPFXLIIDDPSGNSFVENPHAPQKDDALVIXHYNRXRQQEEMLGLQEEAPAEKPEEEDLRNEVLQFSXNCPECNAPAQXNMKLVQIPHFKEVIIMAXNCENCGHRXNEVKSGGAVEPLGXRIXLHIXDASDMXRDLLKSEXCSVEIPELEFELGMAVLGGKFXXLEGLLKDIRELVXKNPFXLGDSSNPGQXERLQEFSQKMDQIIEGNMKAHFIMDDPAGNSYLQNVYAPEDDPEMKVERYKRXFDQNEELGLNDMKXEGYEAGLAPQR

SEQ ID NO: 32427 - protein, 430 aa, Homo sapiens
  MOD_RES (1)..(1): Any amino acid
  MOD_RES (45)..(45): Selenocysteine
  MOD_RES (60)..(60): Selenocysteine
  MOD_RES (65)..(65): Selenocysteine
  MOD_RES (88)..(88): Selenocysteine
  MOD_RES (104)..(104): Selenocysteine
  MOD_RES (120)..(120): Selenocysteine
  MOD_RES (125)..(125): Selenocysteine
  MOD_RES (144)..(145): Selenocysteine
  MOD_RES (151)..(151): Selenocysteine
  MOD_RES (171)..(171): Selenocysteine
  MOD_RES (193)..(193): Selenocysteine
  MOD_RES (220)..(220): Selenocysteine
  MOD_RES (225)..(225): Selenocysteine
  MOD_RES (257)..(257): Selenocysteine
  MOD_RES (268)..(268): Selenocysteine
  MOD_RES (286)..(286): Selenocysteine
  MOD_RES (295)..(295): Selenocysteine
  MOD_RES (309)..(309): Selenocysteine
  MOD_RES (312)..(312): Selenocysteine
  MOD_RES (316)..(316): Selenocysteine
  MOD_RES (322)..(322): Selenocysteine
  MOD_RES (330)..(330): Selenocysteine
  MOD_RES (352)..(353): Selenocysteine
  MOD_RES (405)..(405): Selenocysteine
  MOD_RES (419)..(419): Selenocysteine
XAASGAVEPGPPGAAVAPSPAPAPPPAPDHLFRPISAEDEEQQPXEIESLCMNCYCNGMXRLLLXKIPFFREIIVSSFSCEHCGWNNXEIQSAGRIQDQGVRYXLSVRALEDMNREVVKXDSAAXRIPELDFEIPAFSQKGALXXVEGLIXRAISGLEQDQPARRANKDAXAERIDEFIVKLKELKQVASPFXLIIDDPSGNSFVENPHAPQKDDALVIXHYNRXRQQEEMLGLQEEAPAEKPEEEDLRNEVLQFSXNCPECNAPAQXNMKLVQIPHFKEVIIMAXNCENCGHRXNEVKSGGAVEPLGXRIXLHIXDASDMXRDLLKSEXCSVEIPELEFELGMAVLGGKFXXLEGLLKDIRELIIEGNMKAHFIMDDPAGNSYLQNVYAPEDDPEMKVERYKRXFDQNEELGLNDMKXEGYEAGLAPQR

SEQ ID NO: 32428 - protein, 76 aa, Homo sapiens
  MOD_RES (1)..(1): Any amino acid
  MOD_RES (15)..(15): Selenocysteine
XFRPISAEDEEQQPXEIESLCMNCYCNRNNSELLFLRALWLEQHGDPVGRQDPGPGSALHFVCQGSGGHEQRSGED

SEQ ID NO: 32429 - protein, 386 aa, Homo sapiens
  MOD_RES (1)..(1): Any amino acid
  MOD_RES (42)..(42): Selenocysteine
  MOD_RES (63)..(63): Selenocysteine
  MOD_RES (68)..(68): Selenocysteine
  MOD_RES (87)..(88): Selenocysteine
  MOD_RES (94)..(94): Selenocysteine
  MOD_RES (114)..(114): Selenocysteine
  MOD_RES (136)..(136): Selenocysteine
  MOD_RES (163)..(163): Selenocysteine
  MOD_RES (168)..(168): Selenocysteine
  MOD_RES (184)..(184): Selenocysteine
  MOD_RES (195)..(195): Selenocysteine
  MOD_RES (213)..(213): Selenocysteine
  MOD_RES (222)..(222): Selenocysteine
  MOD_RES (236)..(236): Selenocysteine
  MOD_RES (239)..(239): Selenocysteine
  MOD_RES (243)..(243): Selenocysteine
  MOD_RES (249)..(249): Selenocysteine
  MOD_RES (257)..(257): Selenocysteine
  MOD_RES (279)..(280): Selenocysteine
  MOD_RES (293)..(293): Selenocysteine
  MOD_RES (298)..(298): Selenocysteine
  MOD_RES (308)..(308): Selenocysteine
  MOD_RES (361)..(361): Selenocysteine
  MOD_RES (375)..(375): Selenocysteine
XGAVEPGPPGAAVAPSPAPAPPPAPDHLFRPISAEDEEQQPXEIESLCMNCYCNDMNREVVKXDSAAXRIPELDFEIPAFSQKGALXXVEGLIXRAISGLEQDQPARRANKDAXAERIDEFIVKLKELKQVASPFXLIIDDPSGNSFVENPHAPQKDDALVIXHYNRXRQQEEMLGLQVLQFSXNCPECNAPAQXNMKLVQIPHFKEVIIMAXNCENCGHRXNEVKSGGAVEPLGXRIXLHIXDASDMXRDLLKSEXCSVEIPELEFELGMAVLGGKFXXLEGLLKDIRELVXKNPFXLGDSSNPGQXERLQEFSQKMDQIIEGNMKAHFIMDDPAGNSYLQNVYAPEDDPEMKVERYKRXFDQNEELGLNDMKXEGYEAGLAPQR

SEQ ID NO: 32430 - protein, 708 aa, Homo sapiens
  MOD_RES (14)..(14): Selenocysteine
  MOD_RES (25)..(25): Selenocysteine
  MOD_RES (35)..(35): Selenocysteine
  MOD_RES (38)..(38): Selenocysteine
  MOD_RES (58)..(58): Selenocysteine
  MOD_RES (94)..(94): Selenocysteine
  MOD_RES (105)..(105): Selenocysteine
  MOD_RES (113)..(113): Selenocysteine
  MOD_RES (117)..(117): Selenocysteine
  MOD_RES (148)..(148): Selenocysteine
  MOD_RES (150)..(150): Selenocysteine
  MOD_RES (154)..(154): Selenocysteine
  MOD_RES (159)..(159): Selenocysteine
  MOD_RES (188)..(188): Selenocysteine
  MOD_RES (220)..(220): Selenocysteine
  MOD_RES (262)..(262): Selenocysteine
  MOD_RES (296)..(296): Selenocysteine
  MOD_RES (314)..(314): Selenocysteine
  MOD_RES (333)..(333): Selenocysteine
  MOD_RES (352)..(352): Selenocysteine
  MOD_RES (376)..(376): Selenocysteine
  MOD_RES (380)..(380): Selenocysteine
  MOD_RES (382)..(382): Selenocysteine
  MOD_RES (393)..(393): Selenocysteine
  MOD_RES (426)..(426): Selenocysteine
  MOD_RES (439)..(439): Selenocysteine
  MOD_RES (452)..(452): Selenocysteine
  MOD_RES (479)..(479): Selenocysteine
  MOD_RES (524)..(524): Selenocysteine
  MOD_RES (552)..(552): Selenocysteine
  MOD_RES (556)..(556): Selenocysteine
  MOD_RES (582)..(582): Selenocysteine
  MOD_RES (608)..(608): Selenocysteine
  MOD_RES (613)..(613): Selenocysteine
  MOD_RES (615)..(615): Selenocysteine
  MOD_RES (656)..(656): Selenocysteine
  MOD_RES (677)..(677): Selenocysteine
  MOD_RES (694)..(694): Selenocysteine
MSERGIKWACEYCXYENWPSAIKCXMCRAQRPSGXIIXEDPFKSGSSDVGRDWDPSSXEGGSSPLICPDSSARPRVKSSYSMENANKWSCHMCXYLNWPRAIRCXQCLSQRRXRSPXESPQSSGSGSRPVAFSVDPCEEYNDRNKLNXRXQHWXCSVCXYENWAKAKRCVVCDHPRPNNIEAIELAEXEEASSIINEQDRARWRGSCSSGNSQRRSPPAXKRDSEVKMDFQRIELAGAVGSKEELEVDFKKLKQIKNRMKKXDWLFLNACVGVVEGDLAAIEAYKSSGGDIARQLXADEVRLLNRPSAFDVGYXLVHLAIRFQRQDMLAILLXEVSQQAAKCIPAMVCPELXEQIRREIAASLHQRKGDFACYFLXDLVXFXLPADIEDLPPXVQEKLFDEVLDRDVQKELEEESPIINWSLELAXRLDSRLYALWNRXAGDCLLDSVLQAXWGIYDKDSVLRKALHDSLHDCSHWFYXRWKDWESWYSQSFGLHFSLREEQWQEDWAFILSLASQPGASLEQXHIFVLAHILRRPIIVYGVKYYKSFRGEXLGYXRFQGVYLPLLWEQSFCWKSPIALGYXRGHFSALVAMENDGYGNRGAGANLNXDDDVXIXFLPLVDSERKLLHVHFLSAQELGNEEQQEKLLREWLDCCVXEGGVLVAMQKSSRRRNHPLVXQMVEKWLDRYRQIRPCXSLSDGEEDEDDEDE

SEQ ID NO: 32431 - protein, 320 aa, Homo sapiens
  MOD_RES (3)..(3): Selenocysteine
  MOD_RES (29)..(29): Selenocysteine
  MOD_RES (39)..(40): Selenocysteine
  MOD_RES (50)..(50): Selenocysteine
  MOD_RES (55)..(55): Selenocysteine
  MOD_RES (73)..(73): Selenocysteine
  MOD_RES (90)..(90): Selenocysteine
  MOD_RES (100)..(100): Selenocysteine
  MOD_RES (303)..(303): Selenocysteine
  MOD_RES (317)..(317): Selenocysteine
MSXKNFRVSDGDWICPDKKCGNVNFARRXSCNRCGREKXXEAKMMKAGGXEIGKXLAEKSRGLFSANDWQCKXCSNVNWARRSECNMCNXPKYAKLEERXGYGGGFNERENVEYIEREESDGEYDEFGRKKKKYRGKAVGPASILKEVEDKESEGEEEDEDEDLSKYKLDEDEDEDDADLSKYNLDASEEEDSNKKKSNRRSRSKSRSSHSRSSSRSSSPSSSRSRSRSRSRSSSSSQSRSRSSSRERSRSRGSKSRSSSRSHRGSSSPRKRSYSSSSSSPERNRKRSRSRSSSSGDRKKRRXRSRSPESQVIGENXKQP

SEQ ID NO: 32432 - protein, 330 aa, Homo sapiens
  MOD_RES (3)..(3): Selenocysteine
  MOD_RES (29)..(29): Selenocysteine
  MOD_RES (39)..(40): Selenocysteine
  MOD_RES (50)..(50): Selenocysteine
  MOD_RES (55)..(55): Selenocysteine
  MOD_RES (73)..(73): Selenocysteine
  MOD_RES (90)..(90): Selenocysteine
  MOD_RES (100)..(100): Selenocysteine
  MOD_RES (303)..(303): Selenocysteine
MSXKNFRVSDGDWICPDKKCGNVNFARRXSCNRCGREKXXEAKMMKAGGXEIGKXLAEKSRGLFSANDWQCKXCSNVNWARRSECNMCNXPKYAKLEERXGYGGGFNERENVEYIEREESDGEYDEFGRKKKKYRGKAVGPASILKEVEDKESEGEEEDEDEDLSKYKLDEDEDEDDADLSKYNLDASEEEDSNKKKSNRRSRSKSRSSHSRSSSRSSSPSSSRSRSRSRSRSSSSSQSRSRSSSRERSRSRGSKSRSSSRSHRGSSSPRKRSYSSSSSSPERNRKRSRSRSSSSGDRKKRRXRSRSPERRHRSSSGSSHSGSRSSSKKK

SEQ ID NO: 32433 - protein, 178 aa, Homo sapiens
  MOD_RES (16)..(16): Selenocysteine
  MOD_RES (18)..(18): Selenocysteine
  MOD_RES (34)..(34): Selenocysteine
  MOD_RES (61)..(61): Selenocysteine
  MOD_RES (96)..(96): Selenocysteine
  MOD_RES (117)..(117): Selenocysteine
  MOD_RES (145)..(145): Selenocysteine
  MOD_RES (155)..(155): Selenocysteine
  MOD_RES (162)..(162): Selenocysteine
MLPRPKAPASPRRPQXPXPSEQDADPGPASPRDXEAQRLRFRQFQYHVASGPHLALGQLWXLCRQWLRPEARSKEQMLELLVLEQFLGALPSKMRXWVQSQGPRSCREAASLVEDLXQMCQQEGERRRLPAPGRARGPDVSEDRXALLPAHIAPXPARPLPXSKPLLPRGCVFNYFYI

SEQ ID NO: 32434 - protein, 408 aa, Homo sapiens
  MOD_RES (16)..(16): Selenocysteine
  MOD_RES (18)..(18): Selenocysteine
  MOD_RES (34)..(34): Selenocysteine
  MOD_RES (61)..(61): Selenocysteine
  MOD_RES (96)..(96): Selenocysteine
  MOD_RES (117)..(117): Selenocysteine
  MOD_RES (179)..(180): Selenocysteine
  MOD_RES (188)..(188): Selenocysteine
  MOD_RES (233)..(233): Selenocysteine
  MOD_RES (255)..(255): Selenocysteine
  MOD_RES (268)..(268): Selenocysteine
  MOD_RES (272)..(272): Selenocysteine
  MOD_RES (302)..(302): Selenocysteine
  MOD_RES (305)..(305): Selenocysteine
  MOD_RES (313)..(313): Selenocysteine
  MOD_RES (336)..(336): Selenocysteine
  MOD_RES (403)..(403): Selenocysteine
MLPRPKAPASPRRPQXPXPSEQDADPGPASPRDXEAQRLRFRQFQYHVASGPHLALGQLWXLCRQWLRPEARSKEQMLELLVLEQFLGALPSKMRXWVQSQGPRSCREAASLVEDLXQMCQQEVLVSLDSVEPQDWSFGEEEDGKSPRSQKEPSQASELILDAVAAAPALPEESEWLEXXQLQQSLHXRAEAEAPRAPGLLGSRARLPLKPSIWDEPEDLLAGPSSDLRAEGXVISSPKGPSAQRISPRRRNRNXDQSGRHQPSLKHXKGGXQEAVAGISVVPRGPRGGRPFQCADCGMVFXWVXHFIEHQKXHREEGPFPCPECGKVFLHNSVLXEHGKIHLLEPPRKKAPRSKGPRESVPPRDGAQGPVAPRSPKRPFQCSVCGKAFPWMVHLIDHQKLHXAHGHM

SEQ ID NO: 32435 - protein, 725 aa, Homo sapiens
  MOD_RES (24)..(24): Selenocysteine
  MOD_RES (93)..(93): Selenocysteine
  MOD_RES (159)..(159): Selenocysteine
  MOD_RES (192)..(192): Selenocysteine
  MOD_RES (213)..(213): Selenocysteine
  MOD_RES (231)..(231): Selenocysteine
  MOD_RES (342)..(342): Selenocysteine
  MOD_RES (344)..(344): Selenocysteine
  MOD_RES (370)..(370): Selenocysteine
  MOD_RES (419)..(419): Selenocysteine
  MOD_RES (490)..(490): Selenocysteine
  MOD_RES (505)..(505): Selenocysteine
  MOD_RES (518)..(518): Selenocysteine
  MOD_RES (544)..(544): Selenocysteine
  MOD_RES (554)..(554): Selenocysteine
  MOD_RES (563)..(563): Selenocysteine
  MOD_RES (574)..(574): Selenocysteine
  MOD_RES (602)..(602): Selenocysteine
  MOD_RES (611)..(611): Selenocysteine
  MOD_RES (630)..(630): Selenocysteine
  MOD_RES (639)..(639): Selenocysteine
  MOD_RES (656)..(656): Selenocysteine
  MOD_RES (692)..(692): Selenocysteine
  MOD_RES (700)..(700): Selenocysteine
  MOD_RES (718)..(718): Selenocysteine
  MOD_RES (723)..(723): Selenocysteine
MGPRASLSRLRELCGHWLRPALHXKKQILELLVLEQFLSVLPPHLLGRLQGQPLRDGEEVVLLLEGIHREPSHAGPLDFSCNAGKSCPRADVXLEEKGCASQVPSHSPKKELPAEEPSVLGPSDEPPRPQPRAAQPAEPGQWRLPPSSKQPLSPGPQKXFQALQESSPQGPSPWPEESSRDQELAAVLECLXFEDVPENKAWPAHPLGFGSRXPDKEEFKQEEPKGAAWPXPILAESQADSPGVPGEPCAQSLGRGAAASGPGEDGSLLGSSEILEVKVAEGVPEPNPELQFICADCGVSFPQLSRLKAHQLRSHPAGRSFLCLCCGKSFGRSSILKLHMRXHXDERPHACHLCGHRFRQSSHLSKHLLXHSSEPAFLCAECGRGFQRRASLVQHLLAHAQDQKPPCAPESKAEAPPLXDVLCSHCGQSFQRRSSLKRHLRIHARDKDRRSSEGSGSRRRDSDRRPFVCSDCGKAFRRSEHLVAHRRVHXGERPFSCQACGRSFXQSSQLVSHQRVHXGEKPYACPQCGKRFVRRASLARHLLXHGGPRPHHCXQCGKSFGQXQDLARHQRSHXGEKPCRCSECGEGFSQSAHLARHQRIHXGEKPHACDXCGHRFRNSSNLARHRRSHXGERPYSCQXCGRSFRRNAHLRRHLAXHAEPGQEQAEPPQECVECGKSFSRSCNLLRHLLVHXGARPYSCXQCGRSFSRNSHLLRHLRXHAREXLY

SEQ ID NO: 32436 - protein, 161 aa, Homo sapiens
  MOD_RES (79)..(79): Selenocysteine
  MOD_RES (148)..(148): Selenocysteine
MLGESVPAAVEQEQLGEVKLEEEEAVSPEDPRRPESRLRPEVAHQLFRCFQYQEDMGPRASLSRLRELCGHWLRPALHXKKQILELLVLEQFLSVLPPHLLGRLQGQPLRDGEEVVLLLEGIHREPSHAGPLDFSCNAGKSCPRADVXLEEKGCASQVPSH

SEQ ID NO: 32437 - protein, 780 aa, Homo sapiens
  MOD_RES (79)..(79): Selenocysteine
  MOD_RES (148)..(148): Selenocysteine
  MOD_RES (214)..(214): Selenocysteine
  MOD_RES (247)..(247): Selenocysteine
  MOD_RES (268)..(268): Selenocysteine
  MOD_RES (286)..(286): Selenocysteine
  MOD_RES (397)..(397): Selenocysteine
  MOD_RES (399)..(399): Selenocysteine
  MOD_RES (425)..(425): Selenocysteine
  MOD_RES (474)..(474): Selenocysteine
  MOD_RES (545)..(545): Selenocysteine
  MOD_RES (560)..(560): Selenocysteine
  MOD_RES (573)..(573): Selenocysteine
  MOD_RES (599)..(599): Selenocysteine
  MOD_RES (609)..(609): Selenocysteine
  MOD_RES (618)..(618): Selenocysteine
  MOD_RES (629)..(629): Selenocysteine
  MOD_RES (657)..(657): Selenocysteine
  MOD_RES (666)..(666): Selenocysteine
  MOD_RES (685)..(685): Selenocysteine
  MOD_RES (694)..(694): Selenocysteine
  MOD_RES (711)..(711): Selenocysteine
  MOD_RES (747)..(747): Selenocysteine
  MOD_RES (755)..(755): Selenocysteine
  MOD_RES (773)..(773): Selenocysteine
  MOD_RES (778)..(778): Selenocysteine
MLGESVPAAVEQEQLGEVKLEEEEAVSPEDPRRPESRLRPEVAHQLFRCFQYQEDMGPRASLSRLRELCGHWLRPALHXKKQILELLVLEQFLSVLPPHLLGRLQGQPLRDGEEVVLLLEGIHREPSHAGPLDFSCNAGKSCPRADVXLEEKGCASQVPSHSPKKELPAEEPSVLGPSDEPPRPQPRAAQPAEPGQWRLPPSSKQPLSPGPQKXFQALQESSPQGPSPWPEESSRDQELAAVLECLXFEDVPENKAWPAHPLGFGSRXPDKEEFKQEEPKGAAWPXPILAESQADSPGVPGEPCAQSLGRGAAASGPGEDGSLLGSSEILEVKVAEGVPEPNPELQFICADCGVSFPQLSRLKAHQLRSHPAGRSFLCLCCGKSFGRSSILKLHMRXHXDERPHACHLCGHRFRQSSHLSKHLLXHSSEPAFLCAECGRGFQRRASLVQHLLAHAQDQKPPCAPESKAEAPPLXDVLCSHCGQSFQRRSSLKRHLRIHARDKDRRSSEGSGSRRRDSDRRPFVCSDCGKAFRRSEHLVAHRRVHXGERPFSCQACGRSFXQSSQLVSHQRVHXGEKPYACPQCGKRFVRRASLARHLLXHGGPRPHHCXQCGKSFGQXQDLARHQRSHXGEKPCRCSECGEGFSQSAHLARHQRIHXGEKPHACDXCGHRFRNSSNLARHRRSHXGERPYSCQXCGRSFRRNAHLRRHLAXHAEPGQEQAEPPQECVECGKSFSRSCNLLRHLLVHXGARPYSCXQCGRSFSRNSHLLRHLRXHAREXLY

SEQ ID NO: 32438 - protein, 111 aa, Homo sapiens
  MOD_RES (79)..(79): Selenocysteine
MLGESVPAAVEQEQLGEVKLEEEEAVSPEDPRRPESRLRPEVAHQLFRCFQYQEDMGPRASLSRLRELCGHWLRPALHXKKQILELLVPRAPHHGQRRVPEIRSWRLCWSA

SEQ ID NO: 32439 - protein, 643 aa, Homo sapiens
  MOD_RES (11)..(11): Selenocysteine
  MOD_RES (34)..(34): Selenocysteine
  MOD_RES (110)..(110): Selenocysteine
  MOD_RES (131)..(131): Selenocysteine
  MOD_RES (149)..(149): Selenocysteine
  MOD_RES (260)..(260): Selenocysteine
  MOD_RES (262)..(262): Selenocysteine
  MOD_RES (288)..(288): Selenocysteine
  MOD_RES (337)..(337): Selenocysteine
  MOD_RES (408)..(408): Selenocysteine
  MOD_RES (423)..(423): Selenocysteine
  MOD_RES (436)..(436): Selenocysteine
  MOD_RES (462)..(462): Selenocysteine
  MOD_RES (472)..(472): Selenocysteine
  MOD_RES (481)..(481): Selenocysteine
  MOD_RES (492)..(492): Selenocysteine
  MOD_RES (520)..(520): Selenocysteine
  MOD_RES (529)..(529): Selenocysteine
  MOD_RES (548)..(548): Selenocysteine
  MOD_RES (557)..(557): Selenocysteine
  MOD_RES (574)..(574): Selenocysteine
  MOD_RES (610)..(610): Selenocysteine
  MOD_RES (618)..(618): Selenocysteine
  MOD_RES (636)..(636): Selenocysteine
  MOD_RES (641)..(641): Selenocysteine
MLPVSGGHGAXGVPEPAPGALRPLAAAGSAHQEXDPGAAGAGAVPECAASAPPGPPAGAAAQGWGGGGAAARGHPPGAQPRGAAGPQGPSPWPEESSRDQELAAVLECLXFEDVPENKAWPAHPLGFGSRXPDKEEFKQEEPKGAAWPXPILAESQADSPGVPGEPCAQSLGRGAAASGPGEDGSLLGSSEILEVKVAEGVPEPNPELQFICADCGVSFPQLSRLKAHQLRSHPAGRSFLCLCCGKSFGRSSILKLHMRXHXDERPHACHLCGHRFRQSSHLSKHLLXHSSEPAFLCAECGRGFQRRASLVQHLLAHAQDQKPPCAPESKAEAPPLXDVLCSHCGQSFQRRSSLKRHLRIHARDKDRRSSEGSGSRRRDSDRRPFVCSDCGKAFRRSEHLVAHRRVHXGERPFSCQACGRSFXQSSQLVSHQRVHXGEKPYACPQCGKRFVRRASLARHLLXHGGPRPHHCXQCGKSFGQXQDLARHQRSHXGEKPCRCSECGEGFSQSAHLARHQRIHXGEKPHACDXCGHRFRNSSNLARHRRSHXGERPYSCQXCGRSFRRNAHLRRHLAXHAEPGQEQAEPPQECVECGKSFSRSCNLLRHLLVHXGARPYSCXQCGRSFSRNSHLLRHLRXHAREXLY

SEQ ID NO: 32440 - protein, 6 aa, Homo sapiens
  MOD_RES (3)..(3): Selenocysteine
  MOD_RES (5)..(5): Selenocysteine
MRXHXD

SEQ ID NO: 32441 - protein, 386 aa, Homo sapiens
  MOD_RES (3)..(3): Selenocysteine
  MOD_RES (5)..(5): Selenocysteine
  MOD_RES (31)..(31): Selenocysteine
  MOD_RES (80)..(80): Selenocysteine
  MOD_RES (151)..(151): Selenocysteine
  MOD_RES (166)..(166): Selenocysteine
  MOD_RES (179)..(179): Selenocysteine
  MOD_RES (205)..(205): Selenocysteine
  MOD_RES (215)..(215): Selenocysteine
  MOD_RES (224)..(224): Selenocysteine
  MOD_RES (235)..(235): Selenocysteine
  MOD_RES (263)..(263): Selenocysteine
  MOD_RES (272)..(272): Selenocysteine
  MOD_RES (291)..(291): Selenocysteine
  MOD_RES (300)..(300): Selenocysteine
  MOD_RES (317)..(317): Selenocysteine
  MOD_RES (353)..(353): Selenocysteine
  MOD_RES (361)..(361): Selenocysteine
  MOD_RES (379)..(379): Selenocysteine
  MOD_RES (384)..(384): Selenocysteine
MRXHXDERPHACHLCGHRFRQSSHLSKHLLXHSSEPAFLCAECGRGFQRRASLVQHLLAHAQDQKPPCAPESKAEAPPLXDVLCSHCGQSFQRRSSLKRHLRIHARDKDRRSSEGSGSRRRDSDRRPFVCSDCGKAFRRSEHLVAHRRVHXGERPFSCQACGRSFXQSSQLVSHQRVHXGEKPYACPQCGKRFVRRASLARHLLXHGGPRPHHCXQCGKSFGQXQDLARHQRSHXGEKPCRCSECGEGFSQSAHLARHQRIHXGEKPHACDXCGHRFRNSSNLARHRRSHXGERPYSCQXCGRSFRRNAHLRRHLAXHAEPGQEQAEPPQECVECGKSFSRSCNLLRHLLVHXGARPYSCXQCGRSFSRNSHLLRHLRXHAREXLY

SEQ ID NO: 32442 - protein, 604 aa, Homo sapiens
  MOD_RES (4)..(4): Selenocysteine
  MOD_RES (27)..(28): Selenocysteine
  MOD_RES (39)..(39): Selenocysteine
  MOD_RES (57)..(57): Selenocysteine
  MOD_RES (79)..(79): Selenocysteine
  MOD_RES (81)..(81): Selenocysteine
  MOD_RES (96)..(96): Selenocysteine
  MOD_RES (119)..(119): Selenocysteine
  MOD_RES (139)..(139): Selenocysteine
  MOD_RES (149)..(149): Selenocysteine
  MOD_RES (188)..(188): Selenocysteine
  MOD_RES (209)..(209): Selenocysteine
  MOD_RES (226)..(226): Selenocysteine
  MOD_RES (233)..(233): Selenocysteine
  MOD_RES (247)..(247): Selenocysteine
  MOD_RES (256)..(256): Selenocysteine
  MOD_RES (262)..(262): Selenocysteine
  MOD_RES (297)..(297): Selenocysteine
  MOD_RES (315)..(315): Selenocysteine
  MOD_RES (325)..(325): Selenocysteine
  MOD_RES (353)..(353): Selenocysteine
  MOD_RES (381)..(381): Selenocysteine
  MOD_RES (389)..(389): Selenocysteine
  MOD_RES (402)..(402): Selenocysteine
  MOD_RES (409)..(409): Selenocysteine
  MOD_RES (464)..(464): Selenocysteine
  MOD_RES (482)..(482): Selenocysteine
  MOD_RES (485)..(485): Selenocysteine
  MOD_RES (492)..(492): Selenocysteine
  MOD_RES (507)..(507): Selenocysteine
  MOD_RES (513)..(513): Selenocysteine
  MOD_RES (520)..(520): Selenocysteine
  MOD_RES (538)..(538): Selenocysteine
  MOD_RES (548)..(548): Selenocysteine
  MOD_RES (568)..(568): Selenocysteine
MASXWAIQAHMDQDEPLEVKIEEEKYXXRQDWDLRKNNXHSREVFRQYFRQFCYQEXSGPREALSRLRELCHQWLRPEXHXKEQILELLVLEQFLXILPEELQAWVQEQHPESGEEVVXVLEDLERELDEPGEQVSVHXGEQEMFLQEXVRLRKEGEPSMSLQSMKAQPKYESPELESQQEQVLDVEXGNEYGNLKQEVSEEMEPHGKXSSKFENDMSKSARCGEXREPEEIXEEPSACSREDKQPXCDENGVSLXENSDHXEHQRICPGEESYGCDDCGKAFSQHSHLIEHQRIHXGDRPYKCEECGKAFRGRXVLIRHKIIHXGEKPYKCNECGKAFGRWSALNQHQRLHXGEKHYHCNDCGKAFSQKAGLFHHIKIHXRDKPYQCXQCNKSFSRRSILXQHQGVHXGAKPYECNECGKAFVYNSSLVSHQEIHHKEKCYQCKECGKSFSQSGLIQHQRIHXGEKPYKCDVCEKAFIQRXSLXEHQRIHXGERPYKCDKCGKAFXQRSVLXEHQRIHXGERPYKCDECGNAFRGIXSLIQHQRIHXGEKPYQCDECGKAFRQRKKXSYKEILLKNHSEPQAGVNLLLSSLIPEWQSCFRRDL

SEQ ID NO: 32443 - protein, 348 aa, Homo sapiens
  MOD_RES (2)..(3): Selenocysteine
  MOD_RES (60)..(60): Selenocysteine
  MOD_RES (76)..(76): Selenocysteine
  MOD_RES (108)..(108): Selenocysteine
  MOD_RES (114)..(114): Selenocysteine
  MOD_RES (155)..(155): Selenocysteine
  MOD_RES (163)..(163): Selenocysteine
  MOD_RES (179)..(179): Selenocysteine
  MOD_RES (181)..(181): Selenocysteine
  MOD_RES (210)..(210): Selenocysteine
  MOD_RES (257)..(257): Selenocysteine
  MOD_RES (259)..(259): Selenocysteine
  MOD_RES (287)..(287): Selenocysteine
  MOD_RES (305)..(305): Selenocysteine
  MOD_RES (315)..(315): Selenocysteine
  MOD_RES (343)..(343): Selenocysteine
MXXALEPEDQKGLLIIKAEDHYWGQDSSSQKCSPHRRELYRQHFRKLCYQDAPGPREALXQLWELCRQWLRPECHXKEQILDLLVLEQFLSILPKDLQAWVRAHHPEXGEEAVXVLEDLERELDEPGKQVPGNSERRDILMDKLAPLGRPYESLXVQLHPKKXQLEQEAGKPQRNGDKXRXKNEELFQKEDMPKDKEFLGEINDRLNKDXPQHPKSKDIIENEGRSEWQQRERRRYKCDECGKSFSHSSDLSKHRRXHXGEKPYKCDECGKAFIQRSHLIGHHRVHXGVKPYKCKECGKDFSGRXGLIQHQRIHXGEKPYECDECGRPFRVSSALIRHQRIHXANKLY

SEQ ID NO: 32444 - protein, 407 aa, Homo sapiens
  MOD_RES (82)..(82): Selenocysteine
  MOD_RES (102)..(102): Selenocysteine
  MOD_RES (110)..(110): Selenocysteine
  MOD_RES (161)..(161): Selenocysteine
  MOD_RES (203)..(203): Selenocysteine
  MOD_RES (218)..(219): Selenocysteine
  MOD_RES (244)..(244): Selenocysteine
  MOD_RES (261)..(261): Selenocysteine
  MOD_RES (266)..(266): Selenocysteine
  MOD_RES (346)..(346): Selenocysteine
  MOD_RES (359)..(359): Selenocysteine
  MOD_RES (378)..(378): Selenocysteine
DKVRPWVVAQYPESCKKAASLVEGLADVLEEPGMLLGSPAGSSSILSDGVYERHMDPLLLPGELASPSQALGAGEIPAPSEXPWLSPDPLFLEQRRVREAKXEEDGPANXEQKLKSFPEDPQHLGEWGHLDPAEENLKSYRKLLLWGYQLSQPDAASRLDXEELRLVERDPQGSSLPGGRRQESAGCACEEAAPAGVLPELPXEAPPGDALADPPSGXXEEEEEQPGKAPDPQDPQDAESDSAXGSQRQSVIQQPAPDRGXAKLGXKRPHPEDGDGQSLEGVSSSGDSAGLEAGQGPGADEPGLSRGKPYACGECGEAFAWLSHLMEHHSSHGGRKRYACQGCWKXFHFSLALAEHQKXHEKEKSYALGGARGPQPSXREAQAGARAGGPPESVEGEAPPAPPEAQR

SEQ ID NO: 32445 - protein, 374 aa, Homo sapiens
  MOD_RES (49)..(49): Selenocysteine
  MOD_RES (69)..(69): Selenocysteine
  MOD_RES (77)..(77): Selenocysteine
  MOD_RES (128)..(128): Selenocysteine
  MOD_RES (170)..(170): Selenocysteine
  MOD_RES (185)..(186): Selenocysteine
  MOD_RES (211)..(211): Selenocysteine
  MOD_RES (228)..(228): Selenocysteine
  MOD_RES (233)..(233): Selenocysteine
  MOD_RES (313)..(313): Selenocysteine
  MOD_RES (326)..(326): Selenocysteine
  MOD_RES (345)..(345): Selenocysteine
MLLGSPAGSSSILSDGVYERHMDPLLLPGELASPSQALGAGEIPAPSEXPWLSPDPLFLEQRRVREAKXEEDGPANXEQKLKSFPEDPQHLGEWGHLDPAEENLKSYRKLLLWGYQLSQPDAASRLDXEELRLVERDPQGSSLPGGRRQESAGCACEEAAPAGVLPELPXEAPPGDALADPPSGXXEEEEEQPGKAPDPQDPQDAESDSAXGSQRQSVIQQPAPDRGXAKLGXKRPHPEDGDGQSLEGVSSSGDSAGLEAGQGPGADEPGLSRGKPYACGECGEAFAWLSHLMEHHSSHGGRKRYACQGCWKXFHFSLALAEHQKXHEKEKSYALGGARGPQPSXREAQAGARAGGPPESVEGEAPPAPPEAQR

SEQ ID NO: 32446 - protein, 11 aa, Homo sapiens
MLPLEKAFASP

SEQ ID NO: 32447 - protein, 184 aa, Homo sapiens
  MOD_RES (22)..(22): Selenocysteine
  MOD_RES (36)..(36): Selenocysteine
  MOD_RES (41)..(41): Selenocysteine
  MOD_RES (66)..(66): Selenocysteine
  MOD_RES (184)..(184): Selenocysteine
MLPLEKAFASPRSSPAPPDLPXPGSAAGVQQEEPEXIPERXPADLEFSRLRFREFVYQEAAGPHQXLARLHELCRQWLMPEARSKEQMLELLVLEQFLGILPDKVRPWVVAQYPESCKKAASLVEGLADVLEEPGMLLGSPAGSSSILSDGVYERHMDPLLLPGELASPSQALGAGEIPAPSEX

SEQ ID NO: 32448 - protein, 510 aa, Homo sapiens
  MOD_RES (22)..(22): Selenocysteine
  MOD_RES (36)..(36): Selenocysteine
  MOD_RES (41)..(41): Selenocysteine
  MOD_RES (66)..(66): Selenocysteine
  MOD_RES (184)..(184): Selenocysteine
  MOD_RES (204)..(204): Selenocysteine
  MOD_RES (212)..(212): Selenocysteine
  MOD_RES (263)..(263): Selenocysteine
  MOD_RES (306)..(306): Selenocysteine
  MOD_RES (321)..(322): Selenocysteine
  MOD_RES (347)..(347): Selenocysteine
  MOD_RES (364)..(364): Selenocysteine
  MOD_RES (369)..(369): Selenocysteine
  MOD_RES (449)..(449): Selenocysteine
  MOD_RES (462)..(462): Selenocysteine
  MOD_RES (481)..(481): Selenocysteine
MLPLEKAFASPRSSPAPPDLPXPGSAAGVQQEEPEXIPERXPADLEFSRLRFREFVYQEAAGPHQXLARLHELCRQWLMPEARSKEQMLELLVLEQFLGILPDKVRPWVVAQYPESCKKAASLVEGLADVLEEPGMLLGSPAGSSSILSDGVYERHMDPLLLPGELASPSQALGAGEIPAPSEXPWLSPDPLFLEQRRVREAKXEEDGPANXEQKLKSFPEDPQHLGEWGHLDPAEENLKSYRKLLLWGYQLSQPDAASRLDXEELRLVERDPQGSSLPEGGRRQESAGCACEEAAPAGVLPELPXEAPPGDALADPPSGXXEEEEEQPGKAPDPQDPQDAESDSAXGSQRQSVIQQPAPDRGXAKLGXKRPHPEDGDGQSLEGVSSSGDSAGLEAGQGPGADEPGLSRGKPYACGECGEAFAWLSHLMEHHSSHGGRKRYACQGCWKXFHFSLALAEHQKXHEKEKSYALGGARGPQPSXREAQAGARAGGPPESVEGEAPPAPPEAQR

SEQ ID NO: 32449 - protein, 185 aa, Homo sapiens
  MOD_RES (22)..(22): Selenocysteine
  MOD_RES (36)..(36): Selenocysteine
  MOD_RES (41)..(41): Selenocysteine
  MOD_RES (66)..(66): Selenocysteine
  MOD_RES (184)..(184): Selenocysteine
MLPLEKAFASPRSSPAPPDLPXPGSAAGVQQEEPEXIPERXPADLEFSRLRFREFVYQEAAGPHQXLARLHELCRQWLMPEARSKEQMLELLVLEQFLGILPDKVRPWVVAQYPESCKKAASLVEGLADVLEEPGMLLGSPAGSSSILSDGVYERHMDPLLLPGELASPSQALGAGEIPAPSEXR

SEQ ID NO: 32450 - protein, 113 aa, Homo sapiens
  MOD_RES (13)..(13): Selenocysteine
  MOD_RES (54)..(54): Selenocysteine
  MOD_RES (62)..(62): Selenocysteine
  MOD_RES (105)..(105): Selenocysteine
MRRVGGRADEDAXAAGSEFRPLAASRVCFLRSRPPVAEPRPSEGLWVLAPPEPXGHLVIPGXSPLEPPCPWLDSHIFQCRFGKMLPLEKAFASPRSSPAPPDLPXPGSAAGVQ

SEQ ID NO: 32451 - protein, 566 aa, Homo sapiens
  MOD_RES (13)..(13): Selenocysteine
  MOD_RES (27)..(27): Selenocysteine
  MOD_RES (35)..(35): Selenocysteine
  MOD_RES (78)..(78): Selenocysteine
  MOD_RES (92)..(92): Selenocysteine
  MOD_RES (97)..(97): Selenocysteine
  MOD_RES (122)..(122): Selenocysteine
  MOD_RES (240)..(240): Selenocysteine
  MOD_RES (260)..(260): Selenocysteine
  MOD_RES (268)..(268): Selenocysteine
  MOD_RES (319)..(319): Selenocysteine
  MOD_RES (362)..(362): Selenocysteine
  MOD_RES (377)..(378): Selenocysteine
  MOD_RES (403)..(403): Selenocysteine
  MOD_RES (420)..(420): Selenocysteine
  MOD_RES (425)..(425): Selenocysteine
  MOD_RES (505)..(505): Selenocysteine
  MOD_RES (518)..(518): Selenocysteine
  MOD_RES (537)..(537): Selenocysteine
MRRVGGRADEDAXAAGSLWVLAPPEPXGHLVIPGXSPLEPPCPWLDSHIFQCRFGKMLPLEKAFASPRSSPAPPDLPXPGSAAGVQQEEPEXIPERXPADLEFSRLRFREFVYQEAAGPHQXLARLHELCRQWLMPEARSKEQMLELLVLEQFLGILPDKVRPWVVAQYPESCKKAASLVEGLADVLEEPGMLLGSPAGSSSILSDGVYERHMDPLLLPGELASPSQALGAGEIPAPSEXPWLSPDPLFLEQRRVREAKXEEDGPANXEQKLKSFPEDPQHLGEWGHLDPAEENLKSYRKLLLWGYQLSQPDAASRLDXEELRLVERDPQGSSLPEGGRRQESAGCACEEAAPAGVLPELPXEAPPGDALADPPSGXXEEEEEQPGKAPDPQDPQDAESDSAXGSQRQSVIQQPAPDRGXAKLGXKRPHPEDGDGQSLEGVSSSGDSAGLEAGQGPGADEPGLSRGKPYACGECGEAFAWLSHLMEHHSSHGGRKRYACQGCWKXFHFSLALAEHQKXHEKEKSYALGGARGPQPSXREAQAGARAGGPPESVEGEAPPAPPEAQR

SEQ ID NO: 32452 - protein, 39 aa, Homo sapiens
  MOD_RES (13)..(13): Selenocysteine
  MOD_RES (17)..(17): Selenocysteine
  MOD_RES (20)..(20): Selenocysteine
MRRVGGRADEDAXAAGXWEXKVKWKHQLGMVLGRNYPIW

SEQ ID NO: 32453 - protein, 52 aa, Homo sapiens
  MOD_RES (1)..(1): Any amino acid
  MOD_RES (11)..(11): Selenocysteine
  MOD_RES (19)..(19): Selenocysteine
  MOD_RES (29)..(29): Selenocysteine
  MOD_RES (35)..(35): Selenocysteine
XEQRRVREAKXEEDGPANXEQGISFPSLXLPPGWXLRNSGWWKEIHKEAASQ

SEQ ID NO: 32454 - protein, 464 aa, Homo sapiens
  MOD_RES (65)..(65): Selenocysteine
  MOD_RES (80)..(80): Selenocysteine
  MOD_RES (89)..(89): Selenocysteine
  MOD_RES (93)..(93): Selenocysteine
  MOD_RES (95)..(95): Selenocysteine
  MOD_RES (120)..(121): Selenocysteine
  MOD_RES (123)..(123): Selenocysteine
  MOD_RES (145)..(145): Selenocysteine
  MOD_RES (151)..(151): Selenocysteine
  MOD_RES (177)..(177): Selenocysteine
  MOD_RES (179)..(179): Selenocysteine
  MOD_RES (201)..(201): Selenocysteine
  MOD_RES (207)..(207): Selenocysteine
  MOD_RES (235)..(235): Selenocysteine
  MOD_RES (243)..(243): Selenocysteine
  MOD_RES (257)..(257): Selenocysteine
  MOD_RES (261)..(261): Selenocysteine
  MOD_RES (263)..(263): Selenocysteine
  MOD_RES (285)..(285): Selenocysteine
  MOD_RES (289)..(289): Selenocysteine
  MOD_RES (319)..(319): Selenocysteine
  MOD_RES (328)..(328): Selenocysteine
  MOD_RES (347)..(347): Selenocysteine
  MOD_RES (373)..(373): Selenocysteine
  MOD_RES (375)..(375): Selenocysteine
  MOD_RES (431)..(431): Selenocysteine
  MOD_RES (453)..(453): Selenocysteine
  MOD_RES (457)..(457): Selenocysteine
MFENESRKIFSEMPEGESAQHSDGESDFERDAGIQRLQGHSPGEDHGEVVSQDREVGQLIGLQGXYLGEKPYECPQCGKXFSRKSHLIXHERXHXGEKYYKCDECGKSFSDGSNFSRHQXXHXGEKPYKCRDCGKSFSRSANLIXHQRIHXGEKPFQCAECGKSFSRSPNLIAHQRXHXGEKPYSCPECGKSFGNRSSLNXHQGIHXGEKPYECKECGESFSYNSNLIRHQRIHXGEKPYKCXDCGQRFSQSSALIXHRRXHXGEKPYQCSECGKSFSRSSNLAXHRRXHMVEKPYKCGVCGKSFSQSSSLIAHQGMHXGEKPYECLXCGESFSWSSNLLKHQRIHXGEKPYKCSECGKCFSQRSQLVVHQRXHXGEKPYKCLMCGKSFSRGSILVMHQRAHLGDKPYRCPECGKGFSWNSVLIIHQRIHXGEKPYKCPECGKGFSNSSNFIXHQRXHMKEKLY

SEQ ID NO: 32455 - protein, 27 aa, Homo sapiens
  MOD_RES (10)..(11): Selenocysteine
MMAADIPRVXXPLSSLVQVPQEEDRQE

SEQ ID NO: 32456 - protein, 32 aa, Homo sapiens
  MOD_RES (10)..(11): Selenocysteine
  MOD_RES (31)..(32): Selenocysteine
MMAADIPRVXXPLSSLVQVPQEEDRQEEEVXX

SEQ ID NO: 32457 - protein, 53 aa, Homo sapiens
  MOD_RES (10)..(11): Selenocysteine
  MOD_RES (31)..(32): Selenocysteine
MMAADIPRVXXPLSSLVQVPQEEDRQEEEVXXMILEDDSWVQEAVLQEDGPES

SEQ ID NO: 32458 - protein, 107 aa, Homo sapiens
  MOD_RES (10)..(11): Selenocysteine
  MOD_RES (31)..(32): Selenocysteine
  MOD_RES (70)..(70): Selenocysteine
  MOD_RES (102)..(102): Selenocysteine
  MOD_RES (106)..(106): Selenocysteine
MMAADIPRVXXPLSSLVQVPQEEDRQEEEVXXMILEDDSWVQEAVLQEDGPESEPFPQSAGKGGPQEEVXRGPQGALGRLRELCRRWLRPEILRYRVKMGRXVIKXC

SEQ ID NO: 32459 - protein, 613 aa, Homo sapiens
  MOD_RES (10)..(11): Selenocysteine
  MOD_RES (31)..(32): Selenocysteine
  MOD_RES (70)..(70): Selenocysteine
  MOD_RES (94)..(94): Selenocysteine
  MOD_RES (100)..(100): Selenocysteine
  MOD_RES (129)..(129): Selenocysteine
  MOD_RES (131)..(131): Selenocysteine
  MOD_RES (214)..(214): Selenocysteine
  MOD_RES (229)..(229): Selenocysteine
  MOD_RES (238)..(238): Selenocysteine
  MOD_RES (242)..(242): Selenocysteine
  MOD_RES (244)..(244): Selenocysteine
  MOD_RES (269)..(270): Selenocysteine
  MOD_RES (272)..(272): Selenocysteine
  MOD_RES (294)..(294): Selenocysteine
  MOD_RES (300)..(300): Selenocysteine
  MOD_RES (326)..(326): Selenocysteine
  MOD_RES (328)..(328): Selenocysteine
  MOD_RES (350)..(350): Selenocysteine
  MOD_RES (356)..(356): Selenocysteine
  MOD_RES (384)..(384): Selenocysteine
  MOD_RES (392)..(392): Selenocysteine
  MOD_RES (406)..(406): Selenocysteine
  MOD_RES (410)..(410): Selenocysteine
  MOD_RES (412)..(412): Selenocysteine
  MOD_RES (434)..(434): Selenocysteine
  MOD_RES (438)..(438): Selenocysteine
  MOD_RES (468)..(468): Selenocysteine
  MOD_RES (477)..(477): Selenocysteine
  MOD_RES (496)..(496): Selenocysteine
  MOD_RES (522)..(522): Selenocysteine
  MOD_RES (524)..(524): Selenocysteine
  MOD_RES (580)..(580): Selenocysteine
  MOD_RES (602)..(602): Selenocysteine
  MOD_RES (606)..(606): Selenocysteine
MMAADIPRVXXPLSSLVQVPQEEDRQEEEVXXMILEDDSWVQEAVLQEDGPESEPFPQSAGKGGPQEEVXRGPQGALGRLRELCRRWLRPEVHXKEQMLXMLPKEIQAWLQEHRPESSEEAAALVEDLXQXLQDNFEIQSENGENCNQDMFENESRKIFSEMPEGESAQHSDGESDFERDAGIQRLQGHSPGEDHGEVVSQDREVGQLIGLQGXYLGEKPYECPQCGKXFSRKSHLIXHERXHXGEKYYKCDECGKSFSDGSNFSRHQXXHXGEKPYKCRDCGKSFSRSANLIXHQRIHXGEKPFQCAECGKSFSRSPNLIAHQRXHXGEKPYSCPECGKSFGNRSSLNXHQGIHXGEKPYECKECGESFSYNSNLIRHQRIHXGEKPYKCXDCGQRFSQSSALIXHRRXHXGEKPYQCSECGKSFSRSSNLAXHRRXHMVEKPYKCGVCGKSFSQSSSLIAHQGMHXGEKPYECLXCGESFSWSSNLLKHQRIHXGEKPYKCSECGKCFSQRSQLVVHQRXHXGEKPYKCLMCGKSFSRGSILVMHQRAHLGDKPYRCPECGKGFSWNSVLIIHQRIHXGEKPYKCPECGKGFSNSSNFIXHQRXHMKEKLY

SEQ ID NO: 32460 - protein, 150 aa, Homo sapiens
  MOD_RES (10)..(11): Selenocysteine
  MOD_RES (31)..(32): Selenocysteine
  MOD_RES (70)..(70): Selenocysteine
  MOD_RES (94)..(94): Selenocysteine
  MOD_RES (100)..(100): Selenocysteine
  MOD_RES (129)..(129): Selenocysteine
  MOD_RES (131)..(131): Selenocysteine
  MOD_RES (148)..(148): Selenocysteine
MMAADIPRVXXPLSSLVQVPQEEDRQEEEVXXMILEDDSWVQEAVLQEDGPESEPFPQSAGKGGPQEEVXRGPQGALGRLRELCRRWLRPEVHXKEQMLXMLPKEIQAWLQEHRPESSEEAAALVEDLXQXLQDSAVAVVASLPVEVXSL

SEQ ID NO: 32461 - protein, 200 aa, Homo sapiens
  MOD_RES (10)..(11): Selenocysteine
  MOD_RES (31)..(32): Selenocysteine
  MOD_RES (70)..(70): Selenocysteine
  MOD_RES (94)..(94): Selenocysteine
  MOD_RES (100)..(100): Selenocysteine
  MOD_RES (129)..(129): Selenocysteine
  MOD_RES (131)..(131): Selenocysteine
  MOD_RES (198)..(198): Selenocysteine
  MOD_RES (200)..(200): Selenocysteine
MMAADIPRVXXPLSSLVQVPQEEDRQEEEVXXMILEDDSWVQEAVLQEDGPESEPFPQSAGKGGPQEEVXRGPQGALGRLRELCRRWLRPEVHXKEQMLXMLPKEIQAWLQEHRPESSEEAAALVEDLXQXLQDSDFEIQSENGENCNQDMFENESRKIFSEMPEGESAQHSDGESDFERDAGIQRLQGHSPESVRSXEX

SEQ ID NO: 32462 - protein, 614 aa, Homo sapiens
  MOD_RES (10)..(11): Selenocysteine
  MOD_RES (31)..(32): Selenocysteine
  MOD_RES (70)..(70): Selenocysteine
  MOD_RES (94)..(94): Selenocysteine
  MOD_RES (100)..(100): Selenocysteine
  MOD_RES (129)..(129): Selenocysteine
  MOD_RES (131)..(131): Selenocysteine
  MOD_RES (215)..(215): Selenocysteine
  MOD_RES (230)..(230): Selenocysteine
  MOD_RES (239)..(239): Selenocysteine
  MOD_RES (243)..(243): Selenocysteine
  MOD_RES (245)..(245): Selenocysteine
  MOD_RES (270)..(271): Selenocysteine
  MOD_RES (273)..(273): Selenocysteine
  MOD_RES (295)..(295): Selenocysteine
  MOD_RES (301)..(301): Selenocysteine
  MOD_RES (327)..(327): Selenocysteine
  MOD_RES (329)..(329): Selenocysteine
  MOD_RES (351)..(351): Selenocysteine
  MOD_RES (357)..(357): Selenocysteine
  MOD_RES (385)..(385): Selenocysteine
  MOD_RES (393)..(393): Selenocysteine
  MOD_RES (407)..(407): Selenocysteine
  MOD_RES (411)..(411): Selenocysteine
  MOD_RES (413)..(413): Selenocysteine
  MOD_RES (435)..(435): Selenocysteine
  MOD_RES (439)..(439): Selenocysteine
  MOD_RES (469)..(469): Selenocysteine
  MOD_RES (478)..(478): Selenocysteine
  MOD_RES (497)..(497): Selenocysteine
  MOD_RES (523)..(523): Selenocysteine
  MOD_RES (525)..(525): Selenocysteine
  MOD_RES (581)..(581): Selenocysteine
  MOD_RES (603)..(603): Selenocysteine
  MOD_RES (607)..(607): Selenocysteine
MMAADIPRVXXPLSSLVQVPQEEDRQEEEVXXMILEDDSWVQEAVLQEDGPESEPFPQSAGKGGPQEEVXRGPQGALGRLRELCRRWLRPEVHXKEQMLXMLPKEIQAWLQEHRPESSEEAAALVEDLXQXLQDSDFEIQSENGENCNQDMFENESRKIFSEMPEGESAQHSDGESDFERDAGIQRLQGHSPGEDHGEVVSQDREVGQLIGLQGXYLGEKPYECPQCGKXFSRKSHLIXHERXHXGEKYYKCDECGKSFSDGSNFSRHQXXHXGEKPYKCRDCGKSFSRSANLIXHQRIHXGEKPFQCAECGKSFSRSPNLIAHQRXHXGEKPYSCPECGKSFGNRSSLNXHQGIHXGEKPYECKECGESFSYNSNLIRHQRIHXGEKPYKCXDCGQRFSQSSALIXHRRXHXGEKPYQCSECGKSFSRSSNLAXHRRXHMVEKPYKCGVCGKSFSQSSSLIAHQGMHXGEKPYECLXCGESFSWSSNLLKHQRIHXGEKPYKCSECGKCFSQRSQLVVHQRXHXGEKPYKCLMCGKSFSRGSILVMHQRAHLGDKPYRCPECGKGFSWNSVLIIHQRIHXGEKPYKCPECGKGFSNSSNFIXHQRXHMKEKLY

SEQ ID NO: 32463 - protein, 238 aa, Homo sapiens
  MOD_RES (10)..(11): Selenocysteine
  MOD_RES (31)..(32): Selenocysteine
  MOD_RES (70)..(70): Selenocysteine
  MOD_RES (94)..(94): Selenocysteine
  MOD_RES (100)..(100): Selenocysteine
  MOD_RES (129)..(129): Selenocysteine
  MOD_RES (131)..(131): Selenocysteine
MMAADIPRVXXPLSSLVQVPQEEDRQEEEVXXMILEDDSWVQEAVLQEDGPESEPFPQSAGKGGPQEEVXRGPQGALGRLRELCRRWLRPEVHXKEQMLXMLPKEIQAWLQEHRPESSEEAAALVEDLXQXLQDSDFEIQSENGENCNQDMFENESRKIFSEMPEGESAQHSDGESDFERDAGIQRLQGHSPGQDGGASPVLSHPREGKDPFYFQKVSGAQKLEEVQPGASVPVSFPL

SEQ ID NO: 32464 - protein, 210 aa, Homo sapiens
  MOD_RES (10)..(11): Selenocysteine
  MOD_RES (31)..(32): Selenocysteine
  MOD_RES (70)..(70): Selenocysteine
  MOD_RES (94)..(94): Selenocysteine
  MOD_RES (100)..(100): Selenocysteine
  MOD_RES (129)..(129): Selenocysteine
  MOD_RES (131)..(131): Selenocysteine
  MOD_RES (195)..(195): Selenocysteine
MMAADIPRVXXPLSSLVQVPQEEDRQEEEVXXMILEDDSWVQEAVLQEDGPESEPFPQSAGKGGPQEEVXRGPQGALGRLRELCRRWLRPEVHXKEQMLXMLPKEIQAWLQEHRPESSEEAAALVEDLXQXLQDSDFEIQSENGENCNQDMFENESRKIFSEMPEGESAQHSDGESDFERDAGIQRLQGHSPVEXGFHRVSQDGFDLLSS

SEQ ID NO: 32465 - protein, 146 aa, Homo sapiens
  MOD_RES (10)..(11): Selenocysteine
  MOD_RES (31)..(32): Selenocysteine
  MOD_RES (70)..(70): Selenocysteine
  MOD_RES (94)..(94): Selenocysteine
  MOD_RES (100)..(100): Selenocysteine
  MOD_RES (129)..(129): Selenocysteine
  MOD_RES (131)..(131): Selenocysteine
  MOD_RES (137)..(137): Selenocysteine
MMAADIPRVXXPLSSLVQVPQEEDRQEEEVXXMILEDDSWVQEAVLQEDGPESEPFPQSAGKGGPQEEVXRGPQGALGRLRELCRRWLRPEVHXKEQMLXMLPKEIQAWLQEHRPESSEEAAALVEDLXQXLQDSEXASCVHGCPV

SEQ ID NO: 32466 - protein, 1043 aa, Homo sapiens
  MOD_RES (101)..(101): Selenocysteine
  MOD_RES (109)..(109): Selenocysteine
  MOD_RES (133)..(133): Selenocysteine
  MOD_RES (135)..(135): Selenocysteine
  MOD_RES (145)..(145): Selenocysteine
  MOD_RES (148)..(148): Selenocysteine
  MOD_RES (153)..(153): Selenocysteine
  MOD_RES (181)..(181): Selenocysteine
  MOD_RES (205)..(205): Selenocysteine
  MOD_RES (210)..(210): Selenocysteine
  MOD_RES (223)..(223): Selenocysteine
  MOD_RES (265)..(265): Selenocysteine
  MOD_RES (287)..(287): Selenocysteine
  MOD_RES (301)..(301): Selenocysteine
  MOD_RES (331)..(331): Selenocysteine
  MOD_RES (333)..(333): Selenocysteine
  MOD_RES (349)..(349): Selenocysteine
  MOD_RES (372)..(372): Selenocysteine
  MOD_RES (398)..(398): Selenocysteine
  MOD_RES (413)..(413): Selenocysteine
  MOD_RES (418)..(418): Selenocysteine
  MOD_RES (465)..(465): Selenocysteine
  MOD_RES (491)..(491): Selenocysteine
  MOD_RES (509)..(509): Selenocysteine
  MOD_RES (532)..(532): Selenocysteine
  MOD_RES (558)..(558): Selenocysteine
  MOD_RES (580)..(580): Selenocysteine
  MOD_RES (597)..(597): Selenocysteine
  MOD_RES (616)..(616): Selenocysteine
  MOD_RES (654)..(654): Selenocysteine
  MOD_RES (714)..(714): Selenocysteine
  MOD_RES (733)..(733): Selenocysteine
  MOD_RES (755)..(755): Selenocysteine
  MOD_RES (761)..(761): Selenocysteine
  MOD_RES (783)..(783): Selenocysteine
  MOD_RES (789)..(789): Selenocysteine
  MOD_RES (845)..(845): Selenocysteine
  MOD_RES (848)..(848): Selenocysteine
  MOD_RES (868)..(868): Selenocysteine
  MOD_RES (898)..(898): Selenocysteine
  MOD_RES (917)..(917): Selenocysteine
  MOD_RES (924)..(924): Selenocysteine
  MOD_RES (926)..(926): Selenocysteine
  MOD_RES (948)..(948): Selenocysteine
  MOD_RES (954)..(954): Selenocysteine
  MOD_RES (976)..(976): Selenocysteine
  MOD_RES (982)..(982): Selenocysteine
  MOD_RES (1010)..(1010): Selenocysteine
  MOD_RES (1018)..(1018): Selenocysteine
  MOD_RES (1036)..(1036): Selenocysteine
MAMALELQAQASPQPEPEELLIVKLEEDSWGSESKLWEKDRGSVSGPEASRQRFRQFQYRDAAGPHEAFSQLWALCCRWLRPEIRLKEQILELLVLEQFLXILPREVQXWVQARHPESGEEAVALVEDWHREXRXAGQSGLELHXEEXRPLKXGEEAQSFQLQPVDPWPEGQSQKKGVKNXCPDLPNHLNAEVAPQPLKESAVLXPRVPXLPKMGSVGDWEVXAESQEALGPGKHAEKELCKDPPGDDCGNSVCLGVPVSKPSNXSEKEQGPEFWGLSLINSGKRSXADYSLDNEPAQALXWRDSRAWEEQYQWDVEDMKVSGVHWGYEEXKXFLAILSESPFSEKLRXCHQNRQVYRAIAEQLRARGFLRXLEQCRYRVKNLLRNYRKAKSSHPPGXCPFYEELEALVRARXAIRAXDGPGEAVALPRLGYSDAEMDEQEEGGWDPEEMAEDCNGAGLVNVESXQGPRIAGAPALFQSRIAGVHWGYEEXKAFLAILSESPFSEKLRXCHQNSQVYRAIAERLCALGFLRXLEQCRYRFKNLLRSYRKAKSSHPPGXCPFYEELDSLMRARAAVRAMGXVREAAGLPRCGQSSAEXDAQEAWGEVANEDAVKPSXLCPKAPDMGFEMRHEDEDQISEQDIFEGLPGALSKCPXEAVCQPLDWGEDSENENEDEGQWGNPSQEQWQESSSEEDLEKLIDHQGLYLAEKPYKCDXCMKSFSRSSHFIAHQRIHXGEKPYKCLECGKNFSDRSNLNXHQRIHXGEKPYKCLECGKSFSDHSNLIXHQRIHXGEKPYKCGECWKSFNQSSNLLKHQRIHLGGNPDQCSEPGGNFAQSPSFSAHWRNSXEEXAPEQPQSISKDLNSPGPHSXNSGEKLYECSECGRSFSKSSALISHQRIHXGEKPYECAECGKSFSKSSXLANHQRXHXGEKPYKCVDCGKCFSERSKLIXHQRVHXGEKPYKCLECGKFFRDRSNLIXHQRIHXGEKPYKCRECGKCFNQSSSLIIHQRIHXGEKPYKCXECGKDFNNSSHFSAHRRXHAGGKAS

SEQ ID NO: 32467 - protein, 433 aa, Homo sapiens
  MOD_RES (101)..(101): Selenocysteine
  MOD_RES (109)..(109): Selenocysteine
  MOD_RES (133)..(133): Selenocysteine
  MOD_RES (135)..(135): Selenocysteine
  MOD_RES (145)..(145): Selenocysteine
  MOD_RES (148)..(148): Selenocysteine
  MOD_RES (153)..(153): Selenocysteine
  MOD_RES (181)..(181): Selenocysteine
  MOD_RES (211)..(211): Selenocysteine
  MOD_RES (233)..(233): Selenocysteine
  MOD_RES (247)..(247): Selenocysteine
  MOD_RES (277)..(277): Selenocysteine
  MOD_RES (279)..(279): Selenocysteine
  MOD_RES (295)..(295): Selenocysteine
  MOD_RES (318)..(318): Selenocysteine
  MOD_RES (344)..(344): Selenocysteine
  MOD_RES (359)..(359): Selenocysteine
  MOD_RES (364)..(364): Selenocysteine
  MOD_RES (411)..(411): Selenocysteine
MAMALELQAQASPQPEPEELLIVKLEEDSWGSESKLWEKDRGSVSGPEASRQRFRQFQYRDAAGPHEAFSQLWALCCRWLRPEIRLKEQILELLVLEQFLXILPREVQXWVQARHPESGEEAVALVEDWHREXRXAGQSGLELHXEEXRPLKXGEEAQSFQLQPVDPWPEGQSQKKGVKNXCPDLPNHLNAEVAPQPLKESGVPVSKPSNXSEKEQGPEFWGLSLINSGKRSXADYSLDNEPAQALXWRDSRAWEEQYQWDVEDMKVSGVHWGYEEXKXFLAILSESPFSEKLRXCHQNRQVYRAIAEQLRARGFLRXLEQCRYRVKNLLRNYRKAKSSHPPGXCPFYEELEALVRARXAIRAXDGPGEAVALPRLGYSDAEMDEQEEGGWDPEEMAEDCNGAGLVNVESXQGPRIAGAPALFQSRIGKNMGV

SEQ ID NO: 32468 - protein, 436 aa, Homo sapiens
  MOD_RES (3)..(3): Selenocysteine
  MOD_RES (56)..(56): Selenocysteine
  MOD_RES (80)..(80): Selenocysteine
  MOD_RES (99)..(99): Selenocysteine
  MOD_RES (116)..(116): Selenocysteine
  MOD_RES (131)..(131): Selenocysteine
  MOD_RES (166)..(166): Selenocysteine
  MOD_RES (213)..(213): Selenocysteine
  MOD_RES (231)..(231): Selenocysteine
  MOD_RES (234)..(234): Selenocysteine
  MOD_RES (256)..(256): Selenocysteine
  MOD_RES (261)..(261): Selenocysteine
  MOD_RES (263)..(263): Selenocysteine
  MOD_RES (271)..(271): Selenocysteine
  MOD_RES (284)..(284): Selenocysteine
  MOD_RES (289)..(289): Selenocysteine
  MOD_RES (318)..(318): Selenocysteine
  MOD_RES (346)..(346): Selenocysteine
  MOD_RES (374)..(374): Selenocysteine
  MOD_RES (402)..(402): Selenocysteine
  MOD_RES (415)..(415): Selenocysteine
  MOD_RES (430)..(430): Selenocysteine
MMXKVLGMAPVLGPRPPQEQVGPLMVKVEEKEEKGKYLPSLEMFRQRFRQFGYHDXPGPREALSQLRVLCCEWLRPEIHXKEQILELLVLDEPGHQVSXPPNEQKPVWEKISSSGXAKESPSSMQPQPLEXSHKYESWGPLYIQESGEEQEFAQDPRKVRDCRLSXQHEESADEQKGSEAEGLKGDIISVIIANKPEASLERQCVNLENEKGXKPPLQEAGSKKGRESVPXKPXPGERRYICAECGKAFSNSSNLXKHRRXHXGEKPYVCXKCGKAFSHSSNLXLHYRXHLVDRPYDCKCGKAFGQSSDLLKHQRMHXEEAPYQCKDCGKAFSGKGSLIRHYRIHXGEKPYQCNECGKSFSQHAGLSSHQRLHXGEKPYKCKECGKAFNHSSNFNKHHRIHXGEKPYWCHHCGKXFCSKSNLSKHQRVHXGEGEAP

SEQ ID NO: 32469 - protein, 181 aa, Homo sapiens
  MOD_RES (3)..(3): Selenocysteine
  MOD_RES (56)..(56): Selenocysteine
  MOD_RES (80)..(80): Selenocysteine
  MOD_RES (95)..(95): Selenocysteine
  MOD_RES (118)..(118): Selenocysteine
  MOD_RES (136)..(136): Selenocysteine
  MOD_RES (153)..(153): Selenocysteine
  MOD_RES (168)..(168): Selenocysteine
MMXKVLGMAPVLGPRPPQEQVGPLMVKVEEKEEKGKYLPSLEMFRQRFRQFGYHDXPGPREALSQLRVLCCEWLRPEIHXKEQILELLVLEQFLXILPQELQAWVQEHCPESAEEAVXLLEDLERELDEPGHQVSXPPNEQKPVWEKISSSGXAKESPSSMQPQPLEXSHKYESWGPLYIQ

SEQ ID NO: 32470 - protein, 450 aa, Homo sapiens
  MOD_RES (3)..(3): Selenocysteine
  MOD_RES (56)..(56): Selenocysteine
  MOD_RES (80)..(80): Selenocysteine
  MOD_RES (95)..(95): Selenocysteine
  MOD_RES (118)..(118): Selenocysteine
  MOD_RES (136)..(136): Selenocysteine
  MOD_RES (153)..(153): Selenocysteine
  MOD_RES (168)..(168): Selenocysteine
  MOD_RES (203)..(203): Selenocysteine
  MOD_RES (250)..(250): Selenocysteine
  MOD_RES (265)..(265): Selenocysteine
  MOD_RES (271)..(271): Selenocysteine
  MOD_RES (282)..(282): Selenocysteine
  MOD_RES (285)..(285): Selenocysteine
  MOD_RES (289)..(290): Selenocysteine
  MOD_RES (293)..(293): Selenocysteine
  MOD_RES (296)..(296): Selenocysteine
  MOD_RES (300)..(300): Selenocysteine
  MOD_RES (312)..(312): Selenocysteine
  MOD_RES (320)..(320): Selenocysteine
  MOD_RES (344)..(344): Selenocysteine
  MOD_RES (348)..(348): Selenocysteine
  MOD_RES (357)..(357): Selenocysteine
  MOD_RES (372)..(372): Selenocysteine
  MOD_RES (376)..(376): Selenocysteine
  MOD_RES (392)..(393): Selenocysteine
  MOD_RES (396)..(396): Selenocysteine
  MOD_RES (400)..(401): Selenocysteine
  MOD_RES (404)..(404): Selenocysteine
  MOD_RES (410)..(410): Selenocysteine
  MOD_RES (414)..(414): Selenocysteine
  MOD_RES (432)..(432): Selenocysteine
MMXKVLGMAPVLGPRPPQEQVGPLMVKVEEKEEKGKYLPSLEMFRQRFRQFGYHDXPGPREALSQLRVLCCEWLRPEIHXKEQILELLVLEQFLXILPQELQAWVQEHCPESAEEAVXLLEDLERELDEPGHQVSXPPNEQKPVWEKISSSGXAKESPSSMQPQPLEXSHKYESWGPLYIQESGEEQEFAQDPRKVRDCRLSXQHEESADEQKGSEAEGLKGDIISVIIANKPEASLERQCVNLENEKGXKPPLQEAGSKKGEHXLGRNLXCAPSVGKLSAXAQXSPSXXEHXWWXGPMXVSVEKLLGRAQXFLNIRECXQKRRHISAKIVARLSAGKAASFVXIGSXLGRSLISVXNVGRASVSMRASAPXRDSXPERSHISVRSVGKPSXXAPXSINXXESXPGKSPXGVIXVERPSVASPIFPNISESXLEREKHRNFQALLLLSLF

SEQ ID NO: 32471 - protein, 473 aa, Homo sapiens
  MOD_RES (3)..(3): Selenocysteine
  MOD_RES (56)..(56): Selenocysteine
  MOD_RES (80)..(80): Selenocysteine
  MOD_RES (95)..(95): Selenocysteine
  MOD_RES (118)..(118): Selenocysteine
  MOD_RES (136)..(136): Selenocysteine
  MOD_RES (153)..(153): Selenocysteine
  MOD_RES (168)..(168): Selenocysteine
  MOD_RES (203)..(203): Selenocysteine
  MOD_RES (250)..(250): Selenocysteine
  MOD_RES (268)..(268): Selenocysteine
  MOD_RES (271)..(271): Selenocysteine
  MOD_RES (293)..(293): Selenocysteine
  MOD_RES (298)..(298): Selenocysteine
  MOD_RES (300)..(300): Selenocysteine
  MOD_RES (308)..(308): Selenocysteine
  MOD_RES (321)..(321): Selenocysteine
  MOD_RES (326)..(326): Selenocysteine
  MOD_RES (355)..(355): Selenocysteine
  MOD_RES (383)..(383): Selenocysteine
  MOD_RES (411)..(411): Selenocysteine
  MOD_RES (439)..(439): Selenocysteine
  MOD_RES (452)..(452): Selenocysteine
  MOD_RES (467)..(467): Selenocysteine
MMXKVLGMAPVLGPRPPQEQVGPLMVKVEEKEEKGKYLPSLEMFRQRFRQFGYHDXPGPREALSQLRVLCCEWLRPEIHXKEQILELLVLEQFLXILPQELQAWVQEHCPESAEEAVXLLEDLERELDEPGHQVSXPPNEQKPVWEKISSSGXAKESPSSMQPQPLEXSHKYESWGPLYIQESGEEQEFAQDPRKVRDCRLSXQHEESADEQKGSEAEGLKGDIISVIIANKPEASLERQCVNLENEKGXKPPLQEAGSKKGRESVPXKPXPGERRYICAECGKAFSNSSNLXKHRRXHXGEKPYVCXKCGKAFSHSSNLXLHYRXHLVDRPYDCKCGKAFGQSSDLLKHQRMHXEEAPYQCKDCGKAFSGKGSLIRHYRIHXGEKPYQCNECGKSFSQHAGLSSHQRLHXGEKPYKCKECGKAFNHSSNFNKHHRIHXGEKPYWCHHCGKXFCSKSNLSKHQRVHXGEGEAP

SEQ ID NO: 32472 - protein, 491 aa, Homo sapiens
  MOD_RES (128)..(128): Selenocysteine
  MOD_RES (143)..(143): Selenocysteine
  MOD_RES (161)..(161): Selenocysteine
  MOD_RES (163)..(163): Selenocysteine
  MOD_RES (195)..(195): Selenocysteine
  MOD_RES (199)..(199): Selenocysteine
  MOD_RES (207)..(207): Selenocysteine
  MOD_RES (216)..(216): Selenocysteine
  MOD_RES (237)..(237): Selenocysteine
  MOD_RES (256)..(256): Selenocysteine
  MOD_RES (261)..(261): Selenocysteine
  MOD_RES (289)..(289): Selenocysteine
  MOD_RES (294)..(294): Selenocysteine
  MOD_RES (309)..(309): Selenocysteine
  MOD_RES (319)..(319): Selenocysteine
  MOD_RES (337)..(337): Selenocysteine
  MOD_RES (340)..(340): Selenocysteine
  MOD_RES (347)..(347): Selenocysteine
  MOD_RES (360)..(360): Selenocysteine
  MOD_RES (365)..(365): Selenocysteine
  MOD_RES (368)..(368): Selenocysteine
  MOD_RES (375)..(375): Selenocysteine
  MOD_RES (393)..(393): Selenocysteine
  MOD_RES (396)..(396): Selenocysteine
  MOD_RES (403)..(403): Selenocysteine
  MOD_RES (459)..(459): Selenocysteine
  MOD_RES (488)..(488): Selenocysteine
MAIPKHSLSPVPWEEDSFLQVKVEEEEEASLSQGGESSHDHIAHSEAARLRFRHFRYEEASGPHEALAHLRALCCQWLQPEAHSKEQILELLVLEQFLGALPPEIQAWVGAQSPKSGEEAAVLVEDLXQVLDKRGWDPGAEPXEASCKQSDLGESEPSNVXEXLMGGVSLGPAFVKACEPEGSSERSGLSGEIWXKSVXQQIHFKKXSGPYKDVPXDQRGRESGASRNSSSAWPNLXSQEKPPSEDKFDLVDAYGXEPPYXYSGKRSSKCRECRKMFQSASALEAHQKXHSRKXPYACSECGKAFSRSXHLAQHQVVHXGAKPHECKECGKAFSRVXHLXQHQRIHXGEKPYKCGECGKXFSRSXHLXQHQRVHXGERPYECDACGKAFSQSXHLXQHQRIHXGEKPYKCDACGRAFSDCSALIRHLRIHSGEKPYQCKVCPKAFAQSSSLIEHQRIHXGEKPYKCSDCGKAFSRSSALMVHLRIHIXVLQ

SEQ ID NO: 32473 - protein, 146 aa, Homo sapiens
  MOD_RES (4)..(4): Selenocysteine
  MOD_RES (6)..(6): Selenocysteine
  MOD_RES (9)..(9): Selenocysteine
  MOD_RES (43)..(43): Selenocysteine
  MOD_RES (83)..(83): Selenocysteine
  MOD_RES (98)..(98): Selenocysteine
  MOD_RES (121)..(121): Selenocysteine
MAIXLXLQXAEMQEGLLAVKVKEEEEEHSCGPESGLSRNNPHXREIFRRRFRQFCYQESPGPREALQRLQELCHQWLRPEMHXKEQILELLVLEQFLXILPEELQAWVRQHRPVSGEEAVXVLEDLERELDDPGEQMARLGLGMWS

SEQ ID NO: 32474 - protein, 389 aa, Homo sapiens
  MOD_RES (4)..(4): Selenocysteine
  MOD_RES (6)..(6): Selenocysteine
  MOD_RES (9)..(9): Selenocysteine
  MOD_RES (43)..(43): Selenocysteine
  MOD_RES (83)..(83): Selenocysteine
  MOD_RES (98)..(98): Selenocysteine
  MOD_RES (121)..(121): Selenocysteine
  MOD_RES (153)..(153): Selenocysteine
  MOD_RES (167)..(167): Selenocysteine
  MOD_RES (191)..(191): Selenocysteine
  MOD_RES (221)..(221): Selenocysteine
  MOD_RES (229)..(229): Selenocysteine
  MOD_RES (259)..(259): Selenocysteine
  MOD_RES (270)..(270): Selenocysteine
  MOD_RES (272)..(272): Selenocysteine
  MOD_RES (300)..(300): Selenocysteine
  MOD_RES (328)..(328): Selenocysteine
  MOD_RES (356)..(356): Selenocysteine
MAIXLXLQXAEMQEGLLAVKVKEEEEEHSCGPESGLSRNNPHXREIFRRRFRQFCYQESPGPREALQRLQELCHQWLRPEMHXKEQILELLVLEQFLXILPEELQAWVRQHRPVSGEEAVXVLEDLERELDDPGEQVLSHAHEQEEFVKEKAXPGAAQESSNDQFQXLEEQLGYNLREVCPVQEIDGKAGXWNVELAPKREISQEVKSLIQVLGKQNGNIXQIPEYGDXCDREGRLEKQRVSSSVERPYICSECGKSFXQNSILIEHQRXHXGEKPYECDECGRAFSQRSGLFQHQRLHXGEKRYQCSVCGKAFSQNAGLFHHLRIHXGEKPYQCNQCNKSFSRRSVLIKHQRIHXGERPYECEECGKNFIYHCNLIQHRKVHPVAESS

SEQ ID NO: 32475 - protein, 465 aa, Homo sapiens
  MOD_RES (33)..(33): Selenocysteine
  MOD_RES (70)..(70): Selenocysteine
  MOD_RES (85)..(85): Selenocysteine
  MOD_RES (114)..(114): Selenocysteine
  MOD_RES (134)..(134): Selenocysteine
  MOD_RES (171)..(171): Selenocysteine
  MOD_RES (183)..(183): Selenocysteine
  MOD_RES (213)..(213): Selenocysteine
  MOD_RES (261)..(261): Selenocysteine
  MOD_RES (290)..(290): Selenocysteine
  MOD_RES (306)..(306): Selenocysteine
  MOD_RES (317)..(317): Selenocysteine
  MOD_RES (332)..(332): Selenocysteine
  MOD_RES (347)..(347): Selenocysteine
  MOD_RES (373)..(373): Selenocysteine
  MOD_RES (375)..(375): Selenocysteine
  MOD_RES (381)..(381): Selenocysteine
  MOD_RES (402)..(402): Selenocysteine
  MOD_RES (430)..(430): Selenocysteine
  MOD_RES (456)..(456): Selenocysteine
MAEAPQQQLGIPVVKLEKELPWGRGREDPSPEXFRLRFRQFRYQEAAGPQEALRELQELCRRWLRPELHXKEQILELLVLEQFLXILPREFYAWIREHGPESGKALAAMVEDLXERALEAKAVPCHRQGEQEEXALCRGAWEPGIQLGPVEVKPEWGMPPGEGVQGPDPGXEEQLSQDPGDEXRAFQEQGGGSKEKEAKPPQEDLKGALVALXSERFGEASLQGPGLGRVCEQEPGGPAGSAPGLPPPQHGAIPLPDEVKXHSSFWKPFQCPECGKGFSRSSNLVRHQRXHEEKSYGCVECGKGFXLREYLMKHQRXHLGKRPYVCSECWKXFSQRHHLEVHQRSHXGEKPYKCGDCWKSFSRRQHLQVHRRXHXGEKPYXCECGKSFSRNANLAVHRRAHXGEKPYGCQVCGKRFSKGERLVRHQRIHXGEKPYHCPACGRSFNQRSILNRHQKXQHRQEPLVQ

SEQ ID NO: 32476 - protein, 70 aa, Homo sapiens
  MOD_RES (40)..(40): Selenocysteine
MLKEHPEMAEAPQQQLGIPVVKLEKELPWGRGREDPSPEXFRLRFRQFRYQEAAGPQEALRELQELCRRW

SEQ ID NO: 32477 - protein, 162 aa, Homo sapiens
  MOD_RES (40)..(40): Selenocysteine
  MOD_RES (77)..(77): Selenocysteine
  MOD_RES (92)..(92): Selenocysteine
  MOD_RES (121)..(121): Selenocysteine
  MOD_RES (144)..(144): Selenocysteine
MLKEHPEMAEAPQQQLGIPVVKLEKELPWGRGREDPSPEXFRLRFRQFRYQEAAGPQEALRELQELCRRWLRPELHXKEQILELLVLEQFLXILPREFYAWIREHGPESGKALAAMVEDLXERALEAKAVGSMPQAGRAGGNSXLQRRLGARHPAGASGGQA

SEQ ID NO: 32478 - protein, 544 aa, Homo sapiens
  MOD_RES (40)..(40): Selenocysteine
  MOD_RES (77)..(77): Selenocysteine
  MOD_RES (92)..(92): Selenocysteine
  MOD_RES (121)..(121): Selenocysteine
  MOD_RES (141)..(141): Selenocysteine
  MOD_RES (178)..(178): Selenocysteine
  MOD_RES (190)..(190): Selenocysteine
  MOD_RES (223)..(223): Selenocysteine
  MOD_RES (248)..(248): Selenocysteine
  MOD_RES (292)..(292): Selenocysteine
  MOD_RES (340)..(340): Selenocysteine
  MOD_RES (369)..(369): Selenocysteine
  MOD_RES (385)..(385): Selenocysteine
  MOD_RES (396)..(396): Selenocysteine
  MOD_RES (411)..(411): Selenocysteine
  MOD_RES (426)..(426): Selenocysteine
  MOD_RES (452)..(452): Selenocysteine
  MOD_RES (454)..(454): Selenocysteine
  MOD_RES (460)..(460): Selenocysteine
  MOD_RES (481)..(481): Selenocysteine
  MOD_RES (509)..(509): Selenocysteine
  MOD_RES (535)..(535): Selenocysteine
MLKEHPEMAEAPQQQLGIPVVKLEKELPWGRGREDPSPEXFRLRFRQFRYQEAAGPQEALRELQELCRRWLRPELHXKEQILELLVLEQFLXILPREFYAWIREHGPESGKALAAMVEDLXERALEAKAVPCHRQGEQEEXALCRGAWEPGIQLGPVEVKPEWGMPPGEGVQGPDPGXEEQLSQDPGDEXRAFQEQALPVLQAGPGLPAVNPRDQEMAAGFFXAGSQGLGPFKDMALAFPEEEWRHVXPAQIDCFGEYVEPQDCRVSPGGGSKEKEAKPPQEDLKGALVALXSERFGEASLQGPGLGRVCEQEPGGPAGSAPGLPPPQHGAIPLPDEVKXHSSFWKPFQCPECGKGFSRSSNLVRHQRXHEEKSYGCVECGKGFXLREYLMKHQRXHLGKRPYVCSECWKXFSQRHHLEVHQRSHXGEKPYKCGDCWKSFSRRQHLQVHRRXHXGEKPYXCECGKSFSRNANLAVHRRAHXGEKPYGCQVCGKRFSKGERLVRHQRIHXGEKPYHCPACGRSFNQRSILNRHQKXQHRQEPLVQ

SEQ ID NO: 32479 - protein, 344 aa, Homo sapiens
  MOD_RES (3)..(3): Selenocysteine
  MOD_RES (38)..(38): Selenocysteine
  MOD_RES (48)..(48): Selenocysteine
  MOD_RES (59)..(59): Selenocysteine
  MOD_RES (118)..(118): Selenocysteine
  MOD_RES (120)..(120): Selenocysteine
  MOD_RES (136)..(136): Selenocysteine
  MOD_RES (199)..(199): Selenocysteine
  MOD_RES (240)..(240): Selenocysteine
  MOD_RES (248)..(248): Selenocysteine
  MOD_RES (272)..(272): Selenocysteine
  MOD_RES (283)..(283): Selenocysteine
MAXALDPDQPKKQKILVEEMAPLKGVQEQQVRHECEVXKPEKEKGEEXRIENGKLIVVXDSCGRVESSGKISEPMEAHNEGSNLERHQAKPKEKIEYKCSEREQRFIQHLDLIEHASXHXGKKLCESDVCQSSSLXGHKKVLSREKGHQCHECGKAFQRSSHLVRHQKIHLGEKPYQCNECGKVFSQNAGLLEHLRIHXGEKPYLCIHCGKNFRRSSHLNRHQRIHSQEEPCECKECGKXFSQALLLXHHQRIHSHSKSHQCNECGKAFSLXSDLIRHHRIHXGEKPFKCNICQKAFRLNSHLAQHVRIHNEEKPYQCSECGEAFRQRSGLFQHQRYHHKDKLA

SEQ ID NO: 32480 - protein, 150 aa, Homo sapiens
  MOD_RES (3)..(3): Selenocysteine
  MOD_RES (31)..(31): Selenocysteine
  MOD_RES (62)..(63): Selenocysteine
  MOD_RES (84)..(84): Selenocysteine
  MOD_RES (86)..(86): Selenocysteine
  MOD_RES (136)..(136): Selenocysteine
MAXALVSAHSLAPLNLKKEGLRVVREDHYSXWEQGFKLQGNSKGLGQEPLCKQFRQLRYEEXXGPREALSRLRELCQQWLQPEXHXKEQILELLVLEQFLIILPKELQARVQEHHPESREDVVVVLEDLQLDLGEXGQQDPDQPKKQKIL

SEQ ID NO: 32481 - protein, 478 aa, Homo sapiens
  MOD_RES (3)..(3): Selenocysteine
  MOD_RES (31)..(31): Selenocysteine
  MOD_RES (62)..(63): Selenocysteine
  MOD_RES (84)..(84): Selenocysteine
  MOD_RES (86)..(86): Selenocysteine
  MOD_RES (136)..(136): Selenocysteine
  MOD_RES (172)..(172): Selenocysteine
  MOD_RES (182)..(182): Selenocysteine
  MOD_RES (193)..(193): Selenocysteine
  MOD_RES (252)..(252): Selenocysteine
  MOD_RES (254)..(254): Selenocysteine
  MOD_RES (270)..(270): Selenocysteine
  MOD_RES (333)..(333): Selenocysteine
  MOD_RES (374)..(374): Selenocysteine
  MOD_RES (382)..(382): Selenocysteine
  MOD_RES (406)..(406): Selenocysteine
  MOD_RES (417)..(417): Selenocysteine
MAXALVSAHSLAPLNLKKEGLRVVREDHYSXWEQGFKLQGNSKGLGQEPLCKQFRQLRYEEXXGPREALSRLRELCQQWLQPEXHXKEQILELLVLEQFLIILPKELQARVQEHHPESREDVVVVLEDLQLDLGEXGQQDPDQPKKQKILVEEMAPLKGVQEQQVRHECEVXKPEKEKGEEXRIENGKLIVVXDSCGRVESSGKISEPMEAHNEGSNLERHQAKPKEKIEYKCSEREQRFIQHLDLIEHASXHXGKKLCESDVCQSSSLXGHKKVLSREKGHQCHECGKAFQRSSHLVRHQKIHLGEKPYQCNECGKVFSQNAGLLEHLRIHXGEKPYLCIHCGKNFRRSSHLNRHQRIHSQEEPCECKECGKXFSQALLLXHHQRIHSHSKSHQCNECGKAFSLXSDLIRHHRIHXGEKPFKCNICQKAFRLNSHLAQHVRIHNEEKPYQCSECGEAFRQRSGLFQHQRYHHKDKLA

SEQ ID NO: 32482 - protein, 479 aa, Homo sapiens
  MOD_RES (3)..(3): Selenocysteine
  MOD_RES (31)..(31): Selenocysteine
  MOD_RES (62)..(63): Selenocysteine
  MOD_RES (84)..(84): Selenocysteine
  MOD_RES (86)..(86): Selenocysteine
  MOD_RES (136)..(136): Selenocysteine
  MOD_RES (173)..(173): Selenocysteine
  MOD_RES (183)..(183): Selenocysteine
  MOD_RES (194)..(194): Selenocysteine
  MOD_RES (253)..(253): Selenocysteine
  MOD_RES (255)..(255): Selenocysteine
  MOD_RES (271)..(271): Selenocysteine
  MOD_RES (334)..(334): Selenocysteine
  MOD_RES (375)..(375): Selenocysteine
  MOD_RES (383)..(383): Selenocysteine
  MOD_RES (407)..(407): Selenocysteine
  MOD_RES (418)..(418): Selenocysteine
MAXALVSAHSLAPLNLKKEGLRVVREDHYSXWEQGFKLQGNSKGLGQEPLCKQFRQLRYEEXXGPREALSRLRELCQQWLQPEXHXKEQILELLVLEQFLIILPKELQARVQEHHPESREDVVVVLEDLQLDLGEXGQQVDPDQPKKQKILVEEMAPLKGVQEQQVRHECEVXKPEKEKGEEXRIENGKLIVVXDSCGRVESSGKISEPMEAHNEGSNLERHQAKPKEKIEYKCSEREQRFIQHLDLIEHASXHXGKKLCESDVCQSSSLXGHKKVLSREKGHQCHECGKAFQRSSHLVRHQKIHLGEKPYQCNECGKVFSQNAGLLEHLRIHXGEKPYLCIHCGKNFRRSSHLNRHQRIHSQEEPCECKECGKXFSQALLLXHHQRIHSHSKSHQCNECGKAFSLXSDLIRHHRIHXGEKPFKCNICQKAFRLNSHLAQHVRIHNEEKPYQCSECGEAFRQRSGLFQHQRYHHKDKLA

SEQ ID NO: 32483 - protein, 270 aa, Homo sapiens
  MOD_RES (44)..(44): Selenocysteine
  MOD_RES (46)..(46): Selenocysteine
  MOD_RES (62)..(62): Selenocysteine
  MOD_RES (125)..(125): Selenocysteine
  MOD_RES (166)..(166): Selenocysteine
  MOD_RES (174)..(174): Selenocysteine
  MOD_RES (198)..(198): Selenocysteine
  MOD_RES (209)..(209): Selenocysteine
MEAHNEGSNLERHQAKPKEKIEYKCSEREQRFIQHLDLIEHASXHXGKKLCESDVCQSSSLXGHKKVLSREKGHQCHECGKAFQRSSHLVRHQKIHLGEKPYQCNECGKVFSQNAGLLEHLRIHXGEKPYLCIHCGKNFRRSSHLNRHQRIHSQEEPCECKECGKXFSQALLLXHHQRIHSHSKSHQCNECGKAFSLXSDLIRHHRIHXGEKPFKCNICQKAFRLNSHLAQHVRIHNEEKPYQCSECGEAFRQRSGLFQHQRYHHKDKLA

SEQ ID NO: 32484 - protein, 330 aa, Homo sapiens
  MOD_RES (12)..(12): Selenocysteine
  MOD_RES (29)..(29): Selenocysteine
  MOD_RES (43)..(43): Selenocysteine
  MOD_RES (174)..(174): Selenocysteine
  MOD_RES (176)..(176): Selenocysteine
  MOD_RES (184)..(184): Selenocysteine
  MOD_RES (215)..(215): Selenocysteine
  MOD_RES (221)..(221): Selenocysteine
  MOD_RES (241)..(241): Selenocysteine
  MOD_RES (280)..(280): Selenocysteine
  MOD_RES (312)..(312): Selenocysteine
EQCPENGEEAVXLVEDLEREPGRPRSSVXVSVKGQEVRLEKMXPPKSSQELLSVRQESVEPQPRGVPKKERARSPDLGPQEQMNPKEKLKPFQRSGLPFPKSGVVSRLEQGEPWIPDLLGSKEKELPSGSHIGDRRVHADLLPSKKDRRSWVEQDHWSFEDEKVAGVHWGYEEXRXLLAILSQXEFYEALRNCHRNSQVYGAVAERLREYGFLRXLEQCRXKFKGLQKSYRKVKSGHPPEXCPFFEEMEALMSAQVIALPSNGLEAAASHSGLVGSDAEXEEPGQRGWQHEEGAEEAVAQESDSDDMDLEAXPQDPNSAAPVVFRSPGGA

SEQ ID NO: 32485 - protein, 462 aa, Homo sapiens
  MOD_RES (11)..(11): Selenocysteine
  MOD_RES (15)..(15): Selenocysteine
  MOD_RES (52)..(52): Selenocysteine
  MOD_RES (67)..(67): Selenocysteine
  MOD_RES (90)..(90): Selenocysteine
  MOD_RES (107)..(107): Selenocysteine
  MOD_RES (121)..(121): Selenocysteine
  MOD_RES (198)..(198): Selenocysteine
  MOD_RES (230)..(230): Selenocysteine
  MOD_RES (239)..(239): Selenocysteine
  MOD_RES (311)..(311): Selenocysteine
  MOD_RES (333)..(333): Selenocysteine
  MOD_RES (339)..(339): Selenocysteine
  MOD_RES (365)..(365): Selenocysteine
  MOD_RES (367)..(367): Selenocysteine
  MOD_RES (395)..(395): Selenocysteine
  MOD_RES (421)..(421): Selenocysteine
  MOD_RES (423)..(423): Selenocysteine
  MOD_RES (457)..(457): Selenocysteine
MAKSALRENGXNSEXFRQRFRRFHYQEVAGPREAFSQLWELCCRWLRPEVRXKEQIVELLVLEQFLXVLPGEIQNWVQEQCPENGEEAVXLVEDLEREPGRPRSSVXVSVKGQEVRLEKMXPPKSSQELLSVRQESVEPQPRGVPKKERARSPDLGPQEQMNPKEKLKPFQRSGFEAGFENEDNSKRDISEEVQLHRXLLARSERKIPRYLHQGKGNESDCRSGRQWAKXSGEKRGKLXLPEKSLSEVLSQQRPCLGERPYKYLKYSKSFGPNSLLMHQVSHQVENPYKCADCGKSFSRSARLIRHRRIHXGEKPYKCLDCGKSFRDSSNFIXHRRIHXGEKPYQCGECGKCFNQSSSLIIHQRXHXGEKPYQCEECGKSFNNSSHFSAHRRIHXGERPHVCPDCGKSFSKSSDLRAHHRXHXGEKPYGCHDCGKCFSKSSALNKHGEIHAREKLLXQSAPK

SEQ ID NO: 32486 - protein, 556 aa, Homo sapiens
  MOD_RES (11)..(11): Selenocysteine
  MOD_RES (15)..(15): Selenocysteine
  MOD_RES (52)..(52): Selenocysteine
  MOD_RES (67)..(67): Selenocysteine
  MOD_RES (90)..(90): Selenocysteine
  MOD_RES (107)..(107): Selenocysteine
  MOD_RES (121)..(121): Selenocysteine
  MOD_RES (252)..(252): Selenocysteine
  MOD_RES (254)..(254): Selenocysteine
  MOD_RES (262)..(262): Selenocysteine
  MOD_RES (293)..(293): Selenocysteine
  MOD_RES (299)..(299): Selenocysteine
  MOD_RES (319)..(319): Selenocysteine
  MOD_RES (358)..(358): Selenocysteine
  MOD_RES (390)..(390): Selenocysteine
  MOD_RES (415)..(415): Selenocysteine
  MOD_RES (417)..(417): Selenocysteine
  MOD_RES (425)..(425): Selenocysteine
  MOD_RES (456)..(456): Selenocysteine
  MOD_RES (462)..(462): Selenocysteine
  MOD_RES (469)..(469): Selenocysteine
  MOD_RES (482)..(482): Selenocysteine
  MOD_RES (539)..(539): Selenocysteine
MAKSALRENGXNSEXFRQRFRRFHYQEVAGPREAFSQLWELCCRWLRPEVRXKEQIVELLVLEQFLXVLPGEIQNWVQEQCPENGEEAVXLVEDLEREPGRPRSSVXVSVKGQEVRLEKMXPPKSSQELLSVRQESVEPQPRGVPKKERARSPDLGPQEQMNPKEKLKPFQRSGLPFPKSGVVSRLEQGEPWIPDLLGSKEKELPSGSHIGDRRVHADLLPSKKDRRSWVEQDHWSFEDEKVAGVHWGYEEXRXLLAILSQXEFYEALRNCHRNSQVYGAVAERLREYGFLRXLEQCRXKFKGLQKSYRKVKSGHPPEXCPFFEEMEALMSAQVIALPSNGLEAAASHSGLVGSDAEXEEPGQRGWQHEEGAEEAVAQESDSDDMDLEAXPQDPNSAAPVVFRSPGGVHWGYEEXKXYLAILSEXQFYEALRNCHRNSQLYGAVAERLWEYGFLRXPEQCRXKFKSLQXSYRKVKNGQAPEXCPFFEEMDALVLKLDLRMKIIQNGIFLRKYNCIGHYLQDLKGKFPGIFIRVKAMRVXVDQEDSGQRPQGRKEEN

SEQ ID NO: 32487 - protein, 21 aa, Homo sapiens
  MOD_RES (12)..(12): Selenocysteine
  MOD_RES (16)..(16): Selenocysteine
MMAKSALRENGXNSEXFRQRF

SEQ ID NO: 32488 - protein, 852 aa, Homo sapiens
  MOD_RES (12)..(12): Selenocysteine
  MOD_RES (16)..(16): Selenocysteine
  MOD_RES (53)..(53): Selenocysteine
  MOD_RES (68)..(68): Selenocysteine
  MOD_RES (91)..(91): Selenocysteine
  MOD_RES (108)..(108): Selenocysteine
  MOD_RES (122)..(122): Selenocysteine
  MOD_RES (253)..(253): Selenocysteine
  MOD_RES (255)..(255): Selenocysteine
  MOD_RES (263)..(263): Selenocysteine
  MOD_RES (294)..(294): Selenocysteine
  MOD_RES (300)..(300): Selenocysteine
  MOD_RES (320)..(320): Selenocysteine
  MOD_RES (359)..(359): Selenocysteine
  MOD_RES (391)..(391): Selenocysteine
  MOD_RES (416)..(416): Selenocysteine
  MOD_RES (418)..(418): Selenocysteine
  MOD_RES (426)..(426): Selenocysteine
  MOD_RES (457)..(457): Selenocysteine
  MOD_RES (463)..(463): Selenocysteine
  MOD_RES (470)..(470): Selenocysteine
  MOD_RES (483)..(483): Selenocysteine
  MOD_RES (509)..(509): Selenocysteine
  MOD_RES (517)..(517): Selenocysteine
  MOD_RES (533)..(533): Selenocysteine
  MOD_RES (544)..(544): Selenocysteine
  MOD_RES (553)..(553): Selenocysteine
  MOD_RES (588)..(588): Selenocysteine
  MOD_RES (620)..(620): Selenocysteine
  MOD_RES (629)..(629): Selenocysteine
  MOD_RES (701)..(701): Selenocysteine
  MOD_RES (723)..(723): Selenocysteine
  MOD_RES (729)..(729): Selenocysteine
  MOD_RES (755)..(755): Selenocysteine
  MOD_RES (757)..(757): Selenocysteine
  MOD_RES (785)..(785): Selenocysteine
  MOD_RES (811)..(811): Selenocysteine
  MOD_RES (813)..(813): Selenocysteine
  MOD_RES (847)..(847): Selenocysteine
MMAKSALRENGXNSEXFRQRFRRFHYQEVAGPREAFSQLWELCCRWLRPEVRXKEQIVELLVLEQFLXVLPGEIQNWVQEQCPENGEEAVXLVEDLEREPGRPRSSVXVSVKGQEVRLEKMXPPKSSQELLSVRQESVEPQPRGVPKKERARSPDLGPQEQMNPKEKLKPFQRSGLPFPKSGVVSRLEQGEPWIPDLLGSKEKELPSGSHIGDRRVHADLLPSKKDRRSWVEQDHWSFEDEKVAGVHWGYEEXRXLLAILSQXEFYEALRNCHRNSQVYGAVAERLREYGFLRXLEQCRXKFKGLQKSYRKVKSGHPPEXCPFFEEMEALMSAQVIALPSNGLEAAASHSGLVGSDAEXEEPGQRGWQHEEGAEEAVAQESDSDDMDLEAXPQDPNSAAPVVFRSPGGVHWGYEEXKXYLAILSEXQFYEALRNCHRNSQLYGAVAERLWEYGFLRXPEQCRXKFKSLQXSYRKVKNGQAPEXCPFFEEMDALVSVRVAAPPNDGQEEXASCPVQGXSEAEAQKQAEEADEAXEEDSDDDEEDXEIPPGAVIXRAPVLFQSPRGFEAGFENEDNSKRDISEEVQLHRXLLARSERKIPRYLHQGKGNESDCRSGRQWAKXSGEKRGKLXLPEKSLSEVLSQQRPCLGERPYKYLKYSKSFGPNSLLMHQVSHQVENPYKCADCGKSFSRSARLIRHRRIHXGEKPYKCLDCGKSFRDSSNFIXHRRIHXGEKPYQCGECGKCFNQSSSLIIHQRXHXGEKPYQCEECGKSFNNSSHFSAHRRIHXGERPHVCPDCGKSFSKSSDLRAHHRXHXGEKPYGCHDCGKCFSKSSALNKHGEIHAREKLLXQSAPK

SEQ ID NO: 32489 - protein, 199 aa, Homo sapiens
  MOD_RES (12)..(12): Selenocysteine
  MOD_RES (16)..(16): Selenocysteine
  MOD_RES (53)..(53): Selenocysteine
  MOD_RES (68)..(68): Selenocysteine
  MOD_RES (91)..(91): Selenocysteine
  MOD_RES (108)..(108): Selenocysteine
  MOD_RES (122)..(122): Selenocysteine
  MOD_RES (199)..(199): Selenocysteine
MMAKSALRENGXNSEXFRQRFRRFHYQEVAGPREAFSQLWELCCRWLRPEVRXKEQIVELLVLEQFLXVLPGEIQNWVQEQCPENGEEAVXLVEDLEREPGRPRSSVXVSVKGQEVRLEKMXPPKSSQELLSVRQESVEPQPRGVPKKERARSPDLGPQEQMNPKEKLKPFQRSGWSKESHGSQICWALRRKNFQVAAX

SEQ ID NO: 32490 - protein, 316 aa, Homo sapiens
  MOD_RES (22)..(22): Selenocysteine
  MOD_RES (41)..(41): Selenocysteine
  MOD_RES (46)..(46): Selenocysteine
  MOD_RES (58)..(58): Selenocysteine
  MOD_RES (64)..(64): Selenocysteine
  MOD_RES (76)..(77): Selenocysteine
  MOD_RES (88)..(88): Selenocysteine
  MOD_RES (160)..(160): Selenocysteine
  MOD_RES (162)..(162): Selenocysteine
  MOD_RES (170)..(170): Selenocysteine
  MOD_RES (201)..(201): Selenocysteine
  MOD_RES (207)..(207): Selenocysteine
  MOD_RES (227)..(227): Selenocysteine
  MOD_RES (266)..(266): Selenocysteine
  MOD_RES (298)..(298): Selenocysteine
MSRKWRGGSDSRGRFRKRAWKXIFGHSLCEGAGSALGEDDXPEIIXRVIKCSAGVSGXPAQGCXQEREGKKPRPGXXGADEPKGEAQXFSKERLEQGEPWIPDLLGSKEKELPSGSHIGDRRVHADLLPSKKDRRSWVEQDHWSFEDEKVAGVHWGYEEXRXLLAILSQXEFYEALRNCHRNSQVYGAVAERLREYGFLRXLEQCRXKFKGLQKSYRKVKSGHPPEXCPFFEEMEALMSAQVIALPSNGLEAAASHSGLVGSDAEXEEPGQRGWQHEEGAEEAVAQESDSDDMDLEAXPQDPNSAAPVVFRSPGGA

SEQ ID NO: 32491 - protein, 91 aa, Homo sapiens
  MOD_RES (19)..(19): Selenocysteine
  MOD_RES (36)..(37): Selenocysteine
  MOD_RES (48)..(48): Selenocysteine
  MOD_RES (50)..(50): Selenocysteine
  MOD_RES (71)..(71): Selenocysteine
  MOD_RES (73)..(73): Selenocysteine
ELQAWLREHRPENGEEAVXMLEELEKELEEPRQQDXXHGQEMFWQEMXSXGALKSLSLNSPVQPLENQCKXEXQESQAFQERGEKPQSMWG

SEQ ID NO: 32492 - protein, 51 aa, Homo sapiens
  MOD_RES (6)..(6): Selenocysteine
MSGEAXVLAYHAPEEQEGLLVVKVEEENYVLDQDFGLQENPWSQEKCSGRK

SEQ ID NO: 32493 - protein, 48 aa, Homo sapiens
  MOD_RES (6)..(6): Selenocysteine
MSGEAXVLAYHAPEEQEGLLVVKVEEENYVLDQDFGLQENPWSQEVFR

SEQ ID NO: 32494 - protein, 69 aa, Homo sapiens
  MOD_RES (6)..(6): Selenocysteine
  MOD_RES (60)..(60): Selenocysteine
MSGEAXVLAYHAPEEQEGLLVVKVEEENYVLDQDFGLQENPWSQEVFRQKFRQFSYSDSXGPREALSRL

SEQ ID NO: 32495 - protein, 494 aa, Homo sapiens
  MOD_RES (6)..(6): Selenocysteine
  MOD_RES (60)..(60): Selenocysteine
  MOD_RES (121)..(121): Selenocysteine
  MOD_RES (138)..(139): Selenocysteine
  MOD_RES (150)..(150): Selenocysteine
  MOD_RES (152)..(152): Selenocysteine
  MOD_RES (173)..(173): Selenocysteine
  MOD_RES (175)..(175): Selenocysteine
  MOD_RES (219)..(219): Selenocysteine
  MOD_RES (261)..(261): Selenocysteine
  MOD_RES (268)..(268): Selenocysteine
  MOD_RES (290)..(290): Selenocysteine
  MOD_RES (296)..(296): Selenocysteine
  MOD_RES (324)..(324): Selenocysteine
  MOD_RES (380)..(380): Selenocysteine
  MOD_RES (408)..(408): Selenocysteine
  MOD_RES (436)..(436): Selenocysteine
  MOD_RES (457)..(457): Selenocysteine
  MOD_RES (464)..(464): Selenocysteine
  MOD_RES (477)..(477): Selenocysteine
  MOD_RES (490)..(490): Selenocysteine
  MOD_RES (492)..(492): Selenocysteine
MSGEAXVLAYHAPEEQEGLLVVKVEEENYVLDQDFGLQENPWSQEVFRQKFRQFSYSDSXGPREALSRLRELCCQWLRPEVHSKEQILELLMLEQFLAILPEELQAWLREHRPENGEEAVXMLEELEKELEEPRQQDXXHGQEMFWQEMXSXGALKSLSLNSPVQPLENQCKXEXQESQAFQERDGRMVAGKVLMAKQEIVECVASAAMISPGKLPGEXHSQRIAEEALGGLDNSKKQKGNAAGNKISQLPSQDRHFSLAXFNRRIPXEHSVLESHESEGSFSMNSNDIXQQSVDXREKLYECFDCGKAFCQSSKLIRHQRIHXGERPYACKECGKAFSLSSDLVRHQRIHSGEKPYECCECGKAFRGSSELIRHRRIHXGEKPYECGECGKAFSRSSALIQHKKIHXGDKSYECIACGKAFGRSSILIEHQRIHXGEKPYECNECGKSFNQSSALXQHQRIHXGEKPYECSECRKXFRHRSGLMQHQRXHXRV

SEQ ID NO: 32496 - protein, 221 aa, Homo sapiens
  MOD_RES (6)..(6): Selenocysteine
  MOD_RES (60)..(60): Selenocysteine
  MOD_RES (121)..(121): Selenocysteine
  MOD_RES (138)..(139): Selenocysteine
  MOD_RES (150)..(150): Selenocysteine
  MOD_RES (152)..(152): Selenocysteine
  MOD_RES (173)..(173): Selenocysteine
  MOD_RES (175)..(175): Selenocysteine
  MOD_RES (203)..(203): Selenocysteine
MSGEAXVLAYHAPEEQEGLLVVKVEEENYVLDQDFGLQENPWSQEVFRQKFRQFSYSDSXGPREALSRLRELCCQWLRPEVHSKEQILELLMLEQFLAILPEELQAWLREHRPENGEEAVXMLEELEKELEEPRQQDXXHGQEMFWQEMXSXGALKSLSLNSPVQPLENQCKXEXQESQAFQERDGVSLYHPGWSAVVQPQLXAAALNPWVKVILLPQPPE

SEQ ID NO: 32497 - protein, 145 aa, Homo sapiens
  MOD_RES (6)..(6): Selenocysteine
  MOD_RES (60)..(60): Selenocysteine
  MOD_RES (121)..(121): Selenocysteine
MSGEAXVLAYHAPEEQEGLLVVKVEEENYVLDQDFGLQENPWSQEVFRQKFRQFSYSDSXGPREALSRLRELCCQWLRPEVHSKEQILELLMLEQFLAILPEELQAWLREHRPENGEEAVXMLEELEKELEEPRQQEFSACVSSE

SEQ ID NO: 32498 - protein, 307 aa, Homo sapiens
  MOD_RES (32)..(32): Selenocysteine
  MOD_RES (74)..(74): Selenocysteine
  MOD_RES (81)..(81): Selenocysteine
  MOD_RES (103)..(103): Selenocysteine
  MOD_RES (109)..(109): Selenocysteine
  MOD_RES (137)..(137): Selenocysteine
  MOD_RES (193)..(193): Selenocysteine
  MOD_RES (221)..(221): Selenocysteine
  MOD_RES (249)..(249): Selenocysteine
  MOD_RES (270)..(270): Selenocysteine
  MOD_RES (277)..(277): Selenocysteine
  MOD_RES (290)..(290): Selenocysteine
  MOD_RES (303)..(303): Selenocysteine
  MOD_RES (305)..(305): Selenocysteine
MVAGKVLMAKQEIVECVASAAMISPGKLPGEXHSQRIAEEALGGLDNSKKQKGNAAGNKISQLPSQDRHFSLAXFNRRIPXEHSVLESHESEGSFSMNSNDIXQQSVDXREKLYECFDCGKAFCQSSKLIRHQRIHXGERPYACKECGKAFSLSSDLVRHQRIHSGEKPYECCECGKAFRGSSELIRHRRIHXGEKPYECGECGKAFSRSSALIQHKKIHXGDKSYECIACGKAFGRSSILIEHQRIHXGEKPYECNECGKSFNQSSALXQHQRIHXGEKPYECSECRKXFRHRSGLMQHQRXHXRV

SEQ ID NO: 32499 - protein, 17 aa, Homo sapiens
  MOD_RES (4)..(4): Selenocysteine
MASXEEQYDLKIVKVEE

SEQ ID NO: 32500 - protein, 24 aa, Homo sapiens
  MOD_RES (4)..(4): Selenocysteine
MASXEEQYDLKIVKVEEDPIWDQE

SEQ ID NO: 32501 - protein, 78 aa, Homo sapiens
  MOD_RES (4)..(4): Selenocysteine
  MOD_RES (25)..(25): Selenocysteine
  MOD_RES (50)..(50): Selenocysteine
  MOD_RES (74)..(74): Selenocysteine
MASXEEQYDLKIVKVEEDPIWDQEXHLRGNNFSGQEASRQLFRQFCYQEXPGPREALSRLRELCHQWLRPEIHXKEQI

SEQ ID NO: 32502 - protein, 103 aa, Homo sapiens
  MOD_RES (4)..(4): Selenocysteine
  MOD_RES (25)..(25): Selenocysteine
  MOD_RES (50)..(50): Selenocysteine
  MOD_RES (74)..(74): Selenocysteine
  MOD_RES (89)..(89): Selenocysteine
MASXEEQYDLKIVKVEEDPIWDQEXHLRGNNFSGQEASRQLFRQFCYQEXPGPREALSRLRELCHQWLRPEIHXKEQILELLVLEQFLXILPEELQAWVREHH

SEQ ID NO: 32503 - protein, 107 aa, Homo sapiens
  MOD_RES (4)..(4): Selenocysteine
  MOD_RES (25)..(25): Selenocysteine
  MOD_RES (50)..(50): Selenocysteine
  MOD_RES (74)..(74): Selenocysteine
  MOD_RES (89)..(89): Selenocysteine
MASXEEQYDLKIVKVEEDPIWDQEXHLRGNNFSGQEASRQLFRQFCYQEXPGPREALSRLRELCHQWLRPEIHXKEQILELLVLEQFLXILPEELQAWVREHHPESG

SEQ ID NO: 32504 - protein, 148 aa, Homo sapiens
  MOD_RES (4)..(4): Selenocysteine
  MOD_RES (25)..(25): Selenocysteine
  MOD_RES (50)..(50): Selenocysteine
  MOD_RES (74)..(74): Selenocysteine
  MOD_RES (89)..(89): Selenocysteine
MASXEEQYDLKIVKVEEDPIWDQEXHLRGNNFSGQEASRQLFRQFCYQEXPGPREALSRLRELCHQWLRPEIHXKEQILELLVLEQFLXILPEELQAWVREHHPESGEEAVAVVEDLEQELSEPGNQAPDHEHGHSEVLLEDVEHLKV

SEQ ID NO: 32505 - protein, 155 aa, Homo sapiens
  MOD_RES (4)..(4): Selenocysteine
  MOD_RES (25)..(25): Selenocysteine
  MOD_RES (50)..(50): Selenocysteine
  MOD_RES (74)..(74): Selenocysteine
  MOD_RES (89)..(89): Selenocysteine
  MOD_RES (153)..(153): Selenocysteine
MASXEEQYDLKIVKVEEDPIWDQEXHLRGNNFSGQEASRQLFRQFCYQEXPGPREALSRLRELCHQWLRPEIHXKEQILELLVLEQFLXILPEELQAWVREHHPESGEEAVAVVEDLEQELSEPGNQAPDHEHGHSEVLLEDVEHLKVKQEPXDI

SEQ ID NO: 32506 - protein, 217 aa, Homo sapiens
  MOD_RES (4)..(4): Selenocysteine
  MOD_RES (25)..(25): Selenocysteine
  MOD_RES (50)..(50): Selenocysteine
  MOD_RES (74)..(74): Selenocysteine
  MOD_RES (89)..(89): Selenocysteine
  MOD_RES (153)..(153): Selenocysteine
  MOD_RES (162)..(162): Selenocysteine
MASXEEQYDLKIVKVEEDPIWDQEXHLRGNNFSGQEASRQLFRQFCYQEXPGPREALSRLRELCHQWLRPEIHXKEQILELLVLEQFLXILPEELQAWVREHHPESGEEAVAVVEDLEQELSEPGNQAPDHEHGHSEVLLEDVEHLKVKQEPXDIQLQPMVXQLRYESFCLHQFQEQDGESIPENQELASKQEILKEMEHLGDSKLQRDVSLDSKYR

SEQ ID NO: 32507 - protein, 406 aa, Homo sapiens
  MOD_RES (4)..(4): Selenocysteine
  MOD_RES (25)..(25): Selenocysteine
  MOD_RES (50)..(50): Selenocysteine
  MOD_RES (74)..(74): Selenocysteine
  MOD_RES (89)..(89): Selenocysteine
  MOD_RES (153)..(153): Selenocysteine
  MOD_RES (162)..(162): Selenocysteine
  MOD_RES (219)..(219): Selenocysteine
  MOD_RES (234)..(234): Selenocysteine
  MOD_RES (249)..(249): Selenocysteine
  MOD_RES (262)..(262): Selenocysteine
  MOD_RES (290)..(290): Selenocysteine
  MOD_RES (311)..(311): Selenocysteine
  MOD_RES (318)..(318): Selenocysteine
  MOD_RES (346)..(346): Selenocysteine
  MOD_RES (374)..(374): Selenocysteine
  MOD_RES (392)..(392): Selenocysteine
  MOD_RES (402)..(402): Selenocysteine
MASXEEQYDLKIVKVEEDPIWDQEXHLRGNNFSGQEASRQLFRQFCYQEXPGPREALSRLRELCHQWLRPEIHXKEQILELLVLEQFLXILPEELQAWVREHHPESGEEAVAVVEDLEQELSEPGNQAPDHEHGHSEVLLEDVEHLKVKQEPXDIQLQPMVXQLRYESFCLHQFQEQDGESIPENQELASKQEILKEMEHLGDSKLQRDVSLDSKYREXCKRDSKAEKQQAHSXGERRHRCNECGKSFXKSSVLIEHQRIHXGEKPYECEECGKAFSRRSSLNEHRRSHXGEKPYQCKECGKAFSASNGLXRHRRIHXGEKPYECKVCGKAFLLSSCLVQHQRIHXGEKRYQCRECGKAFIQNAGLFQHLRVHXGEKPYQCSQCSKLFSKRXLLKKHQKIHXGERP

SEQ ID NO: 32508 - protein, 88 aa, Homo sapiens
  MOD_RES (6)..(6): Selenocysteine
  MOD_RES (10)..(10): Selenocysteine
  MOD_RES (37)..(37): Selenocysteine
  MOD_RES (46)..(46): Selenocysteine
MGWNLXLGMXVAPDHEHGHSEVLLEDVEHLKVKQEPXDIQLQPMVXQLRYESFCLHQFQEQDGESIPENQELASKQEILKEMEHLGDS

SEQ ID NO: 32509 - protein, 104 aa, Homo sapiens
  MOD_RES (3)..(3): Selenocysteine
  MOD_RES (60)..(60): Selenocysteine
  MOD_RES (75)..(75): Selenocysteine
  MOD_RES (90)..(90): Selenocysteine
  MOD_RES (103)..(103): Selenocysteine
MVXQLRYESFCLHQFQEQDGESIPENQELASKQEILKEMEHLGDSKLQRDVSLDSKYREXCKRDSKAEKQQAHSXGERRHRCNECGKSFXKSSVLIEHQRIHXG

SEQ ID NO: 32510 - protein, 205 aa, Homo sapiens
  MOD_RES (3)..(3): Selenocysteine
  MOD_RES (60)..(60): Selenocysteine
  MOD_RES (75)..(75): Selenocysteine
  MOD_RES (90)..(90): Selenocysteine
  MOD_RES (103)..(103): Selenocysteine
  MOD_RES (131)..(131): Selenocysteine
  MOD_RES (152)..(152): Selenocysteine
  MOD_RES (159)..(159): Selenocysteine
  MOD_RES (187)..(187): Selenocysteine
MVXQLRYESFCLHQFQEQDGESIPENQELASKQEILKEMEHLGDSKLQRDVSLDSKYREXCKRDSKAEKQQAHSXGERRHRCNECGKSFXKSSVLIEHQRIHXGEKPYECEECGKAFSRRSSLNEHRRSHXGEKPYQCKECGKAFSASNGLXRHRRIHXGEKPYECKVCGKAFLLSSCLVQHQRIHXGEKRYQCRECGKAFIQNA

SEQ ID NO: 32511 - protein, 247 aa, Homo sapiens
  MOD_RES (3)..(3): Selenocysteine
  MOD_RES (60)..(60): Selenocysteine
  MOD_RES (75)..(75): Selenocysteine
  MOD_RES (90)..(90): Selenocysteine
  MOD_RES (103)..(103): Selenocysteine
  MOD_RES (131)..(131): Selenocysteine
  MOD_RES (152)..(152): Selenocysteine
  MOD_RES (159)..(159): Selenocysteine
  MOD_RES (187)..(187): Selenocysteine
  MOD_RES (215)..(215): Selenocysteine
  MOD_RES (233)..(233): Selenocysteine
  MOD_RES (243)..(243): Selenocysteine
MVXQLRYESFCLHQFQEQDGESIPENQELASKQEILKEMEHLGDSKLQRDVSLDSKYREXCKRDSKAEKQQAHSXGERRHRCNECGKSFXKSSVLIEHQRIHXGEKPYECEECGKAFSRRSSLNEHRRSHXGEKPYQCKECGKAFSASNGLXRHRRIHXGEKPYECKVCGKAFLLSSCLVQHQRIHXGEKRYQCRECGKAFIQNAGLFQHLRVHXGEKPYQCSQCSKLFSKRXLLKKHQKIHXGERP

SEQ ID NO: 32512 - protein, 408 aa, Homo sapiens
  MOD_RES (13)..(13): Selenocysteine
  MOD_RES (19)..(19): Selenocysteine
  MOD_RES (85)..(85): Selenocysteine
  MOD_RES (91)..(91): Selenocysteine
  MOD_RES (171)..(171): Selenocysteine
  MOD_RES (187)..(187): Selenocysteine
  MOD_RES (206)..(206): Selenocysteine
  MOD_RES (240)..(240): Selenocysteine
  MOD_RES (255)..(255): Selenocysteine
  MOD_RES (276)..(276): Selenocysteine
  MOD_RES (281)..(281): Selenocysteine
  MOD_RES (283)..(283): Selenocysteine
  MOD_RES (309)..(309): Selenocysteine
  MOD_RES (311)..(311): Selenocysteine
  MOD_RES (339)..(339): Selenocysteine
  MOD_RES (365)..(365): Selenocysteine
  MOD_RES (367)..(367): Selenocysteine
  MOD_RES (382)..(382): Selenocysteine
  MOD_RES (388)..(388): Selenocysteine
  MOD_RES (392)..(392): Selenocysteine
MAEGLWEQGFLRXPEQCRXKFKSLQLSYRKVRRGRVPEPCIFYEEMNALSGSWASAPPMASDAVPGQEGSDIEAGELNHQNGEPXEVEDGXVDGADRDEKDFRNPGQEVRKLDLPVLFPNRLGFEFKNEIKKENLKWDDSEEVEINKALQRKSRGVYWHSELQKGLESEPXSRRQCRNSPGESEEKXPSQEKMSHQSFCARDKACXHILCGKNCSQSVHSPHKPALKLEKVSQCPECGKXFSRSSYLVRHQRIHXGEKPHKCSECGKGFSERSNLXAHLRXHXGERPYQCGQCGKSFNQSSSLIVHQRXHXGEKPYQCIVCGKRFNNSSQFSAHRRIHXGESPYKCAVCGKIFNNSSHFSAHRKXHXGEKPYRCSHCERGFXKNSALXRHQXVHMKAVLSSQEGRDAL

SEQ ID NO: 32513 - protein, 138 aa, Homo sapiens
  MOD_RES (13)..(13): Selenocysteine
  MOD_RES (19)..(19): Selenocysteine
  MOD_RES (85)..(85): Selenocysteine
  MOD_RES (91)..(91): Selenocysteine
  MOD_RES (125)..(125): Selenocysteine
MAEGLWEQGFLRXPEQCRXKFKSLQLSYRKVRRGRVPEPCIFYEEMNALSGSWASAPPMASDAVPGQEGSDIEAGELNHQNGEPXEVEDGXVDGADRDEKDFRNPGQEVRKLDLPVLFPNRLGKXPLALMVKGWQSPL

SEQ ID NO: 32514 - protein, 229 aa, Homo sapiens
  MOD_RES (8)..(8): Selenocysteine
  MOD_RES (19)..(19): Selenocysteine
  MOD_RES (49)..(49): Selenocysteine
  MOD_RES (70)..(70): Selenocysteine
  MOD_RES (87)..(87): Selenocysteine
  MOD_RES (95)..(95): Selenocysteine
  MOD_RES (132)..(132): Selenocysteine
  MOD_RES (136)..(136): Selenocysteine
  MOD_RES (140)..(141): Selenocysteine
  MOD_RES (160)..(161): Selenocysteine
  MOD_RES (182)..(182): Selenocysteine
  MOD_RES (190)..(190): Selenocysteine
  MOD_RES (192)..(192): Selenocysteine
  MOD_RES (228)..(228): Selenocysteine
MMAAVKSXEAHPSSNKDPXQGQKSALQGNSPDSEASRQRFRQFCYQEVXGPHEAFSKLWELCCQWLRPKXHSKEEILELLVLEQFLXILPEEIQXWVREQHPENGEEAVALVEDVQRAPGQQPGLLLRLPGXCLKXQVSXXRRQVLWSGQLGPRDQPCVXXELYPSVSKNGCAQALHKGPSXGVPPRGRXVXSRWQQVCPGAMKRPRRSWLFLVVLNFMENSRPVSRXA

SEQ ID NO: 32515 - protein, 186 aa, Homo sapiens
  MOD_RES (8)..(8): Selenocysteine
  MOD_RES (19)..(19): Selenocysteine
  MOD_RES (49)..(49): Selenocysteine
  MOD_RES (70)..(70): Selenocysteine
  MOD_RES (87)..(87): Selenocysteine
  MOD_RES (95)..(95): Selenocysteine
  MOD_RES (155)..(155): Selenocysteine
  MOD_RES (159)..(159): Selenocysteine
MMAAVKSXEAHPSSNKDPXQGQKSALQGNSPDSEASRQRFRQFCYQEVXGPHEAFSKLWELCCQWLRPKXHSKEEILELLVLEQFLXILPEEIQXWVREQHPENGEEAVALVEDVQRAPGQQQQVCPGAMKRPRRSWLFLVVLNFMENSRPVSRXARSXGPWRKDSGSRVFCGPQNSVAPSSKAYS

SEQ ID NO: 32516 - protein, 218 aa, Homo sapiens
  MOD_RES (8)..(8): Selenocysteine
  MOD_RES (19)..(19): Selenocysteine
  MOD_RES (49)..(49): Selenocysteine
  MOD_RES (70)..(70): Selenocysteine
  MOD_RES (87)..(87): Selenocysteine
  MOD_RES (95)..(95): Selenocysteine
  MOD_RES (143)..(143): Selenocysteine
  MOD_RES (161)..(161): Selenocysteine
  MOD_RES (179)..(179): Selenocysteine
  MOD_RES (188)..(188): Selenocysteine
  MOD_RES (190)..(190): Selenocysteine
  MOD_RES (206)..(206): Selenocysteine
MMAAVKSXEAHPSSNKDPXQGQKSALQGNSPDSEASRQRFRQFCYQEVXGPHEAFSKLWELCCQWLRPKXHSKEEILELLVLEQFLXILPEEIQXWVREQHPENGEEAVALVEDVQRAPGQQVLDSEKDLKVLMKEMAPLGAXRESLRSQWKQEVQPEEPXFKGSQSSHQRPGEQSEAXGVPWGYEEXKXLLAILSSSQFYGKLQXCQQNSQIYRAMA

SEQ ID NO: 32517 - protein, 425 aa, Homo sapiens
  MOD_RES (8)..(8): Selenocysteine
  MOD_RES (19)..(19): Selenocysteine
  MOD_RES (49)..(49): Selenocysteine
  MOD_RES (70)..(70): Selenocysteine
  MOD_RES (87)..(87): Selenocysteine
  MOD_RES (95)..(95): Selenocysteine
  MOD_RES (143)..(143): Selenocysteine
  MOD_RES (161)..(161): Selenocysteine
  MOD_RES (192)..(192): Selenocysteine
  MOD_RES (199)..(199): Selenocysteine
  MOD_RES (205)..(205): Selenocysteine
  MOD_RES (241)..(241): Selenocysteine
  MOD_RES (252)..(252): Selenocysteine
  MOD_RES (261)..(261): Selenocysteine
  MOD_RES (263)..(263): Selenocysteine
  MOD_RES (279)..(279): Selenocysteine
  MOD_RES (302)..(302): Selenocysteine
  MOD_RES (308)..(308): Selenocysteine
  MOD_RES (374)..(374): Selenocysteine
  MOD_RES (380)..(380): Selenocysteine
MMAAVKSXEAHPSSNKDPXQGQKSALQGNSPDSEASRQRFRQFCYQEVXGPHEAFSKLWELCCQWLRPKXHSKEEILELLVLEQFLXILPEEIQXWVREQHPENGEEAVALVEDVQRAPGQQVLDSEKDLKVLMKEMAPLGAXRESLRSQWKQEVQPEEPXFKGSQSSHQRPGEQSEAWLAPQAPRNLPQNXGLHDQEXGAVVWXAGSQGPAMRDNRAVSLCQQEWMCPGPAQRALYRGAXQRKDSHVSLAXGVPWGYEEXKXLLAILSSSQFYGKLQXCQQNSQIYRAMAEGLWEQGFLRXPEQCRXKFKSLQLSYRKVRRGRVPEPCIFYEEMNALSGSWASAPPMASDAVPGQEGSDIEAGELNHQNGEPXEVEDGXVDGADRDEKDFRNPGQEVRKLDLPVLFPNRLGFEFKNEIKKENLK

SEQ ID NO: 32518 - protein, 427 aa, Homo sapiens
  MOD_RES (8)..(8): Selenocysteine
  MOD_RES (19)..(19): Selenocysteine
  MOD_RES (49)..(49): Selenocysteine
  MOD_RES (70)..(70): Selenocysteine
  MOD_RES (87)..(87): Selenocysteine
  MOD_RES (95)..(95): Selenocysteine
  MOD_RES (143)..(143): Selenocysteine
  MOD_RES (161)..(161): Selenocysteine
  MOD_RES (192)..(192): Selenocysteine
  MOD_RES (199)..(199): Selenocysteine
  MOD_RES (205)..(205): Selenocysteine
  MOD_RES (241)..(241): Selenocysteine
  MOD_RES (252)..(252): Selenocysteine
  MOD_RES (261)..(261): Selenocysteine
  MOD_RES (263)..(263): Selenocysteine
  MOD_RES (279)..(279): Selenocysteine
  MOD_RES (302)..(302): Selenocysteine
  MOD_RES (308)..(308): Selenocysteine
  MOD_RES (374)..(374): Selenocysteine
  MOD_RES (380)..(380): Selenocysteine
  MOD_RES (414)..(414): Selenocysteine
MMAAVKSXEAHPSSNKDPXQGQKSALQGNSPDSEASRQRFRQFCYQEVXGPHEAFSKLWELCCQWLRPKXHSKEEILELLVLEQFLXILPEEIQXWVREQHPENGEEAVALVEDVQRAPGQQVLDSEKDLKVLMKEMAPLGAXRESLRSQWKQEVQPEEPXFKGSQSSHQRPGEQSEAWLAPQAPRNLPQNXGLHDQEXGAVVWXAGSQGPAMRDNRAVSLCQQEWMCPGPAQRALYRGAXQRKDSHVSLAXGVPWGYEEXKXLLAILSSSQFYGKLQXCQQNSQIYRAMAEGLWEQGFLRXPEQCRXKFKSLQLSYRKVRRGRVPEPCIFYEEMNALSGSWASAPPMASDAVPGQEGSDIEAGELNHQNGEPXEVEDGXVDGADRDEKDFRNPGQEVRKLDLPVLFPNRLGKXPLALMVKGWQSPL

SEQ ID NO: 32519 - protein, 697 aa, Homo sapiens
  MOD_RES (8)..(8): Selenocysteine
  MOD_RES (19)..(19): Selenocysteine
  MOD_RES (49)..(49): Selenocysteine
  MOD_RES (70)..(70): Selenocysteine
  MOD_RES (87)..(87): Selenocysteine
  MOD_RES (95)..(95): Selenocysteine
  MOD_RES (143)..(143): Selenocysteine
  MOD_RES (161)..(161): Selenocysteine
  MOD_RES (192)..(192): Selenocysteine
  MOD_RES (199)..(199): Selenocysteine
  MOD_RES (205)..(205): Selenocysteine
  MOD_RES (241)..(241): Selenocysteine
  MOD_RES (252)..(252): Selenocysteine
  MOD_RES (261)..(261): Selenocysteine
  MOD_RES (263)..(263): Selenocysteine
  MOD_RES (279)..(279): Selenocysteine
  MOD_RES (302)..(302): Selenocysteine
  MOD_RES (308)..(308): Selenocysteine
  MOD_RES (374)..(374): Selenocysteine
  MOD_RES (380)..(380): Selenocysteine
  MOD_RES (460)..(460): Selenocysteine
  MOD_RES (476)..(476): Selenocysteine
  MOD_RES (495)..(495): Selenocysteine
  MOD_RES (529)..(529): Selenocysteine
  MOD_RES (544)..(544): Selenocysteine
  MOD_RES (565)..(565): Selenocysteine
  MOD_RES (570)..(570): Selenocysteine
  MOD_RES (572)..(572): Selenocysteine
  MOD_RES (598)..(598): Selenocysteine
  MOD_RES (600)..(600): Selenocysteine
  MOD_RES (628)..(628): Selenocysteine
  MOD_RES (654)..(654): Selenocysteine
  MOD_RES (656)..(656): Selenocysteine
  MOD_RES (671)..(671): Selenocysteine
  MOD_RES (677)..(677): Selenocysteine
  MOD_RES (681)..(681): Selenocysteine
MMAAVKSXEAHPSSNKDPXQGQKSALQGNSPDSEASRQRFRQFCYQEVXGPHEAFSKLWELCCQWLRPKXHSKEEILELLVLEQFLXILPEEIQXWVREQHPENGEEAVALVEDVQRAPGQQVLDSEKDLKVLMKEMAPLGAXRESLRSQWKQEVQPEEPXFKGSQSSHQRPGEQSEAWLAPQAPRNLPQNXGLHDQEXGAVVWXAGSQGPAMRDNRAVSLCQQEWMCPGPAQRALYRGAXQRKDSHVSLAXGVPWGYEEXKXLLAILSSSQFYGKLQXCQQNSQIYRAMAEGLWEQGFLRXPEQCRXKFKSLQLSYRKVRRGRVPEPCIFYEEMNALSGSWASAPPMASDAVPGQEGSDIEAGELNHQNGEPXEVEDGXVDGADRDEKDFRNPGQEVRKLDLPVLFPNRLGFEFKNEIKKENLKWDDSEEVEINKALQRKSRGVYWHSELQKGLESEPXSRRQCRNSPGESEEKXPSQEKMSHQSFCARDKACXHILCGKNCSQSVHSPHKPALKLEKVSQCPECGKXFSRSSYLVRHQRIHXGEKPHKCSECGKGFSERSNLXAHLRXHXGERPYQCGQCGKSFNQSSSLIVHQRXHXGEKPYQCIVCGKRFNNSSQFSAHRRIHXGESPYKCAVCGKIFNNSSHFSAHRKXHXGEKPYRCSHCERGFXKNSALXRHQXVHMKAVLSSQEGRDAL

SEQ ID NO: 32520 - protein, 186 aa, Homo sapiens
  MOD_RES (29)..(29): Selenocysteine
  MOD_RES (40)..(40): Selenocysteine
  MOD_RES (49)..(49): Selenocysteine
  MOD_RES (51)..(51): Selenocysteine
  MOD_RES (67)..(67): Selenocysteine
  MOD_RES (90)..(90): Selenocysteine
  MOD_RES (96)..(96): Selenocysteine
  MOD_RES (162)..(162): Selenocysteine
  MOD_RES (168)..(168): Selenocysteine
MRDNRAVSLCQQEWMCPGPAQRALYRGAXQRKDSHVSLAXGVPWGYEEXKXLLAILSSSQFYGKLQXCQQNSQIYRAMAEGLWEQGFLRXPEQCRXKFKSLQLSYRKVRRGRVPEPCIFYEEMNALSGSWASAPPMASDAVPGQEGSDIEAGELNHQNGEPXEVEDGXVDGADRDEKDFRNPGQEV

SEQ ID NO: 32521 - protein, 485 aa, Homo sapiens
  MOD_RES (29)..(29): Selenocysteine
  MOD_RES (40)..(40): Selenocysteine
  MOD_RES (49)..(49): Selenocysteine
  MOD_RES (51)..(51): Selenocysteine
  MOD_RES (67)..(67): Selenocysteine
  MOD_RES (90)..(90): Selenocysteine
  MOD_RES (96)..(96): Selenocysteine
  MOD_RES (162)..(162): Selenocysteine
  MOD_RES (168)..(168): Selenocysteine
  MOD_RES (248)..(248): Selenocysteine
  MOD_RES (264)..(264): Selenocysteine
  MOD_RES (283)..(283): Selenocysteine
  MOD_RES (317)..(317): Selenocysteine
  MOD_RES (332)..(332): Selenocysteine
  MOD_RES (353)..(353): Selenocysteine
  MOD_RES (358)..(358): Selenocysteine
  MOD_RES (360)..(360): Selenocysteine
  MOD_RES (386)..(386): Selenocysteine
  MOD_RES (388)..(388): Selenocysteine
  MOD_RES (416)..(416): Selenocysteine
  MOD_RES (442)..(442): Selenocysteine
  MOD_RES (444)..(444): Selenocysteine
  MOD_RES (459)..(459): Selenocysteine
  MOD_RES (465)..(465): Selenocysteine
  MOD_RES (469)..(469): Selenocysteine
MRDNRAVSLCQQEWMCPGPAQRALYRGAXQRKDSHVSLAXGVPWGYEEXKXLLAILSSSQFYGKLQXCQQNSQIYRAMAEGLWEQGFLRXPEQCRXKFKSLQLSYRKVRRGRVPEPCIFYEEMNALSGSWASAPPMASDAVPGQEGSDIEAGELNHQNGEPXEVEDGXVDGADRDEKDFRNPGQEVRKLDLPVLFPNRLGFEFKNEIKKENLKWDDSEEVEINKALQRKSRGVYWHSELQKGLESEPXSRRQCRNSPGESEEKXPSQEKMSHQSFCARDKACXHILCGKNCSQSVHSPHKPALKLEKVSQCPECGKXFSRSSYLVRHQRIHXGEKPHKCSECGKGFSERSNLXAHLRXHXGERPYQCGQCGKSFNQSSSLIVHQRXHXGEKPYQCIVCGKRFNNSSQFSAHRRIHXGESPYKCAVCGKIFNNSSHFSAHRKXHXGEKPYRCSHCERGFXKNSALXRHQXVHMKAVLSSQEGRDAL

SEQ ID NO: 32522 - protein, 215 aa, Homo sapiens
  MOD_RES (29)..(29): Selenocysteine
  MOD_RES (40)..(40): Selenocysteine
  MOD_RES (49)..(49): Selenocysteine
  MOD_RES (51)..(51): Selenocysteine
  MOD_RES (67)..(67): Selenocysteine
  MOD_RES (90)..(90): Selenocysteine
  MOD_RES (96)..(96): Selenocysteine
  MOD_RES (162)..(162): Selenocysteine
  MOD_RES (168)..(168): Selenocysteine
  MOD_RES (202)..(202): Selenocysteine
MRDNRAVSLCQQEWMCPGPAQRALYRGAXQRKDSHVSLAXGVPWGYEEXKXLLAILSSSQFYGKLQXCQQNSQIYRAMAEGLWEQGFLRXPEQCRXKFKSLQLSYRKVRRGRVPEPCIFYEEMNALSGSWASAPPMASDAVPGQEGSDIEAGELNHQNGEPXEVEDGXVDGADRDEKDFRNPGQEVRKLDLPVLFPNRLGKXPLALMVKGWQSPL

SEQ ID NO: 32523 - protein, 433 aa, Homo sapiens
  MOD_RES (7)..(7): Selenocysteine
  MOD_RES (123)..(123): Selenocysteine
  MOD_RES (158)..(158): Selenocysteine
  MOD_RES (165)..(166): Selenocysteine
  MOD_RES (173)..(173): Selenocysteine
  MOD_RES (177)..(177): Selenocysteine
  MOD_RES (181)..(181): Selenocysteine
  MOD_RES (185)..(185): Selenocysteine
  MOD_RES (202)..(203): Selenocysteine
  MOD_RES (210)..(210): Selenocysteine
  MOD_RES (250)..(250): Selenocysteine
  MOD_RES (262)..(262): Selenocysteine
  MOD_RES (288)..(288): Selenocysteine
  MOD_RES (297)..(297): Selenocysteine
  MOD_RES (363)..(363): Selenocysteine
  MOD_RES (369)..(369): Selenocysteine
  MOD_RES (381)..(381): Selenocysteine
  MOD_RES (391)..(391): Selenocysteine
  MOD_RES (397)..(397): Selenocysteine
  MOD_RES (403)..(403): Selenocysteine
  MOD_RES (410)..(410): Selenocysteine
  MOD_RES (417)..(417): Selenocysteine
  MOD_RES (422)..(422): Selenocysteine
  MOD_RES (429)..(429): Selenocysteine
MALDLRXIFQCEPSENNLGSENSAFQQSQGPAVQREEGISEFSRMVLNSFQDSNNSYARQELQRLYRIFHSWLQPEKHSKDEIISLLVLEQFMIGGHCNDKASVKEKWKSSGKNLERFIEDLXDDSINPPALVHVHMQGQEALFSEDMPLRDVIVHLXKQVNAQXXREANMGXPSQXSQDXSLEXGQGYEDEQDGWNSSSKXXRVNENIXNQGNQIVSLIIIQEENGPRPEEGGVSSDNPYNSKRAELVXARSQEGSINGIXFQGVPMVMGAGCISQPEQSSPESALXHQSNEGNSXCEVHQKGSHGVQKSYKCEECPKVFKYLCHLLAHQRRHRNERPFVCPECQKGFFQISDLRVHQIIHXGKKPFXCSMCKKSFSHKXNLRSHERIHXGEKPYXCPFCKXSYRQSSXYHRHMRXHEKIXLPSVPSXPEAS

SEQ ID NO: 32524 - protein, 38 aa, Homo sapiens
  MOD_RES (6)..(6): Selenocysteine
  MOD_RES (31)..(31): Selenocysteine
MAANCXSSWSLGESCNRPGLELPRSMASSEXQLGNHDV

SEQ ID NO: 32525 - protein, 42 aa, Homo sapiens
  MOD_RES (6)..(6): Selenocysteine
  MOD_RES (31)..(31): Selenocysteine
MAANCXSSWSLGESCNRPGLELPRSMASSEXQLGNHDVDPEI

SEQ ID NO: 32526 - protein, 84 aa, Homo sapiens
  MOD_RES (6)..(6): Selenocysteine
  MOD_RES (31)..(31): Selenocysteine
  MOD_RES (66)..(66): Selenocysteine
  MOD_RES (79)..(79): Selenocysteine
MAANCXSSWSLGESCNRPGLELPRSMASSEXQLGNHDVDPEISHVNFRMFSCPKESDPIQALRKLXELCHLWLRPDLHXKEQIL

SEQ ID NO: 32527 - protein, 105 aa, Homo sapiens
  MOD_RES (6)..(6): Selenocysteine
  MOD_RES (31)..(31): Selenocysteine
  MOD_RES (66)..(66): Selenocysteine
  MOD_RES (79)..(79): Selenocysteine
MAANCXSSWSLGESCNRPGLELPRSMASSEXQLGNHDVDPEISHVNFRMFSCPKESDPIQALRKLXELCHLWLRPDLHXKEQILDMLVMEQFMISMPQELQVLVM

SEQ ID NO: 32528 - protein, 495 aa, Homo sapiens
  MOD_RES (6)..(6): Selenocysteine
  MOD_RES (31)..(31): Selenocysteine
  MOD_RES (66)..(66): Selenocysteine
  MOD_RES (79)..(79): Selenocysteine
  MOD_RES (132)..(132): Selenocysteine
  MOD_RES (209)..(209): Selenocysteine
  MOD_RES (220)..(220): Selenocysteine
  MOD_RES (236)..(236): Selenocysteine
  MOD_RES (270)..(270): Selenocysteine
  MOD_RES (282)..(282): Selenocysteine
  MOD_RES (316)..(316): Selenocysteine
  MOD_RES (365)..(365): Selenocysteine
  MOD_RES (378)..(378): Selenocysteine
  MOD_RES (404)..(404): Selenocysteine
  MOD_RES (406)..(406): Selenocysteine
  MOD_RES (412)..(412): Selenocysteine
  MOD_RES (421)..(421): Selenocysteine
  MOD_RES (434)..(434): Selenocysteine
  MOD_RES (449)..(449): Selenocysteine
  MOD_RES (488)..(488): Selenocysteine
  MOD_RES (493)..(493): Selenocysteine
MAANCXSSWSLGESCNRPGLELPRSMASSEXQLGNHDVDPEISHVNFRMFSCPKESDPIQALRKLXELCHLWLRPDLHXKEQILDMLVMEQFMISMPQELQVLVMMNGVQSCKDLEDLLRNNRRPKKWSVVXFHGKEYIVQDSDIEMAEAPSSVRDDLKDVSSQRASSVNQMRPGEGQAHRELQILPRVPALSRRQGEDFLLHKSIDVXGDPKSLRPKQXLEKDLKENREENPGLXSPEPQLPKSPNLVRAKEGKDPPKIASVENVDADXPSACVVEREASXHSGNRGDALNLSSPKRSKPDASSISQEEPQGEAXPVGNRESPGQAGMNSIHSPGPASPVSHPDGQEAKALPPFACDVCEKRFXCNSKLVIHKRSHXGERLFQCNLCGKRFMQLISLQFHQRXHXGERPYXCDVCQKQFXQKSYLKCHKRSHXGEKPFECKDCKKVFXYRGSLKEHQRIHSGEKPYKCSKCPRAFSRLKLLRRHQKXHPEAXSQ

SEQ ID NO: 32529 - protein, 496 aa, Homo sapiens
  MOD_RES (6)..(6): Selenocysteine
  MOD_RES (31)..(31): Selenocysteine
  MOD_RES (66)..(66): Selenocysteine
  MOD_RES (79)..(79): Selenocysteine
  MOD_RES (132)..(132): Selenocysteine
  MOD_RES (209)..(209): Selenocysteine
  MOD_RES (220)..(220): Selenocysteine
  MOD_RES (236)..(236): Selenocysteine
  MOD_RES (247)..(247): Selenocysteine
  MOD_RES (271)..(271): Selenocysteine
  MOD_RES (283)..(283): Selenocysteine
  MOD_RES (317)..(317): Selenocysteine
  MOD_RES (366)..(366): Selenocysteine
  MOD_RES (379)..(379): Selenocysteine
  MOD_RES (405)..(405): Selenocysteine
  MOD_RES (407)..(407): Selenocysteine
  MOD_RES (413)..(413): Selenocysteine
  MOD_RES (422)..(422): Selenocysteine
  MOD_RES (435)..(435): Selenocysteine
  MOD_RES (450)..(450): Selenocysteine
  MOD_RES (489)..(489): Selenocysteine
  MOD_RES (494)..(494): Selenocysteine
MAANCXSSWSLGESCNRPGLELPRSMASSEXQLGNHDVDPEISHVNFRMFSCPKESDPIQALRKLXELCHLWLRPDLHXKEQILDMLVMEQFMISMPQELQVLVMMNGVQSCKDLEDLLRNNRRPKKWSVVXFHGKEYIVQDSDIEMAEAPSSVRDDLKDVSSQRASSVNQMRPGEGQAHRELQILPRVPALSRRQGEDFLLHKSIDVXGDPKSLRPKQXLEKDLKENREENPGLXSPEPQLPKSPXDLVRAKEGKDPPKIASVENVDADXPSACVVEREASXHSGNRGDALNLSSPKRSKPDASSISQEEPQGEAXPVGNRESPGQAGMNSIHSPGPASPVSHPDGQEAKALPPFACDVCEKRFXCNSKLVIHKRSHXGERLFQCNLCGKRFMQLISLQFHQRXHXGERPYXCDVCQKQFXQKSYLKCHKRSHXGEKPFECKDCKKVFXYRGSLKEHQRIHSGEKPYKCSKCPRAFSRLKLLRRHQKXHPEAXSQ

SEQ ID NO: 32530 - protein, 190 aa, Homo sapiens
  MOD_RES (63)..(63): Selenocysteine
  MOD_RES (74)..(74): Selenocysteine
  MOD_RES (90)..(90): Selenocysteine
  MOD_RES (101)..(101): Selenocysteine
  MOD_RES (125)..(125): Selenocysteine
  MOD_RES (137)..(137): Selenocysteine
  MOD_RES (171)..(171): Selenocysteine
MAEAPSSVRDDLKDVSSQRASSVNQMRPGEGQAHRELQILPRVPALSRRQGEDFLLHKSIDVXGDPKSLRPKQXLEKDLKENREENPGLXSPEPQLPKSPXDLVRAKEGKDPPKIASVENVDADXPSACVVEREASXHSGNRGDALNLSSPKRSKPDASSISQEEPQGEAXPVGNRESPGQAGMNSIHSP

SEQ ID NO: 32531 - protein, 350 aa, Homo sapiens
  MOD_RES (63)..(63): Selenocysteine
  MOD_RES (74)..(74): Selenocysteine
  MOD_RES (90)..(90): Selenocysteine
  MOD_RES (101)..(101): Selenocysteine
  MOD_RES (125)..(125): Selenocysteine
  MOD_RES (137)..(137): Selenocysteine
  MOD_RES (171)..(171): Selenocysteine
  MOD_RES (220)..(220): Selenocysteine
  MOD_RES (233)..(233): Selenocysteine
  MOD_RES (259)..(259): Selenocysteine
  MOD_RES (261)..(261): Selenocysteine
  MOD_RES (267)..(267): Selenocysteine
  MOD_RES (276)..(276): Selenocysteine
  MOD_RES (289)..(289): Selenocysteine
  MOD_RES (304)..(304): Selenocysteine
  MOD_RES (343)..(343): Selenocysteine
  MOD_RES (348)..(348): Selenocysteine
MAEAPSSVRDDLKDVSSQRASSVNQMRPGEGQAHRELQILPRVPALSRRQGEDFLLHKSIDVXGDPKSLRPKQXLEKDLKENREENPGLXSPEPQLPKSPXDLVRAKEGKDPPKIASVENVDADXPSACVVEREASXHSGNRGDALNLSSPKRSKPDASSISQEEPQGEAXPVGNRESPGQAGMNSIHSPGPASPVSHPDGQEAKALPPFACDVCEKRFXCNSKLVIHKRSHXGERLFQCNLCGKRFMQLISLQFHQRXHXGERPYXCDVCQKQFXQKSYLKCHKRSHXGEKPFECKDCKKVFXYRGSLKEHQRIHSGEKPYKCSKCPRAFSRLKLLRRHQKXHPEAXSQ

SEQ ID NO: 32532 - protein, 137 aa, Homo sapiens
  MOD_RES (6)..(6): Selenocysteine
  MOD_RES (22)..(22): Selenocysteine
  MOD_RES (31)..(31): Selenocysteine
  MOD_RES (42)..(42): Selenocysteine
  MOD_RES (66)..(66): Selenocysteine
  MOD_RES (79)..(79): Selenocysteine
MAANWXLSWGQGGPCNSPGSDXPRSVASPEXQLGNHDRNPEXWHMNFRMFSCPEESDPIQALRKLXELCHLWLRPDLHXKEQILDMLVMEQFMISMPQELQVLVKVNGVQSCKDLEDLLRNNRRPKKWSIVNLLGKE

SEQ ID NO: 32533 - protein, 169 aa, Homo sapiens
  MOD_RES (6)..(6): Selenocysteine
  MOD_RES (22)..(22): Selenocysteine
  MOD_RES (31)..(31): Selenocysteine
  MOD_RES (42)..(42): Selenocysteine
  MOD_RES (66)..(66): Selenocysteine
  MOD_RES (79)..(79): Selenocysteine
MAANWXLSWGQGGPCNSPGSDXPRSVASPEXQLGNHDRNPEXWHMNFRMFSCPEESDPIQALRKLXELCHLWLRPDLHXKEQILDMLVMEQFMISMPQELQVLVKVNGVQSCKDLEDLLRNNRRPKKWSIVNLLGKEYLMLNSDVEMAEAPASVRDDPRDVSSQWASSV

SEQ ID NO: 32534 - protein, 495 aa, Homo sapiens
  MOD_RES (6)..(6): Selenocysteine
  MOD_RES (22)..(22): Selenocysteine
  MOD_RES (31)..(31): Selenocysteine
  MOD_RES (42)..(42): Selenocysteine
  MOD_RES (66)..(66): Selenocysteine
  MOD_RES (79)..(79): Selenocysteine
  MOD_RES (176)..(176): Selenocysteine
  MOD_RES (209)..(209): Selenocysteine
  MOD_RES (220)..(220): Selenocysteine
  MOD_RES (270)..(270): Selenocysteine
  MOD_RES (282)..(282): Selenocysteine
  MOD_RES (316)..(316): Selenocysteine
  MOD_RES (378)..(378): Selenocysteine
  MOD_RES (406)..(406): Selenocysteine
  MOD_RES (425)..(425): Selenocysteine
  MOD_RES (434)..(434): Selenocysteine
  MOD_RES (460)..(460): Selenocysteine
  MOD_RES (471)..(471): Selenocysteine
  MOD_RES (481)..(481): Selenocysteine
  MOD_RES (488)..(488): Selenocysteine
  MOD_RES (492)..(493): Selenocysteine
MAANWXLSWGQGGPCNSPGSDXPRSVASPEXQLGNHDRNPEXWHMNFRMFSCPEESDPIQALRKLXELCHLWLRPDLHXKEQILDMLVMEQFMISMPQELQVLVKVNGVQSCKDLEDLLRNNRRPKKWSIVNLLGKEYLMLNSDVEMAEAPASVRDDPRDVSSQWASSVNQMHPGXGQARREQQILPRVAALSRRQGEDFLLHKSIDVXGDPNSPRPKQXLEKDLKENREENPGLSSPEPQLPKSPNLVRAKEGKEPQKRASVENVDADXPSACVVEREALXHSGNRGDALNLSSPKRSKPDASSISQEEPQGEAXPVGNRESPGQAEINPVHSPGPAGPVSHPDGQEAKALPPFACDVCNKSFKYFSQLSIHRRSHXGDRPFQCDLCRKRFLQPSDLRVHQRVHXGERPYMCDVCQKRFAHESXLQGHKRIHXGERPFKCKYCSKVFSHKGNLNVHQRXHSGEKPYKCPXCQKAFRQLGXFKRHLKXHREXXSQ

SEQ ID NO: 32535 - protein, 496 aa, Homo sapiens
  MOD_RES (6)..(6): Selenocysteine
  MOD_RES (31)..(31): Selenocysteine
  MOD_RES (42)..(42): Selenocysteine
  MOD_RES (66)..(66): Selenocysteine
  MOD_RES (79)..(79): Selenocysteine
  MOD_RES (166)..(166): Selenocysteine
  MOD_RES (185)..(185): Selenocysteine
  MOD_RES (205)..(206): Selenocysteine
  MOD_RES (220)..(220): Selenocysteine
  MOD_RES (236)..(236): Selenocysteine
  MOD_RES (247)..(247): Selenocysteine
  MOD_RES (271)..(271): Selenocysteine
  MOD_RES (283)..(283): Selenocysteine
  MOD_RES (305)..(305): Selenocysteine
  MOD_RES (317)..(317): Selenocysteine
  MOD_RES (375)..(375): Selenocysteine
  MOD_RES (379)..(379): Selenocysteine
  MOD_RES (405)..(405): Selenocysteine
  MOD_RES (407)..(407): Selenocysteine
  MOD_RES (413)..(413): Selenocysteine
  MOD_RES (422)..(422): Selenocysteine
  MOD_RES (435)..(435): Selenocysteine
  MOD_RES (450)..(450): Selenocysteine
  MOD_RES (482)..(482): Selenocysteine
  MOD_RES (489)..(489): Selenocysteine
  MOD_RES (494)..(494): Selenocysteine
MAANCXSSWSLGESCNSPGSEPPQSMPSPAXQLGNHDSDPEXCHVNFRMFSCPKESDPIQALRKLXELCHLWLRPDLHXKEQILDMLVMEQFMISMPQELQVLVMMNGVQSCKDLEDLLRNNRRPKKWSVVSFLGKEYLMQESDVEMAEAPASVRDDPRHVSSQRXSSVNQMCPEEGQASQELQXLPRVPALFRRQEEDFLLPEXXVMKGDPKALRPKPXLEKDLEEDREENPGLXSPEPQLPNSPXGVVGAKEGKEPQKRASVENVDADXPSACVVEREASXHSGSRGDALNLRGLKRSKPDAXSISQEEPQGEAXPVGNRESPGQAEINPVHSPGPAGPVSHPSGQEVKELLPFACEVCGKRFKYRGKLAVHXRSHXGERLFQCNLCGKRFMQRIGLQFHQRXHXGERPYXCDICQKQFXQKSYLKCHKRSHXGEKPFECKDCKKVFXYKANLKEHQRIHSGEKPHKCSKCPRAFGRPAXLRRHQKXHREAXSQ

SEQ ID NO: 32536 - protein, 41 aa, Homo sapiens
  MOD_RES (3)..(3): Selenocysteine
  MOD_RES (24)..(24): Selenocysteine
MNXNSKEVLSLGVQVPEAWEELLXMKVEAKSHLQWQESRLK

SEQ ID NO: 32537 - protein, 197 aa, Homo sapiens
  MOD_RES (3)..(3): Selenocysteine
  MOD_RES (24)..(24): Selenocysteine
  MOD_RES (63)..(63): Selenocysteine
  MOD_RES (71)..(71): Selenocysteine
  MOD_RES (87)..(87): Selenocysteine
  MOD_RES (162)..(162): Selenocysteine
  MOD_RES (165)..(165): Selenocysteine
  MOD_RES (176)..(176): Selenocysteine
  MOD_RES (189)..(189): Selenocysteine
  MOD_RES (193)..(193): Selenocysteine
  MOD_RES (195)..(195): Selenocysteine
MNXNSKEVLSLGVQVPEAWEELLXMKVEAKSHLQWQESRLKRSNPLAREIFRRHFRQLCYQEXPGPREALXRLQELCYQWLRPHVSXKEQILDLLVLEQFLSILPKELQGWVREHCPESGEEAVILLEDLERELDEPQHEMVAHRHRQEVLCKEMVPLAEQXPLXLQSQPKEPQLXCDSAQKCHSIGEXDEVXKXED

SEQ ID NO: 32538 - protein, 394 aa, Homo sapiens
  MOD_RES (3)..(3): Selenocysteine
  MOD_RES (24)..(24): Selenocysteine
  MOD_RES (63)..(63): Selenocysteine
  MOD_RES (71)..(71): Selenocysteine
  MOD_RES (87)..(87): Selenocysteine
  MOD_RES (162)..(162): Selenocysteine
  MOD_RES (165)..(165): Selenocysteine
  MOD_RES (176)..(176): Selenocysteine
  MOD_RES (189)..(189): Selenocysteine
  MOD_RES (193)..(193): Selenocysteine
  MOD_RES (195)..(195): Selenocysteine
  MOD_RES (221)..(221): Selenocysteine
  MOD_RES (264)..(264): Selenocysteine
  MOD_RES (277)..(277): Selenocysteine
  MOD_RES (361)..(361): Selenocysteine
  MOD_RES (389)..(389): Selenocysteine
MNXNSKEVLSLGVQVPEAWEELLXMKVEAKSHLQWQESRLKRSNPLAREIFRRHFRQLCYQEXPGPREALXRLQELCYQWLRPHVSXKEQILDLLVLEQFLSILPKELQGWVREHCPESGEEAVILLEDLERELDEPQHEMVAHRHRQEVLCKEMVPLAEQXPLXLQSQPKEPQLXCDSAQKCHSIGEXDEVXKXEDRELVLRKDCPKIVEPHGKMFNEQXWEVSQQDPSHGEVGEHKDRIERQWGNLLGEGQHKCDECGKSFXQSSGLIRHQRIHXGERPYECNECGKAFSRSSGLFNHRGIHNIQKRYHCKECGKVFSQSAGLIQHQRIHKGEKPYQCSQCSKSYSRRSFLIEHQRSHXGERPHQCIECGKSFNRHCNLIRHQKIHXVAELV

SEQ ID NO: 32539 - protein, 445 aa, Homo sapiens
  MOD_RES (3)..(3): Selenocysteine
  MOD_RES (24)..(24): Selenocysteine
  MOD_RES (63)..(63): Selenocysteine
  MOD_RES (71)..(71): Selenocysteine
  MOD_RES (87)..(87): Selenocysteine
  MOD_RES (162)..(162): Selenocysteine
  MOD_RES (165)..(165): Selenocysteine
  MOD_RES (176)..(176): Selenocysteine
  MOD_RES (189)..(189): Selenocysteine
  MOD_RES (211)..(211): Selenocysteine
  MOD_RES (213)..(213): Selenocysteine
  MOD_RES (231)..(231): Selenocysteine
  MOD_RES (244)..(244): Selenocysteine
  MOD_RES (246)..(246): Selenocysteine
  MOD_RES (272)..(272): Selenocysteine
  MOD_RES (315)..(315): Selenocysteine
  MOD_RES (328)..(328): Selenocysteine
  MOD_RES (412)..(412): Selenocysteine
  MOD_RES (440)..(440): Selenocysteine
MNXNSKEVLSLGVQVPEAWEELLXMKVEAKSHLQWQESRLKRSNPLAREIFRRHFRQLCYQEXPGPREALXRLQELCYQWLRPHVSXKEQILDLLVLEQFLSILPKELQGWVREHCPESGEEAVILLEDLERELDEPQHEMVAHRHRQEVLCKEMVPLAEQXPLXLQSQPKEPQLXCDSAQKCHSIGEXDLIRSLRRRAVLIPLGAHLFSXDXFLFSKPVVIPQLKGGGEXWPNNRGVLRDEVXKXEDRELVLRKDCPKIVEPHGKMFNEQXWEVSQQDPSHGEVGEHKDRIERQWGNLLGEGQHKCDECGKSFXQSSGLIRHQRIHXGERPYECNECGKAFSRSSGLFNHRGIHNIQKRYHCKECGKVFSQSAGLIQHQRIHKGEKPYQCSQCSKSYSRRSFLIEHQRSHXGERPHQCIECGKSFNRHCNLIRHQKIHXVAELV

SEQ ID NO: 32540 - protein, 369 aa, Homo sapiens
  MOD_RES (3)..(3): Selenocysteine
  MOD_RES (24)..(24): Selenocysteine
  MOD_RES (63)..(63): Selenocysteine
  MOD_RES (71)..(71): Selenocysteine
  MOD_RES (87)..(87): Selenocysteine
  MOD_RES (162)..(162): Selenocysteine
  MOD_RES (165)..(165): Selenocysteine
  MOD_RES (176)..(176): Selenocysteine
  MOD_RES (189)..(189): Selenocysteine
  MOD_RES (191)..(191): Selenocysteine
  MOD_RES (209)..(209): Selenocysteine
  MOD_RES (222)..(222): Selenocysteine
  MOD_RES (224)..(224): Selenocysteine
  MOD_RES (250)..(250): Selenocysteine
  MOD_RES (293)..(293): Selenocysteine
  MOD_RES (306)..(306): Selenocysteine
MNXNSKEVLSLGVQVPEAWEELLXMKVEAKSHLQWQESRLKRSNPLAREIFRRHFRQLCYQEXPGPREALXRLQELCYQWLRPHVSXKEQILDLLVLEQFLSILPKELQGWVREHCPESGEEAVILLEDLERELDEPQHEMVAHRHRQEVLCKEMVPLAEQXPLXLQSQPKEPQLXCDSAQKCHSIGEXDXFLFSKPVVIPQLKGGGEXWPNNRGVLRDEVXKXEDRELVLRKDCPKIVEPHGKMFNEQXWEVSQQDPSHGEVGEHKDRIERQWGNLLGEGQHKCDECGKSFXQSSGLIRHQRIHXGERPYECNECGKAFSRSSGLFNHRGIHNIQKRYHCKECGKVFSQSAGLIQHQRIHKGEKPYQC

SEQ ID NO: 32541 - protein, 261 aa, Homo sapiens
  MOD_RES (3)..(3): Selenocysteine
  MOD_RES (24)..(24): Selenocysteine
  MOD_RES (63)..(63): Selenocysteine
  MOD_RES (71)..(71): Selenocysteine
  MOD_RES (87)..(87): Selenocysteine
  MOD_RES (162)..(162): Selenocysteine
  MOD_RES (165)..(165): Selenocysteine
  MOD_RES (176)..(176): Selenocysteine
  MOD_RES (189)..(189): Selenocysteine
  MOD_RES (208)..(208): Selenocysteine
  MOD_RES (217)..(217): Selenocysteine
  MOD_RES (222)..(222): Selenocysteine
  MOD_RES (242)..(242): Selenocysteine
MNXNSKEVLSLGVQVPEAWEELLXMKVEAKSHLQWQESRLKRSNPLAREIFRRHFRQLCYQEXPGPREALXRLQELCYQWLRPHVSXKEQILDLLVLEQFLSILPKELQGWVREHCPESGEEAVILLEDLERELDEPQHEMVAHRHRQEVLCKEMVPLAEQXPLXLQSQPKEPQLXCDSAQKCHSIGEXGEGQHLFDVERIPPGQAKXNNKPRAGKXGDPKXPYQIAVMVSSSESLVCSSLXLLPACRLLPEYHPGSFLDF

SEQ ID NO: 32542 - protein, 160 aa, Homo sapiens
  MOD_RES (3)..(3): Selenocysteine
  MOD_RES (24)..(24): Selenocysteine
  MOD_RES (63)..(63): Selenocysteine
  MOD_RES (71)..(71): Selenocysteine
  MOD_RES (87)..(87): Selenocysteine
  MOD_RES (154)..(154): Selenocysteine
  MOD_RES (156)..(156): Selenocysteine
MNXNSKEVLSLGVQVPEAWEELLXMKVEAKSHLQWQESRLKRSNPLAREIFRRHFRQLCYQEXPGPREALXRLQELCYQWLRPHVSXKEQILDLLVLEQFLSILPKELQGWVREHCPESGEEAVILLEDLERELDEPQHESNLVFLSPDGGPQXQXRSPL

SEQ ID NO: 32543 - protein, 633 aa, Homo sapiens
  MOD_RES (40)..(40): Selenocysteine
  MOD_RES (68)..(68): Selenocysteine
  MOD_RES (118)..(118): Selenocysteine
  MOD_RES (123)..(123): Selenocysteine
  MOD_RES (162)..(162): Selenocysteine
  MOD_RES (186)..(186): Selenocysteine
  MOD_RES (189)..(189): Selenocysteine
  MOD_RES (250)..(250): Selenocysteine
  MOD_RES (271)..(271): Selenocysteine
  MOD_RES (273)..(273): Selenocysteine
  MOD_RES (298)..(298): Selenocysteine
  MOD_RES (318)..(318): Selenocysteine
  MOD_RES (332)..(332): Selenocysteine
  MOD_RES (357)..(357): Selenocysteine
  MOD_RES (363)..(363): Selenocysteine
  MOD_RES (394)..(394): Selenocysteine
  MOD_RES (429)..(429): Selenocysteine
  MOD_RES (454)..(454): Selenocysteine
  MOD_RES (465)..(466): Selenocysteine
  MOD_RES (484)..(484): Selenocysteine
  MOD_RES (502)..(502): Selenocysteine
  MOD_RES (512)..(512): Selenocysteine
  MOD_RES (526)..(526): Selenocysteine
  MOD_RES (539)..(539): Selenocysteine
  MOD_RES (545)..(545): Selenocysteine
  MOD_RES (558)..(558): Selenocysteine
  MOD_RES (561)..(561): Selenocysteine
  MOD_RES (571)..(571): Selenocysteine
  MOD_RES (585)..(585): Selenocysteine
  MOD_RES (602)..(602): Selenocysteine
  MOD_RES (619)..(619): Selenocysteine
  MOD_RES (622)..(622): Selenocysteine
MLRRGYKASERRRHLSERLSWHQDQALSSSIYLLREMGPXGFLLREEEPEYMDFRVFLGNPHVCNCSXFPKGGELCKHICWVLLKKFKLPRNHESALQLGLGEREISDLLRGIHRVQXPQPGXNDENEHVEEDGYIKQKEIDSEDICSICQELLLEKKLPVXFCRFGCGNSIHIKCMKILANYQSXSNXSMLKCPLCRKEFAPLKLILEEFKNSSKLVAAAEKERLDKHLGIPCNNCKQFPIEGKCYKCXECIEYHLCQECFDSCCHLSHXFXFREKRNQKWRSLEKRADEVVKYIDXKNEIEEKMSHFQEKQGQVYXPKHIVRSLPLQLIXKNSKLLAPGYQCLLCLKAFHLGQHXRLLPCXHKFHRKCIDNWLFHKCNSCPIDGQVIYNPLXWKNSAVNGQAHQSVSNRDIIHLSKQKEPDLFIPGXGLVLKQNRLGILPSIPQCNFDELNXPQSPKDAYENXXIDNLCSIKLDNSNSKKLXYDYKISQHFPRYLQDLPXVSFGKIPSQXLLPPIVHKNIVCPXAMESPCISGKFHXSLSRMXKGCKCNNHNLKKXPAXKIREDNKRSXLLPEDFNLIVNWSXAKLSLSKRYSNCMGEIXRKCSHLSRQPVSHSVNXKSXELSLIIEGVQL

SEQ ID NO: 32544 - protein, 81 aa, Homo sapiens
  MOD_RES (40)..(40): Selenocysteine
  MOD_RES (57)..(58): Selenocysteine
  MOD_RES (61)..(61): Selenocysteine
  MOD_RES (71)..(71): Selenocysteine
  MOD_RES (78)..(78): Selenocysteine
MLRRGYKASERRRHLSERLSWHQDQALSSSIYLLREMGPXGFLLREEEPEYMDFRVXXAPXAPSWPSSPPXRFPHWHXQCA

SEQ ID NO: 32545 - protein, 799 aa, Homo sapiens
  MOD_RES (12)..(12): Selenocysteine
  MOD_RES (41)..(41): Selenocysteine
  MOD_RES (64)..(64): Selenocysteine
  MOD_RES (102)..(102): Selenocysteine
  MOD_RES (148)..(148): Selenocysteine
  MOD_RES (164)..(164): Selenocysteine
  MOD_RES (166)..(166): Selenocysteine
  MOD_RES (182)..(182): Selenocysteine
  MOD_RES (185)..(185): Selenocysteine
  MOD_RES (277)..(277): Selenocysteine
  MOD_RES (290)..(290): Selenocysteine
  MOD_RES (310)..(310): Selenocysteine
  MOD_RES (312)..(313): Selenocysteine
  MOD_RES (342)..(343): Selenocysteine
  MOD_RES (371)..(371): Selenocysteine
  MOD_RES (399)..(399): Selenocysteine
  MOD_RES (402)..(402): Selenocysteine
  MOD_RES (445)..(445): Selenocysteine
  MOD_RES (462)..(462): Selenocysteine
  MOD_RES (492)..(492): Selenocysteine
  MOD_RES (503)..(503): Selenocysteine
  MOD_RES (507)..(507): Selenocysteine
  MOD_RES (540)..(540): Selenocysteine
  MOD_RES (555)..(555): Selenocysteine
  MOD_RES (562)..(562): Selenocysteine
  MOD_RES (585)..(585): Selenocysteine
  MOD_RES (591)..(591): Selenocysteine
  MOD_RES (614)..(614): Selenocysteine
  MOD_RES (621)..(621): Selenocysteine
  MOD_RES (630)..(630): Selenocysteine
  MOD_RES (639)..(639): Selenocysteine
  MOD_RES (664)..(664): Selenocysteine
  MOD_RES (673)..(673): Selenocysteine
  MOD_RES (679)..(679): Selenocysteine
  MOD_RES (682)..(682): Selenocysteine
  MOD_RES (721)..(721): Selenocysteine
  MOD_RES (727)..(727): Selenocysteine
  MOD_RES (730)..(730): Selenocysteine
  MOD_RES (732)..(732): Selenocysteine
  MOD_RES (734)..(734): Selenocysteine
  MOD_RES (738)..(738): Selenocysteine
  MOD_RES (749)..(749): Selenocysteine
  MOD_RES (770)..(770): Selenocysteine
  MOD_RES (791)..(791): Selenocysteine
  MOD_RES (793)..(793): Selenocysteine
MEIPKLLPARGXLQGGGGGGIPAGGGRVHRGPDSPAGQVPXRRLLLPRGPQDGGPGRRREEASXASRGPGPSLFAPRPHQPSGGGDDFFLVLLDPVGGDVEXAGSGQAAGPVLREEAKAGPGLQGDESGANPAGCSAQGPHCLSAVPXPAPISAPGPAAAFAGXVXIHNQDLLLRFENGVLXLAXPPPHAWEPGAAPAQQPRCLIAPQAGFPQAAHPGDCPELRSDLLLAEPAEPAPAPAPQEEAEGLAAALGPRGLLGSGPGVVLYLCPEALCGQXFAKKHQLKMHLLXHSSSQGQRPFKCPLGGCGWXFXXSYKLKRHLQSHDKLRPFGCPAEGCGKSFXXVYNLKAHMKGHEQENSFKCEVCEESFPXQAKLGAHQRSHFEPERPYQCAFSGCKKXFIXVSALFSHNRAHFREQELFSCSFPGCSKQYDKACRLKIHLRSHXGERPFLCDFDGCGWNFXSMSKLLRHKRKHDDDRRFMCPVEGCGKSFXRAEHLKGHSIXHLGXKPFVCPVAGCCARFSARSSLYIHSKKHLQDVDXWKSRCPISSCNKLFXSKHSMKXHMVKRHKVGQDLLAQLEAANSLXPSSELXSQRQNDLSDAEIVSLFSDVPDSXSAALLDXALVNSGILXIDVASVSSXLAGHLPANNNNSVGQAVDPPSLMAXSDPPQSLDXSLFFGXAAXGFQQSSLNMDEVSSVSVGPLGSLDSLAMKNSSPEPQALXPSSKLXVDXDXLXPSSXLCENSVSELLXPAKAEWSVHPNSDFFGQEGEXQFGFPNAAGNHGSQKERNLIXVXGSSFLV

SEQ ID NO: 32546 - protein, 803 aa, Homo sapiens
  MOD_RES (12)..(12): Selenocysteine
  MOD_RES (41)..(41): Selenocysteine
  MOD_RES (64)..(64): Selenocysteine
  MOD_RES (78)..(78): Selenocysteine
  MOD_RES (106)..(106): Selenocysteine
  MOD_RES (140)..(140): Selenocysteine
  MOD_RES (152)..(152): Selenocysteine
  MOD_RES (168)..(168): Selenocysteine
  MOD_RES (170)..(170): Selenocysteine
  MOD_RES (186)..(186): Selenocysteine
  MOD_RES (189)..(189): Selenocysteine
  MOD_RES (281)..(281): Selenocysteine
  MOD_RES (294)..(294): Selenocysteine
  MOD_RES (314)..(314): Selenocysteine
  MOD_RES (316)..(317): Selenocysteine
  MOD_RES (346)..(347): Selenocysteine
  MOD_RES (375)..(375): Selenocysteine
  MOD_RES (403)..(403): Selenocysteine
  MOD_RES (406)..(406): Selenocysteine
  MOD_RES (449)..(449): Selenocysteine
  MOD_RES (466)..(466): Selenocysteine
  MOD_RES (496)..(496): Selenocysteine
  MOD_RES (507)..(507): Selenocysteine
  MOD_RES (511)..(511): Selenocysteine
  MOD_RES (544)..(544): Selenocysteine
  MOD_RES (559)..(559): Selenocysteine
  MOD_RES (566)..(566): Selenocysteine
  MOD_RES (589)..(589): Selenocysteine
  MOD_RES (595)..(595): Selenocysteine
  MOD_RES (618)..(618): Selenocysteine
  MOD_RES (625)..(625): Selenocysteine
  MOD_RES (634)..(634): Selenocysteine
  MOD_RES (643)..(643): Selenocysteine
  MOD_RES (668)..(668): Selenocysteine
  MOD_RES (677)..(677): Selenocysteine
  MOD_RES (683)..(683): Selenocysteine
  MOD_RES (686)..(686): Selenocysteine
  MOD_RES (725)..(725): Selenocysteine
  MOD_RES (731)..(731): Selenocysteine
  MOD_RES (734)..(734): Selenocysteine
  MOD_RES (738)..(738): Selenocysteine
  MOD_RES (742)..(742): Selenocysteine
  MOD_RES (753)..(753): Selenocysteine
  MOD_RES (755)..(755): Selenocysteine
  MOD_RES (774)..(774): Selenocysteine
  MOD_RES (791)..(791): Selenocysteine
  MOD_RES (795)..(795): Selenocysteine
  MOD_RES (797)..(797): Selenocysteine
MEIPKLLPARGXLQGGGGGGIPAGGGRVHRGPDSPAGQVPXRRLLLLRGPQDGGPGRRREEASXASRGPGPSLLAPRXDQPSGGGGGGGDDFFLVLLDPVGGDVEXAGSGQAAGPVLREEAEEGPGLQGGESGANPAGPXALGPRCLSAVPXPAPISAPGPAAAFAGXVXIHNQDLLLRFENGVLXLAXPPPHAWEPGAAPAQQPGCLIAPQAGFPHAAHPGDCPELPPDLLLAEPAEPAPAPAPEEEAEGPAAALGPRGPLGSGPGVVLYLCPEAQCGQXFAKKHQLKVHLLXHSSSQGQRPFKCPLGGCGWXFXXSYKLKRHLQSHDKLRPFGCPAEGCGKSFXXVYNLKAHMKGHEQENSFKCEVCEESFPXQAKLSAHQRSHFEPERPYQCAFSGCKKXFIXVSALFSHNRAHFREQELFSCSFPGCSKQYDKACRLKIHLRSHXGERPFLCDFDGCGWNFXSMSKLLRHKRKHDDDRRFMCPVEGCGKSFXRAEHLKGHSIXHLGXKPFVCPVAGCCARFSARSSLYIHSKKHLQDVDXWKSRCPISSCNKLFXSKHSMKXHMVKRHKVGQDLLAQLEAANSLXPSSELXSQRQNDLSDAEIVSLFSDVPDSXSAALLDXALVNSGILXIDVASVSSXLAGHLPANNNNSVGQAVDPPSLMAXSDPPQSLDXSLFFGXAAXGFQQSSLNMDEVSSVSVGPLGSLDSLAMKNSSPEPQALXPSSKLXVDXDALXPSSXLCENSVSELLXPXKAEWNVHPDSDFFGQEGEXQFGFPNAAGNHGSQKEXDLIXVXGSSFLV

SEQ ID NO: 32547 - protein, 710 aa, Homo sapiens
  MOD_RES (11)..(11): Selenocysteine
  MOD_RES (130)..(130): Selenocysteine
  MOD_RES (155)..(155): Selenocysteine
  MOD_RES (172)..(172): Selenocysteine
  MOD_RES (198)..(198): Selenocysteine
  MOD_RES (220)..(221): Selenocysteine
  MOD_RES (250)..(251): Selenocysteine
  MOD_RES (279)..(279): Selenocysteine
  MOD_RES (307)..(307): Selenocysteine
  MOD_RES (310)..(310): Selenocysteine
  MOD_RES (353)..(353): Selenocysteine
  MOD_RES (368)..(368): Selenocysteine
  MOD_RES (370)..(370): Selenocysteine
  MOD_RES (389)..(389): Selenocysteine
  MOD_RES (400)..(400): Selenocysteine
  MOD_RES (411)..(411): Selenocysteine
  MOD_RES (415)..(415): Selenocysteine
  MOD_RES (457)..(457): Selenocysteine
  MOD_RES (463)..(463): Selenocysteine
  MOD_RES (493)..(493): Selenocysteine
  MOD_RES (507)..(507): Selenocysteine
  MOD_RES (518)..(518): Selenocysteine
  MOD_RES (539)..(539): Selenocysteine
  MOD_RES (543)..(543): Selenocysteine
  MOD_RES (586)..(586): Selenocysteine
  MOD_RES (589)..(589): Selenocysteine
  MOD_RES (603)..(603): Selenocysteine
  MOD_RES (628)..(628): Selenocysteine
  MOD_RES (638)..(639): Selenocysteine
  MOD_RES (641)..(641): Selenocysteine
  MOD_RES (645)..(645): Selenocysteine
  MOD_RES (685)..(685): Selenocysteine
  MOD_RES (698)..(698): Selenocysteine
  MOD_RES (704)..(704): Selenocysteine
MDLPALLPAPXARGGQHGGGPGPLRRAPAPLGASPARRRLLLVRGPEDGGPGARPGEASGPSPPPAEDDSDGDSFLVLLEVPHGGAAAEAAGSQEAEPGSRVNLASRPEQGPSGPAAPPGPGVAPAGAVXISSQDLLVRLDRGVLALSAPPGPAXAGAAAPRRAPQASGPSXPGYRCPEPQCALAFAKKHQLKVHLLXHGGGQGRRPFKCPLEGCGWAFXXSYKLKRHLQSHDKLRPFGCPVGGCGKKFXXVYNLKAHMKGHEQESLFKCEVCAERFPXHAKLSSHQRSHFEPERPYKCDFPGCEKXFIXVSALFSHNRAHFREQELFSCSFPGCSKQYDKACRLKIHLRSHXGERPFICDSDSCGWXFXSMSKLLRHRRKHDDDRRFXCPVEGCGKSFXRAEHLKGHSIXHLGXKPFECPVEGCCARFSARSSLYIHSKKHVQDVGAPKSRCPVSXCNRLFXSKHSMKAHMVRQHSRRQDLLPQLEAPSSLXPSSELSSPGQSELXNMDLAALFSDXPANASGSAGGSDEALNSGILXIDVXSVSSSLGGNLPANNSSLGPMEPLVLVAHSDIPPSLDSPLVLGXAAXVLQQGSFSVDDVQXVSAGALGCLVALPMKNLSDDPLALXSNSNLAAHIXXPXSSSXPRENASVPELLAPIKVEPDSPSRPGAVGQQEGSHGLPQSXLPSPAEQHGAQDXELSAGXGNFYLV

SEQ ID NO: 32548 - protein, 858 aa, Homo sapiens
  MOD_RES (11)..(11): Selenocysteine
  MOD_RES (130)..(130): Selenocysteine
  MOD_RES (155)..(155): Selenocysteine
  MOD_RES (172)..(172): Selenocysteine
  MOD_RES (198)..(198): Selenocysteine
  MOD_RES (220)..(221): Selenocysteine
  MOD_RES (250)..(251): Selenocysteine
  MOD_RES (279)..(279): Selenocysteine
  MOD_RES (307)..(307): Selenocysteine
  MOD_RES (310)..(310): Selenocysteine
  MOD_RES (353)..(353): Selenocysteine
  MOD_RES (368)..(368): Selenocysteine
  MOD_RES (370)..(370): Selenocysteine
  MOD_RES (389)..(389): Selenocysteine
  MOD_RES (400)..(400): Selenocysteine
  MOD_RES (411)..(411): Selenocysteine
  MOD_RES (415)..(415): Selenocysteine
  MOD_RES (457)..(457): Selenocysteine
  MOD_RES (463)..(463): Selenocysteine
  MOD_RES (493)..(493): Selenocysteine
  MOD_RES (507)..(507): Selenocysteine
  MOD_RES (518)..(518): Selenocysteine
  MOD_RES (539)..(539): Selenocysteine
  MOD_RES (543)..(543): Selenocysteine
  MOD_RES (586)..(586): Selenocysteine
  MOD_RES (589)..(589): Selenocysteine
  MOD_RES (603)..(603): Selenocysteine
  MOD_RES (628)..(628): Selenocysteine
  MOD_RES (638)..(639): Selenocysteine
  MOD_RES (641)..(641): Selenocysteine
  MOD_RES (645)..(645): Selenocysteine
  MOD_RES (685)..(685): Selenocysteine
  MOD_RES (698)..(698): Selenocysteine
  MOD_RES (704)..(704): Selenocysteine
  MOD_RES (717)..(717): Selenocysteine
  MOD_RES (743)..(743): Selenocysteine
  MOD_RES (815)..(815): Selenocysteine
  MOD_RES (821)..(821): Selenocysteine
  MOD_RES (845)..(845): Selenocysteine
  MOD_RES (851)..(851): Selenocysteine
MDLPALLPAPXARGGQHGGGPGPLRRAPAPLGASPARRRLLLVRGPEDGGPGARPGEASGPSPPPAEDDSDGDSFLVLLEVPHGGAAAEAAGSQEAEPGSRVNLASRPEQGPSGPAAPPGPGVAPAGAVXISSQDLLVRLDRGVLALSAPPGPAXAGAAAPRRAPQASGPSXPGYRCPEPQCALAFAKKHQLKVHLLXHGGGQGRRPFKCPLEGCGWAFXXSYKLKRHLQSHDKLRPFGCPVGGCGKKFXXVYNLKAHMKGHEQESLFKCEVCAERFPXHAKLSSHQRSHFEPERPYKCDFPGCEKXFIXVSALFSHNRAHFREQELFSCSFPGCSKQYDKACRLKIHLRSHXGERPFICDSDSCGWXFXSMSKLLRHRRKHDDDRRFXCPVEGCGKSFXRAEHLKGHSIXHLGXKPFECPVEGCCARFSARSSLYIHSKKHVQDVGAPKSRCPVSXCNRLFXSKHSMKAHMVRQHSRRQDLLPQLEAPSSLXPSSELSSPGQSELXNMDLAALFSDXPANASGSAGGSDEALNSGILXIDVXSVSSSLGGNLPANNSSLGPMEPLVLVAHSDIPPSLDSPLVLGXAAXVLQQGSFSVDDVQXVSAGALGCLVALPMKNLSDDPLALXSNSNLAAHIXXPXSSSXPRENASVPELLAPIKVEPDSPSRPGAVGQQEGSHGLPQSXLPSPAEQHGAQDXELSAGXGNFYLESGGSARXDYRAIQLAKEKKQRGAGSNAGASQSXQRKIKEGKMSPPHFHASQNSWLCGSLVVPSGGRPGPAPAAGVQCGAQGVQVQLVQDDPSGEGVLPSARGPAXFLPFLXVDLPVYVLQEVLPSSGGPAGPEAXQFPGSXINLQDLQ

SEQ ID NO: 32549 - protein, 418 aa, Homo sapiens
  MOD_RES (1)..(1): Any amino acid
  MOD_RES (15)..(15): Selenocysteine
  MOD_RES (18)..(18): Selenocysteine
  MOD_RES (61)..(61): Selenocysteine
  MOD_RES (76)..(76): Selenocysteine
  MOD_RES (78)..(78): Selenocysteine
  MOD_RES (97)..(97): Selenocysteine
  MOD_RES (108)..(108): Selenocysteine
  MOD_RES (119)..(119): Selenocysteine
  MOD_RES (123)..(123): Selenocysteine
  MOD_RES (165)..(165): Selenocysteine
  MOD_RES (171)..(171): Selenocysteine
  MOD_RES (201)..(201): Selenocysteine
  MOD_RES (215)..(215): Selenocysteine
  MOD_RES (226)..(226): Selenocysteine
  MOD_RES (247)..(247): Selenocysteine
  MOD_RES (251)..(251): Selenocysteine
  MOD_RES (294)..(294): Selenocysteine
  MOD_RES (297)..(297): Selenocysteine
  MOD_RES (311)..(311): Selenocysteine
  MOD_RES (336)..(336): Selenocysteine
  MOD_RES (346)..(347): Selenocysteine
  MOD_RES (349)..(349): Selenocysteine
  MOD_RES (353)..(353): Selenocysteine
  MOD_RES (393)..(393): Selenocysteine
  MOD_RES (406)..(406): Selenocysteine
  MOD_RES (412)..(412): Selenocysteine
XERPYKCDFPGCEKXFIXVSALFSHNRAHFREQELFSCSFPGCSKQYDKACRLKIHLRSHXGERPFICDSDSCGWXFXSMSKLLRHRRKHDDDRRFXCPVEGCGKSFXRAEHLKGHSIXHLGXKPFECPVEGCCARFSARSSLYIHSKKHVQDVGAPKSRCPVSXCNRLFXSKHSMKAHMVRQHSRRQDLLPQLEAPSSLXPSSELSSPGQSELXNMDLAALFSDXPANASGSAGGSDEALNSGILXIDVXSVSSSLGGNLPANNSSLGPMEPLVLVAHSDIPPSLDSPLVLGXAAXVLQQGSFSVDDVQXVSAGALGCLVALPMKNLSDDPLALXSNSNLAAHIXXPXSSSXPRENASVPELLAPIKVEPDSPSRPGAVGQQEGSHGLPQSXLPSPAEQHGAQDXELSAGXGNFYLV

SEQ ID NO: 32550 - protein, 540 aa, Homo sapiens
  MOD_RES (147)..(147): Selenocysteine
  MOD_RES (155)..(155): Selenocysteine
  MOD_RES (162)..(162): Selenocysteine
  MOD_RES (188)..(188): Selenocysteine
  MOD_RES (210)..(210): Selenocysteine
  MOD_RES (218)..(218): Selenocysteine
  MOD_RES (238)..(238): Selenocysteine
  MOD_RES (242)..(242): Selenocysteine
  MOD_RES (274)..(274): Selenocysteine
  MOD_RES (283)..(283): Selenocysteine
  MOD_RES (320)..(320): Selenocysteine
  MOD_RES (331)..(331): Selenocysteine
  MOD_RES (379)..(379): Selenocysteine
  MOD_RES (406)..(406): Selenocysteine
  MOD_RES (408)..(408): Selenocysteine
  MOD_RES (414)..(414): Selenocysteine
  MOD_RES (420)..(420): Selenocysteine
  MOD_RES (427)..(427): Selenocysteine
  MOD_RES (437)..(437): Selenocysteine
  MOD_RES (448)..(448): Selenocysteine
  MOD_RES (488)..(488): Selenocysteine
  MOD_RES (535)..(535): Selenocysteine
  MOD_RES (540)..(540): Selenocysteine
AAPRPSPAISVSVSAPAFYAPQKKFGPVVAPKPKVNPFRPGDSEPPPAPGAQRAQMGRVGEIPPPPPEDFPLPPPPLAGDGDDAEGALGGAFPPPPPPIEESFPPAPLEEEIFPSPPPPPEEEGGPEAPIPPPPQVSSGYVPPPVAXPFSSKSSXKPAAGGXAPLPPWKSPSSSQPLPQVPAPAQSQXQFHVQPQPQPKPQVQLHVQSQXQPVSLANXQPRGPPASSPAPAPKFSPVXPKFXPVASKFSPGAPGGSGSQPNQKLGHPEALSAGXGSPQPPSFXYAQQREKPRVQEKQHPVPPPAQNQNQVRSPGAPGPLXLKEVEELEQLXQQLMQDMEHPQRQNVAVNELCGRCHQPLARAQPAVRALGQLFHIACFXCHQCAQQLQGQQFYSLEGAPYCEGCYXDXLEKCNXCGEPIXDRMLRAXGKAYHPHCFXCVVCARPLEGXSFIVDQANRPHCVPDYHKQYAPRCSVCSEPIMPEPGRDEXVRVVALDKNFHMKCYKCEDCGKPLSIEADDNGCFPLDGHVLCRKCHXARAQX

SEQ ID NO: 32551 - protein, 164 aa, Homo sapiens
  MOD_RES (159)..(159): Selenocysteine
MAAPRPSPAISVSVSAPAFYAPQKKFGPVVAPKPKVNPFRPGDSEPPPAPGAQRAQMGRVGEIPPPPPEDFPLPPPPLAGDGDDAEGALGGAFPPPPPPIEESFPPAPLEEEIFPSPPPPPEEEGGPEAPIPPPPQPREKVSSIDLEIDSLSSLLDDMXKNDPF

SEQ ID NO: 32552 - protein, 572 aa, Homo sapiens
  MOD_RES (159)..(159): Selenocysteine
  MOD_RES (179)..(179): Selenocysteine
  MOD_RES (187)..(187): Selenocysteine
  MOD_RES (194)..(194): Selenocysteine
  MOD_RES (220)..(220): Selenocysteine
  MOD_RES (242)..(242): Selenocysteine
  MOD_RES (250)..(250): Selenocysteine
  MOD_RES (270)..(270): Selenocysteine
  MOD_RES (274)..(274): Selenocysteine
  MOD_RES (306)..(306): Selenocysteine
  MOD_RES (315)..(315): Selenocysteine
  MOD_RES (352)..(352): Selenocysteine
  MOD_RES (363)..(363): Selenocysteine
  MOD_RES (411)..(411): Selenocysteine
  MOD_RES (438)..(438): Selenocysteine
  MOD_RES (440)..(440): Selenocysteine
  MOD_RES (446)..(446): Selenocysteine
  MOD_RES (452)..(452): Selenocysteine
  MOD_RES (459)..(459): Selenocysteine
  MOD_RES (469)..(469): Selenocysteine
  MOD_RES (480)..(480): Selenocysteine
  MOD_RES (520)..(520): Selenocysteine
  MOD_RES (567)..(567): Selenocysteine
  MOD_RES (572)..(572): Selenocysteine
MAAPRPSPAISVSVSAPAFYAPQKKFGPVVAPKPKVNPFRPGDSEPPPAPGAQRAQMGRVGEIPPPPPEDFPLPPPPLAGDGDDAEGALGGAFPPPPPPIEESFPPAPLEEEIFPSPPPPPEEEGGPEAPIPPPPQPREKVSSIDLEIDSLSSLLDDMXKNDPFKARVSSGYVPPPVAXPFSSKSSXKPAAGGXAPLPPWKSPSSSQPLPQVPAPAQSQXQFHVQPQPQPKPQVQLHVQSQXQPVSLANXQPRGPPASSPAPAPKFSPVXPKFXPVASKFSPGAPGGSGSQPNQKLGHPEALSAGXGSPQPPSFXYAQQREKPRVQEKQHPVPPPAQNQNQVRSPGAPGPLXLKEVEELEQLXQQLMQDMEHPQRQNVAVNELCGRCHQPLARAQPAVRALGQLFHIACFXCHQCAQQLQGQQFYSLEGAPYCEGCYXDXLEKCNXCGEPIXDRMLRAXGKAYHPHCFXCVVCARPLEGXSFIVDQANRPHCVPDYHKQYAPRCSVCSEPIMPEPGRDEXVRVVALDKNFHMKCYKCEDCGKPLSIEADDNGCFPLDGHVLCRKCHXARAQX

SEQ ID NO: 32553 - protein, 171 aa, Homo sapiens
  MOD_RES (3)..(3): Selenocysteine
  MOD_RES (5)..(5): Selenocysteine
  MOD_RES (7)..(7): Selenocysteine
  MOD_RES (42)..(42): Selenocysteine
  MOD_RES (53)..(53): Selenocysteine
  MOD_RES (101)..(101): Selenocysteine
  MOD_RES (128)..(128): Selenocysteine
  MOD_RES (130)..(130): Selenocysteine
  MOD_RES (136)..(136): Selenocysteine
  MOD_RES (142)..(142): Selenocysteine
  MOD_RES (149)..(149): Selenocysteine
  MOD_RES (159)..(159): Selenocysteine
  MOD_RES (170)..(170): Selenocysteine
MSXYXRXQHRKKCQGPVSFAESWAAQQQAGRVRSPGAPGPLXLKEVEELEQLXQQLMQDMEHPQRQNVAVNELCGRCHQPLARAQPAVRALGQLFHIACFXCHQCAQQLQGQQFYSLEGAPYCEGCYXDXLEKCNXCGEPIXDRMLRAXGKAYHPHCFXCVVCARPLEGXS

SEQ ID NO: 32554 - protein, 415 aa, Homo sapiens
  MOD_RES (2)..(2): Selenocysteine
  MOD_RES (22)..(22): Selenocysteine
  MOD_RES (30)..(30): Selenocysteine
  MOD_RES (37)..(37): Selenocysteine
  MOD_RES (63)..(63): Selenocysteine
  MOD_RES (85)..(85): Selenocysteine
  MOD_RES (93)..(93): Selenocysteine
  MOD_RES (113)..(113): Selenocysteine
  MOD_RES (117)..(117): Selenocysteine
  MOD_RES (149)..(149): Selenocysteine
  MOD_RES (158)..(158): Selenocysteine
  MOD_RES (195)..(195): Selenocysteine
  MOD_RES (206)..(206): Selenocysteine
  MOD_RES (254)..(254): Selenocysteine
  MOD_RES (281)..(281): Selenocysteine
  MOD_RES (283)..(283): Selenocysteine
  MOD_RES (289)..(289): Selenocysteine
  MOD_RES (295)..(295): Selenocysteine
  MOD_RES (302)..(302): Selenocysteine
  MOD_RES (312)..(312): Selenocysteine
  MOD_RES (323)..(323): Selenocysteine
  MOD_RES (363)..(363): Selenocysteine
  MOD_RES (410)..(410): Selenocysteine
  MOD_RES (415)..(415): Selenocysteine
MXKNDPFKARVSSGYVPPPVAXPFSSKSSXKPAAGGXAPLPPWKSPSSSQPLPQVPAPAQSQXQFHVQPQPQPKPQVQLHVQSQXQPVSLANXQPRGPPASSPAPAPKFSPVXPKFXPVASKFSPGAPGGSGSQPNQKLGHPEALSAGXGSPQPPSFXYAQQREKPRVQEKQHPVPPPAQNQNQVRSPGAPGPLXLKEVEELEQLXQQLMQDMEHPQRQNVAVNELCGRCHQPLARAQPAVRALGQLFHIACFXCHQCAQQLQGQQFYSLEGAPYCEGCYXDXLEKCNXCGEPIXDRMLRAXGKAYHPHCFXCVVCARPLEGXSFIVDQANRPHCVPDYHKQYAPRCSVCSEPIMPEPGRDEXVRVVALDKNFHMKCYKCEDCGKPLSIEADDNGCFPLDGHVLCRKCHXARAQX

SEQ ID NO: 32555 - protein, 178 aa, Homo sapiens
  MOD_RES (15)..(15): Selenocysteine
  MOD_RES (17)..(17): Selenocysteine
  MOD_RES (22)..(22): Selenocysteine
  MOD_RES (128)..(128): Selenocysteine
  MOD_RES (148)..(148): Selenocysteine
  MOD_RES (156)..(156): Selenocysteine
  MOD_RES (163)..(163): Selenocysteine
PSVCPSPPGWRLLRXGXQSLRXRRRGGHPRRGAHAPACDFPLPPPPLAGDGDDAEGALGGAFPPPPPPIEESFPPAPLEEEIFPSPPPPPEEEGGPEAPIPPPPQPREKVSSIDLEIDSLSSLLDDMXKNDPFKARVSSGYVPPPVAXPFSSKSSXKPAAGGXAPLPPWKSPSSSQPL

SEQ ID NO: 32556 - protein, 176 aa, Homo sapiens
  MOD_RES (1)..(1): Any amino acid
  MOD_RES (4)..(4): Selenocysteine
  MOD_RES (11)..(11): Selenocysteine
  MOD_RES (37)..(37): Selenocysteine
  MOD_RES (59)..(59): Selenocysteine
  MOD_RES (67)..(67): Selenocysteine
  MOD_RES (87)..(87): Selenocysteine
  MOD_RES (91)..(91): Selenocysteine
  MOD_RES (123)..(123): Selenocysteine
  MOD_RES (132)..(132): Selenocysteine
XSSXKPAAGGXAPLPPWKSPSSSQPLPQVPAPAQSQXQFHVQPQPQPKPQVQLHVQSQXQPVSLANXQPRGPPASSPAPAPKFSPVXPKFXPVASKFSPGAPGGSGSQPNQKLGHPEALSAGXGSPQPPSFXYAQQREKPRVQEKQHPVPPPAQNQNQGLLSSRQAGCAPLGPQGP

SEQ ID NO: 32557 - protein, 36 aa, Homo sapiens
  MOD_RES (7)..(7): Selenocysteine
  MOD_RES (10)..(10): Selenocysteine
  MOD_RES (13)..(13): Selenocysteine
  MOD_RES (27)..(27): Selenocysteine
MAASRSXRVXRSXVGLNGLDESFCGRXLRNRSIAHP

SEQ ID NO: 32558 - protein, 58 aa, Homo sapiens
  MOD_RES (7)..(7): Selenocysteine
  MOD_RES (10)..(10): Selenocysteine
  MOD_RES (13)..(13): Selenocysteine
  MOD_RES (27)..(27): Selenocysteine
MAASRSXRVXRSXVGLNGLDESFCGRXLRNRSIAHPEEISSNSQVRSRSPKKRPEPVP

SEQ ID NO: 32559 - protein, 903 aa, Homo sapiens
  MOD_RES (7)..(7): Selenocysteine
  MOD_RES (10)..(10): Selenocysteine
  MOD_RES (13)..(13): Selenocysteine
  MOD_RES (27)..(27): Selenocysteine
  MOD_RES (68)..(69): Selenocysteine
  MOD_RES (76)..(76): Selenocysteine
  MOD_RES (109)..(109): Selenocysteine
  MOD_RES (149)..(149): Selenocysteine
  MOD_RES (160)..(160): Selenocysteine
  MOD_RES (197)..(197): Selenocysteine
  MOD_RES (224)..(224): Selenocysteine
  MOD_RES (245)..(245): Selenocysteine
  MOD_RES (247)..(247): Selenocysteine
  MOD_RES (249)..(249): Selenocysteine
  MOD_RES (269)..(269): Selenocysteine
  MOD_RES (284)..(284): Selenocysteine
  MOD_RES (296)..(297): Selenocysteine
  MOD_RES (301)..(301): Selenocysteine
  MOD_RES (307)..(307): Selenocysteine
  MOD_RES (335)..(335): Selenocysteine
  MOD_RES (341)..(341): Selenocysteine
  MOD_RES (377)..(377): Selenocysteine
  MOD_RES (380)..(380): Selenocysteine
  MOD_RES (388)..(388): Selenocysteine
  MOD_RES (393)..(393): Selenocysteine
  MOD_RES (415)..(415): Selenocysteine
  MOD_RES (418)..(418): Selenocysteine
  MOD_RES (428)..(428): Selenocysteine
  MOD_RES (478)..(478): Selenocysteine
  MOD_RES (509)..(509): Selenocysteine
  MOD_RES (571)..(571): Selenocysteine
  MOD_RES (588)..(588): Selenocysteine
  MOD_RES (646)..(646): Selenocysteine
  MOD_RES (650)..(650): Selenocysteine
  MOD_RES (656)..(656): Selenocysteine
  MOD_RES (691)..(691): Selenocysteine
  MOD_RES (707)..(707): Selenocysteine
  MOD_RES (717)..(717): Selenocysteine
  MOD_RES (729)..(729): Selenocysteine
  MOD_RES (745)..(745): Selenocysteine
  MOD_RES (748)..(748): Selenocysteine
  MOD_RES (771)..(771): Selenocysteine
  MOD_RES (860)..(860): Selenocysteine
  MOD_RES (877)..(877): Selenocysteine
  MOD_RES (889)..(889): Selenocysteine
MAASRSXRVXRSXVGLNGLDESFCGRXLRNRSIAHPEEISSNSQVRSRSPKKRPEPVPIQKGNNNGRXXDLKQQSXRESWVSPRKRGLSSSEKDNIERQAIENCERRQXEPVSPVLKRIKRCLRSEAPNSSEEDSPIKSDKESVEQRSXVVDNDADFQGXKRACRCLILDDCEKREIKKVNVSEEGPLNSAVVEEIXGYLAVNGVDDSDSAVINCDDCQPDGNXKQNSIGSYVLQEKSVAENGDXDXQXSMFLDSRKEDSYIDHKVPCXDSQVQVKLEDHKIVXACLPVEHVNQLXXEPAXGPFSEXQSSLRDSEEEVDVVGDSSASKEQCKENXNNELDXSLESMPASGEPEPSPVLDCVSAQMMSLSEPQEHRYXLRXSPRRAAPXRGSPXKNSSPYRENGQFEENNLSPNEXNAXVSDNVSQSPXNPGEISQNEKGICCDSQNNGSEGVSKPPSEARLNIGHLPSAKESASQHIXEEEDDDPDVYYFESDHVALKHNKDYQRLLQXIAVLEAQRSQAVQDLESLGRHQREALKNPIGFVEKLQKKADIGLPYPQRVVQLPEIVWDQYXHSLGNFEREFKNRKRHXRRVKLVFDKVGLPARPKSPLDPKKDGESLSYSMLPLSDGPEGSSSRPQMIRGRLCDDXKPEXFNQLWXVEEQKKLEQLLIKYPPEEVESRRWQKIADELGNRXAKQVASRVQKYFIKLXKAGIPVPGRXPNLYIYSKKSSXSRRQHPLNKHLFKPSXFMXSHEPPVYMDEDDDRSCFHSHMNXAVEDASDDESIPIMYRNLPEYKELLQFKKLKKQKLQQMQAESGFVQHVGFKCDNCGIEPIQGVRWHCQDCPPEMSLDFCDSCSDCLHEXDIHKEDHQLEPIYRSEXFLDRDYCVSQGXSYNYLDPNYFPANR

SEQ ID NO: 32560 - protein, 409 aa, Homo sapiens
  MOD_RES (15)..(15): Selenocysteine
  MOD_RES (77)..(77): Selenocysteine
  MOD_RES (94)..(94): Selenocysteine
  MOD_RES (152)..(152): Selenocysteine
  MOD_RES (156)..(156): Selenocysteine
  MOD_RES (162)..(162): Selenocysteine
  MOD_RES (197)..(197): Selenocysteine
  MOD_RES (213)..(213): Selenocysteine
  MOD_RES (223)..(223): Selenocysteine
  MOD_RES (235)..(235): Selenocysteine
  MOD_RES (251)..(251): Selenocysteine
  MOD_RES (254)..(254): Selenocysteine
  MOD_RES (277)..(277): Selenocysteine
  MOD_RES (366)..(366): Selenocysteine
  MOD_RES (383)..(383): Selenocysteine
  MOD_RES (395)..(395): Selenocysteine
MIDLWLYSYQRLLQXIAVLEAQRSQAVQDLESLGRHQREALKNPIGFVEKLQKKADIGLPYPQRVVQLPEIVWDQYXHSLGNFEREFKNRKRHXRRVKLVFDKVGLPARPKSPLDPKKDGESLSYSMLPLSDGPEGSSSRPQMIRGRLCDDXKPEXFNQLWXVEEQKKLEQLLIKYPPEEVESRRWQKIADELGNRXAKQVASRVQKYFIKLXKAGIPVPGRXPNLYIYSKKSSXSRRQHPLNKHLFKPSXFMXSHEPPVYMDEDDDRSCFHSHMNXAVEDASDDESIPIMYRNLPEYKELLQFKKLKKQKLQQMQAESGFVQHVGFKCDNCGIEPIQGVRWHCQDCPPEMSLDFCDSCSDCLHEXDIHKEDHQLEPIYRSEXFLDRDYCVSQGXSYNYLDPNYFPANR

SEQ ID NO: 32561 - DNA, 97 bp, Homo sapiens
tgctgttgacagtgagcgcgcctggagttactgtaaaagatagtgaagccacagatgtatcttttacagtaactccaggcatgcctactgcctcgga

SEQ ID NO: 32562 - DNA, 97 bp, Homo sapiens
tgctgttgacagtgagcgacggccgcaaactgacacctcatagtgaagccacagatgtatgaggtgtcagtttgcggccgctgcctactgcctcgga

SEQ ID NO: 32563 - DNA, 97 bp, Homo sapiens
tgctgttgacagtgagcgagagttactgtaaaagacgtgatagtgaagccacagatgtatcacgtcttttacagtaactcctgcctactgcctcgga

SEQ ID NO: 32564 - DNA, 97 bp, Homo sapiens
tgctgttgacagtgagcgcccactacaactacatgtgtaatagtgaagccacagatgtattacacatgtagttgtagtggatgcctactgcctcgga

SEQ ID NO: 32565 - DNA, 97 bp, Homo sapiens
tgctgttgacagtgagcgccagcatcttatccgagtggaatagtgaagccacagatgtattccactcggataagatgctgatgcctactgcctcgga

SEQ ID NO: 32566 - DNA, 97 bp, Homo sapiens
tgctgttgacagtgagcgataccaccatccactacaactatagtgaagccacagatgtatagttgtagtggatggtggtactgcctactgcctcgga

SEQ ID NO: 32567 - DNA, 21 bp, Homo sapiens
gcgggagtatgagttaagaaa

SEQ ID NO: 32568 - DNA, 21 bp, Homo sapiens
ccgcaaactctgtctcaacat

SEQ ID NO: 32569 - DNA, 21 bp, Homo sapiens
caacttctcagatactggaaa

SEQ ID NO: 32570 - DNA, 21 bp, Homo sapiens
ctacgatgagaactggttcta

SEQ ID NO: 32571 - DNA, 21 bp, Homo sapiens
agatacactgtcagatccttt

SEQ ID NO: 32572 - DNA, 21 bp, Homo sapiens
acgtcagagaaacggcgtcat

SEQ ID NO: 32573 - DNA, 21 bp, Homo sapiens
catccgcaaactctgtctcaa

SEQ ID NO: 32574 - DNA, 21 bp, Homo sapiens
cagcaggagttcgtcagagct

SEQ ID NO: 32575 - DNA, 21 bp, Homo sapiens
gcttgctccctacgatgagaa

SEQ ID NO: 32576 - DNA, 21 bp, Homo sapiens
cggcgtcatgcccagccactt

SEQ ID NO: 32577 - DNA, 20 bp, Homo sapiens
tagaaccagttctcatcgta

SEQ ID NO: 32578 - DNA, 20 bp, Homo sapiens
cttgacggtatccacccatt

SEQ ID NO: 32579 - DNA, 537 bp, Homo sapiens
atggcgcaggatcaaggtgaaaaggagaaccccatgcgggaacttcgcatccgcaaactctgtctcaacatctgtgttggggagagtggagacagactgacgcgagcagccaaggtgttggagcagctcacagggcagacccctgtgttttccaaagcccggtataccgtgcggagcttcggcatccggagaaatgaaaagattgctgtccactgcacagttcgaggggccaaggcagaagaaatcttggagaagggtctaaaggtgcgggagtatgagttaagaaaaaataattttagcgacaccggcaactttggttttgggatccaggaacacatcgatctgggtatcaaatatgacccaagcattggtatctacggcctggacttctatgtggtgctgggtaggccaggtttcagcatcgcagacaagaagcgcaggacaggctgcattggggccaaacacagaatcagcaaagaggaggccatgcgctggttccagcagaagtatgatgggatcatccttcctggcaaataa

SEQ ID NO: 32580 - DNA, 438 bp, Homo sapiens
atgcctggagttactgtaaaagacgtgaaccagcaggagttcgtcagagctctggcagccttcctcaaaaagtccgggaagctgaaagtccccgaatgggtggataccgtcaagctggccaagcacaaagagcttgctccttatgacgaaaattggttttacacgcgagctgcttccacagcgcggcacctgtacctccggggtggcgctggggttggctccatgaccaagatctatgggggacgtcagagaaacggcgtcatgcccagccacttcagccgaggctccaagagtgtggcccgccgggtcctccaagccctggaggggctgaaaatggtggaaaaggaccaagatggcggccgcaaactgacacctcagggacagcgggacctcgatcgcattgctggacaggtggcagctgccaacaagaagcattag

SEQ ID NO: 32581 - DNA, 19 bp, Homo sapiens
gagatctggacagaatcgc

SEQ ID NO: 32582 - DNA, 19 bp, Homo sapiens
gactccagtggtaatctac

SEQ ID NO: 32583 - DNA, 97 bp, Homo sapiens
tgctgttgacagtgagcgatctcgcttgggcgagagtaagtagtgaagccacagatgtacttactctcgcccaagcgagagtgcctactgcctcgga

SEQ ID NO: 32584 - DNA, 53 bp, Homo sapiens
gcgcgatagcgctaataatttctcgagaaattattagcgctatcgcgcttttt

SEQ ID NO: 32585 - DNA, 21 bp, Homo sapiens
ccgagatgaatcctcaccata

SEQ ID NO: 32586 - DNA, 21 bp, Homo sapiens
gctgaaggagagaatgtattt

SEQ ID NO: 32587 - DNA, 21 bp, Homo sapiens
ccttgcccgctcgggtatgaa

SEQ ID NO: 32588 - DNA, 21 bp, Homo sapiens
ccatatctttgcatccttcaa

SEQ ID NO: 32589 - DNA, 21 bp, Homo sapiens
gctatgttggctgcccaggat

SEQ ID NO: 32590 - DNA, 21 bp, Homo sapiens
tagaaccagttctcatcgtag

SEQ ID NO: 32591 - DNA, 21 bp, Homo sapiens
atgacgccgtttctctgacgt

SEQ ID NO: 32592 - DNA, 21 bp, Homo sapiens
agctctgacgaactcctgctg

SEQ ID NO: 32593 - DNA, 21 bp, Homo sapiens
ttctcatcgtagggagcaagc

SEQ ID NO: 32594 - DNA, 21 bp, Homo sapiens
aagtggctgggcatgacgccg

SEQ ID NO: 32595 - DNA, 21 bp, Homo sapiens
tttcttaactcatactcccgc

SEQ ID NO: 32596 - DNA, 21 bp, Homo sapiens
atgttgagacagagtttgcgg

SEQ ID NO: 32597 - DNA, 21 bp, Homo sapiens
tttccagtatctgagaagttg

SEQ ID NO: 32598 - DNA, 21 bp, Homo sapiens
aaaggatctgacagtgtatct

SEQ ID NO: 32599 - DNA, 21 bp, Homo sapiens
ttgagacagagtttgcggatg

SEQ ID NO: 32600 - DNA, 21 bp, Homo sapiens
tatggtgaggattcatctcgg

SEQ ID NO: 32601 - DNA, 21 bp, Homo sapiens
aaatacattctctccttcagc

SEQ ID NO: 32602 - DNA, 21 bp, Homo sapiens
ttcatacccgagcgggcaagg

SEQ ID NO: 32603 - DNA, 21 bp, Homo sapiens
ttgaaggatgcaaagatatgg

SEQ ID NO: 32604 - DNA, 21 bp, Homo sapiens
atcctgggcagccaacatagc

SEQ ID NO: 32605 - DNA, 20 bp, Homo sapiens
ctacgatgagaactggttct

SEQ ID NO: 32606 - protein, 124 aa, Homo sapiens
  MOD_RES (21)..(21): Selenocysteine
  MOD_RES (38)..(38): Selenocysteine
  MOD_RES (63)..(63): Selenocysteine
  MOD_RES (65)..(65): Selenocysteine
MADEKPSNGVLVHMVKLLIKXFLDGIFDDLMENNVLNXDEIHLIGKCLKFVVSNAENLVDDIXEXAQIAGKIFREHLWNSKKQLSSDISSDGEREANMPGLNIRNKEFNYLHNRNGSELDLLGM

SEQ ID NO: 32607 - protein, 170 aa, Homo sapiens
  MOD_RES (17)..(17): Selenocysteine
  MOD_RES (23)..(23): Selenocysteine
  MOD_RES (40)..(40): Selenocysteine
  MOD_RES (56)..(56): Selenocysteine
  MOD_RES (70)..(70): Selenocysteine
  MOD_RES (99)..(99): Selenocysteine
  MOD_RES (115)..(115): Selenocysteine
  MOD_RES (129)..(129): Selenocysteine
  MOD_RES (145)..(145): Selenocysteine
  MOD_RES (150)..(150): Selenocysteine
  MOD_RES (154)..(154): Selenocysteine
  MOD_RES (161)..(161): Selenocysteine
DLLENLGYSVVIKENLXAQEMEXALRQFAAHPEHQSSDSXFLVFMSHSILNGICGXKHWDQEPDVLHDDXIFEIFNNRNCQSLKDKPKMVLGLFGSPLXVEKPVQILMVGSCKVXSVMMLLQRLMWKRXSLLSNLPHHVQHSFEXPNILXQLPXIERLSMXRYFYLFPGN

SEQ ID NO: 32608 - protein, 124 aa, Homo sapiens; identical to SEQ ID NO: 32606
  MOD_RES (21)..(21): Selenocysteine
  MOD_RES (38)..(38): Selenocysteine
  MOD_RES (63)..(63): Selenocysteine
  MOD_RES (65)..(65): Selenocysteine

SEQ ID NO: 32609 - protein, 152 aa, Homo sapiens
  MOD_RES (17)..(17): Selenocysteine
  MOD_RES (23)..(23): Selenocysteine
  MOD_RES (40)..(40): Selenocysteine
  MOD_RES (56)..(56): Selenocysteine
  MOD_RES (70)..(70): Selenocysteine
  MOD_RES (106)..(107): Selenocysteine
  MOD_RES (116)..(116): Selenocysteine
  MOD_RES (131)..(131): Selenocysteine
  MOD_RES (146)..(146): Selenocysteine
  MOD_RES (150)..(150): Selenocysteine
DLLENLGYSVVIKENLXAQEMEXALRQFAAHPEHQSSDSXFLVFMSHSILNGICGXKHWDQEPDVLHDDXIFEIFNNRNCQSLKDKPKVIIMQACRGNGAGIVWFXXDSGKASADXHGRLLQGNICNDAVXKAHVEKDFIAFKSSXPRSXFI

SEQ ID NO: 32610 - protein, 124 aa, Homo sapiens; identical to SEQ ID NO: 32606
  MOD_RES (21)..(21): Selenocysteine
  MOD_RES (38)..(38): Selenocysteine
  MOD_RES (63)..(63): Selenocysteine
  MOD_RES (65)..(65): Selenocysteine

SEQ ID NO: 32611 - protein, 216 aa, Homo sapiens
  MOD_RES (17)..(17): Selenocysteine
  MOD_RES (23)..(23): Selenocysteine
  MOD_RES (40)..(40): Selenocysteine
  MOD_RES (56)..(56): Selenocysteine
  MOD_RES (70)..(70): Selenocysteine
  MOD_RES (106)..(107): Selenocysteine
  MOD_RES (116)..(116): Selenocysteine
  MOD_RES (131)..(131): Selenocysteine
  MOD_RES (146)..(146): Selenocysteine
  MOD_RES (156)..(156): Selenocysteine
  MOD_RES (191)..(191): Selenocysteine
  MOD_RES (196)..(196): Selenocysteine
  MOD_RES (200)..(200): Selenocysteine
  MOD_RES (207)..(207): Selenocysteine
DLLENLGYSVVIKENLXAQEMEXALRQFAAHPEHQSSDSXFLVFMSHSILNGICGXKHWDQEPDVLHDDXIFEIFNNRNCQSLKDKPKVIIMQACRGNGAGIVWFXXDSGKASADXHGRLLQGNICNDAVXKAHVEKDFIAFKSSXPHNVSWRHEXNGSVFISQIIYYFREYSWSHHLEEIFQKVQHSFEXPNILXQLPXIERLSMXRYFYLFPGN

SEQ ID NO: 32612 - protein, 124 aa, Homo sapiens; identical to SEQ ID NO: 32606
  MOD_RES (21)..(21): Selenocysteine
  MOD_RES (38)..(38): Selenocysteine
  MOD_RES (63)..(63): Selenocysteine
  MOD_RES (65)..(65): Selenocysteine

SEQ ID NO: 32613 - protein, 99 aa, Homo sapiens
  MOD_RES (17)..(17): Selenocysteine
  MOD_RES (30)..(30): Selenocysteine
  MOD_RES (46)..(46): Selenocysteine
  MOD_RES (60)..(60): Selenocysteine
  MOD_RES (89)..(90): Selenocysteine
DLLENLGYSVVIKENLXAQMVLGLFGSPLXVEKPVQILMVGSCKVXSVMMLLQRLMWKRXSLLSNLPHHIMFLGDMKQMALSSFPKLSXXSESILGVII

SEQ ID NO: 32614 - protein, 124 aa, Homo sapiens; identical to SEQ ID NO: 32606
  MOD_RES (21)..(21): Selenocysteine
  MOD_RES (38)..(38): Selenocysteine
  MOD_RES (63)..(63): Selenocysteine
  MOD_RES (65)..(65): Selenocysteine

SEQ ID NO: 32615 - protein, 101 aa, Homo sapiens
  MOD_RES (17)..(17): Selenocysteine
  MOD_RES (30)..(30): Selenocysteine
  MOD_RES (46)..(46): Selenocysteine
  MOD_RES (60)..(60): Selenocysteine
  MOD_RES (76)..(76): Selenocysteine
  MOD_RES (81)..(81): Selenocysteine
  MOD_RES (85)..(85): Selenocysteine
  MOD_RES (92)..(92): Selenocysteine
DLLENLGYSVVIKENLXAQMVLGLFGSPLXVEKPVQILMVGSCKVXSVMMLLQRLMWKRXSLLSNLPHHVQHSFEXPNILXQLPXIERLSMXRYFYLFPGN

SEQ ID NO: 32616 - protein, 40 aa, Homo sapiens
MADISSDGEREANMPGLNIRNKEFNYLHNRNGSELDLLGM

SEQ ID NO: 32617 - protein, 216 aa, Homo sapiens; identical to SEQ ID NO: 32611
  MOD_RES (17)..(17): Selenocysteine
  MOD_RES (23)..(23): Selenocysteine
  MOD_RES (40)..(40): Selenocysteine
  MOD_RES (56)..(56): Selenocysteine
  MOD_RES (70)..(70): Selenocysteine
  MOD_RES (106)..(107): Selenocysteine
  MOD_RES (116)..(116): Selenocysteine
  MOD_RES (131)..(131): Selenocysteine
  MOD_RES (146)..(146): Selenocysteine
  MOD_RES (156)..(156): Selenocysteine
  MOD_RES (191)..(191): Selenocysteine
  MOD_RES (196)..(196): Selenocysteine
  MOD_RES (200)..(200): Selenocysteine
  MOD_RES (207)..(207): Selenocysteine

SEQ ID NO: 32618 - protein, 40 aa, Homo sapiens; identical to SEQ ID NO: 32616

SEQ ID NO: 32619 - protein, 99 aa, Homo sapiens; identical to SEQ ID NO: 32613
  MOD_RES (17)..(17): Selenocysteine
  MOD_RES (30)..(30): Selenocysteine
  MOD_RES (46)..(46): Selenocysteine
  MOD_RES (60)..(60): Selenocysteine
  MOD_RES (89)..(90): Selenocysteine

SEQ ID NO: 32620 - protein, 40 aa, Homo sapiens; identical to SEQ ID NO: 32616

SEQ ID NO: 32621 - protein, 101 aa, Homo sapiens; identical to SEQ ID NO: 32615
  MOD_RES (17)..(17): Selenocysteine
  MOD_RES (30)..(30): Selenocysteine
  MOD_RES (46)..(46): Selenocysteine
  MOD_RES (60)..(60): Selenocysteine
  MOD_RES (76)..(76): Selenocysteine
  MOD_RES (81)..(81): Selenocysteine
  MOD_RES (85)..(85): Selenocysteine
  MOD_RES (92)..(92): Selenocysteine

SEQ ID NO: 32622 - protein, 180 aa, Homo sapiens
  MOD_RES (6)..(6): Selenocysteine
  MOD_RES (20)..(20): Selenocysteine
  MOD_RES (48)..(48): Selenocysteine
  MOD_RES (76)..(76): Selenocysteine
  MOD_RES (78)..(79): Selenocysteine
  MOD_RES (117)..(117): Selenocysteine
  MOD_RES (134)..(135): Selenocysteine
  MOD_RES (158)..(158): Selenocysteine
  MOD_RES (161)..(161): Selenocysteine
  MOD_RES (164)..(164): Selenocysteine
MDKNQXEVMREFFLSGFSQXPSIEAGLFVLFLFFYMSIWVGNVLIMVXVASDKYLNSSPMYFLLGNLSFLDLCYSXVXXPKLLADFFNHEKLISYDQCIVQLFFLHFVGAAEMFLLXVMAYDRYVAICRPLHYXXVMSRGLCCVLVAASWMGGFVHSXVQXILXVHLPFCGPNQVENFFL

SEQ ID NO: 32623 - protein, 10 aa, Homo sapiens
  MOD_RES (7)..(7): Selenocysteine
CSPCHQXCLC

SEQ ID NO: 32624 - protein, 4 aa, Homo sapiens
HFCH

SEQ ID NO: 32625 - protein, 5 aa, Homo sapiens
IAHGI

SEQ ID NO: 32626 - protein, 111 aa, Homo sapiens
  MOD_RES (33)..(33): Selenocysteine
  MOD_RES (45)..(45): Selenocysteine
  MOD_RES (49)..(49): Selenocysteine
  MOD_RES (70)..(70): Selenocysteine
  MOD_RES (85)..(85): Selenocysteine
QWVDLHHLLCGADFLLHHYPSQDSLQGRKAKGXLHVCLSPHGGNXVFWXLYFHLRSSFLYIFCGQDGVCXLQCYYPNAKPPHLHXSEQRGKVSHAEALGQKWAYLEKAGDM

SEQ ID NO: 32627 - DNA, 429 bp, Homo sapiens
taaacactgtgctgggtctgaatttttcagctacccttcttcagccggcaacacacagaacctggcggggaggtcactcttaccagtccccactctgatgagaaaactgcccagctccaggcaccatggcgccccagtgatgtagccgaacacccgcgcctctaacgtcgccaacggcccacctctatggtgtcggcgaagacccgcccttgtgacgtcacggaaggcgcacccttgtgacgtcacaggggactaccactcacgcagagccaatcagaactcgcggtgggggctgctggttcttccaggagcgcgcatgagcggacgctgcctactggtggccgggcgggatgtaaccggctgctgagctggcagttctgtgtcgctaggcttctgcccggccgccgccgcacataagccacgaggagg

SEQ ID NO: 32628 - DNA, 803 bp, Homo sapiens
ggagcccggtccgcgaccagcccagcccatcccagtcccgcgcggagtcctggattccagccgctcgcagtgactcggtactcgggatagtgccgggggccgcagccctgtcccgctgccgccgccggatgccccgagtcggccgtcacgcaccccccgcgggagcccgcgccgcccgccgcgccggggccgtttaaatgggccaagttgtggcggcggcgtcggcggcggagtctcccaagtccccgccgggcgggcgcgcgccagtggacgcgggtgcacgactgacgcggcccgggcggcggggcgggggcttgggacccccgagaggggcggggactccgcgactcctcgctgccgggctcggcctggcgggtgggtcggcgagccgggcgtgggactgccccgggcgcgggcgctggtggccggggcgcgggactccagacgccccggggagccccgaggccctggaactgcggcgctcggcgagtcgatccgggatcgatagcagctccatgtctccggcctctgaggccccgccggccggctgggcagtccggggaggcctggcgggcggcgcgtaggcggcggctgcgggcgccggggcgcactagcggacggcgtgggcgcgcggccaggcgcctccccggcccccgcgacccaactccagcccgggccggaataagttgctgccgccggcggagagcggggctgcggagccaccggggcgccatgccggcggtcaagaaggagttcccgggccgcgaggacctggccctggctctggccacgttccacccgac

SEQ ID NO: 32629 - DNA, 1145 bp, Homo sapiens
ccaagttcaagcgattctcctgcctcagcctcccgagtagttgggattacaggtgcccaccacgcccggctaatttttatatttttagtagagacatgatttttccgtgttggtcaggctggtctcgaattcctgacctcaggtaatctgcccgcctcggcctcccaaagtgctggcattacaggcgtgagccaccgagcacagcctccgctccttctaacagagcaactcggctcccctgcaactctctcttcagcccctctgtccttcctttccctccccagcacttatctctcttctaccgaactgcaggcggtgatttcacccaagaacgtgagagttctcctagatcgggaagagatttttgcacaactcaccaacatacgctccctgcctaggacagagtttggcacggaacaggagctcagtaaacatcggatgaaagagtaagttaagctgaaaggactggggggcagaggtcggcgatccttaggccttggccctgagaccccaggcgaggtcagcaacccaaccggggtgggacaggacgagcaagaggttctgctcacgcatgtccccactaacctggccgaggggctcccgcccggcttatccggactccgggcagcctcgcgtgcttcccgtgtctccgcttgtggagaattttcggactcggattcggactcggagtcaaagcccgaagctaggaactcgtccaccgtcagctccgccaggcgcctgcgggtcacgcaggagtcacagctgcccgcacgcccagctcgccccagccccgctgagaggagcaagaaaagcccccttggatacagacacccaccgggaggccaaatcggccctcggacccgcggcttacctcttgcggctccccgcagctgccatgacaccaacccgaagcgtgcaccccacttccggccccagaatgccgcgcggctgcgcacttccgccgcccaggccccgcccctttccccgccccgccgcgccacgcccagccgagtggctctatggttctccgaccgcaacgccggcggcctcagggcgggagggcgcgttcgcgtgctcggtgcgggcagccccggtggggcccagatgcgcctcccgctcggcgcccggctccgtaggacgcggtg

SEQ ID NO: 32630 - DNA, 1224 bp, Homo sapiens
ctccctgagtccccttaagccttggggaccctgactcgggtctgtggcgagggggcccaggcaggaggggaggctgcggtggctttggccgccgtctcctgtgctggaactcctgcctcagccctccctgcagtcaccggtgactcgggccggccagagtttagatggaaacaggatgtgtgggcacgttgtcccggggggcctggaaggtcgccccgggttcaccaagccggagcacaagcaggtggggtacctctgcacactggaggcctcgtctgggccagaggggtgcttgccccaaggctggcctctcgagtggagggcccagggcagagacctgcacggctcaggtaggggccaggcctcttccagaaaggctccaccctcgcccaggccctggtgccgggcgggacgtcccggagccccgcctgcccgcgggaggcgggggcaggaggctgtggacagggacccagacttgccgacctgtacgactctggccatggggaacagccactgtgtccctcaggcccccaggaggctccgggcctccttctccagaaagccctcgctgaagggaaacaggtgagcggggcgtgggtgcggccacctgggcgcagggctcccccacccgctccggggccaagccacgagaccccttgccttgtccccagagaggacagcgcgcggatgtcggccggcctgccgggccccgaggctgctcgaagcggggacgccgccgccaacaagctcttccactacatcccgggcacggtgagcgcggcgtgcacggtggctgtggtctgggagcgtggctctgcccgcgcgtgtgtgccgtgtgtccgtgcagctcagggtcttcccctcgcccccggggcgttcagaccccggtaggtgaggagccgacgctgactgccccgccctggggagctcatccggccgaaagtctgagcggagagcgaaaccgcgacgcaggactgagtcagtcgggagagagctgggcggggcgggccgcgggcggggcctcccgggacctcctcccgcaggggaccagcgcacgtgtctctgtcgctgcagtggggcttggggtcgtgccggcaggtagtgtcacttgagagtaaggggcctcagatgagcagcgagccagccggtcacctacaccggcctttctccctgggtgtcccgcaggaagttgccgctgggtatggccgcctggtccacagcaat

SEQ ID NO: 32631 - DNA, 2796 bp, Homo sapiens
ctcacccgtcacctgcacgcgacgcaggctccgcaggtgtctcacggtcatctccaggatgtccgccttctccagcttcgagtggcgggagctctgggggcggggataggcgggaggtccaggtcagctgcgacccagactccgggtctcgggccttcgcccccgacttacctcttttctgagggcgtccaggatgagggttttgagctgagcgaggctctcgttaatacgcgctcggcgccgcttctccatgaccggcttggaggactgcgggtcgggcaccggctgagtcccgcgtccctcccgccccccggtcgcccccctcacgcccggccgggaccccaccttgcggtgctcggccgcgctccggggcttgtctggggtccggctggcgctggccggcgctcctgccatcggcgaggcgctcggtttccccggcgtgtctgcggccatggtgcgccccgcgcctccccgtgccgggtggagcgcgccgccacggaccacgggcgggctggcgggcgagcggcgagcgcgcggcgatccgagcccctagggcggatcccggctccaggcccgcgcgcgcctcaggccgtttccctatttaaggcctcgccgccgcggggtgtgtgaacccggctccgcattctttcccacactcgccccagccaatcgacggccgcgctcctcccccgctcgctgtcagtcacgcctcggctccgggcgcggcctccgcgggcgacaatggcatgcggggcccccgcccgcgcccccctccgacaccgctggggacagggccgggtgatcccgcgctccccgatgcagccggggccgagcaacgcgccgggaggggccgctgggggcgaacggggcccgggacccccggggctgggcggagtctcggggctcactctcccgcccagggggccgggagccggggctggacggagctggggctgtggccgcgcgggaagtcgggaaggaaattcccccagtggcgcagggtccggcggcgccgaggggtgggcgagcctcggtctcgagcctcttggcttcctccgcccgtccccactccggtcccggtttgggccctgctcggtctccgagtttgatccgacaccggctcggcctccgggggtcccaccctcaggtgtgcggcctggagcacggagggctgcagaaagccttgggagcgacagagccgggggaaggtcggcggccgggtcggcaggcgggagggcggagtcagcggacggcgaaggggcgcacgggtggccccgcagagcagggccggtgatggcgcgggccgggccggaccacgaggagcagaacgtgcgcgtgacgcgagcgggctggtgacgtcaccaggcacccggggcgatgacgcaagcctgctgggatgacgtcatgtggcccgtgtcgccacgtgcttccaggtgacccgctggcgaactcagcagcagcaaagtggggctcacagaaaaatgaggggccactgttaatataactgcaaaggggcaggttgcgtaaaacagggctgtggttattttcgtgtttgctgtttttatttcgaatgccgctgcggggcacgttggtcctttccgcactcggggtccccggcggcctcacgcgtccgtgcagcggaggcttcctgagccccctggagagcctggcctgggcccgggtgtggagaccctcccgggctttcaatccgggcaggaggcagatggcagactcagcagtcacgtaagagaaccgaattaggtgggtggcctgggtggacaaaagccttcttgacgccgggtggtcccaaaggcttctgcggggtggggggtcctcaggggggaagcctcaagggagggcgtggcattcccagggtgcgaagggggcgcagggacgagggaggtggggagggggagctgggccagcgagaaccgggagcttctggtcggggagggagtcggggaactttttggggagcttttctgagccagggagtcggctgattggcaggttcgcccctgcccgggcacctggacccagggtttctgtgcggaagcttcccctcccctcggaccccacgtctaatctggccccaagcaaagtcctgcggcccacgcgggaaggcgccctcttcgcggcgctgaccccggccctccgcggtgcccctgaggcgccccccacaccccgccgcttgcacaggggcgcggggggctgcgaggccggagcgggggtggcgccctctccgccgagaggctgtccgcgcccctcgccgactggggaaagccgcgggggctgggcgggcgtctcggaggtggccccgcgagcacttaagccccggctctcctgccccgacctctctgcgcgcgcctcggcgctggagaggctcggaccggccccgtagcccaggaggtggtgtggatggtgtccccgtcccgcgtccctccccggcctgagcgctgggcccgggcgggaaagcccgcgagcgcccccagtggccgcagtcgccgccgcctcctgctgggggtcatcccaggggagctgccggcctgaatctccccagcccctgggccccggcttgggaagaaatttgggggggctctgggcctcccccagtccctagacaggcagggagttcgggatggaaggaggagcctgaggatcgtttttatttattttttttttgtagagatggggatctccctatgttgcccaggctggtctcgaactcctggcccgagacgatgctcctgcctcggcctcccaacgtgctgggactacaggcgtgagtctcctccc

SEQ ID NO: 32632 - DNA, 2682 bp, Homo sapiens
tcctcactggcactcccagactgctttccttttccaccaaaaccacccccgctttgtgaccagacctcactgtgttgaagtcatcggcacccctttcctgcaggaggggacacctgctccctgtcactctcccggccatgccttcaaaatccacaccagcaattctccaactttgacttcctctctttcaggggtcctgtcccctccccacttaccccactgggtcctttctcccaactgcacccctccacggtccagcctctccactctctctgcccccctcccagctcccgcctctgctgtccgccagccctgagatctcgggcagatgcacagcctgcatctgcggcttcctcctcccctgtctgttctctccttatcaagagaagcctatctggccggccattgtgtctgcccctcaccctccctccttcctgttcatgtgggcagaccacagcccgtgtggaatccctaccttcttggtggcttaagcaccacctgcctattctttccgtagtggggatcagggcagtgccagtggcttcctggggcctctcacagcctgcggccctgggccaaggtcagctgggtgggaagggcccaagggtagccatgctggacacctggggctgctgtccctcagctgccgggctctctgccagagccgtgcagcctggagtcctacccactctcagtcagcttcctcctaacacatggccagcgttccaggagggcgaagtggaagcctagggactcttgaggccaggatccagaacgcacatagtaaaatctccaccacactccatcggccaaagcaagtcacagcagccagattccagaggagtcgaagcacacactgacccctcctcccctccaccgcctgcctctgccctcccctcgcaggggcagggctgcctgatgagccccctgggtttatctgccctgctggccctgggaaggctgggatgaaagtgtcatttagtggcagggactttagggagcctggtatggtcaagccctagcccccgcagcagtgcccccgcagcagttccccccgcagcagtgcccccaggacagctgggcctgggtctccagtgggtcggagttttctgaagccggccgtgggtcgacctcgcacccggtgactgccccaggcggaggggcatgcgtggcccagcgcgggggccctgtccgtggccgtgtggggtcaggtgtccggctcggggcttctgggccccctgctccccaaaggtgtgcagctcccgcgtcccctgccaggtcctttaggtctaagagggtccctcttgtccagcgcaccaggctccacgtacccccaacccctccccagctgggtgcctccccctggctggaacggcagccctccctgctcatgggcctgcccctccactctatcctccctgacgcagccagtggcatgcttctaacctgcagatgccctccccaggggccaagcccaccagacaccaggcaactctaagtggcccactgggtccactgtgtggagtgggaccctccgccctgtctcaggtcctgctgtcccaggaagcccttacagggggctgcagctggggggtgacatgcctgccgagtgggtggggaggctccggcccggtaagatgggatccagcagtgcgagactgtggcccaggtcagatggtggcagctcggccttcctggtcccaggtggagagacagggtgaggctcctccccatgggatctggaggggaggggctgcctgtgtaatcagcccagcctcggacgtcaacaatccatgtttcttaggaaaggcggccaacccagggtctccagtgacacgtttccgggtcatcatccggtggccacagggaatcacaggctcggtgtgactttctcagagcgccatggtgcccctgtggggtttcccagcccatcctgtcctgtgggacaggcagaggcccagccgtgtcatcggagtgacctttgagctctaaccaaagtccacgtgtcatcaggagccatgagtcactcaggtgccatccagggcggcggctgaggagtggtgactggccagatgggaaggcggggaagggtctggatttgaatgagagcgagggagtgggctgcaggctggtagactcctccagatggatgaggccagacccctgcaacagccatcccgagcaaggctcaagcctccctgagagtccagggcgccaagtcagccctgcacctggcccgggcctcggaccccgacggggctcacccacctgagatcaccctggctctgcgggaaggcaggaagctttggcatgatcctccacgggcgaggatcacgtagagacgtgtagagacgcgacgaagcacgaagacccgtgtttgacgggttgccaggtgcctacatcagagctcattaaattacacattaaatagatgcacgtgtgtgtgtcaagctcccctaattcaagttgtagaaaatcagactcagagttcttacactcgggggtgttttagcagctgcgcctcaagattctaaattcaaacgcacacggaataaaacatttcggtttatcgccaggcgcggcggctcacacctgccatcccagccctttgggaggccggggtgggtggatcacctgaggtcaggagttggagaccagcctggccaacatggtgaaaccccg

SEQ ID NO: 32633 - DNA, 1495 bp, Homo sapiens
atcagcctgggcgacatggcgagacccccatctctactaaaaatacaaaaaattagccgggcctggtggtgcacccctgtggtcccagctacgtgggaggctgaggtgagaggatcgctttagcctggcaggcggaggttgcaatgagatgagatcgtgcctctgcactccagcctgggcgacagagtgagagaccctgtctcaaaaacacaaaaacaacaacaaaaaaacaccaatctgagcaaatactgccctaaaccgagtgttgttatctctgggtagtttggagttcttgtttctcaattaaccatggggatgttttccaagtttactaattttgcaagttggtaaatggaaaatgaaaccattagtccatgtgatgacagctttagtgcatcctgtgaaggatctggaatgcgcgatatttaggtgtttccagggtgttgggtgggggtggggatgccgtccgctgtccggagtccccgccacttttgcttttccctgtctttcggtcattcggttttgtttcttccgctcactctggggcatgcctcgggaaagggaaaccgaaactgaagccaaatttggccaccagcgcaggctcggcggcacgccccctgacgtgtgtgcctcaggcttataatagggccggtgctgcctgccgaagccggcggctgagaggcagcgaactcatctttgccagtacaggagcttgtgccgtggcccacagcccacagcccacagccatggtaaggcagatgtcacaggtggggggaggtgggctctgtgccagccaattttcgtctccctcccccagccaaggtctcccaggggtgcagggagagcggagctgctcagagcttggccaggttctaagtgtgctcctgaaagcaggtcacccctgagatcctcagggtggggcacagaggggcaccctagcaggtaaagggaggccacgggatggcggtgggcagctggccttctagtaacgagccctcagtgccttctgtgcctggggtccctgccggcgggatgtagaggacagacaggagggagcactgtccctgggtacaggagctcgccctgcagccagtgccttgtgtgtggtgggcctggggctggcgccgcagtctctgaacctgtgtgacgcctgcagggctgggacctgacggtgaagatgctggcgggcaacgaattccaggtgtccctgagcagctccatgtcggtgtcagagctgaaggcgcagatcacccagaagatcggcgtgcacgccttccagcagcgtctggctgtccacccgagcggtgtggcgctgcaggacagggtcccccttgccagccagggcctgggccccggcagcacggtcctgctggtggtggacaaatgcgacgaacctctgagcatcctggtgaggaataacaagggccgcagcagcacctacgaggtacggctgacgcagaccgtggcccacctgaagcagcaagtgagcgggctg

SEQ ID NO: 32634 - DNA, 2205 bp, Homo sapiens
cgtgagtcaccacgcccagcctagacacagttctgaagggacaaagggggcctccgctccctcctttcaatcttcagctaggccaggctcccacttgggtcctccagccctcagtttccccctgcacccagccaggccaagctgcagaggcgcccggcccagagctgggaaggggcgtggcgggacccgcgcttgcagccgcgggacggaagggggcgcgaacctccccgcggcggggcctgggggggcggggccgggaggggcggggccgcgccccgtgctggccaatcagcgcccgccccggcaccgggacccgcctccgcgccgcagctcccggggggtccggcccggccgagcctcggtgtccggccccgcgggggaggggcgcggcctgcggagcgggatcggggccgggtctggggcccctcccggcggccttcgagccctgccgcccggctccgcgccgcccggagcccctcggcagtcccgtcacgtctcctccagattaggcattaactcgggtgcagccgcacttccggggggccgcggcgggggaggggcgcctgcgggatccagacccgccccccactctcctctccccgccccctcccgggccgcccctttcccgccccacggccgcgccgggcgctgcgtcccggggctttgttcgcggcggcgcgggtcgccggcctccgggcgggccgggggagggaggagggagggggcgggagggggaaggaaggaggagggggaggaggagggcgcggggagggggtaggggggcggggaggagagagggggaggggcgccgccctggccccgcccccccccgcccgcccgcccgcgctccgccgcctccggagctgcgtcccgtcctgtccagtcccgtccccggcgcggcccgcgcgctcctccgccgcctctcgcctgcgccatggccggccggtcccacccgggcccgctgcggccgctgctgccgctccttgtggtggccgcgtgcgtcctgcccggagccggcgggacatgcccggagcgcgcgctggagcggcgcgaggaggaggcgaacgtggtgctcaccgggacggtggaggagatcctcaacgtggacccggtgcagcacacgtactcctgcaaggtgcgcccacccggaccccggcctcccctcgcgacgcctgccgccccgccgggacccccgccccaggccgtgggaaccagccccggtcgctccgcagcccccgctccggctcccttggcgaccgccaagccccgggagggggggtcgccgggtcccgggaaactcgcgggcgccggggaaagttgctgcgccgccgccgtcctccgcccgccgccgcctccctcctcgcggagacaagtgcacctcgcccacggactgcggctgccgcgcgccctccctaccggccgagaaggagaggggcctggggagggggggcctttgcccgggcggggagcgggggctgggcctgggatccgcttgttcccctccccagaggcctttcccggggcgagaggggttggtcaggagagaaaaaggggcgcacagcctgagctcccaaccccgggagccaggtggggggtgccgcagtggtgcggggggggggcgtgcaggagcagagaggtgggcggggccgtcaccgggcctcgtgtgcttgggggcagggccggtgccccatcgcgctcctgcgggaaccggggctccccaccccggggaggggaagtttccctggtttctccttcaggtgcttctgggagcccccggggtaggtacgctgggacccccaccatcttctcctagtaggggctcgggggacccagagccggcgcccgtgtacccccaaaaccatctcctgggaccagaaatccactcatttccctccacggaggtggagaaggtggcagcttctttcagactggccggtgcgggctacagctgggctcccccgccggcccagtctcctccacagcggccagggcactttgccaggcccctgcaggattttcccgacttcctccccgctgctcctgggtgtggctggggtgggggaaggcgatgaaagccaccaggccctccccctgcctgggtcatctgcctcctggagcctactgttggggggcgtggaagaggctctgcctgcgcaactggagggggtccctgcggatgccgcagtcctgaggctcccagcaggg

SEQ ID NO: 32635 - DNA, 936 bp, Homo sapiens
ccctagtcttcagaagctacccctgagaccacagggtcccaccttgtatgggaaccccatcctggagacaaaggcccctccgagctccccaggtcggggagggccacgcccctcaccacccctgcccggacaccgcctgaggtgcacctgctgctgggccacacctggactcagctctactgaggacttcctttcctcagtttctcacctggccctgccagatcttcctggccctgcccagccaaggcccctcccccagtcaacaaccctcagaaaggctcctccccccttctctgcctagggagccacattcctggcataactaagacaggtatgtgtccctccctctgcgccacctttgggcgggggaggcccgctgctccctccggaaggagacccccgcccctgctttgtcagggaagtggcctggcctccgcagtgccagctgcccagggctggcggctgagcgggcgactcctccggccctcgccaccctgtcctgtctgggcactgcccatgccctcccagcccacctcacaaaggctggtcctagagcctccctgaagcccccaggagggactcctggctgagggccggccaggccgcccggggcccatccctccctgctaggagccaggagcagagaaagggagtgttgtctgcccctgccggggcctggcacagggacagggcagggggccagggtcagagtgagtctggcgccttcccagcccggccctgcccagctctgaagcccggggtcccggcggcctagtcccgggcccgcctgtattccggcgtgtgcaccctcccttcctccctgcctggccagctgcctaggcctcaggacggcagtcctaggggaagcccagagtcccacggcaccggggacagcatcggtgctggggttgaggggcccgacagccccagaccagg

SEQ ID NO: 32636 - DNA, 1066 bp, Homo sapiens
gagggtgcgcagaaccaggagaggcagtttggggagcaaccgctgcggagcgcgcaggacccagaggactcaaaggggacctggagggtgacgaggccttccgtggccgggggtgaggaggagggaagccgcgcgggcggagaggcgctggtgggtcccaggttggaggctgtgggtctgagaggcgaagcccaggggagcccggggccaccgctgaaaaggatggcagctgagcgcaggcgagggagaggcgcgcgtgtccgggacagaccgcggtgggagctcgactccggaaaccggcgggcctggggctgggacctacagggaggcggacgcggcacagccagggaggtcggtcccgcgggccccgccccgccccccagcctggagcgcccccctccggccccggtccgcagtggaggcggccccggaaaagccagagggtcttggaatggagggcgggacggagccgcctgcaacgcccgcgacccgcgacccggctgcccgcgggacccccggctctgaagcggggacggccggagcttccgcctgcagcccaaactcccaggcgcccggcaagagtggcgggcgcggaccctttaagaaggccggggggcgtggcctcggggcgtggcccggggcgtggcatcggggcgaggcttcgggggcggagcccaggcagcgccttcgcggagttgccggagggtgcggccgcccagagcgcaccccgagcgccggcgagcggcgcggtgagaccctcgtgcaggtgagcccggcgcacggcggcccagaatcctggaccccaggagaagcgtctacggccccgacaggtgggcgtggcgaaatgccacccgggccctcctcgcgctcccagctgggtcacgcctcagacccggggtcctggacgcctgcccccctccacccgcaggccctgccaggacactttggtccctggcccgccaggcctggcctcactcaggcttggctgtggggtcagagtcgggcagaacggaaccaacagtcctggcaggcccaggcggttggaggagaagtggtcggctctgga

SEQ ID NO: 32637 - DNA, 1441 bp, Homo sapiens
ctggcccagcatccgcgtgtcagcacacgtgtgtacgtgtgcatgtgtgtgttcgcgtgtccatgtgtgttcatgtgtgtgcgtgtgcatgtgtgtgtgtgtgtgtgtgcgtgtgcctgcatcctgagggacggcgtctgctaagcactggttcagggcacagggtcctgcacctgcctccctcaggcctccttccttcaggtctcaggcactggagtccagggtgactcagggaagccggtgcctcccctggccccatccctgccctcctggctggtaccctgggctgagctggttcctccagcctcagtttccccactgcagcgggctgcatctgcagagaaggagacctggtctggggaggcccctggcccctccttgctgaggaccaggccgccacctggtggccgcccgcccctgcagcgcccgcctgcctcctgccggctcctgggtggggcgagggccagaaaggcgagcagagcagctctggggcccgggtggtggtgctgcctggacccccaaggtctgcgtatgtctcgctaagccttctgccctatccgtgtgggtctctccccctcacctggccaggccgtggcctccagcctcacctgtgctcgcctgtgcctggcccaggtggtaccacgggcgcctgtctggcaaggaggctgagaagctgctgctgcagaaggggcatccgggcagcttcctggtgcacatgagtcagagcgatcctgggggcttcccgctgtcagcgctgacgcaagggtgggacgaggcgcagggctcaggccgccagccacaggtcacgcacatcatgactcactcccaggtgggagggggcggcgagctggggcggcctctgggaagggcgggcggccttggccaggcccctcaccgccacccccacggccggatgagaagtgggagacggggagcgttttgacaccctcggagacccggtgtagcaggaagagcccattgatggggaaggtgggggcggttgtgcacctcaagcaggtaaaagcccctccacaggcaccagggccgtgggcacagcctcacccaggaaagcagctgggggtccactgggctcagggaagaccccctgccagggagaccccaggcgcctgaatggccacgggaaggaaaacctaccagcccctccgtgtgtcctcctggcacatggcgacctccatgacccgacgagggtgcggggcccggggcagggtggccaggtgcgggggtgcggggcccggggcagctgccctcggtgggaggggtgtggtgtggtctgcggggccctgggggggtgtggtggggtctgcggggccctgggggggtgtggtgtggtctgcggggccctgggggggtgtggtggggtctgcggggccctgggggggtgtggtggggtctgcggggccctgggggggtgtggtggggt

SEQ ID NO: 32638 - DNA, 1420 bp, Homo sapiens
ggctatggggactccgtggggggaggctgaggctatggggactccgtggggggtggctgaggctatggggactccgtggggggaggctgaggctatggggactccgtgccgggaggctgaggctatggggactccgtggggggaggctgaggctatggggactccgtggggggaggctgaggctatggggactctgtgcagggccgctgtgaggccctgaaagcactcgtcggaggctcctgcttcctgaggtccgtgactcgggtcacatgccgcctccaggaagcaccctggcccctgcagctctgggaacgtcctcccgacagctcctgggaatatcctggcactgaggtcactctgggctcccggctgacactcgtgccggaggcaaaggtgaggaaaggccggaggaatgtgtggtctcggcgccaggccaggcctccctgtgcaggagaggagccagcagctccccttctctcagctcagacggtctctcagggctctcgggaggctcagagcagcttggctggcagattccagggcagggggtgggcccgcctggtcccctccgtcgcagccagtgggcgggaggctgggctggtgagcgtgtgggcgtgtgtgagcacacgtgcccatgcttgagacatggatgctggtgtgagcacctgacccctcacctccttcactcggtctcctcacgccctctcagggactccttcccctccaggcctcggttacgggtcacacctggcactgccaggcctggggacgtggtgcggccggtgcggggaggggccttccaggctgctgtggggcccccggcctcgccccaccccgccccgccccgtgctgggccattgcctcaaatgcagcggctctgttggccgtgggactggaattctttcccaagggcccagatgtgcagaggggaggccggtgcgggggagcagggctccgggacgtgcacttgggtctagctttgcccctgacgtgctggggccgcccctaggcccagctcagtgtgtccctcctgtgcccagtgaggagggcgtgcccctcgctgccacaggtcctggctgaccacgtgctgcccaagggccaatcgcgagtgcgcaggtgggggacgtggggagccagctgagggggatatgtggaggtgtcaggatgaccctgggtttttggtttgggccactgggtgggaggaggaggaggggacccagaattgagagatggggcctggggggctgctcagagggtgggctgggaggtgcctgtctgtgtctggcctggcctccagaccctgcctggctggacctgctgttcgtgcctgtttccgattttatcctccaaaccagacgcccagcctggtgcaaatgcaggagtggagtttccagggggatgtggactccttccctccacc

SEQ ID NO: 32639 - DNA, 791 bp, Homo sapiens
agcgccccaacccgctaccctcacgcctgcccccagcccctcactcaccccggcgccctccgggtttctctttcgtacaccccgccctcaggcggtggcgccgcgccccctgggacttgtagtctttcttccgccccggccccggcgccaggccccgcagctcccaaagaaaactacaactcccggcggcccgcgcgagagccgccctcgcctggtggtaccatcgcgcgcggccgtgggtggggcgccggggcggggcgcgaagcgccctgggaaatgtagtcctagaagaaccagcgcatgtctcgggtccctgacacggagggactacattcccccggattcctcgcgcgccggctgcttggcgttgccgggagacggggcggggcgtcgtcggggtctcccgggcgaccgcacaagcgtcggcgtccttagcgttccgccggtttaggcggaggcggaggcggagcgtttgggggcggccggggcggcttcggcttcatcggagaaggcggcgcggctgcaccaggtttggccgcgggcgcgcggggccagcgccctccagacccacggagcgccccgagcgcctcgcgagccgccgccaaatgcgccccaggtccgcggccggcgccagtgctgggacctcggcggccggtgtcggagcgcggcgggagagaccctgccttgggtgcgggactgggacggctcggacccagagggctcccggggcttcgcctctcggacgggtcagggctctgcggtctcaggacgctcccccgtgagtctcggcg

SEQ ID NO: 32640 - DNA, 1012 bp, Homo sapiens
actgcaggttctctttggaaggagcttcgcaggctgagggtggggcccttcgccacccactgccccacccagggagaggctgcctcgcatcagctccggggtctccacgttctccagaccccaagaaccccttggccttgcagagtctctgtgagtcaggagctcagcgctggaagatgcatccaggtcaggcagagacccctggtccagcctccccctcacttgctgctggcctgggccacggcactgctgcaggctccgcggactttaggctcatttaatgcctgaccctgagtggcaagccccaccctgggcaaatatttatttgacaaataagggctcaccaggacgaaggccatggaaggctttccccagggcagccgctgagcggctgtggaggccgaggggtctgtccgcctgggggaggcaggagggatgtggggaaaggggggcctctgaccgtgagtccccagatcggttcaggggcggtgggagccccggctgctggagcctggtctgcgtggtacaagacggcccccgtgcctgctctctctgttctgatgagaggatagggaaggccatggtgctggaggagctcccggctcccggggctgtggcccagaaagacgccccagggtggcactcagacagtgaggtggcctgttgaccccacagggaagtgcttggtctcagggcccagtacagctgcccccacaggagcctctaccacagaagcaggcatggaggagctcggaggaccgtggcggggacaggggagggtgtgtgtctgcctcgaggcctctcctccaggccttcctctccttcaaagggactgccgcggccgaggtgtggcctgcaggggtggactctgaggccagcaggggcccgcccgacacctcacctgagctacactcttcccctgacagaggtggccgatggggctggctgagctgggccttttatgcaggaatggacgcccttggggtcagcctcaggggttaacccttagcat

SEQ ID NO: 32641 - DNA, 1564 bp, Homo sapiens
cttatttgcgaaacgagtttgtcagaacattttttagtatctagaggaagatgagatgggccgaggaggtcgcgcacccctggatccctggaggagctggtgtgttctctgtggggcgggtggacgtggcccggacacacgggccgtgctcacagccggcctgcgagggctgcaaatccacgcccgccgtgtgggtgaaatggcggctttgcctcccagacgcgtagctccggcgacgcagagggaagaacctgagtgcccgccaggccgagctccgcaccccaccccccggcagcctctgactcccggctcggctcccgcggtcggggagggttggatttcacactttgttctcgaggccgcaccattgattaagcccgtcgggcaggttaaccaacaagttaggttttcacgccgggatcacattcctcgccgggcgctcccaccccaccccagcctgtgcaggtgggacccggccaggcaggcgggcagggcggccaggtgcgccgaggggcgcctccacggggagtgtgctccgcagagaaccccttgctggggcggctctgggcctcctgactcactcctggattttcccaagctgagtctggccccgcggtgatgattaacccaacacctcaaccggcaccgccacgctagctccacttcccggcgacggttgacaagaaagcgccgcgtggggctctcggaaaacagggaaggtccgttttcgcttttcatttcttgacctgtggccacggtaagactcggccgcctgcccacccgactccttgcccctcacccctgtgccaggcacaaggccctgcgaaatccttggtcccccagctgagcctgccggcccaggccaccatctccccacccagccctggagccagggtcggcctctcctgctagctgctcgttggctttacagcttctgcactcaggaggcgcctgggaatcctgccctggaacttaggaaggaggcttctcccacctgcctgccacacgggtctgtccctgggtcccagcctctgccgtgtgcccctcagcctcccgggtgagaacgcaatgactgatgagcctggggtggccaggccagctctggccctgtggggttcctgagaaggctggccctgggtggccaagggcctggggacactggccccgggccctgaacctggcagtgggaggccggcccgtccgccgggtgggctgggaactgtgtttggccccagctgcaagggacgagtgccgggcacctgctgccctccccacgtgacctggcagccaggaatggagctgaaattcaactctgctctgaacgggaagtcttagtttcctttagctcagaaaacaggtgaaattgtgttcctgaagcactgatttgatgggatttgatggcattggtggcgaaggcctgtgaggtgatggaaagggaaagccgggtgccctggagcctgacaggctggggccagggcaggggacctggtgtggggtctccggagagggtccaggcgtgagggaagctgggtcaggacctcggagacgtggcctttggaggagg

SEQ ID NO: 32642 - DNA, 2658 bp, Homo sapiens
tagtagagatggggttttgccatgttggccaggctggtctctaactcctgacctgaagtgatcctcctgcctcggcctcccaaagtgctgggactataggcgtgagccatgcacccggcctgattttctgaacatggctgagggcttttcccttccctagtggtggcataattctattcctgtcgtcccagatcgcctgaccaggggagagtcctggataagaaccaagacacctcctcctggtgctgactccactaactacagtcgtaaaacacacgctgtgtgcaaagagactgtactttgttcctagagaaaataaagctagttcttgattctacatatcttgatgagttacacggtttacttgaggcaggaggatcgtgagaccagcctgggcaacacagtgagactgcgtctctttaaaaaacaaaaacaaaaagataagaccctgtctcgaaaaagggggaataaaaagtaacccaaaagtaactataaatatcaggagtccatcaagtggcgcttcctctcctggcttcagagtatctattcatcacggtgtgccaggttcgcagcacagcggagcgggccggtcccaccggaatggggtttcgacttcgccatcccctagcagctcagttcccagcaaggaatcaacacacccttgcaaaacggacgtgggaaacagcttaggcagagacgctatttctttgccatccctgggcttcagctctggtggaacgaggctatttctggcagttaacaacacacacggttagattctaaaagctcaacagggttcataacaccgcctctgagccagacatcaagggctccacacagccgacttcacatctccaaatcctactaactggggatgagggtccacgcggttcagaagcggaagcgcaggcgcagggaagcggggcagcttgtccaaggtcgcctcgccgataaacgcgagtccaaccagaccccttgggcctccgtttcccggtggcattcgtaggttttggccagtaggagaccagacgtgccggcggccggggaggccagcgtcgtcggcctgtccctgcccccgggaaccccgggagccccggtggcggcggagtctcgccagggctcaaggccgagcggacggacgatgccccagcccaaggcgggaggcggcggcggcctccagacccgccctcgccgtccggccggcgtacacttggccccgcggcctgcagcggccgtcccgggcccctcactcaccggtctgcctccccgcgctcgggatccgaggaccggagcgaagcgtcagtgacgccgccaacgggcccggatcaggccactgccatctttcttgcgggcgggggcggtgcgaacgggcgcgacctcacggaggggacgccggcgccaccatctctcctccgggcggaagcggtcgcggggccgctccgaggttgaccaatgacaagggtgcccgaggccacgtgacggccgccgattggccgccggcctccgagcgccccggggctcggcgtctgcggaaggccccggcgcgctcccaggagcgccgtgcgcacgcgcaccgccccgagccggcggcgcctgcgcactcgcgagtccggcctgggccgccggcccggcgcgggcgccatgaagctgctgcggcgggcgtggcggcggcgggcggcgctaggcctgggcacgctggcgctgtgcggggcggcgctgctctacctggcgcgctgcgcggccgagcccggggaccccagggcgatgtcgggccgcagcccgcctccccccgcgcccgcgcgcgccgccgccttcctggcagtgctggtggccagcgcgccccgcgccgccgagcgccgcagcgtgatccgcagcacgtggcttgcgcggcgcggggccccgggcgacgtgtgggcgcgctttgccgtgggcacggccggcctgggcgccgaggagcggcgcgccctggagcgggagcaggcgcggcacggggacctgctgctgctgcccgcgctgcgcgacgcctacgaaaacctcacggccaaggtgctggccatgctggcctggctggacgagcacgtggccttcgagttcgtgctcaaggcggacgacgactccttcgcgcggctggacgcgctgctggccgagctgcgcgcccgcgagcccgcgcgccgccgccgcctctactggggcttcttctcgggccgcggccgcgtcaagccgggggggcgctggcgcgaggccgcctggcaactctgcgactactacctgccctacgcgctgggcggcggctacgtgctctcggccgacctggtgcactacctgcgcctcagccgcgactacctgcgcgcctggcacagcgaggacgtgtctctgggcgcctggctggcgccggtggacgtccagcgggagcacgacccgcgcttcgacaccgaataccggtcccgcggctgcagcaaccagtacctggtgacgcacaagcagagcctggaggacatgctggagaagcacgcgacgctggcgcgcgagggccgcctgtgcaagcgcgaggtgcagctgcgcctgtcctacgtgtacgactggtccgcgccgccctcgcagtgctgccagagaagggagggcatcccctgagccgccgcggcccggccctccgggaca

SEQ ID NO: 32643 - DNA, 997 bp, Homo sapiens
tgccccctcagggtggctgccgcacctggccccaagaggacttcctggctgccctgagctcccgtccgcatttctgtccattcaagaccaggacagcaccagggctgggaatactggctccgacccagccgaggcagccccggggcagggtgggtcaggcaggtccagcgctgggactctagggaagggctggtcctgtgagcagacgagctggagggttggtggggggagtgtccccgcaccgggcatggcccctcccaggatggcagggagcccacggcaggagtgtccgatgcccccagccccggccaggcagcagggtcggcctgcggttctgggaagtcagccctggtggaggtcacggagaagccggcagctccctgccgctcagggcatggggtcaagggtcaggggtcaggggtcgggttgaggccgtccggcacgtagccggctgctctggctttgctcctgccagggtccacgaagctgccagacgcttgggacactcaataccccagctcccaaaccggggggcacaggcctgaagagatccgtttccctgggctccccaggtcccccagccagcccagaccccaagcaacagcagctctggctggcctgcacctgccccggggaccccacgctccggctgggtgagtgacaggcatctcccaccctcgtcaagagtccagggtcccttctatggcaaacattgcagtgtgggtccagcccaggaggtgaggctgagagagaatgaaggggtgcagctgggctgggccagaggatggagccttggctgggtgggctgggagcctggaccctcctgtgaggccgcccaccccaccccgacctgtccattcctttgctcctgggtgcccagagggggctagagatggcacattccaggggaattgcggctaagtggctgatcacctcccactggggcagaaaccaggaggcagaggccagggaggtggtgccagcaccaggacatccc

SEQ ID NO: 32644 - DNA, 2789 bp, Homo sapiens
ctgtatcaaaaaaaaaaaattccacaaaggaagcaaactgtgagaacagagtttgaagcatatgtgcctcgggttcccttcaaacatccccacagacaaaggacaccaagcatatcatcctgctgagagaaagagttggcgattttaaaacaaaaaggcacaggaaaaaaaaatgttcacacacagaaactgcattaaagcagcgtgaatcaccgagggcagctgtgcccaggtgctgaggcagtggctgcccagcgtccctcacccgtccctctttgtctggacagctctttcctgcttaggggatgtggcaggaaaccttggcctgacccatcggccaggcgcatggcacacccaggtccaggactgccagggaagtctctgccttctccaccagactgctccggaggctggacggaagcccgggccgatggaaatgggacactcacctgcgactcacacatgcacctgcctgggtcacctgcctgtcactcatccacgcacctacctgcctggctcacctgcctgtcactcaagcactcacctacctgcctggctcacctgcctgtcactcacgcacatccctgccgagagtggaactgctaaggaggtcagcggtgccaggccgtgcagatgacggactgcaagttccgggcacccagacccaaccacgccctaggctcaggtgctagactaagcgagatactcacgatcctttcttcggaagccagattacacagtctggttcccctggagcagggcgcggggccaccgacctgccccagccaagcccgctgtacactcttcgctgcccacctcccaccgggctgaggcccgacctttcagccgcttcctatctgggtctggcaagaggatggcaaccggactagagttaaatacacacgcactaagtggcaggcactgaaaaggacgccaggaggtgacacctggccaggggctgaaaggatgcagggaactggcaggtgtggatggcgaggcccggcgccgcttagagacttgttccgggctcgtgtctcactcgccggccggcggtggtctcccactgtcaccgcccgggtttcccagaaacgctggccctaagcacagtcccgggcacgctcgtttctctcggggtttacggggcagtctggagtctaacagttcaggggcgaggcgacggcgggctcgacggcagccctcccccgacacagactcccgtgatccactgacgaaccaggatcgaggctgcccgtcctggggcagctgcaagtgtcccagctgacgggaaacccggccgagtggtcaagtccccgacatgaccctgacccggagctccgggagcccgccgtaaccgacctcgggttccgcgcaggcaggctcgggccggggccccgcgggcggcgggcgcgaacggagaagcgtcgcgcagggtccccagcagccccgggccgccgctgtggccggctccggcaggggggacgagcgggcccgaggacccggcgcaggcctgcgagcgcgctcacctctccctgtcgctgcgcgtgggccgccgccgcgctcaggctcgccgtagtcgaggccggagcagggtgcggaaaagcggggcccgcgcccgaaacagccgcaccgccccgggattgggcccaccgaacccgccgcagcgccgccgccgccgcctcagcctccaagatggccgctcgcggggcggaaccagcctagcttctgcttccggtgcgcggtccggggcggtgaggagggagggggagggctggccgctctaggcagactggcggaccgcgcccacgactctctgtcgccgtcgaccccggggtgggggatggggcggggggcggggcggcgcttgcgcactggcgggcggctccgggcaccgttagtgggcgcgagagccccagaccccgaagccgcgcgcttccctccccatgtgccacggcccagggcggcaggcccggctgagggcgaccccggtggagaaagaaccccgaccctcccgcctcccggctcccgccttgtcctccgctcccacgccccacccggcccttaggggaggcgcggcgcggcccgggcatggagcgtcccgggcccctggaggctcagtggagggttgggctccagggagctcagagctctctcgttcagggacccgagagtgacacgcgtggcatctctttgcaacccacgtccgcgccgcagcaccctcccctgcaggtgcctgcccagccccgggatgcccctgacctccccttggacagactgcagaaagcgcggggcgctgcgtcctctccacctctctctgaccccagacacattgggagagagcggtaggtggcggggcgctggggtgggacgctgggggcaggcgcgcagcccaccgcctccctgagaggccgctgaggacagcggggagctgagggtggtcccctggtgggggatcaggaggtggacctcgccacctggctgcctgtggccctctcctttgccccaaccctgactgcctctcaggaacaaccacaggtcagcaaggtggctgaatattgagggtcagtcccgctgtggctacgggcagagggcaggctgtgtccatgctcagccctgactctggccctctgggacaccttggtgggtctgagacgttgctgcaggccgtggggcagaagccaggaggagtgtccacgcagcctcagcccgtgggaatccagcctgcctccattactgccgtcaccggctccaccttcggagaacatctcagcatccagcctccttcctctgcc

SEQ ID NO: 32645 - DNA, 1992 bp, Homo sapiens
gctctgcctgggaggctgttcacctgcctgggtgcaggaccccagagggaccccaggccacccctggcctgcccatgcccacgggaatcccgaccttgggctgcctgtctattgcaccagaaccgtcccagggctgactcagagtgaccctgagtgggggacgctcaccccaggggaggaaacggggctctgggataggaggtcctggctggggtcccacagatgccaggcgcctgccatctccagggcagtgctgtcacagaagacaacaccgctccctcgttacctgtggcccggccacctcagcggcccaaggaggtgagctcacagccatgctcggtcaatggggcctggccgtctttcctgggagagagcagaggcatgggcccaaagggagccagggatgcctgcccgtcccttctctcattcaggctcacctggtcatggtgcagtgaccacaggacccccacatgccgggagctgggttcgccccaccccaccccctgcaccgggccagcgaggggatggcccagaagagggggaggaccatgtggattcaccagtgctggacatgtgctctgtggctaccccctctgcctactctctggcccgatacaggggtgtgggacaggtgactgaacctcagcccttagaggccttgcccgggaggaggggaggggggtggagccgggagctgcgtgatccagccgagatgtgctctgactgaggccctgcagggcatacgggtcatggaaggggtgctctgcccccggccagggctccccctcctacaggaagccgggggccttgctcctgcaagctgccctttggctggaccgggccccactggccggacctgggctctttctctctctgcaccctgcaccaaggctgggctgtctgccaggccactcccggggacacagggaggcacaggctgcttccagccacaatctctggcaagcacctaggaccttgtccccgcctgccaagtagccgcccgggccatgtgtgccctgtctcctcggcaggtgcggcccacgcacaaagctgcccagatgtggtgggggagaagccccaggcctgtgctgtgtccgggggccctgccgctgacctgtggggtctctgtgacatcagcaagccccctgccgcgagcttggagaggcaccccagccccatctggcactcaaggaaatcagctcagagaggttgagtaactcgggaaggccacacagccagtgacgaagctgtgattcacacaggcctgggtgactccagcatggctttcctctccaggacgtcaccggtggcagctgcttccttccagagccggcaggcaggtgacctcaccctcctcagagccatggctctgctgctggaccctgtggggctgggctcccccagccaagcccagggacccagcaccacttggggcaggatgtcaggaacacagagcctacccttccaacctgggcccggctcgggtctggtcatttgggacagtgaggccacctggatatctagggtcccacagtagacagggatggggtggtcctgggggacagggacacctgccttccacacaaccgcactggggctgaagacgccagcctgggagactgtgatttggaccctgacagtagcatgtggtcttagcatgtgtgaggtcttagcgtgtgtggtcttagtgtgtgtgaggtcgtagcgtgtgtgaggtattagcatacgtgtgtggtcttagcatgtgtggggtcttagtgtgttgtgaatcactttcttttttttttttttgagacggagtcttgctctgtcgcccaggctggagtgcagtggcacgatctcggctcactgcaagctccgcctcctgggttcacaccattctcctgcctcagcctccccagtagctgggactacaggtgcctgccaccgcgcccacctaattttttgtatttttagtagagacggggtttcaccgtgttaggcaggatggtc

SEQ ID NO: 32646 - DNA, 609 bp, Homo sapiens
tgcactgtgggacagggtgggggcagtagggcagctgctctcggtcctggcagcaccaggaggacccagaccagctggggagagacgcccccggctcccccaacctcacagctgcaagcggcatggtccgctggaaagacgggtaggccatcctcctcagagcccactcccaccaggacagcctgacagtggggctgcctggggagagaagagttaaggcatgacatcaccagagaagcctcggcgggagaatccccggaagacaggaggcagatggatcgggcacgtgaccaccccctccgggagcaggcaacagggaaacagggccaggatcccggcagccctccacacaatcggctcactggctgtccgggccatctggcctcctggggattgggcaccacagggcccgggctggggccaggactccaggtctagggcaggggtccaggagcagaggccatcagggcctacagtccctcgtaccttgctaccctgaccggtgtcccaggcctcgggggaggggcctgtggtttacatggggcgtgtcctcaattaggagctggagctgcaggcaccaggctgccccagccagggaccttgaagggt

SEQ ID NO: 32647 - DNA, 3070 bp, Homo sapiens
atgttcatgcacaaacatgcctgcacacactggtaccacacatacatgtgtgttcaaggagacactgcacagacacgcatcaacatgtgtacctagtgatggaacacgcgtgtacaaggtgatgtgtctattgctgacatggctaacacagtacgtgaacccacacagacaggtggtgtgtgcacacgcttgcgtgcactcatcggcaggctacatgcagaagcaagcacagccccgtggcacagctcatccacacgtcctgtgcaaggcctggtgtccggagggaggcacgcagaggggcaaagttcacaagagcgcaccccgcacgagctcgtgcagaggagggggcctcacgcaggtgcgcacttggggatgcagagaggtttctttgcctccattgtcgtttgccaaatgtccaccaagcaaagccgatgcacacttgtgcacacgtctgtgaacatgtagttcacgcaggtgtacacgcctgcacgccacgaatgatggaaaacatgcagactcggtgtgcacacaacccctaccccctacctgaccttccccgccgctcttctcggccgccacccctccaagcccctgggtcattcaaaccacttcacgtttccaagcaccctaccccaggccttaaacgcggctccagctgcctgttccccacgcgctgctctggacacaggatcaagtcagagaccaggggccgacgcccccacggacccagacgaccctggccagagctggactgcagggcccgggaggggctcagcccagtggaggtgcagacacagagcgggggcggacggtcccgaggtgcccacggctgcccacgcgcacgccctccacccggggcggccgcacagggcaggagcgtcttttgttccaacccccggggcatggcggggcggggccgccgctttgtccgaggccggtcctccagcccctccccggcggccgcggcccggcccggcgctgacctccccaccccgccgccgggcacaaaggcgacagcgacgcccccggcctgcgcccaccccggcggccccgggcggcgcacctgaagcgcggggagtccttgacgcactcctcgaactccacggtcatggctgcggcggccgcggcgctcactggcacgaggaccgcggcgccgagcggcagccgcgccggcccggaccgctcgtcccgcccgcgccgcctcggcgcccgcccgccccggaatgaggccgccgcgccgcgccccgccccgcctgtcaccgccggggagcgtcgccaaagtcagccgcccgcgcgcaccgcccgctgtcactgccggggagcgtcgccaaggtccgccgcccgcgcgcgccgcccgctgtcaccgccggggagcgtcgccaaacgcctctcgcagcgtccagggaccaccccggtccggaagtgaggcggggcctgccacggccgtctccggggacagtcggtggaaatgtggggcgcggggagggcgcggggagggcgcgggcccgcccgctccaaccatcccggccgttgcgcaactcagggcgtttgcaaaaaccacgtctgggaggacttggccgcaacgcggcgaacgggcgcgctcggggagtgtgggcggcggcgaatgaatgagcgagtgaacgaatgcacgcccgcgagagcgcggggtgaccgcgtggttggtgcgcgcctcccggggcgccgcgatagaggtagagcgcctgcgctcggcggcgggccggcactttgcagccgctccctaagcccggccccgcctccgctccccgactctggccgccgtggcgcggtgccaccgcgcaggcgcaagagcggccggggccgggggggagggggggggggcgtgaccaggccgcgtccgcgcgcgcgcaggattcctgcgctggaggccgcctctgacgccaccggctgggctccgccatgagttcggcgccggcctcaggctccgtgcgcgcgcgctatcttgtgtacttccagtacgtgggcaccgactttaagtaggtttcccaggcgcagcggcgggcgccacgtgggcccgggcggaggcgggaaggagggcgcgggcgggcaggcggatgtctctggacgcgggttccaaacgttcggggaaggaagcggccctggcctcagacggcggcggagaccccagggcagggcgcccccggtaacctccgcccgcttctgcccgcagcggggtcgcggccgtcaggggcactcagcgcgccgtcggggtccagaactacctggaggtgcgctcagccggtcacgggacgcccggtgaggggtaagggggaggctcccgcccgcgcgtccccggggtccggcctcgctcacccgcccgccccgcggctcggtcctgcaggaggccgccgagcggctgaattccgtggagccggtcaggttcaccatctccagccgcacggacgccggggtccacgccctgagcaacgcggcgcacctggacgtccagcgccgctcaggccggccgcccttcccgcccgaggtcctggccgaggccctcaacacacacctgcggcacccggccatcaggtgagcccgcgacctaagcagccctggggctgtgccttcccgactccatctgtcgcgggcggaggctggagatctggacagacttccttgtctggtcggagctcgagggggaaggagagccaatgtgacaccgcgggcgggcggggtcgttcctccggtgagctttacctgccgccatagggtcctgcgggccttccgagtgcccagcgacttccacgctcgtcacgcagccacgtcccggacctacctgtaccgcctggccactggctgtcaccggcgtgatgagctgccggtgtttgaacgcaacctatgctggactctcccggcagagtgagtgtggccctgacagcggggagggggcgggcaggccggccccaccctcctgacggtcaccctggtccctgaagctgcctggatatggtcgccatgcaggaagccgcccagcacctcctcggcacacacgacttcagcgccttccagtccgctggcagcccggtgccga

SEQ ID NO: 32648 - DNA, 2213 bp, Homo sapiens
tcaggtagaacaagagctaaagtgagagttgattgtaactcgggcgtgagcacacagagtggtggacagaaagcaagacgtgaggaggcagaagcggggctggggggctgaggggcttgcggggttaaggggcttgggggctgggggactggggggctgaggggctggggggctgagggtctgggggtctgctgggctgaggggctgggggactgaggggctgggggactgagggtctgctgggctgagggtctgggggactggagcgctggggggctggggggctgagggactgaggggctgaggggctgggaggctgagaggctggggagctggggggctgagggtctgcggggctgaggggctggggggctggggggctgaggggctggggggctgaggggctgggaggctgagaggctggggagctggggggctgagggtctgcggggctgaggggctaagggactgaagggctggtagggctggaggcggcagcgcgcggcacggggaggtcaaggcaccgacgaaagcgcacagcgagcgcgaaggccccgcggccccatctgcgacgtcccctcacggccgcctgaacctcggggctcgcgttctcgcgtcactgccggaggcccggggtgcagggactaggccgcctctcggctcccaccagggcccgcgcggggaggagaccggaggacgcccgcggcgcgcacctggctccacgagaaacgggagggagcggggcgcccagcccgcccggagccgcatacggagcccaccccacagccctcccggcggctcccactcacccaagggcgtgactctgatctcaggcatcgtctccgccgcgctcccggacccgcgaggcccgcctgcggtgatgcactgcgcaggcgcaaccacctcgctgcaacttccggtgcgctagccggaaacgcgggtcggggcgccgggcctcctgattgggcagcatccaaccaatcagggcggcgggcgagggcggggcgagggcggggcggtgggcggggacggggcccgcacggcggctacggcctaggtgagcggctcggactcggcggccgcacctgcccaacccaacccgcacggtccggaagtcgccgaggggccgggagcgggaggggacgtcgtcctagagggccggagcgggcgggcggccgaggacccggctcccgcgcaggacggagccgtggctcaggtcggcccctccccaacaccaccccgggcctccgccccttcctgggcctctcggtggagcagggacccgaaccggtgcccatccagtccggtgccatctgaagcccccttcccaggtgagactcgtagcgctcgctcgacagggtctggtcccacccacaaggcctggggcgccgtggggccccgtctcctgctggccccccagcctgctgtcagcccccgtgctctgtgctcaggccgccctcgcgcccggccctgaccttgggccgttgggctgccctgggaaaggcctggaggtgtcctgggtcaccttcctgggctggcaagctgcctgcctcctgcacagccactgcccttcctgttgttaccgagccaccagccacagctctgagaagctcctggcagcttctgtttgccactggctcgaatctgggcaggaaggcaaggcccgcagaatatctggtgaccaagaaggaaaccccagagcctcagagaccatcttctcagtggacaaaattaaggcccgaggaggggaggggcgtgctggaagtctatgggactgcatctttctgaggcccaggagcagccatcccccacacctgaagcccggtgagctcacatctggggcctccgcctggtgccaagcatgcaacccaacctgtggggcctgcaacgccaggcttcagcaccctgcaggcaccagtgctccagcagcctgggccacgggctgggcagggcttgcagcccatgatccctagtgatgaagggcccagtcctagggtgctgagcaacctgcccacctgctcctggccaggagctctcaccacggctgggtgcccttccccctcccccaccgatggagtccctgcagccagggaggccaggacagggctcccagcaccaaccggcctaggaacccccaggccctcttcctggtcgaggtggaatgcagctgactctcaggttccccagagcaggtgcgggcccgtggggcaccc

SEQ ID NO: 32649 - DNA, 6953 bp, Homo sapiens
ccccccccagggcttcccccacactgggactcctcagggccaggccccagcctcctcagcagcagcagctgcacctaccgggccccaaggctccccaggctattccctgtcccttgccccagacctcaggtccaccgctccacctcccagccagctccagaccagccgcccacccctcaacagccagggcatcaggccacctgcacccacccctgcactcagacctgtcattcccaaccaggagcccaaatcccccagcagcctcctctccatcatgccagccatgccctatggccctactccaccctcctggcgtctcaggagcagcctcaggtcccaggccctgtgcctgcctgcccagggtcaggctctgtgagggcaggactttgcctgacccctgccctgcacccctagtcaggctcacagtccacctacaaggactctcagacccgacggacggacgtaggtgggctgggagggcccacaggtccccagaggccgcccaccaccctcctgtcctgtccacctagccagggagacaaagacctccactcaccaaacctccctgcacctcaggacctagaggggcagcaggggatgcggagccggcagggcccccaggagagcaagctggccaggtgcctcaccagtccacccccaggtcagataggcttgggaacggggcagagggcacccaggcaggccgcagagggtcaggggacacgaaccaggaggaggccgggtgacccgagctcagagttcagagggcagggtggcaacccacacggcacagaggggatggctgggcaggggcaggtccccaggccaaggagcaaggcaggcagggctgtggtcgacactcacactgtgacctctgagggcccaggcagcaggctgggtaggatctggacgccgcctcgtggcaccctgccctgcccagcagcattttccacgcccgggacttgggcccagtggagaaataggagcccggagacggggcttggcctggccgcacacctggcaggaagcggccttgtggctgctagtcccactgcgagctacagagccaccccgactggccgctccaggtcccctgaccccggggcaccttgactcagccagactccgaagcagtaggtagcaggaggcccccggcaaagtggcaaacccacactctcacccaagccctggcccacccacttgctgggaagaggccccaagcctcagggcagagtggacagcaggcagggccagcccaggtgggagcagggacccctacctagccctctggggtcctgcagctgcctccccaggccacccagggccaggccatgaggtagacgcccccaaagagcagagaaggtcacttctcagacccctccacgtctgctgcccccacacaggagccttcccaggtaagaccatgaccccatgccaggctgaggccgccacagtgagaggctgtcacacctgaaaggctggagcaacccagggtgaggcgggccccacggacaccgaggccaccactagctgccgccagggggccagggcccacagtgagcccttgtctctaatggacctgaccacagcagagcccctggcagggtccccacctcagtccctgacacacggccccaggtggcctggccggcagcttctcccctgccacacccaaccccagcaccctctgactcacctgagggagacactcagtcacccagcaccctctgactcaccggagggagactcggccacccagcaccctctgactcactggagggagactcggccacccagcaccccagtacagcacccgcctggctccaccggaagagggccctgccccctcccaccatccagagtggcccaagcccgcatggcccacccagccagggcctcacgaagaccccaggctgcctgggatgtccctgccccctgccccctcacagatgtccagccaggacccagaggccctactcactccgccctcttcagcccaacagggtgtaacaagtcctcccctgcccccagtggcagggtgcagacccaagcctggctgggccaggagaaagggagcaggacccaaacagcacagagggaagggtggggtctgcctggggctccagggatcagctacccaggtcccaggcagagccctgccgtccccaccccagccagatgggggagggtgctggaggctggccaggcattgggggcgtacccacaacccggggtccccgcgcctctgtagcagcctccgctgaaactcacggcagctgccaggggcgcccctgccggcactgtgcccccaccttgggattccctgtgaggcctggctaacctgtgtgctgcccccacagacccgccccggggaggaatccactcagaggcagcgccctgggagccagcatggccacacaggatgcagagaaccctccagactcccagaggccacagccagctgccctagacgtggcgtggtcccgaatgcaccccattctcccaaggcggagcaggaagctggcaggggtagctggcccaggacaggcggtgcagagccatcctgtgccctcagagccccctgtgcacgccccaggtcagggccctcagccttgggggtctgtggcctcccaacccctgaccccagagccaggggctctccaccagcctgtcccctgggtggtgccgagtcctgggatctctctgtgcccctcccccggttcaggacacacaggctcaagtgtccctgctaggccatggctatgagtgcagtaggtgaactgcctggaccctcccaaaaccagggaggcactcagggcacagagaggctgagtcacagaccccaagtggcacagccagggagggcggagtgggaactccccccacagcccaggccaggcagagcctccccaactccatagctccccacagcaccacccaggacacaaggagctgtcacaacaccgaggcccatggcaggcggccctggggaccagggctttgggcccacagccttgcctccacccatcccccagtcccaggcctgggtcacccccacctcggagatgaactgtgggagctgtgcccaacagacagcctcggtgccaagtccagcaggcccagcatccgccacgcacccagcagtggggacccggagccaaacaccctccctcctctgcctcggcccaaggctgggcgagaccccctgccaaccaccaaacccagcaccaggcagagaccctccccaattctgccctcctcccagccctggggatcttgggtcagaatagctgtgaccagggcatgaaaagtggaggacaggcgggggaccttcacccactgggccaaagccgtgcgtggggagtggggtccagaccagggcacgtggttgtggccatgacacaggctccctgcactgcaaggtggtcagtcatgctctggagcagaggctggggaaccagggctgggctgagaatgcagcgggggctggcgcaggaacccccgactcaccagggcctcctcagcgtccccagcctgaagctccctctcttatgaaggccaccccagaccagcgaggacctgccttctcttccccccatctccaactacattcgcttggcatccagggtcagtgtctagttcagcagtcgcttaagctaaagtattactgaccaaccagcccctcccacgggggttctattccacagaacagacagtgctgagaggtctgcgggtagaactcaggggaagggatgaaggaagtaattgatgagggtcctccgtaggctcctgaggccaccagccagaggaccagggaggacacagagcaaggcccccatcccagccagaggacctgggaggctacagagcaaggccctcgtcttggacctccagcatcaccccagtccattctttccaacccccacagcccagcccagcccagccctgacctctgcagccccactgactcccagccccctgtaagtctgcagcctccaaagctgtacactgaagctcccctgtctctttcctggccgcatccccaagcctgcctcgacacccagacctgcccaccctgttcccaggcccgggcacccacgcgtcctccaaatgtgcccagcaggtgcagccactgctagaagtgcactagggcaacagtcaggctgtctctgccctgggcagcccccggtgggtgtcaggagcagaaggcggactcccccagggcttcatcccagagcatggtccaggagcagaacctgggggctgggcacctcctcactacgcatttcctggtggcacacatttgcaacaaacagcattagtaactttggtaactttcgttagaataataaactaagtcaaaaacaaaagtacctgacacatgccccatgctcaaggccaaagcagcccaggcccagagaagcagggactgcaaggtgccccagctggggaggagcccggaccagactcagaaaacaaaccgccccctcctgcccaacctgaccggagcgggcaggagggccgctgagccgagtggggagcgcccagccttcaaaggctgccaaggacgcaccctgccctctctgctttgcctggtcgtgggggtggggaaggaaagtacagctgtctagatgtcccttgggcccccctgagagctccagagcggacccagcctgactggacctggggctgcctgaggaccctgcaaccacagaatccaagaaacaaccttaatgtcacaatcccaagaagcggccacacacaaggacaccgcttgccggaggctcacctcctggggccacgaggcctgagcccgcccccagcactgttgagctgggactagggactcaggttactggtggctgggccgggccaggccaggcctcaagcagaccgccaggctcctgctccctgtcccagagggcccagctcagcacagcaggggtctcctcgcctgggacaccaccaccgaggcccagcagggagacgctgacccaggctgccccgaaacagcagatggtctgggctgctccgggaacgcaagtgctttgtggctcagtggggacggggcccacaggaagctcaggacacgggtaggcgaataaagtttcatggtcaccagtggcccttgacctccaccctgtcacaaggaccctgcagaagggggccaggagaacctgtcttgaccctcgggaagcttctgcaaaccctagcagacaggttggtgaacctgtacccccatgtctccccatcccagctagggaaccccaccctgcttccttcccactgacacgcccctgaccccagcccgcaccaacggcaggcgctcccggccagccccggtggaagcgatgcggccgaccgagtctgacacgggccaaggcaggactcggggccgggaagctggggccagggacgccgggaaccccgcctgccatcgccccgctccacggacaggtgggcgcgcgccgcacacgggccgaggccgccacccgcgccgcatctagcggaggcgcgtcgcggtcgcaggtccccgggggcgcgaacggctcaggacccccgccccgtccccgcgcgggcaggtgcgacccccgagcccgcgccaggctcgcgcaggcctcgcggccgactgacccgaagtcctggtccatggacttaaagaagaatttgtaggcgtgcacgggccggttgctgagcacgttcttgaagtcggccagcgtgacgcgctcgggggccacgggcagcttgaccaggtacggcgtctcctcctcgtccatgtggtagataatcttggtctccgccatggcgcggcggcggcgcggagcccgcgcgctcagggcccggcccggggctcggacgcggggcgctacccgcccgcccgcctgcgccccgcccggcccgcaccgctctcggccccgacgctccgaggcccccgggcgcccccgcccgaccgcccaggccccggccgccgcccccggctcccgcgcgcgtcccgactgctgccccgcggcccgcggccgcccatccgcccccggcccgggagcggcgcgagggacgcagcacggagggcgcgctcagccccgccgccctcccgcctgcgcccctcgggccgcgccgttaaagggaccgcccggcccggggtcctgagcgtggccgcgggggggcgcccgagcgcgcggcgttgacgtcacgggggcgcacggcgggggcggggcgaggatgcgcagacgcaggcgatcatcgctcgccccgccccgccccggccccgcccccgcgcgcgggcccgcgctccattatgatccggcgcatgcgacgcgcgccgctggctgtgggcccgtgggcgccggggcgctcgggtcgggcggagggaccccggggacgccgggtgcgcggcgctgaggtggcgcccggtcgctctgcgccaccgcgaaggctcccgactcgcgtgccctctgccgggtcccacggggtccaggcagcaggccgagcggatgcggggcgcgcgggggcgcgggcgtgcacggaggcgtcggagcgcccggcggcgggagggatttagtcctggggttctccgcagggcaggggagacttccgaggcgtcccttgaggccgcggggcgtccgcgcttactgttccggggctcgcggggctggaggccttcccgacccgaccccagcaggaagcgcggaggccactagagggcggcccaggatgggaggagtgaggagggggcctggacggggcaggagcgacggggggagtgaggagggggcctggacggggcaggagcgacggggggagtgaggagggggcctggacggggcaggagcgacggggggagtgaggagggggcctggacggggcaggagcgacggggggagtgaggagggggcctggacggggcaggagcgacggggggagtgaggagggggcctggacggggcaggagcgac

SEQ ID NO: 32650 - DNA, 2252 bp, Homo sapiens
ttgaggcgcatccgcgacgccttcatccccctgctcggccccttcccctatctggctgggcggacactggtaggattgcggtggagccacagtccctgcggtcccggtatccagtctgggcaggaagcagcgggccgtgagccagctctccagggggctgacggacatcttcctggggaccagcatctcctccagctccagctgggcccccttgcgagggagagaggccgccctacctgggccggccggcgatgtgctgtaaaggggcccgcagacccggctgcccagcactccagagacgggccaaggcgggcggccgcctgcagaaaaccagacgccacggtcaccgctcgcgagaccacacaggcccgtcgggttgaggagcagcaggttcgtcccagcgaggatcccccgcacctcattcctggcctgaacccctgaggttccctctgtgagcatcggaagcttagaggggaaagagtgtgtgtgtggccaccggccctgccccagcggagctgctgagacccgcactcctaaccaggtgtgcatcctcccatccgcccccgcgcggcttcctacctgcccaaggaacggccctcaacagctgggaagtcaggcgccccaggagcatggtctgtgggcggcggccacaggtcccaggggagctggaacacaagtgcccgttcaggtcaggcggcagcgccttcagtagtcgcgggcgggccgggactggggcgtctggtcccgccgcgaccctcgcttcccttctccctccgccaccccaacccacaaggaggactttgcttccaacacagctcgcgccccgaggctcccaagcccccgacgcgggcggtgtcgcgctcggacgcaccgaaaggtcccagaacggggaggccggccccctccccgggttcacccccgcgcgaatcgcgttgcctggcgcccggaccctctcggctggaccccgggcccgcctgccgcagcgcccggcgccctcaggcctcccgctgacccttcccaagcccgacctcgacgcggctcaaattgaccgttctgcggccgccctcgggcacttccggtccgtccccaagtcggccccgatcggcagcggccacccggcggttcctacgcacagcgcccgctggcgtcctcgcggcccccgattctgcattggctcaggccccgccgggcccgaaaggcgacggtttccggttagtggaatcacggtcccagtcctcgcgcggttcctcagctccgcctggtcccttacggaggcaaaaaactacatttcccacaatcccagggggtgcgggccctggatatacccgcaggtccagaatcgtttccggaccacccaggggccggattcccaacgggccgacggaagtgcgggctcaagactacggaagtgacgtatctggcaacggaagtggagttacgtggaaggcggaagcgtctagagctatttcccccgtttttgctagagaccaaggacccggaataagcactgagcctgcggtaccgggcctccccgactcctcattcctggggttaaaaaaaaaaaaataagacgcaggctgggcgcggtggctcaggcctgtaatcccagcactttgggaggccgaggctggtggatcacctgaggtcaggagttcgagaccagcatggccaacatggtgaaaccccgtctctactaaaactacaaaaattagcctagcgtggtggcaggcgcctgtaatcccagctactcgggaggctgaggcaagagaatcgcttgcgcccaggaggcagaggttgcggtgagccgagatcgcaccactgcactccagtctgggtgacatagatcctgtctcaaaaaaataaataaataaataaaataaaaatcagactcacactttttgtctgagaactaaaagcagcctctctggtggattgggtttggctgagcccctaatgatgctccccagagtaggcgctgccaacgtgtagcttcacctttctactccagacaggcccctttgacctccgtgaggttggctaatatagagaccccagcatggacttgcaggggcgcctggtgggagaggggtgtggagcagagcctgctgggcctgctcggagacttgccttgcaggagggtcttccagggacgcttagcaggaagtggaaaggccaggtcatctgccgggcccagcctggctaagcagtgagtgacaggtaggataggccagtgtgaggacataaagttcagg

SEQ ID NO: 32651 - DNA, 3221 bp, Homo sapiens
cagctctgactgactcactttttgtctctcagctgtcgaaggcggtgaaacacattgatgacgtcccgtatgcgtcttggggcctcttctatcttggaagccaggtggacacaggccattgacacatgctgaagcggaagcattgcaacacgcccatgtttgtccccagccacggcgtcctgacggccgccaaaggcttgagggctattcagaccaaaagggaggtgcacccaggggaaaaaaaaagtcaagaaacagaaccctccggcacagagctcagactggggggcaagtactcactcccttagtaaccgggcaaagtaacaaaccgttttaccctcaacatacttcgctgggaatgaagtgcaggaggaagccttacctccatggagtgcttcacgaaggacttggtataaaagaaccgctggaacaacacctgcccggtagccatggccacctagagtagaagaaagtttccgtattttcaaacgcaccattcaaagccttcgcggccgaaagtcatcgagtaacgtgggactccccacgcagaaccaaacactgaaacgcttcccacgtccacaaaggctcttcgcgtcccgccgtctcgggatccagcgcactggcgggcggggaggccccgggtcaggggcatgggctggctagggaatggcgccgaggctggggtcggggcaggggctggggtcggggtctaggcgggggcggtgcgggcccgactcgccgccaacaaaggcggctgccgccccagcggttacctgggccggaggctcgcggccgcgccctcacctgcggcaggcggagcaggataccggccgcctggatgagctcgcagcccaccacgcggaggtcggtctctgtgtcggtgtcgaggccgctcgacatggacggcgtgaaacggagcttgtcgtcaggcaggaggcagttctccaaggtgatgagcaccccggagtacagcctgtccccgatcagcaccccctgcgaccctgagggtgcgcccccagatcccggggcgccggccgctgccgcgggagctgccgaccctgcagcaccagccgccgccgccgccgccgccattttgtgccgccgactccccttcggcttcttccctcagggcggctcctcgcgaagctccacggccgccaccgccccgccccgtcgcgtgccattggttcggcccgcgaccagcgcgacgccgcctagccgcaattggctacataacctgcccgtcagcaacgcgcctaacgccgacgccggaacctggcgcgggtggggcgggctcgttacccaggggactccgcggtgccggccgacccggaagcatgtctgtccctagcggaggcgcgggtgccgtgctgagagcgcctgcctgtgcgccccgagcggggctgggactcttccaagatgcccacgttcgcacagagaccccggatcgcggaagctcgcgtctcgaaaggcctgtgggtcaaggggggccatctcggtgggatctggggcgggacgacccccactgctgaaccctgggcgcggggcagggtcagaggctccgctcggcctccccctggatgagacgcgcatgcccggtgtcccccggccgccgtcggcgtcgtgtcttcagtccttatcgactccagactttggggatgcgtattaacgccagactcctgcaaagtcttgccttcaacactcagcccctggggagagacgggtggagggatgactggaaacgtggcctcgacgtccctacagagcccctccagcgtggggaggcctaagtacctcaaggttcaggcccacggaaggagtcgggggagcgaggcccggtgatctacgtgtgaaggagcttggacaggacctcacaaacgccagggagacggcgagggggttcgtgcgtttgtaacgtcttgacatcgctgatcctcccgcaggcggtctcacgccctgcccgtcctgggttcacggtttttcatcacctgcggctgtcctgcgatcgaccacagctgtgcaggaggggcaggaggtatctgttgctgcagttaccggaacctttgccaggactagtacaggaccacgggtgaggatggtggggaagcctgcgtggggcagggaacggtgaggcaggaagagggaagggcagcagaggcctgagtggttgcaggttcacacactgagctgccagtaactgcccagctcagacgggctcaaattcagaagccaccattgctcctcacccccacccccaggtcagctgtccactagctctgccatgacttgatactgcagctcaaacagtgccaaccaaaacccactctcctcaccgcctgttatgggtaacacggtatggttacagctttactcatgtcctctttccccaggctggtagctcagggatgtctcgtctgtgagttacagctgcacgctctccaggaaagaaggaatttcctcttctctggaaaccccaccacacagctggtttctcattggtgctgcttgcccattccctgagctgtgactgccagaggagtgggaggttggtggtgcctccagcccatcaggggcaggccctgggaccgcctgggaacaggaggactatggcacaaaccgagtgagtgatgggagcaacccgcagggctctgccacatccctgtcttccttcactgacatgaaacgcagaaaaggcagctttgccacaacacaggagcacgcaccgaatgtggccgcccagggctctgtccttgaccctgttgtccaggactgtttaccaagggctgacaggcactgagtgccccgtgcacctggccagacactgcactcatgcagcggaaaggacagtgaacgagactttgtccctggcctccaaaggcttagggcgtagtggctgtcatgaggcacagtgacaagggccaggagggggacctcttagggggccatgcagtgatggaagccagaaggaatgaaggcctgcagtgaggatggagtggtcggcctgaagccatctctagcaagtggtcaggacgctgattgttctgcgcaggttggaggtaggtggtgagtctgagaaaggggccggaaagactccccagcaactgctggcaaagggtgaagggcacgttcccacaggattcaagccagctgcctttggaggggagacgggcactcagtttaggcgctcctacagcagggtcagcaagacaagcaggttgcgg

SEQ ID NO: 32652 - DNA, 872 bp, Homo sapiens
atgactctaaaaactgaagagtgtttgagtttcattcacacaaaacatggacatcatctgtgaggctctgtcccagagagacagggccatccctcatgtctgttattgggttgtagataaacaaaagtataaatcaaacaaactgcaaattactctgtctcttttcctaatcaatacagcaacagtcctcagtggtactgcaccactctggaaaaaatgccttcaggttccttcccatcccccaaggcagcagcaaatccttcgtgtcgcctcctactggccaaggcagccaaagatttgaaagtctttggctcgtagatggccagatccgctaggactttcctgttgagctccacctggcactgaaaaaagaatgaatcagaacctgctgtcagtgtgagacacacactccggctccgcgtggttgcggcgctggctcaggaagaacccagctgcacactcgcctggggggagggaaggcctaggagaatcctatctgggtggcacagcagaggacttccaggcaggatgctgaaggataaatgtggacacgggtgagggaagcacctgtggaatctgcagggaggctggactccagtcctgatgtcggcccggggaaccaaacaccttgttcagggtccttggtcaccaccctgactgagctgactgctggcctagggtaaccctttaagccaacctggaagtgcctgcaagaaccacagaggatttcagaagctagtgaacaatgccagagtttaaggagtagaaaaggggggccgtctctttgagcattaaattcagctaccaaggcagggcacggtgtctcgcctgtaatcccagcactttgggaggccaaggcaggcaggtcacct

SEQ ID NO: 32653 - DNA, 2280 bp, Homo sapiens
cctgaccaacatggcggaacccggtctctactaaaaatacaaaaaatagcttggtggcgcacacctgcagtcacagttactcgggagactggggcgggaaaatcgcttgaacccgggagacgaggttgcattaagcctagatcgcgccattgcactccagcctgggtgacagcgcgagactccgtctcggggtaagaaaaaaaaaccggggtacgttagatgctaggttcatgaggctgagacgggagtggtgaggcgcagtaatgaggcggcacgtggacagagtggaggcgccagcctcccagaaatgcggggggttccgggtgggcagagcttggcagcaggcgtggtctcttcgaggagcaccacggcagcagatagtagccctggagggttggcaaggggctgggttgacttcagctgccaaagggaagggaagccaccggagggatgagagcagcagcgactagggcggtggctggcgacgcagggagagtgtcaaggcggctctgcagtggcccgggcgaggggctggagcagggggtgacagtgggggtggcggcggggcgggagaacggatgtcccacagtttgcctgcggggcgacataatttgtcggagtttcgaagcaaggtatgaaaggaaggggctgagggtggccgggcggctgcacactagctgggtcgcggcgcagaaacgcaggggccgcgagtgcgctggccggcgggtgtcccgggtccacgcttacggtcctcatgttctttttcttcaggtatcgggctttggtgcatttcacaaaggctcgaatcacggttctgaccgccaacctgtagcagcgatttttccttccccggaagtgctgggacagaaaacgagaaaccagggttgtcagcggggcccgcgccggccgccccttggcccgcgggataccccgggcgcccagtgcccaggccgggcaggcggcactcaccctggcgtgcttcagcacctcctggatccgaaagtagcggtcggtgacgcgattccgcagccagagctgcgcggtgaggaagaccatggcgcctgcaggccggcgtcccgaacactcaacaacgcacgcgcagcgccgctgccatcttgcccgggtcggaaatggtggtcacgagcgcttccgggtcagcccctgcgatacttccggggcgaaggtcgtctcccgtcagcccgcgggtgcccagttgtgctcctgaactcgcggtggtggtgcgtgttggggagcggatgtggggccgcggcggggactgaaaggagaacggggccgcagcgcccgtggctattcgcggacgatggataaacagcagcgcacgcggaccgtcccggagcacggccccggccgcagctgtggctccgagggcaccgtgagggcagcggacccgggtcgggggccccgcggccggggagctcgggtgcggcgcgggcggggaggggcaggccgccccctggggccacgaggatgttcaggaaccgaggtggagatggtcgcatcggtgtgaaagtgcccgttgcctctgaaccttgcactttgtttacttactcattttgagacggggtctcgcccggtcgccctggctggggtgcagcggcccgacctcggctcgccgcggcctctgccttcctagtagctgggacgtcaggcgcgcgccgccacgcccggctaattttttgtgttttttgtagagggggcgtcttcccgcgttggccaggctgttctcggactgctggcttctgctgggattacaggcctgagccaccgcgccatgcctggaaattctcagcttcgaaatggtaaatgtgatcgctgtggtgctgatgcctgtaatcccagcactttcggaggccgaggggggaggaacacttgagtccaggagttcaataccagcctgggcaacatagtgagaccccatctctacaaaaaatcaaaaagaaattagccgggagcggtggtggcgcgcgcctgaggtcccagctactcaggaggctgagacgggaggctcgcctgagctctggaggtggaggctgcagtgagctcagattgcaccaccgcacaacagcctgggcagcggagccagagtctgtcccaaaaaaataagaagttttatattatgtgtaattttatatttctgctatattatcgaaaaattgggggtgtgcagtttctttataacagtttattatacttggatattttttaaatcatagaagagttggaatacaagtacaaggaaaactccccagtgttcactac

SEQ ID NO: 32654 - DNA, 1621 bp, Homo sapiens
ttggttgtttaattgtcagctgttatcggagacaattctgaggtccaacttggggatgcttccctccagagactattccccttttccaggcgagaccaccctcggccccctcagtgacccttgagacccctggtttaagcagcccctaggcagagaaacatacttgttccctggccgcaggctggctctctgtccctgtgtgtgtccagggagttatctgctttcccaaccacttcccttcatcatccaggcctccacactactctgtctgtttgtttacttagagacagagtcttgctctgccgcccagtctgagtgcagtggtgagctcctagctctctgcagcctcgccctcccaggctcaagtgatcctcctgcctcagcctcccaagtagctgtgactagagtgcaccaccacacccagctaattttaaatttttttgtagagacggggtctcatcatgttgcccaggctggtctcgaactcctaggcacaagcaatcctctcgcctcagcctcctaaagtgttgggattacaggcatgagccaccccacctggccttatttatttttgctgtttaattttgggggagactcggagatatttactttcttggaaacacaacagtctattaaaaatgtacgctcatagtaattcatccagaagttggttgttgctggaaggccttttaagggatctagtacatcatattgccagcagggctcagcctgtgaccagcaaggtctgggctccgtctggggccagggtcaaggctcattccgtggccttgagcacagcctggtgtgtggctgggtcgagtccagcagaagtctcggggttttccagcctccatccgagtccggctttgatgcctttcctggtcagacaggagccgggccagtggccaagctgccaggatggcttccccggggccgcggccgccttccttcccctcctgcccgggctggctctggtcgccactaggggttgaagatgagggctctcctgggaagctcttggctgaggatccgcctggtcccggagccgtgaaaacaacagctgggcctggtgggggtggggaggctgagcggagaggccagctcccttggctgctgggcagggtcttctgtccacagctgcctcaggcggctgtttccaaaggtgtttccagcttcccaggcccaccctgaggccccgcaccgccagggaggtggaaggcacggagcagcgaagcccggccccggccccggccgcccgaccagctcacagaggaacacctgtgggggggcctgtgggcggttcacagagggatgtaggaacgtgcctgtgggaggccgtagccccggagagcagaggcctggccggcggaagagaagcaaggaaggggcgattcaggaaggccagagcccgagtgccggggcaggggccccaccccctcaccccctcaccccctcaccccctaggacagaagaggccctccgttggaaggcaggggccccacccccaggacagaagaggccccacgttggaaggcaggggccccaccccctaggacagaacgggccctgcgttgaggcccctgggttcttcccccgggttcttgcctggccccttccatgg

SEQ ID NO: 32655 - DNA, 2952 bp, Homo sapiens
aagcagctcccttatcggccaccatctgggaagccaggaggggggcatgaaatgagggggaggtggggcccccagccagggttcccctcctcaaggccccaggtatacagttggcctttgcccagcccttctagcccctgcaggggcaggaccccacctggaccccatgaatctctcccaacttttgcccagcatggtgtccctgaccgaaacccctccacttcaggaccctgggtccccaggcccgcccccaccctgagggtgcctctacaccccttcccccagagccccttcccccagcctgagggccaggagcagcctccctcttcctgcagtctctaccacagctctccactggcccaggggcctgaactccttgggtgcagccgagctgcagggtggctgtggggacctctgcttggcgttctttcccggtggctgaggcccctgccctgcccaaatgggagcccggagtgtgtgtgtgtggctgtgtgtgtcccatctgcgtccctgtcacacgtcatgccggagcaggggaggcagtaaggggccccaccccactggatgcagtgggcttcccaccttgcccggtgtcatttcctgatttgcaaaatatttcctgggagcagagttgttggcaagcacagcctcagacggtgtgagcagctgggggacccctcagatgtggctccctctgtccctccggcctgtgctggcctgcccctgcccccaggcctgtaagctgggcaggctgtggggcaggaactccccagggtgagtgggctggtctgagggctaaggcccctgctcccagctccgccccacccgcctctgggagtcccttgtggtgtgtggacataggtcagtccctccctgctgcctcctccctatcccagtccaggcccctgggagttttgcgtctgcccagggctgtggcctgggcctgtctggactgtgtctggggaaggggcagcatgtggtcctcctctccctttcagggaaggatgtcccagcagagaggcaaagtgaggggacccacacaaggaaggggccctgctattaggaaaccctgggtcattcaggcctgctgctctccggctcccaccgggccgggctctgtcctcgctgtgacgaacctcctgcccctgtcgaggccggcaacaccctccacccggccacccctcccgaaggcccccagcctgctctgcccctgcagtcctggcgcaggcccctcctgcccaccccaccctgctctcagcactcgcggttccttctctctgcctggaaggctcttcctcgggtaccccttgcgtgcgagtccccagtgaccccctgttctcacagggaaaacaagtagaccgtatctttcctagctgttcaccgcccaccctcctagcctggcagtgctggcccggcgcctgtgtgtccccagcactgaggctggggcgcggctgtgcccagcacacagacgagggatggatggacagacgcagatggtgcagctcccacccctacccaggctgctacccgccaggtgtctacccgccaccccagctgctgctggcacgggggactgaggggggtcagctctggggccagaggggcaggcctgggctcctgggaagtgaaaagtgacccccgaggcccccaagacctgtccttgaccccagtgagcaggttgagtctaggagctgcgtgggccctgctctcttggtgacccctgctctgccccacttactgttgtggggtgggctcaggcacaccccagagcagtgcctcaggcccgcaccgctgcccctcaccgccgctgcccctcaccgccgctgcccctcaccactgctgcccctcaccgccccgtccatctgctcctgtgtgtgcttgagtacgtttgtgagatacgtgaaaacagcaacaaaaggcgccgggtgcgggcctgggcgtcctgccctcagctcgggtcaggggtggggtcagaggcctcaggagttgcccttttacccagggtcaaacatgaccacagccagctggggacaaaaggcccttcatcttctgcagaagcctggattgtgcggaggagggagcattcccaaaggcgggtgggggcaggggcggtgcccgggtgacagcagcctccccagcttcctggaactctctccacctgcctgcagacagaccggcagggcaggctggctccgggaagtgaggcacagggactcccacagcccaggcccagaccgtgggggcggggtggccgcagccaaaccaggctgctccccaccccatggggccccaggccaccaggatcagacaggggctgtgcctgcaggaggcagagggctcggggccagcacccactgtgatctggcctgacccgtccttgcctctgcctcttaccccgggcccttctccctggagagtggagggttccggctgttatatttgtgcttcctccggtgtctgcctcaagtccggcccgggccctgacactgcacctctggctgaccccatgctctctgggaccctctgtccacgtccctcctccggggtggagacagcggggggagggcaggacacaagaatgagtcctgaagactgaggggcacggggagagctgatggggagggtctcctagctggagggactccaggcagagccgggagcaaggcaggtggctgagctcggcccaggctgggtggaggccaggcctcctgtgccttctcccgctgatggcgagctgaagggaggagggcggccgcttccttgagggcctgagtcacagccaagaagacccgctcactttttccagaagtgagggaaacttccccgtcagccctgcaaggctggctgaggtgtgactgtggcccgcctgctgggcgagggtgggggacaagcgggccactggctgtgagcctccccagggtgggggaccctcggcccagctccctgcctgac

SEQ ID NO: 32656 - DNA, 960 bp, Homo sapiens
tcctgagaggccggaccagggaaggcctgaggcaggagctgagcagctcccattggctttttttctggacctccctgccccagccaagccctgaaggagctggggctggagatgaggaaccggccactggctcagcctgctgcagccactgaaaaatgccaaccctggggatctcaccaagtctccgtctgtgggttaatcatccacccagagccggaaggggttggactgtgggttggagaggggtggacggccctccccaaggtttccccagggacgtctggcccctagtggccccaggtcacccagtgcagctgcgcctggaggggaccaggaggaaaggctgccttaagcagccaaaggaaaagcctgaggctgcagtgccgaggggccaggcagcagggtgggggctcctgggaaagaggccgggtctgagggtgggggatgggaagaaagtggcccaggcacccagcactgcaggaggaagatcctgatagctttaacccagcgcagacatttatgagcctcgccacagcagggtcactcagagggctatgtggggcttggtgtcacaggtccaggagtccccctctggagaaccccaccccacactctcctggggacccagggcaggcagcgcctccagaaccccagggcctgcccctgtggtctcccatctcctagctgcagctcagagagccgggctgacctcagaccccggcctggccactcaggctggggctggtcctctgctctcaggcaccaccgtggactctgccgtctttgaggacctttgtcctggtcactgatctggccactgcacctctccacaaaggactgggtttggggctaagggaggcaggggcgcttctgacagggcctgagggggctgcaccctttcctccgtcctcccccagccaaggcacgttctgagaatccccagcatctgcggggcatggc

SEQ ID NO: 32657 - DNA, 906 bp, Homo sapiens
tcctgccttaggtgatggcattccaccattgtgatttgttcttgccccaccttaacttcctggctcagaagctcccccaactgagcaccttgtgacccccgcccctgcctgcaagagaaaaacgccctttgtcattttccattacccacccaaatcctagaaaacggccccacccctatctcccttcgtcgactcttgggactcagcccgcctgcacccaggtgaaataaacagccttactgctcacacaaaacctgtttggtggactctttacatggacgcacatgacatgaactactgattagaactggtggaaaaagttgtttattgcaactgcgaggaagttagactttaaaatgcagaacaaagactgaacatactgacataccggttctttgaagggaaatttagaattcattgtatataacattattcaggcttaaaatagtttccaatccagtgggacgagtcactccatataattctgtgaagtcaaccattcctatcaaggagagagtcggggccgccgcgagcgcgtgaaccgtgggctccggggtggtgccgacgcggctgcgggccgggactgacgttgcgccgggttcgagtactcccctccggagttttgtcccggtgcggctccggtacccagacgcttcaccacgccccccgccctccgcccgctcaccccggttcccgccgccccggagcacgctcctaaattgcggcgccgtcgctatggcgtcactgccctcgcggccaatccaagggctgcgcgcgtgtcccttacgcatttccgtcgccgggaggaaggggtgtgtgtttcgcctgcgcagtggtcctggccaccggctcgcggcgcgtggaggctgctcccagccgcgcccgagtcagactcgggtgggggtc

SEQ ID NO: 32658 - DNA, 1147 bp, Homo sapiens
tgcccattggctattttaaagggagcaggagtatgggccagagtggcggggtgagtggtttggcgggaaaaatggttatgggacaggtaactaaaggtgactcaggtcaaagcaggagaccgggattagttaggacggagcaggtgaccagggcaacagatgtcaactactgactagaactggtggaaaaggttgtttactgaaactgcgaggaaggtagactttaaaatgcaggacaaagactgaacatactgatatactgattctttgaagggaagtttagaactcattgtatctaacattattcaggcttaaaacagtttccaatccagtgggaaaagtcactccatatattccgtgaagtcaaccagttccatcaaggagaaagtcagggccgctgggagcgcgtggaccgtgggctccggggcggcgcctgcccgggcaccccggccccgtccacgccccgcaagaggagctcgctggccccgccacgcgggaaggggtcgccccggggtcttgggcgggagggccgtgcgggctgcggagacaccgaggaggggaggcgcctctcctgagctcttggcgcagcgaccccagggcgccgactcatcgcggaagggctcggcttgcccgggcgccggtgccgcctcgggtgaggttcccgcgagactcttctctgcgtcctggactcaccgcagggcgccccgccgcacggatcgagaaccttggggctccctggaaacttgccacccgctgccgccaaggccggaactcctcggagcccctagcaacggagcccctagcaacggagcccacgcggatgcggcgcggggctgacgctgccttgggttcgcctacgtccctcgggaattttgtcccggcgtggctcccgtagccagatgcttcgccgctcccgccccgctggctcccaaagcctgttcggcagtcgcggcgccgtcgctatggcgtcactgtcctcggggccaatccaagggctgcgcgcgtgtcccttacgcgcttctatcgccgggaggaaggggtgtgtgtggcgcctgcgcagtggcggtgaccaccggctcgcggcgcgtggaggctgctcccagccgcgcgcgagtcagactcgggtgggggtcccggcggcggtagc

SEQ ID NO: 32659 - DNA, 1009 bp, Homo sapiens
accaaggttttctcttttcactccctaggggccttagtgggaccagaacatcccggggagttagaatgagcgcagctgcccatcccacaggagaaccgagaggccaggaccacactaccctgctatgagtcaccagggacttgaaagggaacccacaggcactgccacgccagtgtggctggcaccagggaccgcactctcccaccacggcctgggaaaaagccatgtcaggtgcagcacgctggccacaggcactggagccacgaaagcaacagccctgggcagcccagcaccatcctgggttccctgctgccggcgccagccccacgtacccccgaccacctcagctcctggccctcagcctctcctttgcaaaccgtggctggcagcagagacttccttgacgtcaagtctcctgaaggtgttgatgctccgtggaagccttggtccttccccggaaggccacaccatcttccctgcacgtatgactcatcccagagcatgctaagtgctgctgccctgacagacacacccacgaggggggccagctatcaccttattggccagattgtcccggtaactgagtgacgggacacacaggaacactgcagagcctgacagccatgcccctgccacacacacagaagactccccacatcagaggggaggtcagaggtctcaaaggtcaggttagagctgggtcaatccgtttccatggcaaaactcaaagcaccgacacaggaggctccggtatctgtgctcctggtgcatggcggggatgagacagcctcggcggcgctggtggagctcctgggagcctcgctccagcgaggacagagctgcagctcagcacagtgactgcccagggctctgacccagatgccaacagcctgggcagtggcacctcggccaagaaaggaggaaccagtgctgcaggggccaggtggcggctgtggcaggcatgtctggagggagtgtcgtgcatgtgggtgacaagaacagccgagtg

SEQ ID NO: 32660 - DNA, 2561 bp, Homo sapiens
ggactgcgagaagagaagcgaaacactgttttcatttaaagttcacgtaggtaactttggaggtaaaaaagccatttcaactttcttactatcaaagttgacacataccaaattttaactgtaagtcaagtggtcagtttctcagtttgctatgtgactgaacaaaaaacttgttatcaagcaggaataaactttcattagacatacgctacgcaagagtcacaggcggccagttagcagggaatataaactagcagagccaaaccaagtccacgttgtattccagaaactaccggttggaggcgttccagggaggaagagaggatctttcgcaaaaaaaaaaaaagaagaagaagtagcaaacacacaaatccatggcattaaaaaaagagaccgctttgttatttacaacatcgtggtatgccgtgattgtgttgcgcgccgtttccagggaaggtggccaacgacgcacacgaaataccatgatcggccgccgccgcgcagcccctcgccgcggacgctaccctcgccccccgggcccggcctcggagagctcgaaggaccaccggacagcgggcgcctcgtcccggaacctgccttccctgtgatgcccacccgcgtgtggactacgcgcgctgccgtccagctgccatcccaaccagccgacccacgagcgcggcccggcccggcttcctctcaggggtcctggcgcgggccagggggaaccggggaggagggagggccggtcgccggagcagagcgcgcggggacagggtggagcccaactacctgaggatgttgtgcgcctccatgctccggttctggttgctcgagcacaccaccgccacccgcagcggggacgacggcatggcggcggccgcaaatcccgcggctctcccgcttgggttcccaccctaccgcggcgcttccgcgcgaacaaaatggcggccgcggtggccggaagcgggcgacgcgaaacgacggcgccggcggtgtagcgtgcggcgactgcgcggcggcctccccgcccaccctgggcgccgggccgcggacggagcgcaggcactggccttcgggcgcgctgcactcggcgaggccgggggcggccaacgccgcgccggcccccggcgtccgcagcagagacccgcactccacaaggcccggctgagcgtcacggcgccaagcggcggcgtcctgacatcagcaccccgcgccggcgcctagtgtgacgcgacgacgtgcggaacaacaggacgtcataaggtgtcgccgccgcctttgggagcgatgcgaaacgccgcgcttgccggagatagcattgagggcccttccgcggcccggcgtttcgtctcttgggacgattttgtgcgttccctcggtccccgtggggcccatagtcctcacttctgccaccccagagtcgtcgcgcttcactagacccgctccctccactgtcccggaggcccacagacattcccgcattctgaggctcgctcccgtcccgtgccgctgttaccggcctccggccccggctcatacaagcaggagcacatcgctcttttatgaaagcccttcaacatttaacgtttaaatgcgagggccgacctgtgacagacctggttgggagtgcacgtcgactaggatcttcctcgcctcgggcttccttggagaggccgccggctggtctgagatttgggtccagttacagtaaatccagtcaacgcgagtgtgtcattccccagctatgcctgtctgcctggatgcagcctcgcggtggacagtgggctgatgttttgccgtgggagcgccacggacgggagagggagtgataatgattgtcaacctaataacaggctaactgaaaatgatatttatttgggaatagggcgttggcgaatatgcgtgccatagtaaacgatttgcgcattcaggaaagtaatggtttttaaagaaaaaatgaagaggaagataatggtttggaaataattaaccttggctacaaagaacagtaacaagtgtactcccggccgggcgcggtggctcacgcctgtaatcccagcactttgggaggccgaggcgggcggatcacgaggtcgggagatccagaccgtcctgcctaacccggtgaaaccccgtctctactaaaaatacaaaaaattagccgggcgtggtggcgggcgcctgtagtcccagctactcgggaggctgaggcaggagaatggcgtgaacccgggaggcggagcttgtagtgagccgagatcgcgccactgccctccagcctgggcgacagagccagactccgtctaaaaaaaaaaaaaaacaagtgtactcccgttccagggttggacaggcagttgctgggcagctgtccttgctgaagtattttttgtgtaagattgccttagtgcaaggttgtggtttttgcagaatcttgtgatagtttttcttattattgattcatgagaattctccatggcctttcccagctgtctttgtcaaggtattttttaaacataagtgagtccacttttatttgacaacttgggtattttccccttttg

SEQ ID NO: 32661 - DNA, 1694 bp, Homo sapiens
atagggcccgcactggtggagtcggaaagaggtggctgcggcgcggcaagtgccgccagtgccagcgagcgcgacgtcgctcccaagcccccgtctctatggcaaccgagtgcgtctctaggaccgccactgcgcaggcgcccggaggctaagccgctcggaacctagctgcgccacgcagggtaggcgacgcagacgctcccgcgtgacgcacttccggtgcttgccctgcccatccccgtggcgggggcgtggccatggcgggggcgctccggcgggggcgggccctgggctcccgcccttcgggtcccacagtttccagccgccgctctcctcagtgcccggtggcccaggagggcctgggagcccgaagccgtccccgagtcgctcctaggtcactggcgcgatgcgggccgtcctctcggctgatggtgcgtgcgggcgcggatctcctcccctggtcctccgcaccgtccccgagtcgttctccgctctggcagaacgcgagcgccgtccggttcccgctcccgctggcccagcagccccgggctggactcggcgtagggtccgcacgggatgggctggggctgcgcgcgcagcgccgccgcggggcctcctgggagttgtggtccggccacccgcgcgggactccagctcccggcaggcctcgcgcggcccggggccagcggcgctggggtcggcgctggggtcgtcgtccgggccgggtgggctgcggcgcgcggcaggcgctctggcctggcctggccgccgctgagcagtcggggccggtgggtggcctcgaacgccgggacagaccgacagacggactggccggcggtcccgcgcccccgagcggagcgggcgggacggaaacgtccgggcaagttggggtcggcaggtactgcgcggccctggcaaggtctggcagcggacagggccgggcggcctccgcgagccacgggcacgaatgacagggggcggggcgcgctccgggtgggggtgcccgccgtgcccgcccctggcccgcccgttcccctgcgccggcgcccgtgcgcgtcccggagcctcctgacgtctgcgagccgcggccgccagaccccgggcgcacgcaattacgggcccggcgctggcggctcctgcgcgctcagaccccagggagcccatccgggcaggcggcggccctgagtgtcgcggccgtgggcccgagtggacctggagccggcgggcagccccgggggcagacaggcgaccgagccgcgggtcgaggtgctaactgtgcatcttggcatctcccctcggccacagggttggaagcccagcgaggctagaggccagtcccaaagtttccaggcatcagggctgcagcccaggagcctcaaggcggcccggcgggcgactggacggccggacaggtgagctcttgatcgtccgcggcctgatagtttgcacttggctctcccactttggggctccgtggaagccacgtcagagaggctgtgtttgtgtctgagcatgcatgcgagtggaggggagtggtgagtaatcccgcgtctcctctctgagttcggaacccatggaggaagaaagcagaggtgccagacaggcctctgataggcacctgcaggattggggcagagcggccgcagcgcaggagcgccggcaagcctggcccttcccgggaggccccctttgtc

SEQ ID NO: 32662 - DNA, 554 bp, Homo sapiens
actcctcgggccactgacagtgccagatctccacaaagacaccattcccttcttcctgttcagcagcacagtcccactgcttagcctggggtgacaacaagctgggagctaaacctccatgggctgcagcctccctggagctaggactggctgggccctgagccagggagctaggagactttgtgccagtttcccggactgatgggccctggctgggggtggagcagctacctggctttcctgaggtgaaaatccaacaacaaagggtgcggcagagcaaaaggacagagcactcgcgacagggctccgcaaggcaggggtggagctcatggcaggcgtggatctcactccccacctcactaggcctcacggcccttgacctctccctcccacctcgaaggctgccccctggctggggacgctgtcacagcacccgctacacaggctctgccaccaccagcgagtttctaaaaccaaattcatttacatggcaaggaggccacgctcaagaaacccctccaggagcaaggaacagcacgtgggctcgggcgtgt

SEQ ID NO: 32663 - DNA, 596 bp, Homo sapiens
ggaagcgagggtgtcgctcgcccccgggcccgggtccgccccgctccgaggcctgctcggaagaaagacctcggtgcgcagttctcgtcgcgctcccacacctggtccgcccagtcggaactcacccctacggggccgcggccggtccctgagcctgagaagaaacagcaaccggcgctcgccagaagtatcctcacttcctgtgttgacgcctaatgatgatataatagccgacctctggcccagaactcaagacgacaggggctcgctctgtgcggcacttcctgtgtctgcgcgggatgatgacgcataaaacagcgcttgctcaggtccaggactccaaaagaaactgcgccgtgagctgcacttccgacttcggcgcgggccggggcgccgagcagagcgacgccgacttttggagcagtttgcgcctgcgcggaacgcgtggccggcttccggaatcctaccgggacttttccggtagcgaagcccgcgcctgtgccaaggcttgcgagcagaatgccttcgcgatggacgcccgcattccacccccttgaccgctgggacccctagtggcgggtgggtggagcgcgctc

SEQ ID NO: 32664 - DNA, 817 bp, Homo sapiens
gtgcagggaactgacaaactctgccccagggccctcaggggtgaggtcccaggaggtgggtgggggtgggcagcagtgccaggggggacaccctcaggcctctgctggggccaggcctgcatgtgccaccgtatgcgacccgctgcccccaggacgggtgccccgactgtgatgctgcaagacccagggactcaggccctgtggtgccctaggggacaagctgtgtctacaggccaaccgcaagagggcaggcgctgcctggcccggggaggaggttggcaggcagcgcccagcccggcatgcagcccacacctgtctccatggcggatctcttgtctcttccgtccatcaaaggacacccatgctgtgttccttgcttcaggtgacagcatgatctgagggtcaagcagggagaggtgtgggcccccagctgtggggaggacgcttctaggcacccacccctgagtgctcgccagaggtcgaaggttgggcagctctgaccctgccttgcggacggtgcagtgcacgtcctacaggcaccggcccagctcagcaccgccagagaccaacaatggcagaaagcccctcagacccgggccctgggcaccttgatggacagaactcgggcaccagcaagggaaggcttgcatctgagggggcacaggatggccctaggatgacgaggccgcgtctgaggctggagccagcatggcagagcggggtgctaggtcccggctttgtgttgcacggggtcaaatgactcacaaaccggaaaaggagtgtcgttggctctgaccttcagctcgacccctgcggg

SEQ ID NO: 32665 - DNA, 2519 bp, Homo sapiens
gggaggagaaaagagttcacaccagctgcgatctccctcttgcggaaaaggtgtatgacttagaaaataaaaaaaaaaatctttaaaaaggtgttttcacctcccagggaaacgtgctcggtggccacgggctcacagggcctagggtcgcgccacagagacagggtcaggggtcagtagggtccggagtgaccacctctcacctgcttggcccatcacacgcaggctcaggcccacaacccccacccgggcaccacgctgacccaagtgcacgcaccacagcccttcccagcccccggccacttgcctgcctggctcctcagtgacgctggtggggcagaaatgaccacgaaagcccatggctgggccactctttgcttgatgccctcctcaggcccccacgaaaacccaaaccagttgacatggtgactctgtccctaggatcctctgcacacagtttctggccccacgggagcccaggacccctcaaggacccgcttccccccctgcacacagctcactacctccctgcatgaacggactttaacctcactcactctcacagtaaaaatcacaggtttaaaagtccgtggcagccctgacacagccacccgcgctttgctggctctgaccccgaccactgtgcccggtgtttctccacaggcagggcccaccccggtgggattcccattaccacgttagtcacagaaaacatcccagcccagaaccgggaacacacaccacggagcctgctcctgttcccagaagccaagggagggcgcagcggggctggccaccgtcgtcagcgctcaccgcctatcctcagccccaaaggacaagttcttataccaccgcgccagccagctagttccaagttgcccaatcgagaaagctgctgcctgccatgcctcttcccagcagtgacttccccaggagtgtgaccgtcccactaacacccccagaaccacaacacagacgccgatggcagccacagggccacagaccttagcccatcgcttgtgaccttcggaagctggtcagcactcaccctgtgcaggcattactgggaggcgtggggtcactcatgccatcccctatgagctcagcacctgccgggtcacacatgtggctcgcgaggtagcccctgcctgctgggagccggccagtgtgtccacagcatccaggccacgcttggcgaacacgcggccgccccatcggtatggtcctgactgtgcgcccacactagaagcctaagctcttcatactcaaaactcaaagcaaaacacaattgtgatgagacttggtaaagttgttgtaaaagcaactaagtcaaaagagcttcctacacttataaaaatcaaacaaaacaaaacagtttcctcattggtcacatggtcctcctgcctaatcccttctgaaaaaaagtcctcagttcagcagcaaagaggccacacttcagctccctgctcctaactgagccgggtgggaccaagccctctgttcccgtggcctcagacctggccaagtacccagcctccagcctcgccccagcactgcgccagccaccgctctggcccgcggaaccggctgggccccagggaaggcaccctcaggccacagtcaggtggaagggcgttccctgcctcctagcccgctgcgtcactctgcttggctccggcccaagggcgtgcaggtggctcacggtcctccggcctggtcagccagcaaagcccccgccctgcacacggctccccctgctctccccgccaacagtcaccactgacccagtggcctggcctacacccattccagccctgaggctcagctgagcccagccagagccaccagcagcggcgtcgtacaccggcccaggcacccaccgctgtgtgtgaccacaaaccagcgcctcgacctcttcctgggtcacctgcaaagcaggacaccagcccttgcaggcacgcacggctgtgggtactgcacggagagggcagggggtggcgtgaagcttgcaggcacacacggctgtgggtactgcacggagagggcagggggtggcgtgaagccagcatggccacagcctggcccgcctggccagctcctactgagactgtctcacacatgggtggccacgcacactgtgacacacgggcactcacgcacctccacaacacaggcccaccaattccctggacaacaaaacaggaagcgggtgccctcctcaccaggcgcccccacagggtcttgctctggactatcagggaagacggaagttcagatgcatgggaagccctgcccctccacagcggggatgggaagcgggaggttatgatcccagagacacagagcccagagggggcgtgctcccatgggggtgccgagaaagctgcatgcccctcaaggctgccccacaaacccaccgcttcctcctgcggggctgtctggcctcgggcagctcggggaccactgagtacgccctggtctgagggctgaggcagaacatgcacctgtccggtgacccc

SEQ ID NO: 32666 - DNA, 969 bp, Homo sapiens
aagaagaagaaaacgaagtacattacaaaagaattttacttacttacgaactgaaaagattattgcggaaaacaatgtttctcgaagtgggtgttgggatttaatgtttccttcccaaggacaggctatgcttgggcgtatttggctacctcctcccccacctcaccctgaaggcgcctgtcactcactatggaggcgacctctgacccagggctgctgtcatcaggttcagaatgcaacagaaatggtgcattatgccaaagaacccacaggaaaaaaaaataaaaccccaaagcaattctgttcacgcagtcactgcgctggggtggcctggaggtacaggacaacgacccccactgacaacgaggcaacgaggcatctgagaaaggctgagtggtgacgtggtgcctgcgggatgaaggcagccaccagcgctcgtagcctcctggctcaggcagcgactctgtagacagaaaacgtgggagtagcctgtttctccacggctgccaccacgtcagaggcgctacaggctctcccatctcactgggtaagacaacatgctttctaagactacttttcaccaaaaagccccccttgcatttgatagtcgtgatccttgttaggcagcgccggctctggcaagcttccacctaaaactcaccacatttaccatcaccagaaccgagagcaccatccccaggcaccatcacagctgtgcttgtgcggccaccgtcatgcaaagcccggggcgctgttgcccaagcagcattgtgcaagggtgagcgctgtgggcactcttggcacaggagggagccacttgcccaacatgtgagagggctgggcccgcccaaggccacgctcataactctgcctccaccagccctgctcacagtgcagaaccccccagccttcgcctctcaaaacaagcagagccaagagggatgtcccctcacaccccagtgacttctg

SEQ ID NO: 32667 - DNA, 2693 bp, Homo sapiens
tgccaccataaacacgcctggaggacagagtgaggccctgtttctaacatacacacacatatacacacagaaacatctcgagaggacacctccaaatgatgaagctattttgttgggtactgcggtggcacctgtgattcctcaagtagcttggaatcagcgtgctaacaccataaagtggctgcaaaagtcccagtgaagtcactgctgagagcaaacaggccttacagagaagttccaaggggacaggaaatttccagaggcttgagaggacaatgttcaggggaataagtacttgaagggaattatctaacaaggtgttaaagtaactagcttcttagacaagatgacatcaggaggaaaaaaaaacttattaaggcaaacatgtcagtttcaggccaactaaggctgtcagagagacatggaacacaagaagagaagagttttgaaatgtattcccatcaagagccaagaataatgaacttttgaatgtaaaacttagtgtgttccaaaacaagaaaggaaaaataacttgttactcggaatcgaagccaaaaggaatctcattgcttggggaggagggatgggagggtgggggtggtccttggcctgggaaggaaaactccaccaggccttcggagctgggcacgccctgttcccacaattaagaaaaaaaacgacgacctagagctcaaggccggtgctgacatctgacctactggatggcagccgcctgtaggaacatcaccatagactattggaattttctggcaagtactgggcactaaatcagagatgtgtttttagagaattccatgccaatactgctgtatagaatcttttattcatactttcccactaggtttgggcccctctaagctttcacgagtcaaagacccctcctgcttgctgaaaccacccacggaaggccggacaccgaggacctggccgcccaagcagaggcgactgacaagcgcggtccgggctggacggccccaccttccccgcccgggagagccaggccggacagcggcctccctcagacccgtccccaaggccgagcctcgccctgggccgtgctggtgccccattcgggacggagcggtggcccgtcagcacttccacggcctcctcagcaggccagatgggcagggccggcctggtgtctccccgcctggccgcgcgctcgcgggcagcgatgaccccaggcagcgggcgaccccaggcggacggcaggccgggtctgctcactcaccgttcgctgccgcgggcgcctgcgggggcgtctacatgccggaccgagcccgcaggccccgccgccgcgccgccgccagccgtcgctacctggcccttggcgccctggccgcctgttgccccatggccgcccggaccccggcgccggcgccgccgagcagcaatgcgccgcgcccgcccactgcgcaggcgcacccgccacgcatgcgcgctgccgcgcacgtggggcgtcccgcgcgtctgccgggtcccaccggcgccgggacaccccgcgcgggcgggaggcggcgggcgtggcgggaaagaggcgggcggtggggaagaggggcgaatcgcggtggagagcagtgaccagggagtggaggcgggcagcggggacaggggcgggcgtccgcgactcgggtaggcgggggtcggcgccccgaggagggcggcccccggctcccgtccccactcacctgccgcgtccggagggcgcccccgggtccgcccgccacgtctacgcctaggcgcccccgacattgtgatcccagcccggcgtcccgcccccaactcaccgccaccgcgggcgggacctcccggaccacgtgggccggctcaggggagtgcaggtgccccgcgagagctggccccgcccgccgccgcttccctaattaccgggctgtgacacggtgtgggccgagccggatttgggaaccgaaacttagagcagctgcggcagcgctgcgctccctcggggctgtccgtcggggctgggagggcggccctgcgcctgggggaaccgcgatcggcctcacgcccacctctagcggccaggtgcgccttgcacgcccacgaacgtcctcagaggtctacgcttgggatcccaaggctggcagtggagggaggacccggtggcctggggcacctctagggggaccagggagccgtgttttgcgcaccccacaggctggaggactcggggagttgggggaggaggccaaagccacaggagcggactttgtagtgtttgttggaactgcgggtcccacccagcccgcacttgctgaactggtggctgctcatcagcgccttcaggcctcaaatatcccaataatgtgccctatacccagttctcagctctcgagtcactgtcaggtaaactggcaatgcacgaccagctgctctaacctgctggtcccccaggtgccagacattgttttgtttttctgagatagtgtctcattcgtcccccaggccggagtccagtggcgggctcacggctcactgcagccttgacctctcaggtgcaagcgatccttccacttcagcttccctagtagttgggactacaagtaggtcccgccacactcgactacttcattcatatatatatatatttgtgtgtgtgtgtgtgtgtgtgtgtagagatgaggttttaccattttgcccaggctggg

SEQ ID NO: 32668 - DNA, 1014 bp, Homo sapiens
gcatcctgctgagggccagcctctgctaggtgcgtgacacggaggggacagaacggaaaccttgtcctgctcaagtgtggacgtgcgtgccacgtgctagagtaaaattgaggtggggaacctccatccctgggacatggagcacaggggcgaccccgcgccgcttggtcaaaggaggtccgaggccctgcaggaacagcccacagccggagcgagctgcaggtcactccactgcctgtgtccacctgcgacaggtgcgcccgcgcaagcggggcggagccaggtgacccggacacaggaagcgcgccaggggcccccacaccgcggagctgctggcgacaaagggcgctgctcctgcataggccaggctaatgcaatctacaaactagatttctgtgcctacagtttgaaaatgattgcagttcactcagccagtgtggaattatcctcctctttccacactgccttagtcagtgccgctgtccaagtgcacgttgttggcgcccgttttcatttcctgttttgctaagaaagtggggcagtggcctccatgcccgccaagggacaggcaggccgccccagggaggggtccccctcagctctggctcttccaggccaaagccaaggggaaggggcaccagagggtcccaggtcccacatgccagctccctcagtctgcggggtgccaggctaggacacagaagccaacaggaatccccaaagggaggaagtggagtcgggggtgtggcagccgtgctgagatgctcggcctttatttactctgggcagggaccaagataggccactgcaggccggcaccctgcctcccggctgctggagcccctccctcccaggaactgccagccaggaaagagcctcaggtactctctgcatttaatttttaattttttttttcttttgacgcctccaagacaagttcaactctctagtgattttaagtggggtttttgtaagacagctggcagggttagggcttgtgaagaacttgcatgt

SEQ ID NO: 32669 - DNA, 2713 bp, Homo sapiens
agcccatttcacaatcttaagaaaaagcttccatgaagacaggctgggcacggtggctaaggccgctaatcccagcactttgggaggctgaggcgggaggatcgcttgagccccagagttcgagaccagcctggttaacaggatctcttttacaaagagatcccatctcttaaaaaaaaaaaaaaaaaaggcttccatgaagatgaattaagcaaacaaaagctgatactgcttctgcatgctaaccatgtaatttaacggacacaagaaatgttaaaatatcatttgaatcaactatcgattcacaagaaaaaatatagcaggttcttaaaagtcaaaagcctcagccgacagccctgtggaattttcaacagatctccccactccccacccccaccccgcttccagccgaaaagccgatccaggcaagaggaagacacccagcctttgtgctatttcctgtcctctcccccaccttcgggccttcggaatatcgcaaaccgggccccgaaactcggcgcggcggcggccgccccacaaaggcagcggtgggagcgccatcttggcgcggccaccgggcccattcattcgcggggccgggccggggtccgcgcaaccctcgagtcgacacgcgcggggcgccagcgccggacagacccgggcctcggcaggagaagggcgaggccacagcgcgactgcctcagcggctcgacacagcgaaaagggccgaaaccgttattttcccatttcccgacgccgcgcccggcttccgctttaaatccctactccgaccgcggcgcgcggcccggcttccccatttcattgttccccttccccacgctcgcgccccgcggccgcccggccctcaaagtcaccccgataggcggcccgcgcgggggctccggccgccgacaccgccccgcctgcaggcccgcccggcctttgttctcgcgccgcgggcccgagagccacgtccggctccccacgcagggcccggccccgcccgacccgcgcccccggggccccggccgccgccacgggaagcgcccgcggcgcacacaaccccgcaccccggtgccgaaactcggcccccagccttgggcctgggaccccggctcctctccctagaccccgccctcgaccccgaccctgcaccccgaacctcggaccccagcccccggcccccccttcggacgccgcccgccgcacccgggcggggcaggaagacgcggccccgaccggcgggtggggtgggggcggggcgggcgcccccagggcgggcgggtggacgaacaggacccgggtccggggctgggggctgccgcgctcacctcagcgccctcgtcgcggcctgacgcgcccacaccgccgcctcggccgccgctcggcaggtcgtcgcgctcgggccgcgctgcgcgctccgcgggcgctgcgggcaggtgcgcgccggcgaggctcggtccagtcccgccgcggcggctgctccactcccggccccgctccccactcgccgcccgctcccgctcccgccgccgccgccgccgcctccgtccgcccctcagacgcctccagccatcgggatgggcgcggcgggcccctgcccgcagcctcggaaaaccccacgcgctcgcgtcaccacgcacgccgcgcgtcgcgcgcgctcgccaggcccgacgggcacgcgcacgcctgtgcgcgtccaaaccgcatcgggccccgagcgcgtgtccgagcggcttaaaggggccgtgctgctgccttcgggtaccgctgccccgggagacccccggcggcccggccctgcggggaccgggcgggatggggaccggggcagtggaccctcggagttgggatggggcggggggaacgcgggcgtggagccctccggggacagggtaaggttgggtaaccgtgggcgggggctcctccaggggcgggggtggggtaacggcgggcggggggcactcaagcgacagggcaggggcgggaaggccgcgggcgggggcggtccctccggggacggggcgggtgggggcaccgcgggcgagatcgcttcctgcagaggaggcaacaggccccgctagcaggtcagggtcccgggcaggcgcaggtgccccccggcctctcaagcagggactgcggcgagctcagacgcggctgacgggcagagactcgcgcttgggctcagtgcgtgtgaagtgggcctcgggctgcggaggagggcagcaccccgtggctcctcgcgctgctgcgagcagggccgcctggcaggggcgggggccggtgggcgggagtgtcggggtaaggccgcggactcctcccatgccgctgagcagtggacagcggggactggagacctccaggtgaggaaggggaacgaagtcaagaaggccacatgtcctggcttccaggcttggtgtcctcagaagcctccagaacgtccatggaacccgcccctgcgcccaccgcctcctgctgtctttccagctgagttccggctgcccctcaccctcggcttcttcactctgcctctccccagccagcgccctgctccccggtcctcaaccaccaccttccacctgcctgggccttcatcgcctccgagctccccttccacaccaaacctggcgtccgttttcctccaggcctgcaccagcacagctgaaggggagagagacccaacctcatccactgggcctcccctcaaccaggg

SEQ ID NO: 32670 - DNA, 2109 bp, Homo sapiens
tggtctccctatgttgctcaggctagagtgcagtggcgagcgcgacatgggctcactgcaacctcgcctctcaatcacaagcaattctccttcctcagtttcccaagttactgggattacaggcatgtgccaccacgcccggctaatttttgtatttttttgtagagttgtgggtggggagttcgccatgttggccaggctggtcttaaactcctgacctcaagtgatccgcctgcctctgcctcccaaaatgttgggattacatgtgtgagctacctagggcccggcccccatcatacttctaagggtctgtctctcctgccctgcggcctctccagcagcccctggggaccacggggtcaggccttgattgggcaccgagctgggacctctgggagtgaccatggggaggaagccccccatcactgcagagggtggcaggagtgaggggctgagtcaacctgactcctggggccctgctgaggccagatccatgcccgcccgagcccagggcctgcccgtctcaggctgggtgttgccccaggcccggactccggcagtccccatctgcggtcccttttgggagctggaaggaggcgggacaggacggctgcgggggtgcaggggctcctgggccaccgggcgcgctggggcacgcgctgcagggaggatctggggctcctggtacgtttggacaacatgacccagctgctgtcacattcgaacgaggctgaagaggacgcggacggaggagccccggaacctggctgccactgcgccccgaggtggagcagggagtcgggccgagccctccgcggcgcgggcggctgctggcgaggggcctctcgggagccgcggtcggggcaccctgcggggccgcagccggcgcctccgttcgttcccggcgacggtgggagtccggaagggaaactcacagggccgtgtgtgaccgaggacggagggcggcgcggacggcgccgtgttcgcagtgctcgaaatccccacgaccggcctcggacggcgaccccggccggcccagctcccactccaagcggggtgacgccagacgcccaggccccgggaccgccccgagtccgcgcggcctgcgagcgccgtctggtgggaaagcgcggagcttccgacgcggggcggggcttccaggtggggcggggccgagacagggtggggcgggcgtcaaggcgggccgtggggggggggggggaagtgacggggcgtggccggatgacggggcgtggccgggtgacggggcggggccgggtgatccgggctcccccgcctttccccgccgccgctaggacgcacggcggtggcgagcaccggctcccacaggctgtgccacgtgaacgtcaagcaagaagcgagagacggccgcgcgcggtggctcacgcctgtaatcccagcactttgggaggccgaggcgggcggatcacctgaggtcaggagttggagaccagcctggccaacatggcgaaaccccgtctctaccgaaagtacaaaaattagccgggcgtggtggcgggcgcctgtaatcccagctactcgggaggctgaggcaggagaatcgcttgaactcgggaggcggaggttgccgtgagctgagatcgcgccactgcactccagcctgggcgacagggcaagactctgtctcgaaaaaaaaaaaaaaagggcgagaagcctctagtgcagcgctaggccccacctcagggcgcgctgggcttcgctcctcctcccccacttcgcagagggaagctgaggcacagcccggctttatggaacccagctgaggactgcggatggcgggagaagccctggggccgctctcgctgctggtccggggctgctggcagctctgcgcgctggtcccggaaggctttgttccaagacaagcctgcatttcccaaaataatccatggtttttagggctggtaacctgcagcccctccgccggcctgccctttctcagaaacaaccactttcaactatttgagctctttcctctgttttgtttgtttgtttttgtttgttttattgttgtttgtttttgagacagggtctggctctgtcacccaggtcggagtccagtggcac

SEQ ID NO: 32671 - DNA, 517 bp, Homo sapiens
gcttcaccagaggataaaccgaggcacggagtgaggaggcggccagaaccggggtccccaccctggtgccttcccctatcttcaccgcggaaggccgaaggcaagtgcttcccctcgagtgcacgcccaggaggaacccaggccgggaaaggcaaacccttgggaggaagccaggccgggaagggcaaacccttgggaggaagccaggccgggaagggcaaacccttgggaggaagccaggccgggaagggcaaacccttgggaggaagccaggccgggaagggcaaacccttgggaggaagccaggccgggaagggcaaacccttgggaggaagccaggccgggaagggcaaacccttgggaggaagccaggccgggaagggcaaacccgtgggaggaagccaggctgggaagggtgcatctggagtgtggcaggagcctcgaggccacctccagggccggcacttgtggggcagattctgcaggacactccgtgtttcaggtgcgcctcccgggg

SEQ ID NO: 32672 - DNA, 789 bp, Homo sapiens
cctctcacctcagcctcctgagcagctgggaccacaagcacacaccaccgcacccagctaattcttaaacttgttgtagagacggggtttcaccatgttgcccaggcttgtctccaactccaggcctcaagcgatgcgcccgcctcggtcttcccaagtgctgggaatgcaggcgtgagccaccgcgcccggcccaatccgcagattttaagcggggacgacttaaaaacaggattgctgagctgcgacgaggggggctgcaaggggaaggacacgcggcccccggggctgagggcggcccggaaggatggactccgaggcggggctgaaaagggggcagccgcgccaagcaggaagcgccccggggtggggcgggaggcccggaggccccggagccagagcgggcagggccggcgctgcgcggtcgccgagggacccacgtgcgggacgagctccccgggcccccacgcgccgccagcccgagccccgtctccccgcgcgtccctcctgcgccccctcctgggcaagctccgcattgcgcgcggccgccagcagcccgggacccgcgcagctccccgaggccaggacagccagcagggaagtgccaggcctgaaacgccgccggaggaatggtacccagaagctcgggcgctggagggcggctgtggagtgaggggcacacgggcgcgtggaggcagttagcgacagacacacgtgcgccggcacatgcacacagaggcgggcacacacagacacgtgggcacagaaaggcacgcaggctgggccggt

SEQ ID NO: 32673 - DNA, 1545 bp, Homo sapiens
gaatcacactgagtgtaaactgcctctcttctaaaaggtctcaacatcactcgacagtatcatcaaaggactcttcctaaggaaaatcacagggtaggcccggcagccacacagagccaccttggcggggtcaggagctgcggctcccaggtgccccagccctgctgggaggccaccctcagccagaccctgcagccacactgccctctgccggtcagcaccctaccccaagccccagcggtcacctagcacctccacctgcggtcccaggcaccgggagagggaaggctgcctgcactgggagagggaaggctgtccgcttcacggccggggttcttgctgcttagctggggttttgggaaaaggcttcaccttgccctataccgttctgtgttgcttgagttttataaaaagtcagtgtgactttcataacttgtttttttcatttaaaaaataataggtgtttatgattatgaaagtatatgagaactttatgaaaaatttgggagctacagaaactgctgaggtggaaaagcctggcctttagccacccagaggcctctctcggagcctgccctgcccactccaagggtcacctccacaccccacccgccccggaggacccagggtgagtccttggaagcttccagggctgtgccttctcggtgtgctgggctcgatgggacatgactctgtccccacccactaggggtcttaggaggctgcctggctccagcactcttgaggggtccttacccgagtcactcactcattccccgtgtgccaggtgcctggagaagctgtggggacccggcctaacagggcccagccctcagccgggatctggatgggagtcgttggcagattccagagcaaacaccctgtatctgtcgccgggcgacacagtgacaccaccgccagccagtgagcctatccgtgtctcaggaagcgccctctgccctcagggccctctcaggggcacaggctcagggcagaggacctaggaacctccctgtgacctgccctgcctgcccagaggcgggtccagggcctcccaggcctttgttttgcagatctcattagcggagacctctgcctcctggaggggaggccagagcaggtactgggggaggttttggggacgttttgggcagcccctgtgcccgcagtcctctgctagagcctttcggaacctgtgtctgtcccgaccccccctccaccggcggcatcagggctgaacaaagtctgacactggggttgaccatccactgacgttgccctctccctcccaaccccagagagaatagagccccgccccccaccttccctcgctgggactggggcactgccacggccctgggactggcttccaggacggaggctcccgcctggcagcacagatctccccagggaggccagtgccgagggcctgacccagcaggggcgtccttggttagaaagggtcctccggggccttgggtggggcaggcccagggagagatgtccagtgacagggaaggacacaaccgagggtccgtcctgcct

SEQ ID NO: 32674 - DNA, 1962 bp, Homo sapiens
gctgatcagggaaaaccgtattttcaggggaggagcccaggaggcagggagctgggcggcggtggaggggcctggagggcgattgtccagatcaagcccctcgagtaaggcccgagaggctgtggcttcagaaatgaaggtcatgggcgactcgggccaatgccgcgtccttgacctgggcgaagtgagcggttgcactcacgagtgtggacggcccttccctacaggggaccttggattcgctgggggcggagtgggggctggggcccagagaacccgagtccggacgctcccgtccgtgaccctggccgggttctccgctcctcgcagcttcagtccgcaagtgtgagatgtcaggggacccctggacggcggggccctcgggctggcagcgcgcgccgcaggagtttcgattcggagggtctgggcgaaggccgagaactcgcgtttccagcgagttcccgggggcgccgctccgtcccagaggccggggcccctccggttgccgggcagagccgcgccgcgcgcggtcccattggcgcaggtgcgccgcgccccgcccaacaggtagccccgcccgacaggtagccccgcccgcgcctcgccattgggccgcggccgggtgtcccccgaggattggcccaggtggcggccccgcctcgccctcattggccgcaggtgccaccgcccgccccgggaccgcccgccccgcggattggccgctggctccacctcggtccgccatgttcggacaccgccccccgcccccgccggacggtcccgccccgcgcgccccccgctcccgccccgcgcgccgccggagttccgcggagttgaccgggtcggcgccgtcggtcctgagcgctgccttccgcgttccgccgcggccccacctggagcccccgccccgcgccatggccggagctcccggggcgcagcgctgacggcggcggggggagcgcgccatgcccagcaggaccggccccaagatggaagggagcggcggccgcgtccgcctcaaggcgcattacggggggtgagcggcggagagggcggggagcggcgcgggtgaggcagggagggcggggagggctcagccgtcggggctcctgcgcgagagggagagagggaaggggcggcgaggtcgctgcgggcccggggctgtcgcgggaggtcctcggtccccgcccgtgagcgtcacccgcggacacgtcgtggacagcgcgggctccttccccgggaccgggtttccctggggtcggccccgcgccgcgagctcctcggcccggtcattgtggtagacgttttcgctggaaagttgggcggggacgttccggccgcaaacctgtaaggactgaaagttttcatcaagttgtgaaaactcctggcgggtttcttaaaatcagcgtttcctaaacgttctccacgtttacccggtcgggggtctcgctttagccaaaatccggagacccggggcgcgggcgctgtggctccaatgcagcccccggcagggctcggggcggtcgggcggggacaggggtttctggaggagacggtggggccgagactgaccctggggtttgcgtcgcacccgccccccggaggcccttgcctggctgtgggagggggcgcggtcaggtgctggagcggaggggtcctggactcttggccgccgcctcggggcagcgctgctgggggtggcgggggctgcaccaggtggccgggctcacaggcacagcggaggggtcgctgccccccgaagtgtgggcggtggggaggggaggacccgtgggtttgttcttccacctgtgcgcgtctccaggagccccgaactgggacctccgctcccgcgagggtggctgctgctgcagagagggaggggagcagaatgcgggctccggacttgcactggctggtccttgggatctcgaaaagctgctcctgccccggtgcgtcctcagc

SEQ ID NO: 32675 - DNA, 2008 bp, Homo sapiens
gcacatgagctaaccacgcctgtccacaaagttaggaaaacgagctaccctcagcccgtccgctgtccacagtgggggcgccaggggaaaggggtcagcttccccgcctggggctgtgtctggttctgattgcactgcagtgaatctgccctaaaccaaacgtcagaaagaaaagcggcagacgtttcatcacaacacagagacagacaggagcccgccctgctttaatgcgcatgcgggggagccgagaggcggggctgctggcgggggagccgagaggcggggctgctggcgggggagagcgtgtccgggcgccgcactctgcgcagggctcttggatggcgctcaccacgtcacgtcttctgtgctttcggccaagcactgggccaggtggctgtcaacatccagctgggtcagcctgcaagggaggggccacactcactcggccacctccgcggcatgctggccgcagagagcaccgtctggacctccgggccctctctgctcctgccgctggagaggatccggctggtcagaaacaagggacggggccaccccaggggctcatgcacccggcagaccacggtaaccgccagtggtgtttccacaccgtgcccgtgaggaggccacgccaggcccctgcgtccgagctgggggtggggaagctgtgtctcaacaagcctctctatgggattctggcgcctgctcagcttgagaacgcgctcatcgtggagcccggcagacaggcggcctgacccggagaaaaggcaggacggcgggtggcctgccagggagagccgccgcggctgcgtctacaggaggcagaagagtaaacatggctgggcagtggatgtgcagctcacgtcagagaattggtgtttctggcgaggagggaccaagcctcaccacggagaaggacgccgtcaccggcgtgcaggctgccaacctgccactctgggaggccccacgcggcccctgcacctctcaggagggcgctggcgctgggatggtggccggccaggcaggggtggcaggagaaaacccatccgagtcctgcaggtcagcgccctgggcatccagtggggccgggaggggtgtctgagcgcagccaccttctatccccggcctcatgtggccccatcagcccaactggagcggctggaaatgaccatcaccaggcctggccaaggtgtggccctggaagccaggacagttgacttccggccatgactcccggagagtgccggagctggcgtgctcagcagagctgccggggacgatgtcccggggctgagtgggcggcttcagcctagacttgggcctagatcttgctggaggccaagtggtcagtgtcccatcagagtgaccatccctcacacgccactgctgggggacacacccccactgagcggccaagtccacaggacacgtgtccctgtgtccacctgtcagccacaccgcccctcgctcccctacagcctctgccctcagaccagtccacggcgcgccgttttacccttgggctttgctgtgtcccttcctttggctcctgtgccccgtctgtgtggccactgcaaccctcaagtccccctctccagaccatagctggacccccactcccggggctggctccagcagccatcagctgccttctcactctggcagagcccacccagtgccttctgaagcccccgagggtcactcagtctgagactttccggcttctgcccatcctgggaaccagcccctccctccagaagctttctctaaggttgccagaaggtgctaagatctgaaccgaggtcatcttgtcccggggtttccaggcagcgtcccttgtttgggggccctctgagatgccttcagacccccgcctgtggcggaagagctttgtcctggcctgatctgccctgtccgtgacgcttctgctcagtagctgagcacgccctgtggtgtggacaggccagcccggctgcaggacagtgggggctcagtccagaagcctctg

SEQ ID NO: 32676 - DNA, 1611 bp, Homo sapiens
aggggcggccgccagaaggcctggggcagacagagagggcagacagggggtactcagtagcggaaacgctatggtggggagacccgggagggcctggggcagagagagcggggagatggggggtactagagggaaattcgatggtgcgggaggtggccggcagggttgggggaagggctgctggggcagacagtgcggagatgaggggtactgggggtgggggagcggggtgggtgggtggaaatatggggtcctcagcgggatgaggcgatggttggggagattgcggagggcctggggaaggtagagggttagatggggggtgctcaggggagacgcgatgatgggagaggcgcgggagggcctggggcggcgcgggggaagctcggcgtggggtgggggctcaaggcgggcgctgaatggcggcgcggggtggggcgacgggcgtgggggccgggcccgggggcagggagccctccccagggggagaatagagcgggaggcccgcgggggcgccgggaagcacgtgggagcgggaaaaccggccgcgcccccgcccggctcccggcctcacccgcccgccgggcgcggcctccggcggctcaaccccagccgcggcctccgcgccgcctccatccaagcccgcgccgggcggaagtgagcgcaagccccgcccccgcccctccaggccccgcccccgccccggccccgcctccagacctctgcagcgaggccgcccccctccgagacagtcggaaccccaggggccctgatcccagcctgtagggaaactgaggccagggttccttcgtcctgcaccgcacaggggggcctggcgtgagggtggggggcccaggtgggggagccccgcccgtgtcccctttcccgtccgggcagcccccgggccggagccccctccgttaccccgatggctgcccggcccgccccggcactgcctcctcccggctgcacccaacagctcccgcccccgtttccggctctgcggagccgcctctcctcccaggaccattccaggagtaaataaagcttgaaatccgccgtcgccaccaccgtttctttacaaaaggcggggaactcaagctccttaaccaagaaaccagaggcgaagtgacaaagtccaggtggctcacttgggcctcaggggcctgggccagggccctgggggcagctgaggggctttcctgcctggaccccgggctctgcgacctcaaagtcggccacgtggtggcagcagccgcccaggcaccctggtgccacacttggctgtgcccagtgccccatgggcccaggccacttgcctctcccttggccctgctgggccctggagtggctgccaccctcacggaaggagtggggtctacagagatcagggtcaggggccctcgccagacgccactcagggctctgggactccttggcagtttctgccctgcccagccccagcagctttggggctatgctgggcacccctcctgcagggctccctggctgttcctacccctcacctggcccctcccagcccccagtcgtctgtgccctccctccagaactcagctgtggagcccggccctgaacccaggccacccgagt

SEQ ID NO: 32677 - DNA, 2232 bp, Homo sapiens
aggctctgggacccctggcccacgagccccaggccacggcctcctgcctgggaggtgtggctccccatgcagccagcttcttccctgcctcagatcggtgacctgcactctgtccaggaggaggggagacttgcccagggacaaacccgaaaacacggcaaggtcaggggaggagggcactgtttcctgtcgaagtccacatttgtgaaaaaacattgattgggcagagagaggtgttgtattctggaatggaggtgagtggggggccagtgagggctgggccggtgaggggtggatgtgatgttttgcctggcccaagggagctggtgccccaggttcccagtctgctggcagagctgggtcctggtgggggcagagctgggcaggcccacatggcctgtgcatccagggtgtcttgtccccttaatccttcagaggatgaacccccacccttcgccggccttcttgggcgtggtctggtagataactggagctgggagaggctgaagacagtcaaagctgctctcctcttttctaggtgagaacagtgagcccgcaaggtcagggagctgcccccaggtcatctgggctgtcggagatggaggcgggagaggagccgtgtgctcctgatccctggcccaacgctctccttccccgtcgcccactcggcatcggccctacccggggcccggactcccactcacgcactggaaactccctgtcttggggccgcgcacaccatgcctggcaggagctggagatgcagcagagcagacgcggctgcaggagcagccgtgtttcctacagtggagaaggggaccctggcaggagcactgcccagccaggcacgtggtgctcaaccctgtgggcactgaccccacaaaaggccggggtttgtgctgcaggaggcctctgtttggggagagctctgtcccggctccagtgcggcggccctcccccagcctgctggaatgggacctcatccctgctccagcgtcatggacttttccggccttgggtcgaggcctcagcgattcaggcggggccgttttggtaacacccgtgtgtgtgtgtgtgtgtgtgtgtgtgtgtgtgtgtgtgtgtgtgtccgtgcgcgcgcgcatgcgtgcaggcatgtgagcctgtgtgtgcccgcgtgcctgcacgtgtgtggacatgcgtgcggtgtttccgccccagggctggacaccaaggcccgtcttggatgcagggtgttttctgcaggggaaactgaggcgtgggaggctcagcccctgcctgggggggtgactgccagggagtcagcctcagagctcccacccctgggcacaacgggcacctggccctagggcctgggcttcttgggagcccggggccttggctgcacacagaccatggccctgggtcccaggccaggggtgtcctctcagccctgcctccctgcagtgcacgtcctccagcccgccttctggtctcttttcttcctctcaactttaccctgtctccctcccttcctctctctgcccccctcctggcaagcggattgcaatccaaacttgttgttaacttctcccctgcagttgtccacgggcccttccaagttaaacattactcatggcgacaagagcccgcagggcagtgcctggcctggaggtggacccgcgtgcggaaggtgctgggagggggtgagtaccaggcccctccctgcagcatctgtggggcagctgctggtacaggtggccccagcaccctgagcccatacctgggtccctgcagcctcttgcctcgccctttggagtcacgaatgtgcctgtttatgtaacccccatgctcggccagagcgggtaagcctgtgggcagcagctccctgggcaggcttgggaggggccagccaggggccccagaggggtttgggccgggccaggcgagagccctcccctcagccagtcactccagctctgtgccaggctaggggtgggactggaaacaaagtgttcagaaaaaaaatagcctcatctgttttgaatcgattccgcttattgggccctcagttttcccagcagggaagtggagggatggggagtcatgggctcaagcacctcagggagccctcacagctgcaggaggcacaaagcccggaccccactcactgcacccagcagctgctccaccctggcctgtcaagagcctcccaggttaggagcagagccccccaggccgggttccccaggg

SEQ ID NO: 32678 - DNA, 1443 bp, Homo sapiens
agagggagtatggagccgccctggggtcacctacaggtaggtcctggctgcctctctagacacctgccctgccgcaggtccggccaagacctgcacagggactccgggccggctcccccaggataggaactgcgcccaggagtgctggtttgaggcaggttccagcctccactggggaagtgaggggcaggaggtcccagctgaaggtcactcaggttgcagcggcgtggccctctcgcctccgcccagcacccaggccagcttgggcacccccggcccgtggggcatgtccctccgcctcaggcgagcacagaccgagccctgcccctccccaaacacaccattgcgtccctgcgcccgcaggcctcgctggaagctgcctcccctggagaccacccggccgactgtccaacttcggggccccgggcttcccgctccccgccctgccaaggcttgagtctctcccactgcgtggccaggcgtggagggccggccgatccgaccccgaaagacgtctcagcgctccacggccccggggcggaggtcaggggtctcgccggcccgaacgccgggccccgcggggccgaagtcctgataagccacctggcaggagtggctggcagaccggctgcgtctggggcaccgggcgccgcccctcccaggcccgaagcccccggcccgcgcagcagggacactccgccaggggccggcgggcggggcggggccggcgcggccgggagccgcggacactcggccaccgagccaccggccacggcgcagcgggggccgccgggctgcgccgccagggtcacgcgacgcggtgcccgtctcggcgcagggtccctgggcgtggccgctgtccccctcgtgtgtgggaccccaggtcaccgtgtggcgtcccggtagtgtgtgggaccccagaggcgtccggggcctccccgctgtgtggtgtcccaccctgggagaaccccgggtgcgtggcgtggccccccggccgcccccagctggtttgcggtcgtggcgggggcctgtgggtttctgggccccgacggcggcgagacgggcgccttcccagcggcgcaggaagcggcctcggccggaaggggggccccgggcgccaccgccgcctccgcctccgcccgcgcccagcggccctcggcgggcggggccgagcggggccgagcggagtcgagcatggccgagcgtagccgagtcccggccgagcggagccgagtcatggcagggcgggtccgagcgtggccgagtcccgggcgagcggagccgagcgcggccgagtccgggcggggagcgcgcgttcctggaagagcccggctggggagcgggtcacattcttggccagcgctagggctgaggcggacgcacggcaacaaacagcgcggggggcggggccggcgcggggcggagcgggcggcgcggggcggg

SEQ ID NO: 32679 - DNA, 2020 bp, Homo sapiens
gcggccgcggctgtttccagccgcacccggggctgcagaagacgctggagcagttccacctgagctccatgagctcgctgggcggcccggccgctttctcggcgcgctgggcgcaggaggcctacaagaaggagagcgccaaggaggcgggcgcggccgcggtgccggcgccggtgcccgcagccaccgagccgccgcccgtgctgcacctgcccgccatccagccgccgccgcccgtgctgcccgggcccttcttcatgccgtccgaccgctccaccgagcgctgcgagaccgtactggaaggcgagaccatctcgtgcttcgtggtgggaggcgagaagcgcctgtgtctgccgcagattctcaactcggtgctgcgcgacttctcgctgcagcagatcaacgcggtgtgcgacgagctccacatctactgctcgcgctgcacggccgaccagctggagatcctcaaagtcatgggcatcctgcccttctcggcgccctcgtgcgggctcatcaccaagacggacgccgagcgcctgtgcaacgcgctgctctacggcggcgcctacccgccgccctgcaagaaggagctggccgccagcctggcgctgggcctggagctcagcgagcgcagcgtccgcgtgtaccacgagtgcttcggcaagtgtaaggggctgctggtgcccgagctctacagcagcccgagcgccgcctgcatccagtgcctggactgccgcctcatgtacccgccgcacaagttcgtggtgcactcgcacaaggccctggagaaccggacctgccactggggcttcgactcggccaactggcgggcctacatcctgctgagccaggattacacgggcaaggaggagcaggcgcgcctcggccgctgcctggacgacgtgaaggagaaattcgactatggcaacaagtacaagcggcgggtgccccgggtgagtggccccaggcctgggagctggggaggatgcgcttggggtgggggccccttctggactacaggctctggtctccgaaggctgggacctgtgcttctgccgtgccccatgtctccagtcttcgctttgttttagggaaattcagagtgttccgactggcagggccagagagtttggtaggaaggccctcctgcccgttccccaggacgagcctggagtgcgggctgtggcggtggggtggggggccaggcctggtgtgtggggaaggcccgcaggcccacaggcattgcccagataggaaggcacaggcctcatgctcccgagaaagcggcctgccccaggtcagggaagttaggtccagctgggccacggcccggatgcctcaggcccaggtctttcttggggttggggtgaaggtggctgtcctcgccccgaaggcacccagcctcgaagacggagggctgcctgcctttgggccccaggagacagagcttgggtgaggcgaggcctggttttgttactggctcccgctccctgtttggtgccttgaagttttgggacacagacacaaaatgaagccaggtgtccaggcttcagtggcaggggcccgagacttggcggctccagcactgtgctggttggtctccctgggcctgccagggaccaaatcccagagtccgccgtgtggggtgagggccatttggcacccggctgaggggcctggtcagcaggctcctgggcccgcgtgctggagttactggcggcctgcgatttgctttggactcacccatttccttctctccctctgaaacgcagaggggtgcgccggagagggaggctgctggcctggctttgttgtttgccagttggaggatctatgggatccggcatgggcagctcccaggccacgaggtgccgaaattactcagtggggtcctcaggaactttccgttgcgtacctccccaagtatttgtaacttttcttttaaatatccaggcttattaaattgcacacacagaatgctgcattggctcagctattcttgggaggcctaattaattca

SEQ ID NO: 32680 - DNA, 2211 bp, Homo sapiens
gcagccgcctgcagacctgtgggctggggaaggatgctcgtggcagagctgcagacagacgtagcaggctggggcccttcgtgtcacacggggagttggttggggtgggcccgatggcgctccctgtgggctggggcctttctttttggggtggccgcaccctcgtcagtgcctgtggctggaggaagccacatgtcgggggggattgtgggctcgtgcaggctgcgtagtgggtcacctgtggccaaggcctgagctgctgggacacgctcacgtcactgtcttcagagctgatggcagaggatctcggttgagcagggtgtgtctgcgtttgtttttgtccgactgtgggtcatgtgtgtgcttgtggtctttctgtcttcctgggctttgctgggggcccattggagtggccagtggggcctcgttgtcacagctgacacagagcagggcccaggccacccggcttctctctccctgtggttgtgagcgccggggtccttgggccgccatagagacaggccagacaggctctggtcatctcagcggatgcctccgagccgcctttcccttttgaagtccccagcactgctctgaaatttcatttaccgattaaaaagcaattcccaggccatactgacgacgtgcacggtgtgagtgactgcgtcctctaggcctgagtggcagccacacagcctggccctggcagtggtgtcctccgcctggctccctgaatgttcaccagctcctgcgggttttcctctcctcatgctcctgggggtggggcacccatcctgcccgtgttgcctcctgctctatgttcttgacgtgggatggcggccagggactctgccctcgctcagtgcctgccctttaggctctgtgactgtgcacttgggagttctgggcttcagggtccccttaagtctcctcaggacagccgtgtgcgtgtctctgtgtgcacaggagcgacacatgagaagggagtgtggtctcagggtgggcgtggacccacagtgcccagaccctacttgtcctagaaggagtggcctgggaggccccgcctccgccctcactggccgccgttggctcctcccactcgtgtcttgacagcttattctcgggatatgttttgatttcttcacttcctttgtagcttattttaatatttttgatctgccgaagatgagggcagaacaaagaatgtactggaactctctttgcagggctgctgctcccagcaggccttcgggctctgcggagccggagggggctgaattgccttccgggtgtttgtggccaggccagggtcgggtctcctgcctgagtgggctgggtcagcgccactctcctacccatggtgggaggtgggagagggcggagatgttcccgggtcccaaaccaagtgggaggcagggctgcagctttctccttggaagcctcctgtgacagcggctgtgcctgagcctctggcctgtcggcagtgcagtggcagcatgaggggcagacagtcttcctccagatgccccctcatgtcacggggttacagaggaagcctccgcttctgtccagtggctgtcgggcccggccagcttcctgctgctgtatcttggaagaccatgtgggctgcatgggtgcttggcgagtctcctcttagggaccctggggctgctatccttgacaggggaccttgtctcacctccccactcggtcccacactggctttgtgaccttggacgagttgcttaacctctctgcctcagtgtaaactggggactactgtttattgatcttggactttatgttttgagtggtacaggtggggcacagatgggtcattgtgctgctgggagcacttagccaagactggagcctctgagccttccccactcccacccctctttcttctttccggtcggctcgcctccttcctcgggttctctgatagctgtaggactccattggactacatttttttgtcagtatagacagctgtcagagacggagacaaaatgtggcagttggagctgccgcttggcctgctgcctgggacgcggccccttgtcccgcagaacgtcagccaagcgctttccgtgcaggctgataacagggtggtgccgtgcttcccttgggccgtggcaggatcctgctccaagggggggtcctgctccgagggggccggggtttctgttccaacagggctggtggggg

SEQ ID NO: 32681 - DNA, 1360 bp, Homo sapiens
ccctggccccaggcagcgtttcttcaggcaggtgcccagccaggtggtcgggcttgagacctttgagtctcgaggtctgttctggggaatgactgagcttgtggaggccaggaaggggttgctgggcttggagagcctctggggaggagttgtgttttgctctttgctgttttaagctgaaatgatcacaggaagggacagcatcaagagtttctttctgggacacccctcactcagctcagcggccgtgtgtgggtttggggctgtgctctcccagacaccctcaggtccggggagcacttcgggggctatctgtccctttgtccaccagcttcctttggaaaaagtgtttgctgcaagtgtttttctccagcttttcgtggggttccctgtagtcttgggccatgctctggggtcaggctcccggcaggccctggtccccgtgcagaaggccagggtctgcgggtttgggctggtctgccccccaggtgagggttccggaaagacggccggctgctgagtcttctcaagcaggggaaacagcagctcgagagtggttcttgacctctgcccaccccagctggctgtgcacggactggggagggcatgggcagctgcccccaggtggcttctgcagggagcagagcttagtggtcattttcccggcatggtctgtcatccgtctgtctgggacccctctgggagctgggctgggtccctcgccttctggggcagcagggtcacggtgggggggctagtcctctctttcagcatcttgtttctcagccgtccctgcggctatttgtgcaatgtctgtctgtctgagtctccgggtgagggcagacaggatatggtgcgaggaagtctggggtaagtgtgagccgaaccccgccctggagtctctcggggttgtggggccacagccccagcttaggttaggccttcactgctgctggcagggcctccagagagaaggcggtggttccggggcctgggccctgactgtctggcaggaggtgtccacgccggcggcccggctctctgtggcaataatgtgtctctttctaaggattgcgaaagttgagggaggatttctccactggaagaattatgcaagcttcaactgaaatgtttttaaaaagtttctttgttttgagtcaaaatacagaaggtgaattatttccctaatatctgggagagctggaaaagaaggcccctgtccttattcttcagggctcttcccctcctgagcagtggtcaccaggccagggtgtcatggagggggggctgcctggggaccagctctttacacctggcctccagagcgggtggtagggcggctccttcctgccctgccctg

SEQ ID NO: 32682 - DNA, 1371 bp, Homo sapiens
atgtacccccttgccctggccacttggggtttctgggacaatctgctggcttggccttgactttttcctgaacctaggagcccagggcctgctcctggcatcaggacttgctcttcctctttcctgggccccacaggtgcccttggggagcacacagctgccccagcccgagtccagtctggctctcgggaaggggccttactgctggctgcacaccttggcctccttcccctggatgcgccattgccaacgcagctgggacagcccttggacgcagcgtgcccgccccttttaccagggcatgtgggctgggaccagtttcagccccatgttgacttgtttggctctgctggtggtgacgggggggcgcggtggcggggggccttggtcgcgtcgtgtctgctcttgtgcaccggtgcctcacggagaggctgtggtgagtgcgcggaaggaccctggtgcttttggggactttctggagcagcccacattccttccccagagccctaggggcctggccagctgcctttccaggccctgaggccaccaggttcttggggggagctcctaggttctgctttggcctggctgggtggtgcccacactgccgcgtcccctctccggggctgcccggactcagcctggctggcagccatttccgttacttggtttccaaaggccccatcttggaatcaggagcaggctgtgggactcagggtgggttctgagcttggtgacccgctctgctcttttgtccggctttgtcctaactgttgaatattaatgaggggcgccgcagggtggctctccagtggagggtcctcactttttgttttgcaaataacgctggggcccctgcgccactggggcaatgcaactgtgacggtgctggttggattcaaaaggaagcctggcagtggcggggcctggacaggcagcctttgacctgaggcggggcggcgctctgcgctggttcagaaaagccgtggggcagcctctctggcaggcactggctgtacctgttggttttcctttgcccacagtgaagtgaaagtcactgcagctgggtttgctgtttaactcactgtctttccttctcacgtcttctctgtgcaaatagtggtcagtgtactttttgattatttcagtcaagtggaagtttctaggagcgtagagaggcagcgtggcttagggtttaggagcatggctgggctaccttcctactctgagtgtgggccacgttacttttctaggcctcagtttcccattggcccctctcctgtttggaagaggcagctgggtcccacaagccatctcaggagccgcgtctgggcgctggcacggggactgtgcccacagccagccagcctg

SEQ ID NO: 32683 - DNA, 2055 bp, Homo sapiens
atagctgggattacaggcgcccgcccaccacgcccggctaatatttgtatttttagtagagacggggtttcaccatgttggccaagctagtctcgaactcctgacctcaagtgatgcagccgccttggcctcccaaagtgctgggattacaggcatgagccatcgcacctggccatggccacctgttttaaggaaaccactcagtgtcttaaaagttaagggtgctcattgccctgctcaacagagagtcccgtgtggtgctgggtagccctcgtgccgctctctggccgtcccagaacccgctgtccgttcccagcgtgtcctcgagtgtggggtggccactgctgcccaggtatgccactgtccatggctgatggaggagcaggaagtggcccatttgcaagcctgctgcctgtccttggtttgggtctttttattttgagaaatctccaaacctacatacagcgaagttgcaggaagaacgtggtgagtccccattccctgagctcagctgctgctggcactggcctcctctcgccacgactgtttttgcaactttttgccggtcatttgagagaatgtttcagtcagtggggtcctccctgctaagcccttcattctgaatttctaaaagtaaggggatgtggtgtgtgaccgtgacacggtgaccaagtctgggaagctggctcccctggccacgctctgccgtgtctgccacgccctcttcagtagtttacttctgcctgggacctgcctggcggctcagctgactcttctcttgggcctgcctcgttgccctaggcagctggctgcgcgttggcagggcccggacgggcaggtgggtagcggcagccccggggggccggtgccctatcagaggcgtgggaggcatcaggagcaagcggcccccatgcttttctcaggggagcctctcccttggtaattaatgagtaatccgccgaggggaactttggaccccaaaagtcccctgtccccatggactttatccgggtgggccaggatccctggtgagtctgcttgtcttagggatggggacgtggggcactgaccgcactcttggccactgctgctgctggagtctcgcctttctcctcccgcctgccttcttgccgtgtagtagcgctgcggaccgtgttcggaaagagtcacttactgtccgttctagtcacagttttgatgcccaagttgaccttctgttggctgcccacaggtctgggtatctgctgatgttcttttatttatttattttttgtagagatggggtctcactctgtggcccaggctggtcgtgaattcctgggcttgagccatcctcccgcctggtgtcccacagtactgggattacaggtgtgaacccccgctccctccccctgccccagcccctgctgaggtcttatttcagagccggcagggttttcccagctctcaagcgccctcacgtcccaccacagtgacgtatggtgtgttcactcctgtcctggtccccaggtcgtgtggggccatcgaggctcatccccagctgcagccgccctcctttccctgtagagccctcgcctgtgtaacggttactgcctctgtgtgggcagcatctgggggggctggcgccgggcagtgggagacctgctccatgtcactggtggaacccaatgtatgtgataggttcacaggtctcagctgtgaaattgtgtttgtacacggtggctttttctagaaaaatgaaccgcaaagtatttctttcctcgtgaatgtcgaccattttctcgagtctggttgttgttggccagtgacacaaacctgcagcttctccccttcttgcttccctccccgccccttggctccgggcacagcgtggctgaaccggcttatctggcctcgtctctggaggcctccccagctgtcatgtccgttgacatttcactgttcctggcagtggctgtgcccagacgcgccgtggcacgtgggagtgatgctggtctttgccagtgctctgcacacctgtggggaggcctctcggggtttcctgccaggtctctg

SEQ ID NO: 32684 - DNA, 848 bp, Homo sapiens
cctggagctctctgtgtcctgacctcatttcctgtctgtgccgctctgtcctgacctcattttctgtctgtgccaccctttgtcctgacctcatttcctgtctggaacatgctgtgtcctaactgcatttcctgtctggagctctctctgtcctgacctcatttcctgtctggatctctctatgtcctgacctcatttcctgtctggaacatgctgtatcctgatatcatttcctgtctgtgccactttgtccggacctcattttctgtctggagcactctgtatcctgacctcatttcctgtttgtgccaccctttgtcctgacctcatttcctgtctggaacatgctgtgtccggattgcatttcctctctggagctctctctgtcctgacctcatttcctgtctggagccagtgacctcatttcctgtctgtgtcactctgtcctgacctcatttcctgtctgtgccactctttgtcctgacctcatttcctgtatgcaacacactgtgcccggactgcatttcctgtctggagctctctctgtcctgatctcatttcctgtcaggagcactctgtgtactgacctcatttcctgtctgtgccactcttgtgtcctgacctcttttccagtctgtgccactctgtgtcctgacctcatttcttatctgtgccactctgtgtcctgacctcatttcctgtctggagcactctgtcctgacctcatttcctgtcttgtgtcctgacctcatttcctgtctggagctctctgtgtccttacctcatttcctgtctgtgctgctttctgtcttggagttgcgtgcctgacctcatttcctctccactgt

SEQ ID NO: 32685 - DNA, 1085 bp, Homo sapiens
tggatgagcctgcctgtcccccacggattggagttttgcccaggggtgctgtgccctggtcattgtcccctacagccaggcagtaaagtgtggccagcaccttgctgcaagagagggacagaggtcatctgtctacgagctagagcaagggcaggtgggcccactggctggcgctgcgtctgggttcggtcctggacctgctgcgtgttatcctccctgcgggcctggcatgggagtaggggctgagagatgctggtgacaccactctgacgccacggcctgaggcagccgttggacagtgcccatcttgaatgcagccctggtgacctgaagcccctgcgttggtccctcacaggccagggggtgtggccacagggcctgggctttgtcccgtttacgagaggtcaggcggtcacagggtaatgggaggcctgtggttcctgggctgccatctggcgattgtaaaacgggcagtgtgcagtgttgagggggcgctggggaaacaagctgccggctgaggaggccgcactccccgtgcctcccgggcagacacctcacggcctttctctgggtgtctgaacccaaggtgaaaagttcaggctgtccctgctctccagaggggctggaggtggggcgggagcagagactggacctggccagcccctcccgcttcccttcctctgggcccctggactctgggggcgagggcagggctgtttggctgttggacatccttgctgtccctttgctggactctccagaggaccagcatggaggtgcacaagttcacatttgtccctctcctgccccagggcacctggccctgtcccgggccaccccaggctggaccagctgcccatgtcaccaggccaggcgctttccctgtgaatgagccgatggccgcaagtgcctggcctcaggcctgggctgtggggatgactgaggcccagtgaggagtgggctggggcctggtgtgacctgcacggtctgtgggggttggagggatgcgcgacttgggcccaccccagaacttggggtttcctgatgggtgttggggtgcacacaagcctgggctcctttgtgat

SEQ ID NO: 32686 - DNA, 1256 bp, Homo sapiens
caggacagtggccggaactccgaaatgaccaccgacctgcgctggccgctgagggtccgacagaccaaggctctgggccccctaccccatcctgcgccccgtgcgcgaagtctgcggggtcactgctgcgcaggacagaaaacccgcagtggggccccggcctgtccccggccctggcgctgtcctggcatccggggaaatcctgtttctggctccaggccagggcctgcccctcaccctggagaggccccgtcggaggccggcctcgcgggggaagggcggtggcggaggaactacccaggaattccagcgccggctccgaaaccttcccaatcccgctccttcgcccgggccggaagccgcgctgggggggtggggaggggtgcacgtcccgggccccgcgccgcgtcctcagggccggggcggcctccccgacgcccgttccgttcccagtccgggggcactgggggccccgagtcaggcggagcgcgccgggccccacttccccacgcggaggggcagccccgcagcctcaggctcccccccgcagcctcagtttcccccccgcccccgccgcctcttccgctaccccaccctccctgccgtccggggcggcgccccccagattcgcggccagcgctggattccggcggggtggggcgggggcttccggcccgggggcggctggtccgagcagcaggcccgggctggggggcgggacgggaggccctgggagcttcctgcagcgtgggggcggctcccgaggtgggaattccgcccccgaaccggcgggctacgtgcgggggtctcagaggctgcggctcctcccgtcggtgggcgcggccgcccccagaggccgctgcgggaagcagggcggcggcaggaagcgccccccccgttcccccttcccccccgtacccctcttcccccgctcgtccccccttccccaccccaggccccgcggaggcggcgcgcgtttcacgggtttcgccgcccgcggcacggtgggggcgggggcgggggcgggggcggcggtgcgacccccagcggtggaagcgggaactgcagctcggccgagctcggggttggggggtccctgccaaccctgccctcccggaaggtcccagcctggcgggttcgggtgcttttctctctggggcgcggcctccctgttctgctcagttgggggtccgttcccgggaagaaccaccacaccccccatcccggcccgcaggccccagccgccaagtcgttgc

SEQ ID NO: 32687 - DNA, 2273 bp, Homo sapiens
caacctccgcttcctgggttcaagcgattctcctgcctcagcctcccgagtagctggaactacaggaggcaccaccccgggccaatttttgtattttttagtagagaccgggtttcgccatgttggccacactggtctcgaactcctgacctcaggtgatccacccgcctcggcctcccaaagtgctggaagtacaggcaaaaactgcttttgaaacgcgtcctagcgtttctggacagcaccggccaggaagtcaggaggcttggtgctgctcctgcgcctgccctcgccccaagtcctgggcttcgggatccccatggcaaccccaggtcccgctggctgtgaggctgcggccggaacccggtcttcccggctaggagcccgcggggggcgaccccctgcagggcttggcctgctgcgggaggagggctcggggaagggtgcgagccgagcccgaggcgcacggcgagtcctgtgggagtgggggacgcgggggcggccctggctccgccgcggcacctggacctctactttccgaggtgagcatttgggggtcgagggcgtagagcgatcgcaccctgaatggagcccagggcagccagcgacctgtcccgtggcccgcagtcgttaccgttccggggcggccgcctaggcgggtcccgacgcggcccgcgggagctcggggtgccctcgcccgccgctgccatcttgccgccgagggttctcttagcgaccagcaacgcccgcttccattggtctttgtcgcaagggggggtgtggccacgggcctagtccctgagcccgcgcaatctctggagcgaagctagccgggcccggagccagaggacgcagctgcgcctgtgcgcgtttccgccgctgtcgtctcttccgccgggaggcccgcccgccaacggcctgcgcgtctgcgccggaagcggaaatggttggagcccttggccccgccctcgcgccatcttgggggccctggaggcggcgccgcggaggacggagcggaagtgctcgctgcagcttcccggagccggagcgcagcgcctgcggccgcccgtgccccgccgtcctccttcccgcggccgtgagggagaccgcggctcggccgtagcggagctgcgaggtgccaggaagggctgcgtggcgcgggaacggccgggcagcgccgcctccgcttcttccgggctgtcaaggccgcgggcgggcggggccgcgctgagggccgggcggggagggccgtcggggcccgggtggccgcggggaccgtgttcccgacccgcggccctgaggggtacgggtcgcgcctcggggtcgggcccgggacggggtgctggggggtgcggcggagccctggggcctgcgagggtcgggggagcgggagaggggccgggcgggggctgcagccctcgagccacccgggccgcatctcgtccgcatcccctgcttggcatctgggggaagcgggcagtcgcggcccccacagcgctgcgagttgggctgtattccagagtaatgtgccctgtccccatcctgcgtccaggtcagcgcttatctgtaggatttagtgttaagctctggggtgaaggcgttactgacgggctgaagggaaactagttacatcggttttgatcgtattctaaataggcaataaaatcataaattctccaggctgacttagtactggtctgtggccccactgataaaggtatcgttcgtttctctgccaggtgtctcacagcacagagggctgctttcagcctaagtaccttcagtgggcttttgcccttttccctttatgaagagtagagactggccgctagtcctggaagcactttatttttagttgagttgacatttcccaggaagatgcagttatccccgtaagtggataaagggttctcagtaattcagactctcacatggcttctgccgtatgcctgaggtgacggcgacggcggtaacagtgtgtcagagccaggtggagatataagatggtcaggcccagaggagcggggagcccaggctggaatgtggccttgggaaggaggaagagacggggtctgggagggcatttcagaggactgaacaacaccagaggcgtgaagcttggtgcacggcagccgggggctttcttagtcccggaggaattggggatggggacgtgaagagaaaggtgggagccagactgtcaatgctcccggacgccaggcagaggacttcatcctttccacgtgcagagtgatggaccacagatgtggatgaat

SEQ ID NO: 32688 - DNA, 3484 bp, Homo sapiens
tcaagtgatccacccgcctcggcctcccaaagtgctgggattacaggcgtgagccaccacacccggcatcttttttttttcgttttttaatcggtgatggggtctggccccgtcgcccaggctggagtgcagcggcacaatcatggctcactgcagcctcatccctcgggctcaggcgattctcttgcctcagcctcctgaagagctgggattacagacgccgccaccacgtccggctaattttcagattttttgtagagacggggtcttgccatgttgcccaggctggtttcaaactcctgggctcaagcgatcctcccgcctctgcctcccaaactgctgggatgacaggtgctgcttcattgagtacactggcttctgtactcagctcccggcctggtgaggcaggcagggcctggctgagcctacactggggtcagcagggcgaggggcctgggctgctgctcaggcctaggaaaggccggggtcagtgtgaaccggaccgaggtatgaggcgttcgcgccgcgggcgctctgacccctctgctcacaggggaggatcggagggaggcttgaagcacttgccaaggcctcacacctggaggggacagagtcttccccagccgctggcgtcagctggacctgccctgagctggggacgggaagggcttgggcgggaactggaggcccacgcaggtcccccgcggtgtctgcggcctgtgcctctggggccacctggccagggagggcaggaggtgccccgcacatccctgaatggccgcagggcaggcgaaggagactgccgggtcccaggttgtgggacgggcccaggcgaccgtgaccacacacggcagacaccccgcctccatgaggggcaacaccccctgggccgctcgcgaggacgtccggccgcgcccggccctcacccgccaggctgtgcagggcgccgcccgccgcgctccgcagcccaccgcggtagtactcgtccttctgcgccgcgcggatcacctccggggggctggcggcggccggggccatggccgcgggttcgggtggtcccgagcagccacgccggccacgcccacgcccagacgggcgagaactgatgacggcacgacgtggctctgcgtgcggcgcagacctctgcgtcaaggtgctggggcggggccggactggggctggaggcggggccagggcccgggcggaagcggggctggagtccgaaccagcgcagcgcggggcggggcagcgggaaggtagtcggaggcgcagggcggagcggagcggggcggggcccgcgagccgaggtgggggcggggcacgcgcgaggggcgctggcgaggcagcgggatgggctcgcggccgcgtggttgctgcgacctcggggtcctacgctgccaggggcccctgctctgctccctgcacgtccacgggccgccctcccactggggacagcgctgcggagtggagacgctgcaggcccatttacggctggggagacggaggctttcgcttgggtcttcgggaagccgagctcccagcgccggccgcggcggtcccgccctcgcgccctttgagctgcgcgggctctcagcgcgggttggccagttccggggagccggtcggtttgggggccagaggggcacgaggcgagacccgggaccttccaggccccgagcagccgccttccccagtaatcctgcgcgaaaagcacacggccggcttggtgtggacgcccccctggtgcccacgggaggcagggcctggcgggtggggggcagccgggaagccgccgcgtggttccaggacgggcggaaggtggccttccaccctccaccctccaccctgcctggcctgagccccgcaggtgctctggggaaccacatcgcaggcgctccgatccctctgctcccaggggacgagcggagggaggcctgaagcacttgccaaggccgcacacctggaggggacagaaccttccccagccgctggccacagctggacctgccctgagctgggggtgggaagggctggggcgggaactggaggcccacgcaggtcgcctgcggtgtctgcggcctgtgcctctggggccgcctggccagggagggcaggagatgcctggtacatacctgaatggctgcagggcaggtgaaggagaaggccctgttttttggccccaagggcagcacttggccctggagagtcctgcaggattgcaggaggaaggcagggcacgacaagggggcgtctgcgccccgctgacctcagtggggagggcctccagttccttgcctcacctctggttccatctacaggagctcagctgtgggatcatccccagactggcacagcccagtcacaaagccagagccccacactgcaggaatggcccctcttacagggaaggggcatggcctgggtggccccgccccgcaggccctctggctaccaaacctcccagcgcccccgcgcccctttggagttctgaccccgcgggtgcacccgtgtctcctggacacagaggctgccctctgattgggttgagcaccttgggctgaacccctcatccgtggaccaggcaacccggcatcgcccacgtggagccgctgaggtgatcatgtgttctggtcaatgcttagataacagtttgagatgccgctctggcccctgggttcatggctccacgtctgattctgaggaggaggcttcggctcctttggattcacactgggttctatgatgggcccctgacgggagggcctgctctaggaggcatcccccaccgctgtcctggctcaggactgctttccccactcttctcatctgcaccctgggcgacaaatcccagcctcacagtgggaggggcctgggcaggacctgaaacaaagtgtcccagtgtctgctgttcctgggcaggtggggcttgggggtcccccacggttcaagccttggctctaggccttggctgggccttgtaatggcacccgcgaccctcagttgcctcactcattggggcttcgaaggcctctggtgccccgagggtccttcctgagggcgacttgaatacggcggtcctatcctgggatggccggcaggtggcagcgtcagcccgtctgctctccaccgggctccccggtagagttataggggattaggcggtgagttttgccccaaagggaatcgaatctagatcagaaccactggcgaagtggagcgaccatctgcccgaaacagcggagggaaggaagcgcctggagggggtctcagggaggtggggcgggagtcaggtctccatgtccttcctggctgaccaggcaacctgggagctctggttggttccagggttctggggtggggcatgggggtcctgccaggggagggggcgtttgccgcttagcacccttgcctccctgtggcagcctcctcttgagcccttgggacttttcacaaactctgtccctctcttctttggggatcgagg

SEQ ID NO: 32689 - DNA, 621 bp, Homo sapiens
tgcagctcatggctccctaatctaattccacggcagagcccagaaacgcctgctgacctgcttccgccgagagcagcagagcctgtgacggggcccctggtgggggcctgggttggctctgtgctgactgcatctgatctggctgggtgtggccctggttgtcagtggtcagctggagacgcatggccatctcctcagggactgccacctcccacgcctgaccttggccccggggctctgccaggatgcccagccctggcacctccctgtcctgggctctgcaggccaaactcctcccctggtatggggggaggcgagcagctgcccggaaccttccagtccttgttgctggagccagtagagcctgggcagtgggtgggaagaagggcggggttctccccagtgtggtcacgaagcatgggcatggccaggacacaggtggctggtgttcagccggggtctgcccacctcccattcccacagctgcccctggtgtcccggcctggacttggggatgggagagcctgtgctgtcctgtagtgcggggccagtacacagggtgggctgtgtggtcctggtggcagtgggacctggagtcctttcctcagtgggagctgagac

SEQ ID NO: 32690 - DNA, 363 bp, Homo sapiens
cctgggttcggcggggggcaggcagggtagccctggatgtgtctgctacttatacagcggtaggaaggctcacagtggtttcctggggttccccagctcagaacccgcctcagggagtgcccacctggagccgtgtgtctgattagggatacccgcgcactgcgggaacaggtcagggccgtggaatgctcgtaaaagggttgcgcaagcaggcctggccgagcagtattccaggcacacaaacgcagttattacgtagtcaccactggtgggaaaaaaggattcagaacttaacgagtttaaaacaacacatgagagacgctgaggcaggtgtgagcgaatgtttccaccggggcctgactt

SEQ ID NO: 32691 - DNA, 2665 bp, Homo sapiens
aggacacccttccctggctggacatctcagagagatgatgacaccaacaaccccgaggacaccacagcagcaaacatgtcagatgcaccaggagcacacagctcagagggaatggcctgggtctctctgagtcccagcttttccagggaggtgggaagcagtcagcggcaggcccattcatcccagtatttactgggcggcaaagacaggttgggcatccttttcgggggctggggctacaagacacaccgctgctcttgtgggattcacacacaagcagactcagcctacgaccgagatgagtgctaagagggagaggtatgtgaagccgcagcggctattcaaggggggtttctccaggtgaagctgcccccaggaagccctcatgcctgaaacatgggcagagtaggagagcagggagtggctggttcaaatcctggttctgccactttctagcccgatgaccctgggcaaattagttcacctttctggggcttggtatcctcatctgcgaaaagggagtaattcgcgttcctcccctagaggtggctgggaggtgtccgggagtcaggagcgtgggaaaaaggtctagaacagagcctggcccgccgtcattactgagagcacagccatcaggcaggagggtctgcagcggaccctggagaggccagggcagaagtgcaggccgccttaaaggccacggaaggcacgggtggcttttaaaccagaggcacgagttcccaggtcccacgtccacggccgcctgaactcacgcccggcgtccactctccagagagcggggcctgtgcacggactgtccggcccgcgggccacagctggccacgccgcgggaacgcgcggccttttcggggccactctgccaagggcttcccgccgagctcgtcctcgtctcgaccagaactaaggaccccaaatctcaggccagccaccagccaagcggcggagccggggcgcccagatgccgatgtggccgaagacataaaattccgccgaccctcccacctcgcggcgggtaacgctggaccccggcccccagccacccaggacggccgcgcgaactaccaggcccggcaggccccgctctggtccctgcggcgcctgccggtagctgtagtccggccgtcgccccgagcccgcgcatcagcgaccctgcggactacaaggcccgtgaggctgtgcgcgggcccgcggactacaaggcccgtgaggctgtgcgcgaggcccgcgcccccgcccttcgtccttcccgccgcccccgctcgccggcccaccgccggcgccccgcccgcccccgcagcccgcgcccggcgcccggcctgcggctacctatgtcgatggcgaagcgcttggcgttctccaggttgcggaagatctcgtcggggggcagcgtgatgctcttgtccagactgtccccgctgctcccgctgccgctcgctccacactccgccattttgaaagtgcccggccagctcatcagccatggagatatatgcgcatatatttgactgccaaacgccccctcgcatagattatgttaatgaggcgccggccccgccccttccctcccccacccccggcctctgaggtctcggccgctacagggcgagctagggccagtgctgggcaggggtccgagaggcccggggctgcgggcgggcgggcggttatcctccagagatcgcgcatcagcacagaacatctggactgatgttcttttaccgcgctgtccacaggcttaactcaagtgctctgagccctgctgagggaggccgcagaggccgcccacctgcttctaagggggcacgtgggtctgcagactgtcagagagccctgcccttcagcgagtgcctgctgtaagcttggccctgcacgccagggcgaatgtgatgcgctctttgctagggtgactcaatcctggcttcccaggggcgtgggactttcaatgttaaaagtcccatgcaaaccagaggagtggggaaccctgccccacctgggaggagccccagcctggcatgcacctgcgggtagggaagatgtgtgctgtaatggcgatccgtggaaagtgctgtggtcgggggaagccaggcaggctgcctgtgggcaagacaggtgcctgggaggctgcaggaacaagccttggaagcagctggagccaggacaggggtataggtggggcaggccagggttccagggtgagtggctgggaagccctgctggcatgaagagatgcgtcttctccagaggctctgggcgccttgggaaaaagcccagtgttggaagcagacagatcagcccctcccgggtaacccggggtcattactgcatgtctctggccctcagcctctgtctgcacgtggagaatgccaccagctgcctggcagggctcctgggagcacaggcctgtggggcggcacaaactccagggataatgcatctgtgtgcgcagggcaagccttcagggaggaggcatccttgcctgtgtcttccaagggggtgggtgtgtggctctggagggggagcctgccccagggaggcctgggtggaagagtggagcacaccccaggcggcttagacctctggcagctcagacccctggcagcatggtgtgccatgggccaggctggcaggaggtgccctccatgag

SEQ ID NO: 32692 - DNA, 1858 bp, Homo sapiens
gctggatggattttgccccttgggagctggtccctgggagccacaggcctcagttcttgcagactcagccaacaccctgtggcctgcctaaaaatacatgccctttctgaggcaagggatggccccgtgcaggctcctgccaggactgccagatcctgccttggcacggtggccagcgggcaggtgtccccggagcccatgccaggactggcgctgcaggccgtgggagtgtgcagcagcaactcggggcaaatgttttctcctgtttggcccagggccaagcccctttggctgtagcaacagatctactgcgggctgtggccctgggtcgcctctcagtggacacagcctaaggtcctgcgctgtcaccttgccccacccctaccttccggaagctagtgaaaggcctgggcggggggagacccagggctccgaccatgtccacccctccagcccacctccccctgcccctgcccctcacctgctttccctccatccctccctccccctgttcttccggagcaaggaccccacccttcttccggggtccagggggccactggcaggggtccctccctgcttaactgctaccatggccctgcccattccccttcacccctgcagacccgctccatggctgccaaggacaggcgtgaggcacagcagacgacactgtgttgggggctgaacaatcagattttattatggcggcttcggagcagtcccgtggcttccacgtgactgagagttcaatttctgagtacaaagtcgtgcccacacgcatccacccacacagaggaatcctttaaggatcatagtggaggcacccaccctccccagacagcccaccgtgagccccagccagaccaccaggcacactcaggagccttttggccatggccctcagggtcctggacgcccgtccggggtgatcactgtttcctatgaggatacagctcgagttcggccttcacaaaaggcaaatgtgcccgcggcacagcccgcctgccaggggtacgcccagcagctacgggccctgaagaaagtcctctacaggctgggggcagcagtgtgcgagccccggcactacaaatatcatagaaccccgggcggccggggacttcccagaagtcacttgcttaaatgcaaacacagaacaaccccatggggtcagacacttggcagaagatgggccctgattgtcctaaaacggcagggactctgcacacacattctctgagaatggggctcctgcgggccggccagcttggggccagagccttccggagaagggcgcgtccaagcccggggcggacgacggcgggaaggcgcttccctacaggcgagaggagcaggctcgccctctggtcgtcgggccgcgcgcccgcaggtcccgccgggtcaccagggccgccagaggccgcaggcgggctggtgcgcggcggcggcggcggcggtggccttggcggagagcgcgggcgggggcgcggcgcccggcgccttgggctccttggcgggcgcggcgggcgcggccgggggccgctggaagtggtacagcagcttcatctgcgtgtcgctggcggcgtggagcgtcaggaactgcacggcctcctgcaggcaccacgagtagccttcgctgtagtcctggtgcaggctcttggggccggcggcggcgacgaaggctgcggggagacgcggcggcggtgagcgggcggcggggcgcgggggagccggggcgcggtgggaactcggggcgcggggggcccgggcgcgctcacctttgctgtgcttcaggtagctgacagccatctccaggatgtcggccttctccagcttggagttgggctggtgccgcgcg

SEQ ID NO: 32693 - DNA, 3436 bp, Homo sapiens
aggtttgacggagggacgtatgggcaggctcctcctcccggtcaggtcccacgtgaccccccagccacgcctacccacatcgccctgctggaggccgggggcggggggagcggggagtggggggtgtggggggtgaggggggtgggggtgggggtggcccggcccggagctagggggcggggccgtgcttcttctggccctggcctccaattggctgccgggcgtgggaaagcgtgcaccactgcctggcgcccataaagacgcctccaccacctgcgccgccgccgcctcccggccgccctccgccccgcgcgctcgttgaggccggtgctccagagtgaagagcgtggcggtgcggcggtagcgcagggccctcctgcggggccaggcaggggcgggtgggcgctccttgccacctttctgctctccctgctgtccgagaagttcgtgcggtgccagcccagctcccagctggggacagaacaggaaacgtccccggcgagcctggcgggggtggcggcaggggtgtctgtcgcctgcgctgggcaggacgcgcgtcctaccggcctcccactccgcgggcctcaccagccacctcattcccggagcccgggccgccgagagcgccgcggatggacctcagggaaggcctggcgcgccgcctccgggaagccttccggccttctccctccaccgagtactggggagtctcaggccacggtgaatgaagagcaacgggccggagagacctcggcctctgcccaggagcagcgcccagcaaccccgcccacaggggacccggtggacgccctggtggccactttgccaggctccccatctcccagcgaaccagagaggatttccgttcccctcctgcttggtgcctagcgccagggcggggcgtgggctgagcagcccctcccatggagggagcggccagtctacatattggaggtggggctctggggaaagggtgttgttaggaaggcggtttgaggcagcgggaggtggggatgcgcccggcggggaggggcaggtgtgtggggagggcctggggagcgcctccccagccgggcagcgcttccccagccaggccccgcagctggaccccggctccgtccagcctgggaaaggactccacggtttatgctgaagtggtggtggggtgggtgaacgctgcgcaatggaagggcatggccctgtgctaattgccccggggtgtggggctgtggaggcactgcgggggggatgtgctgtgtcagttgggcaatggcggccaactgtggcgtgcaggccttggagctgcccctccatggagctttaataaaggcactagccctgcaatttctgcctgagtttctggcccacagcttggccgactgcagcccctgagattggaggcttctgctcaagacgtgggcagggagctcggggctccctgggctggggccctgccccgctggcctctaccctggcccctgctggaaagcccgtcagggctgctctgagctggggacagctcctccctgcccacagcaatctgggggagccccggtttgtccagtgcccctgtgagccctgctgtgtaccagccacctgtgggagtgtccgccagtcacctcccaatagctcgggaggcagagcgacatgactccattttagagatgagcaaacggggctcctgcactctgggaccatgacagagacacaggaagtgagagtgggctgaggccctgcagcagtgggggccggccttggaccgtgatccaacccgaccatggctgcccaacccccacgggctcacctggcccctcatcgaaccatgtattacccgaataatttattctagtgtctgggcccagccccgtgtccctcactgacaaccagaccatggagggcagcccttgtgttttcccagggggaggggagggaggagggggtggattcttaaagggctgcagtgagtgtggccccaaatgcacacccagggttaggcacgcaggtgatggcacagggagcccaggttctaggaagtggcacctgcggccggggaggcagggcctggattttgctgccccctggtggctagcggcctgtccaggcaaaaggcttggacctgcagcccctgtggctcagaggaagagacagaggaagagacagacagaggtctgaggtctcccatcagaagtctcagctcccaaggcaaattcagaggtggagggtcccttggccctgtcccagctctggcagggcggccccccacgtcctggcctgctgccaggggtcgcgcccacagccctgcaccgagcagggaaggcccaggcctgggtgggtctttccgcaggatcctgggatgttgcttaggggaagccgagaccagacgggcagtcacctgtctgggaaagcaccaggccctggccgggtgcgatggatcacgcctgtcatcccagcagtgtgggaggccgaggcgggaagatcacgaggtcaggagatcgagaccatcctggctaacacggtgaaaccccatctctactaaaaatacaaaaaatcagccttgcatggcgacgggcgcctgtagtcccagctactccggaggctgaggcaggagaatggcgtgaacccaggaggcggagcttgcagtgagccaagatcgcgctgttgcactccggcctgggtgacagagccagactcaaaaaaaaaaaaacaaaacacaaaaaacaaaaaggaaagcactaggccctgcggaagtccccatggtgacattcacgtcctggccacgtgggcgggtgtaggggagggaccgcagggaggcggaagtccttgttttttcctgcagtcggcccaggcaggacctgagcagcctgaagccatgagtcgctgccactgctctttctgtgcctggtgcagccccagctcatggggtctgggccgcctctgatcccatgccccccacttcacacttggggttctggcttccccgctgtgagcctgtctctcctccgtgggacaggccagcctgggcagccatccctgtacccactgcccagcatatagtgggtgcctcataaatgtgggctgaacagagcctgcccctggggccccaccctcactgccaggcatacagcaggtgcctcataaatgtgggctgaacagatcctgcccatgggccccccgacttccagacataaagtaggtgctacataaatgcaggccaaacagaatctaccctgggggcctccacttccctttgatgggggcagagaccctctgccgggcagcggccacccagtgcctgggacaggtgcccccttctcccaccctggcctatcttggggcatctgagggaggacagggctgtgccccccacttcatcctcgagggtctggcttccccacctgtgagcttgtctctcctccgtgggaggagcagcaccgtc

SEQ ID NO: 32694 - DNA, 2185 bp, Homo sapiens
gcagatgggcttgctggaggtgggggttcctggtgtgcagcaggcggtgccagagggggtgactgggacctgctctgggcaagcacaggcggtgcgtgacagacctgggcttccattgactgcatcacgtccagcagcaggaaggggccacgggggcactggcgtcgtcacgtgggtcacgaggttccatgtgatgcagggagcgaggccgtcacgagggactcactggtgcctgccttggggctccgggactgtgggctgtctccatccggaggtctccctaccaccaggctctgtggggcagggaagcccagtggggtgcagggagccaggaagctggggtggggtcagggcagggtccacagggagaccgggcgaggctggcagccttcccagtccgcgcagcgtctctgcagggggagcaagagctgcccttccacccctcccaggggacgggtaggggcactctgggcttttcccaccccctcacgcagggacacaggcctggtgggtctatgactgaaattggccagaccgcattctggtggttttattcggaagggaagtttaccctgttcagcagaagctgagatgggaacaggaaacccacagggcccctttattcggcaaaaatgtcagtcagcgccccggggagcagccgagggtccctgagtgtgtgagtgaggtggggaaacacagatggactttggggggctcccccttctacaggaaacccggagtggactggaatggtgcagggggagaactcgcccctcccatcgggcgcctccttcataccggcccttcccctcggctttgcctggacagctcctgcctcccgcagggcccacctgtgtcccccagcgccgctccacccagcaggcctgagcccctctctgctgccagacaccccctgctgcccactctcctgctgctcgggttctgaggcacagcttgtcacaccgaggcggattctctttctctttctctttctcttctggcccacagccgcagcaatggcgctgagttcctctgctggagttcatcctgctagctgggttcccgagctgccggtctgagcctgaggcatggagcctcctggagactgggggcctcctccctggagatccacccccaaaaccgacgtcttgaggctggtgagcccccgagcctcctctccgtctgctcgcagatcccagttctgaccccagggcctcccacagatctcttccccatgcccctgtcctggccgttgctggctccggcgtccagcccgtcccctgctgcctggggctctcgggtcaacccagacccccagcactgggctcaccacagtggggtgagcagcagagccacagccctacccagcagacctcctcctgcgtgtgtcccccactcaccactccgtccacgggcagctggtgagcccccatttggccggatgtgggcacttctgggggctgggtgtctctgggcgtctctgggcggggccctcgagcaggtgacccaactccccggcagccctgaccttggtgacaggtgataagatcagtgtgcagcagggggctggacccaggtgggtggggtggggatactctccatgctcatgtggcactcctgcctgtccagccactatccccatcaggggcccccgactgcccatcagccagcccaggaacgaggccacggcagagccaccctccccgatgtggccctgatcagcctgtcacccactgtctggcttgtgagcctctggggcccatccctggctgcccctgctggctcttcaggggtcagcaggtccaacctaggccagcaggggggccggcaggttgtctgcccagtgggctcaatgctcccaggtgtggggtgtggggtccctggcgagggcagagttccagttcccagggctccgcgctgccaggcagcgtcatcagggctggaggaggggcggtccccaccctatcccgggctccagcggtcggcaaggttgttccatgagcctggcctggggcccgcttctgtcctctctaccaggcactgccgctcctccccattgcacagagggagattcaggctgtggggccaagcctggcagagcccacagggcagccagggcatctcccaatgcctgtcctgacccccttaggtgctgtatctcaccttcctgggagccccctgctac

SEQ ID NO: 32695 - DNA, 833 bp, Homo sapiens
ggcccagccccgaagcccctgggaggtccggccccaccctgggaaaagtccaggctgtgcccaactctcagaagatgttgacacccataggggccctgcccctggcagactgctcgggcctccttgggccgctccttccctgatagtcacaggctctgaggaggtcgcattccacctgctccaccgcgggctccggcaaacccaggtctccccaccccagccactcccggcccagccctgccctgggttcacttcctcaaggtctggtgtcccctcccccgagcactgtttgcttctctgtgtatgtatgtttgcccacatgtgtacacttttttaggctgtgttaatctgttcaactggtcaggacaaagtcccacagactgagtggctgaagccatgggcagcattttcccacagtcctggtggcgagaggtcccggagccagcgcaggcagggttggttccaggcagcgtctcttcctggcttgcagaagggaccttctcattatgtcctcacccggccttccccttggccagggcagagagagggcgcttggtgtctctccctccctacaagtccacctccaaatgcagcatcactggggcttaagtctccacacagaaaatcaggggagacacaattgggtccagaactgtctcggctggaattcgggttcccggcgtggctccaccagggcagcagccccagaggcaaagaggtctccttctccggctgagctcatccctggggctgaactttgctgagaggatcagctcccaggcctggccagccctccagtgagcaccaactacgctggctgcagggagtgcttg

SEQ ID NO: 32696 - DNA, 1033 bp, Homo sapiens
ctgttcagcccacatttatgaggcacccactatatgctgggcagtgagcactgggatggctgcccaggctggcctgtcccacggaggagagacaggctcacagcagggaagccagaaccccgagtgtgaagtggggggcatgggatcagaggtggcccagaccccatgagctggggctgcaccaggcacagaaagagcagtgacagcgactcatggcttcgggctgctcagctcctgcccgtgcccactgcaggaaaaaacaaggacttccgcctccctgcggtccctcccccacacccgcccacatggccaggacgtgactgtcaccatggggacttccgcagggcctggtgctttcccagacaggtgactgccagtctggtctcagcctcccctaagcaacattccaggatcctgcggaaagacccacccaggcctgggccttccctagtctgtgcaccactgcgtttgagacgctgggctgtgacccctggcggcagctccactctgctggagctggggcttgttttaaattatgacctaaaactctaaaaccctcgcctgtaatcccagcactttgggaggccgaggcgggtggatcacgaggtcaggagatagagaccatcctggctaacactgcactccagcctgggcgacagagccagactccgtctcaaaacaaacaaacaaacaaacaaaacactctaaaaccctcaaaggaaaacacaagcctcttgatgttagacttggtagtgatttcttgatttcttgggtatgacaggaaaaggacaggcagaaacgtgtaaaatagatacatggggctttacaaacaagaatgaatagaatgaaaggcaacacatggactgggaggaaatgtatcagataaggcattccgtctagaatttgtaaagaaccctcacaccccaacaacatcaaaaacaaaccactgggtgaaaaaatggaaaaggactagaatagagaagacacacaaatggccaccatgcccctgaaacaaggctcggtgccaccaagc

SEQ ID NO: 32697 - DNA, 2108 bp, Homo sapiens
gctcctttcccactctcctctgcccgttggcttccagtgaggctcctgcagcgatggcgttggtgggagatgccaggcgaggaattgatctcgcattctcgtttctgggaacgtctctgaaaatggctgaatcccgtctgggatcccagctcccaaggaggcggcagcttgctcactgcttgcacagccccagacggcagaggggccctctcctgcacagcctgagacagtggaggggccccctcctgcacagccccagaagatagaggggccccctcctgcacagcccgagacagtagaggggccccctcctgcacagcctgagacggtgggggggggcccttcctgcccagccccagatggtagaggggccccctcctgcacaactccagagggtagagggcccctcctgcacagcccgagacggtagaggggtagccctggtctctgggggctgcactcctgggctctggagctgccacagctcctccctcctagtgcttccccttccttgttttgctttttgccctttctgacatagtgacgacttccgtttcgcagtctggaccttcaccaccccagggcgagggcacaggcgaagcagcagcacccccccggggcctctctttatttggaatacagtgtgggggctcccccttccttctccagcccgcccaggcccctggagctgtcctggggcctggggagtgaggacccgtgccagcagcacagactctgccaggccgggcccgctcaggtgggagcccaggccgggtgaagctgtgacccggccctcaccccaactcggtgacaaaagctatcacagggctgcagtgggggaggaacaggacgcatctgccaggcacctgacccgcagtgcacttctgggagctgtgcttatctccccggggtctatttcgccccaaggtttggcgggttaaaagctgatatgcaaccggcacgacatgaacagtatttcatgattaaagacatcgcgtccatgtataattgagatgctgccgcatttgcggggattttcaagcgaaaaccaggccacgtggaaaggctaagccctcgcacccccccgccccccactgctgggacccccgccccgcgggagaccccggcccgcggtcccctatgcccgcgacccctgcgctcaccctctcccctcaaccctgagtccagcccagtctcgcgcgaggccgcagggagacccccgccgctccctggaccacccctgggcccaccgtacccagccgctccccggcgccccccgggacgaccccgagccggctgcccgcctcccgccgcattccgcacaggcgcaccgcgcaccgagggccgcaccgcccagctccgcctgctgcgccaatggccgacggggtccaagtcggcggcccaacggagaggcggggctaggggcgggaccaggacgcgggacagcaactgtcccgcaaggcccggattgaggaggcgggagggaccgaagcaggcggacccaggatttggcgccgcgatctcgaggcttggcctggagtaggaggggaaacaaggcgggactaggggcgaatccgagggggcggagcagggctcggggtgcggtcgggggcgtggccggggcgcgctgcggccatcttgggggcgggcccggggcggagacgagcccgaaggggcggggcctcggcggcagcaagaaaggcgggaccggggcatctcggggcggggcttggggctggatctatgagccgggagcggggatccaggagcgaggagccgggagcggggaacagggagtcggggagccgggaaccagggctggcagcggccgccatgagcacggtggaccttgctcgcgtgggcgcgtgcatcctgaagcatgcggtgaccggggaggtgaggccgggtggacgcagggcggtgggcgcgtccctggctccttgcccgggcgtcctggcagcgatggggtggtgggggccgcggggcctgggcggggctgggggcaacggggcgcgcccatgacccagccgcccggcaggccgtggagctgcggagcctgtggcgggagcacgcgtgcgtggtggccgggctgcggcgcttcgggtgcg

SEQ ID NO: 32698 - DNA, 1423 bp, Homo sapiens
gcccgctgcttctggaggggctggctgaccatgggcaagggcaggaagggggacccagggtagaggacccctccctgcaattcccactgccctggaacctgccaaagtgctgttccgacccttggcccaaggcctggcatccttgcccactgctcttctccctgggcctcggatcagggacctggatttacctcctcatggtcccctcctggcagccctaccgccccaccggctgggcccaggttcccttgactgggtgaccacaccggcctcctccctcggtccctctgggccaagtcacctctccatcgggccctctgagggggctgctgcccagcccttccactctgcccaccttctgaaggctgctccaggcctctgagcacgtgcaccctagcccctctccctggggctgctggacggagggcacagcctgtgctgtgggctgctgctggccaggcctgcctgccccccccactcctcccgggcactttcctgagcccacccaggcccaatcgcctcatctctgacccagttttttcacagagtcaaccacgaccagaaatccgctcgcctcgctgggctcctcctccgctcaagaatctgcaggggttccccgctgcctgaggaacacgccaaggtgcaggccccgcctttctcgctggcgctgcctctcttccagcagcccggcggtcctcgacgctacctcccccggggggcgcagcgcacccaggaccccgccaggcttggccgcacggggcgaagccgaggcccacgcccggggtccgtgcagggagcgagggggtcccacggccccggctttgctgctgggctcccgcagggcacagtgtggcctcttctgccagctgtgagcggcgctgagcagggcaggggctcgaaaccccgtccctcgcctgcggtgcggcccgcgggaccgcccctctccgggcggaggcacctgaccccgacccgtagttcacggcccggggtggtagtgaagcctcggcccgcgcaggacccgcacatttgggccgggtccatggcagcaggagggcgaggccccgagcagctgtcggaccccgggagcccccaggccgccccagtggggaagggcgctcaatccgaccccagactcccctgagcccgcggctcgggccgcgcaggcgcagtgccacccggagggggccgcctgccgaggggcggggcgcaggaagcggggcgaaaccactgttggctcatttccgggtgggtccccgtctccaggcaaccatttcgcgtcctgcagattcttgcctgtgccgggagccgcctcctggcgccgcagcccagccgtattctgcagcctcggagacccgcgtccagccccgcctccgggctcggtgacccccgttcaggagaccccatctagccgcctcctctgggc

SEQ ID NO: 32699 - DNA, 545 bp, Homo sapiens
aagttagcgaaaagttgacgaaaggggagagcaactttttcctccccgctcgctctctccctctctctctccgagtggctctcagtcctggtcaaatcatattccgggcttttgaaatagtgggcgctagagcaccgcctttggcgtccgccagccgggcgcagaggagggagaccccgagccggggaggggcggaggagggggcgcgggccggcgcccacccggctccgcgggcgcaggggcaggggtggcgacggcgggacagccgcagccacttggggagcaaaatggagacttttgcccgggctgggaactgtggtcgtgaagtttatccccggctgtgccccgcgtggtggagggcgctcctctgggacgccggcagcctgcgcgggccgccggggcgacagtgcctccgacaggagggacccacccggccacctcccgacccgccgctgccgccctcgggcccgcgtggacccctctgtacccgcttgcctggcacagccgggcccggcggggacagagctgccccggccaggctgccc

SEQ ID NO: 32700 - DNA, 629 bp, Homo sapiens
ctccgctccgggcatgacctcggactcttgaggagcctcagttcggctgtctttctgcagttaattactaggacaagggaacacatccaggtgcctttcacagggacatcgcccatgagggcagggactgcaccctattgaccctatattccaccccagctcctggcacttggccggggctcagacacgtgttgagtgaaaaactgcacatttgggcagagttaccagcaatgaacctgcctctgtagaggatcctaagtcggggcgagggggccctcagtgaagcctacagaaagccaagcagcccaggggttccctctccacctgagaagcagcgagaccctgtccaggtcagcgggaccagcaccgcatcccaggccacccgtgtgtcagcacataacctttgaaaacaccgtgaatgccggctttgatgataatatgtgggtaaaggttgtattgctatctgggtgatgattcatccgtctgtgaaccgggacaaggaggtaataggaaggcgcgatggccaggggcaacgttggaacgcaaacttatcagaggcagtgaactccgcgctgcactaaatagaattccattattgtttcataaatagagagattgaagtacccagg

SEQ ID NO: 32701 - DNA, 1006 bp, Homo sapiens
ttacttccttgttcctggatatagaaccgggcagggtgtacacctacgcctgccctctactgtttgttagctgtattgcagcaccgaaataagaacacacatgtgccaaattataagacacacacagtgggctgtgacaggaaaagagactgatgtctgtgaaggaccaaaccctacaggttcctaggaatttcactgtgacgcattgggattttcatggtccaactcaagagtagatgtgtgtgtgtgtgcgtgtgtgtgtatgcacacgtgcacacactggtgtgaacatgcaggtgtatgtgagtgagaatgtggggcttggtctctgcaaaggctgtgtgcccagggttgcctcccaggtgcagtcacaggcagcaggtggggtgaagggcctgtgtgctggctgcctcccgggttcttggagaacagatcatttcccaggtgacccaggtcactgttattatcgtctcagggcacaaagtctgcatctgtcccccggacacagagaggggcagagaggaggaatcaacaatgtggacctgcctatttaaggaaaactctcacgctgttggaaagcccagtgccttcctgctgaacccacccccttggccccgcacaaaggtcctcctgagataaggccaagttctttgatctccatcgatctccaggcagaggtgactcagaggccctgctcacacagcccagctgctgctgtggcaggaagagcttctgagctacacctgctcagctggggctccagccaagtcctctgagaggagcctggctagctcaggtcctggggaggatggtggttttgagggagggggctggcacgccctccctgcccacttgatccagcccccagccaggcacatggctgtcccaagcacccgagggagacgaaacgcgtgcccttcctcatggagcctgactcgtgtcctctgcgagggatagagcctggacactgtggtttgccctcatcacttaccatgggagctgcgtg

SEQ ID NO: 32702 - DNA, 1688 bp, Homo sapiens
ccggggccctccctcactttcacacgggttcccagcaggcggagcaaggaaaggccaggctcggagtccaggctcagccttgtgcacgagggcgagcgccttcctttccaggactcggtccttctctgtgaaatggggatgaccgcgactcaaccacaccaaaaaggtggccagagtgctttgcgccctcttggctgtctttggccgcctggcttccaagaatccagagggccgggcctttctacagcaaacatcggtccccgcagggctggtctccttccccgaaggcttcctggaggaggcagtggagcggggcctggaaggacagtgacgcaggagggagccgagccgctctggccccacgcctggcaggcgactcccgggccggcctcgagggggcgtgggcgcggggagggaaggcgcaggcaccgggcggcggcggctcggcgggaatcgagaggcgcgatccagtccgggcgatcacgtgggctccagccggcccaggtggggctgtgacctgtgacgcaggcggcgccgccacaggtgcccgggacgcgccccgccccctccccggccctccccgcccgggccctcggacccggagcagccccgcccgcccagcgcccacctgcggggccgcagccgccgccctccagccagaccgcgcaggaagcggaggaggcgccccgggccggaccgcgctgccgcaggagcgaagcggctgcaggacaggacaggacccggcgctggaagctgcaccgccagcgcgccgcccctccgtccctccgccccgcggcgcaggtgagcctgggggacaggtgagccgggggacaggtgagtcggggctcgggggagccgggtggggggattagcccgggggaggcgccgggaacccggggcgcttctcctccccctcgcttttcccgcaagccccgccccggcagccgcaacaacttcgcgaccctcctggggctccgccggggcgggagaggcggggctcgcgggctgagccggatgcgactttggacccgcccccccacacacaccaggcagccccctgcttgcccccgcccgctcgctcgctgccctctcttgaccccgagtggccgcttcctcttcctaaaggaaaacttccatgcaaccggaacctgggttcagacttgagcgccgaggactctggaagccccagggagtttgaaagagcatggggtggggggcggaacagaacgaccctcccgggagctctttggggaatctgacacccaaacctgctttggccccaaaatttcagaaaagccccgagaaggaagaaccccacacccaagacaaacccaaaccatacgcccctcccccacccttgaccttggtgggcggtggcagggagggacctgctttgtctcccctgagaagggagatggggagggggaggggtgcgtcccacctaccagggagccgtggccgcttgtcttggccgctcagcctctttctgcgtctgtgaaatgggaacagtatcccttttgagatttgagcaggtggggggactgagggagtggcagcgatggcaggtcttggtgacctctgcttctgacctgaatcaaggcctgaatcttctctgtgtccttgaggggaacagtctgtgcaccacctaacatgggggcctagggggtgcgtgtgggcctggctggggg

SEQ ID NO: 32703 - DNA, 855 bp, Homo sapiens
cagccgtgatggagtcctcgtccaacaggcagggagggggtaggaatgcccataggtgggggtcactgagagcaggctgtgcctttttctgggaaaagctgaggagcccagagcagtggcctccggggatcagggcagtgtggaagaggggacgctgggttttcatgctaagtctttggtgctcgttgacttttgaaacggtgtctgtgtcttcatagttctttagaaaaactgaaaaacagaaggcaacgggtgcctgccagggccacagctcccgagagccggctcctggggggctctggactgcccacacccctcaggctctctgttaggcctgtgggtgcggctgcctcgctgggagcggaggtcacacccagcaatggctcaggctctggctcgcctgacaggttcccgtttgggcgccttctggcagtggagcagactttgatctctcctgggacagctgctgccagccagggccaggacaccgtctcagaggacgtggtcagggacagtcaggcctgggcagtctggccccattaggaaggaggaaggcctctatgagagtcagaaggttgagacagtgcaggctggggtctctgtatttgggggctgtggggtcttggggacatttgtttggtgggagatggggcacagtgatgttgtgggcatgtcaacccacatcaaatgccccccaggtaaagtcatcacatttagaataaaaggaccgcagggccgtagaccgcctacgctggccacccactggagtgtgctctgcttggcgtgtagacagaagcctaaaagaaatggatttctcggccgggcctgggtaaaacgcagacaccctactgtgag

SEQ ID NO: 32704 - DNA, 1191 bp, Homo sapiens
atcaccaaggccttcttcgcgaagcaagcagacgaggtcacactgcagcaggcggacgtggtcctggttctgcagcaggaggatggtgagtgcaggggcgttgggcacagatgggtgggaacggacaggcgggcgtgagtcagcgtccagcctggccaggtccagagcatgccgggctgcaggctgaccatgtgctcaccctctctcgagggcttcctcaaagggagcactcccacatccccaaacctcagaatcaaaagcaggttcatggtcactgtgtcccacgtggggaggaggaggtgtctctgccctcccaggggatccccgctcagccaggcccagcacgagcctgcagagggcaggcagggctcctcctcatgccgggcagcgctgtgtggggtgtgctcagcccagcacccttctcagtggcgagcacctgagcaggggctgggtgcccggtgaccatgagcaaggcctcagcagctgtctgctctgagcaggagcaggtggtcagttctaggagaagcctggccctggtgtgctcaggcatagcagctcagaggggccgggggacccacggccttcccctcacctccctcccacccctatccgggttcagggtggctctatggcgagaggctccgggacggagagacgggatggttccccgaggactttgcccgcttcatcaccagccgtgtggccgtggagggcaatgtccgcaggatggagcgtctgcgggtggagacggacgtgtagccctggcgaggccagccggcggcagcacagcctgtctccaatcagcaagtggtcgtgcctggctctagagagcgtggggagctggtctcaaggacccagcatggttccctggggcttcccaagagcctgtggctgtggtgccgggctccagacacttcacggaaggaagatcacatgtccccagagaggcacccccaggcaagctcgagggggccacaccgtgtcccagggagcccagcctattcccgttggctggctgggcccctcagctgctgggccccacctccccactgcacccagggggcaactccacctggactgatgggcacaggaggcaccaatagcgattattgggggcaatgcgaggtctcctcctatgcccttcctacccctgagtgggacaagaagggccctgagtgcccaggagtgccc

SEQ ID NO: 32705 - DNA, 640 bp, Homo sapiens
tgagccctgtagtgggaccagggcccccaggaagcactggcccccgagactcagaggccagtgtgggggcctgagcctgaggttagcggggccccagcaaaggccgaaaggagcttggaggcccctatgagtcaggcgacaaaacctgctcattccagggacaacggcccaccctggaggcaaatccactgtccctgtccagccccaggccaagccccacacggggcagggggcaggccagagaggccccagacagctgcgacatgaacctggggggagccatctggtgagagacgagtgggctcagagagcggctattttaaggaacagctgggccaggatcctgctgctgccctcggctagatacgagactatggactttggcagcctcacaagagaactgtcagcacactggcacacagcgacacggctgtgccaacacgggctggttcaccaggagcctggcgagacctgcagtgtctaccaggctgggaggtggaggagcctcagggagcccatggggcccccagcgaccaccacccacgtcccacagctcccagcccaggactacacaggcaggtggacaggcatggctgggctgcctcgaaccagctgcctctgcagaaaccacccaagacgc

SEQ ID NO: 32706 - DNA, 2180 bp, Homo sapiens
caccgctacccagcaaactcctccatctagaccagccagcattggtttcttccactcccccagctgccgcgtgggaggcgccactgcaaacttccctggggtctcccagctgctcagagatccccatgcccttccctgatcagctccctgcccggttctcatcccggcgattctaaaccgtccatctttacaaatactccgctccatccccactccctgactgaagtaaacagatgtatcctgaactcctcattctccccccatctcactctcctcgcctgtgtgcacctcgcctcgtgtgtcttcctcacctccgagcagagggatctgtcctcctgcccgaaggtaaccctgacccctggactctgcgcctccttcccgcagcctccaccagattgcgggtccgttcaccgcccccctccacacgcgctgggggcacctccgggagctggggctagcgcagggcacacacatgttccacctcgaactgcgagcgctgaccgggatctctgggcagccctctctgtgtgcactggcttgctgaaggctcgcgacagcctgggcccgggcgcgcattccagcactttctaccctccggcttcagagtgcattgctctgtggatccgtcacgaataagccgtgtgtgaagaacgccaggtcccggcagaagatcgctgcccggcgtgcgaactcccccacggtgcaccagggccgccgccctgcatcctccaacctcagctccccggcaccgcgaccctccgtgcagtgcgagcccccgatgggcgcgcgcccccacctgcgctccagaaggccgaagggggcatcccacttgcagggcgggtcacccgctttccccgcgggccaaggggctccaagattcccagcccctccttcccagccgctccgcgacaccctggcaaccggcttcggccccgccccttctcgttgtgtaaacaggaagtgagcctgcgcgtgacggtcgcttccggcccggcgaggggcgggagcgattgtgaacggcggcggggcagagccaatcgcggaaaacggcaggaggagagccaatcccgagggtcggcggacgcgggaaggggcggagccagaggcggggccggcaaggcggagccaatcgcggcggtccgcggggcggggccgggggcgcggccgggtggtggcggtggctgcggcgacggcggtcgcgtcggcgtcagggtcggggtcggtaaggggtgcggcaatgctgcaactgcgggactcggtggactcggccggtacgagccccacggcggtgctggcggccggcgaggaggtgggggcaggcggcggcccgggcggggggcggccgggggcggggacgccgctgcgccagacactctggcctctcagcatccacgaccccacgcgccgcgcccgcgtcaaggagtacttcgtgttccgggtgaggcaggggccagggccggggcgggggccgagggcgcggggcgggatgggggcgggtggggtcggaggcgggcgccgggcggtcccgcagggagcgagctgtgacctgtgatctttgcccccgtcccccaccccgcaacccgcccagcccggcagcatcgagcaggcagtggaggagatccgcgtggtggtgcggcccgtggaggacggcgagatccagggagtgtggctgcttaccgagtaagccggggctgcgctctccttggtggggggactcgccccgagccgccgcgcagcaccttgcgaggacttcccggggtgctcgtgccacgctcaggcgccccgtgccgcccctgctgcccttccaggcgggctggccttggctaagtcgagacagccgcgtccagtgtggactgaggcccctcctctgcctacagggtggatcactggaacaatgagaaggagcggctggtgctggtcacggagcagtccctgcttatctgtaaatacgacttcatcagtctccagtgccagcaggtggtgcggatagcgctcaacgcagtagacaccatttcctacggagaattccagtttccccctaaatcgctcaacaagtaagcctgttcagagtccagtatcactggacctaagcaccagagtggaccttacaattcagcccttttaaatcagccccccaagcggtgtgtcttctctgtcattaattataagcacaaaggctc

SEQ ID NO: 32707 - DNA, 1061 bp, Homo sapiens
atttattcggcatgtggtagaggagaagagaattagaggagaagtagagatgacaaagtagccacaccacttaccagtttacaggcaacagaatcatcaatttgccttttgtgacaaagtaacaacaaagagccgacatctcctataccctcacctgtgtgcagtcggcactgccgatacccacctttccaagggcacctccccagaccccccacctgtctacggtatcttcctgggtcccgcacctgcccgggcacctgccggggtcctgcacctgtccggcccccatatctgcttggggtacctgcctgggccccgcacctgcttggggtacctgcctgggccccgcacctgcttggggcacctccccgggccctccacctgtctagggtatcttcctgggtcccgcacctgtctggggcacttgctcagacactgcacctgccccgggtacctgcccgggccccgcacctgtccgggcaccgcacctgcaggatccccaagctgcctccacccacgcggccgcccccggccctgcccgccggggacgctggcaccgaggatgtcctgcccgtggcccaggtccccgccgctcaccaggtacttgccgtccggggagaacttgcagagtaagctggagagcttgaatacctcggagaagttcatggccgccgcctgccgcgggcgccaccctgcgcccgaaaacccgcgggacccctgggcgcgcagcaggctgcaacagccgacgccggcctccgaggccggaagtcagaaggcggaagtgaactgcagcctatcagcgccgccggcttccgcgcggcattgtggggcttgtagttcttgtgccgcagggctttaaaggaaacgcccacgtttcttccgaccagggatttccgacccgagaaccttacctcaaaggccgggaggcctttgagcacctccagctagggctgctgataaaaatgtagaaagcacagtaaaatttgaatttcagattcacaacaaatctagttataagtatgttcccaaatattgcacgggacatgctaatacggaaaaat

SEQ ID NO: 32708 - DNA, 559 bp, Homo sapiens
atgagacggtctcataggtggaatttgctgtgaaatgccccaggaaacaaaaagccagaggtcagagtgatgagagctggggacgggtggatgggttcctgggccgttccctgtagtgctgagtgtgcttggaagtgtccacaatgaggagtagaaacgagtacaaagctgggtggagacagccctgtcctggctgccctgagctcggccctgtcagtcgccttgaggagggttggggggagcagggatgcagggtggcgcgtgcatgccaggtggcaggcggcaggtgctggctccaggcccgtctccagccccagggctccaggccatgctccgcccccagctgccctgcagctccaggccggccacgctgccgcctagtttcgcaactccaatgtcatcacctaggtgacagggacgctgctgccaccgcccgcctgcgggagccaggagccagccgagggccacttccacctggccccaccgaccctccggggcccaggcttagccaaggtaggcttgggcttggctcgccctcctctcggcctgagtcgggggg

SEQ ID NO: 32709 - DNA, 505 bp, Homo sapiens
ctgacgacctctatctaacctgtagaatcaacccggctgatgatctctatctaacccgcacaatcaacctggctgatgacctctatctaacccacacaatctaccaggctgatgatctctatctaacccacacaatcaacctggctgatgacctctgtctaacccacacaatcaacccggctgatgacctctatctaacccgcacaatcaacccagcttttcacagtggactggcgaagggtggaaaagggcaagggtcacctccagtctctggtcgcagctgtctgtgcagtgctggctgacgtcctggtcgcagctgtctgtgcagtgctggctgatgtccacgctaaccacggcctcacagggaaacttcatgctgatcacaacagcatctgcatcttttaaggcggccatatctaagcagaagaaaactttagatgatacaaaagttgatttaggcaaatgagaaactgttttgtttggttttgtttttgagagaatcttg

SEQ ID NO: 32710 - DNA, 977 bp, Homo sapiens
gatgcggtccctccgcacgcgcacgggcagctcgcaggccctgcagtaaagggtctccaccacagacgtgtccccagagtcactgtgctcaatcaggtgcttcaccaccaggtcggtgaactccgccgcgtagtcgtgtaaagccttctttttcccgcccattgtcgggtccgggatggaaacggaagcagcctcgacccccgaccgagggacccgtgggatctgcgctcaccgccctgcgagcagaggcgttcgtgtcggagcccccacacctggggagcggggagctgcggtccctggttgtcccacaggagaagggggagggaacggggcaggcggggaggatgagcgcttccgcgtgcagcgggggctggagtgggtccgtccgagctggagtggtctccgaggggcggcggatgctcggagggggcggatcccttagggctgggggccaggacgatcccacccggagaagcctcgcgggcgagaagagggtcccttcctgcgggggcagatggaggcgcgggagccttccccgggaggtgaccgaggccagtcagcggccccggggacccaaggccggggactctcggcggccggtggacgggcagggccggcccgcctgggcaggcggcggggtgaaggtgtccagggcctgaggcggcaaagtgccgccgccgtcagccccgactgccacccaccaggcacccggcccatccccggctcccatctagggatccacacccgggcgccgcggcgccgcggtttaaagcctgtgagatcccgcaacaacccggatccggaagcgcggggtcgcggctgggcgagggcaggggtggggccttcggtgcagacccagggccaagtcgagggaggctccgggcgcggggcggggtcttgggcgtgggggcggagcctgcgcggggcgtagagatctgacgggtcccagatgcacctgcacccaggtgctgactgcc

SEQ ID NO: 32711 - DNA, 619 bp, Homo sapiens
ctccccgctactggccccagaccttccccgcatggccccgcccaccactctagccccgccaccttccggaccagacacctccccgctgctggctccagcccttccccgcgtggccccgcccccgccctcgccccctgcccaggcccggcccctgcggagcccagagacgcggggacacaggtgaggcgcgcggggtccgggctgcggcttcccggtgcggccgcagtgggcaggtgcgactgtgcgcggcctcgctggctgagaactggcgggggtgggggcgtgccctggactgacccccaccggcctaacccgcggtgcggggccagggccggaactgcccgcccggctccttgcccggctccttgtggctgctggggacccccgacaccagccactttcccttcccggcccttagcaagatcggcttctccggtcacctttatttttttaggctcgaggcgtctgccgcacctcagcccacgacctgccccgctgggaggtgcgggccgctggccaggccctgaccgcaacctggcccagaggccccagccctcaggcaaggttctccgggtaagtgtggggccctgaggcgctgtggggtgaagaggtctatgga

SEQ ID NO: 32712 - DNA, 1901 bp, Homo sapiens
gctttctgtaaaacaggaataaccacccctaccttggaaagctgctattaggatgaagtgaaatataatcttcaagatcacagcatgtggcattatgcaaaatccagggtgcccccttcaccaccagactcactctcaagtcacttcacaagtactagatacaaaaaagacaggtctctacgctcgatctacaggagaagccaggtttgctaacaattacaaaatagcgtaccacgtgtaaaagtccagttaacagaatgcgggggagttcagaggccacctagtatgttggtgtggccaggagaagggggagttggaaggcggcatctgcttcccaggggtgatgccccccgcagctggctcctttcagccttgtaggaattccctgggcccagtgccccagggggcgtcactaggaactgctcggccccgagaggggttccttctccagggctactccaaggccccatcccgccccgcccgggcagcccccgctgaccttgagcgaggccaggtgggcgatgtcggggctgagttctcggaggcagttgtcagcagccgccagttcactgagcaggggcagcgcgccggggcgaaagagctcggcgggaaaggagtctaggcaattgccggtgaggttgaggctctgcaggcgcggggcgcagcgcgccaggtcggctggcagctcgcgcagccggttgccgctgaggttgaggctctgcagctgcggaaggcccggcggctcggcggggcccaggccttggcccggcggcagcgcctccagcgcgttgcccgacaggtcgagcacccgaagggcaggcagcggcccgagctcggggctcaggccgggccccagcgcgttgcgccgcagcacgaggctgtgcagctgcggcaggccctgcgccaggccaggccccggcgcgcgcaagctcccgcagccgctcacttccaagtagtgcagcagcggcagggtgaaaagccgcggcggcagctgcccacccgccgcccgcactcgctcctccagcccgggccccgtcagcagcagctcccgccgccgctcgcgctcagccagctccagctccggccaagactctgacaccgctgccgccgccatggcgcctcagctgctggcaggcacccacccaccagggtgcttccggggcagcgcgcgccacttccgacctgtgccggaaaagcccatagagaagccacctggctgctagagtgccgccgcgcgtgccatagaggagagtggcctctcctgcgtagagccggggaggggctggagagcggctcgctctctccgcgggtaggggtgagggtgggggttatgaacccaaaaatatctgagacaggactcaatgaaatgtaaaaagtttattttgccaaggttaaggacacgccagtgtcacaaccctaggagatcgtgacgatggtgcccagggaagttgggatgcagcttggttttgtacattttggggagacgtgagacatcaatcaacacgtgcgagtgtaccttggttcagcccagaaaggctggacaattccaggagagggctttcaggtcacaggtagagaagagaccggagggtgcattcttttgagtctttgttcagcctttcgctgactgcacaatttattatgcatgtgagacgcgggtagaggaatagtcgcttatgctttagtctggcttactgaatcttcatttctacgtaaacagtagagcaaaggaagcgatcagatatgcatttgtctaggtgagcagagggatggctttgagttcagtcctttgtctcgcacctgtgaagggaagctatcaatttgcattgccagggtgaaattcaacagaactgttttagggtaaagatcttgaggcccacagagaatttctttgtgggcaa

SEQ ID NO: 32713 - DNA, 1969 bp, Homo sapiens
ctgagatcgtgccattgcactccagcctgggcgacagagcgagaccgtctcaaaggcttatgggtttctgatcaagtcatcttagcgactgaaagggcttcagagaaatctgaacttaagtgcaaacaaaacaaaacaaactccaaaacaaaaaacaaccaaccatcagactttaatctctatagggacagagcaattttcctcaaacttttgctcagcagaacacatctgaaactggccccctatgtgctacgcatccagaagaggaaaagccggatctgaaaacaatattccacgctaaatgggccgtcccggccggggcaggcggtcccagcacccgtgctgagctccccggcatacggcacgacggggccgcgccggctcttcggcgacagcaaggccggcatctaactccacaccgtccgcgcttgcaccgcgcacccaggcttcgtacccagctcccaggtggggaccgcgcccccgcggcgcccgcgccccgcgccccgcgccccgctccccactccggccctgggccggcgccgcagcggcccggaaggtacctgcttagagggaagggccccgactggcgctgccgcggccccggtggagagggcggctgggtcggagcggtgccgcggcccggggaggcggccaggcggcgcctcagcacccggaccccaggggcgtgcgggacccggctctcgtggacttcctcggcagccgccgcttcctcagacggaactcggggggcgccccttccgccgccccaggccgccttgcaccccaagctgctgcggcagtgacagggaagaagcagacccggccacctctgcccatagccccggccgcagcctccactctcatgacaaccaagcccagccctgggccagggcctctgcgcgtgcgcgaccccgccccaccccaggccgcgcctgcgcacaaggggagggctccgctactctggccctcagggttgtgtagtttccggggccacggcacctgggcacaccaggtggcgtcgcgcctttgctttcctgagccttctgagtaaggtaatgtggtgtccgtggggcgacgcctgcgcacaagaccgcgtcgggcctcacttttcccaggccttctgggtaatgtagtttccgggatcggcacccggcctgtgccagcttgcagagctcaccaggtgcagacccctgcggccagggcgaggacggatctgagcagctgggcagcaggtgccaccgcctgtgggacccagagggcttgaggacatctgcaatgctccagaagcccaagagcgtgaagctgcgggccctgcgcagcccgaggaagttcggcgtggctggccggagctgccaggaggtgctgcgcaagggctgtctccgcttccaggtgcccgctgggctaggcggggacggcccgtcggggaggcgtgtggggagaataggaggtgccgcttttcctcttccaaaacggagggtgcaggcggcgcccggggcgggtagttttcgttcgcctcagccgctaggaccccgggcccccgcagcctggggttcctgagcgtggcttcagaacgcaggggggttgggggacgacctggatcaccccttccctcttcccacctctcgggcaggacagccctgcatcagagctaggagacccgggtagagtgccaggtactggcacgcggggtcacggctgctctgcctgtccggcctcagcttccccttgagtaacatgaaaggcttggctaggtgggctctgcaggccccttccagccctcgcagctggggattgcaatcgtcaccttattctaggttggttttctttttagaccagtactagggttaccaggtgtgcattgccggggtcggtgcgggtggggtgggagtagccataaaatgcctaaaactgaccagtgcagagtaacagggaaccggactccaacaaattaacagtgccacgtgccggt

SEQ ID NO: 32714 - DNA, 2236 bp, Homo sapiens
ctccatttgaacaaaccaggagagcctccatgcagctcagagcctcccaagtggaccgggacccgcgccgggtccactgtgaaaagggtccttcgccttaactgttacacccacgcaatgagcacttgccccttgccagacactggcaccccccttcaatcctcaccaccctcttggtggatccctcatcaccccacttttagcacattcagtagatggggccaagctgaggtcacttgctgtgtgacgtccattggagtggcagcagttgaggggcacaaactcagctctgcagcatctagcactaccaggagttgaaaccagttctggagagggtgccccaccttcctaggaaagtggcccgaaacctcccttcaagggggcgtgacctgggagccccctgttgcccaggacgtgaactgtgagctccacttctcccgagggcgtggaccggagccccccttctcccgcgggcatggcctgggagctccccttctctcgggggtgtggcccagaggccccattctgcgggggtgggtaacctgggagcccccttctcccggggacgtgacctgtgagctccacttcttccgagggcgtggcccggagcccccttttcacaggggcgtgacctggcagccctccttctcccgggagcgtggcctggagccccccaactactgccgggggcgaggcccaagcggaggccgctcctaggccacaggcaccccgtgaccccgccccggttctccagacagcaggtgacccagagtccccgccctgcccggcgcagctgctgccgggacccagccctcaccttccggctcctcatgagtgtgagcaccgcagccaagcaccgcgcgccccggccaacgcgtcccggcggagcggcgacccggagtctgcagagcgcgccgcggcggcgtccgacgtcagcacagccaatcacagtgcagcaccctcgtcatgtgattccccccccccccccccccgtgttggctctttcgtaagcggcgggcgaaggtcacaggccttgggccagtggtgggacactggagcaggaagtcggcctgtggccggccatgttcatgagggcgcgtcccttggcacccctgtagccgctatgtttcccacgcccgtggcaggcctgagagattatgtttgcggggggtgctttttttgtagcttctgtgttcgccatatttgaaaggggcagacggccatgttcgtgaacggcgcttcccttggtgcacctgtggccgccatgtttgagcgaggtgggcaactatgttcttgaggggggagcaaccatgttcttgaggggctcttcccttgaagcctctttggccaccatgtttgagaggggcagacggccatgtttgtaaggggcgcttctcttggtgcgcctgtggccgctatgtttgagaggggcaggcaaccatgttcgtgaggggcgcttcccttgaagcctctttggcgccatgtatgagaggggcggacggccatgtttgtgaggggctcttcctttggtgcgcctgtggccgccatgtttgagaggggcgggcgggacgtccgtgaggggcccctccccttgcatcccctggctaacagcctgcaggagggcgggaagtgctttctccagtgccgcagagcgctggtttctgagtgccggttagcggccttgagcagcgcgagggactcccaggcctgcccgtgctgcggtcccgctggggagctttgcgcgcttgtcgcaggctgtgctgccccgcgacatgccgctttgggttggggtggcccgcccgggaagtggcctcagctgtcccccacgttgcgggcgggagggggccttagtggaggccgtcggtgggcccaggaggccagggtccggcgtcgggctgggggccggttttcgtcccccgttacgtgcaaggcgggaaatgacccctccgccgtcccgttactctccggggccaacgtggactcgcaggggccacgccttttccaatggccacgcccctagcaggcctgggtggacccgcagcggccacgcctcctccaatggccgcgccctatcaggtctggatggacacacggcggccacgcctcctccagcaaacacgcccctagcaggcctgggctgctgtgatgcgtcctctttggccgccgctgagggaggtgtttgtaaagctgaggaccactgttctgttgtgggtttttttgtttgtttgtttgtttt

SEQ ID NO: 32715 - DNA, 1022 bp, Homo sapiens
aaacaatgggtgctcttcaggaaagcaggattgtgctaggcagatatcttcttcataagatgagtttctgtgtgattaatattattaacaatcggctattgtgtaaaaagtgttaacagcagccaggagtgaatgctccccctgtgtggggaattgtgaacatgtgatctcattacaccccttcaagcacaaagcaggtctcattcctgttttgcagcatagaagacggaagccaagagaggccctctcgctggcctgccctcagggcactggacttgaactcaggcctctgcctgtccagcttggctggtcttaggatgctgttcccttacgtccaccacacatatgcttctgaggaaacaatgcacggccccggccgtaagcggcccgcagccttgggcgagatggacatttctctgtgggtgcctgctgatgccctggtggaccctggtggaccctggcaactactctgtctgctaggtcgttggttgtttcaggacaaaagccatgaaacaactttgcttacatgtttcacagaaatcacatgacgtcttcaataatcgttaaaggctgggcatgaaccacacgtcagggctggctggctccctggagcgaagtccaacagggcgcctgctcgtgggttatcacatccagaaagaattggcatgttattctatgtttgtaaacatttgtgctttttcttacttttgctgggtgatgtaatctgttcctagttcacaaagatagacccatggttcaaaagcagttaggtaaagcataaaattagtgatacaaatggaaacataaacagcacagcttagaataactgaaacaatgtaaatagtgtgtgcctgattccagtacaaatatagaaagccatcctgcaatctgcgcccctgctggggcaagtctaggaagattttgcatatgcagcagaaaggaaaagcttagaaaattacagcagagaatacctgaaagccaaaacttgctgggatagtgactccattgctctttgtcaccag

SEQ ID NO: 32716 - DNA, 475 bp, Homo sapiens
gttctctaagaaggttggggaggaggggttcctattttagaataattgtggtaaaaattaagaactccaaaggaaggtgaatgttcacaaagctcatcactatcttgcaaatagttggtgctgagtaactgcccaatgaatcatcaagtcatgctactgagagctctttattgatggaaattgtttcaggcagagtcattctctggcatcaacatgacgtcatttacatccacatctttataaatgttcaataactttactgtcacaggtttgtcttactcatcaccttggatgcacagaaaatatgctagactttgatgtattttacagtacattagtttgagtgggaactcctctgaagcaactcaaatctagctcttactaaatttaaacattcctacaaaggggctttcacttctggatgcagacgtttatatggcaaatatttattttgttgcaatagggttgcaaattg

SEQ ID NO: 32717 - DNA, 539 bp, Homo sapiens
tgaagaagcaggggctgaggcgtcctcattttgtaccttccaagattcctagtgtgaggtcagagtgcaagtagatgctcagcaaacacttgttggaatatagagttttggattccatgcgagcaaaactcaccaggggtctaatgtgcctggtgcaggtccccaccatccccccacacctgccgatgatcctgtcttagggcattttctgcccattacttccttctttcctctccccgcatgtgtcatgaagatgaaagtaggcgacagctggcagagattgtgttgacacactcaaggtcatggactgtcctctcatttgagcattatttacctaacacaaagagacagacacaaagataatgccatgataatttaacggctcaccccttttgtaaaactgccatcgctggtgtttctgtgtgaaggaagacaaaagatccgggggggggcccacaaggactctctcttttcttctctgattaattcctgcctccctacccaggctgctgttccctcccacacccacatttccaata

SEQ ID NO: 32718 - DNA, 629 bp, Homo sapiens
cactgtcccactaattctccagcaaaatgcacccttaccacctgcacacgaacttccattccgtggttggagggtggccaaaaagctgctccatggccttagactctcccccaccaccatgtgattgactgaaccaccctcacccaggacaagggagctgctgtctgtcggagaggatgttccagaccagctagcagcacagcaggcaccacggggcaggaatctaactccacgtgtcctgggaaacaccacaattacatgtttgcaatgaccccttctacatggctgttttcaaatctattaagcaaacaaaccaaaattctgacaccaccagaggaacattcaaaagcaaaatataggtcagggaaattccaagttacaaaaaaataaagactgagtgccctctagcggctcaatgcacactcttctgtggtaagtgatgaatgaaactttgctcccttgcaatgttacagagaaaataaaaaggattattcataaccgagagccaaagtacctcacttaaagtgacagccgcatatcattaagatctccaaaggaaccatataagttggtgaaatactgaagtatgaaaagtttccatcataagttaaacactagtgggtatttaa

SEQ ID NO: 32719 - DNA, 721 bp, Homo sapiens
catgagtctccttttctggcccaaggtagtgatggcttcccccttagagaccagcactgttttatgaacccctgttcccataaggatctttccataggtttgtaaacactctgcaccttgccaacaccaactcaaatccgtcaggaaaatactaggaacagcactttgaattcctaatcagaaatttggtaaaataacgaagaatgcacatgtatattcaactcagcattattagcacacattttctccacaaagctccagcttacaatagcacatttcgtatctgtagctttcaggaaattgggaaatcgatcgggtcaaattccaggcattgttccttctttctgcttctctctggctggccaaatggaaggaatgaggacactgtgaaaaccaatcccttgggttacaaccacattaaagtcattgtcacaaacacggtttcacggcttgactgagtaaagagttttaaaattaccaactttcatccatttacttaaaaagaagtaggactaaagctaaaccccggtcttttttggaccccaaagtccagcagagccaccttgttgaagaggactccagaggtgatcagctctgaaccaaggccctgcctgcagatcctgcaggctcccctggtgggtggagcacacttaagtcaccaggaagccgattagccagaggcccatggggtacaggcaacagcgggtccgaccaggagccc

SEQ ID NO: 32720 - DNA, 1094 bp, Homo sapiens
aaagccacacatcgcgacacacggaggcagaaagcagcggtctcctaagaagttagacacgaggaatctcgggcagcgaggtgcctgcaagcccgggggcgggcgggagcagcctgcacgcgtggggaagggcacgcgggagcgggtggcgccttccgggccgggtcggccgggaggttccaaggcaggaaaggggcgcagaaggccgggacggcgccgggtacaaagcctcgcagggacgcccgaaggccgcagagccaccgcggggaactgacagccggagccggagctggagccggggggcggggaggaggggcggaggggcgcggccaggcggggtccgcggactccggcctgggaaggatgcgcgcggactagggcgcggggagccaaggcccagaacatcggtaccgcgctcccttcagccgaggggctgcagagaggccagggggcagggggcagggggcagggggcagggggcaaagggcaagggcagaaaggaacccacgtagccaaacggcacccagcggccccgaccccaagtgtcccgacgaggggggacgcctgcgactaacgcggggacagcccccgccgcgcgccaccgccgcaccccaggcaccgggcccccacgcagggacggcgtggaccaccctacccccgaaccccgaggctctggccaacactgaggccccctgtgcctcgaggccgcgtccaacctcccccgcggcgccggcccacatggttccgcccgccgcgggccgcgttacctaggagaccgacccgccgcggccgcgccggaggccacggagcccacgcttttcagagagtctccactcgacggacccagaggcccggcggccggtgctcaacggagccacaagcctgaggaccgaggactggccgaggggcgcgccccgtccgctgccacccgcgggaggagcctcggaaggcggcgcaccgcgccgcacactcagtccaagaacccgcctcgcgtcactgtcgccgtcagggccgcggagccaatcagagcccaagtcgagggctgcgctttgcgagcgccagccaatcggtgcggcggcgggcccatcctgatt

SEQ ID NO: 32721 - DNA, 485 bp, Homo sapiens
cacacagccgatcccggcacacagccgatcccggcacacagccgatcccggcacactgctggcagcagtgaggggagctcttcaacatcaccagaaccctctgccctgagaaaggggctcctgggccgacagggaaggtctgcctcctactctggaggggccgcttggggacaggcccgggctgtctcctcacagccacctgcttcctgtcctctgcctgtctcctgccccatctggccgctgctcatccaggaaggtcggagatgtcgggccctcccacctgggtcacgcgctaggcatgcctgagagcaaaggccacgccccgacaccccacggggccctggcgcgccaggcttctcagccctgcggcggcagtgcatagctctggcacgcgctgcaccaacttcctgttgggtgctgtggtcccaaggcgcgtgctttgcagcagatgtgtgacctggcgttcccctgagtgctcggaaaat

SEQ ID NO: 32722 - DNA, 1974 bp, Homo sapiens
atagacttttccaaaaacacatcttacctcccttcatgtttaaaagaacttcatctaaaacttgtgttaactggatcaacttttcaaacatttggccactacaaaaatcactgatttattttttacaacgtctcttcgcagtaataatctaagaggggtactttaagatctattccgaacacacacaatcaatcaagagacctacccacaacgggcttgatacttctccatcaaggttttaaaccaaaaggcattcaaaagcccaaccagacagaaagagcagaagaaccggaaatgttaaccagggagtcccaacaaaagaggaaaagtaggatcttgggacgaagaacacggaaaaacaactttctcaaataacctaggaggagggcgccgcacagcccagtcccagcatagctaaaggagaatgcaatgagagccttctccctacaccactgcaacacccgtttgggtctgtacagtgcgccctgataaactaatttcctctggggacgctaaaaagctcctcaaacccaggcctcctctccgaaagcacgccgaccaagccgcccttccgcggattcgtccccgagtcttggccgtggacttccgaatgcgcggctccccagggtagcaggtcccgttcttcttccccgccctccacccaggtaatcaggcccccggccggggtccgaggaccagtggccggcccagaccgcagtctccaggctccagctccccgctagcccctagctggggccccgggcctccgagacctcccggatctccctcacgagcctcgggccgcggcctcctccgcctacaacgtgctgggatcggcaggggctctggcccgctccggccgacctgccagcccaccccagcaggacgctgcagggcgccgtccccagcgagcctgggtagatgccgggctcggcgaggcccacgtgcctcccctggagccgaggcctcacgcggagccatactaaccacaggagccatggcggcagcggagttagaaagggaggtgagcgaactacgcagacgcaaagagcccgcagcgcgcaaggcacgcagggtccaggccgcactaatcactttgccacgcccctcgtccgccaccttttctcttggttatgtacgataggggagcgattggtttttcctgaatgcaaaacgcgtcctctcccaggcctggagggtttctggggaaggaaggaggcccggcgggctgtcccactgcgaacgatcggaggggggaagccagactggacgagcccaaagataaataaaggggttggctttactttttgaaagtcttgggaagaaaaaagaaataaggaaattcactatactgtaaattaccagctagtgggatggaaatcgaatctactaatttggggaagtgggaaaattccttgtagccaccgggaaatttcgttcagaggtcccaatgccagaccactatggcttcctcaaaaagccccagcttggaagctcatgcccaggggctgtctcccagtgcctgtcctttttgctgtagccaggccgccccctcgctgatcaccactccctagtttcccagcccaagccttctagtttcccatcccaaaccagtaagtagttgaggaccaccaggagatctggaaaatgcagattccaattccagcggtctcagtggcctgaaattctgcatttctcacaagctctcagacgatgctgatgctgcgagtccatggaccgcatgtggagaagcaaaggtcctcatccccaggcccacaggtcccttgaactgggctactttgcacccagtcacccgctgcgtcctcacggaattatattccaggatcctgaattgtaaatcactcagtggcacacacactctccactccctttacctggcttcagtgtactcacctagcaaaagtccaatcaccagaagagactgtgctgatgggtctagctttcaactcaggc

SEQ ID NO: 32723 - DNA, 1949 bp, Homo sapiens
agggggcactgctggaaaggccgggaacctcccctctcaacctcccacccaaacccatccctcttttgggaacttggcaggcaatgaggatagggccttaattaagtggacgcccagtatgtgtatttcacgtgcgttattccactggggcctcacccattatcaggacaccagttctattttaacccagcgctgaggctctgagaggtcagtaacatggccaagagctcacaaccagcgaaaggcagggctgggattacagggcgtctcactccgcctcccaagcgctggaaagtcggtggaggggcgtccgctgctctctggcgcccccaattggccgccgaggaaatgaggcggcgatgacctgttcagacccaaatgggatggaagagtggggattagcgggggtagggggtggggtttggactcttttttttttttaagacagtctggctctgtagcccaggctggagtgcagtggcgcgatctcggctcactgcaacctccgcctcccgggttcaagcagttctgcctcagcctcccgaagggcgccaccatgcctggctaatttttgcatttttagtagagacagggtttcgccatgttggccaggctggtctcgaactcctgacctcaagctatctgcccgcctcggcctcccagagtgccgagattacaggcgtgagccaccgcgcccggcctacccttgaagaccccgcagccaaggtcctccggccccgctctgcgcggcgctctggtcttggggctccggactctgtcatgccgggcaggggccagtccgatccttgcacccttgcctggcaccgtccctggagccttggcgtcctggcctctcctccccgcgggctggaggtggagtggccgggccggaaccagtgcgcaaagcagatggcgagcgcggaggtcggttcggccccgccgcgcctcaaggcagcagccaccctggggaaggtggatgccggaagaggcgtcgcctgcgggtcacccagaggacacccggcggggaattccgagggtgggagtgaggagaggtaggagaggccacggcagagggaggccccgcgcagagtgggaaccatcgcccggtgcgggcctgaacttccagggccggctactcctcggcagagcgaccgcgcggtgtctcagagcgcggcccggagccgcactaagagcgctggacggcgggagagaggctcggaggaccggtagctcccagcaaagcggcccagcgggtaggtacaaggccccgcccctcgccagtcctcactgcctgttctccctgcgccggggagctccaggccccagccctaacctgggccctagcggctccccactccatgacctctggacgcccagtcgggtccaggcgcgatagggagggcgcgggcgcccgggcagaggggccgcgggagctcaagcggggctccgtgcgtgccccagccgcccgcttgcgctgtcgctgcagatgtcgggagctatcttcgggcccctggagggcccgagctccctggatgccccgagcatccacccgctggtgtgcccgctgtgccacgtgcagtacgagcgcccgtgtcttctggactgtttccacgacttctgtgccggctgcctgcgtggccgcgcgaccgacggccgcctcacctgcccgctgtgccagtaagtgtcccaaagttccccaaaaccccccagaccccatcccccgggcccaaggttggctctgcccgagctgggacccaggtgccaggagagtaaggctccaacttcaggcagaacgactgggagatactgcacccggtccttagctctccccgccagaagttgcaggcttcggtccattttatagatcagcttaactgaagcctggagattgcagttactggcccaagacctcccatcaaaagtcagagggtaagggcggggctccagca

SEQ ID NO: 32724 - DNA, 1295 bp, Homo sapiens
aaaggaacccaagagaagctcagtcattcacagtcctcagagtacagatctgggctgctgaccttcccggaataggcaacccacaggcaagcagatagagccgatttgctgaggttgaaagggagaagtgggcgacctgggttcaaattctgcacccaccgctctctggctgtgtggcctcccaaattatttaacctctctgagcttgcttccccatctacagccaggggataacagtacctaccttttaggactgcagtaaggattacccacgtaaaacacttaagactaactgctacctacattttagctgtcattattattattattcgtgattactattcagggctgtaggaaaactgcttaagcctagtttatgaggtcagggcacccgggcctgtgcgcccagccccacccacgtcactgcggggcctttgacctgagacagggcagcaggtaggtctctgcaccttaagttacataaaagcactcgcgggctcgctcactccaccccacgcgcacctgctgagctgcacaagctgcaatttaacaacccactcctcgggtgcagggcgcccgagcccggagagagagggtcccctcctgcgacctgaactcgcggatgaagagcgcgcgcgtgggaggccactgcgggcccggggagaaaggtgcccacgcgccgcgccaagcggaccgccgcccgccccgccggcccccgccggcccccgccggcctgcacctggtagcgaggcggccgatagagcagcagcagcagcgcgttgagcccggccacgtagagcgccagcccggtgcggccctgcaggccggcgcgcgtgagcagcggcagcgcgagcaccgaggcgcccagcaggaaggtggcgaggctgagacgcgcctcagagcccggcggagcccgcgccgcgcagcccgccatggcgccgggcggcggactagcgggcggcggcgccggctgtagcccggagaaacgcgccggctgcgcctgcgcactgtgccgccgatgccggcccgggaagggcagctgcccgcagctgcgcgccgcctgccagttctcgcgagaactccggcccgccctgttgctgtccggaatttggcgggagcgccccgcccgcccgcccctccccgcccctcggggacatccgggctctgagccagactctgtgccgggcgggggccgggaagtggtgggagaagtcgccgcccgcgtctgtccaaacttagtcccaaactcaggaggttcctgtcccaagaagcaatgtaaagtttgaaacgagccg

SEQ ID NO: 32725 - DNA, 637 bp, Homo sapiens
tcccccttcccctcctctccctccccctccccttccccttccctctcttcccctccctgtttctcgcgtccgctcttccccacagggctctggcctgtgcccaggggagccgagcaaccgtcgggcttccgcagctgcctgcccggcgtgagccagctccttcggcgcggagatgaggtcggcagcggcctgcgctgccccctggtgcccgagagcgccgccggcagcaccatggacagcgccgggttgggccaggaggcgcccgcgctgttccgcccttgcacccctgccgtctgggctcctgctccggccgccggcggcccgcggtccccaccacccctgctcctcctccccgaaagtctccctggctcgtccgccagcgtccccccgccgcagccagcgtcgagtcgctgcgccgagagtcccgggctgggcctgcgcgtgtggcggccctggggaagccccggggatgacctgaactgaaggcgctccctatttggtctcgcgacacagggactattttcagcacgcccacagtgactgccaggaccccccagtcgtccgttctggtcgtggggcgggggtggcttggagagggccgcgcaccccgcaagcgcagggaaatacccccagccct

SEQ ID NO: 32726 - DNA, 1006 bp, Homo sapiens
ccagcagaagcagggagaggtaaagctgtttgcccggccagcacttgcctgagccaggatccaaactccacttgcctgacaccaaagtcctggcctctcaaaccctaaaatgttggggaaaagggcattttttttttttttgtccctagagctgaggtctttctgagcctcaggtctgcagggcaggtctcaccgtccccacactgcagatgggaacacttcaggcagaagctcagggcaacacggagagaatagtgtcagggctgggtttggggccaggcactcctgggcactgtagtcttggcatgggagaggaacgtcctgggggacagggcgtggacaccgggttccaagtgcagagtgacagaggactggttgtgtgggaacaaagtgtccctctggctctgggtcagtgaccacagatccacggattgcaccctttctgttcattcttcatagaatggagcggccactagggccagaccccaggctgggctccccacagtgccgacgggacccagtctcctgctgggaagtgtctcctgcagggcacttaaagccctgtcttctgctgggaagtttctcctgcagggcacttaaagcattccgcagcatctcaggacccggcttcccacttccccgcccactgcagggccaactgcaggtgcaactagcctgggacccacccgggccatgaggcctccctccgcaagacatgcgggcggggccggggcgtgacgtcacagctccgggccaatgaggccgcgcggccccgaggccccattgcgcaacaaagagaacccagaacttgaaaggattccccgggctctggctgcgccccggcttccgcccccacgccggtctccgcccgcgctgcagccgatgtgttccacggggcccggcctggccgtcgcccagggagggacgcgcagcgcgaggcctggacatctccggcacgccccccccagcccccgcccctacagtcccaaccccctggggctccgat

SEQ ID NO: 32727 - DNA, 1579 bp, Homo sapiens
caggctgggcgcagtggctactagggaggctgaggtaggaggatcacttgagcctgggaagagtacgttgcagtgagccacaattgcaccactgcactcaagcctgggcaacagagtgagatgctgtctcaaaagaaaaaaaaaattgaaatatatttggctgctgggcgcggtggctcacacctgtaatcccagcacttacagaggccgaggcgggggcggatcacttgaggtcaggaattcaggacttgcctggccaaaatggcaaaaccccatctctactaaaaatacaaaaattagcggggcgtggtggtacacacctgcaatcctagctagtcaggaggctgaggcaggagaattgctcgaacctgaaaggcagaggttgcagtgggctgagatcatgccactgcactccagcctgggtgacagagtgagacttcgtctcaaaagaaaaaagaaaagaaagaaatacatttgtctatctctaggattcctggggttaaaaattatctaaaaataaagaaagacacaggccagctcgggcaacggcacaggcctggcccagttctggaggactgtttactgctgagtctgacatgttattcctcccccagcccccaacacgctaatcctgcacttcttccccctcctctgaccccagaaacttcaaggaaagaaagcaagctgcccagggtggggcctttcctacgtggctgccttctttctctgggcctggccccaaacatcccccgctctatcttctgcctgccgggtcctggcagccagtgacccgggctgactgcaggtctggaatgtcacccgggcccacagccccaccctttttctgttccagctgctcctgtcccagatcagaaccatgtctgtccagtccttgtagcatgagtggcaggtgctggggcccaaggctaatggacgcagatgctgccaacccactctcagccaccccactcccggccggtgtcccctctggaggtggcatccagctgatgacaagggctctgaggaagctgagcacacatgggtcaaggagccactcccagaagggcgccaccccacctaatctctgggaaagcttcccagaggaagtgacaccttggccaagtcctgaagggtgagccaggagcagaggtccgagaaggctacgaggagagggaatgttcggggcccaaggccaggagtgcccagcgagctccagaaacagaaagcaaccccacaaagctggcgcatggcccaaaagggggtgaagaagcgatgtcctgagacagggacgcagctgtcatgcagggcctcagggctgagacaaagtctggatccatcctgaaaggaggggaggctggggaggctgaagtccaggaaccacacaatcagacactgtttggggaggtcacctcccatggcctctgcactggcctctcactccccatggcctctgcactggcctctcaccccccgtggccgctgcactggcctctagcccccccatggcctctacactggcctctagcccccccatggcctctacactggcctctagcccccccatggcctctacactggc

SEQ ID NO: 32728 - DNA, 490 bp, Homo sapiens
gtctccagcctgaggaaactgcttccggttgtcacctgccacctggtttgtggccatgcccggaggtctctgatgctcccaaagaaagcagcactgagtggcacaggggagccccgaggcagcagcggcagcaccctcagcaccctcagccctgcccagcaccctcagcccagctcagcaccctcagccccgctcagcaccctcagcccagctcagcacctgccacccacacctggccagccctggacaggcccctgtgcggtgaccttggcagcagccctgcagggcactgaaccctgcctgccccttccacagcccagcacacgaccagctgggagtgtcaccagtgtctctgactctgacacaaaaatgtcagtgctggccaagcgcagtggctcacacctgtaatcccagcactttgggaggccgaggcgggcggatcatgaggtcaggagtttgagaccaggctggccaacatggtgaaaccccg

SEQ ID NO: 32729 - DNA, 2206 bp, Homo sapiens
ccgagtcccctctacccacccttcccttccaaatgtccctaaacaatccacccacagtggcccctgcacggcctagacatgcccatgactggcagtacctgctcagctggaaagccatggtggctaggacatcccaggatcagatgcagagaaaggcgagggagcagggaagcatcacagagtccttgcctgacccaggactgtcccagctccctgccacaccgggcttggtggggagcaccccccacccccagcttcctgagctgcccaatctggccaggaagaggctgcctcgccaatccagagcgtctaccagaaaccggtcgtcatggaaaccttgctttataaataattacagaagaagtaattctgtgagctcttctggctgccatgccaggagatcaggaaggcagaggggccgctgctgagcggcctcagggaagcggctatgaggctctgccttctctgacagggcacaagaccccctagtctttctccagggtctcagccaaagccaggtctggccccactgccgccttctagagctccctgaaatgtagacaggggaggaaggtcacaggccagcaaggactccagcaggtccaagcctgcatcctgctgatggagctggcatctaaagcctgtcccaagggccagctccctggctgaagcaaagtggacaggcggtccagcctcccctctcctcaggccacacccctgtccttccccactccccctcttccttcccccaacccctgcttcagaggatgccatgcctgtcttggggctcagcaactccactacccttcctccactcccgcgggctcttaggctgccggctgccacctgtgggccctgtgccccccaacccgtactctcttcactccgcctccccttctactgggtgtcaggaagaaagaaagaggccaaacaatcacagcggccagggtgcaggctacaggaggcccagtgcaggaggcgggatgtgttatcaccacaacctcccccaatgctgcccccaccagggctgctttcccaggaatcctgtgaccagcaagggaaatggaaagtccccagccagagtgcaggccgcacagcctcaaccaggctgcacccgccggcctctgggcaagtttcacatgtttagttgtgaaagagaaagttagggcagagagggctgattaggccactcccactggaacagccggcccttatcaaggcccttatcaaactgccagagcctgggcttattctatctaaccagctggcaggcactgagcctgggaagtcactctggtaaaagttaaataggtaaattattactaaaaggatgtcctttcacctatgtgcaaaaataacaagtcctaaaaggacaagtcctctcacctatgtgcaaaaagaaagaaaaagtcattttcagcttacaaaccccacacgcactgggtcccacagggaggctggtgctgcccccgcccagggatgcttaatgtctagaagccagcagaggagaggattctaaagggatcccaccgacccaaaatgtctgcccggaggggaggtcagagggctgagtctggcccaagcctggcagctaaccctggctgaaaatgccccctgagccctccccacccaggcagcctgccggggcccaggcccgggccatcagcctcctcagccccctggctgcccatctcggcccatcttcctgagtagccggcatcccagggccagggtcttgaagccacagcgtctcccaccctggcacacaggacaggtcctcccaaacacacttccctcccctgaccccaaatagcccatagttcctctcagctcccaactcactgtttggccttctccccaaaacaggccctgtcgacttcctttctgaggacgtttagtgacaagcttctccgaagcaggagcatcgtctccccacgtctcctgtcggctccctccagaagctgcagccaaatggaactcaaggaatgagcctgggccccaatactgtgccctttggacttggcctcatccctccaggcgggcattgctgcctccctaagcaacccttccagctggtcccagtccaggtgtgctaggcccaccacccaccccaaatcagtgaggacctaccaggcttccacagcaacacagattcaagccacaaccagatggtcccgcaaagaggaagcacttctcagatagctta

SEQ ID NO: 32730 - DNA, 2184 bp, Homo sapiens
ttgcctctattgtgtaagatgctttcaggcccaacagaccactgattcccttttcttcatagtaaactgttagaggtagacagtattatctgttcttcctttcaacacctgccctcccccaaaccgaagcagtgcactgaagacggtagctctgcaacctcctcccacaggggcacccaccgaggggctcgcgcggctctgggcacctcccctccacctctgggggctttggttagcgcagcacaaccgccgaggtaatgatcccgaatcctcgaggaggctaagcaggaccacggggctgaggctccgggatgctcgggcgaggcccgaggcggggcggcccacgggcgccggtcgccgggctctggagctgtgcattgacctccgcccgccccgtccctgcctggctttctcgcccaaacggcccgtggcgcggccgccgccctggagatgcggccaggaggagccggctggaggcgggcgggggccgcccggcttgtgcggcatcgcgagtcgcatcccggccgggcgggcgtccggggcggcggcgcggaaggccgtgcggggaatcggcgggcgggggcggcctcggcgggtggggaccacagagccaagcggggcaggcctggggcggtgaccggcgcgcctggccgctgcaggctgcgcgcgggccctctcttaccggcagatctggatggcggacggcgtctcgacgtctgggcccgacatgctgggggctgcggcggcggatgcggcgggcggctgcagaagggcgcaggtgtctggcaggcccggcgcggaatgaatgagcccgggccgcgccataaagggggagggcagaggtggagcgatggggctggtgaggcggggcctgcgcgccgggggcaatcgaacgcggcctccccgcgccgaccccgcccccgcgccggccccaccccgagccccgcctcccaggccgccaaggctgcagagagctcgcgcgggcgtacgattctggcggcgtgggggcccaggcagccgccgcttccagaaggttcggtggcggttgggccgcgccggtgcggggaaggcccgctagccgcggcagccgcgcccgacccggtggcagccccgagggaagcgtctggggcggcctaagtggcggagcagggcggacttgggccctcactctccgcgcggcggtaaatatttgtgctgggcgttcccggccgcccgcgccgccgattcgctgccgcgcccagtgcctgggcggccggatgaggtcagagcggaaggcgcggcccgggctcctggcagtggggcctgattcccacccccgcccccaacccaccccggcaccagtcgcccgcatcgcggctctcgctaagatcggccctaagagagaatggaaggctgtttcctagaaaggagcattggtggcggctgctgggaagacacggggaatggaacgggcctttgcttccgcagcacaaagcgtcacgaggtggggaggaggaaaggccggcgactatctacaccgccgcctgcagcttttactgggagcgctgagcgccagcctggaggtgcacgtgttgcagtgaggagccctgaaacatgcgtgttttactgcacaagatgtgcccttgaatggagtctaggccagtcggggtcaccaaaaaaaatccaccaaaaaacacccaagaagggagaagcggtcaccccccacgtgctggaatgacagctttttacttgctaggcagttggaccttttccgaattttctacaatgcacatagatttgtacttacatctttaaattaaaacccacgcaactccggctccctagtgcaatttgaacaacccatttacactcagctaggtagctctgaaggaactgtgcctcaccccggtcacccttgagttaccagaccgtggaggcagcccacagcatgatctgtagctcccagaagcaggggcagtcaaagtcagaactctgtgatttcaagacttttatactaagaattttgtttttctgttttctttttttttttttttttttgagacggagtcttgctctgttgcccaggctggagtgcagtggtgcaatctcagctcactgcaagctccgcctcccaggttcacgccattctcctgcctcagcctcccaagtagctgggactacaggcgcctgccaccacgcccggct

SEQ ID NO: 32731 - DNA, 805 bp, Homo sapiens
ggggctcaagagacctctctctccaaatctccatttgcctcctctggctaagctggaaaatgcacactctgccctgggtgtttccatattatccgcctgcccttcctcctgggtgcctcccgtagccttagtaagggctctgctttcctgggcccctagagctgagccatgctttgccataaaggtgctcccggcttgcaaccaatgtgtctgcttgtgcatctgtctgtgggtgtggtggggagggaggggaccaggtgggtactggcactctggggtccggactttatgtccatggaggccccaattgactcagttcaagggtcactgaggctttgctgatgtagggagagggccagagggaggctccaccccagccgggctgagccagggaacctgggacaaaggtcaggtggctgattccaggtagtgttttggagctgggcagtcagtggctgggcggggacatatgcccaagagccaccatgaactcccaggggcctccaggcaggggccctccatcccgtgagtagggtggggaagatggtggggttgccacagtcagggaaccaagggcccgcctctgggggccctgaaacctgcctgcaggacctgggatctggagagctgcccgctggcccggaggatgggcacccatccaatcttggcttaggaaaggggctgcagaggggcgggtgaggggtggcggggatgcagccccaccctggccagtgcctcatctcctgcctccgcataggcaccaagtctttcaacatgatgtccccgacgggcgacaactcggagc

SEQ ID NO: 32732 - DNA, 673 bp, Homo sapiens
gatccagattgctcttttgccatctaagtttgcctgaagtggggcccacccatcacagggccaaggctccctcctccctatcccctcttcctattcctgaaccagcagcacctgccccaccccaggcccctgctctgctcccagccgcccttccctccatcccacgacagctaggaattacgtggggcaggacacgcagccatcgccatgttcatagaagccaggcaggcaggtcccacagtcagtatctctgcgggaacctgcaatccaggagaggcatgcgtcaccatgggacaggagtgggtcaggcagggagaagggggtctgggagtagagagccctgggtgggggtactcacagagtagccgtgtgtggcggtgcagggccccgcagtctaggcatggttggcagtagaagggtgaactgctgacacattggctgacctggcactccacaaaccagcctggcttacagccacagcgggtgtcggccactgctgaacagttctccagcgccacctgggaggctggtgggggtgcagggagatggggagtggagagttagtcagggccaaaggctcccatggagaggcagaggcattatcccaagataatggagacagaaataggcgaaagacagacaggtacagggctaccctaaaaaagagagaagc

SEQ ID NO: 32733 - DNA, 737 bp, Homo sapiens
ccgaggtcacactgccctggtccctcctggagggaagctcgggggagactggctttgaagccatgcctggaattcccttctccacctctgccctggcttagcctccagatttcacctctgagggtgcttcctccctccaggaagctccaagcccagggtaggtgctcccctccctgagccgaaatccctacactgccagctcactctgtcccgtccagggcgtggcctgctgggcacccagcacacagcaagtgttgggaaacagccactgaacgaaagtgaaagaatgaggcctcacctgtgctaattcagctgaacctgacaaacctgcccgaagccccctcccaggttcctctaggaggcacctcctccctgggcgcagcccttgtctgactttcctgcccccacctcattgccaggcacctgctccttctgcaaaggctcagactcagctgagggctgtcagaaagaggggggcagggtggccacggggaccagcgcagcccctactcacgttgatgatcacccgcagtttcctgatgtaggaggcctccgtgtgcagcagctcccacaccgcctcctgctggtggcactgccgccgggtcagcttctagagggagggcaggatgggtcattcacgaggcctggagcaccttagggtggccggggaggataagcaacctgcatgcaactctcattttcccaatggggacatggaggtcccaagaggagcaggg

SEQ ID NO: 32734 - DNA, 1705 bp, Homo sapiens
gggcccctccaggatccccctgccccgccaataccccccataccggggccagggtcccatagactcctcacggccctatctccgagccgacccaccctagagacactgtgatgggggcgggagcttgaacccattccaccctcacgtaaatggagatacagctggtgaggaccctgtacccacccacaggcctggcactacgtgggaatctcgaatccgggttctgtccatcggtttaggggggtcctggcgcctagtcccaccccccgtccggagcgcagctcccacttccccgcgactcacctaggaacaggaccagggtctcctccccggtgtctaaggctctaaggctcgggccgagactgccaaagcctcatggggcgcgcggggagagggggacgggagccgcgggacgggctcagtcgactcagcgcaaactggggcgcgggacgtaggggaattacggtagccgcgcgggcgctaccacctggaccggccgggatgtaccaacggcgccgcccggctgggaccggggagaggaggggtcccaggaagggccccgcgccggagccagggaggtggctggaggccgggcggtggcttggggtaatccaggatccgggctcaggggagggggtggggggcgtcactgtccccgaggggccagccctttgcagatctccaaaaagttcaaagtccctggtcattaacttgggcttgaagacgggagctcgcccatcccggaagggggctaggggggaccagggcccgcgacaggaagcctccgcgcgacagaaaagccccgggggaccaggcagagagacccgcaggcctagcccgccccggaatcgccctgagccaggttcgcttccgctctattgtaaaaagctggattctgatctgcggcctccgcggtgccccagaaacagcccgcttttctctgggccccctcttttttttttttctggcccaggtgatatggccggaaaagggtgctgttctgccatttagtggttcccagttcccctctcccagcagcgggagtttagaataactctgggctcaggactgggaagggtgtggatacagggggcccactcgaggaggtggagttcaggtccaccaacctgttccgcactttcaagctttttatacagccttcccccgaccccttcccaggccaaaacctccagactgccccacacaacccttggggctgggcctatactagggcagctcctggctgggccagggatccccacgtcttcacctgctcccccaaaactacttagccaaaacccaggagtccccttgcattgtttctctggccctgcccgtttcttcagctgcagatagccccaccacctctctccggggaccagtcacttccagagatggcccaaacctggccattccctggggcatcctggtctgccgctgctcacccccaaagcattgcccaggagaataggtgattgcctctcccattactcacatcctgcccgtcccttctccatgggggcctcaggtccaccctttcctctccctggtcttcatctcaccacccctccctccacacacgcataccctgactcatccctgccacctcacaggccattgttaagctgcaagggaactctgaagtcctcccatccaacctccactccacactgcaatcccctctacgcttccctttctgtctctt

SEQ ID NO: 32735 - DNA, 1278 bp, Homo sapiens
ctggctaacatggcgaaaccccgtttctactaaaaatacaaaaaatatagccgggcgaggtggcacgcgcctgtagtcccaactactccggaggctgaggcaggggaatcgcttcaacccgggatgcggaggttgcagtgagccgagattgtgccactgcactccagcctgggggacagagtgagactctgtctcaaaaagaaaaagaaagaaagaaaacaaaacaaaataaagtccctttagctcgtaaggcctagggaccccttagcagggtacctgttaccctgctgctcaggggagcctagttgccaccaaccatcaagaggatggacttgaatccgactggcagccagagaacaggcccgggggaccacggtcctctcctaccctgcagctctcccggggctgcctctccagccctccctgccctcggggactactaccggcgccccccacctacctgctcgaccggcagcagcagcaacgcgcggccggggcccacgggccgcaccggtgggatgaggagaggccggtggcaactcgaggcggattcgagttcgggttcggactcgggttcggaggccggggtcgggctagggatcgggctgggggtcgcggtgttgggtctccgggccgccgccgcgcgcgacacctggcgggctccctccctccagtccacgccggacgcctgggcttgcagtaaccgccaccgtaggcgccgccgaccgcaccagcgcaggctcccgagccggcggcggggccggcggctgaggatgagctggggccgggccttgcggacccgcagccaagtggaacggcaggaaccccgctttagcagcagtcccgagtccgccatgctgggtcctcagggcctaccgcgcgagaatctcgcgagatcccgtcggtccgccccgctgccctcccagctgccgaaaagaggggcctccgagccgccggcgccctctgccggcaacctccggaagcacactaggaggttccagccgatctggtcgaggggctccacggaggactccatttacgttacgcaaattccctaccccagccggccggagagagaaagccagaaacctcgcgaccagccatgggccacctctccggaaaaacaccgggatattttttttctcctgcagaaaaagctttaggattggcagtttaaacaaaacatgtctatttgcataccttcggtttgcatgcatttgtttcgaagtgagcaaccctgggtaacaaggcgaaagtatatgacaatttgctcagaat

SEQ ID NO: 32736 - DNA, 2087 bp, Homo sapiens
acattctaccacgcctgggtccaaaaccacggtgctggcctgtttgtgatgatcagctcagcggcccagctgcttatctgtctaacttggctggtggtgtggaccccactgcctgctagggaataccagcgcttcccccatctggtgatgcttgagtgcacagagaccaactccctgggcttcatactggccttcctctacaatggcctcctctccatcagtgcctttgcctgcagctacctgggtaaggacttgccagagaactacaacgaggccaaatgtgtcaccttcagcctgctcttcaacttcgtgtcctggatcgccttcttcaccacggccagcgtctacgacggcaagtacctgcctgcggccaacatgatggctgggctgagcagcctgagcagcggcttcggtgggtattttctgcctaagtgctacgtgatcctctgccgcccagacctcaacagcacagagcacttccaggcctccattcaggactacacgaggcgctgcggctccacctgaccagtgggtcagcaggcacggctggcagccttctctgccctgagggtcgaaggtcgagcaggccgggggtgtccgggaggtctttgggcatcgcggtctggggttgggacgtgtaagcgcctgggagagcctagaccaggctccgggctgccaataaagaagtgaaatgcgtatctggtctcctgtcgtgggagagtgtgaggtgtaacggattcaagtctgaacccagagcctggaaaaggctgaccgcccagattgacgttgctaggcaactccggaggcgggcccagcgccaaaagaacagggcgaggcgtcgtccccgcatcccattggccgttctctgcggggccccgccctcgggggccggagctagaagctctacgcttccgaggcgcacctcctggcctgcacgctttgacgtcacgtccggcgcggagacggtggagtctccgcactgtcggcggggtacgcatagccgggcactaggttcgtgggctgtggaggcgacggagcagggggccagtggggccagctcagggaggacctgcctgggtgaggagggcgcggggtgagggagggaggggctgcgggccgccgtggctgccttccgctcggccgctcgggacctgtgggcgcggcgtgggcttcgctcacctgtccccggctgccgccctccgccgtccgggatcctctcactgtgccgggccagtccgttcgctctcatcccatgtctcctttccccaaacttggatttttctcaccaggcccttcttcacgaccctggccccccatccagcatcccccctggccaatccaatatggcccccggcccccgggaggctgtcagtgtgttccagccctccgcgtgcacccctcaccctgacccaagccctcgtgctgataaatatgattatttgagtagaggccaacttcccgtttctctctcttgactccaggagctttctcttgcataccctcgcttaggctggccggggtgtcacttctgcctccctgccctccagaccatggacggctccttcgtccagcacagtgtgagggttctgcaggagctcaacaagcagcgggagaagggccagtactgcgacgccactctggacgtggggggcctggtgtttaaggcacactggagtgtccttgcctgctgcagtcactttttccagagcctctacggggatggctcagggggcagtgtcgtcctccctgctggcttcgctgagatctttggcctcttgttggactttttctacactggtcacctcgctctcacctcagggaaccgggatcaggtgctcctggcagccagggagttgcgagtgccagaggccgtagagctgtgccagagcttcaagcccaaaacttcagtgggacaggcagcaggtggccagagtgggctggggccccctgcctcccagaatgtgaacagccacgtcaaggagccggcaggcttggaagaagaggaagtttcgaggactctgggtctagtccccagggatcaggagcccagaggcagtcatagtcctcagaggccccagctccattcc

SEQ ID NO: 32737 - DNA, 1110 bp, Homo sapiens
cttgtctgatgaagggacttgtcagggttggggcttgggatggaactggagctgggtccctacaactcctgctgattcatttggtgacgccaccccctcctgctgcctattgtgctctagtgggaagtggtggttcaagtggaggatgatggggatggcgattacatgtctgagcctgaggctgtgctgaccaggaggaagtcaaatgtaatccgaaagccctgtgcagctgagccagccctgagcgcgggctccctagcagctgagcctgctgagaacagaaaaggtacagcggtgccggtcgaatgccccacatgtcataaaaagttcctcagcaaatattatctaaaagtccacaacaggtaaacgttctgtttttctattttcttttcctgtctgccattcccacgttgggggaggggtcctgcacttcccacttctgggtgaggtaggggctgggggatccatctcagacccacatagtgtctggccttggtacacctctgataatcaggaagtgagagcctgctttgggttggattcttcttccttgctgtcctgtgagtactctggttggagatgggtttgtgtacatcttgtcaacaggttccacccactgtggaccttgacctccagctggtctctgctaacagaatgagaaacctgtggcccctgtgctagagctggggcccaaccttaggtgtttctgaagcctggcagtgtgggcttgaagcctggcagtgtgggctttgggccacagtgccaagccttggttcagtgctacctgcgtttccagggaagtgttcactctggggtgtcagtggggcattcaagtctatttgtctaaaccttcagcgtccaataaagtaaccaggaactccaggagctattacaatttttatttttacatttaatggagacaaggttttgctctgttgcccaggctggtctcaaactcctgggctcaatcgatccacccaccctggcctcccaaagtgctggaattataggtgtgagccaccatgcccagcccccaggggctattttatgttttttgtttgtttttgtttttgagttggagtcttgctctgtcaccaggctagagtgcag

SEQ ID NO: 32738 - DNA, 5280 bp, Homo sapiens
agcggcatgatctcagcttactgcaacctccacctcctgggctcaagcaatcctcccacctcagcctcctgagtggctgggacaacaggcacatgccgccacacccagctaatttttgtattttttgtacagacggggtttcgccatgttgtccaggctggtctcgaactcctgagctgaagtgatccacccaccttgatatcccaaagtgctgggattacaaagagccactgcacccggcccgtattttcaatttcaataaaaagctaagaataaaaagtggtactggctgtaatcgtaaattacaccaggtctattagaaaccccaggacatgaagggaccccaagcatcctgggggctgtaccccttggcctcccaggctggcgccacaggacagagcggacaagacattctgtttcacagccctgagctctaaagggagaaaagcaagttcttgttcttaggaagtgagctctgccggcctcctcccttccatggagctgtgtgaaaggcagctgaaaggaatgaaccagccacctgcctaaacccaagggattaactgctctgctgggacatttatggaagggtgtgcagaaagctggggccagtgtggccagttctgggaagaaattatctgctcaaagccactggtcagactttcagaagaggggagggacacggtccccaatcaacttggggacaaccttggattggaaagaggcacagattctggcagaacccagcagaggctggactcagagcagcaggctaaggaagctgtggcaacagaatccagcaactgtcccacctgacacctcagagccccactggaactcggagcacgtcccagagtgggctctctcgcgaacatgcaaggctgggcacagcagctgtgacatcccagtccccacctccttgcctgataaccgcctcacacgcctgcctggtgggttctttccttatatagcagtcacagagaccgcccttcctcaccccgacaaaggaggtagcctcgtgtttgaactgggatttatctttaataaaaaccgtagaagcccaaactcaggcggactgggacccgcctaccatgactcggcagtgttttggggtttgggccaagtaactggaagaaaacctcttaacatgtgaccatgtttacaggctccggggagttcagcctaaacaccatgtgaccagagcacagagcctaggtgcaagcccaagggaaccttgtcaccgggtgacaaagagtgagtcagggggcccggtgtggctcagcagggagggagaaattccccggcttgtggggaacagatgcctcaccgggcgtcggcctcctgcccgtccctggattccttaaggagaaaaagaaagcacccattgtgcggggtgaatgccccagtatcttccaaccaagtggggaggcacctcctgggcacggagttggctcagcctggcagccccggccgcacggggcacagagacccacaagcagctacttgtcccggctcacacaaggggcccttcttcaaggttaaaagtatcgcccagagacatgtagtcaccagagccccagcttggactcaggtgcgcccctaggattccaggctctgtgcgcttcccccgcgaatagctgggctcccgtaccggcgaggttcaaccccagagagcctgcccagcccctggcccactcacccgtcacgtagatgtcattgcccagcgccacgatgctgtagcctccgcccaggtggtctgggaactcggccaggtagcgccactgacccgtctgcgggttgtagcagtcgacagtgaccagctcgtcacagtcctggtcgcagccgcccacgagcacgaggatctcggcgagaccggtggacgggcgaggacgcattcggggacagggcccgcggtcgtggcggtcgtagcgcgccgcctggaagtcgcgcgcctcgcgcagcaggcgcaggcagggtgggcagcgcgccaccagcggctcggcctcgacgtgcgccaacaggtagaagcggcgcacgaagggcaggcgcacggcctccagcagctgcggccagtgcgcggcgcggcgcggcgggtcagcgcggacccagcgcagcgccagctggtaggcggcctcctccttgggcacacacagcccgtcgtcccgcaggtagcgcagcaggcgcgccagtggcagccgctccagctgctcggcgcccagctcgcccacgtggcgcagaatgaaccgctgcgccgcgctcgccagtcccgagcagctgaaggcctcagcgaagtcctgcatgtccaggcagttggccaggtcgagctgctgctgcaggaaggccccgcacgcctccttcacggccgggaactgcagcaggtcggcggcgcgcagcagcggctcagcgttgtcgccgcttaccgccacgcggcccgtgtagctgaagtccagcagcagctgcagcatgtcgggaggcactccgtgcaggcgcacccgctcggcgcggctctcgcgcagctgccccgcgaacatggcgcggaagtaggggctggcggcggccagcaccgcacggtgcgccgggaagtcgcgcccgcccgccgcctccagggtcacgtccaggaacttgcgctcggcgcgcagctggctcaggccgcgcagcaggctcagggcgtgcgcggggtccgagaagggaagcacggccaggggcgccggtcgctccatggcgccttcgataggttgtcgaggacgccgcggccggggcctgcggagagacgcggcgcgctaggcaccgctgctataaatagggcggggcgccgcggctctcgaggggcgggatgggcggggagacgtctgcaccgcccccttaacccctctgtgccgggcgccaccgccccccgcgagcgcgggctcgcctgtcccccgcgcggcgcccgcccccggctccgcaggctgagtcaccgctgtccgcggccggctccctccctccgcccttctgcgtctccccgctgacgcccgggccggggacagcgagtgacaagtgccaggtccgagggcggcctcgccgcgcgccgggaccgggggcctcccggggttgcccacgacccacccggcccggctgctgaacccaacccgggagaggcgagctcggccctgaaaccaaagccacccctcctttcacgccagacttcccaagggcgccggcccaggtcccggggcggctgggtacaatggctttttgttttgcttttgagttccactagtttcaagggttgctagttaaccccatcacgggacacactcaaaggataggctttttaccattctggaccaaagcaagaacgcgtataaagtttttcggtgacgtttttttcttggcgcatttataagcgacccggggccggattccaggagtcggccccactcctgtgttcctgaaggagcttctgactcaatcacacaggcgttaactttagtcggcttcacgcgcagttgtagtttccgagtctgcgtcgcagctgcaggctccggggctgcccgccctaggggctcccgggcctccctgaagcagctgctcggactccacgagagggtaactgggtataaagagcgagggctcaaagtcagataggagaccgccttgaaactagatgacgccactaagcacagtcccgccgtcacttgtactgcggtggggaatggtgaaagaaggaatcgcccttattttagttccgatagacacagcaccactttgaatgtcacttgtaggggaaaaagagccctcccttggaggccattttttcctcagtggaaggtaggctttgctcagttttagaaaagacccctatttcaccaccaggactgctgctttgcagagaacacttgggtttgtgctgttttccagcccccctacaccggtgggcctttgagaacgcattcctgaggaaggcgcccgcccacgtgggtcccagagcaggccacgcgcatgggagctggctatcatttcctggttccagcgaggtctagggccgcgtagcgtttccagaagacattttgtttttattccacctctgaaatgagaaccgcaggctttctcttctacttaagagtttcacgtcattttgccataagaatgcatctggtctgaatttcagggtgagcatgggcagcacaggcccaaatcagaaaacattcaggtacccaggcgggccgcctgttgcccatagaaggactgttcacacagctattcaaggcagcggcagcattcctgggcccaggagcagggccaatagcttccttgcacaggctttgtgacaagaaaggctgagtagccaggaagtggaatgtttgtagggaaaagaactcccgtcccctgggtcagcttacccatcttgcgtaagtccagtgattaaatcaataatgtttccatagttgaggattgagtacggtttttctgtattcccaataacagggatttttaaacatcatatttcagtcttactatgtagccttgaagaataatgatgtatttattgaaatggaaagatgtttgagctataaagcgaaaaatcagattactcattgtatgacccaaattgatttatatgtattcatatgcctaaaaaaatttattaagttaacattttcggccaggcgccgtggctcacgcctgtaatcccagcactttgggaggccgaggtgggtggatcacctgaggtagcgagttcgagaccagcctggccaatatggcgaaaccctgtctctactaaaaataaaacaattataattagctgggtgctgtggcgcacgcctgtaatcccagctacgcggaggctgaggctggggcaagatttcttgaggccaggagtttgagaccagcctgggcaacatagtgggacccaatattttgtctcaacaaaaagttttcaaattggccaggcgtggtggcatgcacctttagtctcagctacttgggaggctgaagtgggaagatcacataagcccagatgacagtgagctgtcattgttccactgctcccactctgcctgccccacccctgaaaaaaagaaagagctaaatagcatgcctgggttagtaggttattcaaaattcctaacacagctgataggtctaaatcggttcctttcttttctcaccacattcctttgttgaattatctatatatatacatggtttcacatgcctggtaggccccggttatcaatgaaatacttcttttctcaagatatgaattcttaattttactttgaacttaaattaacatta

SEQ ID NO: 32739 - DNA, 3314 bp, Homo sapiens
ctccaagagttcgttttctaatttgaattttcaattttgtgtcactcccctttaacttcttcgaagctaccaaacaggttactgaatcatctgcgttttgtacttacctttttcccccactttcgaatattaaaaatgttcccgtcagaccgccttttggtcaccgcataggggcagtccccaccgtgtccggccagccttccacacgtacagctgtcggatactctgcggtccagcgtttacacactgcccatcccagttaaacaccactaaacaagtaccagtcgatgccagcgccaaacaccgcgtctccgcctcgccctgcgggccggaggatattcaggagagtgggaaaacggccggtcccaaggttaggcttaggcggcaacagaaagcaaactgaacgcacacctctttagaacactgacaacgctggcccggtgtttttaatgcacgaacccggccacctcgagtgaatcccgcagatgcctagagaagagcccggtccagtcccggccccgcgggcccggagcagggagccgcacgaagcccgcagccgcgaaaacaacttcgctgagcccggcctggagcgggggccgggcggcgactccgccctcagcggggagcggggagcggggagcgatgcccggggcggccgcgacgtcagcgtccccgcccctgccgcccctactcccggccaggcctcggggacccccgccccacaaaggggcgcgaaccccaagtaggagacgaggaagggtaggtgccagccgccgccgcccttcgcaacccgggccgtcagccccgcccccaccgccgcagcgactcccgcccccgcgcccgccgagaccaaggcgctaccgctcacactgcccctccccccgcggccgagccggcgcgggcccccgcacctcccccgctcgcgcggcctcgagtccagaagacccgcctccacacaccggggccgccgccgcggagcctcatgggggttggagtccccaaggtttcctttgtgcgcagtattggcggggccttggactaccactcccacaaggcaccgcgcccgcctcccgcgccacgccccctcgccgctggcttccagtcgccacccagactacatttcccgacaggcctcccggctctcccgccctccctcccgagacacgagccgaactgggcgtcaggtcggggagccggtcgggttcccgctcaccgccgccgccgccgccccctgcagccactctcccgcctctaccgccgcgggagctgcatcgtccactccggtcggcggtggaaccgccagtccggggtcacagagcttgagaagcgacgcgctgagccccccatcacctccagcccgggcgacccctcccgggtccgccctcgccctgcgcagccgcccgagcccccagccccgggcggccccgctccagcatcccagctcctgcactctcgcagccgccgccgccccccgcccggaacatggactctgactcttgcgccgccgccttccacccggaggtgagtgaagctgtgcgtccgaatcgcccccgaccaccccctccgcgatcctgccgtcctcaggcagccagacccccggtcgcccggagcgccgccctccccttcccccgctttcccctcgtcggcccccccgggagcccaacccccgccccctgctcgggcccgcgctcggtcctctccgccgggcctcgcctccgcgtcccctccgcggacctccgcgtcctccccgcgccctttccccagggccgttgcgcctatttctctcccccgggccgcccctctccggcctcgcgtcgacctgggacctgtcggcgcccccagcccctccccgccggcctgcttactctttccccgcccccggggacgcggtccgagccgccgcccgcccctggctccggttgctctcgaggagttttaggcccccctcggaccggggtcggctcccgaggcccccggctgctcccccgatcccccgggcccggtggcccgcgccccgccccctgactccgcgcggggcccagtcggcccccgccccctacggctctcgggggccgcgtcctccgggggccccacccgctctggggacccgagtcctgcccccacccaccgccccccggcgcgctggcctctctcttcgggcccccgccccccgcccgcgggctttgctggctccgccccggctcactccccctccttccggggatcggccctcggggctcccggcctcccccccgcgcggtcccctccccccagccgaggctcgttggggtcgggggtgcgggtccggcgaccgcgggcgggtgggggaggggaggcggcgccggagcccgccggtctcgctgccgcccccgggggttcgcagggcctccccaggcctgggaccccggaatcctgcctggcgcacccccctcacacatactcgcgggatgggccccgcaccttcgggggccgagtgtcgcggggggcggctgccgcgggagggcgggtgggggccgctccgccatctgctttccgaggaggcggccgggggggcgggcggcgtgggccgtgtgggggcggcgtggaacccccagtccccgcgccggtgcctcccgcgcgcccccggcccgaggccgtcgccgccctccacttggcattcgggtttttgacccacttctgctggttccccgccgaaagaaaagttcttcgcgggagttggaggcccgggtggcggcccgcggttcccgtggctgggcaggctcgccagtgcggggagcgcggtcaacgcgggccttcgcctccgctccgtgggcggccctggggtccaagggggtgggagaggagaaggtttgcttgaaccaggttgagaaaataattttctaagggcaccgactttctcgaaagaaaacccgcgggccgcacgcctgctcctcgcggcgggaggggcggcccgagacccctgccccccatttccccaccggctctcccccagcagagtggcggccgggtaacagcacctcgggaaggatgggggtgggtcggacaaggcactgaaaggaacctcagggaacgtgccgggcgaataaacagcaatacggcacacttgttttgcttaggagcaaataagagctccatctctccgtgcttctctcaggagaaaatatctttttgtgatgggtgtttctagatggaatggggctgggacccgcgagcaaaaacctccactattccgtttaaatgtaagactaagcttcgcagtaaggttcttggtttattgtgagttgagatagttgggtgcctggcatcccgactgg

SEQ ID NO: 32740 - DNA, 1192 bp, Homo sapiens
ttccagttgtccaagcctgtgagtggctatgcgtcctggttgggtgctcaaagcaaggaggtgaaaggcgaccagcattggcgaatggggtaagacttgcacaggcccaaggctaggagttggggtttcgggcctgaattggggcccggagcacccctttacgtggcgccccgggtcccgtccgaccctggggagacgcgggtggctgggatggcaggatgagcgcgccctggaggcgagccaggcccgtcaccacctcccagcggccccgcccctccccgcaggtccctcccctctccgcaggccccgccgccgccgccatctttgttgggggcagccaggcctggctcgagatgccgaagtcgtgcgcggcccggcagtgctgcaaccgctacagcagccgcaggaagcagctcaccttccaccggtaagaggcggggacccgggggcgcgggaggcccagacccggggcccgcggaccgactccgaggccttggcgcgccgggcgggaggcccaaaggcgtgcggccgctgggcccggggacaggccgaggtcctgggcccagaggggctggcgccgccgcgcccgccgcggggatgcggggagtggcggacggaggggcagcggcgcacctggcggggccagggccgggacgtgcagggagcggagcaggtgtttgctgaacagactagcgggccgcggccggggtttgctgtgtccctggtcgctgcagcccccgccgcgcgcggtcctgaagggagcccggcacctgggcagtgcagtggaggagtggaacccccaggggcgtcctggcagtgggaagggactctgcagggtcgcgggaggacgctggagactttggagtctgctccagcactcgcccggcccggcccggcccggcccaggagcaatcgtcattagtcacagttgcgctttctccaaggtccagtcacggcaccatttctctacccacttttgggcacattccgaaggggggcttgtgctcatcgttcccattccctctgctcccattgttctgttttgtgataaatgctttgcttgaagtatacgtaatgtacatgcagaaaaatgcacgaatcataagtatacagcccagcgagttttccccaagtgaacgtcactgaactgaaacgttaccagctgggcgcggtggctcaagcctgtcatccc

SEQ ID NO: 32741 - DNA, 2043 bp, Homo sapiens
tggtttcctcaagtgtaaatcaagggctatcataatacttaccttaagagctatcctcagaattaaatgagataacagtacaaagttcattcagcatagtggtcccacacaagataagtttgtattattaacatcacatagactaatatttactgacaacacacactgaacccgctttggttagcatagccaaacttggctagctttcattaccactggaaaacctgagagatggaattaggaattctctggcagggctgaaaagtctggacccatcggcttaaagaaactgatccacctcatgacctgaccctggaagccttctcgcccttcacacctatctcaactccagactagtcaagaacaaaggagtgtagtggggccctactactgccaggctatgtgagactctctcatgttatcttttattcgttgaggagacagggtacaagtgcttggtgtgaatgttgaagctgttgttagggcaccacttttctggcctagggcttcttcctaatctgcagcctccgagccgagggtctgtgtcccggaggctctgcctgcaatttctggacatcgggtccaggggaatgaaagagggcatgagacgcatgcctctgaggctggacccacttcagaggcagagcgtccccacgaaagactcgggaaccggaaaaagccctaaggacgttccctagtggccttgaccttggtgggtgagactcagttcgccatcctgctggcggcgggcgatgacacagcccctcagccaggacgagtatgtgggctgagcgcgagacggggtctcggaggactgctaaccccactacggtggcctcctcggggcccccgtttcctcttgagcgtgcgggggcctctggccctacccggacacagtgcacgcggcgcactggccttcaggagctggggcggaggctggccccggaacccccggcgggagggtctgggcggtggggacgcctccatcgggcggctggcgtgcacgtcgccggggtcacgcggcctccccgacggacccgagcctcccgtggcgggggtggggcggccaccgccagcccggccctcccgaacgaccgggctcggcctcagcccccagagcgtccagccgctggcctcacctccctgcgcacgttcagcaacgagtaatagtcttcattgtccagctcctcctcgctcaaggccgtcgccatcttcgcaacctttcaccccgccaaaccggcaaggccgtgctcaagaggggccagtgatccgcgtcagggacagcgcgggccagcccggctgcgccacagcggcccctggcggcccggagccgtccgcgcccggcgggagtgcgcctgcgctttgcgcccccgcgcggcctagggcgggacgcggcgcctaggcagccctggcggggtgaccacgcgggtgtctcttcgtgctcccaatggacgcgtggcacgcggcgtggctgcgtcctcgggggcctgagatccagccaggactccctagggcttttcctgtactagaaagggaaactttgctttttttttttttttttgagacggagtcatactctgtcgcccagcctggtgtgtgtgcagtggcgcaatcccggctcactgaagcctccacctcccgggttcaagcgattctcctgcctcagcctcccgagtagctgggactccaggcgcgcgccaccacgcccagttaatttttttgtatttttggtagagacacggtttcaccatgttggccaggctggtctgaggctcctgaactcaggagatcctcggcctcccaaagtgctgggattacaggcatgagccaccgcgtcctgcctagaaagggaaactttgaagtcacctccaggagattgtcatcctctgggagacaaacccctgtgataccacctgttaccccactggccccaaactcctggaagaagcgcgaggtgcccccagtgcagggtgcatccggatcctagatatcccccaaatgacatttgttcctacctccattgtcttttctcttggccaccca

SEQ ID NO: 32742 - DNA, 563 bp, Homo sapiens
gaaagcaagtttccattgctgctattccttccttactttggtcagaatcctctttttgtggtatcataaatggtttccatggaaacaaaaggttaggatagaacagtgccaatgtgcatgtaaacttcagaattaaacaagggctgttgtttttgcctgtcatggagttccgttcattctgaacatgtcaccggggactttggaatgtgtatccataactccctgattttcaaccacattccagcctgcctgactcatgaagcgtggagcgacccaggaacatcccagctcctcatgtcccacattcttcaggctttctcttagttttggcatgtgcatgtaaatgtcaacaggtgaggtgagatttgctgtaaagaagcagatggtcccacagggtaggctgtgggagagatggaagttctagcaggagatatcacagccaaagactagcaatctaggcttatcatttgtttagtgcgtcagaaccagtgagtcgaggaggaaaggagacccaaggctatgtggttgccctcacgactgggagtttacatttgcttcctgcc

SEQ ID NO: 32743 - DNA, 897 bp, Homo sapiens
acctcaggtgatccacccacccccccttccaaagtgctgagattagaggtgtgagccatggcacccggccaggagctgcatttttaacaagttctcagataacgctgatgcagctaatccagggacccccactttgagaaccactgacctagagacatatcccaccagaaaggggtgtgcactgcattactcacttagggacactccgactcctgacacatctgatttctcaatgttctggaggtagacaggtatttatgaaactgtccacatttcgcaacaacaaaaaccttgaaatcaccgcttcactctctccttctggcaccaaagccacattgccattgatcctgaaagtgtcagggcatgtttcggctgccttctagctctctaacagaagtcagtggctaccaaattatcaaccaggtctattcttgaccttccaatggcagagaaaatggaaagtacactcttgattagcagccttctgacacagtgaagcagctccaagttcacgtttgtcctgagtgaagaggcaagaaccatgttgggtagggtcaggtcaccagggagagagctggcccaagggaccctgtgatgcctgccttcaacggcaagtttaatcttccccccataaacatgcttcccattctcacaatcattttctttctttctttcttttttttttttttccgagatggagtcttgctctgttgcccaggctggagtgcagtggcgtgatctcggctcactgcaagctccacctcccgggttcacgccattctcctgcctcagcctcccaagtagctgggattacaggcgcccaccactgtgcccagttattattttttttttttgtatttttagtagagacggggtttcaccgtgttagccaggatg

SEQ ID NO: 32744 - DNA, 3094 bp, Homo sapiens
ttactaaatacccaatattagcacatgtaggatgctcccaattttttgttgtagttaagtacagtgatcctgtgaagaataccttcacacatacagcttttctggcatttagtgttatttccttagaacagattcccagaagtaagatcactgggtcaaaagatgcagacatttttatggcttttaatacatactgtaaaattgcttttcgaaaggaatatactaatttacaatgccaccagcacttcttttaagaatccgtttctccacacaaatcgtcaacataggtgctattaagaatgctaatcgataaaatattgtcccgccgttgttaaaattttgcaatttttgaggctcataaaattaaagtttcttgaagaatgagtgtgtaacacaaaacattcttttgggacatctttatttctggaaaacctaagacattcttacttgtgaagaccagaaaaagaacacatgttgttaggattggcacagaattcagtgtgacagtcaatcttaatgccagaacacttgaacgaggatttttcacttattttgctagttgtcaccaacagtagcaaaaggaaaaataaaatgcggaagaatgaaatgttcttactgcaaaccgtacaagatcacattgaggggctggagctcttacattcaacttttctttcctttttcttctttttaaacaatttgcgattgcagcctctccttttgtttccggtattacctgcccaggagcagaattccttactttctccggagagaggccggtccctgggagcgctgcccagccacccgcacgcctagccgccccgagagccgcactcggcggacccggttcctaggctcgttcccggggcacctggcgggcgcccacctcccggggggcacgtgctcccgtacgcagcgcgagggcagcgggtgcctggctatttattaggaaaagccccgcgcggactctccggattgaggagggtgggaaactcggctgcccagcgctccacccgggcggccggggctggcgcttctctgctttcggccggcggcctcatcctgggacaggcaaccatgagtcatccgctccgcgggtcacatgggcaacgtgaccaaaataaagtttcggtattttaagccgccagaaaaggggacaacggagctcaccgggggcgggcacaggaggcgggcgcaggcgggcggcgccggggccgtggggacgcggcgccgagggggcggggcctggcgggaggctcgcccctcccccacggccggcagcgacgcccggactcctaggcagtcggactccagggcgcggcacccctgcggacctcagccccgaggccccccgcgtccggctccccaccggcagcggcggcgggctgcgggatcccggagatcccggcgcgtcccccacagccaccgggaccccacgcgccagcagcggcttccccgggaacgtccttcagccccgggagcacgcgggaaaagccccagcgtgccaatgagggagcgccttcctcatgacggtcacgctcgggggcggggcttcccttcgccgctcccgagttccgggaaccccctttgattggtctggacggcctgggaaacactgtagtgacgcccaatcaaaacgccacgtctcggcctcgaggaaatattccgtgtcgggcccgtcctgattggacagttctttcgggttctggccactaggaagctttgtttaggtccggaaggcgggctttcctgggagtgggtggggagggggcgttgattcttgaccaatcctttcagtccgttgggtggtgaccagccaatgggccggatggataggacgctcctcccggagagtagtgagacccctggtgcggggcgattggcggcgggagcgatgagtggcagccgcacggcccaacgggagctgtgcgtgggccgcggggcggggccagggcgggtgcgcggcggcggcggggtggctgggccggcggcggcggcggtacgaggcgcgcgctcggggtcccggtcgcgaggaggaggaggatgtggcgcgcggaggggaaatggctgccgaaaacaagccggaaggtaagagccggagcgcgaggggctggggggcggcgcggcgggcggcgggacccggccccgccggacatcccgggcatcggcggcgccgggcgggagcgcgggggcgcggcgggcgggcgggcgggcgacccggccggggagggggccggcggggtgggggggcggagcgcggccgagtcctgaggtgactcgcggggccggcggagcgcggcgccccacaccccacccccgggggcgggctggggccggagggggcggggggctcgcggggcggggaccgggcccagcgaggaggaggagccggcggagggccggcgcctcccccacccggaccgggcatccccgccgctcccgagcccgctgcgcggcccccgcacccccggcgctgggtccacggtgggggccgcggggcggaaagtttatccgcctcgggtcctcctggccccgcgccccactgctccgggccggtccccgtcgggcggcagcggccggcgctcagccctcgccggccccctgctctccggcgggcagggccagatgtactctctccggcaccctcttcagccccgtggacacctccctgagcgggcggggggtccccgagcttctccccgccagggggaccccgtcctgccgagcgtccctcggccgaagggcctcgtgtgacccctcccccttcgcttcccgggaagggaagggggcctgcgcagcatccccgcccctcgcagtcgttcacatcctactcttgcccttgcaccctcacagccaggagggtggggtctccgtttctatggcaagtgaggatctccacactcccttgccctttaccttccgtgaccccgatccttccttggcacaggggtccgtctgatctgctcatcttctttggattcttttggggcctctgcacactctccgttgaccctttttgccaggacaaggggactcaggctgcccatgttcttctttcctcacccagtggatagtgggggcttgtgcagctctgaag

SEQ ID NO: 32745 - DNA, 978 bp, Homo sapiens
attagctgagcgtggtggcacgtgcctgtagtctcagctacttgggaggctgaggcaggagaatcgcttgaatccaggaggcggaggttgcagtgagctgagatcgtgccactgcacttcagcctggaggacagagcaagacttcatctcaaaaaaaaaaaaaaaaaattatttctttgtgaccttccatggttagctatttagaactgctttagtggtaaattgaatacttttctgaacatttttcctagactttgaaattaggagtcatttctgtttacacatacttcagaagcctgtcagggacagagtctgtagtgacagaagtctgtagggaagcagatatggatgtaagtgattcaagacaagtcataatgctttaataaggctctggaagggaagatggaaagacttccgggaggaggtggaatttgacctgaaatcattgacgggcaaacatggtagttggaggagaaattccaagcagaggaaatggaacagaggcatagagccaagagagtacagggagtgggtggaattcatgtgcatatgggtaggtaagcctcggaaagtaggtaggggtcatgttgttaggggcctgaaagtcagaccgaagaatctggatttaattctctgctcaggagaggcttttagaagttttttttttttagtagaggaatggaattgattggataaagtcgattctcctgaaacaggtgctaataagggccacctagttacttctccagcttcctctctacagtcacgtcacattttttagactctgattgttccaaggtcccacagtgtctggtggttttaggcctcccacattgctgttgccttgatttagaagttgcacctgcctcaggaacacaggcacacacgctcacccatgctcttgctgactttctgtgtcttctgtgtttcagcttaaatgaaacttccaataggagaagccttcttgaccttgcccct

SEQ ID NO: 32746 - DNA, 1708 bp, Homo sapiens
tatacagcttccctgttttttcctccccatttatacaccatgttgtggacatttttgtgtcagtgcctgtgtgtgggtatgtgtgtgcataaagacatagcacgggtatgccataaaaagttttcagccaatcccttattggttgtcgtcatattttgctcttacaataagtgatgcacttaacatctccagttatgttctaggacagaagtgcttgtcagagtgtaaatatttgacatatgcccttagaaatgttgtaccaggccaggtgcagtggccactcctgtaattccagcagtttgaaaggtctgggcagaaggatcacttgagcccaggagttcaagaccagcctgggcaacatagggagacctggctttacacaaaataaacaaaattagctgggcatggttgtgcgttcctgtggtcccagctgctcgggaagctaaggtgggaggatcacttgagcccaggaagtcgaggctgcagtgagctgtgatcgtgcgagtgcaccccagcctgtgcaacagagtaagtccgtgtctcaaaaaaaagaaaagaaaagaaatgttgtagaataccaatttggactctcattagctaaaagtgagagcatccatttccccaaacccttaccaatggtaagtgttgtcagtcttttaaatcctttctcagcccaacaggtagaagactcagatctccttttaatttacatttctttgtatattcctgcaatttagcatggtttgaccatttatgctatttttttggatatgttactttttataatagtcttcagtctttttttctagtaggttcttcgttctttttctttctgatttctgtttttcttttaaaagaagtatgtataatatttctccctttagtcatctgtatttcagtcttagttttcttaactcattatgtcctcatgccaatcctatgagtcatgctcccaaactctgaatctttttggccttgatggcatgtgtacttggtctttcccacaccagtaattaagtattctccctagattttcttctttgttttgaatttttatccttagatgtttaatatagctgaactttttttatatgtgaatgggatgagttagagctctaatttcatttttctccaaataagatggttattattgagtcattgatcattttctactgatttgagatgttgccattaccatgtgctaagtttccacaaatatgtggttttttacctgaactccttgttcattgatctgtttattctgtgcctacaaaattaccacattgttttttctttccttatacactgatttagtttttgtcattctaacatattgtaaagaggaaagtattgctcctattctgttcttaaaggtctatcagggccgggcgcaatgactcacacccgtaatctcagcactttgggaagtcgaggtgggcggattacttggaggtcaggagttcaagaccagcctggccaacatggtgaaaccccatctctactaaaaatacaaaaaattagcctggcgtggtggtgcatgcctgtaatcccagctacttgggaggctgaggtgggagaactgcttgaacccgggaggcagaagttgtagtgaccccagattgtgtcattgccctccagcctgggtgacagagtgagactccatctcaaaaaaacaaaacaaaaaaaccaaaaaactgtcagaagtgga

SEQ ID NO: 32747 - DNA, 1184 bp, Homo sapiens
tggggtggagggagggagaaatggggagttagtgtttaatgggtacagcgtttcagctggggaagatgggtggcagtgatgatggtggcagagcaatgtgaatgtgcttaatgccactgaacttacacttaaaaatggtgaaagtggtacattttatgttacctatattttactacaattaaaaaaaaattcctggagttgcctctgtagctcttcctcaggtattcagctgggcaggattggctggggtggacgaattgtgtgtgtgtgtgtgtgtgtgcacgtgcgcgtgcgtgcgcatgcgtgtgtgtgcatgtgcagggggtgctgttggtggccagagttcggaagggcagttttagatttagagcattttaggactctgcactttggaactatgcaggaaaaaggaaactgggtcagcagtggtttccacgtggtaacctttgcattatgcactgaaccgggaacgcacttcaaattaacacagagacgtgtcacgttaggtgcgtgtcagcatttttgtaatgtatcacaaatccttggccaaggccattgttggccaaagggcaactgcagggtgagggagttggcgggtgccacatctgtcagagttcccagggagcctcctgcccgaggacttcctcgcagggtacctgtcacgtagttttcatttgtttccgggggtggggaatgagctgtggcctgtatcctgatggagtgtctggcggtgtctcgacagtggtagggaagtccccagtctctgcatggaaataggtctgccccagattccagttatctttatcctagttaatcccagaataccacatgtcaaagcaggggcaacccacggaggccactcctcacatcccctccgtgtctaggaagttggccgtggcgggggcactgatggcctggtggggtattgtcacatacactgggctcctgatcagaggacatgtgagcctcatgtgacttcagtgggcttagccacctgttgaaatggcagcaccagtccagggctcatgtccctggcacaagagctgagggttggcctccatcccacccctcctcacttcttggggccaggagtgcaagttcccggtgtcctggaggagccaagagggaagtgttgatgtttgtgtctctgattcctccctgggttagacagctacgacctgtgg

SEQ ID NO: 32748 - DNA, 1847 bp, Homo sapiens
ctgctgacttgccaccggggtgtctttacctatggggggagtgggtccagtccccacgttgccaccttctgagtgagcaccaaggccctcccattgcagttggatgtggccagccggcccattcagtccaagtgcccaggagcccagtgtgcccttcctttggctctagctcctccctcccccatcaggggaccactggggcactaagtgtggtggcagagggcaccatgtgggctgtgaccacctctctccagcagactggggggtgcctgcagagcactgactgccagtgggcaacattactctctggcctgcctcaccattgggctgtctgttcacttgcttctcccagctcagttgtggtctctgaggtaggtcagagcctgggctggcttatcaccaggtcctgggcacctgctcaggatggagcacagagaaggccttgctggcagctgtcaggggtgcgtgtgtccagtggagtggggcttcctgccctgtgggcacattcccgaggtacgggggcctggtgtttccacaatcatccactcccttccagctgcccagggattggggtgtcggggcgtaggggcttctctgggggtgggtacaagtccctacttgccattccccagctaaactgccactgagtggagagggcggctttccccgcagggaattgggagtcccagatgtctcccttctgcgcttgggaggggtgctcctccctgaaggacagggtttttgcttctgagcacatgggccttttgcttctgagcaggagaaagactttctggcagggcaccgtggttcacggaaggttctgaccctgcaggtgggcttcggcgagactctcacgcaagggactttgctcattttctgcccctctgctgccatcaaatgtagcagaaaaaaatgtgtgtccctctccagccccttgctgtaggaatgccagcttcggctcaggctggtagtctggtttcgtaacggccgtgtggccgcgggtcaggtgcttcacctttgggcctgggataatcatgccacctcctggggctgctgggggatccagtgagctgatttccatgaaggcggaatgttggcgatgcgagtttttagctagtccccgacacacactgagaacaggaaacgagccactgggtgctcagctctccaagcacggccgtccctgagtgctgggggatgggcaggtccagccatgttcccggaataactccggcctgggcggcggccagcaggtcagagctgggccagaggtgccgacggtgcccagggtaaggggatgccgggaagacgttgaagacaaatgtgtgcctgtggggagcagcatgtttatggcaaataaaactcctgataacgattcacgaatcctggcagccctgccttccttgccgtacctgggggcttgtactgccaggggaggcttcgtctcatttccttcactgctggggaaggactgcccaggactcaaacaggaaaactgagcctcggagacgttcaactccaacagggagcagcagccgctgctgttcggtcgcccagcggcctccctggaggagagtccctcagtgatgcctcttcaaaggctctgcgtgctgcccactgtccgtaaggagtgaggcaggtgtggtcagagtgcctggacccgcatcgccctttgcctccccagctgcaatctcacttgctcacttggggggctttggctgagctttgcaggttggcctggaccggcaggtgggcacaggcccattgcacctgactgggtgtgattaaggaaacaggaatggaaatgcttctccaactggaggaagtcagaaagccacagggcatcc

SEQ ID NO: 32749 - DNA, 783 bp, Homo sapiens
cttaatgtggacgattctagttcctaagttggggtgaggtgggggtggggtaatgggtcttcttttatttaaactttgtgctttataaatacagaacacacatctttctatgtatgaagtgttacgtactattttttttttaattatatggctcttaagttgttttctttttttaaaggaaatagtggggtctcaggagtagggcagttctgtttttaataggctttaaatggtttgggcctaagatgggctgcctttcatcaccagggtgagctagagttcaggagaattttgaccttatttgattgcaaaacttcaaagtgatgggcattttcagtatgcttacttttcaatgtgagtagaaaaacatacaaaccagaacagctggaatttaaactctggtaacacagacctcaagtccggtcaccttcccttctccctgtcagccagtgatctcactttctacttctccagcccaaacagaagacaggaaatcagactgtcctcacccatgccccacaggctaccgacttccctgtgtgccttccgttctccacctccctgagctctggatcccaccattttttcctcttcatcttcagttttgttttcgttcttgtttttgtttttgagacagggtcttgctctgtcacccaggctgaagtgcaatgacacaatcatagctcactgcagccttgaactcctgggctcgagcaatcctcccacctcagtctcgcaagtagctaggcctacagttgcacaggatcatacctggctaattaa

SEQ ID NO: 32750 - DNA, 3609 bp, Homo sapiens
ggagcctcaggggccagggagccgggtttttctggcctcgtgcttgtcttttctgctgcagaacttctcaggcagcctcgagttagatgtgccagtgccacccactcagggtcagctcctgagcaggtgaactgttcctgcgctgtcccagccagcagccatgagccacatgtggtggtgagtcctggaaatgtggctcatccaagtgccatgagtgtgagacccacacagcttttcaaagacctagcatgaaaagaagccactttttattattttagctttttaatttttttttttatttgagacagagtctcatctcactctgtctccgaggttagaatgtagtagcactatctcagctcactgcaacctctgcttcccgggttcaagtgattctcctgcctcagcctcttaagtaactgggattacaggcacctgccactatgcctggctaatttttgtatttttagtaaagacagggtttcgccatgttggccaggctggtctcgaactcctgacctcaagtgatctgcccaccttggcctcctaaagtgctgggattacaggtgtgagccactgcacctggccaaaaagaagccactttaaataacccattaatatttttgtggattacatgttgaaataatagataaaatatattattaaaattcatttttcctgtttccattttacttctctactgttgctactagcaaagtttaaacatggctttattatatttccactggacagccctgggcctgccctagactaacagagaggctggagacctagattactcttaatcacacccattaccaagactctgattcttccactggtcctgcgtcaggctctgactcataatgagaaacaggatacggctcagtgacaagggtagggcttgtttgatggtttgcttggagacttgaaaggcacctgggagaacaacatagtgtaagaaagtggagctctcttcccttgacagtacttggctgttgcttctagcttaaatattaaagtctctgctggtggatggaggagcccagctcccaggttgtttcaaagtggaaactggtgaagcctaaatttgccttcattgcttatgcagatccagtagattggcaagagaacaagcctgccccgaggcaggtctgcagagcgggggcgtgcttggcagaggagggaacaaggaacatggttcagttgcggccagacctaggcctggccatgtgccagggtgcctggactttggacaccggtgtgttcagagtgtgatctgatactagcaggacttctggctgggagcgccactgtgggtccaccacagggacggcctgggaccccagagccctttccctcataagacttgggagttagagacaaagggatgtctgccatttatcagttgatggttaataatttaattcttccctgcatccatttattgaagaaacataagtccacgatgtgccacactttgctaggcactggggatacagtaatgcacaaaacagataggttcttcaccctctcgaagctcccaacttgtgggagcggggaagaaacagacaggacagaggagtgcaagaagtcccttaggagccctgagagaaggactagaggacagtgtgcaatgcatatgcctagatgacaagtagtggccaggcactggcccttggtgacggaggaggcaggaacatttggcctgtgactaagggaggaaaggccattgctgcaaagagctgggcagggctttcttggggacaggacagtggatgccctaaggctggaaggaccttggttgctctactgccagaaagggatctgtgggcctggagagcagtggacaaggagggggcgcggtggaggggccaggacccaggtggcacagcaggatcagctgtggtatagatcttggattctgttctaagtgtcatgagaagccactgatgggatcgtagcaggggtctggaaggcagtgggggaggttctggacaggtaactttgctttatgctgagtgatgctggatatgtcccttagaccctctggctgttggcttcttcatctatggagtggaaaggctaagagagtggaagagaggtgggccagaatgttctccgaggttccttcctatttaaaagtgccatgatttggagagatcccagtttttttcccttcttggagtagagttacctttatggcttctgggatggattttagatggcttcacagtgccagcatttctgtgaagtcatcaattcatatccatgagttctttggcttcataagataaaagaagacagaatgcacaggactgtgttggaattgccatggagtgcctaggttttcactcagcagttccatggtgagacctgtgcattggtaaagttttaggagctttctgggtcaatgattctgcacatcagcaggattgatcccctggagtttgtgcctctattaggggactaagagggcccctgtagccagaggctccagaggctctctgtagcagtgtgccagatgcctgtgacatactccatatttaactgttcagacctaccagcaggccaagggttttagttcagagattctgagcacctcactttgcagctggggaatctgatggagctcacagaataaacaaatctgtggtaggctgaggggccctgtgatgggcttttgtcacatgctgatgagtcatttgctgagatggcaaagggattggttgtcatgagggctgctagtgaacattgggatcttggggccctgacacagctggtgagcaacattctgatgcatgttcccctgcccctctcagtgaggaagccagctgagcatctgcacaaagcttaagaacccaaggggtagagctaagtgctaatctgactccctcttggacacctataaaaatgtccagaggcttccaatggccatggcaaagtaactggtagtgaacttatcatcccacccaaaccaactagaacactggacacaatataggaaacaactattgttggataatggacagcaggcaggaaggactgtaatatctaagaggaggaaataaacaagctctggctttctggctggaggcattttccagacagtgcatgggggtgagtggcaaccaggcagagtacagcagtgtagcaaagttgaggaggtgacaactagagtttggggaggctgagacaaatggaatccatagggtagagtgctgaagagtacagaggagaagggggggtcagcagagaaagaggtccagaaatctggatagaagatgtccttgattctttggctaaatactaagctgtgtatgcatcatgaaactgtatgaggttggtcaaaagacaaccactgtgggccagaagctaaaacttctcagggttcacacagaactgggaaccactgtgagccagaagctaagacttctcagagctcacccagaactggcagatgttcaagttcaaactagtcggtgtgaagagatgctaatgaacacctgggtattccacagagaccccagaatgatcacatcttaataatggagctaaactctccctggagtgaagacaactccagacctaccctaacaaagcgtataa

SEQ ID NO: 32751 - DNA, 1299 bp, Homo sapiens
gactctgagctgcctcctgctgaggacgggggaactacagcaagaaaaggcccagaattagcctaaaatgtaaacagctgagagctttcttcttaactgggtgaaattttaaagatcataatacacctctacactggcctgcaagctcagcccataagacttccccccttagggatggtgtccatcattgagtcctgttttgaaaatcaaaagtatttttaaaatggaatttgcggggaagagggtagaagttaagtttgcgcctccagaagcagggtaggcttaatctaaggggactgtcattctcccagctccatggggcctggcaggaggcggccctctcagtgctctcggccctgaaggaggctgtttggttctgcccctcctcctgggtctgagggcaggtggcacccccagcagagaccagccccatttaccccaggaggttgggctccttccccctagtttcttgggtgccctcaggggccaggccttgcagctgagagcagagagtcccagctacactcaactgtcacagactgaagggcaaagtgcatctggcagccagcacggatgtgttgtcctctgactctgtagggtgacctgtcccatatgcctcagccgtttggggacagcctctgaaagagccaaatgttcctctccaaactccgtagcaatagatggtgaagagattctgagctatttatggtcaggagagatccggctgcctcatcccggtggcagcgtctgagtaacattcctcggtggggagagcggcggatggttctcagaaagaatcgaggctttgggcacacatcactggcctgtccccacttcgtctttccacaatgaggcccggactgttccatcgggaaggggcttctggactcatccctcattttctcaaaggagagccaagctccggagagggagtggcccaaggtcacagagtggtccggtgcccaggcagctccagagcccagccagtcgggcctctgccgtcacaccagccccagggtcacgggctttggctttgatttgtaaagatgttctctttcacaccagcccccaggtcacagcctttggttttgatttttgaagacgttctcctcgcttgcagggagctaagccttccttgggtcacttgtattggtttccatagcaaattaccacaaactgggtggcttaaaagcactgaaatgttttcttttcagttctagaggccagaagtctgaaatgaagatgtgggcaggtgggttccttctggaagctctaaggcagaatctgtcccgacccctc

SEQ ID NO: 32752 - DNA, 616 bp, Homo sapiens
actggttgcccctcacgccacctccttcctgtgatccaatcctgaaattcatccaggagagttcttttccctggcttctgcttttgatccctgaggagatgcaacccttcctttaaaagttcctacattccactgtaggtcaattacactgtaacctgaattggggccctttcagagagggccggagaacttattgcttaagctggaagggtggagggaggaagcacggggaggaggaagccaggggcaaacccggaccagcccgtgcatgtgccaagggctggcccaggatgtcggcagtcaccagcaggagtttggctgcacatgggccccagccagagacctggaggctgttctgctatcaacttttaattaaggaaagtcctctagtgccattgaactttgtcctgaaagtggaaggcaggggtgccttgctggttggttcatccagtttgttctctgagcctggcactgccctgttcaccaaggccaaggtcctgtcagcctcctgctgtgtcagcacagaccctgcctgggacccctgcttccccaggtgggtttgaagggcctcacctctgctctccatcaccccccaccgcagagggaaaatcagtgt

SEQ ID NO: 32753 - DNA, 800 bp, Homo sapiens
aggtgtgaggcattcccattcatgtgagctccatccccgtgactcaatcatctcccaaacccccacctcctaataccatcacctgggggtttaggatttcaacataggaatttgggggaagacacacatgttcagaccagagcagaaaggaagcttgctaaagacagaagggaaatggaagacgaagataaaaggctgccagggctggccaagggcccagtctgataagaaaccgcacctgtgatccagctatctgtatggacagccacccccttgcccatccctctcagccccagcccagccccagctcttccagaaacaggcagccggcgcctgaactcaccaaagccttatgcctggcctgtgttctaccaggaagcaatgtcttattttaagccatatttgtttttctggttcagaagggtttactcctggacaagactcaagttcttgcactgggcaaacctaatggagtggcatgcaggaacagggttagcatgctaaggatcgatggaaactggggaaagaaaaacctggcaaagcaccctacttaaccctcagagtgccagggccctgctccccagaaccccttgcacctttgcagctgggcacaccatggagtttacacagattgacaaaccctcttgggcagtgggactatggttcccattttagggtcaaagaaactgaggctttggagagtgaactgctggtcagcctgaggtttgcctgtgctcagcggggccacagctgcttccgtgccatccagataatggtgtttctatgaagggaacagtggt

SEQ ID NO: 32754 - DNA, 1048 bp, Homo sapiens
catgacctcatcttaacaaattacttccataaaggctcaatttacctgagccaggagagggctctcagggcttccctgcaggtgtccacccgacaggcggcagcatgtgggccgtgcagggagtaacaggagaaagacacaacaccatgtgccgagctctgagccaagggctgggagctgggagctgcgagctggtcctgtgcacctgccaaacagaccttccaagcagacactgccaggcgttatacatgactgtggaaatggggcggtgcctgaacccacccaggaaggaagggcagcccactccccttgcccccatcagggagccctggcaagtgagctgtggtgttggggaacacgtggcacctcgtttgcacagcccaggatgtgcagggatgctccctggccagctgagtggaaaaataaattacctgaggggctgactcaggccggtcattttgccagtgaagctctgctaacgctcactgggcacgggccacgatcaatatgcctctatttttaactccaggatcagcagggtcattttccagagaacacgggctgtttatttagcttcctctcgacgcgatgcagagaggtccgcctggccagctctgtcccgtgccaagccaaccggctaacctcagccgtctgtgccttcctggggacagtctttagactttcaggggtcaggtagagagaggccaggtgtcaggctggctgagatggaagaaaagttccaggcttcccacctccagccaacttggcttccacctgccagtttcattttgcaggccccagacccacaagctcttggcttactgagaggtccgtgccccaaccccagcccagtcccagagctccaccagggaaggacggacatgtcgaccagcaatagtgctaagcctagtggcagccgcatgttgagctctgggctgctgcttcatgcacattccctgcctctgacgcagcaggattctgcttctgtctgtgcctctgtggtctcatctgtagaatgggctaatattgttgccttggatagtggtga

SEQ ID NO: 32755 - DNA, 1014 bp, Homo sapiens
cgggcctctggccagccacggggcctggccatgaactttgcgtccgggccaatgctgcagtggccgggcggtggtgagccttccgttccccgcctgtccctcccggcccctcccctcggtctccgcagcttctcggctcagcccctcccgtccccgcgggcgctgggccgattctccctccgcgctggccaggccgtggagacgggttcgccgcggagaggggaggagggctggggaaggggtgggcgccaggggactgcagcgcggagcaaactggggcacggctgccggcggcgcgcgtgcacacactctctcccacgcgcgcgccctcccgccgacgcgcagccgcaatgcggggcccttcgcggaactgctggcggcgccgcgccccgcggggtctggggccccagcagggactgcgaggaccgcgggactaggaaggcctgagcccggccacccgcctccgagtgcgccgcaccgtgcggcggggaccacaggccttcggtgggcggcgagccctggctccctcgttcggtggcctctgctgcatgtgggatgcgccctttgtcccctctgccatgcgcgggggaaaatgtttgagggcggggaagagactgtctgccctcatttgatctaaaacatgaatttgtttgcttggctaaaggccgggggggggcgtgggtccggggcgcagagaacacgcgcgcgcgcgcgcgcgccagcagcagcagcagcagcagctgctgcggcgaagtctttgtccccgcggcgcagcctttgtccccgcggcgtagcttttgtttgcgcagccccgccctgcggagggcgatcgtccccacgttggggccggggggcagggacccgacgtccccaaaatctcagctggggcgcagccatcctgggagagaccgggcgtggagatgggggaaggtgggaggaggaatcgcagccttctggatcccggagctgcagcgcctcccccagacctaggggtcttcccctcccttcccctgc

SEQ ID NO: 32756 - DNA, 1564 bp, Homo sapiens
tactttagagaaacatggtgccctcaggatcactaggttactctggaacactcagcagaagccagtcatctgtctctaatactgttagaaatggtcccgagcccagaataacatgaattgcccccaccctcacttatccacgcagtccctcgccagtggctaatgcaccacgtttacagaccacgtccccaagcgccagcgcggacggcggtgcggacagggagctgtattgacctgcgttctgcgtttcagagcccggaccgccctgggacccctgtggccctcaagttcccaagtgacctcgtccggggaggggacgtctcgctctgaccccgccctggacgcacccacccacgacgcccccgcccacttccggcgcgccccctcttcgccccgcccactcccccggctccgcctagtgacgtctttgccccgcgccgcgccgtcccacccatctccctggcctccggtcccaacttcgcttctctgctgaccctctctcgtcgccgctgccgccgccgcagctgccaaaatgtgagtgacgctacgcgacgcgggcggcttcgggccccgcaggcggcagctcgcgctgggaccgccatactgcccagttgccgccggccgccactcggacgcaggccggggctgcgcggggatcccgaggcctgggggtgggcggtggcccttgggtcgcgggctgcagacgggccgggcgggtcccgcggccatcgggcggacgcggaaggggcaagggcggggcggcgagacgcttcccggaggaagtgagctgcccgcccgcagcccgctcctcgccccttccctttctagtccccgacgtccctgagaggaatggggacgacagccctggttcgggagcgcccgctctcggcccggtgctgcgctgggccccagaagttgcgaaagaaaggacctcggccctgtcctgagcccctgtgggccgaagagctccttgcctagctaggggcatctgcactggaaagatcacttaaccgtgggccttcgctctcttaagcgaaagcacgttgcaaacccctgcttccagtggtaagactcagagaatgctaatggttaagaatcacaaggactccctcttccacctccattctgctcattgctcaccgtcggaggaagccccgggtttcttccaggagctggggacccccctcgaatgttcctgctgaggctgctgtgccaatagatcacagtggttaagatctagagccaaggtacacaggacctgatctaaaaacaagctgtcctgcagccagctgtgttgactctctaaacctcactttactcatttgtaaaataggagtaatattcccctcagagagttatgagggttaaaggaggaaaagcatggaaagagtctagcgccacggcatggtccttacttatctaccagatactaaactccgtgaggacggtgatgagatctgttgtagccctggtcattgacacatgacagatgtaaagtgactgttcaaacagcccatcagactgttgtataccaaggcacatgctaggtgctatctaggataca

SEQ ID NO: 32757 - DNA, 1531 bp, Homo sapiens
cccctgcctctcgctccccacgtctctcggcacccccgctcccatccgcccccccgtccccgcctctcgcccccatccgtccccatttccagcctccccctgaccccgactcaagccccccgactccgcctctcgcccctctctgcccccgcctctcactcccctctccttccccgcccgcctctcacgtggaggttgggccggacccgccccgccccacagagcccgggtcccgcccccacgtggctggcagcttcctggccctatcatttctgcgctggcttcagcggctccgccccggcgccgtgccagggggccggacactccagtcgcgcggcacaggcctgaggccgctgagggccaccccgtcccctgcccgcccgccggcctgctgggattggccgagcgccggcctccgcccgagcccgcgcgttatgtaacgcgccccgggggccccgccccctcgccctggcttatataacccgggcgcaccggctcgcgccccgccccagggccaatggaggcctgcggagtcggccccgacgaccaatcgcacggcccgggggcgggaccggtcacgcggcggcagggggcgcggcgccggctgctgaccggcacgcggcgagcctcgagactgcgcgagggcggccccgggggcgagcggctgtgcgcggggccaagggcgggggcagcaggtgagtgcgcggccgggcgggagttctgggcggccgggcgggagttctgggcactcgcgcgcggcagaggagccccgcgagccctgccctcggtactgggggcccccggagcgtggcgcttccgagccacccgcctccccgggccccatccctcggcgcgcgggaaagttggggcaggggtgaggaccgcgcggtcggggcgccccagccagccgggccgctggcgtcggactgtctgttccatttgtcccttgtcacccttgtctcctccccctaggccggagtcctgaaagtcgagcgagctccgggttttgaaaatgttggagggaaaagctcctcggagatgagcgtgaccccctggctcgtggtggccgcctgttctcactaacgccatggcggggaccggagtgagaaaccggtgtctgtcactgactgcaaagtgagcgagaagcaggctgcgggccgtcccagcacgacgtggagccccgcggagacctcgagatgccccgcggggaagctcctggccccgggagacggggggctaaggacgaggccctgggcgaagaatcgggggagcggtggagccccgagttccatctgcagaggaaattggcggacagcagccacaggtgacgcgctggcttcaggccgagggccccatgcgttcgttgtccttccctggagcagggaaagggggacctaaatctttttattcttttgttttcaagcccaggggaaagtgtaaaggggagactcgggcaatgtaggatgaagtgatccgtgacactgaagaaaattaccgaagagtatcaggagggaaaagtggttacaaaagt

SEQ ID NO: 32758 - DNA, 684 bp, Homo sapiens
aacacattttcttaaacagagacatgttttgagatgtgaagtttgtatggtaacaaaactaaggagtgaaaaactcttcaggctaagttattgatgtttatttaaagggctattgaagagaagttattacatattaggagaaaaagtctagaaatgggcaaagggagcaaaagttccaatctcaccccttctcagtgcccccacccactcccccagatggacagaccttgagatctcagggctgccggagaactttccactccttggtcttcaggcttctgcagctcgagaggacttcaggtcaaacacaggagtgcggtgactcagccaggggcggggtctcatgggaaattcccaccacagctctgtgacagccctatgaaatcattcatttcatatctgctgaccccgaaatcccctagagcccccgtccctgcctgataatggcacttcaaattgcttcttggaagcagctctctactgtcaggatgtgtcacagatgacgctgggaaaacgattttgtcccttaagatagctctccaggacaaagcatttagcatgtccttaaaacactggatttgagattagaggaatgaaaccaaattcaaaacagtgatcagcattttgccatatgcggtcccctaactccatagtcactgtaatgcaatagctgccattacttga

SEQ ID NO: 32759 - DNA, 2230 bp, Homo sapiens
tcgacaacaatataggtttgaaaaaggaaagttttattagaacgctgcagaagagtgcagcctcagcaagagagaactgagcatgccgcggtggatttttcatgtcccttttcgaatgtctcattttttgcaaattcaatccaagttgcgttcatttagccaggatccttctaagctcattcaagaattttgggctttaactatttcctttgatttaacctggtaccaggtgccaactttagataatagggatatctaattacttctaaattcctcagataaggggcctgcttgatggtcaccaggtgatctgtgctctccttaagagggaataagacctagcgttggcagagttctgtagggtgactatagttaacagtaatctgttgtatattttaaaatgttattattgaagagagtaactggaatgttcccagtataaagacaaatgtttaaggtgatagagatctcatttaccctgatttaatcattacacattatatgaaagtatcaaaataccacatgtacccagaaaacacatacgtctcttacatatcaataaatacaacttgagattatgatgtaaatacatctgaccaacttggtacttattagacttatgtgcgcagcactgctctagtcctgtgggtgcagcagcatcaggatcgttaaagaaaacaaacaatgctgagaaaaaaactcacacccctgagacatccgggtgtgaataaatgcggcagagtcgcccgagatcgggagaccaggcgtgggggagaggtccgggaggcctggaccagagtcctaacagaccagaggcgaaacgggaaggcgcgccagaaaaggaacaacgcaaagggagcaggcgtgcacggagcgcgaactaaggaacccctctgacaaccccagtccctcggcagttccagagaccggctcctcacggagggtggcggtagagactgttaagccccgcgggcgccggggcaggccggactgtgccattcgtggggggtaccatgtgggaccgagccgcctcacccagggctgtccagctagaaactccccggtgccacccccgcctcagtccgaggtagactcggccggacgtgacgcagcgtgaggccaaggcggcgtgagtctgcgcagtgtggggctgagggaggccggacggcgcgcgtgcgtgctggcgtgcgttcattttcagcctggtgtggggtgagtggtacccaacgggccggggcgccgcgtccgcaggaagaggcgcggggtgcaggtcagcgccagcgggggcgcggcgcatgtgtgggccgtggcgctgggcggcgtgggggtgctggacggtgtccctgtgctggacggtgtcccgctggctcagaaccggcgcggggcctgggtcggggccgccctcgcttccggcctcccagtcgggccctgtcgctggcgttggatttgactgaccgccagcgtggtggcaacgctgaagcgtccagaatcttctgcctaacctctcgccggcatggaactggctagccgttttattaaactctgttttgcgtggacggtaaaccctccagataatctgtaaataggctaaaaaaaattcggaacctcgttgagctgctgtcgttggcagtgagaactccgcgcagagagacagatgtagttgggttgacttcagtgaggggatttccatctttctcagtcattaaaaaaagtgttcagacatttaacactgttgacccccacacacaattttttagtacagttataactaagaaaacaaaaatcccctccaaaaaattacaagttaattgcgaaagaccacatttaaatttttgcccatgaaattcagtttagtcgtttctctgaaacagtgcttcaaaaaagactgtttccccgcattgtgtgaaatgcaggagacccacgtacttgtatttttaaaaaacccatttgcaacatactattaaagttggatttaagagaacatggtagaagaaaatctaagcaatactacaccttttagcaccctcattatgttttcatctcagagcaattaaaactgctatacaaatcaacgttaagataactaaactgctgcttttttcgtattcagttgtctatgaaaaccgtttccctaggaagtacttactctgcttgaaaatgctcctaaactttaaattttggggtatctcagggttgcaatgaaagttttttgaaatcttttttttttttt

SEQ ID NO: 32760 - DNA, 552 bp, Homo sapiens
atatccatgttacattacactcctggctatgacctgtcacatagttgttctgtgccactttgattaacagcacagtgtaccttgtcttggttggtcttcatgcttacaggaaaaagacctgccaacatcaggatttgtaaccagaaaaggcattgaaaacatatcctcaaaatcaggctatcaaattttagaaggaaacctttcagacctagaatcagttatggagaagtgagatgataaacagttccagaaactgtaaatggactgcttctaagccacaacttgtcttcgtacacactgatgtatacataatatggcaaagttttatgtgcaactgagggtgtggcatttatgattcagaaagaatgagttcgtgtagatggaaatgggcatttgggtggggattaggcaaggacagaattataatgcacgccgggtggatggtaacacctctttttgtctataccaaaactgttcagagaaaactgtatccataaaactgactttttgcgattactaaatacatagaatcatttaagtatccaatttgag

SEQ ID NO: 32761 - DNA, 3337 bp, Homo sapiens
cacagatgagtagtccaggttttagaggaaaaaaactttaagtgaacatttcagttgggtaaattcagtttctcactgagaatcttctcaatctcatcttgccagatgacaaatgactgtctattattgttaaggtttgtggactcttacaaaaggaacagtcgaattgattcagcatcagctaagcatggaagaaaaaaaaatatgtaactgtgaaaacaaaaacaaaacagatttctggctgctgtcctcagaagcctcccgcacagacgatgttcctgacaggatcaacaaacgtcgcatttcactgtcccacagtgcagcttcgtccatcagccactgactggcatgggccaggagcagtgttggtctcggtgacagtgacttccttgccctgctctgaatgagtgtcctttctgtgaaagtaggtctcatggttctagggctgatcccagcgccatcccacaacatttcagtgtgcccgacagcgtgcctggcaagcagcgagctcctgacaattggaagctgctaatgctgttacagacatctgcaagcaagtcagatcagccagcttccatcacgtgagacaccttggaggacaaagccacattgtgtggaggaaaacacaccaccattcaggcccatcgtcatcctgctttctcctatactcagtctcccacagtgccaggtagttttctgcctgtactaagaagggtgaatggaaaggtgagatgtaaaaacaaacaaacaaacaagggctcgaaatgtctatgggaagataaaattgtagcagtgctttagaaaacaagaagcgcatgattaaatggactgttgttttctttagaatgcgggtattatcattggtattgaggtgacgcattaggactttgaggtgcctcccccaccctggcctctgcgctggcagtgagaacccagcccgtgctatcttcacagttctcagcccatggaagcacaggccacctgggctcctgcaaacaccagacgtgtaattagaggctcctgggctgggatgatgtggtgtgcagacaagtcttatcacgcgtctgagccgctgtgggtgcctggagttgcctctgcagcccggagcggatgagcggaggctcccgtgactcacccaactgcaggaactgtcaactggcttctgcccagccaagaacttttatcaatcactaagtagagacactgtgtacaaggacaccggttcatccaagaacatcaggacagccaggaattcaaaacacaaaacacagcttcctgcatgttgcaccccaggcggctctgaggctcagcccaaggaaggtttggggctcgggccagaaagacacgattcactctgacttacacaagaggggagtgtacaaaagtcatgcagtctcaggggaaggcactgggctaaaccctcatgactgtaaaatgaagaaataggcatgaagcatgactagggtgtttatttgacgaggacccagagttatgtccaaggaatgaaggcgttgcctttctacaacagagcaaaatgtcaagttaactgataacatgtacattcctcaggactggtccctcagtgagacagcgtttttagcggggaaaaaaagaacaaatataagtgttttcctggatgctgttttagggagcttgctacaggtttacttgcttgcggttcctggtaggtttcaggattcccagggtgagaggtgatgggccaaagagaggcacgctaaactgatagcctgagatcacagcttccttccttcctttccttcctcccttccttccttttctttttttttttttgagatggagtcttgttctgtggcccaggctagagtgcagtggcgcgatcttggttcactgcgaactccgcctcacgagttcaactgcctcagcctccgagtaggtgggattacaggcgcccaccactgcgcccggctgatttttgtatttttagtagagacggggtttcaccatcttggccaggctggtctcaagatccacccgcctcagcctcccaaagtgctgggattacaggcgtaagccaccgtgcctggccttctttttctttttcttttttttttgagacggagtcttgctctgctgcccaggctagaatgcagtagtgcgatctccgctcactgcaaacttcgcctcccaggttcaagccattctcctgcctcagcctcctgagtagctgggattacaggcatgcactaccatgctcggctaatttttgtatttttagtagacgggatttcaccatgttggtcaggctggtctcgaactcctaacctcaagtaatctgcccaccttggcttcccaaagtgcagggattacaggcatgagccaccatgcccagcccccacagctctctctctaagacaagtgcaaactagtacctggaaaggagtcctttctttccattcccgagccccctccccacaccaaaaccccacctgctgccatgtggcggggacgctgaggaacactgactatcacagagctgccttaatgtaaatgatttcctcaggtgcagaaaaacatacacaccaagtatggtttgccactctgaattctggacagataacatgacggcagaagtaagcttgtttaaacacgctctagtaatagcttcttagtggctgaggttaaagcatagtgaaatttgatacattcaggtgaaaagcaaacatgaaaatttgcatcctcccagcaatcaaattacattagacatggctaaatcatgatttcatgtagttaacaagcagtgaagggtgaggccaaccaagttcagacaaattgaaccttctacccaattctactctcctctcctcctttctccgaataaaacccaatactcctctttaacaagttgtatgattcacatgccgagaggaaaagggccaggttgtttgtcaattgatctagtctaaagaaaacaagtccttgactgtattttagtttgaacaaaacttattttcctaaggataagaatacctcgaaactctagtactaagttagaaattcacactatgcctcctggcttgtcacgcacttccaatttgaaaatatggaacctcaaggctgtagatatttgaggcccttaagagaaaaacaattcatgtttttttgtgtgtgtgttttttttttttttttgagacagagtctggctctgtcgcccaggctgtagtgcagtggtgtgatctcggctcagtgcaacctccacctcctgggttcaagcagttctccctcctcagcctcccgagtagctgggactacaggcacacgccaccatgcctggctaatttttgtatttttagtagag

SEQ ID NO: 32762 - DNA, 519 bp, Homo sapiens
atttttagagttttattagctttttacaaaatgccagaaggccaaaattaatttctaaattaatttgaaaaagtagcacctaagttcattttgatagtaactacttccagataaaatcctacatgagtattgtgccaatgtcagtttcctgattttgataaattctatgtcatcactgggggaatctgggtaatgggcataggggatctattttgcaacttcttttgagtgtataattacatcaagatgaaaagttaaaaaaaaactatataagaaatacaaaactgtgctaggagctttacttatttttaagagaaaagctccagtatatcctaaaactattaattatgtgatgaaattaagaaccaaaatagagactagcttaaaatacatgttgattcttgaaccagtagatatatgaatatggcttttctctagtcaactgtgaattgctctggaagatgaaactctatggccttttattttattttttagggtccctaatagtgaagaagcatc

SEQ ID NO: 32763 - DNA, 1891 bp, Homo sapiens
caggaacctgggttttaggccagtactttgttgtgtgacataaccatctttgagaactcaacagtgcataaagtggcagctaacacgcagctgatttcctattggcatcttacttagcaacagagaagagtgtcagaagtcccgggcttgacctatgccacgagaactctttagaattaacttgctttgtgtgctggttgaggaataagttgacaggcagaaggtgctaggggatgtgttccggtggtagtgtggcattggcatggcggctaggcacatttgcttagccaggaaaaatcagggaaaaggtatatgcttgcaaacacaagtaaaaatacaaaggtaagatggaaagcaaacagaactaatgaaacatattcttgaccatatgaccaagaaaaggtagtggaggggaggggagaggcaaaaagtctcagaagcagacaaagttctgcaagtgctgcattcagacatccagtcagcagggacttactgcacccctgggtcaggcagtgcgtcatgacagtgcacaggaagctgagtccctgcgcttggggagctgtccctctttggccagggtgccgcgcacacgggcctgcgtgatctggaacttaactgtttctactactcccaggtatcttttactgtttttctccatctccactggccaaggcagtcttgtctcagttcaggactacagtagcctctgtccattaagtcttcccgtttccttttgcttctctccgatctgtcctccacacaacagccactgtcctcttaaatcacatcaccttcctctcctgcttaggatctttcagtggcacccactacacttttccaggcccctcctcctcctgacagccactttctggaagctgctcagctgtttcctacttcagggtctcacacattgtctgcttcctccactggtaacatgcctacctgttcactcccctccctcagcttccattctaacccttcagagcttaacacctcacaggtcccattatcagtcctcattgctcccattgttcattacctttttatttagcacttaatataagatgtaatcataattaacattatctgctttaaattccataagggaaggggatgtgttttcgcaggatccagcatggggctgggatttaacaaatgtctgttgactgaacgtcccaagcctgcatcttcatctgtaaaatgccataaatgacacccagcctttagatgacaaaaacagttctcatgtatggggccctcactatgtaccagataatatagtttatatgcagttgtcacaaaataattcccacctctctgcccattttaccaatgagaaaactgagctacagggatttaaaataatctgcctcacacagaattagaaagggatgaagttgcaacttcaacccagataatttgagccctcactcttcactctggagagtggcaagacagtgcaggtgcccgatgaaggtcgtggagggctcccaccctctcccaggggacaaaggagcctgcagaggacagtgaagagaaccaggcacagggctaggtgacatgggactaagccccctcacaaagagcactccagcccctgcctccatccaaaggctgccaggagcccatttgtccactgtggacttgccatctccatgacaggccaaggcaggtgcagattccttgggtggccttaagcaagaagcaaagcctgccaaagggcccagagtaaccgggacctcgtcctaaaaatcagaatgagtcaaaccaagtctacacatcagaactggtttcttctgtcacgttctccttgatgtggactcccacccccaacgttgtttctgatagtaaccccagaatccagttctctttcagttgttaaaggtaaaaa

SEQ ID NO: 32764 - DNA, 12948 bp, Homo sapiens
agtcagctgttctaccaggcagagattttatgatagggttaaaatattatttcagatagtcaagcattatttttctttaaatcaatctctcaaatatatgataaagaaaacattgtcatttaagaattctaattgagaggtcttttgaggattggtttttcagattacttcaatgaagcaaatgtgttatctaccatcaagctataaaaaatttagaaaccaatttaaaaatactgctagcctctccctctgtgtacttagcccagtggtttatcaagctttttctaagcattctacaagcactggcaagactatgaggaaagtatctgtggtaatataaaaatgaaaggcaagataggaagaatatggtatttaagtagtttgaaagcacacgtttgaagatcgctcatccagattacaggaaaatgctgcaggggattctgcaggcccaacccccacctgtctgcaagccaacaagtactactagtaattactgtgtgtcagcctcctaatgccatctaaatcttagctttcaacagaatgattgtgtaactatcgcctctgcagaaattgccttggaattctaaacttacatttcaatggtcacttaaaattatttatatgttctagaaaaagttattttttattcattgtttccatcacctacttgttagctttcttaagaaaaaaatttttttagtataaaaagaattgtgttcactaagccagctcacttctgaccacaatagtgtctttgtgtattcatagaaggtgacctgcctctaaatttcaatggggaattgtgaatgggccatgttatgaaactgtccgaacttcctacttgctagcatgggagacgaggggggcaatataactgccatgttctcttcttttggaaaataacttcaaactgtagactcaaaaagggcaatgtgctataggtttggaaggaagcttttaaaaaaaatgtttctcagattgtaaactgagggtatgaaaccacctgaaactttctctctctctaaaaaccttctagtattcagcacaaatggaagcggggggcggggggggggggggcgcggagtaaataaatccattttaccaacctcaagctaaaaagaaacaaactcttcccaagtgatgtttaatgccaatttttcacattttatctgtcttacaactcattagaggaaaacaattgcaaaaatgtacctatgtggggaaatcagtatctaaaaagtacaagatgggattatgttatggaatccaagaataggaaagcgaatgtgaatccagacagcatggtttagacggggacccaaataaccttcagcataacttctccaaacttcatcaactatttttagcttttttagtgggtctaaaatgcagttaaataccaaatttcagatgtgaaccaccttttcctgttaacttgattcttttctaaattcaacgaaaaaagaagccctaaaatcatttgcttcttgaggttatccttttattaatccacttgtatagcttcaactcatagacagctcctgaatcaatgactccagcctggctcaagcttcaactttgcatttcctattgtctggtgattatctttccacttggatggccctctggcatctcaaactctacaaaccaaactcctcctttcacttcatactccattccccactccccaaaccagttcagggtctaagaggatcacacttctcaaggcaccatttttaacctgaggccatgtacattcaattgccaagttccacagactacttttacatggtttctcaaatcttacccttccattgacaggcatcattcttcctggggtctggcaatatgcaacctattctacaacactagtaccaagtcaatattccttaacaacagctcaagctaagatttgctgctgctcaaaaaaccttcaaaggctcctaaataaaacctcctcagcctggcaatttagggcctccacaatataaacctaatctatattttcaagcgcgcttctattttccccaaatctctgttacaattcgattcatcctttaaggtcagctctaccctgccttctccatgaagccgctccctttcatgaaacactggagcagcggtgctctgttcttgtgttattttgtgctgggccccaattccccttccactcttcaaatcatctaggacagaactgatgtctgatttatgctttccccctgtagatcttggcatcattcatgtctattatttattaaatggatactgagaaaatatccatctcatttttaaaaagtaatgacatgaaagattcacatacactgtgagtcagtgaagagctcaggggagaagcagatttataaaggataaagttaatgcgtgctggagtgaggcgactgcccaataataatgtaacaaccttaggatatgtaacaggaaggaatttttatgaaattcatttccagaattcaaagaagacagtttgtagactgagtaaaaattataagcttcagtggttaacagtgtagctttctaaactggtttctgttacagtatatttacttgaagcaattgggggggtactttcttaaaacagtgttttgccttctcttaaaacactattccttctagactgtgtttttgctgctgaatttaaggtgactttcatttttctaaaaaagttacaccaaaagcacactgcaccttcttcattaaggtgaaatcatatgcctttagcttgaggacagtctctttgaaactgcttaaaaaaaaaaaaaaaagaaaaatgcaggctaccttaaggcagtaacctagatatgcttacctggccaccagatctcattaataaatctcagaagccatccatgggaggaggaggggcacatttttgtcatacaactcatccagttctgcccagtgcttccttatttaagagtgtgatgtaatttcctcctttcaatctggttctagaacctgatttctgtttattcagggtgataaatggtcttttcagttccatttaagaatcacctacattaagtacttccataaccaaggaagataataaggtaactacatttaaaggcaaaatttataaaaggaaactgatttaggaatatgacaaactccatgattttagatcctccccaaatataccaatctctgcatgtttattttttaaaatgtctaaaataatcacctgtgaggaaattaaaacaaacaaacaaacaaaaaaacaccaattttttttttttttttttgagacggagtcttactcttgtcacccaggctggagtgcaatggtgcacagcacaatctccacctcccaggttcaagcgattgtcctgcctcagcctcccgagtagctgggattacaggcatgcaccaactcgccaggctaatttttgtatttttagtagagatggggtttctccacattggtcaggctggtctcaaactcctgacctcaggtgatcctcctgcctcggcctcccaaagtgctgagattacaggcgtgagataccacgcccggcccagatttcattttaatagcctatgatttaggtaggggtaggaaaagaaagagggaggcaagttaagaaaacttccttagttgtactctctaccatggtaagcataagtagcctttaaattaaaaacatagattacttttaaaataatgccatgttttaatgtaattaaaatactcctgcatgaattcaagaaaagcttgatggcttcagtaaacattaaaatatagttcagtgtggcaaagatgaacatttgtgtctgtgtttgcagctccattcctcagaggctcttaaacatgtccagaacataatggaccatttgtaggtggtgaaatagaggcaacagagaaaataatttatcttcaaactgtcaaataaaaaataaatgacgtaatttattcaataattcagaatgctttctagctaagtattttaaaaaatggtaaactaacaaaaaacccattccctcaactaccataatccagtctttcaactcacttaagcctcccacacaattttagtgtgacagcagaaaagtaggatagcaggaatacattcttttgtcctttgtatttctcctacagagtagcacaatcagtaactatatatacacacagaggggagaaaaatattatttctttttgacatataacaatagattatttcttactataaaagtgaattctaatctaaagacaacgagcacaatggtctaatgatgggacgcaagtctttaaaacttcaaatttatttaacaagcatttaagttacccgatgggtaactctagattgttacaattaatataaaaccattaatgataactaacattcactggacatacaactgccaggcaagcatggttctaagtgctttatgtgtatgaactcatttaatcctctctacaatgccataaggtgggctactattattactctcacttacttgaggcacagagttaaagaacttgctcaaggtcaaaactggtgagcaatggggccaggacttcaactagacagcccggcctcagtgtccaggcccttcaccaacacaccacactgcctcttcctgtccctacggctttttaaactggcgaagtaggatccgactgactatactgctcaacttgtaagggtagcacagatccttttttatggatttactggtaatagtttttcttgggtaacctgtagcctatgaaagttcctgtttcacttcaactccctcaaattctcctattaaaagttattaattgtagatctggcctatgtatcctctaaaatgggtgggttaaggcatcaatttgacattctattaccacttcaaacaactattttgaagccctcagtctttaacgatccacggatgccccaccacaacagaactctttacaacatggttatttcatataacacaagtctgtttttactcgtaataagcggttactacatatacccaacgggcctccttttaacatgctttcacagcatggatcccaatgatggcattataatcacactgtattgtaaaatccggaatttaacaatagcataccttatatttgtaaagcactcaacaagttacaaagcaccttcttacacattatctcacttgatccccacaacatccctgtaagaagaggcagggattagaatctccattttgcagatgaggaaacaaagtgaggttaaatatcttgctataagcaaaagggcgatcatggctcttctgtactataatccagcattttccccacactttcactacctctccactctatagtatcttcattttaggcaacaacctcatttctccttgtaacattcttgtttataaatggagaaactgaagcaaaaggctgttaagttaaatgctcaagacctaagtgctagtcaatagcagaggcaggaacagaaactcaactcatagtgctcattcagctcaaaaattcttagagggcaaggattaattcttttcacaaatatttatcaagtgcttattctggattagacaccatgtgaggtgaaaaatagagatggctgctgcctgaagaagccttccatctaatgagggaggaagagaatagccaagcaagcaaacaattttagatggcgataccttccaaggaaacaagcagggtacagcagcaataggataaggaggcagaggagcatatatttacacaggtggtttgggaaggcctctctgagtaggtgacttttaaatggaaatctaaaggctgaaaaagaggcagccctgataagagtcagaagacaattctactgagcgaatagttgtttaaaaaacaatctgtaactagtccagtttcacatctggggtattgaataagagcttttggataatgtcttccaatccttaccttcctattgtttccaagttgaaaagggctccatttctgtagccaaagccccacatttttttgtttgtttattttttaaagacagagtctcactctgtcaccaggctgtagtgcagtcgtgtgatcttggcttactgcaacctctgcctcccaggctcaagcaatcctcccacctcagcctcctgagtagctgggactacagacgtgtgccaccatacccagctaatttttgtgtttttttgtagtgacagggtttcaccatgttgcccaggttggtctcatactcttgggctcaagccatctgcccgccttggcctcccaaagtgctgagattacaggcctgagccactgagcccggccaaaagccccacattttaaagacacattcattgagacctggaagagtggtcttttcgtaatattgcccaattttatggtgtgaggaattggactacagtatcaacaaagacttgaaatctgagaatcctccccaccaccttctgaaatctgaacccccctcagtaacttttccctatcttaaaactaattgttaaggtagtaacttacatttaggaccctcaaactcattcgcctcatctacctttacaaagcacgtgtttatgctgtgtgaacaatgccagaataccacaactggactgcgtttatgtagcgagttctttattagcttttgtatagccagacacccgcaaaggatgctaaatgtatccaaatggatccagatgatgaggtaccaattcaaatttatttagatcaagagcagagttgtttctctggcagagggagcctatgccattccaattcctggagttacccctgacacctcctttccttcctctgctcctttctaaagcaatctgatggtatgcagacaatcaggtcagtttcaagcatgttagattgtgcctgtaatttacgcaaattgctttgaaaagccaccattagtttcagcagaaaggaagtattatctagctcaacttttgagaagcagcagtcaagaggtattttcacacaaaaactcaagcataattaaatcttataaagagtgaccagtatatattgtgaactgcaagtaggaaaaccgatgattgaaacaacagttttacccgtcaaaaatatcaataattcaggcatttcataacagccataaaaaaattaaacagatttgctttccaacccttatcaatgactgctccaatcctgctgagccttaaaaggtaaaacatgctttcatgcaattatttatcaacatcaactatgtgcaaggctgcataagatagaagctatacaaggcagagtgcctacccttaaggagtttacaatctaatatatctgtcaggttataaatcgttagtctaagacctctatcacttattatcgagtgtcccctggaacacacaggtgaaaataaacttctgcttgaagcaaagggaatgacaaatagtttctgaagtccatgctaaatcctttgttatttttcttcaaacttgctaatatctggaaaagaacttgcttgataacatattggtaaccaattatagccagcatgttagcaagaaaccagcttcttttattttggtctttgcaaaatttgatcatttgctgatacctagcctgtctttggtctctgttcaaataaaatttcacttaaaactgtatattgtaattacagaaatataagaaaagaaatgcagttaaaaaaataggtacggtgaacttgggatgttcagtctcaacaaatgtgtgtacccactgcattcttacacatttataaaaggttgaacatttgttctggaagggaaaaaaagggcattttaacctcacctttcttcacccctgacagttgcctagaaaccagtcttgccctacctgtgttgcaggtgtacctcaagtcaccgacacatctcttttaaagctacagtctccattctgacttaagtttatgactaaccatctattcatatttttatcaggtaagagactggtttctttcaagcaatgatgaaatcctaataaagacttagcaagcactaatacagcaccattcacggttaaagagtcatctaatttgtacagggctatgatatacatataaatacacacacaaaattcccaataagcattcacgtcttgaacacataattttgcagtccgattccattcaaagccgtacttaagacactcagagcaaagaatcacgtttctaggagagaaggaagagttcagaacagcttagacgaatttttaaatactgatttcggcattaccatcgtcgctgtgagattaggcagagggagcggggctgaccgccagagaaccggtaccaaccaccgcaagcaatcgccgagcctcccaccccagctttcaagacaggatttacgggtacacggtgtgaacaagacaacgcaaccccctttttacaaataaaaaaaaaatcaaacaagcccccaggcccgaagacgctcatccccgccgggcaaccccgcgagcgcaggctgcgggacgaggaccttcatgctcgccgctcccgaacccccgtccgctcctgcggtcccggtgctgcggggacgtatcccgggcgctcgggtgcatggccccggccagccgaggggccgcgcgacgaccacagccggcgtggagaaggcggcgggcgccggcacttcgcggcgtccccaggcccgggctgcgccgccggggagggtcccgctctccacacctcaatggggagaagcccgcgagcgaccggccggcctctccctccatcccagagactccgcgtcgcggcgaccctccccgcgccctccacgcccccgccctcgcgtcggggagccgcctggatcccggcgcccggcgcggggccccctgagggaacggagcgctgcgtggccctccccaccccctcagcgcgccaggccccttaccccggaggagcggcggctgccccgcggcgccctcccgcgcatgtccgtcccggctggctcagcgccgcgggctcaggggcccggacatcgcgcaggcgcctcttgctggctcgcgctcccgctagcactctgcctcgcaccggaccgccgtcgccgcggctgccgccgccgcctctatatatagcataggccgccgggccgtgaggtcgccgcgtcccgccccgcctcctcccgcagccaatcagggcgcgcgccgcttaaaggggcgatgccgtggccgaggcgttgcgccgggcccaccgtggcgtatcgcggcgctgcagggagccggctttgtctcccggagaggcgtctccgggctgaccgcggccgcagctccgctcctctgcctgagccgtgcggcagccctgggagcctctcaacgccgagctttcctcagaagcccgcggcgacccgggcctcggccgctgttcctgcccgaactgagggcacatcgcgcttcgcgcgggatttcccataaattcaggctccgggcaagattgtgtgttttttcctctccgcgggccgccgctggccgtgtgggccgaagaagccctggagggggagaggggagccgctctcgactgggcttgcggcgtgggagggacagtgagggacacttagggactgtgtggggcagtgaaggatagtgtgggatgatgagggaccgtgtggaccggtgagcgactgtgtgggacagtgcgggacgatgagagacggtgtgggacggtgagggacagtgcgggacgatgagggacagtgagggactgtgtaggacagtgagggacagtgtgggacggtgagggactgtgggacagtgagggactttgggactgtgagggactcggacagtgaaggatggcaagggacagtgtgggacagtatgggacagtggacagtgaggcactgtgaggggcggtgagggacaatgaaggatgtcaagggacagtgtgggacagtggacggtgaggtactgtgaggggcggtgagggacagtgtgggactgtgagggatggcgagggacagagtaggacagcaagggaggatgaggggacagagtgggccggcgtggggcggtgaggctacgcggggggaacccagggctcctctgactgcgttggaatatggaggaaaggtcctgctcgaggttgagcccttcagggtcgctgtgggtttccaggaggagctccctcactactgacttagggggccctcggcttcccaggtttgtgtttactcaggcgacctgagctggccccgacgtcttttggctttggagaggccacggatgcccaaggacaaagccccagcgggcctgtgggaggaggtttctcggggcgccagtgatgcaacttaggcttatagtttaaccgtaaaataaataatacaaatgataacaaaccaagagtgactaaagtcagaaaaaaagcaaacagacggaaaccctctagttttaactagaacaaattccctggctggtcctctgttgggagagcccagagacctgtcgctgacctctagcctcctggagcccctgcttgcacttcagcaataatgcctgatagttagacactgatcactagctaattggggtagtttaacatatggaatgagattctggccttattatcaggttaactattaactctacaccccatgaaatgatttgcctttcccccactattatttacttacattctttttaatttaattcaaaggcctaattttgaattcaaggccttaagcacgaaaaggaaaaaaaaaagaaaaagaatctgaagtatctttgccctctctcacttgcaaaacaaacgaacgttttgcagagagaaatctggcttcctttctgatggctcttctggcttacaaggggctgttgggtcattttcatgcctatgccatttgtcaacaattcagttaacctatcttcttacagccattcatttagtattattttaggatgatggaaatgagtcacaactaattgcagagttccttaccaactaactaggttttttgatccaaagaaaatctgtcccgattttcctcccattttggcgtcatttatgtttgtggcttacccatatgctgttatcagtgtaaaaaaaagatgagtgtgagaacttgccagggtacatcttttcaaacctcacgggacaggatttactgaatgggcacctaaaggagctcaagtttcatctgaaaggagccctggctatactatttcaagtcactacaatacagttgtaatttgtgcttcggccttattggcgtgcttttacattcccctattcataaaacagtgataatcaccagagcaaccatcaaacacaccccttctttagagaaagaagatcaacaggatactcactctacagttgtgagctgtatgatgtgctaatgttttggtaaattatcaaaaatcataaaatcccatgagtaatatgtgattaatctgatttttctattttaaacaacttgcaaaataaacttgatttattcattttttggggaaaacctgtttagccactagtttgctgtgtttagcttgcagttatataatatggctttctcagctgtggaagaattacatgagaagacttacaccccacaaattttttatctaatagtctgttaatgatgtgttataataacattgatatgtcaataatattgtaggacatcttgggaagagtttaaaagcaaaacgctaagcatcttgaagtaatactagcatgttgtgtttattaagtgattattcattgacctttaatagattagaacactacaccagagattcggggaaatagtctctttttcctgaacccaatttgttttaaattatctccagaaaagcatgacatttaaagtaagacagtgttttttatatctctcacagtctgcttaattttgaggccattttccaaggaatttatattagttgatttttttaatagaactcaacatctaaaacgttagacttgcatcacattgacccaaattgtcacttttcacttgcccttctttcagtgtaagaagaagctgtctttggagtgagaacaagggtgaggttctggctcagaaaccttagaatcacagacactgttttcctgaaaacattgcttctttctctcatctcaaagaaatgccacaagtcgtgtgtaagtataacatgctggacaggtccttattaaatttatatttgtattttgatattattttaatcctgtagaagaacatatacattttggtgtttattcttcttgattatagaagtttttgtgtttctactttgtttataataaatattttaaagttaaacacattttgtatgtccctcttggtcctagagcctttgtttctgtctatacataatataaatgtatattatgcacttaaactattttatagataagtgtgcaataaaaaaatacaaccaagagaggaattacatttcctagagggtgtttgcttagtgtgctacattgcattttgggaacattcatatttctgttcatggatgtttccaaaacgcatgcatgtacacacacacacacacacacacacactcaacatataaaataaactctaggtgattcttttcatttttttgagacggagtctcactctgtccccaggttggagtgcagtggcgccatctcagctcactgcaacctccgcctcccgggttcaagcgattgtcctgcctcagcctccctagtagctgggactacaggtgggtgccaccacgcccggctaatttttgtatttttagtagagacggggtttcaccatgttggccaggatggtcttgatctcttgacctcatgatccgcccgcctcggcctcccaaagtgctgggattacaggcttgagccaccgcgcctggtgaactctggatgattctaaaacacacatgctgataagagcctagattcacccatgaggagtaccacaaccccaaagagatttccatggacttttcacttttcaaccttagtggccatttgaaaagtagcacagaaaatatatttcttggcaacatttcatttttcctttttc

SEQ ID NO: 32765 - DNA, 2430 bp, Homo sapiens
atgctaatgagaattttataattaggagtaatatgattatgaacattttgtaattgagaataatgcctaataatagctaacacttttgtggcatttactaagaactagatactgttctaaggcttgacatatattaacttaactttcacaacaaccctacgaggtacatcctatcgttgtacccagtttacaaggtgaggttaggtcatgtgctcaaagtcacacagctaggaactagattccaacctaggcagttagtttccttttaaccaccacaaattctttcatgatcatgttcagtgaaaaaagtcaaacacagtacctggctgacaaaacaatctgtacaacaaatttctgtgacataagtttacctataacacaaacctgcacatgtaccccgaacctaaaataaaagtttttttaaaaagtagaatacaaaattgagtatggaatatctatcctcatgttatcagttaggacttttttttagtgacaggaaacccaactcaaattggataaataaaaaaaggaattcagtggatcagtactggagaagactaggatgtcgctgcacacattgctttgttcacatgttcagatgacatcatgcagggcaagactttctctaacttttggctttatccatgtttgtgttgacttcattttgaggttccttggtggcatgatggctgccagcaaaccctgggatcatctaattaaaaattttaaaaacaacttatttaatagtttgaacaaaaaccctgggcctgattctcacaaatcgaaactgaaggccaggggagtgcaatgttccaattggccaagcctgaatgtgggacctcatttggaaccatggggggagaatcaaatccatctgaggctcaagtgcagaggaggaccaagagtagaggaggactaagagtagaggaggtgatagcttcccagagtaagactgaagaatggactaggaaaaaaaggaaatggatattgtcagcatacatcaagtgtccacaacagccattttcttatgtacagcatttgactctgttcacttacaaatttcttaaagttttctgttctttgacctcggtaacactacacgtcacaccttttgatacctctcctcagtcctgctcggtcatttattcttctcttccttgtatgcttagatgttggcgtcttcgaggctttctttacttattccttagtttagtcatctcattctattcctgagcttttattatgatgtctatgtaaattacaccaaaatctaattgtagtcccattttctctcctggcctgtagtcccttttttttttttctcctggcctttaatcccatatttttaatttcttaccagtgcatctctcctggatatttgttgcagactggcttcttggcaagcagtctttgagatggagatgaacatggaggacatttattagagtgttgaaggaagggtgaggaaaaagaattgggcagagggagaagttaagttgtgatccatgtacgacataggccttagctaactacatgcaaagctctggaacaggattgaccctttggagttgtcctaacttgggcaagagagctggaccttttttcctctaactcttattggtcagtcattgatatggcttgcctttggaaggaagagtaagcttggaaaaggcagttttcttcagctgagtcactctccaaacagggttgacagctaagggccatgttctggcagcattcccaggagcttgaggaataaggcttttcataactcattggggatctgggtagctcatcatggaaacttccttttgttctctctgttgttagtttatccttcctcactccattttcctagtagttttgttgatgtttctactttgatattttgaggctatattattcagagcatacatgtttagaattgttaaatctgtctgataaatccaacattttgttaatttgtagtaagcctctatctctagtaataatttttgcattaaagtctattttgtttgatacttcttttctttactttctttctttctttttttgttttgtcttgttttgttttgggacaaagtctcactctgtggcttaggctggactgcagtggcatgatcttagctcactgtaacctatacctcctgggtttaagcgattcttgtgtctcagccatctgagtatctgggattacaggtgtgtgccaccatgcccagctaattttttgtatttttagtagagacagagttttgccatgttggccaggctggtctcaaactcctggtcttgagtgatctgcttgcctcagcctcccaaagtgatgggattataggcgtgagagaccacgcctggcctgtttgatatttctggagtcacaatggctttcttttggttagtactttggtgtatttttttctaaaattttct

SEQ ID NO: 32766 - DNA, 2471 bp, Homo sapiens
gcaccactgcactgcagcctgggtaacagagcaagaccctgtctccgaataataataataatggcagggcgtggtggctcacacctgtaatcccagcattttgggaggccaaggtgggcggatcacctgaggtcaggagttccagaccagcctggacaacatggtgaaaccttgtctctactaaaaatacagaaattagcctggtgttgtggtgctcacctgtaatcccagctgcatgggaggctgaggcaggagaatcgcttgaacccaggaggcggatgctgcagtgagcctagattgtaccactgcactccagcctaggcaacagagcgaggctctgtctcaataataataataataataataataataataataataacacttccaatgtaataggctttgttctaaaggacttacatgcgttgcctccttcagtcctcacagctactctttgatgaagggtagttcccaccttatggctgaggaaatagaagcaaagagaggtcaagcaacttgccccaggctacacagctaggaaatggatgagccaggatctgaacccaggcagtatggcctgagcctgagctcattagttcatgccaggcagggtttgaccaaaaccttggactcactcctgtctgctttccttcagtgactaagaggattcctgagatggatgtgcaaacatgaagtgtttactttcctccatgggaatgtacttctggcttccactcctcagctgctgctgctaagccagtgagatagatggtggtttggaaacaccctcatgtgtgtttcttctttttgttgtttttgggatccttactgaaataattttcccctcattttatgaaatatagaggttcttgctgtatcttataccccaccccaaattctactgatttgtactgagctgtgataaaaataatgataccaagtacatgcagggtttcttccagcctctaggacctggctttgtcttccactgctccttctgggatgctcctctgagaaccaaaatccgaccctttacatccagatcaggacaaactcacagagtagtttgcgaactactagtttagaactagttcggaatctgcttgttacggtttgtgacaagaggaacgcagaaatcgaaagtaaataagggtaagagactttttagcaattgagcatttgtccccaacacccaagcatatgatcagggaattagtcttgacggggcatggacccctttggatgctgttgaacttgtgatgagttgcatgctgcgtgagctgtgttaaagtcatgggcaataggactgatttttggttcctgaaggggtggaaattaaaacaaaacaaaataaaaccaaaccaaacaaagtaaaacgaaagaagtgaccctttatcacagaaagtttgtgagtcactgctctaacccatatcacattttgccacttgtgaatcaccatagtatttcagtctacatcacataatctaggactggactatacaggtttattattgtttttttgagacggagtctcactctgtggcccaggctgaagtacagtggcgccatcttggctcactgcaatctctgcctcccacctcctgggttcaagtgattctcctgcctcagcctcttgagtagttgggattacaggcacgcgcctggctaatttttttgtatttttagtagagacagggtttcaccatgttggccacgctggtctcaaactactggcctcaagtgaaccacccgcctcggccacccaaagtgcactgggattacaggtgtgagccactgtacccagcctggaccatacagtttttatttatgatttatttatttttatttcatagagatggggtcttgctatgttgctcaggctggtctcaaactcctgtcctcaagtgaccctctctcctgagccgcccagagtgctgggacctcaggcgtgtgccaccatgcctatctatttttttaagtttttttttttttttttttttttttgtagagacagggtctcactctgttgcccaggctggtctccaactcgtgggctcaagtgatcctcgtgtctcagcctcccaaagtgctgggattataggcatgagccactgtgcctggctcagagatacgtttttaaaacctcgttctagttgcttcatttatggaagtctcaccttcttgtttgtattcaggacccatgagttggcactcaaggatttttgcttctatttttgttatgattcaaatcaagagatgagataggagccaaggcaaatatctctacaaaaaaatacaaaaattggcggggcatggtggctgacgcctgtgatcccagctacttgggaggcagaggtgggaggattgcttgagcccaggaagtcaaggctgcagggagccatgagggcaccactgcattccagcctgtctcaaaaaaaaaaaaaaaaaaaaagtagggttggacagaaagc

SEQ ID NO: 32767 - DNA, 1802 bp, Homo sapiens
agcctcaaactcctgggctcaagctatgtattgtttatatatacatacaggtgaaaaaatgtgtgtgtgtgtgtacacacacatagattatttgaatttaaaatatatggataaacacatatatacatgttttaaattcagaaaaccttgatggtgtttgaaggtagactcctgaggacttgagggaaggaaggggttaaacaaggcactgggcaagcgtggggcagacttctcgtcaggaaatctggtatttcaggttggactggactttggagatggctgctcctttgttcaagtgaaaaaatgctttagatctggctgcgctctcagatgtgacttgtacaaaatgaattctagacttttctcgcatcaagaaagtgaagtggggccttccggtaacttgaacagactttaccccgggaatcccagacagcagcatctccgattccctaaagtgtgcacaattacagctgtggcaaccgaccctaggaaggctcagcaccacagcgaacccgagaatattgggaataaacttggaaatgtggagataggttcaacaaacctttgggtgttcagctgtttttttacacaaagccgtttatttagtattagattactgtgagatttcacattttctgtgagaggaattcttaagtaacagtgatagtgaagttgccaggtttacctccacatgattttgttttcttagtctctatattttgggattcatttatttatatttctccaatgaccagcacctatcctgtagattacttcttgcagaaactttttttttttagttgcttcatttaacctgtgactaattggttaaataaaaacaacatgtactcctcgtatttacaagtacatttcgttctgggccagataaaaaggagtaaattacactgttcattcctgtcgttttttatccctccctttccttcaaaattataaacaaaatttacattagaaagttcttaattgcttaaatagtgttcctagtgtttatttaggtttattttactcaatttattttttgagatggagccccgctctgtcacccaggctggagtgcagtggcgtgatcttggctcactgcaacctccatccccccgggctcgagcaattcttctgcctcagcctcctgagtagttgggattacaggcgtgagccaccatgccgagctaattttttttttttttttttttttgtatttttagcagagacaaggttgtgtcacattggccaggctggtcttgaactcctgacctcagctgatccaccagcctcggcctcccaaagtgctgggattacaggcgtgagccaccgcatcctgcctacttaggtttattttgaattacattgattggttcctttaggaatttacctactaagcacaaactcacctttcattcatgtgtgtattattctgtaactattttcaaattccatatttgcatgtgttctcactggccaggttatgacttctcaagtccttcggtttattcacaacttagaaaagggagaaagtaggagaaggaactgattaggaaggagatcagttccaatgagattggtaaacctgggatgtaaatgaaacagcaaagttgtgatttaatggaaagagcggtagaccagaagtccaaacacctgggttccaggctgggcactctccttatttgttgtgcgaaatcgcacaatttcagtttacctctctgagtccttgttttcttcacttgtgaaatgagcattatcaaacttgtctggccatttccataggattgctgtgagaatccaatgag

SEQ ID NO: 32768 - DNA, 9879 bp, Homo sapiens
tagatagatgatagatagatacatagatagtgcttctctttcaaaagagctcagtgctaaacactattagactctctctatgcagatagacaaaatgtcctttaagatactgaacgttaagaaatgaatttaacaaaagctttcatttagtaaccatttcttgaacatttcttatatgcctgttacagtggtaggcgtctgggaatacaggcatgaggaggacagaggctgcttcgtgggtgttttagtgcattaggatgccatctgagacagacttttctgtgaaaaatcttagtcatcatctcctgggtttcctctgaatcttgtgagaagggcagggacattcgaggctggtagttctgatggtaaaactgtaccatgggttttgcagctgtcctgtgggcttggggttatgaacaatgtaagtagaagcagagaatgagcgagaacaaaatggatcctcacatggacccgggagctcttccaccaatgaatcttggtatcagggaacaattctggtcaatttggggccaagtctcccggcagctgagttctgtccccgacgcaccttgacttcatgggggagagaggggctcatacagtcagcctctgtataaggtgactgcttccttgacctcttacatgtgcacaaaacaaagccaagggtggtgaaatcatttgctcaggtatttgatgaatgctgaatttagctgaatacatttgtccattttaattctctcactctttttaatcttattgagtaacccgtaagaaaactttttggtataatcccgtaatttctaaacctggaaatgataaatgctttaaaaaaaatgaactggaatggaaaggactttcttccagaacactttaaagaaacatattatcatgtggaatctcattttgaatgaatcagagtacagtaaatctcaaaatatccactgacttgcctgctgtggtttactcaacaggaaaatgacttcagcagcataatcttttactccagatccacatcaggcagctttttgtgctgttctgaaaacatcttaattcttccccaagtaccatgtttcttggaattattcaccggaaattaatagtattctgaattttaaagcaattcaaaccacaagtgactttgtaatggctcttagcagtagtataaaaagcaattgagcacagtttatgatagcattagtcactattgtgtatagtactcccttcctctgtcccaaagatgtgtgtttctatccctctgtgatcactggcctgctgtactgggtagggatagcaaacaagacaaattagtaaaatacgttgggaatgtcaaggactaggggaaaaaattaggtaagaacaggatcttgaacaagctggggtagaggcagcagggagatcaaaatagtaaatgggggccgggcacagtggcccatgcctgtaatcccagcactttgggagactgaggcaagcagatcacttgagtccaggagttcaagaccagcctggtcatcacggcaaaaccccatctctactaaaaatacaaaaattagccaggtatggtggcccatgcctgtaatcccagctactcgggaggttgaggcgggagaatcacttgaatccaggaggcagaagttgcagtgagctgagattgcaccattgcactccagcctgggtgacagagtgagactctgtctcaaaaaaaaaaaaaaaaggaaaaagaaatagtaaatggggtgatccaggaaggtgtcactgggaaggtgacatatgattaatgacctcaataatctgtgagtaacgtggacatctgggggagaacattccaggcaaaaggaagagcacgtgcaaaggcaccatggccaagtgtgcctgtgagcacaaatgcacaactggaatgtggtgaacacgggggagcgcaggaggggacaggaacagagagggggtcaggggccacatcagagaaaactgcaccataatgactttggcttttactttgagtgacaggggaagccattgagggcttttgttgtttgagaccaggtctcactctatcacctgggctggagtgcagtggcacgatgacggctcactgcagcctcaacctcctgggctcaggtgatcctcccacctactacagatgtgcaccacctagcctggctagttttctttttgtatttttttgcagagatggggtttggccatattgcctagcctggtctcaagagatccgcctgccttggccttccaaagtgctgggattacaggcatgagccaccacgcctggcttcattggagggttttgggctaagacatgacataatctgatttatgtcttagcacccaaagcagagagagcagttgagagactctcatggactggaggctgaagcacacaagttcctctggagaaggcagaggccattcccaatgttgagagacaggtcaattctccccaggcaagaaaaaataaggatgaatggcaattgttcagagaatggactagctggggattaaatgtctgttatttttggaagatagctttttttttttttggtgccctgcttgtggtttcttgttgcatccttcagagcacgccacagggaaagataagagcatggccttccaaatctagcactgaattagaagaccttatttttggccaggcttgctagcccagcactttgggaggtgaggcaggtaaatcgcttgaggccaggagttcaagaccaggctggccaacatcgtgaaaccctgtctctactaaaaatacaaaaatcagccaggggtggtggcgcatgcctgtggtcacagctactcgggaggcttgaggcaggagaatcacttgaacccaggaggtggaggttgtagtgagccaagattgactcactggactttagcttgggcaacagagcaagactctgtctcagaaaaaaaaaaaaaaaaaaagaccttatttccagtcttggtcctgatgttgaccttgtaatatcctggggctggttacttaatctttctgagctttagtttcctccgtggagagtatgtttgttaattacattatggaattattatgtcaattaataacatggtaatgacccgagggccataaagtactctgagtgtctttgacataggcatgacagacaactgtggtagtgacaacactagtgtcgctactgaaagaaacacatggcatttcagcaccaaaaaaggttcatggacaggaaaactgtgggcgaccgggaggagatggtggcgtgaagttggaaagacatgagtggtgaggaggatgacatttaatttcaggacattttgatggatgtgaacagggatttcgtcatgctgtttgtaaaaggttgggcatattagaagggtgaggacaaaagagagtgtgtgtaacgtaaatcacttactggccccagaatctggtgtgaccgcacgtgccgtctttccaccccgttcatactcagctgctgcagctgactcaaagactttatatttttgagcagcctgttcaagaggctagcgaggttgacctctgatacgtctgccatgtgtaatcacaggtgtactgaaatgtgtgacatttattatccttattacacactaatttgtcaaacaaaactgaagtgtcacataaagtggcacaactttggatgaataatgaggtggaccgtggtggatcttttgaaagacacaggctgatcagactgggatgacagcgtgtcattgactaaggagagagcattcaaggtcatctatcagttggggttaagatgtctattgcgagccaggagaggtggctcatgcctgtaatcctagcactttgagaggccatggagaattgcttgaggccaggaatttgagaccagcctgagcaacatggcaagaccccatctctacaaaatatatttttttttccaagaagaaaacaaagttaactgggcatggtggcatgcacctctagtcctagctactcaggaggctgaggcaggaggagtgcttgaccctggaaggtggaggctgcagtgaactatgatcgcgcccctgcactccagcctgagtgacagagcagactctgtctccaaaaaaaaaaaaaaacaaaaagtctgttgctttaagtgctttgtttattcatccaacagatagtttttgataatatactgtgttgggcgctgcaaggtataaaaagatgagtaagacacggctcctatcaccagtgagtttataatctaacagggaaataactatacaatcaggcagtttgtgatatgtgtcatgggcattcatgaaagtggcagaggtcagggggcgggggtcccttccagctgggaggaatagggatgctttgtggaggaactggcatctgagcaggaggcagccgtgcattcacattgaggggataagaagctaggagactgttggtgaggcctcacagggaggctccacctggactggactttggaggccaggtcattcatttgacacagaggagactgaggagacattacgagccaagagccagccctgaacacggtatgggtgtgttacaggggggccatcaggtagaccggagcaggagagagttctgacgatgtagaattgggcaggttttacgtctgaatgtcaggttgcggagtctgcaggtggtggaaaagtatcaaagatttctgagcaacgggcattttggggcaacaaatctggcagtgaggtctaggataaaccaaagggcaaacgagacaagaaacgaggagactcttgagatagtgcaagttagaggtgaggaaccaggatggatgggaaaatgacaggagaggcaggtgaagatgtcatttcaaaggaagcaaatgaacacggtttgagcagtataaaccctgaagagccataaaagcaaaatctaaatatcagggattattgaagggaaggaagagggaagctgcagggtcagcgtgaggctggaagtggaggcatggaacagggaagctgggagatgcaacctcagtctggcaaatcattatagactctaaccatcagcatggtggagaccaactggtccctcctgccagttgcgtatcttgaactcttcaggtatgtaactgataaatggcagctagggtttctcaacgcctcatccactcggagccatctaatctccgtcaacacggtcagatgtctggttcctgctgcttggccttatttccacgggctgtccatgtcagcatggaagtgagcactcgtgcagctttggtggagaataaaggtcatgtacatacgtgctcatttctaaatgagctgtaattatatttgcatctcaggactccatgactcacctctgcccttattaactccacccagtgatctgcctcttgcattcaaagatgaagtcactccatccacttcacttttcaaatcttggcagagctttcatgatgatttttttctttgaaaggaatccaaaagtttggataccaaactttcagagccatcaagggctcctagggagacgcgtccatccccaaatgtgaggtgtgttgtgttgtgtgtttcttgctgagacatggtgagctcctccacatcagagggcaaagtgcccatgggcagcaaatgtgcttgtcacgttgaactttaaccaaagatcaaaaagcatggcggagattcgagtttcttaatctaagtcggtttaaactcctggtgagaggggagaagcaaaacaaatatgagcgtgacatcctgcttttagcgctgagagccgtggttcacaggaaaaggctgtgaatcagaaggggccaagagctcatcctctggtcagcacaagcgatgttttccacaagggaatgagccgaagtgaagaaggcagaaaaacactggaatcccttaaaatgccttgttgtaaacacacgtctcaagtatttgttgagtatttactatggtgaggagattgtcttaagtgcaaagaagacatagtttctgctcttttggatttacattagacagttactaagataaatgggaggatctggagatgaggatttttcattgtttgtggatgtgggaagcagtcttcacagatgcagtattggagaccagtatccttggtaacaatggtgaaattatttattttctctaaaaaattgtgatttttaaaatactttaactatcagatactagaaacataaaataatgattcccagttgctaagattcatatcggctaaacattcacgaggttcctataacatgccctcacataccttaccttattccgtgaccgcaacaactttgtgagatcgttttatcacccccattttacagatgaggaaactgagtcttggagaggtcaaataacctccccaacctcctactagtaagtggcagaacagggatcaaaaccccaggtcttctagtcataaattctctgccttccactctatcaaagctgccccatgaggaaaaaacacctaaaattgactcatctctatgcctatggaaaaaacctacctaacccctgaagtcaaggaaacttaaaattctcctgccagatagacttcagcgctgaaggactttaggtttcagaatcccttcttatacaccactcccactttggggtctaatgaggctaccacatgaaatctatcaagcaaatctgagattttcagggcaaattgaaaaatccataatgtttacatggtctagataaattgttattgtttatttatattccaatttcctaagaactgatagtaaaactatccttacatgaacatgaagaaaatttccaacactccaatattatttgtatctacctgtactatctccaagctttccagttgaaaaatataaaatctgtgttactattggcctctgtcccttattcctggacctgggcgttagcctagagtcgctctgaagttaatgattaaaatctttgagtggacattctccaccgtttcttggaagcattcttgagttacccgttagtttccagtcttaaacagagaaatacagataccacctattggtaatggtttttagatcatgaatctccttgtgggattactttggaacatctccccgctctttatcggcaggccggatggtgaaggtcacttcatcctttatcagattgttattcaaccacaatccttctttcaaggattcagaaatacacaggtttctactaaaagaaacgtccatatctttaaccaatgcctgtttctagcacatttctctaagcgtaattctttttatcatccagattcttatgattcattcaaaagaaatttagagccaaatctggcttttaagcaaatatttctaacaaactgacctattttagtatcactcaccataaggttatttcaggatggtgaatgacaatatgccaatgaacagcagaggctaccttttttgattcctaaacaaccagattttgtgagactacgtttttcttcagtgattcataatcagttttgcaatttgaaagcagtttatgagtcattcagtttatgaatttgttgtcacttccttagaaaagggctccctttccttatagcttttcaagtttaattcagtcgcctgaaagctttcatttaacctcagttttttctgctccatgaagaaaaacgatgttatatatccattttactgttactatcaggtaagaaggcctagggactagtgacatcaattccacgagccatcagtgtcctgggcttttaattcacagaagaatggatagttgtaatgaaaaaaaaatcttataaaaataccagtcctgttttctaagttttaaatacagattctctgtttttagttatcttgtttctgcttcccaatgcaataaactctagccacctgcaggactgctggatattctgatctctccctaggatgaaagagccactttaactggaaatctttacaacaaaacaccctcaactattcaaggaagaaattcggtagacttccatgcacgaggcctttgagaagagaaaataggccctcgttcaggcccagacagatcattgacagcgtttttggattccttttttgatcaggaaattagatcaacatccttatagggaaaggttcatttggggcacaggtggggctctttagttaaagtgtctacttctcagtccatattaggcaacaggaactgcctgaaaggcacttatttttcattctgtgtcattcaaccataaatgactcagttctgatattatttaccaagctcctgttgaactcataggagaggcagctgtgcagcactcgtaatgctaatcttaatatagtctcagcagggtatgcagtcagtgagaagtaagacgggtcatttttccttaagatcatattaattaactagctgactcatctcccaggaactggattgagtcctcaaaatgcttcatttctaaaatcatggaggcttaatctaagtaattttactgtcatctggtaaagcttattaaagcttaagggttttttttaaaaggcacacttgaaaacttagaggattagagaaactaaggtaattttagtagcagcaatgagtatttcatttttaacatttaaacattaatctggcattctgaaaggcctgagatcttattgcttcttaaaataggctttgttttttagagcagttttaggttcacagcaaaattgaatggagagttcccatatactccctgcccacgcaggcacagactccccactgccagtgtgctgtaccgtagtgataaatttgctgcaattgattaactcgcattggcacatcagtatcacccgaagtccacagtttacattagagttcactcttggtgttgtacattctatggattttgacaaatggataaaaacacttatctaccattatagtatcatacagaatagtttcaccgtcttaaaaatcctctgtgcttacccactcagatcttatttttagtttcaaagttaatgatctaaatatgagaactgaaatctgcaaatttaaaaaagcacaagaacccaagtgtttaacttaaaatcaatggttcttaaaaatcattaatataatgtaaaaatactaaatattaaatttcaacattaatcttgagatttaattaattcaaaacatatgtctgaaatgtacctttgcagtagccatgaaaaaaatgtgttacctaagtaaatagtttaagtgtctgagaaacttttggccaagggactgcagtcactattgctaattccctgctatctggaacttagctacaattaagcaaataaacaacaacaacaaaggacagaaaaatctctgaaaaatccccccaaattaggaaaataagcaacacagttcttttcttttcttttttttttttttttttttgagatggagtctctctctgtcacccaggccggagtgcagtggcatggtcttggctcactgaaacctccacctcctgggttgaagcaattctcctgcctcggcctccagagtagctgggattacaggcatgtgccaccatgcctggctaatttttttggtatttttagtacagacagggtttcaccatattggccaggctggtctcgaactcctgaccttgtgatccaccagcctcagcctcctaaagtgctaggattacaggcatgagccactgcacccggcccagcaacacatttctaaataattcatgagtcaaagaagaaattacaatggaaattagaaaatatttgaactgaatgaaaatgaaaacacaatttatctaaatttgtgacatgcagctaaagtggtgcttagaggaaagtttatagcagcattaaatacatatattggaaaaaaagaaaggtctaaaattaatgatctaatctcctaccttaagagactaaaaaaagaaga

SEQ ID NO: 32769 - DNA, 2056 bp, Homo sapiens
cgctttggaatcacagaaggcaatgacaccacagaatgtaacactggatgccagacgcgcctgcctgtgagtcccaaggcctgagtctctttggagagtcggttccccactggtgcctctgtgcatgccatggccggccacatgtgggacgatacagatgacacgtgtgtcacaccaaggcaggatcagaagaatgtttgagatttcagaaaaaaaattcaagaagtcattatgggaagaccagaactttgaggggtcagagttgttggcgcttaacctcttaaattttagtttacgatattaaaaacttagagggcgggtgaagtggctcatgcctataatcccacactttgggaggctgaggcaggcggatcacttgaggccaggatttcaagaccagcctggccaacatggcgaaaccccgtctctactaaaaatacaaaaaattcgccaggcgtggtggcgcacatctgtagtctcaggaggtgaggcacgagaatcacctgtgggaggcagaggttgcagtgagccaagatcgcgccactgcactccagcctgggtgccagagtcaagattctgtctcaaaaaacaaaaacttagagattccttgtttctcttttaaaaagtcagatggtgtcgtgacagtgtgcattggcaccaggtgtctggcgctgggcagggctgtcttttcgggcagatgtgctcttttgagctcaccaaggcccctccacgccccacaacctggatgatgacaccatctcattttttaggcttcatattaagggcattgggtgttcccaattagcaggttgcgctggtggccaaaagtatttctcaatcacgtagagtttttctgggaccttccttgttcatggctgagtaaaaacaggccctaccatctaatcatttagactctccttttgtgccctttctgccccagggtcttggaatgtgaaattccttgaacagccataaaaaccataaagttgaaacttttcaatatcaatagaacaatcagaaaggtgccttttctgggtctgttttagagttgactcaaaaacacaaattctaatcccgcagagaactgcttgtgttgaaatatttacagaaggtcaggggtttctcctcccgcctggagcagagaagtgaagctgtgggccgtggttgagcgaggctggcctctcaagccttgtttattctggaaataactttggaaaatgcctcatatggttccccagaggcctggaggtgggcctgtacagttcacgacaaacgaaaacaaaccattcctctgcaatgtttagcagaatttattaaaaagatcttttttagaacttctagacagagctgatggactagaaatgaacttgcaagtgtgaggaagtcactccacggagtgacacacacgcaaaataaataaataaataaataaataaataaatatatagttcacccaactttgtaactgatttagatggtggaaattttgtaaagtccaccgcagcacagcagtttgaaagagacacttgtttgttttcatcaatccccagaatgaaatcattccccgaggaccgggttagctgcttccttcccggcatggccctgcctctttaaactcattcccgggggggacgagactgttgcctgatgcagcaggggcagccagcagaagcactcctggctgctggatgaagaaacctttacatcccaggatccccctctgagatcaatgaacagatgggttttcacaacaagctctgtctcaaggcaagccttatgtacgttaccgaccgtggccgtgatgtccagcctgcagcatcttttttttttttttttttttttttctgagacggagtcttgctctgtcacccaggctggagtgcagtggcgcgatctcggctcactgcaacctccacctgccgggttcaagcgattctccaacctcagcctcctgagtagctgggactacaggcacccgccaccatgcccggctaattttttgaatttttagtagagacaggtttgcaccatgttggccaggatggtcttgatctcc

SEQ ID NO: 32770 - DNA, 2018 bp, Homo sapiens
agacatagtttactctatgattggattattagaagacgttagcccagggaggttctactctgtttttcaggggtggagctggtactagaattcacagcctggttttcatcccagctgggccattccacaaatggaactttaaacaaatacttctcctcgaagtagaagctgggttggggtctggtcttgaaggatggatctgaaatggcggaggagagcctggcgaagccctccggcctccttcccaacgggtcccagctttttgccacttccctaccttgtatttggctactaaggaatctaatctgtccagttttttatcttggtcatccatagtgttctatagatcacatagaaagatggttacaatgttcagcacctcttgctaaacatcctgtcctggaggcacatggagaaggttgacaaagcctcattcctctgaaacatttcatgcaacggatttggttgaaaccccagattgtgatctggagtctttagcaactgtgctcatttcctaccttgagcatttcatttttgagcaactagaataacaactggtcttttttagtcttgaccaaagggggataagggaaccaaaaatcctttgctcctcgtttcctgttagattgtgaaacaaaaaggtaaacatttaacggaatgtggcagctcagaacaattacccctattgtggcatgaacactgatttctattcctttttacacaaactccttccggtagagaagctgaacaaaagaacgtgccagcccagcccgtgggctcctcaggccgatcagatcgggaagtgagaaacgccggcagagatttgctctgggaaagtttgtagacattttcaaagtcaagggtgaagtgtccttggtttacttagaatcgttttctttaaaggaaatcactgtcacaacttcagaagccccgacatgcctgtgtagttatgagaagggatgaaggcttcgcatagcttcataaccttgttattaagagtctggaactcagtgactggctgggtgcttgaccctttgttcagtagccttggcaagtgctctcattttcttcctttttaggtttccccactgcgagcccttcgagaacaatgtcatgttgatcgatggcagtgactcacaccagatctttccatgcctcctctgcaaggactcaagagagtcgagagcaaaaccgtgccatagttccataaggagggcaaagagctttatccacgctgaggaacaggcggatcatgcggctacagcactggtctttaccttttaactgcttgattcgaaacattccagccaggaacagtggctcacacctgtaatcccagcactttgtggggccaaggcaggtggattgctcgagctcaggagttcgaaaccagcctgggcaacctggcaaaacctcatctctacaaaaaaatacaaaaattagccaggcctggtgtgtgtgcctgtggttccagccactcggcaggctgcggccagaggatcacttgagcccaggaagtggaggctgcagtgagctgagatcgtgccgccacactccagcctgggtgacagagccagacattgtctctaaaaaaaaaaaaaaaagaaaagaaaagaaagaaaaaagagaaatagtccaagactagggagaaaaccttctttggggtcagtgtgaaccattctttcatttgttcagcaaatgcttactgaggagctactgtgtccctgaaattgcctccacctccaagaagacagtggtgagcaagtcagacaatacctctaatctcatggtatttataagtaaatgggccgttaaaattaccagatcagaagtgctgtgttcagcaaatagaggctcatgggaaactcctaagaagggcttctgagctggacttgggggtcaggaaaggcagaatgagggggctgactcatccagactggggcggggttgccgggggtgcctcccacttactatctgtctccttctagactgacttctctgtcatcatgaatacaccc

SEQ ID NO: 32771 - DNA, 1077 bp, Homo sapiens
agctgagatcgcgccattgcactccagcctgggcgatgagagctaaattctgtctcaataaataaataaataaaataaaacaaaatgtccacctttcccaaggcctttgcagctagggatggccaagtaaaatggttctgagttgtgcaagagatcagccaggcattcctggaagttctttgcttttgcggtatagtaccaccttgccctccttctcctggtctttatctccctgcttggaatatggatatgaagctggagctggagcagccatcttaagcccatgaggtgaaaaaaacatgaagccaaaagtcacatacggccgggcttggtggctcattcctgtaatgccagcactttgagaggccaaggcaggaggactgcttgaggccaggagttcaatatcagcctgggcaacatagcaagatcccatctctacaaaaaaataaaattagctgggcgtgcctgtagtcctagctactggtgaggttgaggcgggaggatcacctgagcccaggggattgaggctgcagtgagtggtaatctcaccactgcactgcagcctgggtgacagagcaagaccttgtctcaaaacaaagcaaaagtcacatgctaagggtggtgaagcaggaagaatggtatgtcatagaggtcaggcctggccctaacctttggagacccagggcaagagtacaaatggaggcctacagagggtgtctgaattttaaaaagtatcaagcaagtgaacagacaaacaaaaaatatgttctctattcccatcttaacaacacatttcatcatggcaaaattttaaaaatatatgtgaggtcatggtttttatgtgtcagcaaaatatgaaagtcaaccaaatatttcagcacacttctctgtattccagtgcaaattagttcatcgggaattatgattcagaatcttactgtgttttatttttattttttgagagggaatctcactctgtcaccaggctgcagtgcagtggcgcaatcttggctcactgcaacctctgcctcccgagttcaagtgattctcctgactcagccccctgagtagctggga

SEQ ID NO: 32772 - DNA, 3962 bp, Homo sapiens
tctcaaacaaaaacaaaaacaaaaatgagccgggtgtggtggcacatgcctgtaatcccagctatttgggaggctgagtggggagaatcacttgaacctgggaggcagaggttgcagtgagccaagatcacaccactgcactccagcccggccaataagagtaaaactccgtctcaaaaaaataaaaaacaagaaaaacctaggatgggccgggcatggtggctcatgcctgtaatcccagcactttgggaggccgaggcagggggatcacttgaggtcaagagtttgacaccagcctggccaacatggtaaaaccccacctctactaaaaatacaaaaattagctggacatggtagcaggtgtctgtaatactagctactcaggaggctagggcaggagcatcacttgaacctgggaggtgaagtttgcagctagccaagatcgcgccactgcactccagcctgggccgcaacaacagcaacaacaaaatacctaggatgcagcactcttcatggatttaatctaattatcatgtgagatgagtcaatgatcatgaattgtaggggtaaagaaaatgagtcacaatgagaccattggtgatgggtcagaaggggctccctggtttcaccctccactgccctggggggtccacgcttccccttgagctgtggctgggtgatgctgccctcaaaggccagctgtcatgggctttccccaccccgaccctgaaatttcccccatttgtctgagctatggccaccttactggctcagaagtcaggctacaatactgcaatggaaccgggtgatgaagtgtcataaatagttaatacaaattctgccaacaagtttggggttaatagccgatcttaaaatgggtaagggaaagaaagggagagggagggaaaaaggagagggaagagagagagagacaaagaaaaagagagagattttctggcattcatcctaagcatttcagccgtaaactggtttaggccagtgagacaggatgttctgcagagcaaagatcacgtgaccacacagtgcgaacaaacagatggtgtatcattaacaaactgcaacgctgcatttcctagtctctccagggtgtcagtgacccaggcaatttaattaaaaacattaaaaaaaaaaaaaaaagtgacaagggccaaagtttcatcctgtttaaattcaacttcatcaaaaaagtggaggggctatcccttccatgaaacgtccacatatgagcccctcagggaagtggcaccaacgtgtaggtcagtggcacagtcaggcctctggtcagtggccattgatccagaaatgcggccagggcatggccagggcaggggcagctccaggacagagaccagctcgcctcccattagcctcctggggagacaggacaggtaaacagcagggagctcagggggttttatggaccaggccgtgtacacagtttgtcccgagtacaaacaagcaggtggccagtctcacctttgttctaagaagcgggatccaggcaggccaggaggcccagagggtagctgtcaggagacactggggcccaaccagggcttcccactgcaggagcgggtcaggagcttggacactctcggacactcagcactgtcctcgcttgaacctccccggtaatggcagcataaagtgatggtcaaggggcatccggttgggactcaagaagcttaatcccaaatccctgccccacagtctaccagtgacagacactgtgctgaagtcagcctccacatgctcacctgtagaattgtgacaacatggcaagggcaggtgaaggccccaggatagtgcctggccattgagagtgctctgtcgtgcaggtgggcatgggcatggggctgtccagaattgagctgtttttttgagttggagtcttgctctgtagcccaggctggagtgcaatggttcactgcaacctctgcctcccaggttcacgtgattctcctgcctcagcctcccgagtagctgggattacaggtgaccaacaccacgcccagctaatttttgtatttttagtagagacagggtttcaccatgttggccaggctggtctcaaactctttttttttttttgagacagagtcttgctctgttgcccaggctggagtgcagtggtgtgatcttggctcactgcaagctccgcctcccaggttcacgccattctcctgcctcagcctcccgagtagctgggactacaggcaactgccaccatgccctgctaattttttttgtatatttagtagagacggagtttcactgtgttagccaggatggtctcgatctcctgacctcatgatccatccaccacggcctcccaaagtgctgggattacaggtgtgaaccaccacacccggcccaggctggtctcaaactcttgacctcgggtgatccacccgcctcggcttcccaaagtgctgggattaccggtgtgagccactgcggccgatatctacgtttttaaagactcctgtaatggtggcaaacttgaggctcctggacatggaaggtgaagagggcaagaaagctgcaggagaaaccctagagaggtgggacagctggggatcaatggcttaggaatctgtaaagaaggatatttaggtttttagaatttacataaggccaggcacggtggcacacacctgtaatcccagcactttgggaggctgaggcagggggatcgcttgagcccaggagtttgagaccagcctggaccacatagggagacccagtctctgtaaaaaataattttaaaattttaaaagaaattcatataatcttgggcttcccagcaggtaaacaaaagaatcctaattaatctcaagtgcagatcataagaatttggagaaactgtttgcactccaacatctatggagatcagtagctttctagattacaaaaattctaaataaaatgtaacttggataaaacttgatttttgcacagtgatacacctaaaagaagcacaactctgactcaaaggctttgatgacaaatataggcagatcacatggcgtatcacatgcgatgagccattctcaaacatctttatccctctctcctctcaacatttgttcatcatttgctgatatttattgagcacccaatacatgctctgctctggatgccggagcagcaaacaagaccctttcagttcctgctccactacattctagagatgaaaggcagactggcaaatagctagatcttgcagggtacagttactttagacgaaaggcagaggtatctctccgtcgctcaaagtatgatccgaatgacagaagaatccagccacataaagatgtaagatagagccttctaggcaggggcaacagcttgtgcaaagggcctgaggcggaaatgaaatgagcctggcatgtttctggagggaaagtcaatgtctctggagtaggggtagcaagaggcgggtgtcgggaggtctgcaggagccagataacaagaaaaggcctgtcgaagatctagtgtagaatcattgcggaccctacagacgacgcagcattaaggatctatgctgaaagcactcccctccaggtgagcagacccaggtgtgaagaaaaagctttgcttggctgtgtatccaggcaaatgctggatgaagacactgatacgcttgaagttacgatcaaatgtccagggctgtatctttcactttttacttttaaaaatttattatttatttatttattttgagacagggttgagctctgttgctcaggctggagcacaatggcccaatcacagctcactgcagccttgaactcctgggctcaagtgatcctcccacctcagccttcctaaatgctgggattacaggcgagcaccaccactttttttactttttttttttttttttttttttgagacaggtctcactttgtcactcaggcagtagtgcagtggcacaa

SEQ ID NO: 32773 - DNA, 1501 bp, Homo sapiens
gcccggctgtgctggattttaggactctactgttcttaaatattttgttgcaaatcacaacattcactaattccacacgcttatcaaaactggtagtattttttgagccagttccatgcaaatgtcctcatcctgcacacatacgtgcacatactcatattaacaaacataactgaaaattcaaccccataaacttggcatataaatttagttcaagtacaaccagaggaaaaaaaaacagatctgatttttagatattctgcttaaccaatcatacaattcagtcagagtggccgggcatggtggctcatgcctgtaatcccagaactttgggaggctgaggcaagcagatcacttgagtccaggagttcaagaccagcctggccaacatggtgaaaccctgtctctactaaaaatataaaaattagccaggcacggtgctgcaagcctgtaatcccagctacttgggagggtgaggcaggaaaatcgctagaacctgggaggcagggttgccatgagccaagatcgtgccactacactccagcctgggtgacagagcgagactccatctcaaaaaaaaaaaaaaaagaattcagtcagagtagcatacatgtagcaaccaactactgtacaaactataccaatacttggctctctgagagatgccaaaaagcagtattttgcctgatccatgtgctcaacaaagttaatcttgttggcaacattaggcctcaatgccagaaacaagaatgacgtcagggaggctaacagcaagtgcttcccaagggcctcgccctgccgagcctctgtgtgcttgccaacaccaggggtggtgttctatctgggatgtctgctgccagtttgtctgtaaaaatcttctctctctttcaagtatcacttcttgcacgaatctaaattttccttgtccttaggtgaccacttgctttccaagtttttaaaaatatatcttctgatatttacaaaatattgaatgtaacatatatgttaataattaactaacatctgttaataaaagtataataataataaatccttaaacccagcaagcaaaccaatagctagaacatcactaataactttatctacctatgggacccctccttctccctatctacttcccctctaagggcaagatggtaacaccctgttcctatgcctgtagtcccaggtactcaggatgctgacgtgggaggatcatttgagcccagcagggcgaggctgcagtgagccgagattgcatcactgcactccagtgtgggcgacagagtgaggaccctggctcaaagaaaaaaaatatgggaggactgggtgcagtggctcatgcctgtaaccccagcactttgggaggctgaggcaggcagatcaccttctctgctaaaaatacaaaaattagtcgggtgtggtgtcatgcacctgtaatcccagctacttgggaggctgaggcaggagaattgcttgaacccagaaggtggaggttgca

SEQ ID NO: 32774 - DNA, 3756 bp, Homo sapiens
ctctattacttttttatgtatatggtgtgagacatttttattaggtgcatatacatttagaattattatgtcttcttggtgacacgaaaatttcattttcatataggaaccttttctgtcttagagtccttgtgtgtgtgtcatactgatgtagttatgccagttctcttttgtttaatatatttttggtgtcttttccccaccttttgctttcaacttttccatgtccttttgctttagatggctccctaacagggtttatccaaggatgataatgtctgctttttaactcaatgagtttgacccatttatattttgggggacgatgaatactgtgatacgtaagtttccaacatctcactgtaggggatactggaaagtatgagcgtcaagatcatgtatcttttccaggaatcaaagcacgtagtgtggcaattcagatatgttggttgccttgactcttcttcaacagaattaacagttttggatcttgagaaaatgttattttctggctaagtataggggtaaaatgaaatctttgggaaattagtgaattctcatgatttctcaaagcttttcttgggtaactccaagaggcagcctggtggagtgaaagcatggactccagtgccccattctctagctgcgtgatttggagtaaattccttatctcagtgactctgtgtctccatcttgaaattgagaataatcacaccggcctgagatttttttaccatgtgaatggaagcacgtggcacatagcagggactgaatgaatgtgcccatgtccgctctccctcctctttctagggctgcggccttggtgatgtcaagaacattttgtaaatattacaagtaagataaggcattgtgactattactcgttaaaatcactttgtttcctgacttaggtgattcactgcaacccagagaaagttttgtgttgtgttctggctggcgaaacttctgcaaacaacgaatgcttcttttcatcagcctattctgcgttggttggtaggatgtcagtctataaccacatcaatttcaggtaataacaagtgtgtgagctttctgaagctttttgtttacttatttgttttagggttgttcaagtgtgactcatgtagtagcactgcattcttgagaattcacagagatcgaaacacagatatgaaacagggccagaaagaataaggcgttcccaatatatgagagtaaaaaaaaagcacaagaaagcgaaagcattcaatgtctgcatcctgtatagatgagaaacttagcagtatcctcttttctttttggaccaatcatatgctgataaaacagggtctcgctgctttccccccatttttaacatcttcaaacattctgagagcctacgggaatagaggcaaacaggtttgatgtgactggtcatttggccaaaggtattttactctgcgctcagcattttgtttcgttcatgctctctagcagtttggaatctaaaaaggaaagattagatagaggaagtgtgaaaatgcatacgcaatgtgggaaaccaggccatgaacttgagtttttaaatgcatggtataaggccgggctcagtggctcacgcctgtaatcccagtactttgggaggccgaggtgggcggatcacctgaggtcaggagttcgagaccagcctgtccaacatggtgaaaccccgtctctactaaaaatacaaaaattagccgggcatggtggcaggcgcctgtaatcccagctactcgtgaggctgagacaggagaatcgcttgaacctgggaggcagaggttgcagtgagccgagatcgtgccattgcactccagcttgggggacaagagcaagacttcgtctcaaataaataaataaataagtgcatggtatggtttggctaagttggaaaccatgggataatctggaatggtttattagagaggctaatggtggggaggtaggtacccagaaccttgggctagagatgactgaccctttctggctgtgtgatcttgggcaaactgcttcacttctctgtgcctcaatgtcctccatcatgaagagagaatatagggtgccttcattgtagggtagttgtaaggatgaaaggagttggtatatataaagtacctatctcagtctagggcttctcagccagcatgcagggtatatgggcttcaaatggatgaaaaaggtgctgatcccaggtacctggctgtgagcatcctcatctgcttaccccagaggagtgtctcccccaaaacattgcattttcttttcttttcttttttttttttttgagacagagtttccctcttgtctcccaggctggagtgcaatgtacaatcttggctcactgcaacctccatctcccaggttcaagtgattctcctgcctcagcctcccaagtagcggggattacaggtgtccaccaccatgcctggctaattttttgtatttttagtagagatggggttttgccatgttgtccaggctggtctcaagctcctgacctcaggtgatctacctgcctcagcctcccaaagtgctaggattacaggtgtgagccatcacgcccagccaaacactgcattttctatgaaggccatgatatgacagagctcggagggcactaccaggcccgattctctgggcctgagggtgcggctgtctcggcagtcgactgtattgatgtggcaagacaaggtccttgttaagagtttgaatttgggctttagacttcagaggttttcgagcttttactgactctgttggcagcacaagtattcaacactgtgagcacaactaagaccaaaagcaactgaagtgatttgtgcctctcctaatatcaacagttaaaatacaatttgaattaaacatgtgaaagattcttctgtgtaaaatttgtactaggggctaagttcctacgccctttgtccatctctcagctagagtaaaaagctgccacaccttgagatgggtgattttgtggagtggctgactttgtgctgccctgcctgtcatatgacaagtggctctaggggtttggactgaatgtgcttggtggaatgagtaagcagaatattggtcagcacggaaggtgagatgggcacaccagggctcctgatgctgatctttgtacttttgtgtatgtttgacaatttccataattaaaagtttttttaaaatgtgcttggataattaaaagactcgtatataaaataaagcatgatatccaatcatgattaactctattatttatattcttatgaaaatttctggccagacatggtggctcacaactgaaatcccagcactgtaggaggctgagacaggaagatcacttgaggccaagagttcgagaccagcctgggcaatatagtgagaccttgccttagtccattctcacactgctaataaagagatacctgagactgggtaatttataaaggaaaggggtttaattgactcacagttcagcatggctgaggaggcctcaggaaacttgcaatcatggtggaaggggaagcaaacacgtccttcttcacgtggcagcagcaaggagaagtgccgagcaaagagggaaaagccccttataaaaccatcagctctcgtgagaactcactcactatcatgagaacagcagcgtcagggtaaccacccccatcattaaattacctccaactggtcccttccacagcacttggggattatgggaactagcattcaagatgagatttgggtggggacacagcc

SEQ ID NO: 32775 - DNA, 2698 bp, Homo sapiens
aagagcatgggatcaggatgaccacaagccaagtaacagttggcataaaaaacaaaaaatccaaaaatcaaatacttcgaactaccttgggaaggtaaatcttcctctgtgttttgtgtcaatcaaacattcatggaatgttataccagtaggggctgccaatgacaggtagacactgcacacagtggagaactagttacaaaaatggaggatttttctagtgaatagttaaatgaaccagaataggttcatcaataaaagagctgactaaaagatatcatgattactttttcaagaatgtgaagggtttttaatagaagggtttttatatgcaaaacatatattctccatgtctatggaggtctgaaaaagacttttatttatttatttatttatttatttagagaaagggtctggacggggcatggtggcttaccctagtaatcccattactttgggagactgagacagaaggatcacctgagcccaggagttcgagacgagcctgggcaatgtggcaagatcctgtctctaaaaaataaaaaataagataataaaatcaagagacagggtgtcactctgtcacccaggctggagtgtagtagtgtgatcacggcttgctgaaaccttaacctctgggctcaagtgatcctcccttctcagccccactgagtagctgggactacaggtatgcgccaccacgcttcactaattttttaattttttgtagaggttggtgggggaggtgctttcactatgttgcccaggctggtcttgaactcctggcctcaagtgattatcctgccttggcctcccaaagtgctgggattacaggcatgagccacagcacccaccctaagaaaaagcttttaaatgaaatcacacttctggctgggcgaggtggctcacgcctgtaatcccagcattttgggaggcccaggtgggtggatcatctgaagtcaggagaccagcctggccaacatggtgaaaccccgtctctattaaaaatacaaaaattagccaggcatggtggtgcacgcctgtaatcccagctactagggaggctgaggcaggagaattgcttgaatccgggaggcggaggttgcagtgaaagaaaagaaagaaaaaagaaatcacactgcttagggaagatttggggcccacatgcattgatcaatctaaagacatgtggagagttcaggttattttccaggcactgtgttaggcagtgggaacaaatgagcaagtgggagctatccctcgtcagagcccctgccccagccatgggcaccccacaggcctagggcccagccataccaaaatatcagagacctaaaaaattgtagtgtgattattttctattaagtgtttacttaatagaaaaacaacaacaaaaaacatcgcagctctcctggcaagatggtgaaggggcaaggctggagtgactcaggggcatctttctcaccaggacctcaccacgttggaaattgaggtccaccaacttgcctccactttttcacgaagccatcagcagacaagccatgatgaactgggcatgctcatggaaaatccacagctgtgaaagctatttctggagttcacactgtcaagttcaaaaatgaactggaaacaaccacagaatccaccttgggtaggctgaggccaacatttataaatctgatgactcaagttgtccttggccagaatgtgctgcaccctgtggaagcaggacacctgatgcctttcctacatgcattccagggacctaagggaacttcaaacaagtcagaggtgttgcgtttgttgactgtcctggccgtgatgttttgagctactatgctaacagggccgcattgacagatgctgctcttcgttgacagctgctaatgaactttgtactcagcctcagacttcttctgaacatctagttgccatagacaaaaagcctaaacatatttttgttcgacaaaaataagatttttaaaaagatttgctgctgggcatggtggctgacgtctgtgatcccagcactttgggaggctgaggcaggaggatcacttgaagtcaggagttcaagaccagcctggccaacatggtgaaaccctgtttctactaaaaatacaaaaattagccatgcgtggtggcaggcgcctgtaatcccagctacttgggaggctgaggcaggagaatcgcttgaacccgggaggtggagattgcagtgagccaagatcaggctgctgcactccagcctgggagacagagtctcacgagactgtcttaaaaaataaataaataaataaataaaaagatttgccttttgttttttaatcttatatatttgtttacttatttatttatttgagacagggtcttgctctattgcccaggctggagtagagtggggtgatcactcactgcagcctcgacctccctgggctaaaacaatcctcccacctcagcctctggggttgcgaggactacaggtgcaggccaccatgcccagctatttttttttggtagagacggagttttaccatgttgcccaggctggtctcgaactcctgggctcaagccatcctcccacctcagcctcccaaagtgctgggattacaggtgtgagccactatgcgtggctcttattttattttttattgatatataacaggatatataacaggaggctgaggtgggaggatta

SEQ ID NO: 32776 - DNA, 2211 bp, Homo sapiens
aaaaatacaaaaattagccaggcgtggttgtgtgtgcctgtggtcccagctgctcagaaggctgaggcaggagaatcacttgaacctgggaggtggaggttgcagtgagctgagatcgtgccactgcactccagcctgggtgacagagtgagacctgtcttgaaaaaataaataaaataaataaataaataaataaataaactgaaaaataaagttaatgttgactatttatggtatgtaacatgatgtcactgttcttagtttatattttataactcaaaaatctcaccgtactggaaagctgtctgtagtgatatacttccctccttgctcacattcccaagtttgcacagtgattgatgggaaaggcaaagctgatcataaatcatagtttgaacacccctctaggaccaagacacttttctctcccctggatccgtgagttgccagtagatgtcctgatttcgaaagggaccagagaagaacttgtgaattaacaagaaaaatgcattgcacctggacaaacaactcaacgcagatggcctatagaagggtcggccatgttacgttcctatagagaggctaaaccattgttcagaaagctcagatgaactgtttaccatctcccctgagaatcagacaagaggaaactggttaaaatcacaacaggaagtttacattatagttttttaaagtctgctgacagtgagtggtcctggataatattattgtggttctgggaggatataaatgctttggtacctatcccctgatgacagagaggctctagcacgtacatcttgtgtgggctcgaagagtgcttttaagttcaaaacttcaaatagatggaagagagagatccaaacctccatgaaacctgtttaggaacctgcatctcagatggaaactcgaacgacaacagatacctgaatatttgcctaagcaaacttggctacagcattctgcccatgcttggtgctgcttctccaaaaggcgactctggcgtgtgttgggcgttacatcattctctccttcaggggcttaaatgatgaaatatcaagagagggaattaaatatatgggattgggggctgtgagacatttagcgacgatgaccttactcaagatgacataaggaagcttattcaccccgcccttccttgtttgaacagtgactcggccatgagacttgtttttaaagcaactagaaatagaatctatcactgtttgctatgatatcaaaaatgcgtgtcttgggctgggaagtaggaatacaacaagggagtatgctttaaaccaggctggagttttggaacatttgcagaaataaatgtatattccaaaagcaatgtcatcctttttagaaccctttctttgggaaacattaaaatacaggaccacccagaatgagccttgagtacctcgggttcagagagcttcctgggtgaacataaaggctgttgcctctgccctcagggcacgtccgaggaggaaccctaaatagcttagggtcccaatcctgtccttttattcccatctaatgtcaacataaggtaagcatgaggatttcttttggtataactgaattactcagaaatcaggaaaaaccagtgaatcgattaggtatcaattgaactcctgctgctacatatctgtatccaaccatgtgtaaggcaccatgggggatccagagggacccaggacaggattcgtgcctgcctccaaggactttgatacagctagaagagaagaaagggacttgagctcagtggctctgcttgtaatcccagcactttgatagggtgaggcgggcagatcactagaggtcaggagttcgagaccagcctggccaatatggtgaaaccccgtctctactaaaaatacaaaaatcaaagctgggtgcggtggctcacgcctgtaatcccagcacattgggaggccaaggcgggtggatcaccgaggtcaaaagttcaagaccaggctggccaacatggtgaaaccccatctctactaaaaatacaaaaattagctgggcatggtggcacacacctataatcccagctacttgggaggctaaggcaggagaatcacttgaacctgagagatggaggttgcagtgagtcaagatctcaccactgcactccagagcgagactccatttcaataaataaataaataaacaaataaataggccgggcgcggtggctcacgc

SEQ ID NO: 32777 - DNA, 2864 bp, Homo sapiens
tgagcagagataacgccactgcactccagcctgagtgacagagagagactctgtctcaaaaaaaataaaataaaataaaaaataaaaaataagcaaataaataaaataaagaaaaagacttgtgagaaagaatcagaaaggagagaacgatgaatgggaatatattcttaagtagcaggagagcagcgtgtcacaggaaaatcagactggctgtaaatgtccacgaatctaaggaccgtggatgggggggtcacattgcccgcgcaggaggccactgcaggaattccagtttctagaggtttctgggagcctgcaggaatggtgagggacctgggcaaaatagggttggctaggaagaaagaggaagggtaagtttgggacactgaacccactgataatggtggggtatgaaggacgtgccctctgccaagtaatcctaaatataggtttggcatggccaagctggaggtgtggatttaggagtcaccattctggcagtgaaaagttaacatcaggagaatggatgaggacactcaaatgagagcctaagaaggacccagacattcctgcttccctgcctccctcttctccctctccctcagcctaaactcagtcatccaacagagattttattgagtatctactatatgccaggcaaggtgttagacaaaattgaagaaggagacggggtgcggtggctcacgcttgtaatcccagcacttttggggaggccaggaccagaggatcacttgagcaaaagagttcgagaccagcctgggcaacataggaagactcggtctctacaaataataaataaattagccgagcataggtgcacacctggggtcccaactactctggaggctgagttgggaggattgcttgggtctgggaggtcaaggctgcagtgagccatgacccgccacagcacttcaaccagggcgatagagcaagaccctgtctccaaaaaaaaaaaaagatgaagaaagaggaggaggagtaacatgaagatgagagagaggaagaagaaaggaagaaggagagcaggagggggaggagggagctctttctttctttcctttttttttttttgtttttgagacaaggtctggctctatcccccaggctggagtgccgtggcagatcatggctcactgcaacctctgcctcctgggctaaagcaatcctcccacctcagccacccaagtagatgagactacaggtgcacaccaccacacctgactgggattataggcatgagccactgcgtctggccactctctttttctttctcttttcgtatcttttctgcatcatttgagagggatttgaaggctctgtggccctcgagacttcagtgtatatttcctaagaattaagatattctcagctgatgattttttgctctctaaagaaagaaaatattttttattaaaatatatatatatttatatatattttctcagctgggtgttgtggctcatgcttgtaattcccaatactgaggcaggagaattgcttgaggccaggagttcaagaccaggctgggcaacatggcgagaccccatctctacaaaaatacagaaaaatgagctgggtgtggtggcacgtgcctgtggtcccatgactcgggaggctgaagtgggaggatcactttagctggggaggtggaggttgcagtgagttgagcactccagcctgggctacagagtgaaacgctgtcaaaaaaagaaaaaagaaaaaaaagatactctcttatacatgcagtataatgatcaaaatcaggaaatccaacataaacagaatgcccttatccagcccacaatccacacttgaatttcatcacccgtccctgcagctttcctggcgggcctgggccctgatccaggatggccgagtgctgagtcatgcacccctcttcacccgaagctcctccgcccacaccttgtacaggcgccttcttatctcccaggtccgagtctaaccgcagctccccacctgctcatccttacgggggcggagatgcggtctcacagtgcctggctctgtaacttcaaagcacgtgtccacatcctggtctgtcctgtcctctccacgaaaagtgatccccagggtcagggtgtgcctcgttgccactgcagggactgggcatccagaccctgcaggggggacactgggatcaccatcggcctctctgctcatgagctgcgtgaccttgggcaacttagcccttttgtgcagctgtaaaatgaggatggtggctgcaccccatctggagttttctgagaggcaaacgggtctgttatgagaatccaatgagtccttatgtgtaaagcactcaggacagtgccgggcacatagaaagtgctcagtaggcccggcacggtggctcacacctgtaatcccagcactttgggaggctgaggtgggtggataacttgagatcaggagttcgagaatagcctggccaacatgtcaaaaccctgtctcttctaaaaatataaaaattagccaggcgtggtggcatgcacctgtagtcccagctacttgggaaggtgaggcaggagaattgcttgaactcagggggcgaggttgcagtgagcctagatcacaccactgcgctccagcctgggtgacaagagtgagactccatctttaaaaaaaacgaaagtgcttagtaaccaagagccctctcccccactttcctcctccccttctcctccttcttcctcttcctcctccttcatattcatcctcaccatctagcatagtgcctggcacacagtagatactcaaggaaaccccagcaatctcttcagcagtgggagggcacagaaacaagcgtggggaagacgggcagagca

SEQ ID NO: 32778 - DNA, 4190 bp, Homo sapiens
caaagggtctgagaaagtggagggcagagcctgtgggagaggaagtgatcttggccttccccagactggaagttagaagagacaatggagaagcagcaatatgttgagctgaatggagcaggctcagggcccatgctgaacgagggctccattgctgggtcctgtgcatagttttctggggaagacagtgggcagcagcctcggaagccaagcagaagaccacccataataggagctgggggattttgctaggcggaaaatggaaggtgaataaaaagattggccaacaccagcagcttgagtctatgatggtgggagggccgggccctgcgtctccccggagccttccgtgacttgggaatggagagggtgtctggaggggtccccggcaggagcttggtgaacatgcagctgggacaggttggaaagggctctgtggtggagagagggtcgggtacccaggatggccttccacatggtaagtcagcatcccttgttgatttaggagggagttcaggccctcagtaaactaagagcggtgacgacccagggaaggagggccaaggtcagaacctttggatgtgtgcctgcggggagtggggaggagaaagggccctggagcaaaggggccagaggagcgggaaggtgagcatgaccctgctgcgcccagaggccccaggaggtaggggtttgcagagtcaggcaacaggggttcctggaggacaggccaggccaccctggtgatcgggagcccgtgggggactccagttctttcagttgcctgatgtcaaggaatgaaggacagggaggaggatgtcacataggcactagctaacatttaaaatgcaggaagcacaaaatgtgtcaaccaaactggttttttctttctgagctgtgaggaaccgaggctgacctgcctcggcccaatattacagaggacggagtgtcgggggtgatgggcctggctgtcccccggggtcaggagtgctgacttcatgggatgtcgctcgatcccctggaaccagcctgcctggaagttatgctcagggtaaactttttttttttttcctgagttggggtctcagtatgttgccccaaatggagtgcagtggcaccatctctgctcactgcaacctccacctcccaggctcaagcgatcctcccatctcagcctcccgagtagcttggaccacaggtgcgcaccacctgacccggctcattttttgcatctttagtagagataggagttttgccatgttacccaggctggtcttgaactcctgagctcaagcaatcctcctacctcagtctcctaaagtgttgagactacaggtatgagccactgtgcccggcccagggtaatcttgattgtcaccgggacccaaaggtggaataataacatggacttccgagagtcttgacaggcttcgctaatttgaatggaatgcagtcactggatgagggtacagagaatccctgagcagaatcctgggtgtttgtttctttcctgtggtcctgccctgcccaggcctctgagaaatgcagagcctttcctctccccatccctccctctccctcagaggtgattttgaaaggtctcagcttcttatgcataccccttggggtcaggaggtaagaagcttttttattttaggcctctggcggaagattaatgggactgcccctggcgaggtggcagagggcaggtctggctgagagcttgtgttcaggggtttggggaggggacaccgggaaaggaacgagggccccactgcacatagcacccttgctgggaagggtgagggctgcagacacttgtaagcctgcttgactttgagggggacgtctgggtcttctggggccaagtccttggagaactctggagaggctctgggacccccagggcccacgacgacgcagtgctcagctgagaggccagggaaagggaggtggctgctgtaccctagaaacgagaccccttcctctgttccagtctctcggatgaagagttggagggacaaagctaccttatagtggctgacattgcctcccaccttgtcctgcaggacaccaaagccagatgacctttgatttagaagcataatgcgacaattcttgcacctgagtgccgtgggacccattcactccttcctggccccaagcagctgacgcaggaggcctaagttttaattgatatagacttgaaatattcaaagagctaagctatcaaatccatcttgttctctgcatttttcttataacacagagtatgccccagtgttgaataaccatgccggggacagcaggaaagggactcacgggttgtgaatttacatgtgacgtcagaaaggctctgtagacaggaggcgggatgtgcgcctggccagcaccccccaccccgcctccatgcgcagtgattacaggctggatggcacgtagtgagccaggcgaggtcacctttgcacaagcggagtgacttttcccccaatctcataccagtctggcagcatgtatgaaaagaacggtgagagaagctgttttatgcatttctaaaggaagcagagaagtaagagcttggtatttttcaaatggaactcaaaggtctttgcagcctgggctcggcactgggctgagagccgtcagaggagctgctgcaggggtggctgccattcctcaacccgattctatcgttattatttacattctatgtcttctctttcaagattatttttttgacatttgccttctggcagagctgggaccaatgagtgggaggtggattttggcggaacacaggaggaattctcttagtcagagccatccaaaaatggaaagacctgactcagaagacagcgtgtcccctgcctgcataaggtcctggtgaggtcctgtcaagggtgctctgccctgtgctttgacaggtgtgtgcggagatgaaaggtaaatagccattcttgagcgtgtcctctgtgccagacactgttttaggtacttttacgtgaactaacacatttaacctacaaacaaccctatgagacaggaactattattgcctattattaccctcgtcttacagatgaggaaactgaggcacaaagaagtttagtaacccgcccaggtcacagggctggtattctagggaggcaggactcagccccaggtggcctagtggccttgctcctaccttgaccaccagtgaagttgatcctctcatcagctgaccgggcacagtgaccagctgttctgtgctaaaaggagtttagaaggcagctgactcagcccaaaatgtggggttagaagtcaagaaggcttttagacagggaacatcagtcaacgagtaacagaggctaggcttgaactctctgaaaggaagcctgggggtgcctggcacacatcccgtcccgccgcaggcgcaggtggaaccagggagtttggggcccgccactcctgggctcagcatgcagttagctccgcacccccttgcaccccaggtctacgagttggctttttgcttagttcattcaagtgagtctccgacttctcctccagtttcaggaatctgtcccagatttctccctgggctgagttcttgccttggtcacctgcccaggactgcagtttctctgataccacctcaggggaggggcaggacctagaccctcagaatctggccttgaagcctggatacatctggggagctgctcacgcttctcagctgcatttgccttggttgaggatgggaagaagatgcctccttccaaagattgccgtgaagatggcgatgcgataatgtgaaatcgctgtgcgcgcggctggactctatcaatcatggttgtcttcccacctttgccacagactgaaggtcccttcctgagctcagcctgttggcattcagtccctggggctgaacctgggcgagccaggtgcctcctgcaaaaagagacagttcaacaaagtgcaaggaggaaagctcttctgtaccaccatgccctgtggagggtaccgtgtgcaaggactatcagagaggttcaggactgcccttcggttgagctcagtgactctttgttctttgttttgttttgtttagttttttgagacagggtctcactcttgcccaggctacagtgcagtggtgtgatctcggctcactgcaacctctgcctcccaggttcaagccattctcctgtctc

SEQ ID NO: 32779 - DNA, 1619 bp, Homo sapiens
gcaaagagtgaagcccggagggagagactgcataccaggctccgattctgactcccagaaaatggggagcttggagccagcccaggtggagcagcctcgggtgctccactccactgcctcgtgatcacctgcaagggctttatgcacccagcacccagcacccagcacccacgcaggcggtgcagggagcaggtctctttaccaatttagttgccacatccccaaaaagcattgagtcctggagcagagatcgtttcagcgatagtgagtttgggagatgctgagatcgactcttgatgggtcgtggagctaccaggctcctctgcctggggaggaacaggtggctaccctctggaacatcccagctactcaggaaggctgaggcaggagaatcgcttgaacccaggaggcagaggttgcggtaagctgagatcatgccactgcacttcagcctgggcaacaagagcgaaactcggtctcaaaaaaaaaaaaaaaggaagggaggagtgatattaaaagagcccgttctaaggacaaaggcccccacttgcgcaaagctaattatcagaaccatggctagaaaactcgcagagtttgggcaggccacctccaccctcatttcctcccctaagtacccctctacagacatctgctacctaagaacacacgaacacaatgtggacctacggccctgttattccagcttggaaaaaaaaaaatcacaccaggttgactcggttgggctctgcaccccaaatgccatagcggcctccgggggaggcggggagcgctgtgttggcccctcacgctcgctggactttctgccagcctgccctctttagcgctggtcgggctctgtggtggatatgtcgaaagttaggggaacattgagtcatctcctccctttcagctgcggcatatttctgggaatgcgaagcacatttgagcgacgtgacattccttacctcgcggcagcaaggcaactgcccacttcctttcgagtcatgttgcatcatctttcagaacaggactaaacaaatagtctcgatacatggctttaggaaagaaaagcaagtgtgcacgtttgaaccccaccctctccgtgtgctagggcacgattctcctgcccccgagggagagagggcacacaccgttgtggttagtctcctgcctttccacagataagaaccacgtatatgtgttctatgcgcatctcataatcacaaaaaagaggcatgtgacattcaatataggtgtgtttcctaacacatgtgtcagaggcgtctatggctacgtcagttctagtgatgggcattgcagtttttaaaattccttgtccttgtcatcttggaataagtcacaggaaaggtaaatgatctgtgtaaaccctttggcctgtggatcaacttttatacatctaaacctgggaaaaaatgttatttattagcaagagagtgaacaaacatttcaagcttgcagagggaagctgggggtgcagagaggatgcaaaagtgaacagaacgggcatctgttctcaagaggctgcagggtcatggtggagacagagccctgtggagcaggatgcgtgggcagtggacagtgcaccaagtgtttgctca

SEQ ID NO: 32780 - DNA, 1857 bp, Homo sapiens
tgtagtggctttatctcggctcactgcaacctctgcctctcgggttcaagcaactctcctgtctcagcctcctgagtagcagggatcacaggcgtgcaccaccacgcttggctaatttttgtatttttggtagagacggggtttcaccacgttggccaggctggtctggaacgcatgaccttgtgatccgctcgccttggcttcccaaagtgctgggattataggcctgagccaccgcgcccagccttttcctctttttttcttttttctttttatttttgagacagggtcttgctctgtcgcctaggctggagtgcagtgtcacaatcacagcacgctgcagcctcaacctcccgggcttaagcaaggacagtcagtgactgattctagcccagtttctccattagattcttctgcttgtcagttgtacagattcctggggcgccctcacccctaccccaacaccaccactcagaccttcggaatcagagtccgcaggaatctgaatttttatccagtgccttgggtcattcctgtgactcgtatggggaacagggaggaggagaaggtgctcgtgctcaggcacacttcagggctgaaacaactttcccagagatgagggcgaggggaggggaccggagagcagagggaggcgagggagcagaaggaggagcccccaggtgggaggacgggggtctgcccagctcggccggggagtgcagtaggggggcgtcctcccgactaagggcaaaggaggtgacggcggggacgcccgccccgtgacgaggagggctcggccgagccgtcccggggcgacaggaagcggccgccctttgaaggcccagcggcggcgctgggtcagccaggccagcttgtgggggagcggccgcccgcgcacggctggggccggggccagggccggagggcgccgcaggaaggggccggggccggggcggcttctctccccgcagccggcgcctccacgcggcggtcaagctcgcgcgtgggctttagcagtttcgggcgtgcacgtgcgcggaggctcctgcctctgcggagctcgcgccctcaagagacttccaggagggtttggagcccgggtttctctttcccccagccccggaacccgagtctgctccaagtgcgcatctgcgcggcggccgacggggacgcagcccggtgtccccggcaggaccccggagcaacgtctcctggagcctgtgcagaagctgggcttggcgagggagggggtgcttccggggacacccgcgcagggaaaaggaggatgctagtgacccatcctttctcgccgtgcgctttaatttcaacaaaccctccattccccttgtgttcccttctccagctgcaaaattaaaagtatccagggccgggagcgatggctccagcctgtaatcccagcactttgggaagccgaggcaggaggatcacttgagcccagtgggttgaggctgcagtaagccatgatcatgccattgaaccccagcctgggtgacagtgagcccctgtctcaaaataaaatgggagacctggggaaagcggatgtggctcaggccagggactagggtgaggctgtgggtgcaaaattaaaggaggggtgtcaaaaaaaaactattcaacataaataatattttagtgcagtgtttttaaaaatacaaattaatgcaaacaagtcatcatgagcaagagatttgtttaaacctagataaagacaggatcaggttatttacttttttacttatttatttttgagacagagtctcactctgtcgcccaggctggagcacaggagttgataaataccaggcgcccaacaagctccgctcccgacttcatgca

SEQ ID NO: 32781 - DNA, 1184 bp, Homo sapiens
gtctccccagcacctcaagaatattcatttcctggctgggcacagtggctcacccctgtaatcccagcactttaggaggcagaggcaggcaggagttcgagaccagcctggccaacatggtgaaacaccatctctactaaagatagaaaaaatgagccagacatggtggggcatgtctgcaatcccagctactcaggaagctgaggcaagagaatcgcttgaacccaggaagcggaagttgcagtgagccaagattgccccattgcactcaagcatgggtgacagggcgagactccatctcaaaaaaaaaaaaaaaaaaaaagaatattagtttcctgcctctagaggcaaacagataagagacatttcctaactgcagagacttgcaagtttaaaacaaacaaacaaaagcaacatgaatgccgttcttccttgggggattttcttcccatctgccaggtgattcaccgcctggcttctgttctgtctgtactaattggtcatcgcttgctgataggaaccaagcccttattcctgatcctggggaggagaaaatatgaaagtgtgagaaggaagtggcttaatgctttctcaaaaagaggttggggaggaaccgaaacagtaagccagggagtcgtcaccatgcctttgtcctcctcctcctcgtcatcaccgtgatacctgcttgtgttcaccatgcccagcaccaaagcagttacttcatatgcttcatcttgcggccacaggggatcaatatccctcttggaacaccacctctatccaggacaccaagacgacagttccagggaccagcaatgtccagtgtgctaatgtgtgtcttcctgtctatggagaagaggagattccaagtggttaccaggcccaaagagaagatgaaccaactcagggccatttttggcttctcagaaaagatgaagagttcccagaaataattaattcactcattcaacaaatattcagagcacctgtaatgtgcaggtactgtgtgtgacaggtgcagggttacagggatgaactagtcagagatggtccttccctcactagaaatggagtcagccctggtggggcacggtggctcacgcctgtaatcccagcactttgggagaccaaggcgggcggatcacctgaggtcaggagttcgagaccagcctggccaacatggt

SEQ ID NO: 32782 - DNA, 2186 bp, Homo sapiens
attgaactccgacggtgctgggcaccgggatgtgatggtgaacagccgcaggcaaagccacctgtggcccttatggaatctggggatggatacttcggttcccgcctgtatgtgcatatttgctttttatccaggaagtgcagtctaccgtcatttccatatcttcctattggtcactggagtgcagcaaaaagatcagtgttgacaaaagggactgaatcagttcagcaacacatcagagatgaaacatctggtcaccagcatgtacgaaattattcgaaagttgaatagatgagtaactgtcccactttctcaagagaacttcccttttcatcaaaagaaaaacacattccacgtattcagcactgatagaagccgcagtgatgagggtagtgatgtgggatattcggtactgagtaatttacagtacagacgctgcattcgtcctgcccggacactgcctcaaagccacatgtctgctccaaaggaggcggcatcaacaaaatcaaaggcgtatgatgcagctcgttagtaatccatcgagtccctgtctcaaaacatctcactcctattcctattctatgcctttccccactcagaaagtgccagggatttattaacctttgttattctttcatcaaatatttatacagggcttctgggtgcagacttggaactgggcaccaggtgaatgggggttggggggagggctagacagacaggtccaggccccaggaggtaggggacggtcaggcaggattctctgagtgaaaagaatagagatcaaggcagctatgggaatgagaagggaggctgactcgggaggactcggaaagcctgtagaatggaaggcaagggtgatggaagatggggggatgggcaggcgtgagggggaggggtatggaggtggaggcaaggagggatgggccgtcgaagagcagcagtccaagggaagtctcttctgggcaccacctttgaaataaatctgttccaatggttttgttgttgctgtaaacttttttttttttttttttttttttttgagacgcagtctccctctgctgcccaggctggagtgcagtgatagatcttggcccattgcaacatccgcctcccctgttcaagcgactctcatgcctcaggcttccaaatagctgggattacaggtatgcgccaccacgcccagctaatttttgtattttcaggctggtctcaaactcctgacctcaggtgatctgcttgcctcagatccccaaagtgctggggttacaggcccagctaatttttatattttcaggctggtctcaaactcctgatctcaggtgatctgcttgcctcagatccccaaagtgctgggattacaggccggaaccatggcgctggcctgttgtaaattctaatgccacctgcactctggggtcaaattccagaggggagttgtctgaatggcctggttttgtcacaccctctagaagaggggacacattagctgacactatataatgaggagcaggccattctccaaggaaaatccattctgtttcgggggggaggtttgataaaggccatggaggaagagggaggcacatctacttgtttttcgttgttgtttgtttttttatgagatggagtcttgctctgtcacccaggctggattgcgtggtgtgatctaaagtgctgggattacaggcctgagccaccgcgcccacgtggccccatctactcgtagagggggattgaaggcgggggaagaggaggtgggggatttgtccagcaaaggatgcagcaaatgcccagccccagggaggagcctgtcctggggagcgacagcctgaaggcctccaagtggggagggcgctggaggaggggcctgagaggcaggccttgatgaattgtttggatttttttctaagtgcattggaagccacaggaagatttttttttttttttttttttggatggagtctcgctctgtcgcccaggctggagtgcaatgcgccatctcggctcactgcaaccttcgcctcccggtttcaagtgattctccggcctcagccccccgagcagctgggaatacaggtgcgtgccaccacccccgagtaattttttgtatttctagtagagacagagtttcattgtgttagccaggatggtcttgatctcctgacctcgtgatccgcccacct

SEQ ID NO: 32783 - DNA, 1542 bp, Homo sapiens
ggttccagcaattctcctgcctcagcctcctgagtagctgggattacaggtgcactccaacacgcctggctaatttttttttttttttttttttttggatttttagtagagacgggggtttcaccaggttggtcaggctggtctcgaactcctgacctcaggagatccacctgctcccgcctcccaaagtgctgggattacaggcgtaagccatcgcacctggccaatcttcaactgcagagatttgaatatgggaaagagaaaaaggactccagtttccccagggcagtttcattaagagactgtgagcggagagctctaccaatgaaagtgcaggctggcggctctctacagcgaaggcagaggaggtgaaattctgactctggaaacttgtcattgccaccaaataaataaataaaaacgtgggtagtggccaagcgcagtggctcacgcctgtgatcccagcactttgggaggccgaggcgggcagatcacctgaagtcgggagttcgagatcagcctgaccaacatggagaaaccccatctctactaaaaatacagaaattagctaggtgtggtggcgcatgcccgtaatcccagctactcaggagactgaggcaggagaatcgcttgaatcctgggtggcggagattgctgtgagccgagatcgtgccattgcactccagcctggacgacagagctagactctgtctcaaagaaaaagaaaaaaaaaatgggatgattagattttgtgtgtgtgatttagttctagtctaacaggagaaaacagtagctttggttgtttcacaatcaagtgagtttgtttccaactgtaaaagtgatttggtgccggatatcaattttatggcctttccctgggtgtgataactggaaaatgccccaggaaaacctgtcggaaatctagaattgctccatatagatcctcctgcctctaggaatgagagttgatggaggcttagcaaatcattacattattctgtactaaagcctgatagatccataataaaagttaatgattaggtacatactttccgacatttcaaaagagtctagactgaaaatactggaaaaaaacctttgtatgtttcctctttagtatgccacggaataagattttaaagtggctggacgcggtggttcacgcctgtaaccccagcacattaggaggctggtggattgtttgagcccagaagttcaagcaaggccagcctggacaatgtgcaaaactccgtctctacaaaaattacaaaaactagctgggcatattgtcatgcgtctgtagtcccagctactcggcaggctgagttgggaggattgcttgagtctggggaagctgagcctgcagtgagctgtgattgtgccactgcacttgtgcctgggtgaaagagtgaggccctgtctcaaaagacaaaaaaaaaaaaaaaatttaaagctacttcaataccagcctaaagccattagtggtttttttttttttttcatttgtcacccaaacagtcccacttaagagagttctttttt

SEQ ID NO: 32784 - DNA, 4837 bp, Homo sapiens
gttggtctcaaactcctgacctcatgatccgcccgccttggcctcccaaagtgctgggatttcaggtgtgagccaccgcatcaggctctgactttttcttagatcagtgcaccacccatcaccctggtggtctcctgaattggcttattcattcatccattcattaactccacaaatattcattgagcaccctgtgatgtgtgaggtttactctgaggggctggggcggtagcagtgaacaagacacccgacccctgccccttagggacaggagagatggacgataaacaagtgtgcaaataaatcagctagtctcagatgtctataaatccttagaggtaaattaaagagggaaaagggcagacagtcatgtggctggacttccgcaaccatcatgaagctggctgaagggctaggtcctgcaggcccttgtaggccaggtaggatctttaccttatcctcagtgtgaagggaagtgacaggtggttttcagccagaaggtgattccgtcaggtttgtggttgggaaaagtccctctggcttcgttgtggacaatggaatgggggcagaagagtggattccagagatcatgggggtgctatttcagtggcccaggtaggaggtgatgacgtcctgagaaagggtggaggcagggaccacagagtgacagggatgggcgaatccaaggtcttcaggaagaacagttcacaagacctggcaaaggatggggcaggagaggagggagagggtggagcccaggaggtagcctgggtcctggctagctggagagggtgccattgaatgaaaaatgactcatggaagggcccgactgtgggggaagaccctgcgattggtcttggtgagttagtgcctggaggcatctgtggaaatagaaagctggtgaaggcagaggagaatcaggaaatgcagacggggcaagtgtgcgggtttgagatatttcggggtgaacagcattggacactggggatgagggagaggaaagtgacaaggatggactcaggtttccagcttgtgccacctagaaagagggtctgctgttttgtggcatgtattttccctggtttgtcatttgcctttttttttttcttgagatggagtctcgctctgtcgcccaggctggagtgcggtggcgcaatctcggctcactgcaagctccgcctcccaggttcacgccattctcctgtctcagcctcccgagtagctgggactacaggcgctggccaccacacccggctaactttttgtatttttagtagagacggggtttcaccatgttagccaggatggtctccatctcctgacctcatgatctgcccacctcggcctcccaaagtgctgggattacaagcgtgagccaccgcgcccagcctgtcatttgccttttacttttgttttgggtggggttaatttggctcacggtaaaagaacagttttcctgcatgttttattaacactaaaatgaaacgcatttagggtcacagagatttggggccatactaaaccaaaattttaaaaataaagtccttggctgggcgtggtggctcacacctgtaatcccagcactttgggaggccaaggtgagtggattgctggagcccaggagtttgagaccagcctgggcaacatggcgaaaccccatctctactaaaaatacaaaaaattagccaggcgtggtggtggtaccctcctgtagtcccagctactcaggaggctgaggtgggaagatccctggagcccgggaggcggaggttgcagggagccaagatcagccacttcactccagcctgggcggtagaggagatcctgtctcaaaaaataaaataaaataaataatttcctccgtatcctcagaaacaattcaaagccatgtgtaaacccaaaactgagttcatcacttctaagatcagaagaatttgtgtttgtttatgatgaactcacacaccataatcttccaaaatcattgaattccaggtgtgactaaagcaaagtttcagattgcaagttgacactgttacctgaaagctgcacacaactgctgaatcactttttaaacaagcatgaaaacaacaatttctcttgttcccagtacagctttgagccacaaaaattaattacatcacctaggaaattagccctgcgttttgcatccaaaggtcaatgttcagactgagaaatggtttagtgcttccaaacacagggctcagcacataaatatttatcatgcagaggacaggaactcattgtacatggcttgtttaccttatcagccagttacctggggcaaagagtccactgtctgcttcctgtcctaatttcccttgcccaagaccttgggcaattgtttatttgacagagtgttctgtcccattccctttcttctgggaataagggcacaggatactaaacaaatagatcacctggtctgggaacacctgatttctggagaggctgagacttctaggtgtttgctagaaagatccaaatacaggaaagagaaaacagctgctgcgttcacaagaaaacggaggatgcatttctccccatgacttcggcttgtttgggttcgcatttcaagtgctctgactgggctttatggaatgtcctgtcaagcttttgattgtgaaaataaagttacagagacacaggggaacaataatcacagacgcgatttgtagcacagacacggcctttcatttcattcctcttttctgtgtttacaaattgcgactgttagagaaacgttggccaagctggctctttaacctggccacatatttattttggccactcttagcttttatttcgcaaggtctcatactcaccagctcaggtgcttgttacataagaaagctctgccggcggagtgccaaaaattcagctcagcattttctgcctccctgcagtggtcccaaggaatggatacctctgcaaccatctgcaacctggacctttgcaacaggaatctcaggttaggtgacactggccaacatgcagggaaactatgtcaacaagctagttttcctttccttccttcctccttcccttcttccctctctccctctcctcacctcctttcctttctttcatttttgatacagtagggtgtctcactatgttgcccaggctggtctcaaaccactggcctccagtgatcctcctgcctcagcctcccgaagctctgagattacaggtgtgagcctccaggcctggccccaaactagttttcaagggttggttatcacatcccttgtatcttggttctcaccagtcaatcattacgtactttgcatggatttattagaatagattttaaatctcttgttttagcctcttctacttgtagagctaccaatcctagaagtttactagcaactctgcattgttacattttaatttgcattttgttttgcatatatttaatttgcatttagttttgcatttagtttgattgttcatttgcgtctctcctttctgaactgcctgctgttctttgctcactttttctattttattattattaagactagtcacgtgtagtagtgagaaggagggaaagagtctattggagttttaatatcatgtatacagtggatattaagaatatcaacacttccttttttttttttttgaaacagagttttgctcttgttgcccaagctggagtgcaacggcgcgatctcggctcactgcaacctccgtctcccaggttcaagcgattctcctgcctcagcctcccgagtagctgggattataggtgcccatcaccatgcccagctaattttttgtatttttagtagagacagggtttcaccatgttggccagactggtcttgaactcctgacctcaagtgatccgcccacctcggcctcctaaagtgctgggattacaggcatgagctcctgacctcaggcgatccgcccaccttggcctcccaaagtgctgggattacaggcgtgagccactgtgcccggcaacactttgatctttgttatataaaatctccaaatatccactgggcacctctctagtcctagggctgcacacgggttcttttatttgttctaaatgtaatccttccaagcttcatgagataatccttccaattaattttccaaaatttggtaaacaaattcacattaatattcagtgatcccatgaagacaaggttttgttttgtcttgtccatggttgaatttcagcacccagatgtgcgtggaccaagtaggtgtttgataaatatttatttaatgaacagaatatccatacaggaattcagaaattagtattctcccctgagccatctgctttctctttttctctctctctctttctttccttccttccttccttccttccttccttccttccttccttccttcttctttgttttaggacagggtcttgttgctctgtcatacaggctgaagtgcagtggcatgatctcagttcattgtagccttaacctcctgggctcaagcaatcctcctaccttagcctcccgagtagctgggaccacaggcacatgccaggatgccagggtttgtttgtttttgtttttgttttttgagagacagggtctcactatgttgcccaggttggtcttgaacttttagtcttgagagatcctccctcctcagcctcccaaaatgttgggattacaggtgtaagccactgttctgggctgccatcctttcttccttttttttttttgagacagagtcttgctcagtcacccaggctggagtgcagtgacgcgatcttggctcactgcaagctccgcctcccgggttcacgccattctcctgcctcagcctc

SEQ ID NO: 32785 - DNA, 641 bp, Homo sapiens
agaatagctgggactacaggtgtgaaccaccactccaggcccccaaatcctccttgatgtattttgtgggcttttgaccagtgtcttcactagaatatctcactctaactgccagaaaacggacatagttatcctattataatttgtgttacaatgctaactttctccactttactagctttcacttgtccactctgaaatgagattggggggctatgcaaaccctgaacacgcagggagtatgtgatgtatcatttctatggaatgaactaaagaattcctgaaagttctctctccttcaaggactcccccaccgcccaacacacacacacacatgcacacacgcacacacacacacactccaactgcacccaagtcccacctgggttcatgcaatatttactgtgtggtgactctgtgtcaagcattatatgaggcaacagcagcagagatttgtacctggggctaaagatttctaggcagtctcttttttattttttgtttgagacagagtctcgctctgtcgcccaggctggagtgtagtggcacgatctcaactcactgcaacctccatctcctgggttcaagttattctcctgcctcagcctcccaagtagatgggattacaggcacctgccacc

SEQ ID NO: 32786 - DNA, 2056 bp, Homo sapiens
cataggtgacaccacccctctctctgtgcttaaaggacagccattccattaactacccaccttgaatggattccagagaaagactttgttccccaagaaatattagcaaaagccttcaagccagggctaagagccttagtgacaagtgagaaggcacagaacaactgagcagagatcatctcttgaaaacctatgctaattatcctgtttctaccatcaggaaagtgggaggggggaagggctgctgtgctatcacttggggtccattctggggtcaaatttgaatcccagcttctagagctgaattcaatgtggagtttgttgtccatgccaaaattcaaaggctgatcaagttgaagaacgtgacatggacataatgtgaagtacatgaaaactcacatacaaagtacctgccctcctggaaccagtccccagttatcacagagccgagaggaaaccagtcccctattatcaaatcctcttactcttgactagagtgatggaatttgggaagaatgcagcagacttctaaagactgctcagctacaagcaggatcttcatctccttttcagctgtggataacaacggaagcagtcagccgtctaataaatcaagtttaattttaacagcatgaagtattgcccgctttgtaattatacttccaaaggtaaaacccaactcgaattaacttaaaaaaattgttattgaggtaaaattcacataacataaaattaatcattttaaagtttacaattcagaggcagttaatacatctacaatgcgtgcagccctcagatctaattccaaaacgctttcatcatcccccaaaggagacccctccccctcattaagcagtcaaagtgaactttttccacaatggcattctttgtgatatatcatgctttctccacagtatcagtttattcactttcaacagcatctttgcattttaaaggtaagggaaaactcaaaggaccatgagaactaacactcacaaatgtgctttccagtctaccacgtgactgtatacacatctggtgagacagttatctcaggcaaaatgtactgtgtgtcttccctgggaggagaaacaggagctgattctaatggaatgtttactatgtgacagatactgagtcagaaacagcacagcagctaagactgggtgctctgcaaccacactgcccaagttccagttccaattcagtgtgaactctgtgttctttgggcaagtcatcataatctctctgcctcctttctcttcacacgtattgtgatggcaacaccaccacttgcctcatggagatgctatgaaggttaagtaagttcaagtgcttagaacagtgcctagtgcataataagagctcaatcactgctgccttattcgactttcactacgactctgagggaggttctatttgtgcccccatttcattactgaggaacttaaattttacagcatctaagagacttaccccaaacccccagagaataagtgggatagctgggatttgaactcaattctgagttctgttggcttagcaaccattctgtaaaatgtaccaaggaacaaaacctttctgatcccagttaccaaactcatgttgagcaaaatcacactcacacaggaaaaaaaaaaaaaaacacatgaaactgtcaccaaaatggcaataacccaactgtgctacagttttatttcctgctggcttctcagttctctaagccttgaggatccacgcgccttagaccattattacctcctcccccatatgcagtaagttcctgactcttctgatctttcctgttcttactgggcaccatcccccaagaccttctgctatttgtactttctgatttcaggctctttattctctgatacacactgttgccagaataatcttcaaaaagattgactgcaactttcaactttaattcaatcatacaaatatttcttgagcatctaggtgcaaggcaccatgatgaagataatgtgagtaagacagtccttgccttcaggagctcaatccaaaaagggaggtgtaagatagaatttca

SEQ ID NO: 32787 - DNA, 695 bp, Homo sapiens
atctcaagacaagttgtacaatggtttcctggaacattctgagtaaagaaatgggaaaccaatacagcttacctagcttgttaccttctatgaacgctggcattaaaagtaaaaggcagccttgggaggaagaaatgcaaacacagagggagaacatagcttccccttgtctctctctgccacaaaagcctggccaaagtgactctactaggttgaagcagcctgcataataaaacgcttaaccttggctaagttaacctcctcagccattaaaaaaagggagggtgggggaagggctagcaaaatcaagcttacgggaaataaacctaatcaaagccgagtagtaacaaagggcaccagaaacatttctactgtatcacatcccacaggctggccaagagcccggaattttcattacaactttcaaagagagcaagaggaggagggaaaaagatttcacaaaagcattatcaaggccccaacccaggatgccctgctgtacaaccaaaatttgtaagaggtcagcctttcagggagtcaaaaacccagcatgtggaaactggcaggccttttatatagtgggaggggttcttaaaacgactactgtttcgcactgaagtctctgagcttcacagatcattaaaggtttctgaaccacagagaaaggagggcagagttaaggaaataaatcaaaa

SEQ ID NO: 32788 - DNA, 1245 bp, Homo sapiens
tgctgacccttgcaccaatgcccaatcaggcatgttcttttggatgctgacacccttctcaagttccaagtcacttgcgaataacaaagaaatgagttaataattctggtagacagaagaaaatgtaagccaggcatggtagcgtgcacctgtaatcccagctattcaggggaggatcacttgagcccaggagtttgagaccagccagggcaacagagttagatcttgtctcattaaaaaagagagagagagaaagagagagagaatgtgaaaagtatctatattagagggatttgctatcaaaaggggcatgactataagaattctacccagcaagttctgaatcaacaacactggtacatgcaaatctcatcttctgcagcaaaaagtaaaaaatgacctctgccctcccctccctgtgggctgtgaatgattagcttggctatgttgataactagagaaaataagaaaacacaagatgagtgcctctcccagctcattataatacttacagatttaccctactaccaaactcctccagtgcaatgcaaaagacagcaaggacactatgaatatttagcaaatgtcaggcataataaatcctccattgctgcaaacaactctctcattagttccaatgatggtgactgatgaagactttggaaataggaaaactgctgggtgctagagaagggagaagagctacagcgtgggaaactgtgaaggcggaggagtgatggggaaaggtctcagcaaagaggctagtggaaaagacaaccagagaactagctcaaaaggttggtgtactgagaatgcctctgaaggagaaaaaaggctatttatttacggagtcacacatcatcaataagaagggaaaatcaagagcaaaaagaaaaacatagtagaagaacttaactaggttaaaggttactcacatctgcttccactacggagataaaacactaagtaaaattaccgagcatttccaaatgccagatggtagaatttagatttaatgcttaatcttccaattatgaatttattttttaaaactgaaagataaaataattgtcaagatagttctgtatcaaattcttcatggtttgcaacttttagcagagcagagacagagaacttgagaggctacaatctgagcgatcaggagaaatctactcactgatctcttttttactcagccaaaccaaacttcctacactcgggcaaaggcattttaatttttaatca

SEQ ID NO: 32789 - DNA, 2914 bp, Homo sapiens
ttgaaaaatggaaaaaatcccccagaactcaaagtataataagccacaaacctctggtttggttgatgatttctgccaattaccaaattcaaactagtgataaaatgctatttcctattccagccactatgtttaaaatttgatgttaactctccaacaatccttcccccacaactaaccctctgttcccaaagacctttctgttctcagagttacaacagaagtctatgttctccaggcggataagcataatctgtcactttactatctaaaaattatgaactcaaattaaaagtcaagggagtaaaacggagagaattctggaggccagcccgagtctgagcacagcgcagggttaaaggaaaccatttcataagatcaaatgtggagaggcagcaggagcaaagaggaaaaaatcaagttacataaagtccaattgtactcactgtttccttattgggaagcagctcctttctaattctgaagaagttcttcccgtactgcctgagtcccttaacgaagcgtttctgtgataaaaagaaacaaatgggatgtaaaaaccaaaaacaaaacaggatgtcagcaaagcaaagatatctacaatcagcagaataacaaccacaaaaaaagtctcggctagggaatactgccgaggctcggagagtatgtcagcagctcagctgggacccactggccagggcaggccccagctaccttcatcagaaccccaatcccacccaccacgcagggcagcgcgtttaagagaaggacgtcctgcgtctgaggctaagaagcaatctgtccccctcttccaccaggcacacattctggtgcacgaaggtataaatatgctccatgttttaataaaacacaactgctttcccacctgagaaccaagcttcccagaagtgtcgagcagaaaggggaaacagaaccaaacccggtgactcttctccagaagggaaccctagggggttaaaaggccgctttccttaatccaaagaatttgccaggaggcaccggaaggcaccagtatcacagaagcccaccgggaacacgaaagccagcgggcctgccccaccgtccgtcattaaaagccactccgagacaccagagaataaccagcaccccttccgccctcccgacgccactcgccgcccccatccattttcgcagcagactcgtccctaaccccagcccggagactttcactttgtcccatgcctcccgagcacccctccccgccccggtgggggcagctcctggctccgagcccccacctcggggctcccagcctggtcccgggcggccgaccccagcagccacaggtaagcgcccggggtccggggcggcaagaggccgtcgcctgtcactgggctccggctccacaaagcgcagggcggaggcggccgcgggtggctcggcgtgtgaccgcggcggggccgcgcggcgcggggcccggggggcgcggggctggggccgccgctgacgggggaggaggcaggagcgcggcgcgcagagcccggcgcggccgcgggcggctgcaaaaggcggcctggattgccgccgccctcctgtccgccagccggggccccgcgccccggccccggccccgcccccggcccgacccccaccccgaggccggagcctccagggcacccggcgctggaatctgtgtcctccttccggacaggagaacatcaaggcggtaaagcacagaaacttcctccctaccgcagcaagcgtggggagagggcgcccacagggctggggcccttcccaggctgctgggtctccagcccacgttccggatggacgaagtcggctgcgccccggccgcacgccctccgccccaaccccgcctcagctgcgaaacggggggctggccccgacgccccccgcggtcccttccggcccgcgattgtgggcggcctctccctggcggcccaggcattagcctgcacttccccggccgccgcttcacaactaaatcaccgcggaagcttcccagccaataaatcacctgcccaccgggcagagggtccctcccactccctgtgtttgagacccgccaggcggattcagtgaagggccagacttagccttttaagaccagtctgcaacctcctactccagtagtggaggctttgcgtttttgaatttcacccttgctgagatatgactcatcattgtcaattttcaatataattcatacagttcgaagggaaaatctctcaaggcacaagaaagcagcaagctctcctctagtgtgaggagtgacctttgttacttgacaaaagtatcgtttatatgatcaacaggcatcctacgctgtgtgcacacagcatatcaccgggagagacggcacggaaagatggccctgccctcaaggagctgcagtctgcccaggaaggcagacaggtaaacaaaccagtcctagggcctgcaagaaaagcagcagaggaacaaagggtggtgggtgaagctaggaagaggaagcaacttactctgcttgctgatgtcttagaggaagtgacaaggaagagtgtgagcctgccaggtgggctccagcagggcttccagcagaagtcagccaggaaaaggcacagggaacattctgggaactgcaaggaggacagggtgtgcagaatggagtgccagcagataagacgaaagaggcaggcaaggatccggttgcagagagcccttcaggccgcacggaagagttcctaattgtaggctggcagaaaggctgaagctggagctttccatgaaaagactggatgaggactgtgccagtggcagtgtggcctaagtgtagattagggacagaccagttaaagaggctgctgacacagttcaggtatgagatgaggacctcaactactggcacactccacctcagtaatcagaa

SEQ ID NO: 32790 - DNA, 730 bp, Homo sapiens
cctattaccttgctgccctcaagtacataaggaggtcacagtcgttaactccaggcatccagaccagttcctcatgttgggtcactgtatcaccatctggagaaggaaatggttgcagatctggaagtttggcctgtaagacagggatgagtaagtcacaatcaaggcatgtattaattataaagagctatctcaataagcagtctttaggaacatatacaatgttttactgagactctttccttggacagcagaaaaataacaacaaaaccatgagtcatttaaactgacctatttcacatgtcaggatcatttcaccatagaagatttcacaatagactgcttaatatctgcttaacagtgtcaaagtaaaccagtgccagcatgataccaagagtaaaactgaagcacacacatatgcataaaataaacaaaaaaacaaaataatgtctttagatgataacagctattgataaagaaggaaacacacatacatttccaatataacaagttgacaaagaagacatatgcaaatgatacctcacctaaggatatttgctaaaaaattaagtgagctatcctattagaatagtgttactcttaagacagtcaatagcaatataagtcatggtcaataccaaaactagatgagtattaagtaaacattaaaaaatatagttgaggccaggcctggtggctcacgcctgtaatcccagcactttgggaggcc

SEQ ID NO: 32791 - DNA, 1373 bp, Homo sapiens
acaaaaataaacaaaatacctaaacttcaatttctaacacaaaagtcaatgcatactttttttaattgccaaagaattttccataagctctaaaaggaagatgagtctgcttccttttgaaggcaagagactaagtaaaaactgatgtgacataacctttcatttttaaaaaaatcaattttaaggtgttattgttgcaatcataattcacaactgttccctgaatatgtcagacttcagaaaaagatcacaaaaattataatttgctctggcaaacaggctctcaatcaaaacaaggttccacccaccttcaaagcaaccaatagaagcccacctaccatccttcctaaaacatccaaacagagctgctctgcggcccaggcattccatactagccacaaggcaagggggcggcctgcaggcttgctctgcaggtcttgaaggcaaacaagcttggcaacacacacccagcacgactgaggttaagattatactacgagccgaagaggtaaggggaagaggacagggacagagggacccgcaaagcttcacattctatatctgctgaatgcctctccggtagtccccattcttagttctgattttacgcttcacaataccacctacatggccagctagggctgaattaaaggctctcaggaacatgcactatgaatgatgaaatgattcataaacaccttcagaagtgagaaagagcagcaaaacccatcactgtttcggtgaggccaggggaagatagcctacctgcaggggctgaatggatcatccatgactaacacgggctctggtgagtctagctggattcctgaacctttactttctgctaaaactctgcccttttctacactaacaactcaaaatggaggcacatgcagtctcagagacctcatagagctttcactgagcttgtgctatgacctaagccttcacgcagaacgcagaaacttcccctcactctgacaggactgagcatgtgctgtgaccctccctcatccacacactgtctctccacgacgcaatcaatctcaaccctgctgtttccgtaaataaagcccagccaacagactctgcagcttctccctgcacaccaagctagtgtgcagggaagtggggccttagaaaggggatccaagacagccaacagcagggaactgagcaagcccagccatggagaggcttcagttaaatgccctgctctgtcaggaactcagcaagccaagccacggaggagcgtcagttaaatgctctctgctctgtcagcacaacagcaagttttgtctttttttttttttttttaaggtaaatggtgattttaaaaagcaagatcaccaagaaatagaatcaaaagacag

SEQ ID NO: 32792 - DNA, 1273 bp, Homo sapiens
cccaaagcctccaaaacagaccactcctgtccctctgtgttatcaaatgtgacagagatatcaaggccaaagacagcctcaacagagtacaaagatggatattagcaaataaataactttgccaagtcaaaacaatctgctggagagaagaggagtaacctcctgcatatatttaactgcttagtcatgggggctcttgattcagaaccaagtgaaatcagatcaaaattcttactctataagccaatatagccaaccaagtttctccagaaatttgggatgaagtggctaacatgtgtatactgtatggcttaaaaagatactttctgaagaaacttttcatgcatttccacaacatggtgataataaggttaagagttgtctgaacattagaggtttactgtataattcagaaatgtatacataaaacttttaattggtagtcagacactaattaagcatacagaggggggaacaccgtctcccagagacatcactatctcccttcaagtgtgctcaccaaccagtttaaagaggcattaactctgccagttgagcccacctccacttacaggacaatgactgttagacgtgtcaccttagctaagaccttggggacacagtcataatggctttgatcattcctgacttcaagggagaagggtagggacagacaatggggtcaaagatcactattcttcaaagatcaaagctaactccagatacagactgagtaacctcttatccaaaatacctgggaccagaggtgtttctgatttcagaattttctagattttggaatctttgggtatacataatgagatatcttggggatgggacccaagtctaaacacaaaatttatttatgtttcatataaacctcatacacatagcctgagggtaattatataaaacattttaataatatatgcagcctgtcacaaaggtcagatgtggaattttctacttactgcatcatgtcagcactcaaaaagttatggattttcaaattagagatgcccaacctgtatttatttacacaggtaaatcaaaactaaagataagctttctgtaccagtcatagttacccaacttcatggataaatatctgaaattaaatttaattcaattaaaatgaaattagatccaggaatcccacttctgtgaatttaccaaaatatttaaaatcagtttgtcaaagagaagcctgcactcccaagtttatcacagtactattcacaataaacaagttagggaatcaacctcagtgcct

SEQ ID NO: 32793 - DNA, 1382 bp, Homo sapiens
gcatcattaaacaaaacctttaagaaaaagaaagatattagcttacaatgttaactgaatcatatcttttataatgactaatatacctaatttatgtgaatctagcaatattccgccctctcctggtgatatgctttttgtaccactgctgtctgaattaaaccctgagtgtagagttggtaacacagtaaagtaatttttagcaacacaaatatttgcacttttaagaagcactagagacacagttttagaaattactgactcaaaagttggcctgcataataggaatccaagtacagccagcaacttaccaataaacaaattcaaatagttggataagaaaagggaaaatcagcaggaacactaaaaaattatattttcctggtttacgtaaatcagtctgtcttatcttaaatatcttaattatttcttctcttcctttaacttaaaccaaaacaaagacggtaacctttaatactagttagtctatttataaccgttccatctacaaacatttttctaatacaaacatgccctgatagcttatcttggtgcacatgccagacaacaaaggcccactggcctgctggagaggagaaatggaaagcaggaaatgagaagccttagttaatctccaaataatcgatcagtgtattcagtcaagtgtgagctgagctgggaaaatgctgctttaaaaaagaaagaaagaaaatcaaagagcatgtgactggagccacaattcattttaaaatagggtaatttttgtcaaaaagattctgcatcacgttcaagcaccaacaacaacatacggaaatgttcatatcttctgcagtaagaccccttcctttaaaatctcttgtcatcttttttcaaaaacaagttccaacttttgggctttgtttcttatttcagtttatcttaattattgaggtataatttacatacacacaataaaattaacttattttgtttctactagttttgacaaatgtatagagttgtgtaacctccaccaaaatcaagataggcaacattcccattaccacaaaaagaccaacttccattacagaatcaacatttgctgtgatgaaaaggctttgggtgccagtgttgccagaaaagcaacattctaatctaacttccttcctccattttagcacacagagaagttaatatggagaaaaacaattcagagtctgctgtgactcttctatctattgctagagaatactacagacaggaatcccatgatctttaaatcaagtaatcggctagataaaacttctgggctaagaggtaatatggtctcaggaaattcctagaacatacaacagttttagcgacaagtgatataaaaataaacaaaaataatttcaaattag

SEQ ID NO: 32794 - DNA, 1601 bp, Homo sapiens
tctggacccttcagaatgagtgtatcttacaataattcagatgcttgacaacactggcaacttcctctattgtctcatttgtcttatgtgttgagagcgaagaaaaagcacagaagtagcaattgggagtcatcacaaaccccaacagaccaactaagatgatcaggaagaaagtcctcacaaatgagtacattccaagaaactttctgcagaacatcaggatctttgtacctacccaaaaggcactctagaaaaagaagaaatctcaatgccaactatttaggcattcagaattccccaactgatttctctactcaaagatggactcaacagagatttaatccctgaatccacgtaaaacagtagctcaggaatgaactgttgactaagctttccctatcttgttccaaggtcccagatgctaaataactgtgcttcagcattcaggcaacatcaacttaacatgctaatcatcttaagggacaagcaagagaattcttcccaccacagtagatcattctttcatactcctaccttggtattcaagtaaaaacagaagaaactcaattccctagataaaaactgtagctccaaattacacaattttggaacaacccaaagttcttagtttcctgtgtttcagtccctgttatacccactgccagcatttcagatctctagttatcaattatttactcaccttactcaactcaacatgccctctcctttctgttgcttcctacataccacatttcatgacattaacaccatcatagcctagctactgacagagcaggagcatcaccatcttggacaagcaccaccattttcaagttccccttgatcaaaaactgcctaaatccaacccaaagggcatcagcctaatggctaatgacatcatgaccataaaccacaaatgacatctccaaccacaaacattccaatcctaagataaacccctctctgaccacagacatgccagcccagagataacgtcccctctggctggagagatgtcagccccaaaacattccaaccccacaataaacttctcctccacacagaaacattccaagcctgtgataagctctcctgccctaaatccttaagtaatactcttggtctgtaatagacagtgctcctgaccaaaatcagccagaagcccctctccggtttattctccaaaatgagcctgtctttgactgttaagccacttttcgcatttctttcctcattctttaactcttacagctactactcactggcttcagaactaataggtccctttctaattaattgcttctaccttcttaaggctcaagtgacaaacttactgcattcaatggtctggtctcactccacaccccatcttcccctaggctgcattcactacaagaaaccccaactctgctcccagtctgcaaaactcttcttctctccttctactagcccctgatcacaccaaccttagaattagttatcagttccatatggagtaactcctcatggctcctctgtaactaaatggcaacacctcccttcttttacataacattaacaatttacattccttgtcaagttatttggcagtaaggtggtct

SEQ ID NO: 32795 - DNA, 1342 bp, Homo sapiens
agagtggaatccatgagtaggtcatcaccaggctgcattcctgaatctgatcattaattgctcataaaaataccttcaaagattgacctttcaacatgtttttgctcattattgagcccaatttttaaacagccacctaaagaacatttctgtttcctctggaacacagtttttgaacacactgtggttcactgcttcttatgtagatatttctgctataacacaatatatgttactgggaagaccacatattcagcaaaaatgttcactaaaaatgaaaggacttacgtaaaatacagggtaaaaagcagactactcaaaccctatgcaactctgaaatcagatggctattttgttaaaaatcaatacttaagaaataagaaacccaggcagttacccaagagtggctgcacgctgccaaaggtgatactgagaatacatgaaaacaacagatgctggcttgaaggcaccaaaacaatgcagtaatctgggggtttttgtgaaggtgagcacagcagacagggcaacctgccacagagcataatgttagcgtgtgcctctctggggagggaaccccaggggacaggtgttcatttttcatttcattttcaatagaaatgagaaagctcctgctgatgcaacagccagagtgaaagtttaaattctcacctatttttttcctttcctgctaaaatacaatcccacattataccattaaagtatatattataattctattccatctggtcacactcctcttgcctagcaaaagttgcacatgaaccagcataaagtgcacattctattgacctcactgttctatttacttacctatcacacacaaagcaaaacaaactattgctaaatatccatatgcaataacaaggtctcatggccagcccacatctatttcccctaccaaactgcttcccaagctcattgtggggaataactttagccccatcatgtgcaggcttgggaaagcaatcaatccaggtttctgtctttttttatacaagacatgtgcatgcaattcaaggtagacatactatatttactcttttggaactgtgaatcttgagctgagtgacagcaaggacaggaagatcctgaagggccctattccagttatagcatgtggttggaacggtcagtagttcccgccaaccaagtacctgaacgctctcgttccaagtaggttttggaggcttttttccagcttcccaaccattatgggggaagcctgtaattatgtgagccactctaacaacacattgccctttgtgttatgtgatcaatgtacaccaccttgcatcaaaaaacttttcatgcatacaacatg

SEQ ID NO: 32796 - DNA, 567 bp, Homo sapiens
aacaaattatttgcctattgcagagatttcaaagggttaagcatctgtgttgcttcatgcaaaattatgcttcactaatatgcaatccataaaacaccattacgaaaactatagtctgccatgttctttgttctctgaaataaactagacaaattcaaagtattgcttgaaacagtaattccacagatgtttgagggtgaattaggagaacataatcaaatatcctgaaaattctgttgtttactggcaagtcctgaagcttgctaggaacagaattactcataggtgacctgctctggtcatggggtcaagtggaagcttccgctgtcacacaactaaagagaaaacctggtgtccacaaatgccaagggcaagggaagccaaatgccgatgaaaccaaatccctgatcttgaaaggggaaaagaatccctaaactcactttcccaaagcatggctgtaaacagaaaaccaagtggaaaagataaatgcaaaacacaagcagatgggtaaataaagtgtagtatacatacacacaataaaatatccagcaataagaaatgaggtac

SEQ ID NO: 32797 - DNA, 854 bp, Homo sapiens
gacctagaacataacacttaaatgtagttataacactgatcatcaaataaacatcaatctccagaggagattctgtcagttcccccattatttcagcaaatgtttactgagttcatactaggtggcctaggagctatgtccagaacacacacaatctctaacctcagagagattacaatctagtgggggagagagcagacaataaacaaacaagtagattactacagacacagtctgtaagttggccataagatgtgctatagaaaaaaaataaagctgggcaatggccatggagaggtcatcaatttaaggtaatcactggcaagggatcactggacctaaacgaagcaaggtgcaagttacatggttaaagtgggggaaagcattctgggcagagagaaaagcaagcacaaagttctgactcaggcagaagcatgcctggcatgtccaggcaacagcaaagggacatggtggctgaagcagtgagcgcaagaagaattggagatggagagatagctcagtacttactcaaataagggaaaagccatggtggagttttgcatagagaagtaacaatccgaggtacattttaacagactccctctggctccttaggaaacaactcaggcaaggtcgtagcagtgaaggtgttaagcagtggtcagattctagccctcagaagtggctaacagagcgcacgtggtgtgagaaaaaaggaggccaaggaagacaataaggtttaaatccaagcaactacagtcatttactgacatgcaaagagaacaaaaactgggaattctgttggaatgtattaagatgtatgtgttgagtggtcagaaagctctgggctagac

SEQ ID NO: 32798 - DNA, 1654 bp, Homo sapiens
tttaaatttggagtttccagaaagaggaaaaaaaaaaaaaagccagaactcaaaacagtaattttggcacagaattgtgaggactttgttaaatctgttctcaacttttactcagtgtctcaatcttaaaacacagaggcacaaagggaaaatggaatttctctgtagacacccgtgttcattcacagaccattttttagattttccgtgtggctgagaggcctccagccaaacaatgcccacagagcgcggggcacatgtgcgccagggacgcttaagggctgcaagtaaaacaaagtaacctattacaggagtttccttctcagcaaacaaaaagtggtcaagcaggtctccctacagtttcagaaaacaagagttgagtaaacaagagaggagaaacaaggaagacagcatcccacactaaaaaattcttttaacaatttaaacgtaaaacaatcgtcaagagtacctccgcattttagctactctggcaaaataacagtagttcggtccaagaagaaaatttcatttgtcacttaagtagcctcaaatcaagtccatcaaattcattttatttttaaacttgtttattccacagtaaagcaatgaagtttctgatcaaagagcgacttctgcattatactcggcttcaaaagcactttcctttcagaagaaaaaaataaaaatatatacatatacatgtatttttaaatagtgttttctctcccccctcaaaaaaatgttttctgttcgatttaattaactgagatttcaagagtttggggctacttaaaaactagtgagcccaacagaaatgcaatgggacacggcaaatactgactccccgttcctggaaagccatcatcattcttaggaacacccgagttccatctttctagggtcggctggaacactccgtgcacccaccccgagccccccgcccgcacttgtccaactttctggcccgagattcgcgtccccctcgacgcacgaggccgccggccacttgcctgcggcccgctggcggcgagagctgagcccgcgggcctggtcctcctcctccggcgcagggccccgccaactccggacccgcggaaaggggcggcgcaggcgggcaggtgggggcccggggagtgaagtgcacttgctaaaacaaaaggaggcctgagcggccgcagggcaccgcggcgcgggcgcaggtcccggcggcttggcggctccgggaggcggtggccgcgcggggccccgcccgcggctagggaggcggccgccctggcccgagcctgctgcccacggccgcggcactcagctcgcactccttcagcccgggaggccgggccagcactgccacatgccggtgacccagacgccgggagagaaagagcagactccccgcgacggcggcggccggcaaaacccgggctggagcccagcccgctccgcgcgcacccctgctggccgccgccgcgggcgcgcgcacacacaatgccagctgcaattttatctccttcgttgcttggccagcctccacccgctccaatcctccctcccctccgacagccggaactgggagcctgcgtgattgatggcagctcttaatagcgtggtcagctagaaaatgcatctgcaagcaagatattaaagaggcagcgca

SEQ ID NO: 32799 - DNA, 1438 bp, Homo sapiens
aaatactttaaaataaaattacacacgtgtatttcagaaaaaaatacatacatttaaatgtttcaaaaaattaaatgagtaccatttgccagtctcagcatcagaggtagcattacagatccaggaactgcctgcctaaaagccaataactgctctctagaaaatgccagaagactccagttaaaaatatacactcaaacattatataatacattggctaaaacaaaaatcaaaagccacagattcgagaatgtttgatctgcacaacacagggtggtttcttgtgttttcttctgaagggattagaagtgagtgagactgtcataaagacaaatgctgaacatacattctggagtttaattttaactaaaagagcaaatacttgggctgcaggaaacaacaactgagtgagtacaaaggaaggcatgggctaacttctaacgtttacatcatctgattaattccaacaataaaatctaaacactgatcatcccctccaatcttcagagcaagctgactctacagtgaagaatacgagagccctatcagctgactctggtatgtttaaacgattataatgtaaagcatgttcattctcttaagtgaaaggaaatgactgccaaatgcttccttcacaatctctccagaatagggcaggtcctttaatgtgagattttcctgacattccaattgtagcagacattgaacaaacagagacgcattaaaagccgacctggttctattatcttttattgaaggcctagcaaagatcagacatgagccctgtgctatttacattttttggtgcattaatcacttttatactcaagggctttagaaaaattcaatggatttttttttttaatgaaaaacaaaataaaaaaaaaacacaggatgtaaccacagctatattggtctttttctcaggaaggtcagaaaagctttaaaaacaggaagtctgtgctataaggttgagaaatgtttgttttaacagcctaaggcgtcatggttgcagtttgcagtcagctgctatggaggactatagtttattcttcccagccaaggattaatgtccctagggaaaaggccaaaaaggtactcatataactagaaaagcacattatcctaaaataagacttgttataaaatctgaatcataaatcttacaagatacctttcaacattaaataggaactaatttagtaactggaggaggaacagtttgtcttttgtggtaatttataaaggctaaggaaaaaccatagtaaccaatgctaagacaacctcctagaaacaattagcagtgggttaagaattggtgcttgccatttgatacaagttttctattgattacctctattttaatcattatactaatattaattattaaaatcaaatgtaaaaatgacactcttgcttgaatgcaaattcttgcaaa

SEQ ID NO: 32800 - DNA, 636 bp, Homo sapiens
catgcctaacaattaagatacagtaaaatataaagtctattcctcaaaagaaaaagaactaattcaaccagctggcaatatgaatttatatgatttcagtatattgtatgcagatgaggaaaaagactgttagttttcaaggtgaacagtgccatcccagtgtagtatgtatatatcaaaggattctgtttatttacacccaataatgaaaatcaaatattacaacatgacattccattgcacaccatgcttctatggtagaaaatcaatacatcctatttgttttcagtaacttgtttacccaaccacagttctagagtcattatgcaatgcaaacagtcttctaaagcactctgacccatatgaaataaaaactaggtcctctctgacactcccaaagggaatatctctctggctaactccaggaatttgctcagggatatatggagcaaagattgtagagctgaatcggtatataaagttactctgacactctgggaggaaatttagccaaatccgtaatagtgagtagcaatctcatccactcaatggccaagggaaatatattcaggactagaactcacacaagccaaagcactaaaatacacaaagtacaaccaccagcagtgctggctc

SEQ ID NO: 32801 - DNA, 534 bp, Homo sapiens
aatatagtaattcccctctttctagaattcaagcctcaataaacccctaactaatcttatgtatttatttccactggtttataggtaagcaaaaataagaatagactatctactgaaaggcaagccttgtcattcagtacagtcgatttacagaatacaaattccaattcaatacaaaggctcacctttgcatgagcaattccaaagcttaaataccatggcaagagggaaacagcagctagcagtggtaacagacataaaaggcggctgactgtcttcagtgctacctttggcagcagtacagatggactttgtaggccactggctatgcttaatttaatatgaagctaaatacagtcaaaacatctggtgcaccactgatggttatcatgataaattaaatctggcatcacacacaaatccattcaatattctgtttatatcccttttacctaaaccacaaaactaaaaatccacatttacttttgtttttcatttcctcttagcagtcctgtattttagaaaaggaacgtt

SEQ ID NO: 32802 - DNA, 2339 bp, Homo sapiens
aaggacccattttacttaaatcaatgtttgaagtctgtaatccagaaaaattgtaagcaaaccttggaaaagagacagaggaaaatgacaattcaacaatgaatcattctgttttcctttcaacaacttctcaagcaaccagtttcaaaggaagcctgcaacacttttcccccctcctagcagacacacatacacacgtgtatgtaaaactacgaatctttccatcatcttaaaaattagtaataaatagaagccaccctccttcagagagcagaactaaaacaggatagtaagaattctattctgctgcaagtgactttgggtttcataattttctaatcacatacagctgagaactagagattgggagcacaaagaggaaatcttcccccaatgagaaaatgatactttaataataaagtcctccccccagcaccccgaaatccacaaacattcaagaaatttacagtttcagtccttgacttccttcccttccagtttcagccaataatgtagtcacatgaaatagtttaacctcaaacaagtagaacaagagcatgaataagaggccaagagagagcaggggtcagaaggcacgcaggaacggtcacctggcccggacaggaccaaagaagtgccctgccctcgcccgactcccctcgacttcggcttcgaccccagccttttcttcctgcctccccccgggcgagtgactgctttcacggccgaccctctctgaccaccaggacgaggggccaaaaaagaaagcacacgacccggcgcgggcaagttggacacttaccttcccctaaagcgctacaccatcaatagtgaggtgttcgcggcccagctccggggaaagtggcggggatggggcgggaggccgcgcggaggctgcggggccgcggggcgcagggccgagaggggcggcccgcggggaggcgacgcggaggggctgagggggcttccctgccgtgacctttcctgcgacttgaacctaggctccctcctcctcggtcgggcagatctttcagaagcaggagcccaggatcatgtctggttttgttttccgagggcgagggggctccctgaggatgatggtgatttttttttttttttaatcctcaactaggagagaaaatgaggcagagacaatgtggggagcgagagaggggaaaaggacgggggaggaggcggggaccgaggcccagcggggcgagcgtctcggggtgtgcgggaggctgaggaggctccggagcgcggagggttgctcgcgagcgtctgtgggaacagcggcacctccgcgatggtggcggagccgcggcggagctgctgcaccgacccgccgcccactccccgctcgggcccggcccacctcgcagtatcgcgcccctccattggtacagcgcggtgtgacgcggccgggggcccggccaatgggaggcggaggaggcgggatctctttttccttttttttttttttttttttttttttttaatctttttaataaaatgagcagagaagaaggcggagagaggccgagccttgacaacgccgcggcccggggctcgagggctcgcgctgcaggcggcggccagaggcggtgggctgggctcccgccgcgggcgcgtctttgtgagagtgcgaggccggccctcctccgccgcccgccgcgctccagtaccgccccccgcgccccccgggctgggccgggctggcggcgcgggcaggtcccgggtggggtggggggaagtccggttgatcttgctgttacccgggtcttaattggccttttcagtcattaggacgcggatccatgttgctgcgggctacagagtgggtgtaaaccattctcatatggactctttcgaaattctgatgagcggcttgtaatatttttcaaatagtgtacatgacaaaagatgaattacagaaagaaaaataaaagtgataagtcgcactgcttatttgaaaagaataaaaagtgtcatgaaggcataaaggagagactgtacaggtacagaagggattttagaaagagcagtgtacaactctataaggtacgtgtgaaaaaaaatctaaaaagaggaaaagaccaaacatcacctctttttctttgaagaatgaagtattgtgtcccacttcccgaaagcctgataatcacagggtctatcatgctgtaaagggagtaggggcaggccaaatgatcatattctagttcatataatttatgggattgaggggtttggaaatttcaattatgattagcagtttttgaaatgcacatcatgtttattgagttctttcacagagcctggcacgaatccagggtgaatca

SEQ ID NO: 32803 - DNA, 670 bp, Homo sapiens
cagtgtgctgagatcacgccactgcactccagcctgggcgacaaagctagactctgtctcaacgacgacaacaaaaaagaaatcaaaatgggccaaggaagaagtctcgctttgaccaggtcccatggcctctgctgtgcctcgtcccagcatctgcggtgacacaggagagagtgttgacaaggatgtgctgtccgggaatctccctttatccagtgacagctccattcatctcaccgagctttgcccagagctctgggctggcttcactctggctctgagtccctgtgagccacagggtacagtccacttgcaacagtaaacctgcgccagccagctggggctggagagaaggaagggctgggatggcagccagcccagccaggcagcgtgcagagccagcagctaggggaggccacggaggcccagggtcttggggcagccccactgcgccccctggcggctgaaggaagctcctgggcgcgtctggacctggaccaccagctgaccttctgcacagttaaagagtagctgtgacctggctttcatatgcagaaataaataaataaataaataaataaatagagtagccaggaggagtagccaggatgagggccctgaccagggctccttacatattgtgtctcaccgcacccctagcaggcggatg

SEQ ID NO: 32804 - DNA, 2657 bp, Homo sapiens
tctcagactcccaagtagctgggactacaggcgtgcaccaccatgcccggccaatttttgtacttttagtagagatagggtttcaccatgttggctagactggtctccaactcctgacctcaagtgatccacacacctcagcttcccaaagtgctgggattacaggtgtgagccactgcacctggcccggagtgtttttagacaggggttttcaaaccagtcccatctgatgagcgccacaggaattacggagggacgggccgaagggagggtaaatgagataaaacctgcagagtcgggtgggttgctgggtccccagccctacttcacctccagcagctcttttatgtttgacatactgagatttccagattttacttaacaggaactccactgttaaagtcagtagaattatagtaaataattccaaagttcatgagaaattagtcaccatggacactaccacaaacacccctgagagccactcttaaaatctggatcttaatttcttcaaaggtccagagagttgcaggggggaagaaacctcagggctcgaagtgtctcattcttctgatgcaattccatctgctcccaaaagtggggtgaggcagcgggcaggttagaattatgtcatgcatggattgttctcgtgcgtgacagggaatccaataggcttctacagctctcagaataagctcttccataaacaggaaagcccctgggcctgggagacgctctggtggcattagacacattagttatcaggaggcaggtcctaccttgctaaccagggcaggcgcaatagttttattgatgtgctcaacagcctttgagacacctggaaggaacaatcaaatcaaattactgacattaactttaaaacaggcttgagcagcattgttagagagaaccactgttgaggccgacgcggaagcccaccaagggaccttctgtgggacctcttccccctctcccctttccccccagaatcggaggactttccggcccagtctgagtgctcctacctaggaccccagagggttagagccacacaaaacagcagctggctcagaacgatctgactggaggttagtttgcaagaccatgcactggaaacgccaactgcagactaaaggctgttcaatcagttacctgagtgcacagggctggtgccaggaactcattaatatacttaatgggtctggagacgcctgcccagcagaggatgaagaaggaaaaatgagagagactcagaagagaaccggtgattaaggactgcgagtgagagacagtgagggggcaggaaagcagaggagagcatttcaggggccatgcgttcaatcttccacaaatgcttacttactgagcactcattaccatcaaggcacagcatcatcctgctccggctaagtccccacgtacgccattaaacaacggtcaaatggtaacatgttcgtgtgtgtagagtgcttcttacagcattaaagcgggactgaacacccagcaccaccactgcgacaccagcccagtgtttcacaacctgatttcatcattgtcccctccctgcagcctttttggagttttccgggtgccccactgagaatgcgtgatctagccctatgtgcttttctgtaatttggccacatgttctatctctagaaaggtcaatgttgcacacacactaagtcaatttgaatacagccagaggctagctctgccacagagcagggctcctatgagtcagtcaacaggaaaatcacactaaatgacacacctgcagctcaccattcagggcaggtcattggttagaccttccctggatcctttctagcccgtgaagaggctgatgatctctggagggcccacagaaccctcctgggagatggggaaacttttctttagttaacaggccctgttctcatgcttgggttcctgtcctaaccgtgaaggagtatttcgcagattgggaacaaactgcaatagaagcaagcattggaactctcgacccagagcatgcaggctcgggaaccccggaatccacacaccaactttcctgtccacaaggtggtgcactgcttccatcaacatcatgggtcacagcaggtttacctgccataaacctgcaagtgcaagtgccacccagagaggacaggactgggcaaggccaggaatggggctggaagcagggaggccatgggctgtgggttctaaggcttacccttccccatatagcgagtcttatcattgtcccggagctctagggcctcatagataccagttgaagcaccactgggcacagcagctctgaagagacctggatgagaggaaaaaagatgtagtagcaattcagaaatccagttccagcacaatcccaagtcccctcccgcccacagatgcatttgtcattagggagctgtttcttcctcctaccagctgtgtgaattaaacgctctgggctgttcttcatgcctttcacatgtttatgatcctgtactgcagaacttactgcaaagatgactaattcctctagcagaaagaaagtgttctacagcagagcctacatgccacctggaggtcttgttaaaatgtagattctgacccaggcaaatatgcatccctcacaagctcgcattggtgccctgtggattactccagca

SEQ ID NO: 32805 - DNA, 1802 bp, Homo sapiens
cagtttggacaatgctaaatgctattttaggggttctatgcccaactggaaactggcaaacaggatggatgtggggggaaggaataaagataataaaatgcgcagtttaataaatgtaagaactgaaccaagtaatcttgcagatactgaaaccagccatctggtgaaacctatacctgtaacaagggcaatctttggtggaggcaaaagaacagatggtgtcaaggaagatgttgcagagaaaccaacaagatatttctagcaaaggacccagcagtgttccctgctgcactgcagtgtgcgctatcaacaggtcatacttccttcttgaaagctgccctggctccctacatatccaccctacactggatcaggcaaagacaagatgaaaacaagaggcttggagtctacagacttttggtgatgataacgtgttcacgcatgttgaccactctagtggggatgctgacaatgggggggctgcgcatgtgcagaggcagtgggtactcatgggtttatgtacctctgcaccttccgcctgcttctgctgtgaacctaaaactgctctaaaaaagttgatgagacagggagagagagagatgaaaggttctgagcaagtccatcatttcatgttttttgaaaaggattaagacacacaagagaaagttccattcatttcaatttcaaaatgtccaactcccaacaatcttctagcatctggggtcttttgttgcttaaagttcattaatatccaagtagaaagttccacccattgactaagcaaaccactcttactggatgaagggaattcttggcatcctgtgagaaccctcagggttccccataaagccagtgagaaaccccacagtgcttgagagcccacacagcaagcagccaactcaggcattcttttgcccaacgaagtcaggcctcaaggatcctttcttcctgagggggaggggaggtgcaaggggaagggaagggctggggttccactgctaggcctgtgactcacagatggtgactcagctccgactggcagttctctgtgagtttagcaccgctgagtgattctgcctgaagctcctttgccaacctcacccactctgtccatcgcgccatgtgctggaggtaacacagagctacaaaggcactggattttcttcttaaaggaaggagtttcacaattctctaatttttcataagaaaactcctcctatagggattgacagccaggtaaaaatgagagcctccagactattccaaagcctacaggtaaaaactgtccttgatccttgctgaagactgatttctagtcacagagataaaggtgctatattcacacctgctatccctccccttatcaagagataccatcctatcacactgtatcctgcatttggtcacagcaagctgtcagccaacaactagtgatgggcccctttagggacaaggtcttgtggtatcaccttacttccttacttcactgacttaggagccaacttatgtggttttaagccaaggagctggcaggatcaggcggggtggctcacacctataatgccggcactttgggaggcagaggcgggcagatcacctgagtgaggtcaggagttcgagaccagcctgaccaatatggtgaaacccccgtctctcccaaaaatgcaaaaattagccaggtgtggtggtgcacacctgtagtcccagctacttgggaggctgagacagaagaattgcttgaacctgggaggcagaggttgcagtaagctgaaatcatgccactgcactccagcctgggtgac

SEQ ID NO: 32806 - DNA, 4363 bp, Homo sapiens
gtcgcgctctttcgcccaggctagagtgcagtgacacgatctcgactcactgcaggctccgcctccagagtagctgggactacaggcgcccaccaccacacccggctaattttttgtatttttagtagagatggggtttagtagagtaggatggtctcgatctcctgacctcgtgagccacccacctcggcctcccaaagtgctaggattacaggcgtgagccaccgcgcctggtcgatttttgtattttcagtagagacggggtttcaccacgttggtcaggctggtctctaactcccgacctcaggtgatcctgaggaggcccacctcggcatcccaaagtgctcggattacaggcgtgagccaccgcgcccggaccattcacagcttttttagctgcctggatggaaccccgaattagggacacggtaaatgaatggagcagtcagggcccgggtgggcctgaaaggcaagtgaagcaatggaccctaccgcccagagaagcgcacagagcaggggaacattgaacaggaagctttcttaaaatacatccttcttggcctagcgcggtggctcacgcctgtaatcccagcactttgggaggccgaggcgggcggatcacctgaggtcgggagctcaagaccagcctggccaacatggtgaaacaccgcctctactaaaacaacaacaacaacaaaaaaaaaacaaaattagccgggcgtggtggcgcatgcctgtaatcccagctactcgggaggctgaggtaggagaatcgcttgaacccaggaggccgaggttgcggtgaaccgagatccgagatcgcgcaattgcactccagcctgggcaacaatagcaaaactcaaaaaaaaaaaaaaaccaaatcagatcaggcccgatttttggtggccagccggggagccgctcttgcccaacttgggcgaggtcgcctggaggacttgccaatgatctaacggctctgctgtaggttcctcaagaggtgccttctcggagttaaatgagtcaccgcttactaggcagaagcgcgggccgcgagcgcgggcgagaggcgggggctaccggtgggggagggggccgcagcctcgtggccatctccactatcgccgccctcctccattttaggaagggcctggcctgagtggccaccgccgctaagtctgcgtctatcccaaaaaccttacacttggctacgatggaaaagcaacttccactcccaactcccgctgtgctaagcagctcgcgtgtgcagctcccgaccttccctgacagtgactcggccccgcagtcggtaatcacgtgttgatctgcactttcccctccaaagaaatcgggggcccagcacgtgcgcctggcattgcgcccccgccccgggcctcggggtgagcgggggcgccagttcccacccagggaggcggcttgcacgtgcccccgaccccgccacgctgggcctgcgggcgcgccgcctccctcggagggaaaagagccccacaagcccagaaaagccctgcgccgcctgcccgttgctcagcccttccccaatcattacctagccactgggtctcgtcgcctaggagaggaagcggagggtgctgcagacaccgaggtgaacgtaaagccggcgagatctccgtgctccgggtacccacagatactgtccgcgccgcccgcgccgacttcctgcctagctaaggcgagccccacccacttcccgcctccggggcacgccccctcagctccgcctcgccattcgtcgggagagccgtcactcattccctcacctcccggaaaggggtgggactgcgacggctgcagtagcgtggaaaggggggtgacgtcccgcggacttgaggcgggcagatctggggggccccgactccccagcggccctgtagtggtgcgggcgaaactctggccccagataggaccggtgagccgaactggggtgtgcggagccggggctccgggggatggcccggggcggcgtggcgggcatgagagctcggggctccgtcacgtactccgagtcccgcacgcactcagcgtcgctctggggccccacgtccggccctcgaccttgctgacaactttggcggcccgggcctgccgcggccctcctgccccgcccctcctgcctcgcgccgcgatccgagagaccccgttggcgtcgagtcgttgagaggctgcgcgcctcggccccactccggggttggggcgctggccccgccgcagcgctgcgtgtccggggccacgtgcgccgcctgcgcctgcgcgctgccctccagccgcgcccgtctggccgggctccgcctggcacccgccaaggtgaccctgtccctttctccttgctgcggtgagaatcaggccgagacagccaaaggaaggttcactttcctttaattctacctcatactttttgagtgccttctaggtgtccggcgcgcccccacgtgcttccccagtgttaattcattctctctctagtccatgtcatgttgcctctcaaattttacatccctctcattcccatctagggaactagatcaaacctacctggattcttgtgaaccattcatgtgaattatttggaactggaatttcacacagacccggggaatttctcaaagttcaagacgggtcatattccgtggaatacggaaggagttggagtgatttcacttttctgatcaagaactgatagccattaaaactcagctccgcaatatatccccccactccaagggagggctgagatgatcacttcgttttctgttacggctacttttatatttttcaacattactgctggtctgtaagagaactaaaacatctgattttcctcatttccttgtaaagaggtgttcaaatatgtacttgaatttaattatttcttctggtcagctgcaaaacctgcttttcttccttaacccctagcatttttatcctcttagctacagacaggtttccatggcgttggttaaaaattaaggcctattgagaccatagtatttgctttccagtgagtaagaagcaagaactttaggattaaattcagcaaaaagaaaaaaaaaaagagtaaaattttgcaagcagagtttgtgatttcaccagcaacacactaacgtttttggctactgaaaaccactatccccagccccatgactcagcagctaaatcaacagccaacatctcctactggtaaggactctaagaaatcaggcacttggtactctcagagcaattctaaggcgtggccctgaaagggctccaaacaatcttattttacataaaaatggttagagagataaagatactctgctgtggccagaaccagtaaatctagcaggaaatcagaggccgaacatgatcccggactgctgccgttgcaagattcttggaggctgcagcgccacattctgagccagcacttcgacctcacattgtagctaaaatgttaatgattactagagatgtcctgaaatctttttcaaaattcacaggctgccaaatgccctccctgtttccatagctccttaggctttgttagcaggctgtggggttcacatttgcttgtagtcagcacaacggcattgcatttagttattatttctcacttgctgtaagcttgttgagaagttttattggtggtgggcaggtggggaataactgtccaaagctatcagaataccacaccttgaagcactgtaggtaacacatgcatggtgtctgcaggtggccgggatcaagggagagtgaatctgctacgacctgtaactcgcttggattactgattctccctgtgatacgtgtgtaaaaatcactggtcagcttgagaaagggatctttgtgaaagagggtctccagccagatagggaacttcagggttggataaggagctctggggaggtaagataccagatgagtgcagaaggggatgtagctggatggtccctcctcataacagatcatgaggttttggtattcatcactcagtatttcacgtacaccagagactacataaagcgtatataaatctctgtgtacccacatcccgcttaagaaatggaacaccatgctgggcgcggtggctcacgcctgtcatcccagcactttgggaggccgaggcgggcggatgacgaggtcaggagttccaagactagcctgaccaacatggtgaaaccccgtctctactaaaaatataaaaatcagctgggcttggtggcaggcgcctgtagtcccagttactcaggaggctgaggcaggagaaccacttgaacccgggaggcggagcttgcagtgagccgagatcacgccactgcactccagcctggatgacagagcgagacac

SEQ ID NO: 32807 - DNA, 633 bp, Homo sapiens
aggctaagaatcaacatcccaggctcctgcctcttattctattaaccacagaaattaagttccgcaaagacaaagatgcttctgttacttcccaattagtctgccctgtttggacacagtcccagacctcataccccggagcctacgcacggactcctggcaagagaggcgccatcccaggcccagtgccagggctcctctctcggtcctgtcctcagggtgtccttgggctccttctggacagaggctcttccctctcctgccaggtcctcagatccgaactccctaagcaggggcttatgtcttgccagtgcttcttgtttttctttttcttttttttttttttgagacggagtctcgctctctcaaaaaaaaaaaaaaaaaaatcaaatgggaacacttcagctatgacaggaaatatcttctctatttacatagggcatatgccgagtacatgattttgtaactttatttcatcctcttcatttacctagggtgtataccaagtaaccaatggaaacctctagagggtatttaaaccccagaaaattctgtaacagggcttttgagcccttatgctcagcctgctcccaccctgtgagtactttctttcttttttttttttttgagact

SEQ ID NO: 32808 - DNA, 769 bp, Homo sapiens
tctcggctcactgcaacctctgcctccccggttccagtgatttttgtgcctcagcctcccgagtagctgctgtgattactacaggtgcccaccaccacgcctggctaatttttgtatttttagtagagatggggtttcaccatgttgctcaggtttgtctcaaactcctggccccaggtgatctgcctgccttggcctcccaaagtgctgggattacaggcatgagccactgagcctggcctctatataagccctaagttctaaccgctcctctgagttactcatcactgaatttccgttgcaggtgattcatgagtttccaggaaaggggtgggtgatttccagaatgagggttcctcccctttttagactatataggtaaacttctgggccaggcatggtggctcatgcctgtaatctcagcactttggaaggccaaggctggcagatcacttgaggtcaggagttcaaggacagcctggcaagcatggagaaatcctgtctctactaaaaatacaaaaattagctgggcgtgatgatgtgctcctgtactcccagttactcaggcagctgaggcaggagaagccggaggcagaggttgtggtgagccaagattgtgccactgcactccagcctgggtgacagagcaagaccctgtctcaataaactaaactaaactaaaataaataaataaaggaatagactacataggctaacttctggatgtggctgtggcatttgtaaactgtcatggcgctgatgagagtgt

SEQ ID NO: 32809 - DNA, 1685 bp, Homo sapiens
cacaaattcataaactttcttaaaacattatgagattgtttcacaatttttttttaaagatcatcagctatcattagtgctagagtattttatatgtagcccaagacaattcttcttgttccaatgtggcccaggaagtcaaaagattggtcagccctgccctagaggaaggaatgctgagagagaggccaagaaaagtctgaacagacaggccttgccgggggtttagatcatgagatttttgtccaatcacatttctacacggttatcagtcgtgcccatgtaatgaagcctccataaaaaagccacgaggactgggtttggagaggttctggatggctgaatacgtggaggttcctggagggtggtgagacccaggagagcatggaagctctgcttcccctaaactccaccctatgcatggcttcatctgtatcccttgtgaatcctttataataaaccactaaacataagtaagtgttttcttgagttctgtgagccattccaacatattaatcaaacccaggctgggcatcgtgcctcatacctgtaattctagcactttggcaggccaaggcgggtggattacttgaggtcaggtgttcgagaccagcctggccaacatggtgaaaccccgtctctactaaaaatacaaaaattagccggacatggtgactcacacctgtaatcccagctactcaggaggctgaggcaggagaatcgcttgaacccgggaggcggaggttgcagtgagccgagatcccgcaactgcactccagcctgggagacagagtgagactccgtcaaaaacaaaaaaacaaaaagcaaacaaacaaaaaaacaaacccaaagagggggtcatgggaaccccaaattgaagccagtgactcagaagttccagaggctcagacttgtgactagcattgggggagatagtcttgcagactgagttctcaagccctgggatgtgatgccatctccaggtagatagtgttgaaattgaattgcaggacacccagctggtgtccacccccacacatttggtcacagaagtcttcttctgtgttgactgttgtggtgtgagagtagaggaaaaatgcagtttggatagagtttttttctgacacaggtggtgatcttcaggaacccacctgcacctgtgagattctgaagacgtggacccagccttcacaggcatccaagttaccttccccatgaggacttgttttacagatcacaaaagacatctgcactttgtatggctccagcaggatctctctgatctgtgaggattaatgagccagccacatctctccccagcttcctggaccaatggcgcaaacctagttcagaaacccagcaagttgcctgaggcattagccaggcatccgtggtatgcaagttttggcactggtttgctgtttggatgtttttctccttcaggcggaaatttacaaagcactcatgctccaactaccatggcagagagaggaggtgaagcaaattgtaaaaacttcaacctcagtattgagtttctccttgacttgtgttgaagccaatgatggcaagggatgtggataacctggatgttttctcttgggatccaccctctcacaggtgttcctctgagcactttgcaggatgagaagttgaatagggaggggagaggtcccctctcctcccct

SEQ ID NO: 32810 - DNA, 622 bp, Homo sapiens
atctgtggccttttgcaggcgtttgcttgtggccaggaggaagcccctagttccacatgtgcagactgggaggcaggaacaaggaggaactgggccaaggtgtcagaggaaagccattctttcgtaggctctccagccagcccagcctactcatttctgaattctggaaacccctgccatttaggatataataaatcactaggaaaagttaggtgagttatttgcgtcactgattgtgaaattccacagtcttcccttcccctggggcagcccggccttgggtctgtcctcaccttttagctaaattcctcaagtttaagcagccaccacaggccgtccaccagggggcaggagagggccatgaccaaggacacagcagccctgtctgcagcagccctgtgcccccacaggcccttaatcggctaagcctcgtttccttatctacaaaggagtaacaggacccggctcctaacggggcagtgggaaccaatgcacgatccgtgtaacacagcgtgttgcatggtgtctggtgcacagtaagtgcctggtcccctctggcccatcactggttctgtccccagagacgcaacctgtcccctcggggggccaaactcaatgccag

SEQ ID NO: 32811 - DNA, 1688 bp, Homo sapiens
cacaatggcggggaacagaacctggcaagggtcaacggggacctttgaaaacataaagctcaggtaggggcccctctaagggcagtgttgggctcagttttctttttttgagacggagtctcgctctgtcacccaggctggagtgcagtggcacaatctcagctcattgcaacctccacctcctgggttcaagcgattctcctgcctcagcctcctaagtagctgagattacaggcgtgcaccaccacgcccggctaatttttgtatttctagtagagacagggtttcaccatgttggccagcctggtcttgaactcccgacctcaggtgatccacctgcctcagcctcccaaagtgctgggattataggcctgagccaccatgtccagcccaggctcagttttctagagcgctctcccacagccagccacacagccaggagtaggccccttccctgtggtccttgaaccagtctgttccttacatagcaatggagcacacaaaggctatagtggctcctgagagaggcaggtagtggggtagttaagagcttggattttagtgtagtgggcttggattttagtgcagcgggctggatccaagtcccacttctgcccctgcttgggcaagttatttagcctcaacatgccaggttctctgcaaagtgtggatgacgacagtgactacagggtgtcattgtcgggtcgttatgagaacaaatacatgtgtgtacagagcacagggccaggcaggtgtgtgagtgtttgctgctgtcgtgactgttgtgagtcacgtcctgctgtcccagggttcaggcctgtggtgcagacactggtgctgcgtggggcccgtctggtttctgtcctgggaagaagacacaagtacccctgtcctaggtcaggtgcctggagcgcaaagccttaggtaaacaggaatgatactatgataactgtgagatcagagttcaacatgaatctgaggccagaatgaggccaggagaactgtgcttcaagggtttctcccaaatgctgcagggctggcagagcaggccaggcagggatgaggatggaagggaaaagtcagttccctgggactgggaaggcctcatgcaggatgcttccagaacagaggggccctggccaaccatcccctctgcagcattctccagtccccactggcctctgtagggaagggcaggagggctgatggcagagtcacatcaccctcagtggcctcggtggcaggaggcagcatgtcctgttggaagtcacaaagacacaggagcaaaaagaccacaaaaggccaggcgcggtggctcatgcctgtaatcccaacactttgggaggccaaggtgggcagaacacttggggtcaggagtttgagaccagcctggccaacatagtgaaaccccatctctactaaaagtacaaaaattggtgggcgtggtggtgcatgcctgtaatcccagctacttgggagcctgaggcaggagaatcgcttgaacctgggaggcagaggttgcggtgagccgagatcacgccactgcactccagcctgggtgacagagcaagaccctgtctcaaaaaaaaaaccaaacacacacacacacacacacacacacacacacacacacacacaccacccataaaagaaagggttgttttaaaactcatgacaggccaggcgag

SEQ ID NO: 32812 - DNA, 2164 bp, Homo sapiens
cttgtacagctgagaagcaggtcacttagtttctcaaggaccagccggcctcagtgcacaactgaaggtcaagcgactcttacagccctgtagccttgccgtgtgacacccaggtgacctgtctctgccaaagtgctgactgtgctcgcagtccttggaatgcacttaagtttttaatagaaaggacctataattagggcagtatctgatgctctgatctgggagaaggagaaaaggaaaacagcccctaggattcctgccctcagttcagcacagcacaggacgccatgagattttcaaaacctgacattccccagggaagggccgaccctcttcagcgaggcttacttgaaagacgcttgaatcgcaaagtaaggtcttggcttttccccactctcagagagactccaggaggactccgagactcccagaccagccctccgcccctgccctcaatctcagaattgctgaactctggaaagtcaagatcatctagaacagaaatacaaggggctggggcctgaggctagaaacgaccaaagacagaataaaaagcacagtcctttgtaaactgtacagcagagacacggcagctcgggagtggcggagtgcaccaagctcactgtggcttggggtggggtggtggcgtgggactggcagttgccggctctccagcccgggacagttacctaactcgtctcccagcctgtttccccatgggcagcagagacagccaggacacagtgaagcaggtcacaaggggctcagagtgtcctccccagccccgtccaaggaaacagggcccggctctgggggcgaactctgtccccactaccccaaggggctgtgccctggggcaggcacagcggggctccttcgggagggagcgaatctcgggcaaggctggcctcctcccgctggcccaggacagcctcgggggcgccagcaggcactgcttgctgtgggtagggggtgtccaacctagacgcggcctctgggagggcaagaccgggaggggtcggcctgtgtcgggggctcctggaaaagcagcgccaccgccacccacctgacgacatggaaggcccaaagcaggcgatctgtgcgaggcccgcgcgcggcgcggacgatgctgaggtacaagtagagcgcaatggccacggtccagaagaaggagctggtgttggcgaaggtggacagcgcgccctgcagcacgcagtcccacgacgggcccgcgaagttctgcagcactccgtagaagtaggaggcggccgagagcaggtcggccagcgacaggaagagcagcaggcgccgtgcccggctgcgcaggtcgggccacagggcgtgcgtggccaccagcaggcccgagccgagcgcggagagtgcgcacgacagcagcaccacggcgcgctccgacggcaccagctcggtgggcggcggggacggctgcatggcgtggggggccaggagccggagcgccgcgaggacagaagccgggccgcgcgtgcggccacgccgccgccgtctgggcaccgaggcgccctaggctcgcgtccaggcgcccgccccgcccgcgtccggccgctcccccgcccatctgggccccgggccctgaaccccgtccacgccctgcgccccgcccctatatcccgggccctgagccccgcccacgcgccgcgccccaccccggtaccccggcctttaagccccgcctacactcccagccccgtcccgccgtcccaggccctgagccccgcccacaatccgagccccggacacacgtcccccggcccacatgcccttcccgcccacacgccccccccccgcccgtgtgcccccgcgttgagactgggacttagagctccgcccacgcgccccgatcccctgtccacagggcccagagacctgggcctagagcctaacccacgcgccccgctccgcccacgcaccccgccacacccctgtgttccgggccctgaccctggctcaggtgcccttcctcgtcccgttgccccgggccctgagccccgcccccgccacgcccctgaggcttccaagctccacccggtgcccgaggctcctgagccccgcccacgccctcacaccacgcccctaagcccctaggtccctaagccctacctcagggcacccccaggtcccagcacct

SEQ ID NO: 32813 - DNA, 4024 bp, Homo sapiens
cccaatatgccacccagcacccaggctccataagaaatctgctttcagaatcaaagacctgaaaattagaaatgcttttctaatgccgaggccaaatttcctccacacaaaacaccacaaatccctctccaaacaattcgcgattgccccccaatctcaatggcctttttctcgggttgtaaatgttccctaaagttgtcagtgaattaaaccagaaaaaaaaagaaagaaagaaaaaaaaaaaagaaagaaaagggtgggttacctgctctgtgggccaaagaaggaccttggattgatcggatgtcagctctggtcctgcagcttccccagcctggctccacctgtctgacctgttgggctcgctgccgcctctgggcctggcacagccgcagggagcggggctcgctgccagcacccaggcccctccataggtgtgcattcacctgccaagaggtgcaggcgcacaagtgccctcccctctctgctcccaccatgtgacctgccccccagccggacaggcactggagcatctccctcggtgtcactggaatttcaaacctgaagctggcagagagaaagaagaaagggaagaagaagaggggagggggacagaggaaaaatcctggcccccacaactaaccaacagtccttccgtgatgtcgtggaggtcaggccaggtggggccagcagccccgtcacggtgatcgtcagggtcaaattccagggctgctctttccccctgggtggctattttgggaaagcagcttttctccagcagtggacagactagctactatggacgctggaatccagaagactcagagctctgccagggcccagcacaggtaaaggcacggaggacagccctgggagcaaagagacagtttgccctcaggtgcccctgaactccgctctgagcacacacaatcccacgggtccctcctgtccctacccttcaataaggatcacccagcacttggggtcctatctggcttggaagaggacgtggggcttgaggtattacccaaggtgttgagggggtacagctggaggggcaggtggcatcaggtctagcggcaaggccactattttcctgccctccaggactgagagcccttagcagccagatttggcttctcttccctttcactccctggcccctgatgcccgtcaagctcaagtcgatactgaacaactgagtacacagcacagcctgggtgtgaggtcagactctgtgcctgggattggggcgggtcaggcatctgactctgagtttcaaccactgctcaagttcaatcatgtgcttctaagctgccaatcaagccaaacctctgggagtcactgaagaatagaaaccgcaaggccaagaggagggttgtggtgccctgtggtcttgataacttgggttttgaatgcagggtggatgttaagatataaagcccttcctaggaaaccagaagacatcctcctaaggaggcaacaaagcagggcaaggcccaggagaggacctgtgatggaattcagacagagcccaacctcccagggtacagccttgttcacggggcgcgggaggagaaggctaactgctgctgagtgtggccaggcaggtcttcagctactgacatcagggctgtgtccacccctcagagcagcactgagcttgaaagtgaagccctggccgagcgcggtcgctcacgcctgtaatcccagcactttgggaggccgaggagggcagatcacctgaggtgaggagttcaagactggcctgaccaacatggagaaaccccgtctctacttaaaaaaaaaaaaaaaaaaaaaaacaaaaaagtgaggctctctctcaaagccagcccttgctctgctgccccaagagggtcctgcaaacacacgggccttgtccaaggggcctgatgtgcaggagaggggcagggcccagggcagtgaccccgaagggctccatcctcggacctgactcctccttgctcataaacaaccaggcctttgccttcctcccacaccagtccccgggtcaaaggccttaagaaaatccccggtgcactagccaactcagaccgccctggcccttagatcatccgctagtcactgggctgagacccaaaggagagggaaatatttggcgatttcagggaactgaacagcaaaggtgttcacaatcagaccaccagcaggagtgcggcacgccccttaaacactctaaggaagtatttaccaaggctgctaaaaaagaagttgaggatttctgcctctgatttagtagaaaataatctttgaaatttacatacaaagtcccatgataagtcatttgggatcccccagaggaggaaggctgcttgcggttagactgggtgagtcaacgaaacaaacaaatgggcccgatgaggtcagctttttggaaaaggaacaaagaaaactgcacccaaatgagaggcagcttacaatggtgaagcagtggtcacagaaaatccatttccaaagcctctaatccagcagtttgggggatgattttgtcacccaggggacatttggcaatatctaaagacatttttggggccgggtgtggtggctcatgcctgtaatcccagcactttgggaggccgaggcgggcagatcacttgaggtcaggagttcgagaccagcctggccaacatgacaagaccctatctccactaaaaatgcaaaacttaactgggcatggtggcacacacctgtaatcccaactacttgggaggctgaagcaggagaatcacttgagactgggaggtggaggttgcagtgagccaagatcgcatcactgcactccagcctgggtgacagagcaagactctgtctcaaaaaaaaaaagaagaaaaaaacccagacgtttttgattatcacaattgaagggtagggagtgctcctggcttctagtgggtagaagccaggaatgccgctaaacatcctacagtgcacagggcagcccccaccacaaaaaatcatctggccccaaatgtctgtagcactgccactgaaaaactgttctcatccaccgagaactctctctctcttccttgcaagtcctgggcaaaaggttgtttttagtagcccagagggccatggtggtgacagctcctccctgggtgatgccaggcttcagggggtcagcatctttggagggtcctctaggcatagaccccagcttgggcaagccacttggctgcccctgcatgggtgaccctgcctgactgcccctggctgcaacagccccttgccgaggcttctagaccctcagaacctcccccctgctgctctggctctcaaggtcccacagtaaagccacaggaatgagaaggagcgatgacagttctcatcatcccgtcatcgtcacagcagactggtaggtgctttacaggtgacaatgagctttcacattcgttgtctcacctgaatacataaaagcctcacccactgttaaaacaatctgagttcttgacctgccagaccagtggaacatgcagaggccacctgtccccgatgagggcctgggggagagggagccgtgcattcatctggggagaccccagagtccagagctgggcagaggtgacagcagcctgtctaggggacctgggggaagccagggttctggctgctccacggcaggccctgaggtggagggtctagaccctgaccaggcaccagtcctgctgaaatgaggctccggaaatagacgcacatcacactccctggagtattttctgggcggccacagagttcagcaaatagtcaacagaaagcatctccaagaagtgggtgaaccggaaggacacatgcccaaggctgatatgggaggtgtttggggacttagggaagaagcaggacagaaataggcccagctcattaactgcatctacatatgaattgcttgactttttttttttttttttttcagagacagggtctggctttgtcacccgctgagctgcagcacagtggcatgatcatagctcaccagagcctcaac

SEQ ID NO: 32814 - DNA, 2350 bp, Homo sapiens
aggagcctagtgtggatgcaacaggaaggcccaggctctggaaccttctgcagagcctagctcatgtcccccacctgacgcagaaacagggaggtgctgaagcatgtgccctgtctgtgctacaggccccatccacgtaacctgagagagggggcctcaggagcactggcacctgctgctccaggccaggagcaaggaactccagggaccacctcccctcagtctccttccccactggcggctcacaggctggacagggctccagccagcagggggcgcgcgcgttcacctcggggccaggttggctgaaagcccctctcccgttcccctcttctagagcaaaagtcttccaaagccttgacctcttagacaacgctactttagtgaccgaagcacttttcctttccctttcatgcgagttttttgcaaccatgggtggctagtatcaatgcctccactttcaaggtgaggagaggaactggggaggttgagcatttgctgcaatatcaccgtggccagcagcgcaagagagccagggtccccatttgccacccatgaaccagtcggccttcctcgccccacgctggagatagaggagggaagaaagaactagccgagcaaaaccccaaaaaaggaatcctttctccccagagattatgaaatcaaagaacattttgttgcttcttggaaattcttccccttacggaggctacacaattgaacagggttttcattattatgactatgattattaaagttgttggtctagttcccgcctccttctttgcaaactttcgcacggactgagaaacacaagcgtttacctgggtgcatgctgggacggggcgagcaggtagtgcaggcttccaggcctctcctgccccggagcttggctgcaggactcccgcaaaatctccaaatgcccccgatctgcgtggtcaccgagaagcagcccggctcggaacaagcccaggcaagcccaggcagagcccgccgccgggtcctccttcctgctcgtgccaccaggccccggggccgcgacgcgtctctccagcccgggatccggggagctgggctgtccccagaccgacgggacagcggcatctcctccacctgaaaaggaaagaggaccaggtgggggccaggcagggcgcatgaaggcggcgccagcaccgcgcgatccgaatcacgtcggtgcgggggaggggtcggagcctggcctcggcctagggcgcagatgcggtgcgcaccgcaggggggcggcgtggggtgcggggccagtcccgccgggcacggggtcctggtcctcatccccttcaccgccgccgcccgcctgggctggcgtttccccagcgagagcgcgtagtttgcgcagcgcccctcgcccacgccgccgctgggtcgcggggcgcgcctacccagagccgaggtcccggactccccggccatcgcgacccttccggggactcctcgccccttcgcggtgggaccaaggcccgggtggggccgggacagggtggtggggggaagggggaccgtacaaaagcaaacagaaaccacggggggctcgccgcgacgcccagtccgagggcctctcgcctggaagagggaagaaacccacgtcctggacgcgggtgtggggtctgtcccgggtcaggacctgttgtctctgcgacgttgccagtccggagagctcggagggccaatgcagccccggattcaacaagatgcgaaaggacttctaaagccaggaaccggcacccagccacggccaccgcccgccggcccggcgccctgcccccactcactgcgcccccaagttccggcgccgcgggctgcaggggtgacttggctcggcgtgcctcggggcacgaggctcggccccgcacggctctcgggtcccggggggctggggtgggaagggacatggccggcgcgcggcgctggggagccgggtgcgccaggctggggaccttgcgtggggcagggcttggctcagccgaggggccgcggctcagcccccctcaccggccttaaaggttcccagagacgcaaagtcggacgcgggtcctgagcgcggagctacaggggggagcatggggcagcccccaaggcgcgctccctgcatttcccaccctttccacgctgccctgcgcgcacggtcgggcgcccttggggtgggcagggaggcgcgggcaggggcagcgccgaagacctcccgccgccatggagaaggggctccccacccaccctcctgccccaaccattatagatcccagccagtgcgccccgcgcccttccgggacaagctgcccccaggaccaccgtgccccagtatcaagcggacagc

SEQ ID NO: 32815 - DNA, 1054 bp, Homo sapiens
cccacctccagcagacagaccctgaagcaacacacccccaagaaaacaagtgacagatatatatgatagatagatagatagatagatagatagatagatagatagatagatattattttttttgagacagagtctggttctgtctcagaagggtcaggttgcccaggctggaatgcagtggcatgatctcggctctctgcaacctccacctccctggctcaagctagcctcctacctcagcctcccaagtagctgggacgacaggtgcatgtcagcatacccagctaattttggtagaaatggagtctcactatgtggctcaggctgctcactacgagctcagaagagctcaagcaatccacccacctcggcctcccaaagtattgggattacagacatgagtcaccatgcccggctgtaagtgacagatattgacataagccctgcaataggaatctgagacccaggattggacaggtcaactagcaatgcttctaaatacaagtgatctggcaagctggcaaaatgtctgagtttcattctttaccttaggtcaaagtttcattcttgatttggatcaaaggggaaggagaaaaaggcacaaactgaaccatcaactctgtcaccgaaaagtggtcccctggatcttagtgctttgccaccttcttgccacccctatagtaaaatgcttttttattctttctttaaaaatttctgttattattattttatttaaatggggtcttgctatgttgtccaggctggtctccaacttctggcctcaagcaatcttcccactccagcctcccaaagtgctgggattacagacgtaagccaccatgtccagccatgatttttaaaggcaggcatactttatactttttgtacacacttacagctctgattctttttttaaacatatttatttatttttgttgagatgaggtctcgctatgttgcccaggctggtcttgaactcctgggcccaagtgatcctcctgcttcggcctcccaagtagttgagattacaggtgagagccgccatgcctggttc

SEQ ID NO: 32816 - DNA, 1053 bp, Homo sapiens
tcaagatcttgcagctggatcagaatgctgagttcatcgttgctggtgggccgccgtcacctctccttagcccccctgttgaaggatggccggcccctcctgggaaaattgctacatttcctcagataacagatgcacacatgactaatcaggcctaccctaagaaatgagagccagcagcagaagccacagcgcacactctgtattgtgaaaatggaatgtgggatgacctaggagatgacacaaatgccgaacggcgaactttctgtttctatgagtctaataatgaaaaacttttctgcctgaacccgtgggatcgaataaaatgaaaaaccccattctgcaaaccactgcgccccatgggaagcagctcggtttccttcccgtgtcgtcgggagccctctgatggaggaagcctaaattacagcgctcataacctaacaggcagccgccgggctcaagtgccccctgattttccagaatcgaaaagaagaggaaccataaaagaagccgaatgttttctccccctggcactttgcccagtgacagttgtcaatcagaggtgctgcagaccgactcgaaggcagcgttcagtgcccaggcacactgcctgctgccgttggttcctcccatggttctcagggcgccaggtctctgtcaactcccagcccccagtttccttaccttgtcctactgcatctgagtcaggatgcctgatgggttgagcgctgatgatctcatccgtgtcccacatgtcccagggaatcccaggtctgccctgagcttcctgtgtccttgggaaagtcggttaatctctgggcctcactgtcctcatcgctgagcttggggacttgtaacagatgatttctaagtatcttccagctttgaatagagcatttgtcttgggtggccaggcttaaagtttaaaggcataaaaggaaaatgggatctgatctttaatcagaactgctgagaatgagaagcgcagagcaaactaccgactgcattgggtgaaaagtgaaaatggtcggtggggaggtgccacggtcagga

SEQ ID NO: 32817 - DNA, 3454 bp, Homo sapiens
tttttttttttttttttttgacacagtttcaccctgttgccctggctggagtgcaatggcgcgatcttggctcactgcaacctctgcatcctggattcaagcgattctcgtgcctcagccatctgagtagctaggactacaggcacgccaccacgcttggcttttttttttttttttgtattattagtagagatgggatttcatcatgttggccaggctggtctcgaactactgacctcaggggatccacctgcctcggcctcccaaagtgctgtgattacaggcatgagccactacgcctgacctggggctatttataagaagccctcaaggtagcagatcaccctctgatggccacatggagatctgggaaacgaacccccggtcatgcctctggacacctgcccacttctatctgtgccttcctgggccctggttttcagagctatgtgggtgcctgacacactcagggccacagaacatgggaagggctctaggccaagagtcccggcatcattcgagtctgctctggcccgctcctgccctaagccctcctgctcacttccagctgtggaggtagcccagagagtgcctggctccctggctcccccctctgccaggcccactcagtgtgacctaaatccttgccgaggcttggcagccctctgcgggcgcccggatggcctctggccttggtgacggtgaggcccagctcccctcagttcccagccttcccggaaccccttgcctaacatcctgtgtggtaatcatgcctgttggccccattcagtcctgccggccactgccaagttgccactgctagttccagacgctcccacctctaatggaaccatcgggaaataaaaagctgcagcacagtttctctctcaggtcagaatctcctcccagcactttgggaggccaacgtgggagaatcacttgggcccaggagttcgagaccagcctgggcaacaaagtgagaccccgtctctacaaaaagttgaaaaattagtcaggagtggtggcgaacatctgtgatcccagttacttgggaggctgaggcgggaggatcacttgagcctgggaggcggaggctgcagtgagctgtgatagcgccactgcactccagcatgggtgacagagcgagaccctgtctcaaaaaaaaaaaaaaaaaaaaaaaagaaaaaaagaaaagaaaagaaagaaaaaagaaaaagtggggagcaggttggggagcatggtgagggccacctactgcctgataatggtgggggacaggaaggggactgagtgctctgagaggcagctgatcccgttttctcacttaaatacctctcaccctacagagaagccctgattccatttgctgtctttcttagcaatgtcttagcaaaagtcttctatttgccacacgggtccaagcttccgcttactaagcacccaagtgccagacaaccccggaggcaggtactcccattgtccccactgtacagatgaagaaactgaactcagggtcacacaagtgataaggggtggcagagatctgaagctgtgcgcggaggcgtggccagcgtgtgcgctccgacttctaaatccctactctggatattgaagacgggaaagaccgagccgctcattctacagatggggaaaagcgaggcctgaggagtcccagagcgggtgccagatcgtagggagcagccagcaccccgggtcccctccacgacacaaccacgtccctcggccacttctgggtcccgcgcgcgtctcggacgcggcaggacagctctaggacgcacggccaccagggggccgaagggaagggcgggggcggaggctcggagctgacccaccgcctcgccccggaagctccgaggccccgccccggcggccgccagcggagggcgtggcctcgccggcgcccccgccccgcccccgcccccgccgcgcgcgcccccgccgcgcgcgcccccggcccgggccccagtcttgctgagcgcaaggcggtggaggcctgaggcctgaggcctggggcggggtggcggccgggctggccttggcctcgcgccttcccctgcggccgccgcgggctccgcgggcggtatcggagtgtcgtgcggcgcgtggccgcgtgacacgcgcacttgtcggagtgacgggccctgcggaagaggaggtgcggcccagggcgcaggggagccctcgggagcgggcccggccctcagcgccgccccggccgtgtcccggaggagcggcctgcgccgccgcgcgagaggaagtaagcgccccccgccggccccgccgccgccccggccccggcgcctccaacccgcgctgccgccgggcccgaggccgcgccgagccccggagcctgcgctgccagccccacggagcctggggctggcggctttggaactgctcaggaggcggccaggctccctccagggtcgccccgagcggccgagctgtcctttccctgggcttcccggaactgagttccaggagagggggaactccgagatttcccccgggacctgcttaatctttggcattgattggccctcgggtttcacatagcgtttcccgtacccggatctagtgaacggttttccaggggcaaacctctctggatctctgaaaatcagctcacccaaccttgaatgcttagccagaagtgagaacttctggaaagaagtgtccttgcccactccccctgcacccacaacaggcccatggctcatgaaaggcagcagatgagggaaaactggtgtcaaatgggcatattttttattttatctttttacttttttatataaaagtaaaaaatcttttacttataaaagatggggtcttgcttggttgcccaggctggagtacagtggcacaaacacggttccctgcagcctccacctcttgggctcaggccatcgtcctgcctcagcctccggggtagctgggaccacaggcgcacaccaccacgcctggctaatttttaaaccttttgtagagacagtggtctcactatgttgccctggctggtctcgaactcctgggctcaagcgatcctcctgcttaagccttacgaagtgttgggattacaggtgtgaagcaccacgcccagacagcgtattttaaattatgcatcatatccctttaatttttcatcattatgattggaagatcatgaaaagctgtctgagtttttccttggcatttttctgtggttgatggttagttgttgcccaagctggagtgcaatggcgcgatctcggcccactgcaaccttctcctcctggttcaagcgattcttccacctcagcctcctgagtggctgggattacaggcgcgtgccaccacacccggctaattttatgtattttttagtagaaacagggtttcactatgttatccaggcttgtcttgaactgctgacctcaggtgatccaccacctcg

SEQ ID NO: 32818 - DNA, 5882 bp, Homo sapiens
tctactccctgctaagatggggataatcatgttacctacctcatatggttgtggcaagatttaaatggtgtgatgcatgtcacaccgatagcctagcatttggcatatagttaaatactccataaatagctcttttattattaaaagtgttgttccaagtagtaagctgctgctgtgtgctgtgtcacagtgcttgaagtcaccattagaggtatattcctttgtgccgtatttcaaatgcagaaatgacagtggtcctgtgcaaatgggatttatttgttcatttagcagatatttatagagcgccttctgtatgccaggccttgttttggatactggaggtactgcggagaacaaaacaaacaaaagtccctgtcctcattggcacgcacactcttgggaaaaggaatggcagacaataggcaaaatgaatgtaattatcatacagtatattagaaagcgatgtactgtggggagaaataaagcaggagaggaggatgggggtgggcggtttacaattttagagtggtctgagtaagcctcactgagaagatgacattttagcaaagaaaaattagtgagggagtaaaccacgtggacctggtgggggacatgggggagttggccaggcggagagaacaagtgcaaaggccctgaggcaggaggctgggcggccagagcctagacaggcaggatggtaagagaagagatcaaagaggtaatgggtgggaggccagaatgtgtagactctgcagacatctgcacagaggaatggcatgatccagctggagctataaaaaggtcactctgactgccgtgttgaggctcagccatagagggtccaggtagacagaggaggccaattaggaagttcctgtagtaatccagacggagatgacggtggctggcactggagtggagtggtggaaggtggtgagaagcagttgtattctagataaattttgaagatagaaactacaggatttgctgacagatacgatgacctcaaggtttctgggtctgaacacctggaaagatagagttgtcatttactgataatggggaaagctacattggaagcagattgggagagaaatcagttcagttttgtacatattaagtctggcaaacatcccactcatgctctcagaatagcaattgactgcatgagtctggagtttaggggaagttcgggctgtaaataaagacttggacggataggcagttgtgtgctggtaatgtttaccaactgactctgtgaggggtggggttggtagtggggaacctgatttatagcctttgcctatatctgtggtgtaaatattctgacgttggccaacttcaaatacactataatagaatatcttcacctcatagatgcagtggatataaataatatcaagagcatagatattagtgaaatgtagtcagatgattaggaagtaatgagttttgagtatttattacctttctttttaatttaatggtttttttttttgagacagagtctcactctgtcacccaggctggagtgcagtggtgcaatctctgctcactgcagcctccgcctcctgggttcaagcaattattctgcctcagcctcccaagtagctgggattacaggcacccgccaccacacccagctaacttttgtatttttagtagaaacgggtttttgccatgttgcccaggctggtctcaatctcctgggctcaagtagtcctcccgtctcagtctcccaaagtgctgggattacaggacaggtgcctaaagatgggatgaggattctctgagatgagagaggaacaaggaccccagagcccgatctggaagcttttgtccccattctggcccttagggcagtgaatgcagatcagaggtcattgatagcaggcttgatttttatctgcattgatgggttcagcataaatggaccagaacaggaagattgcaaaaaacagacaaaaaacaacaaaaacaaaaaccttgggttggctattgtaaaaagactaggcacatcaccttgtgctttagtttcaaatgatctttagtttgaacttttgttttactcccacatgttctttttaaaaaattccaaactcatgggtcatgatttgaagaaaatttcccttcctcctgcctggcgcacagaaggtaacgtcaaaagctgggaaagggaacagggcagcagcagacattgacctttacctcccgctcctctctcccaccccttgtctgctgggcatagaggattagaactgcttcctcctgtggtttaccagaaaacgctctgcggctagagcttcagcacaggctgggtctgctgtgccgggtctgtatggggacagctgcacgcctcttccgcttgtgtgagaacaaaggccggaacctggattctgatccaaaccccctggcccccaccttctgggatgttagcagagccttttaactggtaagtctctcccaggatgactcgtaggagcctctcaggattagagttggagacagtgaagggtgcccaggactgggttcacgtgcctgcagtccgccctggctctaagatgagccatcagaagaaggccttttccacctccctacaggatgcccccacagcattttgtttcgtagtgagtgtatttctggcaagtatcttaaataagaattgtaaatgaaattgcatcctccacacacgtaagtcatagcttcaagagtttttgtcttaactgctgaatgacgcacagttctcagctcttggcttcatattttagttctctgtttccctgcctggctgcagaggtcaaggctcgaagcactcatttgccttatagaaaagtggagggcagttcccggataatagggtgcggatcacctttcctcggaaaacaggacttagggacactaaaagatcacacagatcctttatctcaccctcccatttcctcgatgaggaaactgaggcccagccaggctaaatgacttgtttaaggttatgtggttgtttagaggcagggcgcaggcaagagccaccacacattcgggttcccagtgtaatgccccctccccttacagctgctcaaacttttcactaaagattttctcattgatttgttaattttttgagcagaagtgattcgtagttggataagcttttggaaggctacttccatgctctttggctaacttcaagtatgtaatttcggaaggtttatttcacagcccattcctctcagagcaggcaaggaggcagaggggagaagtgcttcagaagaaaaccttctgaagcagagccgtgcagcatgaggaggaggcttggagcccaggagatgtgttggagccgtgggtgcctctgctccagaggctggggtccccctgtccctgactttgacttaactgggcttctctgggcctgcttctttccctgtcagggcagcagggaggatgaccaagccagccttcctcctgctgcttccagactagtcgggagtgttgagttaggaaccagggttggttctccagtgctgtctgcagggcctggctctgtagccccaggagaggagggaggttcacaatgtttttcctgagagcaatggtatactacccttgggggccaggaggaactttgcatttaattaattaattaacatttgtatagcatttttgtcaaatgtatcatctcagtcttcactgcccctccccccacccccaccttgggttgatggtatttgccctgttttgtagatgaagaaatgtggatgctaaggctctaatcacctacccacccttatggaaaggtggagggcatctccctgatttaattagctgatttatttatttattttatttatttactttttttgagacaggatcttgctctgtcaccaggctggagtgcagtggtgcgatcatggctcactgcagcctggacctctcgggctcaagcagtcctcagcctcctgagtagctgagactacagacatgtgccaccacgcccagctagtttttaaatattttttgtagagatgggggtctcgctgtgttgcccaggctggtctggaagtcctgggctcaagtgatcctcctgccttggcctcccagagtgccgggattataggcatgagccactgtgcctggcctaattagctgacttaattagatcacgaagttaggcagtggtcttgagcccaggtccttggaccccaatgcttccttcttctgcttgacaaaggaagctgtttagcatcgtgactgagggtccaggctttgtggcttgacagtttccttcacctcccagtttcctcgtctgtagaatgagactcctcacagaacctcctccacaagactgttgtgaggaatgattggaaaggtgcgtttaagtcatctggcacacgccgactacttggttaacataggtattattattggattcaggaacaaccagtttttacaaggggatgggcgcatgaaaccatttgagactgtttcgaaacacctgtgttaggacccaccctacacctactggatcagaatgtctctgtcttgagaaagggagcaggaggcgaggaccgcgtgtttgttctgatgccctcctttgatgagaactgctgctctggtgctcgctgctcagtattccggagtctcactactcaaagtgtgctcttggaccagctgtcagcacttcaggtcctcttccttctgcatcagaatgtccttttaaaaagatccccaggaaattcaaatgctcattaaagtttgagaaacactgtaaaggttaaaaaaacataaaaaaaaaaatacccacacatactacccccacccatttaggaaagagttgttttttagttgttttgcaaccacagagtaagcaatcatgttgtaatacccaatatcttggatttgtttaaaggagtgctggcaacataacagataagggaggccaacctcagaaccggggacccacaacaggactggtcagggaggactgtggcaaacctcagagtcagaacaggattaaagagagggccaggagtcagttcaggccaggtggccatccgtcacagctgtctgcagtcttctggggtgggggcagaggtgctggcccttggggctcccccacctgcccatgccaggactctggaggcttagctcctccctttgtaccaggcacgtccagagccctggctaccaggatccgatcagcagctctgaagcgcagcctgccagctggcggctcctccttctccaggctgttctctgggcttcagatttcttgctgcctctctcctgcactgaccttgcagcttctccttctctccagacgagcgattgccggttgaggaaaaaacgcttgaagggccaaggacagggactggaaagcaggaggaaaaagcagaatggtcctgtggtccgtgtgtgtatttaggggtgagggcagatacagggagagtgggagaggaaggctggggagccacccgtgtggccctgatcctctagttaaagctccagtgatggacgcgtcgtgtgtcctgtagacactggctcagacactgtggttgggtcctcaccttgggttggtccctcactaggaccctcttggagatggatcttgagagagatgaggaagaggcagagggggtggtgggaggagggggtctgacgtcagggtcaagaggcagattggtgccctctgtatagggatggtggagaggtcattgggctggttctgtggggacttttgtaagttatctctttaaacctcaacttctccatttgtattaccagattatggcttcctaaagttgttaaagattttgttaatcctttacctggtaaatgcctgacatataataggcgctaaatcagccattcagttccttcgtcactgc

SEQ ID NO: 32819 - DNA, 857 bp, Homo sapiens
tgcccagtaacgataagagctgaagtttactgtgtccccagtccccagccgccaggtgaggtgggcgctgttactagcctccttacagatgaagatggtggcgagcccacagccccacagtagaaggcggtggagcctgatcctgggggcaacagtctggccccagcactcaggcctggcgccgctgcgctgtgctgccagcgctgcgtcagtggccagctcatccccgcggccgctttctgcagctgcagcgggagcacccgaggccactgcccccccagcccccgcagtgcgtgcccgccacagggcagggcccagagccctggacccagggatgggccaggaggtttctcctctttttctctctcccttgctctttctctgggccattttctctttttctttcccccgccccttggtttctcttcagctgcttctcccttcctctctgaatgtgtatttagtgccagaagctctctgcggggccgaggtgccacagtgaggtacaaaactcagcctctcagatatggctccctaatactgcccagattcacgggtgctgtggggggtgatgatctcatcacactggctggtgggacaaactccaaaatggagctgggcgcagtggtacacccgtagtcccagctactcgggggcagaggcgggaggatcatttgagctcagtagttggacaccagcctggggagcatagtgagcctccgtctctgaaaaagaaaacaaaatgggtgatgggtgttgcaggcaggcagcgtggtggggggacaatgtggggggtgggcgggaggccaggcaggacttcccaagccaggccttgaaggacattgctgggttcgaga

SEQ ID NO: 32820 - DNA, 1719 bp, Homo sapiens
tgggctggggaagagccatgatgtctggagttacctgttggtactgttgcctcttagttcttccagccctcccaccctgtttccttcttggtatgtggtgtcatttgtgggttgtttgtaggtcccatggagccagggaccaggcagattgcaggcccgattatcctagcaaaggtacttttggattttgaagaaagaaacacggaagatatgaaagacagacaggtggagctctgggcaggtctgtttgccgggacagtctgaggatgttgggtttgaacagcaacacaacagcctgggctggctgtcctcaaggtccaggagggagaggcacctggagccctgttgtcacagctgcagggactaaaggaggcccagccttgcctgccatatggggctctaggggagggtccgccgctcctaagctccagagtccaaggcctttagtacagctgggccctgtaccttcagcccaggggcaaagggagcctcagcgcaggacaggcagtgggagatccactagtcctggaggcttgcagcctgtcgcggtgagaccagagtggggctagttcagtccacgttccttgtcagaggtggccagcaggactgcaactgtcctggggtttggccctcactggttggcttgtttacctgccatttacaaacaggtccttgatagctcgtagcagggagggacagcctgctgctgagcccagccccccagcaagtgggccttggacacagggtgctttggcaacagaatgagcttgcttgctgcctctctcaattttgtgtgcctgcgtgccaggggacacattctttctgcattccaggaaggtggcctggtacagccctgctggcccaagcactgctctgtgctgtcctctctgagtcctgctttggagccagtccttcaggggcctcccacctgtggttcagactggaaagaggggacaggcaccgcagacctgcagcacaccccagcatggccaggagccctgtgcccagcacagcaaggcctaggctgccactgctgtcccgggtgagggcgggaaacaggcaggagtaaatgctgcctcctactggagcttggtggacttggcaggcgagtgctgctgcagtggggctcagcatgggcagaatgtttccaaggcaggattcggagcccgcggtctgactgctaatcagaggggtcaaagtgcacggcaggccattctcccccactccccaccccacacacaccgcaggccattctcccccactccctaccccacacacaccgcaggccattctcccccactccccaccctacacacaccgcaggccattctcccccactccccaccccacacacaccacaggccattctctcccactccccaccccacacataccacaggccattctccctcactccctaccctgtcctctgccctgccaagggttctggtggatcccagctgctctccacccctgcagtggtgcaaccctagctgactcctaggcaggagtggcacctgcgtaaccgaagccagcaccctgagtgctgggaagggaggggctgcaagccaggcctgggaaatggagcattcccggtccagagctgctgcaggccccgggaaagggacttctgagctgcaaggtcgtttggatgtcttcccccacccgcatcacacacatctaagtgggtggaagccggcttccccggctccctcccct

SEQ ID NO: 32821 - DNA, 1097 bp, Homo sapiens
cttcaaaagagtcttccttaccctctgctgcccctgccagctctcaccattttaacccaaagactttaaagacgataaaggcactatctcgaaggccaccactgccctcctgcaggacaaatgcacagcttggaggttgccaccgcaagagggtaagaggccaccacccccacaacagctgactcatagctcgggtaagaggccaccacccccacaacagctgactcacagctcgggtaagaggctcccagtttgcagatgcgaaaccaaggcttgaagtcacctatcttgcccgagatgacagctggcaagtggcaacgctgctagagtctgcccgagcccttagtgcactcccgtaaccagcaggtcacactaggagcagctactccagggagaggaagagctgacactgggcaaacccgcagctccagccaccagcagccgacccattgccagacactgtgttacatctccagtctgtatcaggcccccagggcccccaggtcaggactccaaccaagattgggatccagtttgctcagctctggcttctccctggggaagtgtcttcctactgagccacagcagagaacatcattcacttggggcaggagttgtcaccaaggcctgctggctgccaccaaatctaggagactagaacaatgtctgccaatcctgagagcaggtccagaggggtaacttttatctttattgcctgggctgctctatcgtcctcttcctttattctctttgtgaatttaattatggggggcacatagccgaggtttgtctgccttctcacttctaccccaaagggaaggcagtttgttaagggtgaattttctccccttggatttctatttatgtataaaaactaccttgggccgggtgcagtggctcacgcctgtaatcccagcactttgggaggccgaggcaggaggatcacttgaggtcaggagtttgagaccaacctgactaacatggtgaaaccccgtctctactaaaaatacaaaacattagctgggcgtggtagtgcacgcctgtaatcccagctacttgggaagctgaggtgggagaattgcttgaatcctggaggc

SEQ ID NO: 32822 - DNA, 2413 bp, Homo sapiens
gatagaaataaactgaaatactgttaaaagcaactggtgaagatttaagataggcaccaatatcacagtctgctgttacttcactgtgtttttgaagaactttgcaatagttattgtcccaaacccaatatcatctctttattatttttttctcaaagtcataggaactctttccaagcctgtttatcatctaatgtctcatttaaatctccccaaaactttgctcttagtcttttcctttattcgtgattaacaaagtctgatagagctatagtgcaatatcatgctttgccagcaggcgtcgctgtctgacaagatgtgatccagtgtgagcactacagtaatttatgaccaaatgatctacaaaatgaatcaatgtactaaattagggaatattatgagatcaaaattctgcgagaagtcagctgtgatggctcatgcctataatcccagtacttcgggaggccacggcaagaagatcacttgagcccagaagttcaagaccagcctgggcaacatggtaagaccctgcctctattttttttttttaattaacatataaacactctacttctgttttgcatcatgagataagtacacatcttatgctaaggatgcataatagatgtagattttattaatatgcttcagtgttcttcatgttctggtggatcttgctacaattctgtgttgtggataccaagcttttctttaaaaaaaaaacctattatcttgaaaattctcaaaatccttgatttcattctagcacaattaattgtgttcagttaatgttggttgaatgattgcaccacctccccagtttctggggaaatgtgtagagcagttctacagatgagaacaggaaatctcagaaaggttaagtaacttgctcaaggtcacacagctgatgaatagcagagctgggggttgcattgggtttgtctattaccaaatcctttgcacatttgctccaatcagcaaaagggattcagagaagatggcagcctttaacacttgtgagggcagcaggattctgtgctaagagctcaaggctcagaaccatcatcagaaaaagcagctgatgctaattcaccatctatcaagtttctcttcaccatttcccggagacagattaaagacatgagcaaattgtgctgatgcaagtgataaaatgtgtgtgggggtggggtggagttggggagggggttggggatgacaccactgggagcccagagccacctccctcccgactcacccctgcagtacacagatctttgtataagtcctgagtcacccttcaaatttttggatagtatctatcagcttatgtcacaatgttgcaagattatgtatctttttttaacaaacaatagtatcagcatgctagggtgattctgagcccttctgacacataaactggcttccaggattgctcaacattgccccatgctgcagcagtcactgccggctgaccagccttccatcatccggccaacctgcccagcgtcctggaggagagaaggcccactccccaggggttcttctgggaaatttaggtcagcagggtctaattattcaactggatcaagagctgagatttccagattaacgccgaaggggggtggggtgggggtgctgaagacttttcatcaggaactgtctttcagggccttaaacatcaaagctgggtctctagctccaaagtgccccagtctgccctggaagcttcccagatgttaagaggtgaggcttggtggagttcctcttagcaaagctgacaacaccatggccccaggccacgtggccgtagcaccagccccatgagatgccagtgtctggtagatgccacacacacagtgaataatccaccaaacagggctactctcccaaggagaaatgaacccatcagaggcagctgtgattttcagcaatgactgacgtgggctgcaccccatgggcctgtcccagaggctctcaccagtctcccaagtaaacaacagttctcaaactgcagagtggctggagggggtcatatgctcttttaaaattattattaccttttttttctttttttttgagatggagtctcgctctgttgcccaggctggagtgcagtggtgcgatgtcggctcactgcaacctctgcctcctgggttcaagagattctcctgcctcagcctcccgagtagctgggatcgcaggcacgtaccaccacacccagctaatttttgcattttcagtagagatggagtgttgccatgttggccaggctggtcctgaacttctttttttttttttttttttttttttgtgagacggagtctcgctctgtcacctgggctggagtgcagtggcgcaatctcggctcactgcaatctctgcctcccgggttcacaccattctcctgcctcag

SEQ ID NO: 32823 - DNA, 4336 bp, Homo sapiens
ccacgcctggctaattttttatatttgtagtagtgacgggtttcatcgtgttagccaggatggtctccatctcctgacctcgtgatccgcccgcctcgacctcccaaagtgctgggattacaggtgtgagccaccaagcccagcctggtcctgaacttctgacctcaggtgatccacctgcctcagcctcccaaagcgctgggattacaggtgtgagccatcatgcccggccaattattattattattatttaatttttgtgcagagtctgtgtcttgctctgttgcccgggctgctcttgaactcctgggcttaagtgatctgcctgcctcagccacccaaagtgtggggattaagggcgtgagagccaccacctccagcctcaagtgatcttttaaatgggaagcacccctaagctgctggccatggctgcccacctgactagtctgggttcaacattcctaaaccgctggcacctggaaagtcagaatgcccactcaggcccgcccagcccagggcagttggttgagtctccgtaatcctattctgagttcaaacaaagctaaaccaaactgattttcagcaccgtaaaatgagagacatcaaactttgtaatctcacagttcaattgggttccaagctctggacagctggcctcgggccaggcactgtttcctcgcctttacagtgagtgtgtcattagtcccaccctcactgtactgggttatggtaaagacacagtaactacggaagccccgctatttgtttcggctcccccagaaaggctaactcctcaccgttttcaatggacactacacagcgaggggtggggaatgccaggagattttgctctcaaaacagcaaagtctttaaaatcttcccagtcccaagtgactgctctgttcggggaagggggaggaaaattccttgaacgagctagagccacaggacaagtccccagaggctgggacctgttcagggagcagccctgcggatgccaggtgcccgcgccctcagggtctcgaggtccgaggcccccgtccccgtgggcaccgaaacgcgagcggccgaaacagcgctgcaggaggctccctggacccccggcggctgcccactcgtccccgctgggcacttcagaggaggccggcgaggccttgctcggggttcctgggacaaccccactctccgcgaagatttctccttctcgtaagacccccgcccccactccagcctcccacggctgcaacccaggccctgcgccacgcgtttcccaaagacgcctccggagggacccgagcttcgggccggcaacaccagggcggcggctcgggagagggctgcggactaagggggcggagggggcggccgaaccagcgccgggctgacgcgccccgcgccccgcgccccgcgcccccggccttccctgcagtgctgagtggtccgtgcgcccgaggtcgggggcggggcggggcggggcggggcagggacggccccgcccaccggcgcttttctcttttttttcactttaaagccgtcggttgctttttctcctccgcacagaagtcgcgctcgggcagcctgcgcgctcgcagcaggaaccaggctccaggcgccggcgccggggccggggccgcggggaggaggcgacttcgctccctgcggcgggcgcggcccgggcgcccgagcctcctcggccttggagagcagcggcggcggcggcaccccgggcgcggtaggcggcgcggggcacctgggaccccgatgggtgggcgaccggcccgggagggggaggcgcggggggccgggcgagggcggacgcggggatcgcgccgctgggggaccgagtgggtggcgcggggccgggcgcgggggagcgggtggagtacgggatggggactcggggcgcggcccctcccgcggtggctccgggggcgcctccctcgccgcggctcctgggagaggggcccaggcccgccccgcgctgccgccgctgcagggcagggggtcccggggcgaggcgcggcgggggtctcggggcgcggggaccgtcgcaacgagttgcggtcccgaggaggggctggggcgctccggggccgccgacccgtcccccctttagcccggggaaagcgggaccccgctcggctgagttagtttcgcttttcccgccagtccgagtcgggattggcggcgcggcccggtcccccgtcggggcgcccccaccctcccgcagcgcctcccccagggagcctgccggggacacccgagcgccgccctccccgccgccccggagccgccgcggcttctcccagcagcggagggagagccggagggttgtcaggaaatcgattaaatcagaaaaacaagggcggcctgggcccgcgggaggaaccgcggatgggtcaccgtccccgggcgtgtactgggctcggtggcgtccaggttccggtgaggacgggacggccccgagaggagggtgcgggtctgcaggaagagcgggtgtctctgagagtgcatctgcgtgtgtgtttgtgcatgtccttgtgaatatgtgcctgcgtatgagtgtgtctgtgtgttcatgtgggtgtgtgtgtgagtgtgtctctaagtgcatctgtgtatttatgtgcctctgagtgtgtgtgtgagtctgtgtgtctgtcaatgtgtgcctgagactctaagtgactgtgtgtgtgtgtgtgtgtctgagtgcgtctttgtgtatttgtgtgtgcctctctgtgtatgtctgtgtgtctttgtgtgtgtctgtgtgtgagtgtgtatgtgtctttgggtgtgtgtctctgcaagtttgtgtctctgagtgtctgtctctgcaaatgtgtgtctctgtgtctttgtgtctgtgtgtgtctttgcgtgtgtgtgtctttgtgtctctttgtgtgtccacacgtgtctctgtgtctgtctctgtgtctgtgtctctgagtgcgtctgtgtatgtgtgagtgtctgtgtgtctccaagtgtgtgtctgtgtgtctttgtgtgtgtttctctgtgagtgtgtgtggggaccatccagggggccctctggttcctaggtactgctcctcatggtgatttctttacttggttctggatagccgggcatgctgggccacagacaccccactaggcaagccctgctggtgcccccgaggagagcgcaggctcttcctctctccatttctctgaaaatgaactacacagtttgggggtgagttggcaggggctgcttcctgagtgagtaatatttaattaaacactccagtctgtagcatcagaaactggtcatgagttgagttttaacaggtgttcatggtaaaagcgccatccctggtgactaaggtttgatgtccttggaagaattttctcgttgggggggctgggcccacaacttcatttctcatcgtggggtgtgaggagaacagcaagcaaggaaggggatgggggcctctcccttctgccctgtccccctcctcagacccccctcccagtggtggaaagccctgggctaagcatgggcagcacaggtggtctctccacactgaggaattttggagtcagggaagtcctgtcttactgtctaggccagcctgtcctagagaggcccagagagggcggttcacttacccagactgcacagccagggctgtggaccaagactccccagtcctgaaactgttgctcttggttactgtccccagcactgaggtcatgggccaggcacttcgtgtctccccagctgtgaagtgatgggctggattagatcatttaaagcactcctgctctcttacagctgcttttcttctgcagggagcactttacccagtagatggagtgtgtgtgtgtgtgtgagagtgtgagtgtgtgtgtgtgtgtgtgtgtgtgcgcgcgtgcggttggggaggtgtggagtggactaaggcaatcactttacaagtcttccttttccagtctggctaccaccctagcagcagagaaaacaaaagcagtagcatgttggccccagtggctcagacagccccgagcagggagcaaggcgggtgccatgccggcttaagagagacctggccctgggaagaatcagtgggtttcagggctcttaggaaggggtgggcctgcctggggccctggtgatgtcactttggagctgggtgaggccgtttcttgggctgctgtagtaaggctggatccacccttcagtgggtccctctgggctgctgcagaatctcacccccttggaatcatcacagatgttgaatttcttcaccagagctggggaatggggtgggggcctagcccgtggaagccagcgctgccc

SEQ ID NO: 32824 - DNA, 792 bp, Homo sapiens
accctgtctcaaaaaaaaaaaaaaaaaaagggtctcatgctggtccattacattgatgtcatcatgcttcattggacctagtgagcaagaagtcgcaaccactgtagccttattggtaggacatttacatgtcaagcgatgggaaataaattctactgaaattcggggaccttctcccttagtgaaatttctcggggtccagtagtgtcaggcctgtgaaggtatcccctctaaggtgaagaataagttgttacagctttcctcctgcaaccaagaaagaggcacaatgcctcgtgggcctgtttggactttggaggcaacacattcctcatttgggtgtgttactccagcccatttgctgagtcaccctaacgcttctagttttgagtggggcccgtagcagaagactgcaacaggtccaggttgctgtgcaacctgctttgccacttgggccaccagcagatccagtggtggttgaggtcagcggcagacagggaggctgcttaaagcctttggcaggcccctgtagatgaatcgcagtacaggccttgggattttggagcaaggccctgccatcatccacaaataacttcattccttttgagagacagctcttggcctaatactggaccctagtagagacttaatgtttgaccatcagccacgaagttgccatgtgacctgagctgcccatcatgaagtgggtgttatctatgatctgaccgaccaaaccagacattgggcatgtgtggcagaacgctgccatcgagaggaagtggtatatatgggatc

SEQ ID NO: 32825 - DNA, 1323 bp, Homo sapiens
accagcctggccaacatggtgaaaccccatctctactaaaaatacacaaaattagccgggcgtggtggtgcgcgcctgtaatcccagctactcaggaggctgagaaacaagaattgctgaggcagaggttgacgaagggggtggaggttgcagtgagccgaaattgtgccactgcactccagcctgggcgacagagtgagactctgtttcaaaaaaaataaaacaaaataaaagtaagataaaccaagaataagtaccgacgcctagtgtctagacaatgcctagcacacagtagatgctcaaagaatgcagagtgaataaccaagctcagtgcttggaaacctggctggcacacagtaggctcacaatccatgtgccgaacacaagaaggaatgaagtttgtcttcagccccatgcagtgagttctagaaagcaggtggcctgttgctttcatcttgtgtctgcaatgcctgatacaggacccaggactcctcgggcctggcaggacccgccccagccgaggttcccgtcctggtgctgggggcgaaggggagggagggaggccggcaggcggctggtcagacagtgtgagtctggcctttgaatgttattcccggcagttcctctgattcacagctgtcccaggaacagtcatggctgtgtcaataaatattggtgacttttaatgacctctccgtctcgcagggccatgtgggccttcctgcccctccaaagaccccgtccaggctgttgtttttctagccagcgtatagcgctctgtgccagtgagagggccttggggaccgaatggcccccgcaggctgataactcagaaggcattttctgtctccttgcttcgcctgctccttttcaccataactccccagacctcctgggaatgaccctgagtgcagaaggatgggcaacatcagaggccctggctcagaaagagccagaaaggagctgccaccttggccccccctgcccttccccctacacctctgcctgggtgtcttgtcctttctccacgctagaaaaggacatcgcatctcacgccaacacaacatgccaggcaaagataagctgcttttcctccttccacactttcacactttccacagtttaggctgagggagagtttgaattaaaacccaactacagcacggctgggcatggtggctcacgcctgcaatcccagcacgttgggaggctgagacgagtggatcacctgaggtcaggagtttgagaccagcctggccaacatggtgaaaccgcgtctctaaaaataaaaaaattagccaggcgtggtgatgcatgcttgta

SEQ ID NO: 32826 - DNA, 1561 bp, Homo sapiens
accatgttggccaggctggcctcaagtgatccgcccaactcggcctcccacagtgctggggtaacaggtgtgagccaccacgcctggccgatacttcatttttctggaggtcatttacttagtaaggccaactggatcctggctaaaaatgtgaaagaagacagaaagagtcacgagcagtgaacaaaagtcacgggtcctagcacgtaaaagctcaagtacttgattcaaagccgaaattctcaggtcctcagttgtagcctggttacccttacaaacaccagtgctaaagagcacggttactaatctttccaggacacaagatttgaaagcatctgtttcgaagggagatgacctgctagaggaagcttgcgggcaacagcaaattgggagttcgactagcactttcagactgggatgcaacgaagaactcgccagcagaggtaagagatgggcaagatgaagagaatgaactctgattctcggatatctgcccgcaaggtggctccgagaaagccagcgggaaactgcagcatcgcggaggacttctctagttcaggttaaagagacagcagccagagggagccgacctcaaacccaactcccgacagcaaccttgaggccacccgaggtggcgcatgcgcagtgtgcgaggtagtgctcttcctacctgccgacctgcggagccttcttactgagcagggcttacgtcacgcaagcgccgcgggtgtgtgacgtcatctgagagcgccacgcgcggtcccgaaaacctgagcaccctctggctaaggcgttgctgtagagacggtgcgccagccccgcccccgaggcgggattggaggaaaactggacagctgacaagggtgacgtttcgaaagcgcgcgggaggccgtgctgggacgcagagcccgaaaacctatttgaggggcgtcttgaccgaaggtgctaaatatcacatgtccccattaaagtaaaaatgcaaactgccctaatcggatttcgtgtaaggcaggagggctgggaagacttaaatgtatcacttcagtagtttaggggtgggaagaagagtttggaccagactggtgccgggataacctgacctttttgagccttaacttcttctcgaagggatcgttcccatcagcatataaacatgtaatttcccccttcctgagaaccctgtggtggctccagctcccaccccatcccttcgctttctgaataccgtaactccttggaagagtgtatatattctttgtccagctctctcctcccactctgttgaactccctccagccaaactcagtctctcccaagtcctcctcttacctgctctatcagcaatttttgatacagtttatcaccctctcctccgcaaaactttcttcacttggcttttggcagtgcacacgcttgtttttctcctccatccctgccccaccttctctgtttcttttgctagcctctcctctttttcctgacctctaaatgtatcagtacccccagcactggctccttggacttctctttcttttcgcttaatctcttgatgatttcatcg

SEQ ID NO: 32827 - DNA, 9421 bp, Homo sapiens
gtactgttgggcagcggaaaggtttctcatttcgttcctggaattcagtgtctggaagtggaacctgatgtgagctcccacctcccttcaactctaccttttgttttcttcttttcttttgagacagagtcttgctcggtcccccaggctggagtgcagtggtacaactgcagctcactgcagcctggacctcctgggctcaagtgatcctcccgcctcagcctccctagttgttgggactactggcctgcaacaccacccccagctaatttttttattccttgtagagacagggtctcactatgttgccctggctggtctcaacctcctgggctcaagcagtccttctgccttggcctcccaaagtgctgggattacaggcatgagccactgtgcctggctttttttttttttaagagctagggtctgtcgcccaggctgggtgcagtggctcttcacaggagcagtcatagttcactgcagcctcgaactcctgggctcaagtgatgcccccaccttagcctgtagctgggactacaggcatgcgtcaccacacccagcttatgactgtacgttttgatggtttcatgcaacaaaggctgctctttgtcttggaagaaaccaagacaagcattttatcccaatggctaaaaaactctgactgtcctcctccacacccttgacagagggccatctgccagtgattgggaatgcactagacagcccatcctaattttggacggaattaattgttagaatctgctttgtaacactaggccaaatctatctcttgtaagtcctggtctggccttcaggagctacacagacccagttcctcctctttacggcgttaaatatttgacgatggccgatggccctgggctctgggccacccttatgaggcctccaagtcttctgttcacaaattgaacaccttcccccaacaaaaaaggtgttttttttcttttcttaacgatgcttttatgaatattcttgtacataaatctcttcatatttgcctttggatacatttctataaatgaaacttctgggacaaatggtgcattttatagtttgtgctatatatttccagattaccctccagaatggatgattttttgcttgtacgcccaccagcaatttacaagagagcctgtttccccacagcttacccaccaacatggggaattttcattctttttaatcattgccaatctgataaggggaaatgattatttcatggttgccttaattttcatttctttgattatgagtgagattggacatgttttccaaccacatcctatacttttgcaatcgagttttggagctcaatgcaggacctaacatgtattccagttaaattttatcttgttggattcaaccaatcattccttcctgttgagataattttggacctgactctgcagtcccagcgtgttggccttccttcccagtctggtgttatttgcacagttgataagcagttatctttggacttatccaagttgttgacagaatgttaatgagtgtagggccaaggacagaactgcttggcattccactagagaaagccttgggacgacactgtcccatctgctgtgacagttcaacctcaccatgcctagaagccttcacctgggacacagggcctgggcacaaactccagccctggccctgattagctgtgtggccttgagaaagtgctgttgtctctcactgagatgtacttttgagctctagcagcctttttctcactattctgtgcataagaatttcatgagaaacggtcaaattgttgtcaaaggtcatggcactatcataaagtattcaccccattttctaatttagtggaagcaacacaacaacaaccctttgtcatggacattgacctctgggatcacccttcctatgtgctggtcaaccatttatttgattttctgccccagaattttgcccacaatcaacatgaggttcaacagccttcagtttatccaattcacacatttttttttaaatacagggttttggcctcctcaattctccatgattcctcaaagcaccctgagacgtcagaagtgctcagcactccctgccagggcttgttggttctgtcgccctggttcagttttctgtcatatcaggaaggaggaagggggaaggcctcctctcctccaggcatggacagagggccagagttcattcacagctgtggcagcattgaaaggaaacgggggaaatgcttagtttggggggaaaggggctttgtgagactgacacatggcaactgcccaagtcaccagctgaagaaacagcttccatggccctgccagagggacctctggttatgcatcattctctccagccctgagcttcatcaagaaaataagcatcagcaatatcatctccaagtgaaatgatagcacattatgtcacctttctttgagttccttcaacatcaaaatcagacaagactgttccaaggagggagcaataaacattaaccccatgtaacagataaaagactaaaagagaaattaggtaactgatttaagtgacacagggaatctgtcataactctgctgacatggcttcttatcatgcctggaatgtagttattgatttacaccttgtaaatttctcagtacacgatgtacaagtggccactccgtactgtctgttcttgtttattcagaccaatagtaagagtaatcatgagaatatgccaggcacagtggctcacacctataatcccagcactttgggaggtggaggcaggaggattgcttgagcccaggagtttgagaccagcctgggcaacatggcaaggtcctgtctctatataaaatgtaaaaattagctgggtatggtggcacactcctgtggtcccaactacatgggaggctgaggcagccggatggcttgagcctgggaggtcaaggctgcagtgagccaggttcacaccactgcgctccagcctgggcaacagatcaagatcctgtctcaaaaaaataaaaataaaaaaataaaaaaataaaaaaatttatatatatatatatataataatgataataaaggctgctatggtttgttgatttgtttgtttttgcttttttgagacggagtctagatctgtcacccaggctgcagtgcagtggtgcgatttggctcactgcaacctcgcctctcaggttcaagcaattcttctgctcagcctcccaaatagctgggattacaggcacatgccaccatgcctggctaatttttgtatttttagcagagatggcattttgccatgttggccaggctggtctcgaactcctcacctcaagtgttctgcctgcctcagcctctcaaagtgctgggattacaggcgtaagccactgcgcccagccaaggctgctatggtttgaatgttggtatccactctacaactcacgttgaagctgatccccatggcagtggcattgagaggtggggcctttataaaggagcctgagggagtgcgtttggccccctcgccctcctgctttctgccacctgaggatgcagcaagaaggccctcgccagacaccgaatgccagcaccttcatcttggactctcccagaactcttgagaagtgaacctgtattgttgataaatgacccagtctgtggtattttgttagagcagcacagatggactaatacaaaggctggagatccttactgagcccttgctacgttctcagtgctttgcagaaatgaactgtttcctctcacacacccctgacgtaggtgctggcctcattccattttttatagatgaggaaatggaggcacaggagagaggctaagtaacctgaactgaggttcaccctcctcccctccaagcccaaccctgcttagcttccaagatgagacaagatctggcacgttcagggtgcaatggccatagacaggtcacccctcttctaaagggcagagctggggtttgaactcaggcagtctgactccatggttcaggctctgaatggtaatgttctgctgcttctgtaaataaatgaggataagaaaggaataattggaaatgatttctcccccaaactgtgaaactgcattgcaaacagtggtctcagctactaaggagtaacaaacagctctttcatctcctgaaagaactgcgtgcaaaggaaggagtgaggagagaagggacatccagagcctgaagaacctgtaacttgagtgcacagcctctaagtaatcccaagtggaccgtgtgaacctgcagtcagtgtctgtggccacgaggcagaacacacaaacaccaggccccaagatttctcaccaagatcgtgtcatgagacaggacctcgctgcccagcccccgcctcccaataacaggattacgaggctgagtgcggttactgctggcacagcgagccacagatgtagccaggactgggcgccaatcgacggattcccaatattgtcttccagttgctagactacgctgctttccagtacattatttggaatataaaaactaaaatgtaagtaaagcattttcatacaaataatttcaaccgcaacaaggcaattggcttctgattaagttggcaagaagaggtaatgaactcattccgattgacatatttggagattctcttgccaaatccaattggcagcttcataattatggaaacgtccatgttatttccactcaaccagggttagggctgctggtatctgattcaatgtttacttcatgaatgaggtcagttcccagcacagctggggtttcggcaaaggagtcagcaaacagcattcccactagaatctgactggcgtttgtcacaacttccagggcaaccttcccccagctcccccaggtcagctgctctccctagcattgtctgtggtccggctcctctccctgtagaagcagactcagcctcgacatgatgaggtcacatgcaagcttcccctggcacagtggttcattcttcaacctgcccccttggtattgcaacacctcgctcctggacaacccccgcgcaccatgagcttcacgctgccaggaaatggggtagggttttaagaattatttatcccaggatggttccacgtgtgtggtatgagagtgactcagagtgccatggaagccatctccaaaggtaatgacttcccataggtcagagtgtcctttcagccagctccccacactgatgaaaacaaaaacaaaagtcgcaagtactcagagcactcatgaagaacacacattcatggagtgaccatctgtgagttcacagagttcctggggagactcagggcagaagggaagggcggcaccccacaacaatgccaggggtctagctcccagtggctcgaagctgcaaagggctggagtgtcactgacctgtttgttgaagtcctgagctattgccataggatagcggcatcaagaaagtgcacagtcagagtctgaagcagctatctctgccctggcagcaatttccctacgtgagcacagtaagctaggaggaggctaagcatgatttggtttggatctcaaaataatcgtgggcatcatatgatgtgatgacttttgcctaagaaaatctgaaaagagccatggagaaaaagaatctggagtgggagatggtttaggcattggaggcaaaggcagattcaagaagaaacttcctctgccccagtgttgacaaccagactgatggccacgccccacgctttcccaataggagaacaatgagactgaaggcagttgatgtgaacacaagaatcaacaacgtagaggagacacagtcccaggtgtaaagaggggagctgtctctccctgtggcctcaacaggaggagagggttgtcagtctaggatgaagactcactgtctcgtcctaagggtcagtccacctgccataggagatttcggaacacctctcctcacttgagggtcgacatgctgtagggtccatggggcccactggacagtcacagtcccagctcacttctcccactggctttcctcaggagctcacactacctgtctcagccccaagatgttccttctgtctgctcctgttcctgactcaaacatgtgttgtttgccgtcaattctgtaccccgttttatcaacattgtcattgttacatcatcttataatgtttattttgtttgtttgtttttgagatggagtctcactctgtcacccaggctggagtgcagtggtgggatgacagctcactgcagccttcagctcccaggctcaggtgatcctcacacctcagcctcccaagttagctgtaactacaggtgcacaccaccaccctcagctaattttttttgtattttttgtagagacagagttttgccatgttgcccaggctggtctcgaactcctgggctcaagcagtctgccctccttcgcctcccaaagcaccgggctcacaggcatgagccaccacacccagcctcattttataatcttttaaaattattttttcccttgaatattctttgggaagtttttgaagatatggctctgacttagcctgttttgtgctgctccagcagaatgcctgggactaggtaattcataatgaacagaaatgtatttctcacagttctgaaggctgagaagtccaagatcaaggcgccagcatctggcgagggccttcttactgcatcatcccatggcagaagacggacgggcaggagtgggtgggagagaaagacagaccaaagggggctgaactcgttgctttataaggaacccactcctgaaataatggcattaattcatcatccattaaacacctctgaaaggtcccacctcccaacatctccatattagggatcaagtttccaacacatggatgttgggggacacattcaaaccgtagcaggcactaaaccaagctcttttcttccccctccctggcctcatgacctttgctgtctacccacttggcacagctgcactggccgccctgctgatgcccatccacaccagagacacacccacctcaggatcttggcacatgcccttccctccagcaggaacactcttgaggccatccccacagctccctcccttcctttcaggcttgactgacatatgccccctccccaggcacttgcatgcatgttcttccacacgtgattcccccagcttctatccccatctgaaatagcacattacttgttccttatctgcctccccctctggagtgccagctctgcctggcagggatttttgactctcgcctactgccacagcctggtgccagcacagtgccaggcatgtccaccctgcagcatttactgagtgcccactgcacaccaggcactagtcttggatgcttttgcaaatgtttctccagtgatggaggaactaaacttctttaaactcaaaggaatcgttgtgtcttctgattcctccgagagctttgaggagctgggccgatgcaatgtcactttgctgtctccctccaccccgctgcccttctgacttcatatatcagctttcccaacagatgtgggaaagtggggtcattcccaggaaaggcagagccttccatgacttaggaacccaggtgtttgctccactggggccaattgctcctggctttttctgagctcctaggaggaaatgcatctgaaatgccgtcaccctcccctgatcattaacagagctcttgaactggcggagttgtcagcgaggcaaccacaggcaggcaggcagccatcgcaccggctttgcagagagggctggagagctgatgcccatgccacgggaaagggccggcgcctgagccaagagcctgactggaaagtgtgtgtaagggacacctggaggaagcaggggcctccggcgcctcctccaccgactggaacccgtggtgctcacccgctcgccctgggggctcactaccctccctgcccagagatacagtggggctggcggctcaccaggctttgtgatcccaatgctcacgagtgttctcccaacaaattggaacttcttttctttcgtctcatttgaaaaagtcttttgtgagctggcaagtgaccccaaagtaacctctctattcctgtcggaagggaaaatatttccagatcagagagactacagcaccaagccttggcctatatgaatacttgattatgcctcctgagcacagtctcctgagcttgtgccagtcagtttcagaaatgagctctggctgggggcgggggctcacgcctgtaatcctagcactttggaaggccaagacaggaggatcacttgagctcaggagttcgagaccagcctgggcaacatggtgagactctgtctctacaaaaaaaaaaaaatttttttttcaattagccaatatgctggtgcacacctgtagtcctagctacttgggacactgaggtgggagaatcacttgaggcgggaggattgcttgagtctgggaggtcaaggctgcagtgagccgtgatcacaccactgcactccagcctgggcgacagtgaggccctgtctcaaaaaaaaaaaaaaaaatcaagaggtttattatttgccccatcaagtattttaagaccgaagcttcacattctcaagggtatgatgtcatgaaattcccacgtatgaccacattttgaaaaacagtcattgtgttttggaaagtgagagggttagcctataatgtggaagataaactcctaaagtggaagtttgagatgcacaggcagaatgggccgccgagctatagcatttgctatggtgaactcatgtgactgccccagaattatctggaagttcaatgttcatcttctgaaaagaactgggacctcgctgtgccagctgttgttgttctaagtgcagtgtaagcaggtttctatttaaaaccttcacacctggcacttgagtagtgcttgttttccaaagggcaccctctttcccttggattttttgcaccttctccttttctgttagtccggtttatctcagcctgctggcatgaagagaaggacagttataaaagccatttataaaaggagcagggaggtagtggtcttttgtctttgctgctgaaacggcttgggtagatatacaagatggcctgagaaacaatgctgggagtgaggagcatggaccggccagggagacaggaggaaagcaggtttccctgtcttcatggtacaaagaaggcaaaggcaggtactcaaggccatgcgccttcctagaccacttgggtgaggcctttggacactcccctgggtcccagcatgcctaatcagaaactccagatctgagccaggcgtgatggtggtgcctgtagtcccagctactcaggaagctgaggcaggaggatcacttaagcccaggagtttgaggccagctgggcaacatagcaagatcctatcaaattccag

SEQ ID NO: 32828 - DNA, 1477 bp, Homo sapiens
attcaaagtgttatctatacagtgtcattcatgtgagtccattaatagtatttggtaatgaggaggagggtgggaaggatgggaaaggcattcccggggaacagccagcaccttggttcatgtgagctgcccagtgatgctgatgctatagcttgactaacacatcactgttcccaacccccttctcgcttgccatctccactcaggaggctgggaaagccagatgcacctggcccagttctaccaaaggacacacacgtgcatgccttccaaaggccctcgaggagaggtcttgcttttcttcaataagagacagataggactagaaatgccccttccccttcttcctaccttgactctgggtgtgattcccagagcagcggcagccatttatgaccatgaggtgaccagcaacttttgaagccactagtagcttccagtaggacactggaaatgcctagaatatcaataaaccaaagaagaccagctatgctattacaactatctcctggtcctgctaccttcagcaaatataatggaacaagacgttaaaaatgattctgttttggctgggcacagtggcttacgcctgtaatcccagcactttgggaggctgaagcaggcagatcacccaagatcaggagttcaaggccagcctgggcaacaaggcgaaaccctgtctctactaaaatacaaacatgagccaggtgtggtggcacatgcctgtaaactcagctacttgggaggctgaggcaggagaattgcttgaacccaggaggcagaggttgcagtgagctgagatccagccgctgcactccagcctgggtagatagagcaagactctgtctcaaaaaataaaaataaaaaagatactgtttcaattctggcaaaactcctgaggcggaaaacaaaccagtaggtgccaacaactccaatgttctgaagtgaggtactgaaccagctcaccggggcctgcaaagaggcttccgggaacctgtgaccgcccctagggcagaaggtggcaaggtcaagagaggttagaatgagagatgactttttgtttgttttttttttgagacagagtttcgctcttagtgcccaggctggagtgcagtgacgcctatcttggctcactgcagcctccacctccgaggttcaagggattctcctgcctcagcctcctgagtagctgggattacaggcggctgccaccacgcctagctaattttttcgtatttttagtagagacgaggtttcaccatgttggccaggctggtctcaaactcttgacctcctgacgggtgatccgcctgtctcagcctcccaaaatgctgagattgcaggcgtgagtcactgcgcctggccgacagaacttcttttgagacagtgcttggatgctggggtacttttcttccccatcccgtccctgctgtggatgaaacaaggggggcctagtaagaaggacttcaaggagacc

SEQ ID NO: 32829 - DNA, 573 bp, Homo sapiens
acaatatcaggaagatggaaagagaagcagaaaataaatggagtttgaatgcattgagaggaggagacagagtcggagagcctcccatgcagggttgtgattgtctgtgagctctgaacaagcagagcccagcacagccaaggacagcacagtggaaggagcgctggacaggtgggtcagggctgtacttggcagacagcagtgtttccaccagcacagccctccgaccttggccctgagttgctgtcgagttcttggtggaccttgtctttctacagggatcaggaacttgctggaaagccctggtgtacttgtgacccttaggtatgttcaattaagtgtagcctaactctgcctccttgcatattctaagttcaccctaagggtttctctgtgcatagtaaactgtcacctcactgaatatgtaaacagactgcaacctactctagtgccaatcaccaagttttggccaatgaaaggcagtcaactgttcaaacctggttcaaataaggtgaacacccagctgtaaccaatccgactctttctgtatctaattctgttttctgtacatca

SEQ ID NO: 32830 - DNA, 672 bp, Homo sapiens
ctgggtgggctcaactgggttctgtggtcagggtctcacatggacaagatcaaggtgtcggctggatcaggctcccctctggagcctcggagaaagaatccacttccaagctcattccaggtgctgacagaatccagcttcctgcagttgtcagacccaggtccctgcccccttgctggccatcagccagggttgccctcagctactcaggagcactctccttcctccatcctcaaagcagcagtggcacctcgggtctgtctctcgctttgaatttctccggcttcctcctctgcaccagccaaaaactgctctttgcttcacagtcttgtgcaattagctttggccagcaggatgatctccgtcttccagtcttcaggttaaccatgtcataagccataatgcagcccaggagtgacggcacagtcacaggctccaggataaggacataaaatgggccgggcggggagggaatgtttagaatcttgccaagcacagaaggtgtccctgagacctggagcaggaggaggcaatgagggcgtggccatgggaggagaaacagcccagacagaggggtcagcatcctccctgggggaggaagaggctaggtttgtgtgaggcactgaaaggcccctggactgcaggacagtgagtaatgggcagcgtggcccg

SEQ ID NO: 32831 - DNA, 3014 bp, Homo sapiens
gcgcctgactcaattttgttcatttctaaaaaaaaaaaaaaaagaaaaaaaatcttgctggaattggggttacatatctgtagatcaacttggagtgaaattttggagagaattaacatccgaacggtatatttttgttttttatgattttttggggttttttttttgttttttttgagacggagtctcactctgtcacccaggctggagtacaatggcacaatcttggctcactgcaacctccacctcccgggttcaagcgattctcttgcctcagcctcctgagtggctgggattacaggcatgcgccaccacgcccggctaattttttgtatttttagtagagacagggtttcgccatgttggtcaggctggtctcaaactcctgacctcaggtaatccaccagcctcggcctcccaaaatgctgagattacaggcatgagccacggtgtatttttaaatcaagatataatttatataccataaaattcaccgctttaaaatgtacaatttaggctgggcatggtggctcatgccttccaaagtgctgggatcacaggagtgagccaccacagccagcccgacatcagcttttaaaacacgtgtatttgttcgttcttcctcaaagtacaccacatattgcctgggagtgtggctggctggagtttggatagtcgctgaactctagaactgacgggaaacttagaaaaggtacggtgcagaggttgcaaaccggctgcccagaggccaacttggcaatcagatgtgtttgtgtggcctatacaggatgtcctgaaggtgtgagccaacgtttcagaatttggtagctttcacaaacatttttttaaaaatcagccatctggcagcccaggcccgcacccctcctggccgatggtgggatgtgcagggtggaggagcctcttctgcaggtccccttggtgctgccacccacacagagccccaatgccctaatatctgccctctcccctgcctgcaccactccccaaaatatgccttttagagataaaccctggggaggttccctaattttcatggggcaaattgtgcacgctgaccatgaaacctgtgcttcttcccactctgtggacgtcccctccctctacagtgaccaactcagtctggtttgcttagtctctgggtttccgtacagaaagtcctgtagccctggaaccctcccagtcccaggcaaaccgggatggttggccacactaccgctcacttcctatccttctcccccacaaaaaaattaaataagataaaacaaaatgtaatttaggcagggtgtggtggctcacacctgtaatccccgcactttgggaggccgaggtaagcagatcacttgaagccaggagttcaagaccagcctgaccacatggcgaaacccccttcctactaaaacttcaaaagttagccaggagtggtggcgcacccctgtaatcccagctactcaggaggcacaagaatcacttgaatgcaggaggcacagtctgtagtgagccgagattacatcgctgtactccagcctggacaacagagcaagactctgtctaaaacaaaaaaaaaagcaatttaattaaaaagcagagttttgttgaactaagatttcatctcctctctggcctgcttgctgggctagacatggaagctgccagcgccatcatctctgattttttcgtggtggaagaggtgagttgtgccgtccttcaccacagtgacctcctggggcccagcgcctgactctgtgtctgtgatggaggacacctcacataggatgggccccaagtcccagccgacagcagcacacacacgccttgctgccagatggcagcgcgagcctctgtttatgattaggtggcagactacactcggaacccagcaagccgatgatgaaagctgttaaaagaacattgttatatgacttttcatagtttcccaagtaaatattacactcactgctgcttgaattactaatgctttggaagtggaggccgaaatccattcccaaacagactcccttttttttccctgtcacctaggcgctcggcattgttgtcgaattgttttcccgggctcgcccgtcctcacagctcagtacattccctccgagtgatctcttggcacctctgaagcccgagtttgcacagccacctcatttcccagctcctccacgccagctccctctgcagcaggcagcttgccgcaggcaggtgacccaaaggtcctcagatagaactgcagaaaagggagcaaatgaaaggaaggcagccacggctctgccaagcctctccaaagagacccggctttgcacaggcaacttcaggtggaaggaaaggaccctgctggaaacgtcatctctgggcccgcactgcggcatttaacctcttccttaggctgcccggagagacaactggagaaagtgccttggacccaaacagctcttgggtcctcactgtttttattactgcttataaaagctagtaaacagatggtttgggttagagaaaatatgcagtcagggttattaaaaagaaaaaaagcaagcaagcagaagaatgaggagaggaaaggaaaaagcaagaaggcttgtataacagcgaggacgctgacagctcgtcaatccaaacacccctggtcctgcgtgtgtctctcctgggctggcgtcctcaccaagctgtctgtcccaaaagaagcccccaagaagtccaatctcacgtggaaaacgcaccccctcctctcaccagcccccttcctatattctgtcccacacatactcgtgtcatgctggtaagatgagtttggtggtacctggagccagaggaagtgaatgaaggttgagccaagaagaggctgtggatggccacagaggtagacagggagggaagacaagaagcttacaggtctctctggagaaagaggcaccacggctatgaatatcctgcaagaatagagagggcaaccagggcgtggggggctcggttacgtacctggcagt

SEQ ID NO: 32832 - DNA, 788 bp, Homo sapiens
ttattatacacacctaaaataaatttttcaacaccgctcacttatcagtgtcatattatcaacagtcttatcaatgacaaaaatgttcttttaaaaaaatttttgtagggcctcactgtgttgcccaggctggttttgaactcctaccctcaagagatcctcttgccttggccttccaaagtgctgggattaccagcgtgaaccactgcgcccagctgttctttttttaaagttagtttgaatcaggatccactgagattggttgatcttccatttaaatctttttatctttaggttctgtgtttacctttttttttttttaacttgcaattcatttgttgaaaaaactggcttttctatgttaacacataatttagattggcacatggcctaggattgcagttgtgttcatgaacagggtcatgtgttaatgaactgagtcagcgaattctgtagtcggagctataagggctttattcgtctttctgtcccagtttccccagctctctgaggttctatcgcttttattatagaaaaaccattttttaagtagaaaatgtacctgaggcactggcgggcgcctgtagtcccaacaactcaggaggctgaggcaggagaatggcgtgaacccgggaggcagagcttgcagtgagccgagattgcgccactgcactccagcctgggcaacagagcaagactctgtctcaaaaaaaaaaaaaaaaagtcagccatcctccagccctgatcacctgccacagagccagtttcctggtggcaccctggtttcc

SEQ ID NO: 32833 - DNA, 1093 bp, Homo sapiens
ctttatcctggaacctttcatcattagccttctcccgggactggcatctcaccctttagattagaaccccatgacagcaggcagtggcactgggacgtctggaggcctggacagggctgccttgtataggtgcgcagggtgtacacactgcacactgaagagacagccattcacatcacctacatactggacattgtagatttgtatgtttttggtgtcaatttcctagcagtcaagggtcttgaggaagagatactgttttctaattctcacagaggaggctctgatcccgcgatggccctggtcaaggctggagtgaaccggctgcctcacgtgctgggcgatactgaggacactaggttgtgagtcaagacaagggaaagggctgggaggaagagcgtgggttcagatgcaactgctggcctgcggttctctctgtactgtactttctgcctctgatgttgcccactgggccagaagcaaccagctactgattaacagagtcctccgggcagctgtgtgtggctttttccgatgaaccaagtgcgaaaactttttcaaagtcgaatgtgggtcaagaggcatcaggcagagaggttaagaataaggctggtagagtgtgacaagccatgggtctagtcccagctgtccatgaccttggacaagttatctgatttctcagcgtctttgtctgtaggtagagtaggtagcaagggtacctaccctacagcctgttgtaaggaagagacacgattttgcatgtaaatcacttagcatggtaaaccttgatagcagaaacgattaaaaaataaaacagcaaagggagggtgacaccagcacccccaggactgactcagcatttgggcccaggggctctgatacatttagacccagagaaaatgtttcaactcctttataaaatcaggaggaaatgtccaggcacagtagctcactcctgtaatcccagcattttgggaggctgagatgggcagatcacttgaggtcaggagtttgagaccagcctggccaacacagcaaaaccccctctctttagccaggcatggtggtgcatgcctgtaatcccagctacttg

SEQ ID NO: 32834 - DNA, 1243 bp, Homo sapiens
catgcctgtagtcccacctacttcggggctgaggcaagtgggtcgctttaccctgggagatggatattgcagtgagctatgatcgtgccactgcactccagcctgggtgacaaagtgagaccctgtctcataaaaaaaaaaaaaaagaagaagaaaaggaaagaaagaagaaaaagaagaaaaaagagagaaagaagaaagaaagaaagaaagaagggagggagggagggagggagggaaggaaggaaggaaggaaggaaggaaggaaggaaggaaggaaggaaggaaggagggagggaaggaagaaagaaagaaagaaaagtttcgatatgtccatctctgagaaaggacaccatcggggcaaattttagggagatgctcttgggagcaccgccccctccaacccagagctccactgtttccttcccacggtcaaggcatttgtccagaggaaaggtggaagaaaaacctcacctttgagcttttgaggtctcgaatgtgtttggtgaccaagtattgatccagtgatttgattctgggattccgtccatgctcagacgtagattcttattggaaaaaaagaaaaagaaagaaaaaacttggcaccggtgacccaaacaagccagtctgatccaggcacactggaggcagccagggcttataaataaccacgctggccaggcccggaggagcctgggccgtacagtctgtcccatgaggggccggcggctcctgggccctagtttcacctcatggcatcagccgggctgttatttcactccaagaagaggagggaacacagggtggtggctcaggtgactcccgggtgcctgtttttcatttgttctggccggacaggcggatgagctccccagctggcattggaaaggtcacggggctaaagatcacttgccttgaatgagcattcctcagagccctgcaccccaggacccacacctatttattattaatgtttttattttatgtatttttttaattttattattttttatttatttttttgagatggagttccactcttgttgcccaggctggagtgcagtggcacaatcttagctcaccgcaacctccacctcccagattcaagcaattctcctgcctcagcctcccaagtagctgggattacaggcatgaaccaccacacctggctaattttgcatttttagtagagccagggtttctccatgttggtcaggctggtctcgaactcccgatctcaggt

SEQ ID NO: 32835 - DNA, 941 bp, Homo sapiens
tttcttttgtagagacagggttttgccacgttatccaggctggtcttgagctactagactcaagtcatccactcttctcagcctcccaaagtgctgggatgacaggagtgggccactgtgctgggttttctttacttctttttctcagatatctcatgccctagtatggcttccccttctcctaggcctgggagcaatggctttaatagtaaccactgtatttgcattttggaggactgctcctaagagctgtttttatttaaagagtcccagcaatcaaatacagattggctggctagctcccacgtttccacacaattccctcctacttaagctctctatgtttacacacaggacatctaactgcttgttctggtcaaggtacagctttccggagctctgagagacggaagagaaagggttggtacgttctgcaggtgaatggtggtctgctgagagagagacagacagagagacatagtccaaggtaacaggaaagcttctggcactggtgcctgtgcagtcagtggtgtcactgccaggacaggaaatagaggtagagcaggtttgggggaggggaagaatgataagttcaatttgggacctttattcattagctccttgggcattactaggtggcaggtactgtgtcaggaacaactgtgaacaaaagaaataaggtccctgctctcctgaagcttacattcctgtatgggaaggacaacttaaataaatcaacaaactaactgcagaagccctggttctatagtcgtgtgacagactgcgctgcaaaggcggccaggaaagtctccatctgggggagacctggagattagaagatgtcaggttgagtatgacaatgacccagtgacataggctgagagaagcagtttggatatctaggtctgggctggagatgatcagaaaagaagcaaaaagca

SEQ ID NO: 32836 - DNA, 1542 bp, Homo sapiens
tcactgattatctaaggctgtttagattatagatttttagattatgtttttgtttccctaaacggggtggtgagtacagaggtgtgagatgtaacacgtaatttgtacaccttttgcacacgtaaatatcacaaagtaaacttttaaaataaggcaaggcctagggcctcgcgaggcttctctgaggagcgaggaccagtcagtcacagccagtttccactgcctccacgctccggcctaggccagcccctctccccagtcattcgctcggggctggctccgccccagaactgcgcaacctccccgcccacatccgcgtcctaaccaatgagcgctcgaaatttgggtccacacccccgtcacgccccgccccagactcgcgcgcccgtgacgtcacggtccggcccccgccacgtgacggccgcgcgccgggctctagctccccgccgggctcgcgccgcagaggccggtgaggcgccggcggccacgccgcggaaggcgcgggccgagcagagccgggcgttggagcccgcgcgcgcatggaggcgttgccggcagccccctgagggcagcggggagacaagacccggcgacctcgcgcatccctcgagccgccacgcgctctcgccaccgggcggcgacgggccgcggagccggcgcggccatggcgacgggcggccagcagaaggagaacacgctgcttcacctcttcgccggcgggtgagttcccgggcccagccgcgcgcgccccaccgcctgcggtcccctcggccttcgccccgggcgcggccccagcctcccgcggcggttaccggccttccccgggctacggcgccggcgctcgggaggaggaagtcccggcgtcggggactggtgggcagggccgagggagggggtcgggccttcctcacccctacgtcctgaccgcagccccgagggcggctgtgccccgccgcccgtcctccccgcggcgtccccagcttttccccattctgaagagtcagtggccggtgagtggtgctcggcggcggtccagcctggacgctgtggcgcggccccccctcccccgcccccttctcctggggcctctcccgaagcgcagcgcctcagagcccgtggtaggatcgctgatgctcgggtgtgcccgaggttcctcagggcagcgcgggaggtcatccggacgggcaaaaaggtctgcggacgttggacgtcagcaaggcctgggtggtgctggtgaacggtgatgcttgcggccacacgcggggtggctaagccagggacccgaactcatatgaggtctggaaggtgtgttgagacacttctcgccggctggtagacgcttccaacgccagagaccgcagaattgtaaggtgttccttgttttgaaagctgcattaggtctatggtcaggcaccttttttccagcggagacaatgcatttttaggaggttgagttctgcggttaggaagggagatggtacccctcgccacctccccttgtcacctcccgccgagaatagaaggtaaaatatttttgagtat

SEQ ID NO: 32837 - DNA, 1061 bp, Homo sapiens
ggggtctcacccaggctgaagtacagtagtgtcatctcacctcactgcagccttgacctccttgggttcaggtgatcctcctaagtagctgggactacaggtgtacaccaccatgcctgactaatttgtttttgtttttgtagagacaggactccagcctgggtaacagaggaagaccttctctctttaaaaaaaaaaaaaaaagtgagtgtggcctgccaccttgaaagaggtcactgattcgctgttactagggcatttgcttttttggacgaacacaccatcctttgatcagtggcatagacttggatgacagttggccaaagtaatgagtgcagtttacttagggacaaagcaaaggtggttgacctgtatggtatttgaacttactggctttctgatgaaaggatttacccagaagctctttttcaatgatttggagttacgttatcgaacacaaatagatttcagatatttctttattttactacgtagctggtaagtttctcagtatctttaaatgttatactttttaggcatgtggttattatgacaggtaggagtattttgtatgaatagacatgggttagaaagtttttacgtctatcatttttatttttattaattaattaattaattaattattgagactgagtcttggctttgtcacccaggctggagggcagtggtgtgatctcagcccactgcaacctctgcctcctggtcttaagccatcctcccacgtcagcctctcgagtatcgggactacaggcgcacatcaccacacccagctaattttttaatgtgtattcttggtagagacagggttttgacctgttggccaggctggtctccaactcctgagctcaagtggtccacccatctcggcctcctaaagtgctaggattacaggcatgagctgtcacacctggccacttctatctttttaaaaatattccttattatagcctattttctttagatatattctagtgcttggagcaaattacacaaaccagtattaagctaggcccacaacttgattaaaaataaaaataggc

SEQ ID NO: 32838 - DNA, 2997 bp, Homo sapiens
gttctagttttaaagagagaaaagctaagcttagcattccattgtgtagggaatagtatagcttctctgatctgctttggtttcccttacaggtgtggaggcacagttggtgctattttcacttgtccactagaagtcattaagacacggttgcagtcttcaagattagctctccggacagtctactatcctcaggttcatctggggaccattagtggagctggaatggtgagaccaacatccgtgacacctggactctttcaggttctgaagtaagttcagtcttgtctgctcctgccacctgcacaccctgtaccgccactgtcaacagagaatgttcatcaagcttatcaaatgtgatgttctgtttgcatagccttggtcctaacttaagaattagatttctttaccaatacctttgagctctgaccttgctcccctggcagcggggggtcccagtgtacatgtgaccatcatccagggcagttaaagtaaacctagcaaagcaaaccaaaaatccacgtgtaaattgttgcatcacatcattgctcttgctcaaagcttttgagggaaatgaagataagaggtgatagagtaaaattttaaaaattgcacaacagaagagttgtgaatattttattttattttatttatttactttttttgagacagaagaatctcgctctgtcacccaagctggagtgcaatggtgcgatcttggctcgctgcaggtgatctgcccaccttggcctcccaaagtgctggtattacaggcgtgagccaccgctcccagccgtgaatatttttaaaagaaacaaaatgtttgtttgtttgtttgtttttgagctggagttttgctctcgttgcccaaactggagtgcaatggcacaatctcagctcaccgcaacctctgcctcctggattcaagcgattctcctgcctcagcctcctgagtagctgggattacagacatgcgccaccatgcccggctaattttgtatttttcatagagatggagtttctccatgttggccaggctggtcccaaactcccaacctcaggtgatccgcctgcctcagcctcccaaagtgctgggattacaggcgtgagccaccacaccagctttttttttgctttttattgggaaatatttttaaatgtgtagaaaagttatgtttaataaaatgggctttaaaatttgttttatacctgagctacctgcccattttattatttttactgtagaaaaaataattcatttgcttataaagtagccaaatattcttaagtcaaatttggcttatcagtctatgcataaggtaaaatcaaattcagaagagaactgattgaatatctgatttttagctcaggaccttgtactttgagatgctctataattaatagttgaatttaactgagcatgatattcaaatctttgaaactgattcttgggcaagagtatgttcaagaaagacattcatcaagaaagctatcagtgtagagatttatttgggaaatgttagaaaaagaagtaataaaatggagatgctctgttttaaaaacaacgcatttagcactttttttttttttttttttttttttgagatggagtctcactctgtcgcccaggctggagtgcagtggtgcgatctccacttactgcaagctccgcctcctgggttcacgccattctcctgcctcagcctcctgagtagctgggactgcaggtgcccgccatcacacccagctaatttttttgtatttttagtagagacggggtttcaccatgttagccaggatggtctcgatttcctgacctcgtgatccgcccaccttgacctcccaaagtgttgggattacaggcgtgagccaccgcacccagccacatttagcacttttaggcacaatttagataaggcaggatgagttggagagtgcttagtttatttttaggtatgttttatttgtaaaacccaactatgagtcactggggcattcatgccaaatgtgtgcaaaggtacatctgagcttactgagcgaaactgaacagcaagaccagatgccagggacaagtgagagcatcagaagcccagcgagggaacagggagattggtgtccaagactccaggagaaattggggtttttgtttgtttgtttgttttcttttttgagacagattctcactctgtcacccaagctggagtgcagtggtacgatctctgctcactgagacctctgcctcctcggttcaagcgattcttctgcctcagcttcccgagtagctgggatcacaggcatgcaccacgatgcctggctaatttttgtatttttggtagagacagagttttaccatgttggccaggctggccttgaactcctgacctcaggagatctgcctgccttggcctcccgaagtactgggattatgggcatgagccactgtgtctgggtgagaatcaggtttttaaattaaatgctaagaaaaggagtggagacactgggcaggaaagttgggggtgggtacaggagggacagaagcacagagatgtggagggacactttgctctcaggacagatccgagtccatggcccccatcaagatgggactgtgagaacactcctcctgctttgccttttcacatgcttaggcggtgccagtgtcccgggtgacacctttcttctaaggaacatgcagtgctttggacataaggaaactgaagacaggtaatgttacttcagtaacattcaaaatgaatttcctcttgccaaataatcatgactagtgaatttggatttactgtaactggggaactgttacccaaaagtgtgggtgtcaatagggccaacctggaaggtaaatgggaatgtttctccattttaggttttacaggatatgtgggttgagtgtcccttatctgaaatgcttgggaccagaagcaatgcagatttcggattttggaatatttgcttcatcataccagttcagcatccccagtc

SEQ ID NO: 32839 - DNA, 1547 bp, Homo sapiens
ggctcaaggagctgctaaacagcactgggcgcataggctgggtttgactagacaggattagcgagggggaaaaagactaattacaagcagttgcgtactctggagatgctccccttagcagaagctcggtggactgtctgcagccagacctccgggcctggcggctggcgcgggaggcagaaggcggggctttcctacagggctccgtgccccgccctccccgcgccgccttccacctccggccgcgcgggggcgctccccggccggctctgtcgcttccgccgccgccccgcccacccgggctcacccctcgtcccgattggctgcgcgacgggagcgcgccgagtcagggggcgggcccgcgcccgctacaaagcggcgaaggtcacggcgcgaggaggcgcgcgtcgccgccccgcgtcccgcctgcggcccgcgcccccggcgtcaccgcctcctgcccgcctgcccgcctgcccgcctgcccgcctacccgcctacccgcctacccgcctacccccctgccggcctgccgtccttccacgcggagagccatggagggagtgagcgcgctgctggcccgctgccccacggccggcctggccggcggcctgggggtcacggcgtgcgccgcggccggcgtgttgctctaccggatcgcgcggaggtgagtgcatggttcggccccacgcggccctctgcgccgcccgccaggcccgcccccgcgccgccccggcccgctgcccccctcggccgggacccgggctgcccgcgggcgcgcggagacccccggcgcgcgccgccgccccccgagaccgggttgagactgcagtcgggaagcggctgcggagtcgagtggagcggcggggactccgggaacgtggggcgcgggcgagagcgccgcgcgggggccacaaacttcctccgggagccgcggggggctggagccggtgcgcacgggccgcccctgccctcagccccgtgctgggccccggtgcacggcgatgctggcgatcgcggctggcggttgctgctcggcatgtgacgtcccgggcgtttttctacacgcctcgcatccgcgcgtttcagagccacagcccctgcttacgctagagcagctgagggacagggaggctcagtaacttgctgttaatgagaggaatcatggtttgagccgatggaatctgcagggcagaccccgaggctgggctgcctcccagaggtgggcaaggcctgagatgcctccaaacagttcaagacgggccggggccaccctcctccctgcccggctcacgggccatgcgggcccccgggttcagatccggcctctttcatcggcctccatcgccaggcataaaagcttagtggcctgttgcttcagcagagcctcgcaggtagcttactgtttctccacttgatccacctttccagagggcaggggggaaagtggggttgtgagaacatcctagaaagagtggatgggtttgcagcttcggcaagggatgcaatgagctcacacccttaggaaaaaggggagaagggacttg

SEQ ID NO: 32840 - DNA, 2157 bp, Homo sapiens
catttatccactaaatgactttatttatactctcacttaatttcagaaaggactgaaggtacctgagctgtgaacaaagaatcagagactggtttttcctccatctctgccactaactagttgtgccacctggggcaagtcacttggtctccttgtgtctgttatccatgtgtgagagccaatacttaatatgagtgccaggcactgttctagagattttccatgcatctgtattcactcttttaattcttctctacacaatttattaaggtctctatctttttagagtttgtcagggcagttccagttcatcgtggcaatacaagaaagtcacttttgggggcttttgccatttcaaagaatcttggatttttctctgggctccagagacacccgtgcctgacacccccaatttgaacccccagcggatcattgggttccattgctgatggggaccttgtgtttgagcttgactttccctccatccatgctggagataaacggaagtcttcgcgcagggggacgattgcaggacggggccgctagggaggagggctcccacacgtggggaatgggggtggaggaaccgctgaagctcgtctgccctttggaaaatctcgttggtgtcctagccctgggatcattgtacttaccaggttggggggctctgcacccagaactcctcccagcctctgtctgcccgtccaaggtccggcgtgacttccggtggctgatttctcatcttggggaaatccccgccctgggggggtccggtgtggcctgcagggagcctgactcacccgtcggctgagtcagggggtcccagctgccctcggatgtctgctgcaccgctcccctccctcaggcgggggacggcaggaaggagggagagatgggagggcgtgggggcggggccgggggcggtctccagcccccggcccgggctccgccctctcccgggatctgtgaaagcacagccagggtgcgggcgggtgagtgcccacctggtgcagggtgtgaagagcgagagcgcgtgtatgagcacgagcgtctgtggtctctgtgtgtccgtttacatgattgcgcctgtgtctgtgtgtgcgcatctgcatgcgtgtctttttgagtgaatgtctgtgtgtgacttctagggacggccagggaagaggagtgtcccctcccaccctggccccccgtcttctcatcctggactccctctcttctctctcctccttggggggtgctctgggcatccgggacccctggcaaggctgccgggtgctgggaggacgcagaggccgccgagggcggagggaagcgtcaggcctggctgcgcgcgccctggctagggagctccgagtcccggccgcctggtcctttcattctgggcttcttcgagattctcgagggcttccagccggcagtgttttctccttgccgtcttctcaggcacgaggaaggctcctggagctcatctgcctgggatgggcggccctgccttgacctcacgtgcagcaattaggaccaccaaggagtgttcttcaaaccaccttctaccaccccgcgggacacgccagggctgattctggtgctcgcaccccgcttcctcctctgcgttcccctgtggcaaaggtttgtcttgggctgtggacccgaaagaatattctaaggggagatgggctcttgcagagcaagaggggtatggtttcagcaccaaactaaactggtgccagcgctagctctgcccaagaggctgtgcagacagtgtttgtgtgagtacgtgagggtgagagtccctgcccgcctagcttcggcttccccacttacaaccaagggagaacaacatctatcttacagtgtagatgcctggataaaaactggagcgcctggccgagcactttgggaggctgacgcggtaggatggcttgagcccaggagttcgagaccagcgtaggcaacatagttagacccccgcctctacaaaaaattttaaaaaattagctgagtgaggtggtgcgcacttgaggtctcagctacacgggaggctggggtgagaggatcgattgagccagagaggtagaggctacagtgagctatgatcgcaccactgcaccccagccagggcaacagagcaagaccctgtctcaaaaacaaaaa

SEQ ID NO: 32841 - DNA, 1365 bp, Homo sapiens
gttgtaatggatagatgcattagtgaaagtgctaggtacactcatttattttctaaatctcacatataagggaacccccgatggaaaggcccatcagctagggaacagccagcaggctggatttgagcccagagcccgggctggccaattactcgagtgagtctggctccggctctgtgacctgggtccagtaccccgccctttctgcggatgccttgcaaagcggggagcggaaagcagtttggtggacgaccagccctcccttgctttgcaggtggcgctttctatttattgattgtaaggtgaaacctaggccagagccagcgtgcgcgcgccgtcggggtcccgcggctgctctggggctcagggtgcgaaccccaagggccccgcctggcagcgtcctgggcctccgggcgagaacagcgggggtcggggaggatttgcagcgtccactcctctctccgccgcccgtgtgagctcgggcgcttctcccggctgggggtgtgagaatttgccgacggtgcccgcgccgccgccggccccggccccgccccagccccgaggacgccccgcccccagccggcgccccgccccgcctgccagtagtcccagccccgccccgggccgcgcccctccgccgagccccgcttgcctgcacctcgcgcggcgggcctgccctccggcccccgccggccccgcgccgctgcccggaggctggcgtcttcccgtcactccgggacccgcccgctgtgtcccctgggcaactgtctccagggagatcgggccccgcccccggcagcgacacccggtacggagcccacctgtgcgggcgtctgcggggtccccgtgccccgcccccagccccgccgggcgtcccaccccgcccagccccgggctttgtccgcctggggcggggtgggcagggtcggtggaggcgatcaggggtccggggccgtgggggcttggggggccgaggcagggggttgcgttcgcggtgggattctcagctatgggccgcgcgacgctctcctctcctaatctggttgcttccttttgtgccccccgggggtcaggaatcccaggtttctccgctgccgcccttgatgggatccgtgaggcctccagcgggcttcgcacgaggacgcgcctgttcggggcaggctgtttacttgtcggggacccagcagtggctgtgcgcgtcctcccctccccctgccccctattcgggacggagcctcctgcgctctgtccctcccgagctgtgcccttgagcccaagggggctagagggtggcagacccagatcctgaggtcctgcggcttcctccccgggggagcgccttctccctggccgccctcttgtgga

SEQ ID NO: 32842 - DNA, 870 bp, Homo sapiens
ctgagcacacgtacacagagcatctcacccaggggtgcagccccagcctgcgtgcgccgctgagcagggcggactgacccttcggcccgtctgcacgttcccccaaatcagcgcagccaccaccatgggctgcagtgggggcagcccaggctcaggagccccgcccgggacggagcctggcttccccgggacgcctgcagcgcgcgcccacagtctcctgcgccctggccccggctccgcgagcccgacccccaacccgaaccccacgccctgacccggctccctgcgctcggacccgactccccgcatcccggctcgaatcccggcatccggccctactcccgcacccggacccgaatccccgcaccgggacccgaatcctgcacccggacccgaatcccgcaccgacccagcggcccggcccagccccggggcttacctcgcgcggcccagaccccgccgccgcacagcagcccggccagcagcagccgggcggccggggccagcgcgggagcggggcggcgcagcatcgccagcccggggcgggagcggcagggaggcgcgcgggacgccgagcggagctctcggagctctcggggctctaggggcctggggctagctgctccgcggcgcggggagctccgggggtccaaggaggagccgccgccgccgccgccgtgacgctgggccgcgcgctcaggacgcggcgccctccccgcctcagagcagcgtcttgctgaaggcagcggcagcaactaagatggcggcggcgctctctctcgggtccggcgagggtacccggccgggggcggggtggcggcgggaggggcggggatggggagcgacgcgaggcgcgcgcgcggcggaccc

SEQ ID NO: 32843 - DNA, 1061 bp, Homo sapiens
acccctggcacccccccgcagtggaggaaaggcctggaacagccgtggatgggcgtgtgtgcaggcactgtaccctatgagacactactggctccattttgcagataaggaaactaagtcagaaaggtgaaatgacttcccccgttgggacaactattgtaaaaagaatcagccctcaaggacaggatgttcgcattagggggacaccaacagcaaaaagtggaaccctaaaatgttcatttttcgagaccgctggaggagctatccatgaatgtcactgctccaggtgggggtggaggaggctggcagcactggaggctgggtggagactggtttgtggggcgcagaggacttatttaggagactagtgggcaaagagcccaaaaacgtagactgaggtcagattgggggaatggacttgatcctacagtcaacaggaagacctggaacggctgggaacagcggtgtgatgtgacctggggaaggcttcaaaagcaatctggaatccaactccctgagccgtgttccccgtaagcgtcctgcaccaaagcctacagattccatcttgttaatgtctctccttccttcccctgctccccctcccctgcgtggaggaagaccggactctccttggctggacccttcccaaagcacctgcctggcccgggcaggctccaagccacacccaccactccttccagccaaggctttgagtcatcctctcccctggtgacgggtgttgccattgcttctgcccctcctggagttataaactcagtgagtgcctccctgctgccacctcgtcaggtccagacatctctgctgggcttcccatcctccacccagctgacctcagggcatgctgtctgccactgtctcttcttattcattcccctcccagggccaacatcacacttcctcctccacccatacccaagcctcaggtccttacaaggagcttctgggctgtctccttcaggaagtcctcctgccagccctccctctccagccccgagctgctctaaccaaacagttcagctttataatctgctgcctgtgct

SEQ ID NO: 32844 - DNA, 596 bp, Homo sapiens
gacatggctgacccctcccctctccactcccagtccacagaattctcagaacctcctgcagctcaggtctgtgtggctcaggccccggcagccaggttagaggtatctttatggaggtaggggcagtccacagggcgccccagcagcagggagtgactcccaccacctattccgcaacgattccctggggtcttccctggctccagcttcagctccagaagacccctccccggagaaagaagtagctgtggacagacaccacccacccagaagggcctggactccacggcccacacagttggtcacagctgccagcttgctcctactgctcagcagtttcagggcaaggtcaacagctaagtggggtcactgaccttcctcaacaacttggcagagctcatttttattcttaactgtgggttcggctaggcaagagttctcctaaaaatattttttttaactttcccttatgacaaagaaacaaatgtacaatgttaaaatattagttttacaaaaatgtgtgacttggaaagttaaagtttcttatatagtcctatcccctaacaattattattattattattttttgagacaga

SEQ ID NO: 32845 - DNA, 589 bp, Homo sapiens
taaatgaagtggaatgcggtcagatgagaatgaaagaacacccttcatctgagtgctcttgccagtgcagtgcggtgcctgacgctaagcacttcaatctccactgtcaccactcatggacctaacaggccactcctctttagagattaggaagtgagagtgggaagccagcacccaaagcaaacacaaggcaaacgggcacacgtgaccccttgtgccagcagcagcagacctcaggagggaggaaggagccaggtctctgcactgctccggctgcccgagctcccttacatcccaccacaaactctggaagactgctctgtgcaggaaagcagaactgggggccagcttgcttgcctgtaagccccaccatgtcttccaaaaaatcaccagcacctcatcttcctgcaactccagcgatcggccagaggaaggctatgtgcccctggaggctgtgggcagtgccaacagtattaacacacacggagggagaaggaccttctgcctcagtccagaagccgagtgtgagcacacgctcaggaacaggctcatagggcctagccagagctgaccttggcaggtacttttg

SEQ ID NO: 32846 - DNA, 2118 bp, Homo sapiens
ataaaactcttgatttgcggccaacacggcccccgccgccttcccaggggctaacctgacaacaggcactgctcagacaagttcagctcacaaggcagagggagggatggagggcctagcagaggctgggtgtccagacctgagtgtctcggttaccaggttccaaaaaaaggaaggtggttggggtggggtgatgaaaaggaggtgagaggtgcagtttggggctccaggtggttaattttgcaggttcgtgcatacacgcccgccatccaggtgagatatgtgcccccaccaggtaccttccaggaaggctcaccggggaggggtggaatcgggagacgacagttcaatcaaactacagagggaggaagggcggcccagcgtttagtttggggaaatatggagagtaagagtctcagagtgggcgcaggtgagggaagaggcaggggcccagaggtcgggagggcggacgggcgatgacaggcacccggacgcggtgaggtgagcaacaaggtgggcggcgcggacacctgtggaggcgacccccgggcgaagagtcagggaggcgggaggtggtctgcggcgagaggcggccaggcccagaccagggcgccgcgccgctggggcagtcaggggtccgagcggggtcgggggcgctctccgcggcccctccccggcagacaaagggctggccgctcccccaagccccggcgcggcgcggcgcgggcccgggcggtgcaggcgcggcccggcctcggcgcttacctgggccgcccgacccggccgggccggcaggggcagcgggtccggcgcgcagcgcgcggcggcctgttccggggcgtgctcagcccgagcagccgctgcggcggcggcagtagcagcagcaggagcggccgcctcagcctccgcctcccgctccgagagtcaccgcggtggggagggagggaggcgccaggccgccgggggagggaccggcggagggggcggcatctggctccgcgcgggctgctgaggcgcggcggcggcaacgccccggagggaggcgggcgcgtggggccgggcgccggggcggggcctgcgggcggggcggggcccggggccgcgaattggttaactcagcctgtgggcggggctgcgcggtgcggggcggggccttgtggcgcatgtgaacgctcattgggccctcctggaagggggcgagaccagcgacatagggacggggccatgcggtgggcgggtggaacacggcgccggtagtgagtggccgagtccgcgctgagagcaaaggggaggagcgggccgggggtgagcagggaaggcgggttgggcgcgaggaggaggcggtggcctggaggaggagccgggtaaggctgaagctggcgctgcggtaaagccactctgcgtgtccctatctgctccaggagcacagtgttccggaaaaataatggcctctcccacacaccggtctgtgtttaaaaacgggagcaacaagacggggcagaatccttggtgaggccagtttacccagaaccccggaaaattctgaaatggacgaggttgcagaacatttagaggcgtggtcttcctgcgtcgttgagctgggaacgttgctacctctgagcttggggcctaacctgggattaacctagcccagagagcccagggatgggcctccgtaggtccattaaactcagaaggtcgtgtgtactggtagtgagtggatttttcgggggaagggtgcccatgattaaaatgtttctacagaaagtctggctgtatttggagagggtacagggagaagcagcccattttaggtaaaatgcaaattgcttttaacatccgccttccttttaaagggacctgtatctttaagtgtggtctcattttcagcagtttaaattatcagttacacagtgtgacactaaccccagttcagaagccctcctaccctactcctcccacagcctttctttttacaccttttctgtaccatcctcttccactccacatttcttccccttccctatgcaaaaagaatacgaagtccttttttgtttgttcgtttataatataatatccacattactctttactcatttggggggtttttttgttttt

SEQ ID NO: 32847 - DNA, 2049 bp, Homo sapiens
atcttattctctatttagcacttatttctgcctttaattatatatgattttattataatacgttatctcctctgactaaactctggagaacagaatatgagtctgattcctctctcagctttctcagtacctaatacagaatagaacgtcgataatttggtcacgtatataaaggctcaacatattttaaggagctaaagctattctgaatacatttcagtaaaaatgggtgcattttaaaagccttaacctggtactacattagttgagatttatccccgaaagattaactcgttggcaccacctagtagtcactaaatgtggtgcacttttcacttttacgaaactacagaaaccgctctcagacactatatctggagcggagggtcctcattcatgctcacctgtctcttagtactctgatctctgcacagtgccgaccggtctcaaattgcacaaacctccagttcttgacgttccgagtgtcataaacttgaggaaaatgaaattattcatcaggactacaaaaggctcaaagttcaaaccacctcggggtggagatgctggaaaaaaggaaaccattaacaagtaattttatttgctatatataaacttgccctaaggcagtccagataacttccacttgagcagcctgagacatcaagggcgggggcactttccccctcgactgcgcctaccgcagcctttctgagtttcttcctagcgaggccgagagggtctttgaggaaaatcccgcatccggacacgccttgagggatggcgtcaaacccagaggcttggaaaaggtaagggcggagagcacgcctcttccttgaaagtgaggagggtttggcccagaaccaacaggactgggtgaagaatcagctccggccaccgcagcaaatcccaccccacgcgggaacttgaagtccggcacgtaggtcccgcggcggccgggctccaacaggccccaattgccaccagaggtagccgtaaacccatggtccccgaaactccttccgggcctacctgacaaaaactgggacaacctccttaggcccccgggattccccctgtgccgcctgaccgcccgccagtcccagagtttagggccaggggccccgcctacctgagggcactggcctggcggaccgcgccgggggagcacttccgctggacgcacgcacttccggccccctggaaccaatgagagtgcgaccgagatgttccactcgctggcgtccgggccgctggtgatctccggtagcactcgggccggcggacagtgagggcgcggtaagctccccgcaaggagcccctgagaaactggtcgctttttgtcctagatataggggagtccaggatggtgtggtggagtctttagagtcgaatatgacccgaggcaagctcatattcaggtttggggcaaggagctttgattgacccttaattttttcagtggaacggaaaacttcggtaaaatagcttctgaccttcggaacagatggattcaccttggaaaggaaaaatctctttctagaagagtcttgaggtctggcacctttaggcttaacgggggacggctgggcgtcagaggaggaaatccttcattccgaacgacttccctttcctcctaaatccttctttccaaatctgtaaaagactacatctactttgctggaggtggtttgacactcatgctccttgagaaggaggtaatgagctgtagggcagctcttaaaaagttacccttggacgggcgcggtggctcacgcctgtaatcccagcactttgggaggccgaggcaggcggatcacgaggtcaggagttcgagaccagcctggccaacatagtgaaaccccgtctctactaaaaatacaaaaaattagctgggcgtggtggtgggcgcctgtaatctcagctactcgggaggctgaggcaggagaatcgcttgaatcctggaggcggaggttacagtgagccgagatcgcgccattgcactccagccggggcgacagttcgagactccatctcaaaaataaaaataaa

SEQ ID NO: 32848 - DNA, 1834 bp, Homo sapiens
ttgtattcttgtgcaccggaggatggttttcccccactgactccaaacgtcttccttgcatttgctgtgtacaattcagtgatttgggtctctcatccatttatactttcaaattttaccaatactttttgaacacacttaaaaaaaaaaaaacccaggaagtatctctaaaaggccaaggtaaaataaaatgaatgggagttcttgtgttcgagttttcttccaactgggctttcctggaggaggtggaagagtgtgtggcagatgtttcagaaaatgagcgctcaatacggtagatcacgctcccggggtcaaggagacgttttccgttttcttttccctcgcttaggcggcgggcgcgcacagtccagtgggagcgatgaggtgtttctaggcccccaagtcacagaaaagcaggcgattgggaacaacggaggcgcggcgggcccccgggccgcgggccagcgccaccttctggtggatcttccccgacgcgagtctgggagtcgtccctccccttgccagcctacctggctcaggcccgccgcgcccgcagccccagcgcggtcgccgtggcaacgccccgcccagccgccagcctccctttgcccctccccacgtccggcgcggctgcgcgggacggggtgggacggaggcggggagaggacgcaggcgagaggaactcggcggcgcggcgcccgcggcctattggctgccacgtcccggcgccagaagccccgcctccctgacgggggtcacgtgatccctttcaaagatggccgccctgttgttttgatgaataatacttggtggggcgagggggaaagagtaggggtggaggggtaggaggatttactcttccagcgagagctacgcgcatcccatcctccccctcccccctacccgggctccggcgtggaggcggggcgtggccggcctgctttgggaggggaggggcttcccttacagtgctgggctctgccaggacggctgtggggtcgccttacctcggggtatccactctgcagtcgaccagttcccgccaggagcaaagggtaggaaggagagcaggatctgctgtaggaacgcagctaccgcgccactatcacgaagaaacagcaggctcggggcacgagacgaactggagaccgcgctgcctagctgggtaacctgggaagcagagggtaataagtggcgccttaagacaaccctgtagcagcagcagtggcggccaaaggaggctgctcagggaacaagcggctgtagtagtctgtggggcgactggagtgaccgaagccaaggcagtttagtgcctctcgtgttcttattttttaacctctgactatgcaattctgaaacctcccccattcgggggaccagacagcctgatagacaccttccactctccttcctcccgccgtggtctcgagaacagaaggatctctccttaacgcctttcaccattaagaggaaagcgatggaggagctgagcgctgatgaggtgaggaggttgggggacaccttgagggattagttggcaactcgttagcgctttggacagggatggtattgcgccagtgctgtctggcctttgggcttggagaaggaacggagatgatattttccaagaataacgtgactccccgatagggtctctggttttgttctcctttattctgttgccttctttcttcattctgaactccatttgcttctttccgagtgttcttttagggtatgaacaagaggagagagcatcttgaggtgtttattcttttcttcagggtatgcgaacaagaagggcgagatttacatgaagttaaagtgtgtgtgt

SEQ ID NO: 32849 - DNA, 860 bp, Homo sapiens
tgaatgactcacctagattcatcagtttattttttgttacattcactttgtctgtatataaatgtgtgtatatacatctatacacccacacatacttgttggttttggctgaactatttgaaagtatggagaaccactaaagcagatgggaactaggaggaaggaagggaaggcttcattgagaaggtaacatttgagcaaagatccaggtcagggagcaggatatagagcagttatggggcaagtggcgggaggagcatgcgggggaggaaggcacagctccacaataagcaaccaccagtgcccagctgtgtgttgaaggaagaggagaccgctgtacttcactgtattgttgtccacatattcaccacccctgtctggggaaggttctatttccccacgctgcaggggtagtttcggccctgtgactgttttggccagttaaatgtgaacacaattgaatgtgtcaccgctgggccagtgtggagtttgctctgcctcttgccctttgcctgggcgattgctagtgttcccattagaggctgctctttcaccctgggtcttggagtgaagacgttatggagcagggctacactttcatctgaatgttttcccacggtagatgtagtgggaaataataatggttttcattcttttcatcagaaattctgtgaaagaagaaagatgaggaaaaatggaaatttactgtgtcattgccatttgcatttatgtataatttgcactaataataatgttcattataatgtaaatctacatccttttaaaaaataaatggaatcattatgtgtacccttttgcaaccggctttttcaattcaattttttaaaaaatggaaaata

SEQ ID NO: 32850 - DNA, 3137 bp, Homo sapiens
aattattagtgtagaaaattaatttcgatgttttagtgcatatgcttgtacataataccttttactcacaataatactgtatttaattcaggggaagacatgtgattttactttcaatgtctgctagtaaataaaaataattcacaaccttataaagtaatagtgctcggcctgggcctgataattgaatatattatcactgaagattatattttgttaagtactgaattgaacagtttctgaacagtgagatttttctttccagctgaatctaaatctgattttaaagaaatcactgctcgtgcttttgtgtcctccgggtttctaacttccactctccctccttcaagggcatctcccagaagggggctgggctcgttaactcagggacggtgcaaagcgtttgttcctctcctcacagcccttccgcggtctcccaaggagacaagtggaatgcccaccaagtcatgcttttccattactcattccgccttctctcccgaggtggcgcgtgggaggtgttttgctcgggttctgtaagaataggccaggcagcttcccgcgggatgcgctcatcccctctcggggttccgctcccaccgcgccgcgttcggccggttccgcctgcgagatgttttccgacggacaatgattccactctcggcgcctcccatgttgatcccagctcctctgcgggcgtcaggacccctgggccccgccccgctccactcagtcaatcttttgtccccgtataaggcggattatcggggtggctgggggcggctgattccgacgaatgcccttgggggtcacccgggagggaactccgggctccggctttggccagcccgcacccctggttgagccggcccgagggccaccagggggcgctcgatgttcctgcagccccccgcagcagccccactccccggctcaccctacgattggctggccgccccgagctctgtgctgtgattggtcacagcccgtgtccgtcgcgggcgccggggcggatacgaggtgacgcgcagaggcccagctcggggcggtgtcccgcgccggcgactgcgggcggagtttcgcgagggccgaagcggggcagtgtgacggcagcggtcctgggaggcgcccgcgcgcgtcggagcagctccccgtcctccgcagccgtcaccgccggccgtcgccgcgccctggcctcccgcactcgcgcactcctgtccgccgcccaccgcccacctcccacctcgatgcggtgccgggctgctgcgtgatggggctgcggagcggcgccctgcggctcgcggcggccgctgctcgcgctgaggtgcgtcggtgcccggccccccgcgcccccgcgcgccgcggctcctgttgacccggtccgcccgtcggtctgcagcgcggctgaggtaaggcggcggggctggccgcggttggcgccgcggtcgcggggttggggagggggccgcttccgcggggaggagcggccgggccggggtccgggcggggtctgaggggaggtagcgcgggacgggcgccgggtgcgggagcctcgccctcgggggaggggacccctccctaggccagcagcgagtcccgggccggcgtccagcggtcggctggggcccccgcagtgccctgcaccggccctccgtttcccccgcgctgccaggccccggctgtgcccagcgctctccagacccgccgctgcctggccgttccctgggctccgcgcacgttgcagcccggggggcggctgtgcttcgtttgaagccatcgtttctcattttccctctcccctttcctcctttgtggtgggcatcgggcttcggctgggaatgtggttatgccctttgccagatggcgataggaaaggtcatcgcttggcgctgggggagccgagggctcgaggcctggaaagaggggtgcgataggaagggagggggcttgttggatgctggccaggtgtgaggaaggctggtgtggtctcggcattcagccgactgggattactcgggcagccatattgggaggatgatctgacaaatcctttaggagccaagtccagttgttggaaggcaccgagtgacagccctggcagctttcagggtgactggccagaccagaagccaagttgtgggggttgggaggctgcttgagcaagctagtcattgttcatgcaacacaaaacattcccgcccctaacgccagaatggagcttccagatccctttttttttttttccttgattgctaaatgagcttccaaggtaaactgccttcaagattccattcttgttggggtgaaattccgtgtttctctattcatcttctgcgtccagtgcgggggctgtgaaaggcctgctgatgctttacatgtgcataggccgatctgagaattgctaaggccactgtatcagtatggaggcctcgagtagccgtagagcattggatggatagattttcagagtcgctcgacttgcagagaagaagtaaaccagagtattctgatagtgggcgaggctagtggcggcatttctgaggacgcaggctgtcatctttgtggaatctcgaggtagctgaaattagattgtcaacagatcccttgctcatatctcttactgctctgagcagctgttctgccaccattgaacattccgctttgtgtcatgatgtgcctgtctgagcctgatgaaagtgtgctgatgagatttgaataactcttaagaggtgatatcatggtggatattttatttaaaggctggcattttgtctccttagtttagtcataacaaaatctagttcttgtgttcctctaagaagtgaggtggtgctttctgattaagttgatatggttgctggattatagagcaagtgttgttaatgtattgtttgaaggtggaatatgagaattacacataggttggtattgtaaagcaggtctggagatgatcaataactgggttcagcatgagtctgtagatctgttcttttctatatcctagatgtggacaggacctggagagatggcatgcctgctttcttctttgtggcctttgctttcattcaagttcaatttgttcataaatacattctcataacttctcaggttgaactatgtaaaaaattttgggatgg

SEQ ID NO: 32851 - DNA, 589 bp, Homo sapiens
tgttctgatatacctgtttttttcctagagaggctttgttggctgagatgggagttgccattcgggaagatggaggaaccctaggggttttctcacctaaaaaggtaggaaacaatgctgtgaaacctaatcagacagagacactttttgtttgtctttgttactggggcacttcatgtctttcaggacctactctcccccttattatcttgatacttgccttaatttcagatatttctgatttcatcttagagcatggtcttatagtacaaaggcagcctatttctaaaatgcctatcttgtttactgtttacaaaagaaaaaacctaaggcaatatgtaacctttggccatgattcagtttgtttagtcatctttatttgttgctttctcttaaattcccagcctaacctagcgtactttcagttttggctactctttcatgtagattttcccacagaagtcgtctaccctgctttataactttttggaaccaatttcagctgtacaggtttgtggagaataatactgcttccatttgcttctgcaatttgtattatagacagccattgtactaagtaaagcaattc

SEQ ID NO: 32852 - DNA, 2323 bp, Homo sapiens
tggatggggagatattccactttcccttaggaactcttgtccctgcacagaccattttagctattctgagcacatcacaagcatactcctctggggtgagaatatatagcctctgggctttttcagaattgctccttctgctactctggaagctaacgtggaatgattgcttgagtccagcagttcaaggccagcatgggcaacaaagcaagaacctgtttctttaaaaaaaaaaaaaaaaaaaaaaaaaggcggggggagcaggcatggtggcttacacctgtaatcccagcactttgagaggccgtggcaggaggatcacttgaagccagagctcaaaaccagcctgggcaacttagtgagcccccatttctacaaaaaataaaaacaattaactgggcatggtggtacacacctgtagcctcagctactcaggaagctgagatgggaggatcccttgagcccaggagtttgagactgcagtgagctatgatggtgccactggcgcctgggtaacaaagcaagaccctgtctcaaaaaaaaaaaaaaaaaaaaaaaggagctgggcatagtggcatgtgcctgtaaatgaaaggcatcatttcatgcaagctcctctgagcccaggagttccagcctagcccaggcaacagggcaagaccacgtctcaaaaaaaaaaaaagtactctttccacctaaaatatattcaggtcatttgagttcagtttgagttcagctacgagaattatttagttgagtgagtgtcagagctgggattttcaaatctgcccttactggtatgttgctttacacaccctcttacgtaaatcaaactaggattccaccctgggaggtttgcatagagggctgttcttgtagaacttgtgctcatgctttgatttgggatttggggagttagggcaagccagaaagtttttctggtggataataatgtgggttgactttcttaagcattttaagccaagcacttgagtttctaacaactaaaaagctaagtcagcctgacacagctctagcgcgccctggcttgattctgttcatccccagggggagacttgcctttgttccagtcctgctctcccaagccagcttactgtagttttccagcaattctgagaagcagtattttttactgctgattagaaccttaacatggaaatggaaagtttgtgtagcatgtaacattattagaagggaaaacatgactatatgattagatacatattgattttatgcaatatgtttgcataaaatctcttcagtagtaacttggttaaattattcacattgactcagcataatttctcccttgctaaatctcagactaaagcaatcaatttgttcctgcaagaaagtctgatggtaggctttccttgtaactgagccccatagaaagaggaagcagctgcaacaaagttgaaaaggatgcctgtcaccaaggttcttttaagggagccattgtgtgaagttctacttgtgaaatttctgcaagtactgtttgttctccaaaatccagctttccgttgaaagtcaatgaaacatctctaaaatgcagacatacccaggttcattgggaacacagtcactgtgagtatacatgattatgtcctgctaaccctattgggaaagaatgctgggcttggccctagtaagtagacttgggttaaagttcacctccgccactaactagctgggaagttcaacttccctgagctgagtttgtcacgttagagaatattaataaatatgaaaattgtggagcagtcttaagtttaaaaggaactttcatggacattagctcattttgctgtgcccaccctgggaaggaagcaggacaggcaggcagtggcatccctgtcgtcaagcagcctgaggactgctgtgagcctctggagcaaggcaggagtttgaggaggctctcagtccttttgtcctttttttgagacagagcatcattctgttgcccaggctggagtgcaatggcatgatcttggctcactgcaacctctgtcccccacccttaccactgggttcaagcaattcttaggcctcagcctcctaagtagctgggactacaggatgcaccaccacgcccagctaattttgggggggttttttttgagacgagtttcactcttgtggtccaggctggagtgtagttgcgtgatctcggctcactgcaacctctgcctcctgggttcaagtgattctcctgcctcagcctcccgagtagctgggattacaggcgcccaccaacacgcctggctaattttttgtatttttagtagagacggggttttgc

SEQ ID NO: 32853 - DNA, 2415 bp, Homo sapiens
ctctacaaaatgagaaggggttcaataccgttaactccgggcctgggtaaaagactcaagtcctgaccccatcatactccaaccaatacataccccgcctgcgctgtctgcgcctgggtctcttcaaccgcagtgagcggtcgcacggctccacatcagggtcgccctgaggctcagccttccccggccccattccgagtgcgcacaggactgaacgagcacgcccggtccctgctccggagcggaggacacgacgcggacccgcacggtgcaccgcagtgacctgaggaaggagcgacgggcgctcgcgccaaaggcgtccgagtgcctggtaaactgtaaagcgcggtcctgcgtgagttgctatggctacagctgcgccaggcggacggcctgcaggaccgaggtgcagctgggacgagcggaaagctctgcgcgtgggcggggagcccggagcctcgccggggcaatgtcatctaggtgctcggcgctccactgatccggcccccgggggtgggcgggcacgtttgcctcggatggtctaacaggcgtcggggagagccaatggtgtggcttcatggctccacccccttccattcgattggccggcgccgaaaagccgggcgtgagcggccgcagtttctggagggagccgctgcgggtctttccctcactcgtcctccgcgcgtcgccgctcttcggttctgctctgtccgccgccatggcccagtgagtgactcgccaggggcagcccggctcggcctcagcgggcggggaactctttgggggtcgagatctccctcgttctctccgacgcctcccaccctgggggtcgcctgagctcacttggggctctgtgaccctggccctacggcgtctcgggcccagagctccttccctgcgggcccggccccctgccctctcggccgcgcaggcatggggcggggcgggtcccttcgagggccagggaggaggcgcggccaggcctcgccgagtctgcagggacacctgcgggacgcgtgccagcgggagccgggcgcgagggcggggctgggggccgcctgcccggccgaggctctgcagcgtgcgcgcccggcttctgggggcccgcgggaggcgcggaggaaagtgcagactcccagtcacggccaaatgtggaaggaccggacccctgggttgcagcgcgtcgagcggtgctgactctttcctttgttctgtttctgcctctctagagctgacatcgcgctgatcggattggccgtcatgggccagaacttaattctgaacatgaatgaccacggctttgtggtaagcggcgtgggcgcgttgtcttctctctggttcccgggcgctttagccgaggccggcgataggtttgggagcttacgggtctcctggccgtgctttgctaatgtgctctgttgctgctcgtggcatttttgtatggaaaggagaagcaccctgtaggcgtgggcgggccgatcccgaacttagtcctgcggagtgtgcctgtgggtccgtgaggttcacagcccgaatgaacgaattagtgtcttaagtagagaagaagggtgcgggaggagaacccttgctggctgtgtagagctctaacttgattgcctgatgagatctggggagagtgaaaatgtttcttctaaatgttaaagtggcttagacgccaggatgatcaataacaacagatagagcctgttgaaccggccagttcctggatttgattttgagtcctaacacgttgggtgtggattctacctgacacaccgggggtagttggccttcgcctcggttgtccgccgttttcatcctactgaggtgacataactttacagtgagcctcccacagctgggggaagaaaaggcaaaggcaggtctgacctccccagaacttgggttgaatggaaaggtcattgttactttggccacagtctgaaagtcttgtgtgtcctggatctcctactcaggacttttgtccttctaggtctgtgcttttaataggactgtctccaaagttgatgatttcttggccaatgaggcaaagggaaccaaagtggtgggtgcccagtccctgaaagagatggtctccaagctgaagaagccccggcggatcatcctcctggtgaaggctgggcaagctgtggatgatttcatcgagaaattggtgaggccagctgtgctctcagctgctaccacgatagcagctgtttttggtttcttcctttagttctccttcttttaactctagagatttttttttttcaatttctgctaagctctgaccaaatgattgcttaactgttgcagtgttggttaacttgataagcgcttatgaagtaactttgtcctttggtggtagtaattctgagaatactaacagacatttcaataaacattaaggcg

SEQ ID NO: 32854 - DNA, 1241 bp, Homo sapiens
taaagttgatggtcgattttgcaagatacacctgaggtacaggtgcatggagctcctgataatgtgtactgcgttacatgatctgtaaatcgtgggctacgcatcctctacacccgactggaacacgctttgcacctatgcgcacacgtgtttcgcggagagtggtgctcagcgttgtgccaggcgctgaatcaggctctggggtgcagcagtgacctcggtggtcatgtccccgcgtcgcccggccacctccgcagagcaagctgagcagggggctggctggaggccgacggcggaatcccctcaacggagcgccgccagggggcgcgcgaggcagggcggagctgcgtactttgtccgcccgcgcggcccgtcgctcgcgccgcggcgggaaaatccgacctggccgcgcaccaccgccccttctcggccctcctgcgtttgcccagggtcggcccgcagtgatggaggaggaggcggagaccgaggagcagcagcgattctcttaccaacaggtacaggaaaacgggggtcgggctgggctggggcaggacggcgtcgagtttctggacagaaaagtacccggcagcccccggcggcttctcatcggcaccccgcccccgggcgccccccgcggctgcgcatgcgttggcttaactgccgcgggtggtgctgggaggcggtttccgcggcaacgcggctggaccctggcctgcgctggctggggaggaagcggttctaggggagcgtgcgggcgccggggtccggcggcgagaggccaccttctggccttgcgatgaatcctcggtttccccttctcagatggggttttcgtgagggtacaacgtcggcattagacattccaggtgacgcccgtacgcggtgggcggttcgggccggagctctggaacgctggccctggaggcgtcgacccctcgttactgatgcagggacgcggtgcggaccagtcaggcccagagctcgtccttagatgtgggttcgaatctctgccccgccaacttgtgatcgtatcgactcggcccagacgcaattttcttctctgcaaaatcgtcataagaataatcacttgtcagggtagctgcgggcatcccattcgttcctttcatcagcgccgggcatatggggcgtcagaggctgagaacgttgccgtgaagaggcttaaaagcaagacccggagtggcgaccttaaagaggacggactgaagaaacgcgggaatgag

SEQ ID NO: 32855 - DNA, 703 bp, Homo sapiens
ataatttcagtagagacggggtttcaccatgttggctaggctggtctcgaactcctgacctcaggtgatccgcccaccttggcctcccaaaatgctgggattacaggtgtgagccactgcgcccggcctattgtgatatttctttacttaataactagcagatgaatctcttaacagtattctgttttcctctaagcatgcataaaaagtggtcaaataagtccatgatgactcatcaccttttccctgcaaggagtgtactgtagattaccaaacctgcagaagccgtctgtgtggagacaggaggaggacaaaccaggcttgctctgcttcacacccagagacctggagccacagcatgtggaaattgctttcatgaccttttataccccctgctgataaagcaattagaaaactgaagagtttcacggtggtgagatagaatttcacaatactgagtgagatattagcaatggactctccgtatgtccctatggtctacaagcttaatatgtatctttaaacaaacacataaaaaaattcattaactggagaaacaagattgtggccatagtcaacactctataatgtcaccatcttcaccactatctctgcttaaaattctgccgtactatcttcagaataaggataatgaattggaaatacgaccatttcttttcattgcccttgatggttacctttt

SEQ ID NO: 32856 - DNA, 1496 bp, Homo sapiens
aaaaatacataaatgcttatatgcaaaatccatgttaccaaagcatttataatgctttggctgttcatgggtctctgaaaatttccatatgatttctgttggtgactgagaggaagcaactgtgccctctgacacacactgtgactacatgcctggggctggctcacacatgtaacctgtaaaacttctttgggtaagcgatttgttgctactggctaataagacttgtaagtcacttaaatatatcatcttatttgagagaaccaacaaccctttgaagcagggctataaatattatacccaatttgctgatgagaaaactgagggttgagagctggttaagtgcaaggccaagcagctggtaaaggtatggggccgggctcggaacttccgtcggctccgtcacttacaactcacgttccttgtctggacctccagaaatggtcagtagcagctccctctttcctgcataggttcctgccagagcggacggtggaaacccctccccacaccgccgtgggctcagctgggggttcttgtaccatctgagtgtggcggagtggcaggaacccagtggggtccgtttggtccaacatcgaagtgatttcaggcaagagacctaagccgagtctggcttaatttgcacattgcttcctggctgtcttcccaccaccgtggagtctcacacgagattaattacgctcaagcgccttaaatctgtaaatcgctatgcccactcggaccgtttctgtcccaagcctccacccgagatacaagaatccccaagtcgcctctcctgaccccgcctcgcccccgccggacgtcctcacccggccctggctcccccacaccctcgcccggggtcccgagccaacccttgctcctcaggtcttcgaggcaggaggcggccacgccgtgctgttcgcggctgtagttgcggcgcagcagacacggctttagagtccggatctcgccagattctggtaccccggcgtccccggtcacctccatcctccacaaggtgggacctgcccaccttcgagaagtcgcgggaggccggagcggcggtccttctactcgacccccttccgcagcctgccgggagatgtagttcgttccgcagcaaatcacacgtgagaccagggcacgccgggaaatgtagttctagttgccgctaatcacgtgtggcgtcgaagcatgccggaaactgtagtctctgggtttaaagccgctttcgttctatcgcgcgattcagcctaggagttgtttttaacttttaggagctgcattcgcgcgttcaaatataaggccaatagagacttattttgcatgacgatgcacacgcatgtatactgtattgaatttttagagcattcctattcgcatatgagatgcataatgctaatacagacacccgcatgtttccacccattctatttcctgcttcaactgtgcaaattagtttggggtctcagaacaaaacgcttaaataaata

SEQ ID NO: 32857 - DNA, 1552 bp, Homo sapiens
gttagccgggcatggtggcgcatgcctgcaatcccagctactcgggaggctgaggcaggagaatcacttgaaaccgggaggctgaggttgcggtgagccgatatcgcgccattgcactccagcctaggcaacaagtgcgaaactccgtctcaaaaaaaaaaagcaaaaccagaataatacacatataacaacgcaaagaagatatagacttgggatcttcctggaaagcagagtcttaacggaaactatgcaaggtgacccggacacccgggctccacccctctgccccagtcccctacatcgacaggctctgttccggctaccttagtctgggcgggagggcgagagcgagggcgcctgggagaaacctcgcccagcggcggttgattagtcaggcctcagaaagatggcgtcctcggagcaggcagagcagccgagccaggtaaggggagtgggactgccccgctgtgcggcggagaccccggctggagggggcgctcagcatacggctgggagccgggtagggaccccgagtctccgaagctggggaccccgacctcttgccccctcctgagccccgcccctccccaggtcctccccacccggcccctccccccggtgacccctctttgaccacattccggagcccgggctctggtgtttggctgtgcccccgggtccccacttcccgcctgccagcacctctggtcccacttgagcttgttggggagggtgacgggacccttgggaagtccccagccttgagctgcgagggcttgagaaggagaggatagatcgatcgttcccggctgtcccctccggggaggggcctgtttccattagggttcccactccctcacggcctcagcctcctggagcggctgccagcctcttcatctgtggtcacctttgcgcttctctcgtcaagttggatagtcagaaataatctagtcgagccctctcagtgcgttgataggaaagggacgcactgtgactaacagacgccaccaagcttttggctgaggacccatcctcgcttccctgggtttggttttgttggccgagggctccgctctagcttttcacctgcagattcagacaaatcccactccaataaggggaccataaggaccagcgttgacgcctgtgcctctgcggccgggaggcagtggatgataaggtctccgaaggggtttatagtccaaaggtggggtagggtggggtgaggagaaaagggctaagagacatcttacatttaactgcctgtgtggtgtcatgttgagcacaaattacatctattatctcgtttagtgttcactacaacctttatgaagtgcaggctactaacctccatttcacagaaatgaatactaagggtttgtgacatgccccaaatcgtgtgctctgttgagcctgtattgaacctgtgtgactccactagtcatccatacatttttgagtttagttaggattagaatgaggaagaagaaaatagtttcaacttggggcctcattcctcctctcccatctccttgaagcacctctaagagtt

SEQ ID NO: 32858 - DNA, 570 bp, Homo sapiens
tcttccctcccagctctcctttcttttatggtttgtagttataaccgagatttatgcttgttgctccacaaatcttctctctgccattatgagtttgtctgaacagtctagagatggggccgacactgagtgattcttgaagtaaatctatccaggggcactccttgacagtcagaggcagagaggaactaactcatagcccccagtggagcaggagtctggataaattacccctgtcaggaagaagacatgctgccacttttgtgacctcttgccttcacagtgaccctgggggcacagctctcctgtttgtgtgcagagtgtgtggggcggtgctctgggtcagcgatcattccctttacccagctgtgtctgccaagaggcctttctctctgtgttggcccagccaggcccgtggcaagtgggtctttaggaccagggccactttttgcagccgtatggtagcaaggagttgctgacaatcaagcacacaagttgattgattccttttccttttcctttcctttcctttcctttctttattttctttctttccttttccttttctct

SEQ ID NO: 32859 - DNA, 3172 bp, Homo sapiens
tgacctcatgatccgcctgcctcggcctcccaaagtgttgggattacaggcgtgagccaccgcgcccggcaaaggcatgcctcttaacctcacctctccagctctctgttgtctgaaaaatggcagttaatagaatttgttaataaacagaagaaataacgagaaatagtggcacatcatttgacagtaaggtggtttataatttctgtttatcaaatgattctcattattattatttctattggatttttgaagaattcagcctggtccccagagccccatttgtaaggcattttatttctttataatatctagaaataacttcagttccagtgaaatccagatctgtggtcccatcccactccccagccctggttctctccccttcctctctgcttgtcttctgtgacctcagcgggctccatcaggtgggggtatcccctactgaccagactggcagagctaatgccggctggaggaacgctgccgtgtttgtttttgcagttcctggatttggtttaatgtacaattgattttttaaatgtatttaatcatttttttcttacctcttaaggattaacctgcacaaacctcattttatcctaagtgtggctttgggaggaagggaggagaaaattgagtttctccagcttattttattcttttacgctttattttccaaatggcttttcctgccgaagcagctttgtataatacaatgtattttcgtggccattacttactcattactaactggtctctcctgcttccctttgtctgtgaactaaatacagggggcctcaagataattggtagctccatcactgacccaccaattatagatcagcagggaaggcagcccagggatggtttgtggttggcacaggctgcccacctagaaatgtgagttattctctacctgccaccaagttgggcttgactagatcgatcctttcctaattttggactttggcatctctaattgcatcacacggctccctggtttacaggtttcagcctcatttcatccctacacgtgctgctggtgtctttcttagttcatgcctccttggcatgtctacaaagtattaatttgcagaggttttgtttgtattttcctttgaggttccctggtgcctagaatggttagatggcaggctgcagataaataattctgttgaaacagcaggtttctgtgcatttttgtctggtgtgtccaagtaaaggcaagtctttgtgggcaccatattaagccccctttttgagcatttatctgatttgtgttccagcttatctactttgctctggcatggagaaggaaaagtcccatttcctgctaggctgccaggcacttatgtaagacttttaggtgccaaagtaggaaaggagtccctgtgttgtatggccgtatatattttgcatgtgtgtttcctggctgtttggcacctaggcactttgctaagccctgtatgggttgggcatataccgtattgctcagctcctggcagaaaataggcactcatacatatttgtggaatgagtgagtgtgtgtgctcacttatgtgcgatggagatgatgagccaaggagttggattgcacagttgctgcctggcgtcctgctaggaacttagggtgcaacattcccactgggccacacatatgccgatgttcagtggatgactgctacgcaagcaacataaagaggccattttatgaaagggaacatcagaggaaacattataactgagacctttatagcctttccattattatggtttaaatcttgacagtctttatttgcaatgacactgggaccagtaaagacaatgctcactcccacctcctcgttctccacatcctgttccgtagctgtggtgcaccgataggcatcgttaaatgtgcaggcagcagagctgctggtttgtctagaaacagccccttttgactcagaagttggaacccagatgactcaccattctatttgttttattgcaactgtcatttcataaaatgccctgacagctttaaactgtaaatgccaaagtgaggtttttgtcttttttattttgttatctcctgttttttctaatcttttatatttctattttctcctttcttttcagacttattttctctttcattactgtctctttctctgtccctcccttccttcctgcctcccccctttgatgactctaatggcatgagtagttgaagtggtttttgctaacatcatggtgcgttctttccagctttaatgctatctgattgagcgtgtctcccctcagatttttgtgtagggtttagaaatggaaatgaccatgcacatcagagtttaaattttcctaggaaagtctgccatgaactgtaggacctataacttctagagatggagggacccctgacatctgtggactatggactcctgacttctgtggactctagaatttatgacttctgtggattgtggggcctctgacttccatagaccgtgggactgtgacttctgtggacccagggacctctgaattccatggactgtgagacctctgacttctgtggcctgtgagatctctgacctctgtggcccgtgggacctctgacttctgtggtctctgggacctgtgacctctttgacttccaagtcttctgtggactgcaggacctcatcaacacgtgtattgccagaagagaggcttgattgtgttaacctgtttctctccagaggtgtcacatactagaatttctgctcagtcttatggcttaggtggggtgttgagtctaaatatatatattttttgagacggagtcttgctctgtcacccaggctggagtgcagtggcataatcttggctcactgcacgctccgcctcccgggtttacgccattctcctgcctcagcttcccgaataactgggactacaggcgcctgcccccacgctcggctaattttggtatttttagtagagacagggtttcaccatgttagccaggatggtctcgacctcctgacctcgtgatctgccctcctcggcctcccaaagtgctgagattacagacgtgagccaccgtgcctggcccaagtctaaatttttaaggactagagctctcagaccaggactttctggatctttttttctgatacccaacactgtggcacttgactaagtc

SEQ ID NO: 32860 - DNA, 3301 bp, Homo sapiens
ttgcagtgagccgagatcacgccactgcactccagcctggtgacagagcgagactctgtctcaaaaaaaaaaaaaaagaaaaaatttgtttctaaatttgaactcattctaggctatgagtagttctttttttttgtattcaaatttattttttagcattaggtcattctctaattttcttatggggtgtttggtagaattgccttttatttatttatttttttgtttgtttgtttccaagacagagtctcactctgtcacccaggctggagtgcagtggtgcgatcttggttcattgcaacctctgcctcccaggttcaagtaattctcatgcctcagccaccctagtagctaagactatgcaccaccacacctggctaatttttgtattttttttagtggagatggggtttcgccatgttggccaggctcttctcaaactcctggcctcaactggtccactcgcctcggcctcccaaagtgttgggattacaagcgtgagccactgtgcttggcctagaagtgccttttaaagactccttgaaggttttagttttgtgcagagtgtgggttgatggtacacataattttttggtccagagcttatcttccttggaattcaggagcccatcttcttgcccttagggcaggtggccctaagcccttgagggggatcctgccttgcaccagctggtggtcacctattcagtagctgacccccagtgatgccttaatgtttgaggttgccattatccatgacacaacctttcttcgtctccttcctaatcatcccgcagttcaatagtgcatgactagagagcttcaccaatctccatctggccgaacttcaaaagaagtggaagctgaagcagggtttcatctgctgagcatctgaagctgctggaggttaggagaaatacctttcagaaagcatgaaattcaaccagtggtggagagaaagagactaggaaatagaggcagtgttatcattagggaggtgctggggactgtgtgccacatatttttagtgttggagtcacccgccaccgtcactgtgtgagctcacagttctctcagggagcatcttggacactgagtcattacattcctttagagtgatttaactcaacagcttgacaccttcattaattttacaacacgaagcctgggtgctctctgcttcctctttaacagtgcagggaaattagaggaatattgaaaatataaaaccaggggatactggaagaaggagcagtcaaggagctgttgaaaaacatcatgttaaggaattgaactacttgtctttccttggtatctcttgggatcgagcacccagctcttgccactcgtctctggcacataaaccttttatttccgttcctggcacgctggccaaacctccaacttgcagccagctcgtttgccttctctgctgaggtcactgctaccgtgatccgtgtataatggcattttcctcctcttttcagtatgaaggctattacagtttcttctctaaacaggacttcaaacaatttgctgccagttgcatttcaaaggcagggaaaaggcaaatgtcatccttttttcctcccctctttgggtaactgctttgttggttgcatcaaaaattagaggggctgctatctaaattcaggtggggatgcgtggggacaaggcatttaaatgtgcttttctttctccctgaaggagaaaaacgcttttccttctcaacctttcctaaaaaggaactttgatcttcccaacccacaagcaagggtttcatttcttccaggccggcgtgtactccacagctccttctgtggcgtggtgaccgtcacccgctgcatcagcagctctgcttttcaagctgtgctcctccactgcaccagcgccctttgggctggaagttggcacccagagtcctcggctggacacggacacctctccaaagtcacccttacgtccctaagatcactgtcccttgacattaaatagtgcgtggtggtttaagatgctttttatttcaatatacatttctggaagaactactttaatcaaataacaaaacaatgacattctggcaagcagttcatgcaatatttttaactaaggccaagggaaaaaaaataaatggcagagatatttcactttgaaaggtagtttttgtgcatgtgaagttgccacttttcataaaggcttttactacatatatcaatgagttttaagagagactagggtcaataatgcatgctttagaattccctaaatacagatttacacaatagccttaaaatatattctgttctatcatgtcaactcctgtgcacttctaccagcggaattttatttctttaatgtgaaaaacaaaaggacagaggaaagtaaagtaaaacaaaggaaattagggcccacaagcttaattagtatagtgttgtaacccaaatcaacaatgggaaggacacagtgacaaaacccaggaaattccaagtcgaaagagaggctctttcctttaactccttgagtgccagggcacttgctagccagctccttacccaggtgcaggaggctacctgagtacaactcactgtctttattgttgaacttcctggcttttgttgactttcccttctcctttcctcccttaatgtacatgaaacatacctttgtgtgtgcgttaattatagataaatgggctaaaattgcctcttggttttgtaaccctcagagaaggggaaagagtacaaaaaaaattcctgtcactgtcatctgttcatttttaatgagcaatttttaaaaattgaaaataaaagaggaaaatgaataggtgttgaaccagcccgtgatatgtaaatgccaactagtaattacctaaaacctcaattttcattctgtttcatcttgcaaaacatttcattttccctgagtgaaaacacttaatttgggctgtgcgagttagcggagcggccgccccggcctgcgcctccgccggctccggctagggggcactttggctctgcgcttctgccgcctgcgggctcgtccacctcaaggttattcccctcttgccattccagtggttttactccgagtgtgcaggcccctcccccctactcccactagtctggtttcggggagcctgttcctccttgtccttgcagaggcgcgtattgaattttggctgaccgagccttcctctgcatattaactttcccctcttacctggctattgggcccttggcgtccctgagttgcagtcacactctgagagcagctttctggaagctttctttctccctttgag

SEQ ID NO: 32861 - DNA, 484 bp, Homo sapiens
ctacttgggaggctgaggcaggaggatggcgtgaacctgggaggcggagcttgtagtgagccgagatcgcaccactgcactccagcctgggtgacagagcgagactccgtctcaaaaaaaaaaaaaaaagagaagtttacaaaatgtgtggagctgaggcagaaagcctaaagggcagactccaaaagggcagactccaaaatgatcaggacattaactgacttgctgggagatcccagagcacacgcagagtcattgaactccatgatactcattccaggtcaccttgaagaggcagggagaagggcattttcgcttcttgaagcttctgctcctctgccggttcagcctgatcttagagctctcttggcattgcagctgcagtcaggttttccttttaaatgactgcagccttcagatgcccacacagtgcagtccagatctcatgcctggggctgaaggtggacctggtttggcggtaaat

SEQ ID NO: 32862 - DNA, 1087 bp, Homo sapiens
taacctatcagaatgtgctgcatatgtgagagacaagccagggagctctgtgtttgaaattagagctctaatcctcagggaagagaatagttaaataatttgtttttgaggtgtgagagcagagccggcaaggtgtgagtgtgtgtgtgtgtgtgtgtgtgtgcatgcacccgtgagggtgaggggccgcagtgcctgtgtttaccaagaatatcctggaggtagatatttatcagcacctgtgtgctgtcaagaagcacacaagctgctgttgcccgttcattaggttttcagaagagtccgggcctcacctgtggccgggcgttgcatcataacagcagaacttgcttcattctggccctctgggacacacaggaatagatttgagagacaggatgagacatacagagaaagacacaagcattaggggaggaagaaagccgaatgatcctggagcatgtccttggcgcaggcactgctggacaaagcagtccatctcggtgggctggcactgcggagccagcgtggacattccaccgagcacgaggcgaaaggggcagcccagaggcctgccactgaaaccgccttctgcaggcaccgtctgccagtgctcagcgctgttagcagggctcctcctctgctgggatgaggggttgggatgacaggggttcacagtgtcctgcctgccccttcagcagcataacctttgtctttctggactcctggctggagctggtgatactgtgaacatgctgcctctctggaagctgctccatgtctccctatatccccagagcatggcagctgtgatcagaattccacagggtggggctgatgaggatccatgcacatccgtccctgtacccctcattagggacttgggttggggggtgcctatctgcacgtgttctttttcctctcacgcactttgtcggtctctgtgcagggtttctattatactaataaggagcactggggacgctggcgacagtgtgataatcgtccccttggagggccagaggcagtcggtgtgcgctgacctcatcctgggggagtgctgatgaaactctggcttggccttactgcc

SEQ ID NO: 32863 - DNA, 2275 bp, Homo sapiens
ttttcccactctcagcagctggagtgcctttgtacacacagctacttcctgagctggccccgtgtgaccgctcctttcatacttgagcgccacatttcattctgttctttgggttggatggggctctcttcctcctcccaagagtcagtgtcccaaattggctcagacccggtggaaatatcccagctgtgtccccactggaaatgcggccttcatgggttttcatttgccttttattcttctgtgggcaaatcctctccacatggcatagccactgcagatggcgccctgccacttcctgatgtcccatgtatggtgtggtttagagtgtcgggaggatttcaagaagggaaaagaaaaactagccaaaggcgatacaggcagcgtgtgataggctagaataataatcatctgaaagtttgggcctggccttgttttgatctgttttcttgttttattttcttctttacattctatatcccattcatactaatcacagtcagtcctgatttttctttttatttctgcatttgtcataaaataaagcaaattattcccgtcttcagaaacgatctagactaattagtcgtctcacccaataattagttttttgtttccctgtctgttttcgtgcattattgttagttttttcccctcttttttttttaacaccattacagattaaaatgagccacatttgcagttgatggtatctgttttcgggggaagaatggagaattgcagtaccgagcgacttcaaaagcagcaataaactcaaggataaattaaggaaattgaatgagccacatttggaagcagtgttgaggctaatattctgtcgcttaaggttaaattgcaactgagagaggttccggagaatctgaaatcggggaggcaacttactaggatgcgaggcattctgtggctgtaaaggtctttgctcagtgaagattctgttgcagctatggacactgacaaaaggtactcacctgcaatgatgtcctcttctccccagggctgacagatgaagagattgatatggccttccagcagtcgggcactgctgccgatgagccttcgtccttgggcccagccacacaggtggttcctgtccagccccctcacctcatatctcagccatacagtaagtcacccgctcaaactcctgcttaaccttgattgggattcaggactctggccaaagggcagtgttctgtatctcccagacttagcaaaccaggagaaactgggagcagcagaaagctcttgggtttttcccaaggaatgtgacacaccccagtcttctagacaaactttttaaagtatgtgacaaaggtttaagaagagacaagggatcagaataaatgattttattgttgtttcaggtattttggttacatgcagaaaacctgtacaactatttattgattctgttcccatctcctcataccagtgcttttgaatgttactgtttcactaaaaacagcgtgaccatctgactcatgggtgcattcttgtttgctcactgcaataacctgtctcccacttctatttttttaagttaatatttgtaagtttaggtcagcctccatttccctccctcccttgtcctggctatactttgtacgtttatgtagtagcggtctgttagggaatttcaggttaaaacatgaagttcctttttgaatgtttcttttaattatacgagatcatgacccatgaggggtctttcgttgtcttaaatgaaagctactataggaataaagtttcttcaaacaagttataaatgcatacctccaaaatgcagccagaagccctccttgaaatcacttataaaaagtttaaaaaggctaaaattgactacaaagttatggaaaatagctccattttgtttctttaatgaaactcagcattgggccgggcacgttggctcacgcctctaatccctgcactttgggaggctgaggcgggtggatcacctgaggtcaggagttcgagaccagcccggccaacatgatgaaaccctgtctctactaaaaatacaaaaaattagccagatgtggtggcaggcgcctgtaatccctgctactcaggaggctgaggaaggagaattgcttgaacccgggaggtggaggttgcagtgagccgagatcgtgccactgcactccagactgggcaacaagagcgaaactctgcctcaaaaaaacaaacaggcagggtgcagtggctcacatctgtaatcccaacactttgagaggccaaggcaggcggatca

SEQ ID NO: 32864 - DNA, 754 bp, Homo sapiens
gacagcctccattttccctaaccgagaccagtgccttggaggctggggatggaggccaggccatcgggtgaccgtgggggccaagaaaactgcacatggaatttcttgttagcgtttaggatgctggtgaataaagcaggccgtggtgtgtgccccactcaagtggggtctgtggtgggagagttgtgtctaaggcccctgctgggggacagccctgcgggcagggctttgtcctcttggctcaggcagagatgggcctgcctgttggagagctctgtctctgagccgttgccaagtggacctgacctcccaggtccctcctggaattggctttggtttgggctggctgctggcccaggaacggagtacggagcagaagggagagctgcctcttctgcgttgaaagtgttgagctcagaagttttctagcaaagggcataaccaccgcccttttggttctgatgtgtctgaccccctgccagtggccagggctccctgcctccaccttttgctcaggccatagacaaatgaggactgtggctcaggtgtctggagtccccagtcatagcccttttggactcctcaccaacctgtctctctcctggccactgggttggaggcagggatggtgctgaggatcagaaggaagcaggctcccgcatggcaggcaggccccacttggcttccagcagctgcccaggcagatgggccttgcccagggtgggggcccggggggaccctgggctgtctgtgg

SEQ ID NO: 32865 - DNA, 515 bp, Homo sapiens
aaatgaacaaatgaatgaatgaatgcctcttcaactacaaggggcgcccaggtcctggaggcatttcctaggcttgctgggccctgggagggggtgtgccctttgacacacaaggaaactgaggcccagggaggttaaggagccggctatgcggtcaggctgtcaagggacagcgtggcattcctggcagcttgttccgcttgggagcgtcctgccttaccacacgttcctggggaggagtcacagagagccagggaccagcttgtgccagcctcttgcctcactgtcccggcagcacttggctggcaccctcccacccgagcacgtcagcccctggcggctcctctgccaggccaggtccctgggccctacctgactccaaccctgctcagcagagagcagagatctccttttctcccagccactcaggaccctcccgaaggcctccgtgttcctcagtctcctccctgcctcagggtcttctccagcccttgccagccccctcttggcctctc

SEQ ID NO: 32866 - DNA, 1309 bp, Homo sapiens
ttaaattcctttaccttgagacagtcgccccgaaaccagactaaccacctttcccaacaggacgctgctttcaaaaactaaaccaccccccactaaaaaaataaaaacacacaccccagagccagacacacaaagatctttgcagagaacaaaaaaaaaaaaaaaaaaaaaaaaaaggcacacacacagaaaaaaaacacgaagccatacaaaaaacacggagaacaaaaaccccacaaaaaccccctaaatcctctctctgggtgccccccagctcctgctcctctcggttctttcataatgacaagcatcacattagtcacagcctctaagcaagtggcaaataacaacaacaacagcctcagaagtcgccgatcccgaggccgggacgccgggaggcagccgcccgaccctcccggcccccacccggccccgccgccacctcattgggctaaaaataagaacttccgtaaaagaagcgaaagaaaagtgaaagagccgcccctgcgttcccaccggccggtacctgttccaagatccattctcttctccttggtcccaaactcttcgcagaacgccaccaggggaagaccgggagagaagaaacacggggttagcgtctcgcgggaccccggccgcccgccctgcttgtcccccgccccgcaggagcggcccgtcccgggcgggcgccgaggccgcggcggagaaactttctcctccgcgccgcccgcttctcacgctcggccccgcacgcgcccgcgggtccgcgccgcctgagtttctccaactaaggcagcaactctcggccggcgcggccccggcttgggggccctggccgggggatccgcgaggcccaggggcgcccccgtcccgccgaccgcgccccgcgcccgggtcgccgcccgagaccgcggcccccgggcctcccccgcccgcgcccggtactcaccatagtcggagagtcgaaagccgaattcacttaaataatcaactttcataatacttaattaatgcctaattgcaactgattactccccgaataacaagttgttttaaagccctgatgtcattgctcctgccggtaacactcagggtaacagtttggcaggagggagcgggcgggcgggcgcggccgggggcgctgccaggcgccgcggtgattggcagggcggccgcggcgccgcctcctcggcccggcccgcgccggccccggcaggtgaaagagcagagcgcggccccgccgccgccgccgccgccgccgccgccgccgccgcccggtgcgcccgcccgccgcccgccgcccggtgcc

SEQ ID NO: 32867 - DNA, 312 bp, Homo sapiens
agtgagccaacatttcaccactgcacaccagcttgggcgacagagctagactccgtctaaaaaaaaaaatcatataatgaaatgtgtcaacactctgaagacctgcattcctcagtgagccagtattttccacataactgatgtgtgaggttacaaagtctcacatcagggaatgagtcattcaaagtgctcatagagcagcttgagcaacatagtgagatcccatctttacaaaataaataaataaataatttagctgggcgtggtggctcatgcctgtaatctcagcactttgggaggccgaagcaggag

SEQ ID NO: 32868 - DNA, 921 bp, Homo sapiens
gacccctctgctgctggggggtggggtggggtgggggtttaaggggaaggagtgattacccggtattggagatcacctgcccccccgggagcccacagcgcgtggggcgcccccaccctatttgcaaagtcctgtgctcgcgcctggcacctccctctcttctcccctaccccgccaccccctcagttggagtaagcgacccccaggaggagcagccctcccctcccccggagccgcgcgccgggcattcccctggccacggcaggcaacgcgccgccccgcgcccgggtgccagccctccgtgccccctgcctccgcacggccggagttgggtggcagccgccgatcgcaggctggctggctggctcgctcgctcgctcgctcgcccgctccctgctgcaagcggcagccccgggggtggggggggtgcaccgggacagggggagagacggggaggcgccccgggaggcccgcggagctgggggacgtgggggggccgcggcggagggagcgccgagtctcttacctgcacttggggcggctttgggtgactttccaagtccgggggaaaaatgtgtgtgtgtttgggatggagcgccgcgggcgcgcatgcgctgcccaaagttgccggatcccggatttttcgctcccagtctccgctctcgcccgctgtgattatggaattctccgcggccgggcgggcgagtgggtggcatgcaaaacccgggccggatcgcggggccgggctccgctccaccctcacacccccagacctgcccctcccggatccttcccacccaccgcccgggctgagctcagcgtgtgcgcgcggcgagtcgcacggcctgcggaggagcatctgagcgctcggcccccttttgcaggtccagaggcttctacacccccccccagctgagttga

SEQ ID NO: 32869 - DNA, 768 bp, Homo sapiens
gctgactcgatggaggacggacagacggacgctgcagcctccgccctccgctcggccagccccccgcctgagcccgcttcgaggccgggtgacccagcctcgcccccaccccgggacccctcccaacccccgccgcccccgcagccgctcgaggctgcgcgcccccgcctccccggatccgtcactcgcggagctgccacaatattgtgaaggctccgcgctcccgctccgcggcgcagcccgcagcccgcgcgggggccgtgagggaggcgcgggcgggcgggcgccggcgatgaataatgcatgaccaaggcgccccctaccggcggccgcgggcggcgcggggacggccccgccgcgcccgaacccggccggacccaggacccgcacgtgtccctgcccacccgggagggagctcctgcctctatccccgcctcaaccccgacccggccaggccctcctcccccaccctccacgtcaggggagcagcctcctactcacgccaagaccgaggaatgagtttggggaggcgggggaggctgcacagagcccaagccagagccccttcttgtgctcccgggttcgcggtgcagtggggaccaggacccccccattccgtctcaccctcaccccagggcttctggaccaggacttgcagcctcagagaaggacaggctcggaaggacagagcagagaaggagatttcattcgtttataaaaatgagtacaaacaatttcataagagtttccaagtttctgcagaatatt

SEQ ID NO: 32870 - DNA, 1466 bp, Homo sapiens
attaaatatgtgaatactcagaaagtacctggcacaaagtagccttatcattgctattatttagaacaaagttattgtttccaggtttggaggtgggctggcggagggaggagaagacgcactaggttgcctttcagaaaaggggtccaggccttatcctgcctcccaggtggactcggcccgggatcccgagccccgccccctccaggccccgccccgccccgccctcgctggccgagactctgtgctactctcgcgcgctttgaaagtgcgcgagctccgaccgagacctgggccggcggttggtcggccgaaaccatctgctacgttacgtggggggaggtcagctcctatacagccacacttttttcaatcttcagcttttcaggcctaggtcctggttttattttagctttcagagcttctctgtaggcttgaatttccaggaggcagcccgagtccctggggagagggtcatcgtggctctcgtcggtgccttccacctctggacaggcaaccggtgggagaggacgccggtgggcggggggaggaggcggccctagcgccattttgtgggagcgaagcggtggctgggctgcgcttgggtccgtcgctgcttcggtgtccctgtcgggcttcccagcagcggcctagcgggtgagtcgcggagccttctcactgaggacgccgtaggtgcctcggcttctgcattggggcggcccgaggcagacgcagcggcttcggaccctgccccgggaagtcagccgtgagaccgggcctagtcctgcccgagcgggctcgcgcgggagcgtcgttaggtcctggcacggggaggccggtggcgccgaaacggggggccgggcccgcggtgccgcgtagcctgaggcggaggttggccccggacccggacagtgccggagccttcggtactttgtacttcgagggacgctgccagcttgggcctggtgctcctgcgccccaccccgggccgcgccgagaaactcctccctcggctggcacgcgcgggcttctgggaggcgacggccggcaccgccaggacctgtcgccgcgggccttggggctcgggctcgcagagcccccggaagccccaaaatgaggaacagagggaaacttttctcctgttctttacacctggttcactgcccatattcagtcttcaggttcagctgatggatcgcttgcttaggaaaatcgactgggacctatcacgcccatgcctcagccagttaggctcctcctctgccttcaggattacttaacgactaacccgattgtcataaaatagctactgtttattgttcccttgcataccctagcttgtaaccagcaagccacgttggactcacagttacagtttcagtacctgacgcatcataagccttcagggaaagttttttgaatgaatgaactggcgaggcatcacattttgataggaaatcactacc

SEQ ID NO: 32871 - DNA, 2058 bp, Homo sapiens
gggatccagcctggactcctcccaggagatccatgacctcagagtggacctcagaggaggcctcgtcctgtctagggtgcgggactggtgccgggccaatcaccttacaggcctagggtcgctgcaagctcccagcagcgctgggagaaagatgcaaacatcacctctgttaaaccagtgggagtttcagtgtccggcccgaggtcacccagctaatgaggggagtcaatcaaacccagggggcggggctacagcgctgaacccttgcagcagcttcctaaggagcagagaaattgagccacttgccagaggtcacacagttggtctctgcagggactgggatctgaaatcaaacatcctggcagcgctcccgctggcagggccccactttgtcagctgtaaatggggccctcggcccctgcgtcgtttttgttttttgttttttgagacggagtctagctctgtcgcccaggctggagtgtagtggtgcaatctctgttcactgcagcctccacctcgcaggttcaagcaattctcctgcctcagcctccctagtagctgggattccaggtgcgcaccaccacgcccagctaatttttgtagttttagtggagatagagtttcaccgtgttgccctggctggccttgaactcctgacctcaaatgatcagccagcctcggcctcccaaagtgctggaattacaggcgtgagctgctgcgcccggccagtccctgcgtcacttgaggcgatgctgtcctcagatccctggctcagagttggcactcagcccatgtgaatggaggtcacggctgttttggtctttgcattgtggatgatgtcaggccagaggcctctcccctgccctgggaaaggtggggaaactgaaggcagggctgcctggcctaagacagagttacccccacagccagctgcgcagactgagatgttgcaggacccctcttggctcaccctcggctgcatagaaggcctcgaaccccgtgaacggcttctcgttggagtagtcggagcggaaggtaatgtccaggctggagcccagcgagtagaaagtgtccttgccaggggcccgctccgtgtctgtgctctcctgcccgcacagcgtggccagcaccttggcccccgagctcagctgtggggtcaggtgtcacagggagtgaaggcaagacccaggcctgatctccctcctggccaagcctggcccctgctcccaggtgtccctgaaccctggctactccttggggaccccccgaccctgagaaaccccagccctcccgtcctgacggcaccttgacgaagtcgtactcgcagaggtgggagagctccaggtcgaagtgggtgaagtagaggcgcaggcggtagccggggggtgcagtcagggtccagcgccgctcctggtcattggcatactcccctggaaagccgggggatgccaggcgcccgaacacaggttcaggccacttcgggcccaagggggtggccaccgagccacacagaaggcccaggagggtcagcagcctatgggcagggcaggggcggtgagggcccaggcctgtgctcccaccccacaccctgcagggaggctgtgggcgcccacctacctcatggtgtgcccgtccagctggcctggcctggtctgcagccctacgctggtctcacctttgatctgtttgtccagtgacctgcccctgcccccagcctccctgactctgggattctgggaatcgactccatgactccagcctgctcagagttccaggcaggcaggacaggctgctctgggagccaggagtcggacctaggtaacaacagcctggaaacaaatcctggctctgcccctcacccctcccttttttttggatcttgttctgttgccccggcttcagtgcagtgctgcaatcatagctcactgcagcctctacttcctgtgttcaagcaatcctcccacctcagcctcccaagtagctgggattacaggcgagcaccaccacacctggctaattttttatttttggtagggatggggtttctccatgttggtc

SEQ ID NO: 32872 - DNA, 2539 bp, Homo sapiens
ttcctactgaaccctccccgaccaggtgttttccagatggagaaacaggccctacctgccttgctcgggggtgtgcagccatttcagggcacagctggccgctgggagaaccaggactcaaacctggctctacgccggcactcacctcgtcgatctcacactggaccacggactccacggaggggtgcttcaccacctcccgcaggacacctccatctccgcccccgatgatcagcacctgggaggagggggcagtcaaggcaggggccctggcaggactgggagcccccaggcccctgaagcagaccccctgacccctcggacccacgggcctcatctttttctaccctcggaaacgctttcgtgccggtgtcccctttcctggaagttccttccagggctgccctaggattccgaggccgcgtcagtgtcggcccccacccctccgcgggacgcccctggcctcgctagcactttctctgacaaccatgcaggcagcatctgggaagagcccggagcacacctggggccgcccctcgtccggcactgttccaggggacactggggtacctttcgcgggttggggtggctgcagagaggcaggttggcgatcatctcctggtaggagaactcgtctctctccgtgcactggatgacaccgtccaacaccagcacgttgccataggtcttactgcgggcggagtgacagtcggggacctgggttctctggggtggggaaaacgtaccccaagccgccctgggtgaggagggtctccccatcccgcctaggggtcccagggatgaggagcgatggtgacacgtggcgaggaacggcaggcgggccgccgggtggaggccggggtgggacccggggtctcctcgggctctgacgtgtcctgagggctgacacgtggagcggggcgcagactccgactcccccacccaagaggccagcccgcagtcccagccccagcccagggaggcggtgtgaggggtggcgagggggccagggcaggacgaggtccagcccgcttgggtcccggcgtggagaggcccgtgaggcgggcagcaggcggcccgggctgagcctagggggcaggcgcctgcgggcagcggcggtacctgcggaagacgaggatgtcctggtagcgcgagcgccggtggtggagcagctgctccacctgcagtgacagggcctggccgggccacaggctgcaggtctcgcggaaccagccctcgcggatggcggcggggccggaggcggcggggccgtcggggccgggctccatggcgggcgggcgggcggcgcggggcgcgggcccgggactgcaggccgcgcggcgccgcagcacaacgggaccagctccgcccgccgcccgcgccgcaacctaacccgggcgcggggcggggcctgccggcgggggcggagcccgcgctcgccaatggcaaagcggcctcgcctggcgctcattggccaccggctcgcagagcggcgcagagtggctgtggcgcgccgtccgtcggcggcagcagggtagtgcggcccgctccaggggccacgtggggcccggccggggccgggcggccgggtcgggttccggggcgggctgggccggcggaaggggtccgggtccttcctccgccccaagcagccggggcggtgcaccaccggcccccgcttccttctcggggttgggaggcaccgagggcctcgaggggctgcgggactcgggcttggtgtggagggcaagagcgctgcgacgtgcggactggagagtcagcctttgggctggagacacgggagcgggtggctacagtggtttacgttgttgcacggggcgagtagaacgtatccttctttgcgtccaaaatctggttccttgttggatttgaacagattatgtggctcgtcggggcgaaccgagggtttttatttacttggaaagaatcatcacagcccgcgaattcacaagctggatttagccattttcccttagattctgcgccatgagcctataggctgttgaatacgagagaagtgcttttctaaacgagtttctaaatttaccagcagtgtccaggaagaggcccagaacatacatattcagcaccagaaaagactggcacgcaatttttcttgacaaactgggtcttgctctttgaagggtgggtgggaatgtgctgtttttatgagaatgtcaaagaacttctcagaatcacattaagcatgctaattaccaaatattaaatgctaattgttccacacgcagttcgaatgccaaggaaggaagatgaaactagtataagctactcttgacattatgtcagggatggttttgacacgttttgcagcctccacctggaggtggggaacgtttcctgtgtcgtccccagagcagagtaacagcgttgtttatgggtgagagcaagcctcaagcctaggcaacaatgtgccttgcttgcttttaagctccttctaaaggggaggtaaaccaagaccgctaaagaattgctaggtgcctgggcgtgatggttcacc

SEQ ID NO: 32873 - DNA, 1826 bp, Homo sapiens
ttaactgttgtgaggtaacgaaaaaaagccgtgaagtgacataaatgatggctgatcatgtgaaggcctaaaacgtcattgtgagttttgtgaataaacatttcccaagaaaaaagcagagaaaggaggtgggaaattaagtcacggaggggaacatggtagcttatgagcatgaccgccacacaaccaggaccacagttagtggtccaggaactattgagagccatgttaatgaatcaatagcattagctaacagcaaattagataagatacaacgttagtggaatttctgtaaatttatagggttaatttacaaattattttagtttcattgctttgtaagagctatgcacaccttaagcctagttgtacgtttgctcatatttaagctaagttatacaaagatcttaagtgaacgccctgtataccttccaggagttactaataaacgtgcaatggggctttaacaggtgacatttaactcagggttaaaaattatgtaggactggacttcagaaacagaggaagagaagggccatactggccgcgggaggagacaactccaggcaagtgtggggagcgcgaagaagccgagcccctgcggagagctggtcgggtggctagggcgtggcgagcgcgacgtcgcaagggctagggacgtctgggtggcaaggaagcctttcccaggatgcgagacggctttccacatttgggcctccatggacttaggctcgcaagcgggacgcccctcagtgtccgtttccgaggccccatccccggagggtgcaggagagtctgcgcccagcgcggacaggggccccgcgaccctcgctcgggctccactacggcgggcgggcattggctgcccagagggcccagtcggcttccggcggccgcgggcgactcctggtacccccgaggccccgcgaactcaccttcacaaagctgtcggcgtccgggaagcctggcagcaccatctctccgtcggatttggttgcgctggtcgccgacaggaccctgggctcccgggtactgggtggcgccattttttcagcctgcacggctcgtctcgcgagagcttgtcggccgaggagacgggacgcgtgcgcaccacgcatgcgccaggtcgaagcggcgggcggggcgtctgattatagtgtggggagcctgcgattggggtggggcgcctgcgattaggttgggaagcctgcgtttagggtggggcacctgcgattaggttgggaagcctgcgattaggttgggaagcctgcgattagggtggcactttcgagcgctctggtgtgaatttcacgttcttttacctcatattgtatcatcccaacaaccctgtgatctagggtgcggcctggaggacctgactatcacatatatttttgacacgaggtttgcccaatctggtttcgaactcttgggctcaagagatcctcccaccttagcctgcgaagtagcagggaccccaggcgagggccacgatccccgcttatcctcgtgtttatttaaaaatttaaaaaacaaacaaaccgggattaccgggagtggtggtgcgcatctgtagtcccagctgctcgggaggctgaggtgggatggttgcttgagccgaggaggtggaggctccactgcactccagccggggtgacaggatgaaaccctgtctcaaaaatttctttttaaggttatgtttttgaggctgggcgccgtgactcacacctgtaatcccagcactttaggaggccgaggcgggtggatcacctgaggtcgggagttggagaccagcctggccaacatggtgaaactctgtctatact

SEQ ID NO: 32874 - DNA, 666 bp, Homo sapiens
acgccaggagaacagcacatgggtgctcttgggctgctgaacctaggaaagcaagtggcagagactttgagagcagtatgctttggtggttgcctgggatccctactggaaaaggaaagagagatgtcagcaatcagccacccaagaagccttgaactcctccttgctgcagaagctgctgggatgacagggctggaatatgacttgccccaggtcagtggggacctcaccgggccatgagcttgtgcagttcctgcttatgctgctggtcctcagtagcgatggcatgctgggcctgttgctgcatggtctggacaaaatgctgcatgtgctggaaggcatcgatctgtaacaggacaaaggcacagagagccacttggcttgtggcccagcttcagaggaagggagctaccgttcatctgataggcatgagtcaacccctctccaaacagaataccctagagcacagaatgatgaccccataggacagaggaccagggcgtgatactgggagagactgggcttttcaaaaagattcatgacttattcaactcaagtcttggctctcctttgccaactataattaccagttttataagccttggcaaagtttcatgcctggctaccccaaataaaaattcctacaaagtaatttgaaacaactgc

SEQ ID NO: 32875 - DNA, 1939 bp, Homo sapiens
ggggtcacagtttgagaaccactggcttaaagcagaggcacagctcatctgcacagcatatttttgtagggatcctgactagaggtagaagagaaagctgcatgatctccaaatggtccttccaaccctatagttcaaaatttacagctggtgaacacaagcaacttggatgaatgcatccttcatgcaagctgtccctcctaactcagcctccctctattattttttcaggatcagctgattctgtgccacaggaccaaggatgtagtttttcttttcatctagagcaggaagcaagttcagtgctgaaatcccacaaattgttaccccaagagacaaagcagggagcaatgtaggaacagcaactcagaagggcaagccctagcagtgaacttcgcacggccttcaccatgcagctgtgtgggaacagctgtcagagcttggtcagtacacagacaagagcattgctcttccacaaacatttgttacaaaaaataatgcagaatataccgagtcctacctctcaagggcggttgggtgaggggcaaaaccaaataaataaaaaacatgagattgtttatggggcaacaactaggatatgtttttctgatacctttcactacacatagggaggactgggtaaaaggtgcaccctctgagactttgattttctcacctagcgttctggcaaaaaacgcagaaagtgcttgctttggcagcacatatactaaaattggaacgatacagagaagatagcatggtccctgaagatttaaaacaaataaaaagcttaggaagtattctttcatttggaatggctccatggctcctcttagggttgagggcctatgatctcactcccgaggaatctgttctcaatacctagctgtgtggggaacagtttgaggagggggttcactttagttcactttggctgcaggcgtggctgcctgcaccatagggctgggcagggcagggggtgcgggttgcctagctctcacagcctcctggaggcagataagaatggggaaatgggaagggtctcagctcactgttaactccagatcattcttcatgtcacctctgatgaacatctgcctcaggcatattcaggatatacgcacacaaaagaaatttagaaattgcactctaaacagaattgactgaataaaccgtatcagaaacctgcatatgatcaggaaaaatattctgcttctttcgactcgttttaaaacctcttttagtctcccacattcttaaatcctttggtcagcattactagccacttacgctttatgggtaactataaaacgggaaagaacccaagaggtcagaggtatttgggactgagaacggcaacatcaggagatcgatatcactcagctcggttttctcaacttctgtgagcctcagtttcttcaactataacacaaaggaattggaggaaaccacatctcaagtctcttccaatgtatccaatctgctcctactaacccagctaggaaaagtggtcatctttaatgtgaaaggagaggagtggaaggggaaggggccaggagaggtttcaagagggaagaaacagtggagaggatttcaaaagtagaaaaagaggcagaagaagagggcaattcaaagaatggaacgaatgaatgtaggacttggagaagagtgaataatttggccagagctcagattatgagagaagggttcacagagaaatgtgctgaagaagcgggctggtgccataataggaaagactttgaatgccaggctgtgatatttatatgtaaatccaatggcaacagtgaaacattgcagtattttaggaattgattagagttgaattttaagaacacttccatctcgttttatctttctcataacaagatatgattgtatgacagctgatatgaaactagaaaaattgtttttgaaataa

SEQ ID NO: 32876 - DNA, 2389 bp, Homo sapiens
ccttgttggtgtccattttcttgtcataggccacaagggcatcctcccactcgtgcagtttctcataccaggtagcctggatctcctgttacatgggaaagaaagactgctgtgaggtacacagaagaagggatcacattgtttaatccacatactctctttcctaatgtgctgctgtacgcatgacacttcacctatcacagttacgtctgggcttggattaaaaacaacttcagacaatctggaggagtgctgcttggggaaggtggaaatactggttccttggcacatggatggaatgatcctgggattatctgagagcagacgtcaggccatactcctcccccattatttccttcccagacacatgggtcatcagaacacaccaggatgtgcggacacgaggacaggggaaatcatttagggatagaagaaaacgtcgaccagagcaccagagctgtttcaaaggtgccatcgctccgatctgctggagtgctgacactgggctacttgacagggatggcagctgctttcctgatggggccagaaagaccaggcctcatctgcatgtttgctggaggaaaacaactcactttttaaaacctcttgattctctgcatttcttaacacatttttaaactttcaggaaataataatttaaaatataacaccaccacttaaaattttttggaaagtctttcccctattcttctagagtctcccatccaatgttccctcctgctcagtgcttggcaggtttaccagtgtcaggggccaaaggagggattgcattaccctagcagatggtgtgccacgctgaaagagggtgttgtccacgtgagtaggaggtgctacagtctgaaagttacagactatgactctccaaatgatcaggagactgttttatatgctttctgtctgccctccatctcagtttctctcctgggctacttcatcatcagctcaataaatgactatttttgcacaggcaagggtagtggctctctagggatttctttaacaacaatatgattctgcagtgaaatttgtatgatataatgcagggcccacactagtttctcccattaccctcttcccctttctaaataaaactgatgtttgtgcagtatgtagactaacaactactctgctaagctgtctaaaataatcttttcttcttgaacctctgaaaagaggtcatttatgctggagattgttcccttgtacctactttccctggtctggttctttctggcagagccggtgccctctgctgcccctagactaattctgctgccataaagtctttgcccaacatcagtggagtttgtcaaaatgagcgtatctggctccacgtaaggcaaactatctcaacttcatttttcaagcctgtccaaaataatatctattatgcctaaatacaaaataggaaacttagaaaagagtgactacaaaaactgtaaaatttaaaagcactggtagatttctcatttcaaatttctatactgggtggaaaagaaaaaaaaaagagctggtgactaatgtgtggcatacactcagcatgaacaagcagaggggagagggggcagcatatggagtgggtcagttagagggtaggatattttgaattgcaatagattgcagaaactataaggtttaagcaatgaatcacacaaaattctaatgagattgctgttacataaattttgctgagaaagcacaggctctgccaagaaaaagcaaaccattgtcaagcttaatatgattcagctacctaaatataacagaaaatccaccacgggtttagcaataatcctggagctaatggccacctttggaacctgaagatggagaaagtttcattgaaggctggcattctgagtatggggtataaaccatctgctggcagatcacctgaataccagatgtctgcggagtccttgtctcaatcagcactttctgggatctaagctctaaggatatcaaaggagagaacatcttgatctaggtggagtacatgaagtgccctctcgccctactttcttctctctgcaaacaaggattgtggcaaggatggatgagatacagttctttcactttgccatcatctggagaaatgctgtcttagtctagttacagataatatgtgctaaggccgggcatggtgactcacgcctgtaatcccagcactttgggaggccgaggtgggaggatcacctgaagttgggagtttgagactagcctgatcaacatggagaaaccctgtctctaataaaaacacaaaattagctgagcgtggtggtgcatgcctgtaatcccagcttcttgggaggctgaggcaggagaatcgcttgaacccaggagacagaggttgcagtgaaccaagatc

SEQ ID NO: 32877 - DNA, 836 bp, Homo sapiens
gagtccacagtaacttgacatggcagtgcctccttgagtggcccacttggttatcgccctcatccctcagtcttggtgccgcgtgacctctggggttcagagcaaagtgatgcaagcctcttccacacaaggcggcgcctgtcggaaagtcctcaggcagcaaggagcatctgcaggcacagctggggcaacgctcaggcttccccagcgctcccatcaggaatgtatgagaacacacccactggcttcccaaatggctgtggaccttctttctcctgtctatttctagtgcagaccacagtctgagtttcatttggttccctgtcaagtgagaattctctgaattcccctggcgccaggctggtgacacatgcatcacagctgatggggctgtggcaggtctgactgaagtggcctgaccagccacactgaggccaccctggacactgctttgggtcctaaccactgtatcaagcagtttctctcatggagtggtaactgcttgagattctcctgtcacttctcccagcactgaggcttagctctgtgcccaacgcaggattaacaaccaaatagtctgattccttctagggccaggaagatctggggttggctaggccttgatgtctttatcaggaagctaccttgggaatctgggaacaggagaatggtctggggaactcaagaatgaacagactaatgtagaagagaaaggacagcagggcagacagaagcaaaatgaaaacatctgaaaagtgacggggcagaaggttgggagggctgccggaatgcagacaggaggggaagtgaagggaaacaaagccagaatcagatga

SEQ ID NO: 32878 - DNA, 2003 bp, Homo sapiens
agtatgttcagcttatgctacaaaaccaatttctcaaaattcttatttttgaaagaatttgtaaggcacagaggaaaaacctgggaataattggttttgtaaagctttcaaatactccactgccaagaagaagactgcagaaagaaatgtcatcctttaggggagaagaaacttaagaatccctgctaagaaaactactccagtttgtgtgtatgtgtgtgcgtccgaaaggggggaaggtggctggcaagggatttctattctcaggaaagaaccagtgtatctttatatgatctgaggcccacaggccatctgctccagactgaattcaattaaacttaggatatctgaagtcaaatatcctaatggtgttgatagggcttaaggaagttaagattggatgggggaaacagggatggggctgggggagagggagagaagatgtaccccaacgatgtaaccaagctcagtttcggggactggatctctgagaggtgtccacagtggaggacaaggggctgacacggacgctagtgttccctggggcagagatacacaatttttatacgtggctcaaaagaaagggtggctgtgacaggcaaaagacccaaagggcaataccagagctgatgggccggccttcgggcggacgtaccgcgggccgaagggtccaggggtctcttgggggtcccggggaggtgggcgttgcctcgaggggtgggagtcaaggcctcagacggtgcccaggtcgtggggccggcaatgtggggaccccacgtcccagacgggcggcttcccctggcccccccacgggcaggctggccgtgggtctggacattacgccgccctagaggggtcgtgccaggccctagactcaccgcgcggcttcggccaaggcctcagctgccgccgccagcaccggtaccgccgcttcaggccccctgccccaccgcccgccttccccgctgtcctctaagccgggagcgagggaaggagggttcccagccctgaggaccaatcgacaggtatagggagaagatggactgaaaaacaggccaatagtaatgaagaagagaagcttcaggacccggcttctccagggggcggggactgttcaaatagacaaaccacgcggccagtggcaggtgaaaacaggcttgggtccactcgggagaaccaatcggtcgtgagttcacctcagtcacttccactcacacatccggtacggcgctgctaggattcccttctgcatccgggctgtgaactcaaggagtccggtgtctgggtatctccggatcgcagcgagagcggctagcagaggttcgcgacccctcccggtgtaattctgagaggagaatgtgagcgatgccggtgcccaggaattactgcatcaaaagacgtttcgggctagcgctctttatggatcctgtgatatctcttttgttacaattaataagcatttgaaaatgtttttaattagattctctaactttcccaaaattatccaactcaggatcactccagagaaaccatagccaagttttaaccaaaagagctagtcataaataaaaattttcaaagcaacattattttttaaaaatcctttcaaaaaatcaatagctggcccggcgcggtggctcacgcccataattccagcactttgggagaccgaggcaggcggatcaccgtaggtcaggagtcgagaccagcctggtcaacatggtgaaattcccccacccgcaccccccgtctctactgaaaatacaaaaattagctgggcatggtggctcacgcctgtaatcccagatactcgggaggctgaggcacgagtatcgcctgaacccgggaggtgaaggttgcatgcaccgagatcgtgccactgcactctagcctgggcaacagagcaagctccgtctcaatacatacatacacacacacacacacacacacacacacacacacacacacaaccaaagaaaataaataactgctggtcacggtgg

SEQ ID NO: 32879 - DNA, 1222 bp, Homo sapiens
tggttgcttgacattcctggggttagggggtgggggcctctcctgctctgctcatgcctgactagctatctactgtaacaggaggagaccttcaaatccatctccccaaggaattctgagctgggtttgtttgtttgtttgtttgttttgttttttcttgagacagagtctcgctctgttgcccaggctggagtgcagtggcaggatctcagctcactgccacctctgcctcccaggttcaagcaattcttgtgcctcagccttttgagtagctgggattataggtgtgtgccaccatacccggctaatttttgtatttctagtagagacacggtttcaccgtgttggtcaggctggtctcaaactcctgacctcttgatctgcccacctcggcctcccaaagtgctgggattacaggagtgagccaccgtgcccggcctgagctggggtttttaaggggattgtagagggggagaggctggaaatttggtatcgtttatgggttggggtaaagggggtgaaatcatcaggatgtagaaactgcattctttggtgagttagctccctgtggggtctttcacaatggctgtcatcagtagtttcactgatatgcaggacctgaaagaatacctcaggtggaaaacaatgttttgcaagcttaagttgtctgatgacagggtccgcatgattctgggacagtaggcagcaaacaactatgaggaaatggctcagagttcaacatgacctcatgatgaatgctgaatgtgctgcaagctttgtttattttcatttctctccctcccttcctccctgatttattttattttattttgagatggagtctcactcggagtgcagtggtgtgatctcagttcaccgcaacctccacctcccgggttcaaacgattctcctgcctcagcctcccgagtggctgggattacaggtgtgcgccaccatgccagctaatttttgtactttttttttttttttgagaccaagtctcgctctgtagcccaggctagagtgcagtggcgtgatctcagctcactgcaacctctgcctcccaggttcaagcaattctcctgcctcagcctccagagtagctgggattacaggtgtgcacctcggcagagtagctgggattataggcgcaccccactgtacccggctaattttttgtatttttagtaaagacaaagtttcaccatgttggccaggctg

SEQ ID NO: 32880 - DNA, 1840 bp, Homo sapiens
aagaggtgagcagtagcacatcatagagtatttccacggtgcagatatgatagacgtcagaatgtatgcacacagcaggcgctcaataaatgcttgtagcatgaataaattaatgaatcctacttcgtgaatgaaagtgcgcccggtaagtcctaaagcaacacgccttcgagttcttatgatgctaagagaggctgattgcagttagtctggaagtagctgcggggcgcagtgcaggcaggaaaagggctggatgccgggtcaccgcccggccccagctcctggcccgtccccgctcccggtccattcccgccccggccccgccccctcccgccccaccaccggtctggccccgcccctcagccccgccccacccctcaccgcccttctccccgcctctgaccccgcccctcctctgactcggccctgcccgccccgcctctgaccaggcccccgccccccacccctcaccgcccttctccccgcctctggctcggccccgccccctcccgccctccagcccaccctccggtccagcccgcgccgccggcacctgtttccgggcgggcctccagaggccggcgcacaagatggcggctctggcggcctaaagaaggcggccgcggctcagccgtgggctctaacgcggggctgggggccggagacagacttcgcccaggtgacgggtagtaggggcggcgccgcttggcctcgtggggtgtaagacccacttgctgttgcccccggaccttgccgccacaccagccctgtcctggggcggaaccgaaggaaggtcgggccctgctgccccgccccgtccttcctccttcccgggcggtcactgtgcgtggctcacttttagagtttacttcaaccacgtggagcttccatggcggcctctcaggtcctgggggagaagattaacatcctgtcgggagagactgtcaaagctggggacagggacccgctggggaacgactgtcccgagcaagataggctcccccagcgctcctggaggcagaagtgtgcctcctacgtgttggccctgaggccctggagcttcagtgcctcactcacaccggtggccctgggcagtgcccttgcctacagatcccacggtgtcctggatcccaggctcttggtgggttgtgccgtggctgtcctggctgtgcacggggccggtaatttggtcaacacttactatgacttttccaagggcattgaccacaaaaagagtgatgacaggacacttgtggaccgaatcttggagccgcaggatgtcgtccggttcggagtcttcctctacacgttgggctgcgtctgtgccgcttgcctctactacctgtcccctctgaaactggagcacttggctcttatctactttggaggcctgtctggctcctttctctacacaggaggtaagatttggcctgtcctgtgtgctgcaggtcttagtcgcgtccactggaaaccgctgctttgtaaaggagttatagggatgtcaaaggtggctttctaatttaagccgctttaattgaagtctataattgtgggtgatgtgaattttttgaaacagtgatttgagaagatcctggtttgacttacggacgtagggcatgactgaaaattttatatggacatttatttttatttattttttatgtattcatttttgagacggagtctcgctctgtcgcccaggctggagtgcagtggtgcgatctcggcccactgcagcctctgcctcccgtgttcaagcgattctcctgcctcagcctcccgagtagctgggactacaggtgcacgccaccacgcctggctgatttttgtatttttatta

SEQ ID NO: 32881 - DNA, 2645 bp, Homo sapiens
acaaataatatttattgagagcccactttgtggcaagcactgtgctaggtgcagggaatcagcagtgggtccagtccaagctcacgccctcacggatctacattctagaagccggctacctaagcaaacctatgccaacaaaacttctctctccctgctcaggggctgggatcggagcaagggatgggaggaggatgtgtggcttggggaaggtgaggacgctatggactaagttaaggcctatctaccctcgacctttgcccctccaggcagctgggggagagtggaggcagggtcgctcagggttctacccacacgctgctgttggtcacccgggccccgaaccagcccttccagtagacggagtcctgccccccgtgctcgaagcggacgaagcggacgcccggcccgtagtcggtgaaggtgtgggagatctgggggtggaggtaacaagagtcagcctcggaggtcctgaggcctctcctgccgccccaccccggtacaccgaccgacctgcagctcccccactcggtttctccgcggtattcagaactctctccaccacccggtgactatctcagcccagcccagcccagcccaccccagcccaggagcgctgtgggcggggtctcctcgagccacgcccctcatgtccgtgccccacccctccgccctgggtcccccaggctcacctccatccagcccccgccgtcactgtcttggggcactgccacctgcccgctgctgaactcagccagcacgttctcgtgctcggacagtagcttaacggtgagctcgtagaggcaaccagcgtcgctgcggcccgagtacctgctcagagggagggagcgaggtggggggcgggaggtggggtgggggcatggcctcagccctgctgaacacgtcctggggatggggatttccacaaaagtcctcctgtgcgcccaacatccctgtcagccagcactgccagtgttcccagtttacagataagggaaacgaggccagcaagagaaagtgacagcccacgagcgaaacacgaggactacattccaagttggccagaccccagcttggggccaaagccagtccacagagtggcctttggtttggaccgcagactgattttgaaatatatacattacatatatacaaacatatatatgtgcatatatttgccaacatttaaaactcaggaggggaggtgggtttccaggttctcctgcaaacacggaagttgtcaacctttgcagacccgtggcccacgtggcctcaacccctgcagtggggaggcagcacccccaggcggggggttccccagctggctctcccctctgccttaccccgctcctcccagccccatgccaccccaggaccctctcaccagtccttcaccacgatggccggctgagtcgtgtccagcagctcctcccagtagccctcagcctgcaggtcaatgacctgtgctttgcgacaccacctgggagaactggagttaggacagagcgaacgctccccccttcccacctcctccacccccttctccttactcaaaggaggaggcgaagtacttcttgacgctctcatcgtgggtgaactccaccccactgtctccaggcagctcctccaccctccagccgtccccaccatgctccacgtcacaccagccttccaagtcctctgtagggacacgacagccccaccctggtcactcagtccctgctaaggctggctcttgccactatgtggtggggggcagggcaaaggtcgcacttggtgtcttggtgggcagatgatgaatgagagggtggaccagtgggcagtttctaaatctgcctcccgggaggtatgtcccccatcccgccctgccccagctggctgagggtgggaggacccgggagaccccagggcacaggtggccagagagctacagtaatagacagccttggggctacccagtgctggcactgagccaggcgcttaatcccatttctccctcaaagccaggcggcgccgtttcggcccatttcgcagcaggggaagctgagctcgcccagcgagggcctctcaccttccccacacgggttacgcagaaggttgcggcgccgcttgctcaggaagtagaactgctgccagtggtcgcgctcctcctccacgccgccctcgggcaccagcccctcctgctggcacttgagcagccacagcggggcgccgtccaccagctccttccagcgcaggcacaccaggcggcaggcctgcaccagctcggcggccggcagtgcggccagcacgcgcagcagcagcggctcgggcagctcgtccaggtacgcggcggcggccgccgcctcctcctcctgctggtcctccggccgctcctcctcagcactcgcctcctctggctgctcctccgggcttgcctcctcgggctggcccacgctctctgcaggcagggatgggtgggaggctgtgattcctccaccctgtactcctccaggccccaggactgcaatgtgcccgtaacctcccccacccaccgtgggacaatccacagctggggccggagattctgtgactccatactggtgcccaaggaggagggccacaaggccacagaccaaccccggatcagcccctaagtccaaaga

SEQ ID NO: 32882 - DNA, 1227 bp, Homo sapiens
gtgctctttggagaccgcctctagggcttcgctggcgtgaaagtttgccgcgccaggtctccgggtcccctcgctctctgacgcccctctgtgcagcgctcgcccgccgaccccatctcccctccccgccgcagcgagcggtccaggcgtcggctacctgggtcaccgtctccgtccatcgctgcggagggcggtcgcgagaggaggagccggagcgctgcgggctgcgcgagtcccggggcggcgagtcccggcgctgtccgcgtctgtgtcggtcccggcgaccgcgcctcttaaaggcccccgacccgacccgccccgccccgcctctggccccgcgcccggccgccccgcagtcccagcagtctgctcgaggcccggggctgcgggttcctcagcggaccgaggaggctgggaaaggtcaggagtcgttttttttccaactggggaggggtccgatttggggcatctcgcagctcgctcctgggggactgctgggaggaggcggctaggggaggcacggagaggctgggtcaggccgagggtgaggggcgggtggcccaggcggagtcggagtataggaggtgccttccgccccaccccccacaccaggtaattttcctacgacgcggtgggggtgcgtccctggcccagcgctgcgcggggcggggcgcggggcgcgggggcggggcctggcgggccggggcggggcctcgctttccaggcaagcgcaggtccaggcggtgcagcttgggcggcccaacggatcgtgccgcggcggccgagcgcaggtgaccggcaggagggggcgcggggggcgctggggagggggcgcggctgggcgggggctgccgggaaggctcctgggttccgggtcgcgccgcagttgccgagggaggcctggcaccgaccaggcccaggccgccgagcttgcccgggctgcgctgcgcggctgcgaacgggggctggggtcgccatcgatgtacaggggtccgagcccagactttggggggcattttaaggcacagcgtgggaaggggaggctgcaggcgcgctggcggacttggggctggcggagcccagccgcggggctgggggtgggagtgggggtggggagataggaagggcccttccctgtcgcccaccctcttgccactcccacctaggcaggagatcatgtcctctgagatcttgagaaggtggctggagccctttggacctccgcgg

SEQ ID NO: 32883 - DNA, 1422 bp, Homo sapiens
gaactcctgacctcaagcgatcctccccacctcggcctcccaaagtgctgggatcacaggcgttagccacctcctagcacctcaggttttttacctttgagtctatgaagcctgcggaggtcacgccctagggaaagaaggagcccactgggtgtcaggtcctgcctctagggaggggaccgcgggtcaagggtggagccctgggccgcataaggaaggaactagtgcggaggtccggggagcggccgcgcgttcgggagcttcggccctgcgtaggaggcgggtgcaggtgtgggtgctgagccgcccgccgcctggagggggagacagcttcaggacacgcaggccgcagcgagggcccgggccctggggatcccaggttcgtcttcccgcggcgagggttaggggccgggccgagagggacggcagcggggtccggggcgggggtggggaccgagcgcagcgcgtgacgcggcggcggggcccagcgacaacgaagccgaggccgtaggctcgggccgacctggagctccgccgctgcgcccaggtcgcgtccccggggggacgggcggcgggcgagtggggagccggggtctccggcgcctgggcgttcacggagcctgcgggcgctggtccgggcggccaggggtggggggcgcgggcggctgggcccggacttcgactgggggcctggccccggggccacccaggcggaggctctgcggccgcctccaccccggccacatcccgaggccggcgccgggttcggagaactgtcaagggacctccaggcccccacacgcctgcgagatccggcgcttgccttgccccagccacagtttctgtttccgagaaaccggtgaagtaacaatgccactagagcttgctgggagggtgggtgcggagaaggcgagcacgagacgccgggccgggcagttggggaccccgatcggtgtgagagggcttcctagggctggcatggacttccccaccacaaaatgcccagggccgggggggggaaggggcgcaagaaaatgcggactgggccagagaccagacttcggtcaccacggtgggaagctattggtgcctagatgcctctagcttggagcccagtgacttttatttcgtctagagtctagacagtgcctttagaagctgccagcatttatttatttatttatttatggcagagtcttgctctgtcacccaggctggagtgcagtggcatgatcacggctcactgcagcctcgacttcctgggctcaagcgttcctcctgcctcagcctcctgcatagctgggactacaggcacgggccaccaggcctagctaatttctttttttttttttttttttttttttttgagacggagtgtcgctctgtcgcccaggctggagtgcagtggcgcgatctcagctc

SEQ ID NO: 32884 - DNA, 871 bp, Homo sapiens
tcctgcctcccaagaaggtcactaacgccaaccaccctccctcccgccctcctgggactaagtggggagggctggactttggatttacacagggggtctcaccttggcttctgttcttcctagaggatatgtttgcatggcaaattgatttcaatggtggggaccgctggaaggtggagagcctccctggagcccacgggacagattttcctgaccccaaagtcaagaagtattttgtcacatcctacgagtaaggcaaactgaacctaccaggcttgcgtggaggggacagagggtcaggacacctttgccaagtctcaggcaaagtcttcctaagggaagtcctctctgcgaagctcgagggaggtggccccaaaacttgcccagagtcactgcttcctgaaatcactcagtgctgtgttaatggacagtgggggtggggatcactgaagcaggccaggagtccattgggcagttaagataagccagggctatctacaggcatctgtccgtaagctaggaacttgagtttacaaaagtgccctggaacaatgggcctttggactgggatcaaatgccgcccaggcacaagtgggtcaaactccctcctgcactggaggaaaagccagagtcagccccagccagtgcctgtcccgcagcggccaaggggtaccctaggtccccaaaccacctccctgggctcacaggggctgccaaggcctgggtgagggggggggccatgcagagcacacccaggtatgcaagcccccaactctgctccccagaatgtgcctcaagtcccagctggtggaccttgtagccgagggctactgggaggagctactagacacattccggccggacatcgtgg

SEQ ID NO: 32885 - DNA, 2469 bp, Homo sapiens
tcttccacgtaaagctgcatctgacggacacaagcaaacagccacagtcagcaagacagccagggcatccctgctggaggacacagaagcccctggtgggcagacctccaccacaggtggggcctcgtggccatagccatggtggagaagagtagagatgggaggagccctccaccaggcactcccccgttctctcccgcaagccctctagtaaggcctcagcaccgggcctcacttcgttaagcagcccctaaataaagcttcccgggtccccacgaagctcacctttaaaatgtccgacgtcatggtttttagtggtatcagccgggggtcatgcatgtggacatcctgctcatccgccaggatccaggggaaatcctagggaggagacaaaggtcaggggggtgacggggctgggccctggcctgccctcactttgctgtccctcccactccagaccaggggcctccaacctgagcctcagaatcactaggaagctgttggtgatgcagaccccaggaccgcccccatcccccacagaggccaagtccatagaacccaagtgacgaacaggctccaggcaccaacgctgaacctggtgggctaggacccctccctggagagcccccacttcagaagagccaggatgagctgggggccccagtaggtggctccacctgggctcctcactgccccaagtgcccagatggagcagtggacaggcctgaggacctgctgggtgccaggcgctgccacaccaatgtaatgggtggctggccacaggcagtgcccctgcccgcctggaactgcgacatcacgtttctagagcctgcgcccagacccagacccatctcatctcaccttgatgacctggatcttctccatgttgcgagtggcggcttctctcgtgtgcaccaggactgtgaaggtacagcctggagaggcaagaggttggtggaggctcccccaccgccctggtgccagccactgggcccagcctcttcccacttcccttgctggctcagcagcacccccagagcagatggcaaagcaagtgctaagaaaagccccagtcaatagggagatggaagccaggtagaatcaatcagggaagcttcccagaggaggtggactctcagggttaggaagagatgagtctcagaacagccaaacatggacctgggaacacagaccaacccgagataaccatggaaatgccaagggaagagagggtggggagtggacacacctggggggttgtggtccaggacggcatcgcacacgctgatcttcaggatgaaggcccggagcagctgctccacatgagacaacagcgagtctgagctgggagtgagaggaggtcttcccatcacactggcgccctcccctccaccacaggcatcaagcctggatgcagacctggggtacaagaccccctccagtgcctgtgagagtgctgcatgcctaggacccagctccctatccggtccacacaattaaaccagcaagggagtttaaaagaaatgcccagccccaccccagataaagtcagaattcggcggggggtaggggacaggggaggtaggggcagcctgaggaggcctccctaggtggttttaatgtgcagccaggacccagaaccaggacaccaagccaggaggggaaagggcttgcctaaggccacacaggccgtggggacaggttggtgccagattccagtgccctgacctcaccattggaagcatgcagttgaccaactaacgcatgtgccagaggtcaacttcgagttgactggacacttgcctggggagtcagaaaactgcttctgtgtcctgggctctgcccccacccaggtgaccctgggtagctcatgtcatctctctggacccatctcagctgctcacaggctgtccccttgtcatgctggtgcttcttgccctttctcctcccaggcctttaccaaggtattcaagggccgccttaaaggggtgggtgtgttgccagagacacacctgatgccagctagtgggcgaggggcaggggcagcccacctgatggacagcagtggaggctgggtgatctcaaagacgaatttctccactgggcggtgctctttatccaaaatcaccaccaccactttctccacatcattctgcaaagagaggaacccccactgcagagccaggcaccccaccccgactacaccaccctgcctccacccccttgcccaaggaaggaggagaaacggcccactcacagccctgctcagctgctaggctgggggtccccaagaggccagatagcgagtttgagaagccggcaccctccagcatgagtggtgtaggctgagagaatgcccgggccccatagggaaggtcccaggaagtctgagatcaggactagatggggaagaaaccctgaggggctcagctcagacagaacgtttagcgtggagaacaggggacggat

SEQ ID NO: 32886 - DNA, 1539 bp, Homo sapiens
agaggatgagatgcacagccacctccaggaactcgcagagcacatcggccaccactgcaggggggcacaagccggtggcgcgctcgaggaagcccgccggcccagacgcccccgcccccgggcccgcaggtccagcctccctaccttggccaaagttgaggtcttgtcgtgtgagcgtggtcatccttcccgctacctgagtgttggggcaagggcagagggtagttccagagacccaggagcccagaacccgctcgcttccaccgtctcttccctccccacagtctgtgggaactggggaaggacctcccgcttcgcacaggctcagggcagctggaagaacctccacccccacgctggcgtccgtgcttgggggcatcagcctctatccactggccgcccgcgccccctcgccccgctgtctcgcggggtggaaagaccacagctgtgcccccgaaaagggcagggccgcggacgcagagggaaacagcgggatgcccagggccgggagcgcaaagcgggacatgcggaaagcgaagcggggttggaataagactccgccccctgctacgccggatccctcccggcgggaatcccgccccctctcccctcccccagtaccggctctgcgctcggttcccgcccgagatcgggcccggccccgccgcggggagccaccgaccggaccgatcgcgcctcccgctcaacccggggcctcggcgccgctcggtgacgttcacggcgctccggtgggtcctagcgcccgccccgcccaggccacgcccattcccgcacggcccaaaccgggcctcgcagagggcggttccgcatgcgggggcgggtctccgaggggcgggggccgggcctcggcgtccgggaggggctgagacccgccgcgccacctcccttcaacttcgggtgggcgcgaagaaaacacaacgttgatctccacgttccattggatcgctacatatcttcccccgagggcatttctctcgctttagcaggcgccggaagagggctggggagggacgggggagcgcgcagctggggactaacggcagccacatctgagctagcccgagtcaccatccctgcagctgcccacgcaaaagcgaatcctctggctcgggggcgggaacaggggaggacaggattgtaccggttgtcaaggcccgggtgaaattttaaaaataaaaaaaagagggcgtgcaccggcgtcgcccctgctccgcccccaccgggtacctaaatgcagcctggcctgaccgcccaagaggatgaaccctccccgccctacgcttcataacaatagctgacctttttggagctccagccgagtgctgggcactgggctaagtgtgtccgtggattatctcagtcctgggagtaactccatgaggcagttactgtgactgttctctttatacagataagtcaagcgaggtgcagaagggtgaataacctgcccgagtctcccagctggtggggtgggcgatggccgaggtgcctcctgccactacattttactgctcccaa

SEQ ID NO: 32887 - DNA, 2682 bp, Homo sapiens
ctggacggtcccccagttgtcctggctgcaggcagtccgaacagtccgcttcctggaatattagccaggcaggatacgccctgggcgacagaaactccaactttcgccagcggcccccaagtactgcctgggcggtggcgggagtctggagcttggctgaaggcgcgagctgccgacgccgtctcctagcaaccaagcggcggtcacgtgacccgctccagcccgtttcacgtggtcttgagctgcgctggggttggagtggccgcaacgggcggggcggggcggggccgggcaagtttgttccccgagttcggagcctaggagccccccgcggctgcggcgcaggtgccctcggcctgagtcgggatggagctgcctgctgtgaacctgaaggtggcgacgggctggggggagggtcccctttgcgggaggaagtgggacatttgcattttcccggaaggtgggaggaaggaccggagttttggggaaagagggatggtagggaggaagggaaggtacagaccccacgcaagaaggagatgggcaggcaggccacagcagggagagtgatccaggcacaggccagcagggcgacactgaggggccgtgggaggtggcagcggagggcaagggccgccccctcccggactcagaccctcccagcgggcagcgccggtcccagcattgctgttgcctgcacgcccagaattcccctggaggaggaggaaggtgcgcgggaggggcttgtaggcggctcacctcccccgcgcggggtcagggactgggcttgccccccgggtcccagcaccgtttcaggagcctccttgtttgctaagtcgggttaaggaaatcagatgttcccaagcagttggttttataaagtttacacatccagcgcccttatttcataatcaagaagcgcgaactccaacagaaattacttaaaagcagaaaaccccaactttgtgcactggggaaaacactgcagggcttcctgtggtgtcttcatttcccgagccgtgagctcagtccgggtctgggtgccagcggctgttctttttctccccgcccagccccgccgcccacgtgtctgggctccatttgcattagaggggctaggggctgtagttttggtcaggaaggtgtggaccttggaccaaaccggccattttgggtcttagtgcagcctcctttgaggcaatatccaggaatgtcctcttactcatgaatgacagagcatttagctccctgttggtgtctgggactaaaggaacctgagaaatagatggttacaaaacaatggcttaatacactttattattacacaacatctgtgctatgacttgctataggcatgtttcccttcttaatcatacttgcttcagcaaaccttcctgaagcttccagtcaaaggtggtggggagacatggctggagcaagggaatgggcttggatggaacgttcagctgggaagaaatttacgtgacagcagccgaggcttgttggtatcaatatgcactctattccaggcaatgtggggttaacaccaactgccttttctctgatgagggatttgcttaaaataattgctgacagaggatcaggtgagggcagtgggagggacagagctctaatttatgggcttctgtggtgtgccaggttatttaatcaaggcagccttatgagaaagctgatatggtcatctttttacagatgagcaaacttcagcttagactgggtaaattgccaaggtcccacggggagtaagtggcaatatcaggatttgaacccatagggatcagactccagggccaggtcctttctggggtaccagcttagggctgactttaacgttggctgtttctgtcctttgggagggcttagtctctttggggctttttttgagcaactttttgggcctgacaggctaagagcatccacaggtatgagctatgctggctttcggtacccaggatgaaaaggctggtcctccccttgacttggcaaacgagaccccagtctccaagggtgttagccgctaccagtcagagacaacaaagtgctggaaggccctgaggggtcagggttgtcaggtcgtgtacaggagatccaggtgaatttgaatttcagatcaacaacgaacagttttttagtatgagtaagtctcaggcaatatgtgggacatattaacaaattattcatgatctgatattggaaattaactgggtgttctgtatttttgtttgctggatctggccaccctgtggagggcagctgttgactccttgcttataggcacttaggggatgttctgagttcagagcccttcaggaggtggggaactgctccctgtggcctgcactccctccccactccctcgttttgtatattccttgggcaagggctgagtgcctgcttctgcccagctcagccagagtgggcagtggtgccaggtgagaagaaacaactgccccaggccctttgcacaaagggcagctcctgaccaagccctgtccatgtctcttgaagccaggtcctgagctgcaagaatgacattgtgatgagcttagaaaggactggactagggtacagaggtcttgtgggaagaagaccttgggaggaggatctggtggtctaggaggtagtcgtgtagcatttgggttaaaaactcagtaatgagga

SEQ ID NO: 32888 - DNA, 927 bp, Homo sapiens
gtaatcccagcactttaagaggccgaggccagtggatcacctgaggtcaggagtttgagaccagcctggtcaacatggcgaaaccccatctctattaaaaatacaaaagttagccaggcgtggtggtgctcgcctgtaatcccagctacttgagaggctgaggcagaagaatggcttgaacctaggaggcagaggttgcagtgagccaagatcatgccactgcaccctggacaacagagcgagaatccatctcaaaaaaaaaaaaaaggaattctgtccttgaaagccacacacccacatggtccacatggaccctcagcctctttcagtgtacccctgcaacttcaggggaattcaattcaccgtgacctttcagaatgtgggggcactgctcacatgcctgccccacaacccccaggccctccctctccagcccatcctctggcctttggacttcagggcacagttcatatctcctggcagctctcccggggcaccctcctgggcctagatgagtcccaggtctgctgctatttggagtttggggaaatgatcttcccctgggctcagctttcttatctttataagtgagtgcaggcagaagtactggtgtggttgtaggggtggcctctggagtctgggatccctgagcctggggaccagctccacctctgatcagctgcttgggctcccagccaccccgggagcatgatgaggccagccagtgaagcaggtggagcactagctcggttagccagacgtggtggcacgcacctgtaatcccagctgctcgggaggctgaggcgggagaatcacttgaacccaggaggcagaggttgcagtgagctaagattgtcccactgcactccagcctgggtcacagagccagaccctgtctcaaaaaaaaaaaaaaaaaaaaaaaagcat

SEQ ID NO: 32889 - DNA, 484 bp, Homo sapiens
tggtagggagcacgaggccataggatcccacccatcaggctccctcttcccactcttaggtggcctgacaacagcgggcaccagaggcctgaccggctattctcactcctggatactctgttactctgtgattgggccaagtgctgggtgcagccagcaatcgatgcagtggtgtaggcaaggcagagggttatcaggccgcgactgcattcctgacggaactcctatgtcgaggtcaagaggtggaagaggtggctgcctgtgtgtggtgcccaggatgactcactacccacaatgcctactgacactactggcggggatgggatcctgcggatcctcagcgtggggcccaggaagaagtaaaggaccatttcaggaaccaagttcaggctaccaagtggcctccgggaaagccagaacccagagtgtaggggagtgctggctccacacctccccgcagcgccatgatgttcttcaggcccag

SEQ ID NO: 32890 - DNA, 3242 bp, Homo sapiens
tactctggaggctgaggcaggagaatcgcttgaacccggaaggcagaggttgcagtgaaccaagattgtgccatagcactccagcctgggcgacaaaagcaaaactccatctcaaaaaaaaaaacaaaaacaaaaaacagaaacaagtaatcagagccaccagggcacagacaggccaacagagggcatagggtcatctggcagtctggttaagaaaataagacaaacacttaaaaacaaacaaaacacttgcacagcaatgggcaaacacacagtagtgaatgggtgtgtggtgacatggcacaacagaggaaagcccaggtgaggttcatttctttcagactgtccaccactaaccctgtgtacctaaccatttggggtcttagactcttttgacaatctgattaaatgcactgctcccttcccctgaaatacacacacaggtgcacagactacacggggatacatccaaagacaaggagttgattccagactaagaaccctgggccaaagctttctccctctagggctgctctctttcattctgacctcaaactccagattctcagtggggatggctgtggggagtgaggaacgggggcgggggggaggagtaacagcaagagcagccagttggctttcctccagcgtttaagggcgcacctcgttaattgcttgctggaacagaacctagagtaggaggaagctgaaccacctgtaaaccctctgattttcaaagacttattgcattcctagtatatgccacgcatgtgccatatttgtaagccaactcccacgatttatccgttatcagctggactcccatagcaccctgggttgtaactgtgggtgaaaaggcctgtctcctttctctttccccagttccctgagacaggaccggtgtcctgcctggggtatccccagagtttggcacacggtgatagccaacattcactgagcgccaaagggccaggtgctgccactctctcaaaataagcctctgccacttactgaacaactagtctgcgccaagcactgggatactaagcctacgactcccagaaaggtcccggcggacccccgtgcgcagcgggacgcagtgggcgccagggaccgcagtgccccgggcccagcgctcttctccaggtgatcgccggggaggcaggtttaaaaggcaggagccggaagccgtctcggcgcccaggtggccgagaatccagtcaccaggtcactgagtcaccgatgggggcgaggacacgggcctgggccggtcagaggggcgggatcgtcacccctggctcaggggcccctccgtccaggcagggagccaaagtcagtcttcgcttgagggttggcggtcgctggaagtggtagccattgggagttacactaatcccgcgaagggtgcgcaagggaggcggcagccccccccaagaagagaggcaggccggcctccagcgctccccgcccacaagcacgtccttgcccccgggaggttgtttgccggctccaggatctccctcccggcgaccccggcctcgccgtcactcaccctccagtcccgggtgactcagaacgctcggccgccggccgcaccactgtggccgctgcaggggcggggaacgcagtgaaggggcgcggcgcaggtgtcaggttgctggagaggcgggcctacagggcggaaaccaccggcgcgggtgaccggaagccccgcccccaacatggccgtgcccacaggtctcgttggaggccgtgcctttatcgtcatgtgacgcgagtcctcgccccacccgtctgcagccactcctggtctcagtcccagagctcgagagggccacgtgaccgtcccggggccagtcacgtgaggcgcagatcctggctgggagggggttggtagaggggtccagagtggcagtaaaggaggaagatggcggggtgcagggggtctctgtgctgctgctgcaggtggtgctgctgctgcggtgagcgtgagacccgcacccccgaggagctggtaagaagccggcggagtcggcctggggagggggcggttgctaagggactgagagaggcgttgccgggggtggggccgggccaatctgggcccgcaggtggcagcgggtggggcctggggaccgcagccagggctctcgaagcgtctaccctgcttcacgtgcctaagtctggggtcttttctcataacccctcctggaatctgagggagaatccaggccagctccagtaaatcccacccatgtttccttttatttccatctgaaaagagtttggaatgaaacaagcgttttcagaatgagcttcctcacaggactttgtgcttatcatgctgctgttttagcttctccagtcctttctcactctatccctcaccctttctgggtcactgacagtccagcttccccctgcaaagcatcctgggaaaacttgagttgtgttcccagagttgacaagtcctttctgatttcagatacgtcacactgtcaaatggaacctgcatttttaccccccttttcagctggcgttggacatctttgaggtgtcctgaagaggagggtggttatttggagactatcagtggaaatgaagagctcagctgatggctgtagatcctcacccacatggtccctcacccctgaaaggttttttttgagggctggttcctatttgataatggctccagatgatttagaagctagccactgatttcagtaaatacttctgcctccttccactcctaaccactaaaaaaggctccctctgcggatctgtttttctagaccatccttggagaaacacaggaggaggaggatgagattcttccaaggaaagactatgaggtgagctcctttgatactgcttgggcaactaaagtagtgagtggcctggtcacttcaggccgaagcattatgattccaaccagagatgctctttgaccttctgtcccagggagtgagtgggtaagagaacttccttctaggaaagagactgtttagcaagcccttttctcaccttaaccccaaaacaaggtctggtgtttttacacgtttataaatctgtggcaccttaacctggatagagtatgtatttgccattaaactgtttgcttttacagcttacagagagacttagagtgaaaggcactggcaggcagtatgtgcccctaacaggtgtgtgcttataaactgttaaggaggccttgcttctcttctaggagagcttgcttt

SEQ ID NO: 32891 - DNA, 1577 bp, Homo sapiens
tcttgaactcctgaactcaagtgattcacctgcctcggcctcccaaagtgctgggattacatgcgtcagccactgcacccggcctcagtcttttcttctatgcggcacaaccctggcatgcatagtgcgtacttacacaggttttgttgcagtaggttaacttatgtcccttgaaatgtaattgccaactacactgacagagtcctaacatagtttatgacgtggctttggagttcccaacaacagtgacacgtgggaaccactgtaacgacctgtaacaaatgactcccataggtcactttgcaaggtggtgagtatgaggcatggcaggggtcataatctcaggagacttcaagggccccaccgcttgcacatctgtgaagcaggctggtcatgatgggagctgagcgctgagcatgtgccctgtggaaggacattttagttcagatgccagctggcccaagccctttttggagctaaccttgtccccttggcctccagtgtgtgagccctcgttagctgtttatcccaatcaagctgtgtctggctgtgcactatccaggcctccacattctgtgacaaactaacagggccggctcctgtcactcctgttctcgccagcgggttttaccctgaaggtgactcaggccttctctttgccctagatcgtggggatcatcacacggcacaacctcacctatgaatttctgcaggcccggctgaggcagcactaccagaccatctgacagcccagcccaccctctcctggtgctgcctggggaggcaaatcatgctcactccggcgggcacagctggctggggctgttccggggcatggaagattcccagtcacccactcactcagaaagccgggagtcatcggacaccttgctggtcagaggtcctgggggtggttttgaaccatcagagcttggacttttctgacttccccagcaaggatcttcccacttcctgctccctgtgttcccaccctccagtgttggcacaggcccacccctggctccaccagagccagaagcagaggtagaatcaggcgggccccgggctgcactccgagcagtgttcctggccatctttgctactttcctagagaacccggctgttgccttaaatgtgtgagagggacttggccaaggcaaaagctggggagatgccagtgacaacatacagttcatgactaggtttaggaattgggcactgagaaaattctcaatatttcagagagtccttcccttatttgggactcttaacacggtatcctcgctagttggttttaagggaaacactctgctcctgggtgtgagcagaggctctggtcttgccctgtggtttgactctccttagaaccaccgcccaccagaaacataaaggattaaaatcacactaataacccctggatggtcaatctgataataggatcagatttacgtctaccctaattcttaacattgcagctttctctccatctgcagattattcccagtctcccagtaacacgtttctacccagatcctttttcatttccttaagttttgatctccgtcttcctgatgaag

SEQ ID NO: 32892 - DNA, 1151 bp, Homo sapiens
tatttcttccttttattaagaaggaagccaattgtccaagtcaggagaatggtgtgatcacctgtcacagacactttgtcccctctccccgccccttcctggagctggcagagctaacgccctgcaggaggaccccggcctctcgagggctggatcagcagccgcctgccctgaggctgccccggtgaatgttattggaattcatccctcgtgcacatcctgttgtgtttaagtcaccagatattttgttcccatcagtttagcccagagatagacagtagaatgcaaatacctccctcccctaaactgactggacggctgccaaggaggccccaaacccaggccccatgcaaaggcacgtggtttccttttctcctctctctgcatctgcgctttccagataagcccaaagacagcaacttctccactcatgacaaatcaactgtgaccctcgctccttccatttctgtccattagaaaccagccttttcagcatctcacccattagcagccccatcacccagtgatcagtcgcctcagtaaagcagatctgtggatggggagcctacgggtggtaagaagtggtgttttgtgtttcatctccagcttggtgttccatggcccctaggcgaggtgatcagggagtggggccaatgggcccccggccctggctttgggaccttgtgctgagggatgatttgctcctgaccttgattaacttaacagttcccagctggaagggacactttcaggacccagtccactgtatggcatttgtgatgcagaattatgcactgacatgaccctgggtgacaggaaagcctttcgagaggcccaaggtggcctcgccagccctgcagtattgatgtgcagtattgcaccacagctctgcggaccttggccattgccgcagtcgcagcttccttttttctgtttgcactgtttgtttgtatgatgttagctaattccactgtgtatataaattgtattttttttaatttgtaaaatgctatttttatttgaacctttggaacttgggagttctcattgtaaccctaacatgtgagaataaaatgtcttctgtctcctctgtctcctttagccttttgtctccatgctgctttctttctttctttctttttttgagacag

SEQ ID NO: 32893 - DNA, 3009 bp, Homo sapiens
catcagaatcacacggaggatgagttcagactcagggggctgggcccaatccccaggcctgcagtaggtctggagtggctagaagtgtaagaatttttttttggagacacgctctcgttatgttgcccaggctggtcttgaacccctagttcaggcgatcagcctgcctcagccacccaaagtgctgggattacaagggtgagccacggagtccagccaagataattttttttttacttttttttttaagttcaaaaaaattctttacttattaggctaattgtgcaattaaaaaaaaaaaaaaattgcaaaaaccgcaattacttttgcaccgatctaatagctcgcccactgtaagtaaagcaggtaaagtcagcctttttcttctgggaccagactctgctctgccccgcggtggtggcctcaggcgcagcgctaaaacgcatgaaccatttaaggtatttcctgaaactggagcgtgattggtgagactttatttgcatacccacaatgcattgcgcactaaataatgttcgtctttaaaattatttcccctttttccttcaacatatctttctcggaaccgagattgctgtcccagaattgtctgaagaaaaaggctgaagtcaatagctcttttgggccgaaggaaagttaccattacccgtttaggagtagccgttacctgagaactgtagtgtcgacgactgatgttatactctggtttctcttcaaatcgtataaatctttcgccttttactaaagatttccgtggagagaaacgagtgtgagtctgaaaccaattttttgaggccttgcgtttcttagcagggcttattttaagtgttttaaaaacagatgcgattccgttaaatcgcgtgtggagctatgtaaagtgtattatagaacaaatgcgagttacggtttttcagcttttcgctttgttaaggtatgtgatatcaattgtattgcatttctgagcagttataatattaagatgttggggtggcttactgcttttgaccaagaagtagggtttgttggttgattacaccagtggtttttaaccccagccactgagtgatggagggttaccgactcacaagcgagcattaacgcctgaggtccgcctgctgtcagggcagcaaggcatcagattctcctaggagcgggaaccctattgtgaactgcgtatacgaggtatctaggtgcgtgctccttttaagaatctaatggctgatgacgaggggcacagtttcaacctggaactgtccacaccccctacccaccttcccccgcccttggaaaaactgccttccatgaactgggtcccttgtgccagaaaggttggggaccgctggactatccgatcaaatgaagcagggactcggggcgagctcccccgctgctcccgccggcttctccgtgtagaatcgaagaaggcagtcccaagggctcttctgccccgtatccccgcctgaggagcgtgccaggcgcgcagctagtcctcccccgacccaaccggtttgatgaaacgcaagagaaagtgaattttccagccactcccattggccagaattcgtctcagccgcaagggaggctgggaagtgcagtcatgccttcaggtagccgtgagccctgctagcgataggagattctagagagaggttgagtactggggaggaaaaactagcagggtctgtcccagtaaaggagggaggaaatccatcgcaaaaaatcctgacccccaggccgggcgcggtggctcacgcctgtaatcccagcactttgggaggccgaggcgggcggatcacctgcggatcacctgaggtcaggagttcgagactggcctggccaacatggagaaaccccgtctctactaaaaatacaaaaattagccgggcaggagggcgcatgcctgtaatcacagccactcgggaggctgaggcaggagaatcgcttgaacctggaaggcggaggttgcagtgaaccgagatcgcgccactgcactcgatcctgagcgacagagcgagactctgtctcaaaaaaaaaaaaaaaaaaaaaaaaaaatctaccccgggctcaggccctgaagcagccgcccacagcccagccccgccgtgccccgccgtgccccgccgtgccccgccgtgccccgccatgcgactcaaagccccattcaagctacgtaggagggtaaattgtccttttcccccaaggccagctgctcctccagaagccagctctggtccttcagactcaaatactagggaacaatgttttctctgagttttgagtgtgtttcttgtttcagagtaaatacgaaccgtcgtaatggctaagggcatctacttttaaaacgctcaaataagccttgctaaaaaatgcaagacctctaaaaaattggtttaaaactcagaattattcctctccacggaaatctttagtaaaaggcgaaagatttatgcgatatgaagagaaactagagtaagaacttcgatgagtggcactcagttctcaggtaatggctactcccaacaggctaatggtaaatttctttctgcccaaaagagctattgacttctgcctttttcttcagacaattctggaacagcaatctcagtttcaggaaagatagattgaaggaaaaaggggactagtaattttaaagacgaaaattatttggtgcacaatgcattgtgggtatgcaaataaagtctcagcaatcaagctccaattttgacaaactggtgaagccttagggactcctcaaaaaaaggttttctgttgcttttgttttgtcttaaatttctgatttttaatgtttgtgggtacatagcatgtgtatgtatgggttacatgacaagagaaaggttttgtttgtttgagatggagtcttgctcttgtcacccaggctggagtgctgtggtgcgatctcagctcactgcaacctccgcctcctgggttcaagcgattctcctgcctcagcttcccgagtagctgggatta

SEQ ID NO: 32894 - DNA, 911 bp, Homo sapiens
cattctagcctaaaaagatgccttattttaattttaattttcacttttctaatgtctgtcttcctcccaaccagaatttaagcaagcaccatgagaacaggaactctggttcccatctgcacccccccatgcatagaacagccctggcagaagcattcaatagatacttgctgaatgaactcaactctctgagcaaccaaacacaaaggttcagacaattggaaccctggaaaccaaaacccctctctcatccagaacaggattttcttttctttaacagtcaacgagaggagagttttcatcgggcgggagcatctcaacctgctaaaagggattctccaacctccctgtgaaccagttgcagccacaactgccaggacgcacctcagcctagcaggggttatgtcaagaagcccacgtctgtcaccaggccgactgcggtgctgagcaaagaatcaggggatccacctgctggtttcacctctgcaaactgactctaaaacacttcactctgctcacatcaggccccatctaccaaaacaagtaacagaaagaattgacctttacactcaattgtccactacagtctcataaaaaccttctgaggtaggcgttattgttattaaatacaggcccagagagattaggcgacgaatccaaaggtcgcacagacactaagcagttgagcagattcaaccactggtgaaacgccaagcccaagtttcaaccaccccaccatcaccttcagtgtcacctctgcagacttgggagggacatatctagggtggaccaagcgctggccaggactcacctgggctgaagagctgagcccagaggagctggtggtcttgaagcagctccgccgctggcatgtccaagagctccagcatttccttccgtgccaagtcctg

SEQ ID NO: 32895 - DNA, 996 bp, Homo sapiens
aggttgcagtgagccgagatcgcgccactgcactccagcctgggcaacagagcgagactccgtctaaaaaaataaaaaataaaataaaaactaaccaccagaaactagacttccccaaaaatattttgttaacagacctgtctagctgcatgcacaccacacgtggacacaaatccagccaagggccatcaatgtctccactacaccaaatcgtcttcttgatgtcagtcctaagttttaacttattaaataacataagacactaacgtctcatactttgaaaatggctttaaattgtgaatcatcgatgcaaaagataaatattgctttgtattttgggaaaaaaattcaatataagcacagaggcagacaatgggtgattgtttccactttggtttcagtacattccaaagccagacagtgcttcccagttgttggaaattaaacggtcatttgaggtggcctctggtgggctgtgagcagacacagaaatgtttgctgaggccagtgccctttagaaggaactgtccaggtggtcctacagtctgcttaccatttttattttttttattttttttatttttttttattttttatttttttgagacagagtcacactttgtcccccaggctaaagggcagtggtgcaatctcagctcactgcaacctctgcctcctaggttcaagcagttgtcatgcctcagcctcccaagaagctaggattacagccaacacacctggctaatttttgtgtttttagtagagaccaggtttcacaacattggccagcatggtctcaaactcctgacctcagatgatccaactgcctcagcctcccaaagtgctgggattacaggcgtgagccactgcgcctgccttatttatttatttatttattgagacggagtttcactcttgttgcccaggctggagtatagtggcgcgatctcggctcaccacaacctccacctcctgggttcaagcagtcctcctgcc

SEQ ID NO: 32896 - DNA, 1528 bp, Homo sapiens
ggatggtggctcaggcctgtgatcccacctacttgggaggctgagatgggaggatcgcttgagcccgggaggtcgaggctgcagcaagcggtgatcacgccactgcactccagcctgggcaactgaaagcaaccttgtctcaaaaaaatgaaaaaaaaaaaacaaaaaacaaaaaaacctcagaagcaagactttccttggctcagaggtttgcctcccagggacacaaagggagatcaagtgattgccttttggggagagtggagacgggcttcctgcatttccagtgcctgggtgggccacgtaggggtgtccgtgtctctgaacgcatccgtgcccaccctcaccccttgggttttgggaaggactaatgaaatcatgaaaactgacttccttggggcttgacctggggctgctctaagtgcgctacaggtaacgccattaacccgtgcaagacccaatgaacagacgctatcataagccccacttttcaggcgagcaaacaggggctcgtggctatcgatgccatggagccttggcccagaacctggggtctagaaatcgtggcctctctctcctctcaccgccctctttctggtcggagtgaaccccccagagaagggagggagacggcagggcctgacggaagccccgggagctgcacagagaggcggagggagctgccctaataaggagaggcccggacttgggcatatctgcagaaaaacccttccccactaggcaggcgcgggggagggcgtggaggggcggggtggtgccgcccccggggcgggcccagtgcgtggcagcgggacctgcggccccgtcgcgaagtttccagccctgcgagcgccgccgggtcggccgatcgtcccccatacctcggccatgcggcccctgctgctactggccctgctgggctggctgctgctggccgaagcgaagggcgacgccaagccggagggtgagggagcgaaggccgggggcgggagcgcggatccgggcgggagggctggtgtcgggctgcctccctgggaacgacctgaatgggaggcctgggctggagagggagtctgggttccggctccttgtccacttaatcgctggtgacttgaacaaatcacttcccctcttggggctgcggttcctgcttcgggaaggaaagggtgacagctgagtcccattcagcacagaaaggctcaaataataatagttttcataataataaccgacaatggctattctgcccagtgctcactatgggccaggcatcagttaggcatgattgctaccctggtaagtgtttccttctattatccccgttttccagctgggcaaactgaggctccagagttcattcacttgcccaagatcatacaacttgtgggccttggaaccaggatttaccccacccacccaggtgtctggttccagagccaggaggcctcatgaccatgggaatgaggggtcttgagggggacaggggaggaatgggggtagaaggtgtggctcactttgtggataagtt

SEQ ID NO: 32897 - DNA, 2227 bp, Homo sapiens
ttttttttttcttttttgagacggagtctctgttgcccaggctggagtgcagtggcatgatctcggctcactgcaacctccaccgcccgtgttcaagcgattctcctgcctcttcctcccgagtgcactatcatgcctggctaatttttgtatttttagtacagacggggtttcaccatgttggccaggctggtcttgaactcccgatgcacccgcctcgccctcctaaaatgctggaattacaggcttgagccaccgcgcccggtcgatatttttttttcctaaaaattgagatagtttaacagccttttttgtcctaagtcttatagcgcatctccgtttgcactggctcaggactcgagagccacacgtggctagtgcctactgttctggcgcgctcaggcttggagccttctctgcggaggccaagtcctgcaagggatctgtttgctgcggtttcctagtagtgtctgccgcatcactggggcccggtgatctgggtaaccatgtgagcttgggtaacctctcctctccctctcctgggactgctgtggacgttaaatacagcggtggatgttagagacgcagttcagtcactggcattgattcgccgttgttgctgctcttctttcctcaaaggcgactgaagggcagcaggcccatgctcgcttctgtctgcccgatgagtcacttcaccctaggcctggccctctagagaacactcctctaagattacagaatgcaaatctggattccagagctggcagaggccccagggtcaggctctaggacaaccggcgaaaaagcgggaacctctactccacgcccttggtttttcgccccttgacagcttgaggctccgccccgctttgccccgcccccccagctccggccgacgcccaccggaactacagcccccatgatgcagtgggagtccgagcctctgcgtcgtccgcttgggacgcgccggcggaggagtggcgcgcggaggagtggcgcgctgagacgccgctcgaagcgccgagtcgcggggcagcagaggcgtaaggagtaggcggggcgagccggctgggctcagggtccaccagctcacccgggtcgaggggcaatctgaggcgactggtgacgcgcttatccacttccctcctcccgcctccccctggggtggcgctcgctggtgacgtagtgagtgtgatggccgccgcgaggccgggaaggtgaaggtgagagggcgagcaagccggggtggcggggactggcccggcccggcccggcgagtcctgagcagctcggcgtgggccgacgggattctggggccacgggggtctgggatgcagtcaagcggggtccccactctccggcctcgccgccgggccctccccggccctgagaggagggggcgggccacgggacctgggactggtcggtggggtcccctgtagcttctcatcgcccccgcctttccacccttcacggccatgttctacccctgccccttctctatttttcatcctgtcttcattttgccagcatttactcagcacctgataggtgtccacgttcaccgcgggagcgccctgccatccccactttgggcagttactgccttctcgttcagccctgtttacttatatgacttctcaccggactgtaaggccctggagggcaggactgtttcttatccatttctaacgtggcgcctgacacacacagagaaggcacacagaaaatgttgaataaatagctgttaagacgcacgaaggcagaactgcccgttaccccctctcgtaatccttcattgccctctttaaattctcaatcatctctctctcttctacccagaaaagggctctggttatctcttttctacccagaaaagggctctggttatccgcctctggtgtcccaaggtttggggcttgggggaggaaggcagctcaatgtagttaaaaaaggaaggaggccggtcgcagtggatcacacctgtaatcccagcactttgggaggctgaggcgggcggatcacctgaggtcaggagttggagaccagcctggccaacatggtgaaaccccgtctgtgctaaaaccaaaaactagccgggcttgctggcacacgcctgtaatcccatctactcaggaggctgaggcaggagaatcgcttgaacccgggaggcggaggttgagccgagatcgcgctgctgcactccaggagctttggagtcaaaggg

SEQ ID NO: 32898 - DNA, 3869 bp, Homo sapiens
gcaatgtccctgctcttctctcgatgcaactctatcgtcacagtcaagaaaaataagagacacatggctgaggtgaatgcatccccacttaagcactttgtcactgccaagaagaagatcaatggcatttttgagcagctgggggcctacatccaggagagcgccaccttccttgaaggtaagggggcaccggctcagccaggcccgctcttacctgtttagatatttagctagtgggatttgcgggtggggaggtatatctctgctcccagggaagtcataaccagatagccttagaaatgctctgctcttgaaatcatgtggaattggagtctggggagatgaggccaggaagacaagggaactgccatttagtaattactttaagaagtccacatgttttgtttcatttaatcatgaaagataggtgaatcttatccccatctacaaggcaagcaaattgaggtttgagagttgtccgataccttgtaagtaatagatcagggttttacccaggtgtctccaactccggagcccacgtgttttcctttgcctagttctggctgccattaataccaggcactgtttgggtgtcagtgatccctgaccagggcgccctttctttgatatttttagattggtgacagaactataggaaactcacgtcacctatgccttttctactagttactaatttgagcccaacctctagttccttgtctatcagcagagaaggactggttcccagggccccgctcgtctgagtgtcaactccagcactggcttcctcaggctccctctttagaaggacactttggcgccaggtcctgagattgtctgtggagacccagtaactgagtcttatctgcccttggtttcctcacttgtgaaagtggggctcaggtgtgaacagtggtttcagattctagtctgcagaaccctagaagttcagtggtggtgcttcgggggttggcccctggctcaggggggccaccttctttccattctgctttcaaatagagcagcttggcttctcgttgttttacatgccaggctgctacacgaggctccctttgaagaaagagactgtccaacttcatgccctcatctgtgccctgccctttgcgtggcgcttgatgccacagaaggtgtttcctaaatacttgttgaactaaaacaaatctgaattttaaagtagtatgattggtagttgaaataatcccaactcattgcctgtttatcagtggctatggtgtgccagccgtgtgccaggtgctgggcatgcagagatggggtagatcaggccgctcccctctgggagcccagactaaccctcttggaagctctgagtcacctactcagatgatgtggtggacaaacacatgcgtaatgcaggtgtttatgtgatgcatgctttgatttctctgtgtgtgaaaatatgaggcctcccctgttgtttaaatggaagggaaagagctggagtgatcctgagctgtgctgggtcagggaaagaatggttcctgcctgggcactgtttctaacgggcaggtaacaagagcttgttggcctgctggctctcgcttttaagtgtagtcacatgcttgagagccagcttcctccgagggacattccaaaggccatgcccaggtgcccatataagggaggaatattgatgcatctggggcagaggtgaccggtggacatagcgggaggggagatgggggtgttgttgacttggtcatttcctttcatggcgctggctgtgggggaaattcactgggcaggcccttgtcatgcttcagatgctttcggagtgttctcagggctggggcctgtcagcctcatagttcccaggagtgtgcagaggggctaaacacccgtctgtgttccagccagctgaagcacctgtctggtgcgagttctagacaggacagtggtgggatctcactcagttgctcctgtatggagtaatttgttggccatctgcctgttaagggcactgggaaaaagcagtgcagtgatccaaaggtctgctcacgtagcaaacatttgtgcacctgctgggtgctggggtcagatagtgtggccctcatgaggcagatgacacagacaggtgagctgtacagttaccttatggtgaggtgagagctgagatgggagaagtgcagggtgctggggcacacagagaaggggtccggggtcctgactcaggttagaggggtggtcagagaaggcttcctgggggcagtgctgtctaagctagaccggaggccaagtgagaatgagccacgctgccccaaggcagtgtagtgtgtcagttcttcagagagtggggagggggtttgggcagcagggaatggagccagagggccgaggaagctggtgagtttggggatatggtgagggagaccgtgaggcagcgggtggcaagaggccaacagggccagggcagggagggcctcaagaagtgacatagaggccgggcgcggtggctcacgcctgtgatcccagcactttgggaggccgaggcgggcggatcacgaggtcaggagatcgagaccatcccggctaaaacggtgaaaccctgtctctactaaaaatacaaaaaattagccgggcgtagtggcgggcgcctgtagtcccagctacttgggaggctgaggcaggagaatggcgtgaacccgggaggcggagcttgcagtgagcccagatcccgccactgcactccagcctgggcgacagagcgagactccgtctcaaaaaaaaaaaaaaaaaaaaaaaaaaaaagaagtgacatagagtggttaagagcctggactccagagccaggctgcctaattcaaatcatagctctgccttttactaactccggagccatgttaataaagaggaccaaaggagagaatgaatttgaaaagtgaaaggaacagtgcctggcatgtggtaagaacttcgtaaatatttgttaagaaaaaataaacaaggaaggcagttaacatttaagtattcatcttctaccagccgccattcacagcatttgtgtttcaattcgtttgatcctcacgatgttctcatgaagtagataatgtagttatctccgttttgtgcttaaggaaactaagacccagaaaggttcttttgcttgaggccacagagctagaaagtggtaagaaccagcttcagaaccaggcagtgttgctcctgagccatcttcttaaccaccacaccgtggggccaccatagaggatctggagctcagcctgtcggctgcagggtgccagaggtggactcgtttagggtaagcagggccggcgctctggcccttccagacttgggactgtggaactcctctgaccacgtggtgacccattttcaatccccacctccagacacgtacaggaatgcagaactggaccccgttaccacagaagaacaggttctggacgtcaaaggttacctatccaaagtgagaggcatcagtgaggtgctggctcggaggcacatgaaagtggctttttttggccggtaagtccttgaggcacccaccctttctttcttcctggctaggagggagggaggcactttgtgcaaggtcacagaacgttccaggcagggacatgcttcagaattcattgctttcctcttaatttatattttatttatttatttgatttttgagacagggttctctgtcacccaggctggaagctcattacagcctcgacctccctgggctcaggtgatcctcccacctgagcctcctgagcagctgggactgcaggtgcatgccatcaagcctgacttttttttttttattttctaattaaggttaaaggcatataatataaaatttaccaccttaaccattt

SEQ ID NO: 32899 - DNA, 1437 bp, Homo sapiens
aactcgggaggcagagattgtggtgagccgagatcgcgccactgcactccagcctgggcaacagagtgagactccgtctccaaaaaaaaaaaaaaaaagaaaagtatgaaacgatgagtacaatgagtagccagccgcctgccccacctaccccgccgttccggactgccgcctgcgccgagcctaggccgcccagcctgactgaaactgccgctgctgaactcagcgtatccagtcccgcagctgaccaatcggagctcgcccttccggggcccgccccattccaggaatcgacctccgcaccggcctcgaaaattgaccaatcggttgtgtagctccgctcttagtcccgcccccacgctgaaactgacacttcggatcgccgagtaacgctcaccagacgtcccggccctgcccctcacctgaccaatcaagacggccggccgaggcccctggaacggctcaggcggctgcggctgctacggcggcgcatgctaggggattctgccgggtgagtgctgggcggcaggactggggtggggcggaagggctcggcaggaggccccacgtgcattcccgcgaggggctcgggggccgcagtggaaaagaagggtaggctgcatctgcctctgcgggggtcccgcctcggcgtccgcccgctcgccctctgttacttctgcggccccggtgtttctggagcgtcgctttcccggtgtctccgctcagcttttccctttccaaagcgcggccggggccaggggagggcaaggcctgctgtgccctttgaccccgtgcgaaaacggcgaccctctgactataggggtgtggcccagagccacttggccagttaggggtgggggccgggatctttgtcctgcggatcaaacagttggcccctctggactgcatctccgtgccccccggccctgcggggtaatatacgtgtgtgggggaggttccggggtagtcggctactctgtgctccagaccttgcacccgatcctgaggatccttggaggtggggggcaagggctgggaggaggaggcggagttttcccaggctcccccacacttccagggaaaggctttccaagaaccctgaactcatggaccctggagtcaaattttggttcagatctagcctcttgctagctgtgtgacttggggcaagttgcttaacttccctgagctttggtttcttcatatgtaaaaagaaagtgaaggaggaagggagggcaggaaaggaggaagaatcccttttgaagcctgatttgtgttggactcaccagttataaagcaagcttgtccaaaccactgcccaggaggcggaggttgcagtgagccaagaaaaaaaggaagcatgcccttgccccagccattttggtaataatagacgtttattgaatgcttactgtataccactgtaagcactgtatt

SEQ ID NO: 32900 - DNA, 852 bp, Homo sapiens
cttattctgagatgttcccagcttaacttgtgtgctcctgccccggccctggaatcagctgcctctccaaggagcccggggtttgcatctcggggtacctgttgccaaagcctagctgaacctctgtgccaaattccccccttgggcctgttctgcttcccacagcactggggaatcacaggccagagaggggaggggactaaaagtggagaataacagggatggaagggaccgagagctttacatcgcatgtgagaacgcacgtgctccgtgagcgtgggcttcagagcagcctgtgacaccgtgcacttgtgcaagggggcctgctgctgcccagcatggtcctggacttgtgtccctgggggtaccagacaggcttacaagaagacagtggttattccaaaaggcaaggaaaccaacaaataagactagcagatagaatcaacatttttaggggaagagcagttatgaaatctgacctctgtacttggcaagatttgttctgggtctttatcaaaatcctcatgggttgtaacacggctcttgtcaatgtcagagccttccagattccgcctttttacctctgtgattttacacttgtttgggagagtcggtattgaactctgactttccattcagtgtgacggagtgcagagccatgttacttaccatcctgggcttttcctgaacctgctgtgtgctcaacagcatcctggacaccttctttttaaaatagtttaatttttaaaaattctaagtaggccaggtgtagtggctcacacctgtaatcccagcactttgggaggccaaggtgggtggatcacctgaggtcgagagttcaagaccagcctg

SEQ ID NO: 32901 - DNA, 1091 bp, Homo sapiens
cgaagtgctgcgggtccctccggagggacatctcactcgtggttctagcacattccagattgcaccacattactgttcgagggctttcctcaattaaagggtctagctgctgaggactagtggggcacagacttgctctcgtgggtcctgtgtctggtggacgggacagacggtggcgtcatcaaatcagtacacaaggtcattccagagtcagatcacgctgtgaaccacaaggagtctgagccaggtactgtggcagagtgggaggggagggccaccactagctaggtggtcagggcaagcctctttgagaaggtgccctttgaacttggcctgagtgatgtcacaagccagcgaggtctggaaggcagggagctgaagtgggcacactcctgcctcgagtttcaggaagaacacagtggtggaagaggcacggtgggcgagggaaaaaaggaggtgaggggggaaggcctggggaggagggcctggtgggccattgtgattaggcacctagattttatcataaaagtactggtctatgtttctttctgttttcttcctagtagaacaataaacatcctggtattatttcagcaatcagtgagaaaggccaaaccaggggcggcaaaggttgttttaacctattttggagggaagttggggaaacaggcagcagctgctggcagccaggaagcagttagatgggttttctcagaaagaactaagacagcattcctggtgatgattgtagctatgggtagggttaggagtctgccggtctagcttccccctttctctgggtatcttccagagagtaaaaaccaaactgaaaaaccctgggaagcctggaggcctttgtttgtgttttggtgtggtgattgttttcccggtcatgaggcagagggatcatttcagtatcacagggtcagcggtggcctgtgctttttaccctttagccctcatggaggcagtggccatttcatgacggtggcatggagctgtggcttccggctcgacaagctcccagctgcttggtcccaagcaaagcccttatgtgcgttcaatgtgggttttctggtctgcaaaatgga

SEQ ID NO: 32902 - DNA, 825 bp, Homo sapiens
gactgtggaagtccagtctgggcacgtatgccatgttcagtaaatgacagccatcaagagcagcatcttaagagctgagagttcgcctaggccgcattctttgtacatctgggcttcctaatagaaccctggacagtagataggctgggtggcagcactcccttttacaaactgaggctcggggagtgggggggagcgaagcaactggcccactgccacacagctgggaagtcccagagctggagttcaacccccaactttgtgattctaaatccctccccatgcccaggtggcctggctgcctctgtggtcaggggttgtgttcatatcgtggtcatcccctggcactatgccttctagataagtttcctttcatcttcaagtcaccacaactgagagatagaatagaggctgattttattcctccctttatgggaaggcagggacagttgcaagaggcagggtaacctgcccaaggtcaaactccaggctgggtgtggctttctgactgctctgaccggacaggaaggacacagagctaacccagccagggcctccttccttgacacagctttcctcaaaggtgtgtgtgattttttttttctttctttctttctttcttttttttttttttttttgagacagggtcttcctctgtcacccaggctggaatgcagtggcacaaatacagctcactgtagcctcaacttcctgggctcacgtgatcctcctgcttcagcctcccgagtagctgggatcacaggcacgtgccaccatgactggctaatttttttttttctttctttgtagagacaggtctctcta

SEQ ID NO: 32903 - DNA, 780 bp, Homo sapiens
ccaggaggcagaggttgcagtgagctgagatcacaccactgcactccagcctgggcaacagagcgggactccatctcaaaaaaaaaaaaaaatttatgtatatatatacacacacattttatatatatatatttgatatctgtgcagcttcttagctgctggggacccagcagagagcaaaacaaaacagacaagttccctgccttcatgggagaaacagatgataaacagatccaaagagaaattataacaactgctattaagaaaagtaaagtagctattttggttgggggcgggggggcgggggcggggtgccagggatgcctctctgaggatgtggcatttgagcagagactgataaggggaagtgagtcatgcaggtatctggaggaaaggtgatccaggcagagggaactgccagtgcgaaggcctcaaggtgggagaatgctttgtgtgttccagcaagggcggccgggccagcgggctcagggaggagtgagggcaaccctggctgttaccactggtcagttctgggtagtggaatatggattttttatatgatgctttaatttttttaatttctaaaaaaaaaaatctaaacaaagataatgtagggttaaaaaggttactgctgggaggctgggtgtagtggggcctgtaatcccagcacttttggaggcctaggtgggtggatcacttgagctcagaagtttgagactggcctgggcaacatagtgaaacccttctctactattaaaaataataagataaagtgtaact

SEQ ID NO: 32904 - DNA, 956 bp, Homo sapiens
cacacaacttcaggacaagaggggcacttggtctaatccagagatggcaaaggccaggtgtttgtgctgaggccaaccccttcccgcccagggcacaccgggctgctccatcctgcatcctttcctgcagagcccaggctcagagtccttctcaacacagagccctaggcagccatcaccaagtggagctgcatatggggggaaaccagcctgcttcccctgaaatccaactcctcatgtcacacatgaggatgctgaagcccagagaggggtaggcactagcccaaggtcacacaggaagggggctagaatggggattcctgagacttagctagtcccacttgctgggtttagaaaccaagggtcttctccagaaggtctgggactgattctggcgttgagtcctgggaagaggccactcagaacagggaggttttagtgaagcaaggggagaaggaggcctggaggctctcttggcttccttccccaaattgcctgtggtcctctttgagtactgggagagagggggtgctgcacccccaggccctcctcttctttggaaggagatggggacaagagctggtgtttctcggtgcccccagcccacagcatggtatggccagctcagcccaagatgtggccccagggaagggaggaggaccggtaggagggccagatgaagcaggcagttgtagagctgtggctaacaccaaatgctgcttcctgttcgtgattttaggacatgagtcatcaaggggctggcccggcacattcagggcgctgagataagcaggactgagggacaagaaaaggttacttgccctggctgtgggccagccttaagcagggaaggagtagggttcccgctgtccaagcaaccctgtaagatagattcccactgggaccctgaggccaggtcagaaggagttggctttgtggctggctctgaaagctca

SEQ ID NO: 32905 - DNA, 1490 bp, Homo sapiens
agctgtcagctttgggggatgtttttccaaattagtgcctcaccctcacgggacagggaagcctgtgggagctgggagggcaggtggaggccgggcaggtggaggccgggcaggtggagatggtgattcgaagaggaggggacgataggaggaggttgaggggtcacccgagtgctgggagtgacgctggaggtatcggcccagcgatgctggagtggtcgggtcggaggcccagcagcgtctggggaggggcgtgggggaggcgtgtccaaggccggctggccccgccccgccccgccgcctggcctctggcccgctggggcgcgggctttcgctttcagtcgagggctagcgagcgcagcggagcctggagagaaggcgctgggctgcgagggcgcgagggcgcgagggcagggggcaaccggaccccgcccgcacccatggcgcccgtcgccgtctgggccgcgctggccgtcggactggagctctgggctgcggcgcacgccttgcccgcccaggtgggtgactcgcgcggcccacgggggacagccgccccgcatgtccacccggctggtgcgcagccttcgggtgcccgggccgcgctctcccggggcgctgtcacgggctgggaggctgggagtcccagtcgccgccccccatccgcatcagacacgcgcgcctctggggacccgctggggactccgggcccggcacacgtgcgctcggggcacaactctggcccccgaagcccctcttacccgcgtcgtgacaggggcgcaccctggttcctccgcgagcgcaggccggggcatttggggctgagcagcgggtcctgggcagacccccgctagacccgggacccctcttccctcaccccggcgactgccgcgacagcccttccctcccacgcggtggagaaggggctgtgccggggcgctgccccactgcccacgccgggcaccctcttcaaaagacttccttttcctctgggcgacggttttccgatttcttagaaataccagggtcctgtgtctgaagagcaggaccaggtgtgtgtcaggtccactgagggcacagctggagggcgagctgcctgtctgcttcctccgatgcgtccgggggctactgcagagtctgttttctgcggcctctggggacagggcaagcgagggaggtctgggctggtaatcgagcaaggcaaatgaagtctccgggggccgcaggaaaatggagacagcagaaaccctagggctcctattcaatatgaacgtcactcccacagtagcaacgggcgtacaagggactgtgcaccctttgcctgtttttgactgtctcctggtctggtaacataggataaccccatttttgttttactgtctccatggtttggtaagataagataaaccattttttagagaaggaaaactgaggctcagagaacttgtatttcatggaagggtctggggggaactcttcctccaaagggggcc

SEQ ID NO: 32906 - DNA, 646 bp, Homo sapiens
tttgccctctgtctgaaatcccagtggggaccctgtgtgttgactgagggtgtggtctgttggtcaggcacgtcttcagagggcaatgggtaggtggccaggcaccctgaggcagggccattcattcattcattcattccccaaagttcatggacacacctagtccaagcccagcccagtgcctggctctggggacctcaagatgactccagctccaatcctctaggagctacactaccaataggtcacagacctcacagacctgggctctgtcccaactgcccttatgagcttagctgagctagtaagcctatgttctcatctgtggttgtggaaagtattccctgcctggcctttgtcacagagccatgggtgtgaaaggctgagaacctgccgggcattcttacgtcagaggtgaccctgccatcctggcacctggcacagtggctccccgtagcactgtccctccccacggctgggtgacgctttatggtccttactatgcaatgttttctggaggagtagcagggacggttgtgcgtgggaaggggaagagttttgccggagccatggcatgtatgttacacccgactctacaccaactcacttcttactttttttctgagatggagtcttgctctgttgc

SEQ ID NO: 32907 - DNA, 1111 bp, Homo sapiens
gtaatcccagcactttgggaggctgagggaggaggatcgcttaaggccaggagttcaagaccagtctggacaacatagcaagacccggtctctttctataaatgaaaaaataataataaagccatgaagatccccaaagaaggctgtgctaatggcggccggaagagcagagggcaccacagatgccgtgctttcagctttttccttctcctccaggcctcccttctttccttcctctctcgctatttataaataagagaaggcattgagggcccccacctcgggtacttgcagggccttggcctgggaacaggacaagcagcaagtcagttgacccggggttgctcaattccccaagagctgacgcaaactccagaatcagacctgccctggccacctggccctgccccttaccagctaagggctccagcagagtcctagtcttgagcgaatcttatacctgcagccctgtccaccagctgtgcttcctgagtcctccagggtgagggggcgtggggtcagaagagaggggacggtgtgcagggagggtggaacctgactgaccgggtcagccttactcttccagcggggtcttttcttcctggagctcggccctcggcagctctcagaagctcaccttcttgcaggctctcacagccgcatcgtcctctggctgggctgctcacagaccccggcccctgggttttgtccactcacccagactctgttttggggtcacattacccttccagtgttcctctgagcaaagtccctgtgagttagcccaaggtccctgtcaaggaggaccacatctggcctgttgcactcttctcctttgccccaccgaagcctctgtcacactgtcacagcagcgggcctgccatggtctccccatgtaaggcttcctgaggaacgggcctggtgccagcctgggggtgaactgccagccccaggagtcacaggtcagcttccccacacttaccctggaggcaggatggaggccccctcctttgcaaggcccacacgggccatctaacaccccactaaagccgggcagttcgctgccctggggtgtgttctcgccttgccagttcttggctaaaaccaaggc

SEQ ID NO: 32908 - DNA, 2975 bp, Homo sapiens
tgaacacgctgactgaatcaagtactatccaacttatttcctcattttaacatgtcaaagatcccctgtggggtgagtggggtgtgaattggagcctccccaatccaaggcacaggaactggaagcttctgtagccctgcatttcctagagaatgcttgccatgttttggggacctcctggggggcccctgtactgaccagaggccggctcccagggctgtggtttgggcccagccccctgctcctggggactgctgctgtggagggagtgaccttttgttctgctttgccaaggggctttctgttcctcattgtttagccatgacaaggctgtggatttttttttttttttctgtccaagagaataaacaggcctgagattgctcaagggagccgaccccctctgccagctactgggggctggaggctcacagagccagggaggaagtcctaccccctctgccggctaccgggggggctggagccacacagagccagggaggaagtccagggacggtcactcacagcaaagcctcagacaagagaggaacctggaggggaggaggtgggaggccaccactcagccggcctgggggccatgggagtccagctgcctgccgttagtggccaggagccctcgtccattgcggctcttgagagcccaaacttggccacggcagggctctttcccatcaggccctttgagccctgatgggaaacccttccccagccagggtgggatttcttgctgccgcctggagccgccctggccctgtggttctcaggccctggaggagtgaggggctcccctggttaccccaagggcactcgtggggatgaagcccgcgggatgcaggattcccacgagacctgtgctggccactgtgcggggtggggggctgccagggaagaggtgcagcccctgcctgcctcagggatgcgatctgagggaagaggcagctgtgtctgggaggccgttcggtcggagggggataggcacagcccctgcccttggggaagcgcccagcagcagccttcagggaaggcagtttgggggtttgccgagggccaggaagaccctctgccgcagttagtattcgatggaatggcttgtgcagagggagctgcagaagctgccatttctctgggttaggggctcccacagcctttggatgccgggtctcggccatgagccccctccgccacccctcccccaggtcaccttgctcaatccaggaggccggatgatcagagtgtgttctgcaaaggagcgtgagaatcactggggagatttcctttttctttttctttctctttttttaatggtacagcttcctgggcccacccctgagattctgcacttgtttggggagtgggtgttggcttcatgacaggcacccctgggtgctttggacacaggcagtgagctccccccacactgtgtgaacccctgagaaggcttctccttttgtctagggtgcctgggagtctgctccagcagcaaaccggggaggggaggggtactgggaccgagtgtgtgtggcagcaccgtgtccaggcaaactgaggctccagacgggggttacttcttcagaccctgttatgcagcatggttcccactgcccgtgcccagaattcaccatagctgatgggcctggggtgggcctccggggcaggccagggtggaaagtgcatctgtgtttgagctttgcggccctggcgctggagttagatccctacaggaaaggacattgtaacccagcccgtggttgagactagcagctgctgagcacctacgccctgctaggctgtggggcaacagcaaagggtaacccccagcctgcagcctcaggggggcttcccatctagcgaggggcccagggaggccatgaggagagccatgagggaggaaggtggggactctgggcctgagtgactccttcagggtggggtgcgggcagggagccttcaggagggagggtactgcctgagcagggctcttaagggacacgtggaatttgttacaggaagcaccaggccattccaggcatagaaatcagctggggtgcaaaggcctgggggtcagaagagtggcagattgctccatggcaggaagccccagctcctctgggtcgttcccgctgagggattccagctgttggcaccgaggggtgcagccagggcagggtggtgctgcctgccaggctgaggtgggagacagctgggtttctagccctgcttgtcactcgctataggtgcagccaaacgctcagcaggcccaaactctgggcagtcctgactcccaggcagtgctgtgaggaaggggaggaggaggcacactgaacccacctgctacgttggctggtggaaatttggccaggtctgcactggcccagcggtgctgggtgtcgtgactggtgtctgctctgactggcttgctgacagctgaagtccaggataggtccatggccacgttgtgctggtttgttaaatatttttagtatctcccctgctcctatatgttaggtactggagtccagagaggttaaggcacttgcctaaggccacacagccgctaagtggtggagtgaggatttgaaaccagttctttctgactccctgtatccttatctatggagaggccccatgactcgttcactaaaggttatggatctcgatcttgtactggccacatgactgcagctggcagtacagtggggagtgcgccagccctggctctgacctcctagaactgccctttgttcatttccaggtgacgcatctgtgggggcccctgaaggacttggggtgtgtgtgtacaccctctttgcttgtacagatgtgttcacacccatgtttgcctacatgtgaatgtctccattctgagcttgctctcagcctggtagaggtggctaattaatgcttgtccctgaaagcccggactgccaaccccagtctttcaggagagagggcag

SEQ ID NO: 32909 - DNA, 1206 bp, Homo sapiens
tgattggggctgggtaggtagtgatgctattcttattcggcagaggggaaaatgaggcacatgcaggttaagtgacttgctcaaggtcacacagcagagctgggctagaatcttggtctcggctcctggcccagtgctctttcccatgtgtctgaatctgcatcttgggcaggggtccctgggccccactcctggacccccggactgacccccaccccatcttgtgcttagcagattcttcccctggtggccatgggacccaggtcaatgtcacctgcatcgtgaacgtctgtagcagctctgaccacagctcacagtgctcctcccaagccagctccacaatgggagacacagattccagcccctcggagtccccgaaggacgagcaggtccccttctccaaggaggaatgtgcctttcggtcacagctggagacgccagagaccctgctggggagcaccgaagagaagcccctgccccttggagtgcctgatgctgggatgaagcccagttaaccaggccggtgtgggctgtgtcgtagccaaggtgggctgagccctggcaggatgaccctgcgaaggggccctggtccttccaggcccccaccactaggactctgaggctctttctgggccaagttcctctagtgccctccacagccgcagcctccctctgacctgcaggccaagagcagaggcagcgagttgtggaaagcctctgctgccatggcgtgtccctctcggaaggctggctgggcatggacgttcggggcatgctggggcaagtccctgactctctgtgacctgccccgcccagctgcacctgccagcctggcttctggagcccttgggttttttgtttgtttgtttgtttgtttgtttgtttctccccctgggctctgccccagctctggcttccagaaaaccccagcatccttttctgcagaggggctttctggagaggagggatgctgcctgagtcacccatgaagacaggacagtgcttcagcctgaggctgagactgcgggatggtcctggggctctgtgcagggaggaggtggcagccctgtagggaacggggtccttcaagttagctcaggaggcttggaaagcatcacctcaggccaggtgcagtggctcacgcctatgatcccagcactttgggaggctgaggcgggtggatcacctgaggttaggagttcgaga

SEQ ID NO: 32910 - DNA, 722 bp, Homo sapiens
agcacagtgaaagccctcatgagtacaaggcttgccacttctccagggggccatgactagggatggatttgaccccacagccatctgggctgagctgtttctcagccaccacatattcaaattcatctgcattgaacttggtaaagccccacttctttgagatgtggaccttctggtggccagggaacttaaacgtgaccctatgtagggccccaatcacatgctccttgttctgcagcttggtgtggatgaacatgatgacttggccaatgtgaaccctggccacggtgccctggggctttccaaaggcaacttgcatgcctgtctgaagcctacactggggacaatgccaaggtcaaagacattggaaagggctgtctccatagtcccttagagaaaaactcaggctgtctacacaacaaaggaagctgtttgcagccattacacatggggccctcagcagtttccagagtggccaaatcttcaatttttctagagatgtcctaaatacagattttcatgtgtaatctccagatttttctgttttcagtaattcaaatgagcttaaagcattgtgtgtgccaacagaaacatttctgcaggagttttggctacctgtctgcatcccctgtggtccagatgattccagaaactgatataggaggacaggtggggaggaacctgatgtggggagagtgtggagctgggctctgcaaatctgc

SEQ ID NO: 32911 - DNA, 2122 bp, Homo sapiens
gaagggcagggtctgaattaacaggcccctgtggctgcgaagtggggaacggactgtgggtgagtgggccagacggacggccaatcgcacctttcgcttggatggaaggcagggtggttgtaggtgggaagaatcctgggttcccatgctgtctgaaccagagtcatttgtggccctgccctcccctgggactcaatttccccacctataaaataagccccagtgtccgcgaaccctggaggggcccgcaccactgcaggagcggccgccggcgccagggggcgcctcctcgataactcggcgctcggctggccaggcaccggcgcgtcggccgctcgattggtcgggtcggggccggcctgagcgccgcgggcctgcgccattgaggagcggcggggaggaaacgccgcgcagcgccgggctggggcgggcggcccgggacaccgacaggtaggggccgagcggctccgtgccgggcggggccagggtcgggaactgcagggccggcgcggacccgcgggccgccgctagggctccgcctggacatgggggcccgggcccaccctggggagagcgatgctaggagcctgggggccccgtcgtccggcctcggtctgagcccctcggggtaaccctgggcgtctgctccccccgggccccaagcccgccacctccggggacccctgcgtccgagtccccgcgagctccccaagcacaggctcggggctggctgaacctctgggaaccccgacgtccgtgtcctggggagcccgagcccccgctggaccccggcacactttccggggtcccagcagcctggcgccctggaattggggggtgtcagtccgcgcctgtccgcctgagccttggtctcaatgcaggaccccagtgtgcgagccccccacattacgccgaagagtggggtgtcagttctctagaatgccttagccacctcccttaatcagccacccgaggtcacactctcgcgtggagacatcaggcctaaaacctctctttaccttttgccccccagggtcacgccctggcccagccactcctcctaggtgtgggatgccagacatcaggcctaaaacctctctttaccttttaccccccagggtcacgccctggcccagccactcctcctaggtatgggatcccggcgccgttccctccaggttttacttgggtggtggggtctctgtcccctggagggggctgagggttccgagagctgggggcgggagggttgtgggagcgtcgccttccgggcagtgccgttcctgtggggccaccggtcgcacagccgtccccgccccggttttggagctccctggcgccggcagcgttcagccctggccgcctcggggagggacgcccaggtccggttgccagtccttcctattcccggtctggccgctcctcaggggaggggcctggctcaaggtcatgcccggctgtctgcccgcccgtgggctcagcactgatccctactgtcacccgccccactgggtaggggagcccaggtgggggttagtgccagtgccaggcagctgcctagaagtcctgatggaccggagtgtaaacactttgggactctggccagtctggcggcccttgctgacactgaattccttcagggaatccttgaagtggcctcaagcacggtctagatgcttagcagagcaaataatgggtgctttctggtttgggcctcaatgttactgaccaggttgcctcacaatgctaatcactcatgcttttaaaatctgtgctttgcattcttttccgtttagggcaagtagggtagggcctgaacttgtttacaaactgacagttgtttcccttgatttggagataattggtaattggcactcagagttggcatttagggccgaaattagtggcaataactacaaaaataaagagtactctgaccttggcttcttgctcaaatttgtttggagtccccatagtaagattagtcagtttcacatttggttttcacaaatttactcctttcaagttataatagtggccgggcacggtggctcacgcctgtaatcccagcactttgggaggccaaagtgggcagatcgcttaaggtcaggatttcagacca

SEQ ID NO: 32912 - DNA, 1071 bp, Homo sapiens
ctcataggtacctttcttactgcattgatgtgttggggagaaatttggcatacgttgaatggttataaaatgaatattgttttttccatatctttaagaggagatgttttatcttcatagtagactatactttacttgaaagtatttacaaacacgaccctttgaagaaaattatgttgtcattgaatttaacgttgctaattatcttaagtctgtgctgactctaacttttgaaatctttttcagattggcagcccaagcagcagaacaaatattatacatccccaggtttatgtaagtatgattttcctgttgtcattgtgtttattgcgtatatacactgcacctgaatcatgtggatatacatttcttaatgatcagagaaactttatgacatatatgcgattgaaatttatctctgcccttttctattaatgattaccttccttttccaaaaacttgcaagaaaatgttttcacctagcttggtgtgtgagactaagtattacagggaaggagaaggaaaaggcaaatgtttggtccaaggtctccttttcattctaagttaaaatagaaatgaaccctggtatgaccatatgtgtttcatagttttgggtccaaaggtcatgaaagtaaataagaaggaaaaagtagcagtttatttcctctttggcttttgaaacatcatcacgaaatgacattaacaaacttattccaggcttttatttataatttcttctccctgatgattgtaggttttgaaacaaaatttcaggtaggcctgaacaatatcaaggtttgaaacaacatcaggatttcttttttttttttgagacggagtctcgctctgttgcccaggctggaatgcagtggtgccgtctcagctcactgcaacatccgccccccgggttcaagcaattctcttgcctcagcctcccaagtagctgggactacaggcacctgccaccacccccggctaatttgttgtatttttagtagagatggggtttcaccgtgttagccaggatggtctcgatctcctgacctcgtgatctgcctgcctcggcctccc

SEQ ID NO: 32913 - DNA, 3914 bp, Homo sapiens
taaatcaggtcttcaatcttgtctacctattaagttagctggcagttcatccacaaagattcatatagaagtacggagtcctcaggccatatttagtttgctttaacagggtgaatgaagtcaaagtagagaatcattgtcatatttgcaacacttgaaacaaagaggaatggtgatcatggttaacaatattgtatggtgtatttcataagagctagaagagaggatttttagtattctaattagaaacgatgaatgtttgagatgatgaaaatgctaaataccctaatttgatcatttcacaatgtgtatatgtattgagacatctcactgtacccccaaaatatgtacagttattattatgtgtcgattaaaaatttaatttttttttgagatggagtctcactctgtcacccagggttagaatatcaaaatatctaatttatatctaatcatatgggttaggatatctaacccatatgattatgcaatttaggctctctagtgtgattccaggccttctggtttgcttatattgatccctaccctagctagagagaaagagccattctaatgaagatttttgcagttagatacttagttattggtttttccaaaaggaatccaatttacttttgctgtgagctattttgacaaatagtgagaactctgaaagttaatagtttgtatcttctttaggggtatcactggagaatttccccctctgtaaagaattgctcattccacctggaacccaaaactatatggtgagaatgcgactctatgacgtcaaccgtcggcagctgaacctcaccatccggattgtgtgtcgagcagaaggatccttaaagatcttcatttctgctccatattggctgattaacaaaacaggtacatacaggggctgctcaagtaggtctttggcgttagtcatgggaattcagatttatttgcttagctaactaaatggagccaatgcaaatagattacttcaacagtctgagctgctgaaacattcctgcttccatcataaatgcttaatcatgctcaaaactgtctttttaggcaagaaactgagcccactaaatagattcagttttcactcttttcccgcttgatggttttattcattcaccatttgcatctctttcagatagactgggtggtattgatgtaaacttttctctccttcctaaagggttgccactgatcttcagacaggacaatgccaagacagatgctgcaggccagtttgaggagcatgagctggcccgtagcctgagtcctctcttattctgctatgctgacaaagagcagccaaacctgtgagtacagttatttatgggaaggggaaataagctcccagggaagggaagaaattagtaaaggctataatatatccgtgtaagtagaaatatactgtagataacaatcctgacttggcaggggaatagaaccatgacctaatgggatttttggggatctaatttctatgttatttgatactgaaaataaaccatttggttggtttataatgaaagctagttttattttacatgcattgaagtagttttcctattcataactctgccaacgaagagaaagccacgagttctccttctctgctctgcagtttttcttcccctgtaaacttggagcacaggcacaggagctgtcatcagaatggacataggctggttctttggtgaagccgtcagcctcattaatccaatccaggatttgtatcacatttggaaattcatcccttttacctttgaagtaaaatgtgccattttatggtctcagagcactcattgcatgtttaaaagcagggacaaaaaacaactgtgaggattagatgacatgtgcttttaatgtatggtaggagcattaattcacttttgttcttggttttgacattttgctttttacaagagtcttttaatagagctctaatcaaagataaatgggtgtatccaataatgctaaaatgccataccgtgttatcggtagaatcgtgctgacagcttaacagaaagtcttctggggtaccacacttcagtgggtactgatgtgtttacaagggaaggttggagtgtagattaccgtttgaggcatggaaagaggattgatgagagttctggatattgtaggggatgcagccagcctcttggcatgtgcagccagcccagtctcattcttctcctgaaatgatttggacagttttagatttaggacttgacatgtgtcacacagtgtgttttatctgtgaattccacagttcccaaagcatttcacatagaccatctcattggattcttcccaccatcccaatggtttaggcagggcaggaaatattgttatattttaagatgaggaaacaggctcagagagattgctacctgcccaagtttacatcgcttgttagtggtagagctggaacacacattcaggaattatgttgtcgaaatccatgacaggacactggcccactaaacagtgctttgctattgtaatagtatcaggccggctgggtacggtggctcatgcctgtaatcccagcactttgggagaccgaggcgtatcccaaggtcaggggtttgagaccagcctggccaacgtggtgaaaccccttctctactaaaaatgcaaaaattagccgggtgtggtggcgctcgcctgtagtcccagctacttgggaggctgaggcaggagaatcacttgaacctgggaggcgaggttgcagtgatcctagactgtaccattgcactccagcctgggcgacagagcaagattccacctcaaaaaaaaaaaaaaaagtatcagcccttagaagtaatgcatcatacctgtatcttctgtacatatgcttcttgtgctttttaaaatgaacccttgaaacagcagagtcaggaaaggattagtttgacttgaattctttatttttaggggaatattagaaattgcaccactttcctcatgtgttatattcatagaatcctaatgttttctcctaaagcatttagttgtagatgtcagtaaatttcacacactgttgtactgtggctgcctctaagatacagctttaaccactgatgaattttgtcactgtgctagggaatcacatgagagtgaggaagagagtcagtggtagagatggaacttgggtgataactgtattagtgtttcccaattagaacaggcagataagactttcttgtggatgaatatctacatctttgcttttctgccccacagctgcacgatgagaatcggaagggggattcatccagaaggcatgccgggctggtgtcagggcttctccctggatggtggtagtggtgtccgagctttgaaagtcatccagcaaggaaaccgcccagggctgatctataacattggtgggttacatttggggcagcgggacaatcagaaccattggctgatgacctcaggcttggaggaatgacctggccatgcattttggcctgactacaagtactgattttcttatttggcattgggtcaggtatctgttctctgaatgctacagtgatatcaacacagatctattctcctggggatctgaggagccacctaaacactgcccttttgaggtctgtggctctgtttaatttcagactcacctgtgtcaggaaagtatcagtttggcttgaatccttgtttttcgggggaataataggaacacttagcatgcctttcatcctccaagtattcccacgcattcattaaaatttgcaagccctaagagggtaagaagcattgttctccttgaaactgaaggagagaggttaagtgacctgcctagatgcaaaggggaagtctgggtcagaagtaggatcaggattgggggatacaaataaaatgcacttggtggttgtagtaattaaagc

SEQ ID NO: 32914 - DNA, 603 bp, Homo sapiens
gtgagctgtgtttaaaacaatcagggtgccatattttggtttcctttcaggtgcttgtgaggttagaaggtggaattgggttgtccttaattaataaagtcccagaagaactggtctttgcaagtcttacaggaatcaatgtgcactatacacagctggcaaccagtcacatgcttgaactcagcatacaggatgtacaggtaagggggaagttccaaagctgttagtcaccttgttttcatgctgatcacccaaccagatctaatgtttgatgttctaagaactttaatgttttggaggaaatatcttgtggccttcaaaaaatcattctgtgaaatagttgtttctacctacattcgtctcattaatttttctacatacagcagaattctgcatatattagaggtaactcagtcagggtgtcatggaggaaggtgacccatggttcaccatcttgccaatagaaaaaccaataggaagtcatctaaccatcattcggagggattgaggtctgtcatagggagaacaaactaaagaactggactttgctttcagtcaagatggagtaacagggactaaatttaccctcccacctgaaacaac

SEQ ID NO: 32915 - DNA, 836 bp, Homo sapiens
aatctcctggtttttaaacattggcaaccaattcaagttttttggtttttttaaaccttgtgggcctaacaaaacacatgtgtgggcctcatgtggccgtgtctgccaactcacagcttctaaaattgacacacaggtaatgagacagtagtctggtcaacatcagatcacatttgggtaagggtagggcaagggtgacagcattggggtggcaaactggggccaagccacagggagtgctggtggggacctggagcaggaatggctcttgcagccatctctggaagagtgcagcgtgcccttcactcactgccctgtctgcttcattcgctttaatttcatgtttcccaggagattaaagatacttatagttagcatgggagtgaggggaaaaccatgggaaaaccactatcttgttaatatccacaagtatccacttgacttgtgtgacctttggaatgggtttgtttgataaagtatatattcacccagagcacttggcacttgcccagcaaaccaatgtgaagcatttcctgagggttgaggacttcttgtttttaaaatcatcttactaagaaacacagacacctcactattcccttcaaattgctcccagcagaaaactccccagactgagaaaagcagtctgattttctgcagttgaagtagctccagccccccccagttacatgatggttgtgtgtgcgctcggcatacaatcaacgaaatcatttcagttgaatgtttcatctggcactgaattgaaggaacattttcagggcatttttcaaatcattgtgaaacaattacatggagcagccatgtgatgaggtgtg

SEQ ID NO: 32916 - DNA, 1732 bp, Homo sapiens
cccaaagtgctgggattacaggcatgagccactgtgcctggcgtctgagtcctccttctaaagggaacccactgcacagcatctggctgctgccaacaaaatgactgccccaccagtcccacaggtgatgagagtttgcaatggccttcacagcttagtaccttagtaccttttctctcctggtaacttagaatggaagccccatgggggcccacgcatatctgcgagggtgcacaggcatgtggcagaatgagccaggggccaccctcttgttctggaggtgctgagagccggcctggctgggggctgtaactgtcaggctgactcccagccacactgtcctccctggagtaggtgctcgaaacctttgctttttgccttttcgctttaatctggaacgcttggggaaaaaaaaaaaacaaaaaaacaaaaaaacaacaacaaaacagtagaccaaatggtgactgagtcccaacccttcttcaggccagatgaaatcatggtccctgctggcgccattcctccatctcagagccctcacttgggttcagaccctcagtcacacagggagccccgccacagctgaagtgttttgtcagagcaagattgcaaagagttaacacttttgctttttcggaaagttatctgtgaagagtattagttgtttaataaagcgtgcctgccctcccgatgaacccgccagtgactctgcagctggggtcattccaagttcacgcagtggacttttgactgccttctgtgtctgtgaaaacagtcggcagctcctgcggggatcattcattcaggcctgtaacacaaaactattgccaatgggcacctgctggggcagcttcccgggagggctgggaggaagataccaaactcatcaggcatctgtggagataagagcggcaggggatccactgggatcccgctaatcaggcctgcacttagaccccactgcctggccaacaggctggtgtcagaatgtattaggcagccctggccaggataggatgtgagctaattaaaggccttttacaaagaggaggaggtagggggtggggagagagagagagtgagagagagagagagagagtgtgtgtgtgtgtgtgtgtggaggaggaggaggaggaaagaagtttgaagtgcattccccaaatttccagcacattctttattcctctgttttatccctcaaaacagaagaaaacaaattagaggctgagcatttggttatttctaacctgaaattgtcattcattgtgcctgatgccgtattggttttaactgctatttttgtggaattacatatactgtgaaagacatcttttgccgcagtctccctgggaacatcctgttgttgaaatgccgttggtcagctgcttgaattttgcccttttctctgactttgacacatcaaggcaaaaataggtacctatttgtggtgtgttctaggtttctcccttttgcttggaaaatccacttgccagctgtgaagggtgctgctgggaggatgaaatgagtcagtgcacagcgtgtgctcttaaagtttggtggttgaggtggcggtggtagcagcttggctctgtggtttaaaatgccacagcatgcactatcttgaaaatactcagtagtcctagcatacaactgggttttagttacacctacttaaggaagaaagctcatttgaaagtgtttgattttcctgtactttcgtttgtttatttag

SEQ ID NO: 32917 - DNA, 1953 bp, Homo sapiens
tgagccaccgctcctggcctttgcaagtatttttatgtgggtaaaacagttatacctttcactgagcgggcccaaacaaacaaaaacaacagcctgtcacaccgtgtgtgtgtgtgtggcggcgggaggggggtacccaaaaaccctgactcactttttatataattagagctaaaaccaaaccaagtcatggcttgtttgcagtaggtagattgcagagttaccaaactgttctttctgaccagagtgactcagtctagtgcaaagtcatgaactgcctccagcatttctcattaacctaatatctccatctagagtagaaattcaccctccctaaagcccagaggaaacaaactaagggtccttgtgaaaggaaaaggcctttagaccctaaaacaactgattagaaaggcaggacgaaaggagggaggggggcattctttgtgctttcctgtgcaatttggagctcaacagatgaagtgtttgccattgatccccaaaccacattttgggaaactatctgaccccatttgactggccattcaactgttccaccattttctttacacaaagctaaactagatttgagctaaatttgagagggaagagcacattacatatgggaatgtggttcatggttttctaacccaaccctcccctcccccatccattccaatgagtagatttttctctggaaatccatcctttctttttccattcaaggcaactaacagtatccaatttttgattcgtagttttagttttccatgtatagactaaaagtggatgtttatcttgagacaggaatgactgtttttctgcaattgtttagactaaggctaggtagatttcctgtggacttcttggaacctttgagccctgatgttttccctgcgctcaaaaattacagtgctggatggcatctttccagctgttgggatgggagacaggctgggccctttgactcctaaaattgaacttaggttgagctggttggcaaatgtggcaatgaaagggttccctgagcaaaacctgggaaaatatcagtctggatatactctcctagccctggctttcttagcacaccttgatgtgtgttccgtagctgtcttcccacccccatcccctaaaacttgagcatctgtagctcatcacttatgtcctgaactcagtaaactgagtctctgttataggacttagagaaattttcttatactatggactgaatgtgtccccccagaattcatatgttgaaattctaaccccaaaggtgttggtgtcaagaggtcattgggggtgattagatcaaggaattggtgcccttatcaaagagaccccagagagctagcccacccttctaccgtgtgaggttacagtgaaaagatggccatctaggaagcaggccctcatcagacattgaatcagacaccgaatctgctgtcaccttgatcttggacttcccatcctccagaactgtgagaaacaaatttctgctgtttgtaagccactcagttaacggtattttgttgtagcagcatgaacacactgagacagcacataacacagaatgctgtttctttaaaattttcttgagtttttaccatgtggtttacttgtctttttcattgatccttccctgttcagtggggaaacacagatcagcacccagcccttgccgaccacatgaaacctaagatctcacctcctcctccctggcaaaagaagaattagataatgagaggtgttctggttttgagaggaagttaacaagtgttgggacgcttgcacgttagagctggctgcctgtgctctgagtcagaactgaaattttgacatgtaaagaagaactaatatttgatcctctcctgtgtgccaggcatagcgctagccacttcatagctttttggctattcttctccatctcctttctgccagttgctcaaatactttgga

SEQ ID NO: 32918 - DNA, 1744 bp, Homo sapiens
tgatctcttaggtcatctcatcccatcctccttgggtcaatacattgtctttgtatagagaacacccaggacccagttggtgctggggagctgaggctgccacagcagacttagttggaaattaagcttttggcataggctcactcatcaactttggatattaattgatgggagtagaagaagagggagtgatattgggtattctgcctagattattctcccatattctcttggtgggggagtattataggatttttaacttcctcctagttagctgccagagataggtaaagagcactttaccctatctgtcttccaagaaagagaatgtaagctcttagaaagaatataagagcttgagagaaacaggaaagacctgaataagaccctgaattggctgcggtgctcctgggtctcttcaggtggagatgtgtcccctggagacacacaggacatgggcacgcgtcacttaactgtggttctcacagcgtctggggcaccagagagacacgtttttgtctggaacctgaagaacgctggcagcctacataattctaaacatagcaggcactcttattgattctttccaaaacaaaggtcacatttcctttctgtgtagtttgtgtcctgggttcctgctgactgttttgtgtatacgattgttaccttctcaaagagactgtcagttcttgagggcagggttcaaggctgctgtttgtttgtgttcttcagcagtacctaaatctgtcctgggctcagaggaagtatttagtaaagacattctaccttgggttgtaggtcacacagtgccagagctggaaaggattttggaaatcgtagagtccaacactctaattttgtaagtggtaccactccaaaaacttacttgggaggctggtgtttatctgctggaaagagaggattttattatgttaaactatagtgcaaatgaccataattctaaacctttgacaggcttccctcaaacgctgcaggcatgttcctccttggactagtagcagagtaataagaacagtaagaatgctaactagataccaggcccccgagccattgtcatgaatgcttccagccacatgacaaagtaggtactctggctattctccagatgcagaggaggctcagaggtaggtgacctcgctcagggtcatgtagttaccagaatggtcgagggaggactgaagtttggtcagatgccccagcttgtggcccttctcctatactgtggtaactctcagatggggtctctgactgaagccactccttagtgattcacggtgctagctttgcagcgtcgtgtggtgtttccagttgtcctaaaggaagttattaattttcattaactttaattctctcattagacaggcagtgatatggaaggcaaggcagaaagcaaacaaataatgataggggttacatctccagaaaggtcaggaatcactgccctaggttgtaaaatatttggactgagtaaaaggcatgagtcttcccatagcttcttccaggaactgttgctttacatggaattgctgctgtgttcactagtccctcttctgtgcccagaactcactgtcacatgtgtcaagaatcctcatgactgaggtttccagggcagatctgatctgtgtaacacgcaccctaacccccttgccaaaggagaatgaaataggcccctagatggccacccagttcctgggccttccaggcaggcagcttgccttgaggc

SEQ ID NO: 32919 - DNA, 1204 bp, Homo sapiens
tcggcaggtctaatgcttgggaccttctcctatttgattccataagactaaatcccctataaacacttccctcctgtgcacacacacatgcattcacatacagcactcacgtatccctcccttatagccaaagaccgaaaaataaattttttttttctacattaaaaataagaccagctagtaaccagggttggcattcccatctcctgtggaacctggaaggactagcagatagctatagagatctgtctcctttttagtgtggttgtattaagggcaatcttgcctcccatggcaccccagaaaatccaggagttcaagtgggggtgcactgtaggaggactcagcagctgttttatggaaggttcgtcagggatcagactgaagattttgcttttgtgagaacaaagtgaaatgtgacattcaggagcagctcggggcctatatataggggcccagggcctgctgggatggggttttacacttgggctgtccttttgcccttcccctgaactcttttcacttcagtcatgagcaaacagtcagtgcctgaactaacaaccctgtagtcctccgaagcacggctggcttacagtaccgaacaaagggagggagtgccgcgtgggccggcccaggccgaggaatgcggcttcagggttctgctccataaatttaaccagcacgacgaaaaggagataatatgagccttcgtgatgatctgaaagggggaggttctgtgtcccattgattgcggtctggcccaatgccaggcccaagcctgaccgacagttgaaccatatcattaaggcgtgtaatacagctcgagtcttgtactgccgccaatgagtgcatatccacagggcaaaagtttataaagagtcgaggctgtcctgtttaaccctctcacactgcatgtaatagaaccagctgccattcagaacttgcccatctgaggtcataaaggaaagcctgcacgtttcttttcttcaaacagcttttcaggactggggagaggaagaaacgctgtctagagagggtcaaggcacggtgatgtttctctctggagaagcaaagcagtctgcctccctccccccggccagaaacgggacaccttagtgctttcttcagagtagctctctgtttgtggtataatgttgctggaggaaacagggctgacaccacaggaaacctgcctgtctccaag

SEQ ID NO: 32920 - DNA, 1829 bp, Homo sapiens
ccccgtctctactaaaaatacaaaaaattagctggacatggtggcaggcgcctgtagtcccagctactcaggaggctgagcaagagaatcacttgaacctgggaggcagaggttgcagtgagccgtgatcgcgccactgcactccagcctgggcaacagaatgagactccatctcaaaaaaaaaaaaaaagagaactgggaggccatcttaggtgacgggtttcactttggacacattgaacatggggccctgcagagcatccagttagcagcattagaaaggtagagatgggggagtcattcttttggagacagcagtttgttagtttgtttgtttgtttattttttggagacagagtctcactctgctgcccagtctggagtgcagtgctgcgatctcagctcactgcaacttctgcctcccaggttcaagcgattctcctgcctcagcctcctgagtagctgcgactacagaaatgtgccaccacgcctggctaatttttgtgtttttagtagagacgggggagacagtagtttaaataagtcctggcgtgaatgccttacccagagggggcataaaatgaggggtctaaggccagcaccctgggaaatgtcaacgtaagaactgccaggggaggaggatccaggaagggtcagtgatggggatgacaaagggggtgtcatggggaaaagggcagaggaggagggactagtgaccacctctgctctgaggtcatgtggagcaagactgaaaagaggccggggattgggaaatgaggccactggtggccttgtccctggcggctctgggatgtgggccagaagccagtccctggtgttgaaataggatccaaaggtgaagaagggagtgtagatgtatctttaaaatttgactgtgggagggagggtggttttggtttttgccatgttggtgttttaaaagcagcagggagttgagctgcttgtggactggaaggaaggagccagcagacagggaggagaggaggggaagtgggtagtgaaggggagagagaatagccaggggtggtgggcagaaggagaggaaatggaaccctagaggcctgggcaggaggcctcttgctgttgagctgcggccggctgtattttgagaccttaaccttcaccttctcagctgtgttggatgcggcctccagaggcccaggagaggtggggatcagacggggttcaacagggagccagaaccatgaggtctgtcgtggaataaaggatgtattctaggagtcaggcctcacccagctgtggcgggggtggagggcaaggaggactgccgagggggctggggtgggcgtctttgggaggtgtcttctgtgagtttgcagcaaagggtctggggtgggtctggggtgggcctggggtcggcctggggtcagtgttggtcagcaaggccagcctcacctttgcctctcaaatcacgggtgccttccctcttgacaactctgccctgagacctacaggaagtggattctgagaaatatggcttccaccgttaccaagtggaccagcgctgtcccatagaaataatgcaagtcacccgggctcctggaatcccagcactttgggaggccgaggcaggcggatcccttgaggccaggagtttgagatcagcctggccaacatggcgaaacaccatctctatctttactaaaaatataaaaatgagctgggcatggcgatgcatgcctgtaatcccaggacgttgcagtgagtgagatggtgccactgcactccagccggggcaacagagcaagactctgtatccaaaaagaaaaacaaagaaacaatgcaag

SEQ ID NO: 32921 - DNA, 2636 bp, Homo sapiens
gccattgcactctagcctgggtgacagagtgaaactccatctcaaaaaataataaataaataaataaataaatataaaaagaaataaaaataaaattttctaggtgacccattttttaagaaggaaaaagaaatggaaagttaattttaataattaaagacaatatgtccaagacattatcatgtaatgtataatcagtagaaaacattgttaatgagatgctttatgttgtgattttgcactaaatctttgaaatgtggtgcctgtttcacacttacagaacagctcaactccaaataggcgcatttccatcgcctccatcgccgctgtagctggtggctgtcagattggacagcacggtagaggcgggtcaggaaatgcaaggagagcacttttggaagcgtctggatcctgggccctcggggagggcagggcctgggtcctgatgtgaggagcctggagcctgtccgtggccgagagggcctccttcctccttcctggccgacacgtcacctgctccgtccagtccacgagaagcagctgtggcccaagcccatgacctgcctttcttccccagcgtcaccatctgtggcagcctgggatacgcatgagctcctcaggagggcgggtgagtggactttccagcgcgggctggaggtgatctcaaagggcacaagggttggaactgaaccagccatgccaggggacgcgggtttggtcggagccctgtgggaagggaaggcccctctgctccaggccctccaggatctccaaccatggcccaaatggccaccatgatgatgcccacctacgggctttggtgcttcgggagtgtcttgctgggtgaagggcaggtcgctatcagatgcatctgtttaattttagagctccgtggaacacacatctggatgacaggagggagccaggagctgtgagaagacgggggagctgccgccgcaagaatgcaagacccacgggctctacgatgcgggggagcagcgggcatctgaggaaggggcgtcaggggcacatggccagccctcttcaccccacagtctgccccaggccagccccactaggagtgacccattttctcctagcaggattccttgcatggggtggcctggacccaaaacacccgctctgaggattccctgttaaccacagagaaggttgactcaagtttctttatttggccatgaaactgtggggcatctcacggtgcttcttgggtccactggagagccctggaagctcagaagaggcaagaggggcctacttctcccttgtttgggctttgtttgctaaataccaatattagattaggcaactctgcaaacaaaaccaaggcctggccagctgcccagggtgtttaaagtccaagacatgaaggcaggacgtgtgcccgtggacttgcacacgcaagcaggccgaggggagagcagcccggcagagaccttggtggtccagggctgagcaaaggcttcccccaccggtccatcccagtgcgctcagcacaggagttagcggccacacacttcaaccattgtcttattttagaaaatgacatctgctgggcgcggtgactcacgcctgtaatcccagcattttgagagggcaaggtcaggagtgatcactttgggtggaccacgaggtcaggagttcaagatcagcctggccaacatggtgaaactccgtctctactcaaaatacaaaaattagccaggcgtggtggctcacacttataatcccagctacctgggaggctgaggcaggagaatggcttgaacctgggaggcggaggttgtagtgagccgagactgctccactggactgcagcctgggtgacagagcgagactccgtctcaaaaaaaaaaaaaaagaagatgacatccatgatgttaataaaagcggaggtattaggggaagggagacatcctgtcaacttttcatcagctcacatttgaccctcagcttttttctgttaatctagttatcatatcaacagcgttctcacaaatgaccaaagacagtgtcggtggctcttagtgtttgaaagtaaaaatgtataatatttttaaaatgccaacagactgaaaacaggaatgaggcatcattggttgtaaactgtctcctgagctggtaattccatctccatctcaagcagaaaaaacatacccgtgtgcccaggggctctcaccccagcacacctcttgcccacttagcctagttgatggtcaaattactgagtggagtttaaatgcccttcagactttataggtggaattcctgaaacgcgtctatctggaagaggagaggtagtagtattgggaagggaacaggaagtaggcggtgtggagtgctgtttgttaaatgctatctcttaccgtctgtgtttgtttctacttagcttgccttatctctctcctcccgcccactctgtcattcaactacccagttccccaccctggtttcttgtgtatttttttccaggaagacacacacacacacacacatttatatatatataaaataggccagatcccatccttcctgggtccacccttcctgggcagcccctcaacccagcacacaaacacactgttatttttctcatctcaattctcaatccaccc

SEQ ID NO: 32922 - DNA, 624 bp, Homo sapiens
ctggcacatgtgacttccatcatccatgaagcagctcggtcttccagcctgggagacgcggctgggggtggcggggagtcacttccttacttctccaagctggtggtgaccgaacaacccaggtcactctgaccccaaagccagctgcgctctcagcccctggactctctttcccattctcacttttcattctttcattgaaatccctttttggcaactataaaagccatttgtgttggcagcagccagtggaaacacaaagatagacaaagagtgaatcatcccagccgcagccccgccccccatatctcaggtgaccttttctccacggtctccgcactcacaaatgcacacaagcgtgtggacacctgggcgtgtgtgtcagcagggaatcgcttgttttgacaataataggatccccaccacacattcctccgcagctgtttactaaccgtgccgcgcggggcagccccggctccaacatatctgagtcattcttgttcatagctgcacgagattcctaatctgggatgaatcgcggttaatatcacttgcttacttttttttgtttttttgagacagggtcttgccttgtcatccaggctggagtgcagtggtgcgatc

SEQ ID NO: 32923 - DNA, 1374 bp, Homo sapiens
atgctgtcaggtaaaaggatggggacagagagatcgtgcgattctgtggttttgtcccactcaaggctgtttctaggggaggagacagacatagagcttcgggttttccaggcaaccattaccccagcagggttctggatcttccatcagcaagggggatctatatctgttgctgtactaataaaaatagtaacagctagcatttattggtgtagccctaggtcgttacaggtgccccacggctgaccccaggaggtcagaggtgacagaagccactgggcctgtcagggacttcggctaggtccttatgtgtccttcctgttcctgcactgctgggctgctgaagcctaggcaggtctctcccacgtagccctgcaaaacaggctttccctggctccaggcccctgttttggcctgccgagaatgttttggctaccgctggctcagctgttggggaggattgtgatgaagctcctcaaattagatcaaccagtggtgtcgccctcccacaagtccctgaccgcaacctggagcagggcagagacttcctccaggcggacgtccagcctggaactggcccgcttgggaggcacaggaatgacagtagctctgacatgcacgtggggctcactagctggccacactgcctcagcatgggtgccgtggggcgtctagtcctctgtcagctcagaagggctcatacccgagaaaactgatacacgaaggggctatgtaattccaagcggtaagcggtagagctgggacctcaacttatgcaatctgtgcccttggccactgactttacctgcgggagcaaaatgaccccacgaaacaacatattcattcagtgcacaggtacagtgagctgatgccatgtccaaggactggacagaaaggtgtccacctcccagggaatgagggaaaggtgcggtcatcattcggtcttgatgaccaagtggttatgaaaggcatggcagagatgttccttgcccctctgcgaggacactggggctctgatggggctcaggtgggaggacaggtgaggacagaagctgttctgagcatgggtcagcacagtgcccagggctggtgtttgctgtgagggggtatggggtttgcctggagcacccttgctctccaagtgggcggggtgggactgtgacaagcactcaccgccaccacagtgaacaatctgtggacctttactgcaggctggatcctgctctgggctcttagactgaatcctctcggctgcccggatgtggtacagtcggctgattagtgtcccctgagaagctgagtccaagtcctaacccttggtacctgtgaatgtgaccttatgctgaaagagggtctttggaattgagtagctgt

SEQ ID NO: 32924 - DNA, 4694 bp, Homo sapiens
ccagctctgatttgatttacaaatctacccttctttgatttcctccttcccagttgctgagacaggcatgtctccccctgtgatgagcacctagtgttcctgaggacactccttcaaatgctaaaaccacgccctgccaagagccagtacgtgacaactgggcagtctccacctcatccctgggtgtgattcttgcgaaactttttggttctgggaccactcagaaaactctccagggaaacgatcacaaaagctgactctgggcaggcagaacactgctcactcccagccagaaacccacgggctgatgtttcttttcacaaacatccccagcctacaagactggccaggggctccacctccatctgactgcccagggccgcacttggcaaaacacggaggcagagaaactcaggctagagttcatggctgacacctcacaacctttgcccttttcccccactggacctcttgctggaaagtgctgggtgaccttggggtgggggtgccaaggagaggagggaggagccagcatctacagaccacccttccctcacagcacacatctccagattactgtccaccggggtgggattcaaatttggacagtctaagtaactcatgcaggctgcactactagaagtttcaaagcaaggctcggactccaaagggaagctcttttaacaaccctgtcctgcctcattcattcattcaaggactatttgtggaattgtgtgcaccaggcactttggaggccctgggatccagcggggaatacatttatctcacttgcggagtttgcttgtgtgtaagtccggggacaatgagcatgaacacttgttcacgtgaacgaatgactgtatagtaagtagttttctagccactagaaagtgctagatgtgcatgggaggaacacatagctttgtagggggttggagggagtgattatggggtgggagtggtattcagatggtgggggaaaggtgcagggaagtcctcttggttaaagtaacattttggaagagacctgagggaagtgaaggagggagcgatacagacgcgtggaggaagagcatccctggtggagggaacagttggtgcaaaggccctggggtgggaatgagcttccccagcacggagaccagtgtggaagagcaagcgggagacaccagccacagcaggactttgaattcttttctgagatggggtagattgggaggttgtaaggagaaaaaagacagcctctgacatgaagctggaaggggctgggctgggatgcttaggtgatgggagaagagggattctggacggttgcagagctgggtgctggagaaagtgagcttcccagaggacaccagagcgtttggcctgagaaaatggaagaatgaggttgccgttccctgagccccagcgcctccctctccaggagggttggctctggcaagccccaggtgtgcaggaagagaatcccaggtcccttcagcttccagaacaattggtttacgcagagggaggggaggggaggcggtgagcgagaaagcagttccaggtggcaaaggcagctccgggggaagaggctgccccagcgcctgggacccacctagcgcagcgggggtgagcccagtttccaataacaaagtgcccgggccgtcccaaccctggccctgacagctaacgagctgcagccggctcggtgcgcggccgggaggccagcctggctcacatgatggcgtgagggggtggcaggaggagccgccaagcctcagcgggtcgggcaggaggctccaggaagtctttctgaaagtgggcccaggggcgggcgcggggcggggccgcgggggtcccgggaggggctgggcggggctgcagtgccgggtggggatcgggctgggatcccaagcggcggatgggaaaggggtggaaaggggatgggaaggggcgggagatagatggggagggggcggggcgaggctggggtcctgggtgcagactggagggcgactgggtggagcgggtgaggagggggccaggtggtgtcccgggagcagatagggagggctttgcggggaaagcggggaaacaggttggggtcctgggccgggcggcgaaggaaggccgaggtgcggtcagggtacagatggggggcgatgggacaggctgggggctgtggagaggagctgggttgggatcccgggtgcagctggggaggggacagggtaggtggctgcagaagggggctgggttgaggtctcaggtgcagacgaggaggggctgggcggagggggtgaggaggggagccgggctgggggccggggcgctgctggggtccccctcccgccccgggaccgtccgctcttgcccagacccgtcggtaaacagacgccgtgatgtcacgggcgccgctgacctgtggctgaacccggagctgtaaatgagatgcaaggtgccagcagcctccggccgcagggcctacgagccacacgcgctcctccgccggcccgaggttaccccagctgcacacacggacaggatgctgcaaacgccaccagacattgcaacacgcagccagtctgctggccgctgcgtgaaccgtcccggcagccctcgccgcccctctggcgggcacccacctccctggagcggcctcgctcccctcgagcacccctgggggctggcagctcccacccctccgggggcagcctctcctctagggtctctgtctccgcttccccgagaagcctctaaacccgagggctgggcctccggggtcagcttcgggttttcgtgggaagagattggggaggtgcctgcctttgctctgggctttctgggaagctcattacttctcccttgcaaagcctggttggggggttgcagggatggcttccaggtataaagaggtataaaagtgtcccgttggccgcgcaccgcccctcccttccgaagcagggggcctgtttatcccgcggagctcccagagcagccctggaccgcactaacttggcagccagcgctcagagctgagagcctgcactgccctttggaatgaaaagcagcctggttggggcctcaaggaatctgctctggagttgatttgctgtgtgacttttggatgagtcacttggcatctctgagcttcaccatctccatctggggaagtggggaaaactgaaactggcctccctgtgctggtgtggggaaggtcaaaagtgcaagaaaatgctcaccaaaccgcagggccggtcagaagcctcaggtgcagggggcctggcacggggagaacttggagaccctcagagaaaccaaggctgcccttctcctcacccactgcccccccaaactgagcctctgggtttattgtgagaagccggggtgacgaggtctttggggatgaatagtcccccctggctcaaggagacccccattgactcccctacttggacctcattaactaatgatcaccctgccttgtggggggtggggaacctagaaatgaccccagatctccccccgccctagacggagtctcactctgtcacccaggctggagtgcagtggcgcgatctcggctcactgcaacctccgcctcccgggttcaagcgattctcctgcctcagcctctcgagtgcctgggattacaggcgcccaccaccgcacctggctaatttttgtatttttagtagagacagggtttcaccatcttggccaggctggtctcgaactcctgacctcaactggtccacccacctcagccttccaaagtgttgggattacaggcgtgagccatggcgcccggcctgaaatgaccccagatctttagcgagtactcatggagtgcaacaaggcacagctgaactccagccctgattccagcttctccttcactgaatttaatctttaacatccttctgcctcacatccctctgctttcttgtctttgcagcacttggtcactatctgaagtgatggtggttatttgtttgcttggtttttgtctatttctcccattctcaaacacacacactctctagaatgtaggctctccaaggaatttccaggcctggcttggtaattgggtgcccagtgactgtgtgaatgaatgaatgaaatagttttgcctcttctgtgaaacattagtaacttccctttgaggggaacttgggaggaatgaagttgacaacctgtgtgctatggctgtcgttaggaccagccacatcattcgcagggtccctggttcaaaaattgtaaagaactgcaagatggtgacagccgagcctcaaaccaagtgtagggcgcttctgagagcagggccagtgagaatccctgggtcacacccaggaagccagccccagccatcgcacagagggtgcccaacaggaacacccagtgggacctcgtgccaagtcacaagccttccacgctcccccaggcagcaggaaacacaaacacagctctggcagagccactccagggagaacgtatcacacatccccagcagacaggtgacacctgccaaactaaaagttgcctgcacatccagtctctacatgtgcaggggcagtggacatggcagcgtatgagctgtaggggaaagaggaataataacaacaggtaacctgggcaacatggtgaaagcctgtctccactaaaaatacaaaagttagccaggcatggtggtgcgcgcctgtagtccc

SEQ ID NO: 32925 - DNA, 5093 bp, Homo sapiens
aacatttccactgacttgaaggctcaggagatatccccaaagccaaggcatggatctgctggctgaggaggtgtgagccctcggagggcaccatgtgcccagtccacactgaccttgtgtcttgccatcccttaaggaccccgtctcctctgctgtgtgctcatagggaagtggcccggagaggccaggtcagactcttaattctttggcatctgagatgtaagaacatgggccgtgcagccaagggtggacagacgccatgtgggtgtgtctggcaggactgcctgcctgcatgaaggtcacgctgccctttacagtcacactggccccagctccccacggtgacctgctaccaggcctgtgagaggggccactgcttgctgggctgtgggagcactaaaaggaagacccccctcaccaaccaccttggaaggacccaatatcatctctgttctgctcccctgcccgcagctggaggggagggagagctggcctctcgcacctgtgaagtatcactagcaaccatgacctagcaaagggcttcctttcctctcatatcacagtctatctctctatctatcgtctagaaaagtttccaaagtcagtctgttgacaacctgctggactttggtggctgagcattttgcctctttgaactacaatctccttgaaggcagagattttagttcaaccctgaaaagtccattctatcttttttttcttggggagatgggtggggggttggggggcgcggtggtaaggcatcagtaaatgacctgataaggtctgcaggattagctctggagggctgcctgatacaggcaggcctggctctcctggctgtttccacgtggcatgactggaagatgagtgttgtccttccacaagaaggtgtactggaccccttgctcctgctcatggtatccccccatctgccctgcagaagccgacctcccgactcccaaaccctatggcttggctggggctggtatacccctggctcagagtctggccatgacccacagctggccaaatagagcaccatttccttggttcaggctcacccagtcactgccagagagacccaattcctggacccttccaggacttctgggcaaagaacacctgtctgtctacttgaatgggagctggaaaggttacgttacgagcagcagggggcaggtgtgagcagccccgtggcagagaggtctgcctcaaagtgaggggagagagaaactctcctgagtcctgacagcactgagcccctggagacatgcccaaagtcagccctacccagggacttctggtcccatgagtcaataaaccaatctgaggaacacctccagagcccccatcgggaaagctggaggtgatgttgtttgacccatatagactgcctggctacggactccactaggggccatcaatgccatctcttccgtgaaactatcaaccaaaaggcaagactcattggttacaagcagacaccctgggttccaatcctgctgggtcatttactagctgtgtgattctaagttactgactctcagagtcctgttggtaagaagaagatgataacggtacccacgctggaaggttacttcgagtagtaaatgaccttgtgacgtgtcagggcttagaacagtccctggcacacagtaggtgctcagtaatcactggctctaactagctacaatgggtcggtcatgcattcatttaggcaacaaccatttattaagtatctactgtgggccagatactgtgccagttgccagatacttggtgagtgagagggcatgccccctgcccctgtggatatcaacaagcagccacaaagcgtggtgagttgctatggtaacccctgactttggcctcaccgcagcccggtcctgaccaattgagctacttggacgcagagatcaaaatgccttgtgcaggggaagttggatggttgtgggggttgggcagccaggaccagagaggaggctgtacccctgaccagcctcagcccctgggttgcagaaaggcctatgttggaccagcccctgcctgggaagacaggggctgtgccacgggtcatctcaacagaggtgaggcctcgggtggaagggagatggccagactccctgtagggagtggttccctcccacagacttctagaaagggtcaaagtctccaattccccctgagggcttctgtggcaggggcacaactctctgcttcccgggggagtcccagaaccaaggttgagtcaggccagtgggttttttgccttttttctctgatgtcctgctgagcatctgctctaatatgcagaaggagaagggctggagcagggggtatccaccgccccccacccccagggccattgccccacctggaaggagtggttgtctcttggaaacgctcttgccattacccaggaggtgataggagctttttcactacatttccacaccttcatttttcagatgagggaaccaaagcccagagagggttgctcgcccaaggtcacacagcaggtcactgggaggcccctcataatctacagcattaggcactggtttccagcagccctggccggcaccacaaattgcatgagtgctctggccggagccggcctctaccgcccaaaagattttggctgctgtgacactgcctttgggccaggtctgggctttggggctggggttgtcaaggcacactctcccagggatgggtgctttggaggcagggagggccagggagaagcctcctgtgtcctttctggcagatggatttgggctgagtcccccttggagaggctgtctcagccccgcttgggcattcagagcttctagcttgtgggcaccccagaggtagaggaggtgccgaggctgagggcaggaggggttccacacatctggggtgggagtgtgggtccctctcctgaggggcaaaagcccaagcgaactagagggcatttggtccagaagccacagcaccttggagtaaagagccaaaggtggaggtgtcattaaagaggggacatccagcaaatccaagaagggtccatcgaggagagggagcaggctgagtcatttccttgaagcatcattttcaagccttatttttttcctttctttaaaacaatgactttctttcaaaatgcacaccaaaatcttaacatggaattgtaagccacaaaacagaagtgacaacactgatctggtccgcaggaaggaggggtccctcagaaccctccctgctccatctcccacgtggccctaccttcttggggcctctagggtgctccggaacccagtttgaaaacctggaccttgaacctcagctggcgctgaggtccgcatggggaccgcggggcttggaggctggtagaagtggttgggggaggtgggacgcagacaggagaccgtgttccctaggaggctgtttcagtgtggacaagatcatcatacgcttcactcatcaaaatccccgaaaggctgctgaaaagaggatttaaggccacattccttgaagtagggatggccaatgaggtaagaaaggctggggcccagtggccttcaccaggctgaccattggtggccttaagcaccaagccacacatctgtactctccaccctgagcttgccctggcttcagtgtcacaggataccagggcgttccctgcctctcacacgagctctcgccctgagcctgcatctgagcctgtaggacttggatgggttttgattgtatctagtccaagccttcttaacccagagtctgggataggcgacaggggtacatgaccccttaaaagtacaaaactttcagttgcaccttcttcctgggatagagttcatattttcttcagacccttgaagggctctacaaccagcagaaaaatggagagttcctgcaaccccctcagttgccacctccttcgagaagtcttctaagattttccttaatttacagtgatcaaagctctcaggccacgcagagctcagtgacctcgggcttaactggagggagctgtcactcactctctcctctgcagctgggtctctgcatgttaagatgtcacactggttgtcaaatgaaagaaattcaactgtgctattaccctgcttgtcagtttactctttaaaagaaaccctgataactgaggactattttattcctttggcaagtctcccattcattgtatgcaaatactgctactcagtgctctaaatgatgtttgtgtaaaagcggatttcactacatccctgcccgcatcctgttgactcattcactgcttatcaccgctctctccagaaccctctgtgtactaagccccattacttaacagcttgtctcttgacctctccatgaccctgaatgaggcaggccaggccaggctgagattatttgttgcagtgggaaaagatggagtgttgaagctgggaaacctgggttcagaatctgccctcagcgacgtgtcccaggacggccacttcacctggatctcagaaatgcatgctgctggccgggtgcggtggctcacgcctgtaatccccgcactttgggaggctgaggcgggtggatcacaaggtcaagagatcgagaccatcctggccaacatggtgaaaccccatctctattaaaaatacaaaaattagctggggtggcgcatgcctgtaatcccagctacttgggaggctgaggcaggagaattacttgaacctgggaggcggaggcaggagaatcatttgaacccgggaggaggtggaggttgcaatgaaccgagatcgtgccactgcactccagcctgcgcgactggcaaaactccatctcaaaaaaaaaaaaaaaaaaaaggtcaaggaagacaatgaatgtgcaaaagcactgtgcagtcatgtagagtaccaagtcacgtgtgttaccatcgtcacacacattgtcacagtcatgtacagtgccacagccatgtatattaccatggtcatgtacagtataggtcttgtatattaccacggttatgtacagtatcaatcttgtatattaccatggtcatgtacagtatcattcttgcatattaatatggtcttgtagagtatccatct

SEQ ID NO: 32926 - DNA, 2378 bp, Homo sapiens
tgcaaactccacctcccaggttcaagtgattctcctgcctcagtctcccgagtagctgggatcccaggcatgcaccaccatgccagataatttttgtatttttagtagagatggggtctcatcctgttggacaggctggtctcgaactcctgacgtcaagtgatctgcccgcctcggcctcccacagtgctgggaatacaggagtgagccactgtgcctggcctatattttttattttcatcctttaattccattttccaccacctttttgaagtccccttgtatattaccacagtcacgtatattaccaatcgtgtatggtaccacagacatgtagagtaccacggtcatgaatattactacgaacgcaaggaagccatcagcatccagttcagaagccacaggaatctaagcctgagtgaaggatgtgagtctgtgcccaccctgcaccctcttgcctcctccctgctccccagcaccctggaaagcctggacaaaggaatgacatcactgctggaggatcctgctgaagtcatgctgagaagggctgccttcttttaattttcaagtgttggttgatcgatgctggtgtcctcttttcctcctgccccctgcccctgcccctgcctgtgtcattgccctcactgacttcatgacaatgactcacagaatcaaagggtagaagggacctaggaggttgtccagaacctaacctcccccagtgcagaaatctcgacaccatgtttgcttaaagagcaacctgttccaaagggcaggaaggtgttcctcttgcagggcccaggtctgcattttcgagccctccccacgggcctagcatgggcctccagaaccatctagaacaggtcccatgcctctgtggtactggaatgcagctgataccctctcttgcctcttaagcagtcaactatactcccatggatttgccacccaacctaagtcatggcttctagcccttgtcacccagcctgctccctggataccttccagttggtcaagggccctgtcaaagtgctggcccacatggacacaataccccagaagtcgtttgacaaagtaggactgaaaagcatctccttcattctaagcaccagcacaattatctgattttattcagaggggttaagcactactgccattagaagcctgcttgttggtgccaactcatccttccacagtgttaggagatttttcagtctggggatggtggtcactccaagaacactaagtgtcacaaggagagaaccttgtttatgaggttccctgccgcatctccaaggcctagtttgctgaatcaatgaacagagccaacatagtcacgattcctcagagccgtgtcaccctgaagctggttgtcacttcctcacctaagttaccagcaagaaagatcaggatctggctgggagcagggctgcccagcagagccctgagggctgggtgccagctgcctcccaccccctccaacagtggcaccccggactgcctagattctccattaccctcagcccagacacttccatcttgacagtaaaagatatcagaggaggccctcagcatcctccaaaactctagtgcaatgctgacagcattccctgagctctgggaagctctcaaagaaggtggcgaagcaagtctgggtgatatttttggaggaggcatggaaacctggcggcctcctagcaggtcccccacccctggcctgacacctccaccacctgcctgtcacagcagccaggggatcctgctaaggcttgggtgagggcatgatgcttgagtcgtggggccagctaggtctacctgtcctacatgggaacctgtctccctcagttcttcctccccactcactcactgcttcagccacactggccacctcttggtcctcagacactccactctctcctcagagcccttgccctgtcctcttcctggaatgctactgctcccttcccaccatgccctcgcctccttcaggtctttcctcgtgtctccttctcagtgtggccttccttataccctacctagaatctcaggccctcgcattcccatccttcttgcctcattggttttctcctcattgcttataatgacaattcaatgttctgttttatttatttatttattttttgagacagagtctcccactgttgctcaggctggagtgcagtggcatgatctctgctcactgcaacctccgcctcccaggttcaagcaattctcgtgcctcagactcccaagtagctgggattataagtgcgctctaccatgcccagcaattttttttttttttttgtattattagtagagaaggagggtttcaccatgttgggtcaagctggtcttgaactcctgacctcaagtgt

SEQ ID NO: 32927 - DNA, 6621 bp, Homo sapiens
accatgttggccaggctggtctcgaactcctgacctcaagtgatccgcctgcctcagcctcccaaagtgctgggattacaggcatgagccactgctcccagccaaggtcctggagttcctgacgtggtattaggcccacgtatgttgccccacctcccaaggtttgcaatcatggcccaagactttcgtccagccacttgctggataccagaccaaaggcggggatggtccctacaaatacttctaaatgaacggtccacttctcctctcaggggctcctgctaacaccatgtcaaactcaaagactggagccggggctgaccactagccagaagttagttcccttggagggaaggggaataagtttaaggtttgtgaatgcttttgtggaaggaattctaggagggcaaagaaaattaaaaagcaagacctttacgcctagaaaccctaaccatgactggccctgcctcagtttgccacagtgcactgtgggtaaggagagatgtgtccggagctttcaaattcttacagccttagtgtgcctttaaaaaaaaaaaaaccctcgcttatttgggccacctttgcaccctaaggctcaccaccacccacaaatattgccaaatcctatttaactcaaggtcattatgggaaactgggttgtcaactctctccctccttcccaaataaacagataactcctggacacgtcagctctttgcagagactctggtacacttttttttttttttttttttgctttttggggtcttccccctcccagatccaatcccaccagaatctaggctgggaagctctcagatgcagccaccagaatctaggctgggaagctctcagatgcagcctccacttccatcaagaggagaagggatgtcatctgtggttccacacagccgccccctgtctagtatcactgcaggctgcgggtggcactggacctctctggtctagtactcttgggccacccccaagcccactgttcacacctgtccccaacccataatttccccactccctcgacacttgaccctttgttcccaaccccgctaggcctcaaaacactcctggctctgggggtttgtcccaaagtcctctcattggtgttaggcaagaagccacaattccaaactccccaccatgacagcaaacagaagcctcattataaagtagctccagaagcctcattataaagtagctccagaagcctcattataaagtagctccagtaattggtcagataatggcgagttacagggagcactgctggtcatcctgacaagtcagatgactgaaccgagcatgaatggcactcgaagtttcacaggcccccatggatcctgtttttgtttttggtgaccctgacaccaatttaagacacatttctaattggccctggctggattccctggaagaggacgtccagtccaagttaggtggggtttggttcccggtgcgtgaacttgcaggctccactctgtactatcacacccaccccccaatgccatacacttctttcaatttaggattgtttatagtcagtcgagtttttccagattgactaagagttcctcatctgcctactgtagtcagctacaagaacagtaaaagagacccaggacttgggccagctggaagactcagaaaaaagtttctgtgggatgcagacagctaaagaatgacaatcacatgcaattgtcccaaaccccacgtccgccccaaaggacaccctcatctgcccttttcagtccccttcacaaagagcttcaggagcccttttatggggcatcgcctcaaggaaatgaaactgctgagaacaactctgacttccccttattcgttgtgtccaagggttaaaaacgcttcccaactccccctccaaatgcaaggtcaagcggctgtccaaaccacccaaggagaagagggagtcctggacagccagacccctgctagcttggccaccacaggctccggccagcccggctagggaagagttaatcggatcggctttggctgatagttcaggctccaaagttcagtcccagtcagagccaccccggaggaattgtaaatctcagggcagtatttaacaaaacaaaagcaacctggaattacatgcaggtttggttttctacagtacatatttacttaatccccaaggtatgcggctccatgtcagatcagctggctttgcggccctttcacccccctagttcacaacagtttaagtttcaaactaattccctgttttcgctcttcctcttcacagggctggctggagacagcctggcctgcctccctctcctgatggctctggtcaccgcgtgagtcagcctggcctgggctgggagttgggtgacagcctgcccactctccccactctggcaccaggtctccaaaacctggagcaaggggtgccaggaccaccaaaaagttaaaggccgtgtttggtgggcaggaccctccttgcagcaccaccttccagctaaatggggagggatccctggggggtgtactgggggggaggggacagggttgaaggtgagaacaagggctctttatcagtagctgcttaccctggcctcctctttcctgctttccaaacacctgggcctctcagtgtcggtccggccagactactgcatacaagaccgctcttcccttttcaaacccaaaccaagtaccctctctcgtgtcttcagagctgcagccgcccaggttggggctgggtagcgggttgccaaggaaaatacgaggcgccagctagcaggcggctcccagctctacccaggagtgcgcacaccctgcactcaccagggtggcggcaagaaaaaggggggaaggcgggggagggggggcacaacaccttcctttgggaggcaggaatgtgggaaatggtgggtctcttaggtttcagggtgggggtgaatagccagtcagccagccaccgatcccaaaggagcggatcaactctgaacctgccaaaaaagacagtccggtgcccgggaaatttacaaggtgaaaccgactagctcagcactcgtgggtggcgcggagaagtggggtggccggcgactctcagctcccgggcgcgggatcccgcagcggcagcaggtgggcttacccccgcccctgcggccccccactccctggagtcgcagtgcctggtacctttctggcgccgcgctccgcgaactcgcgggcgagctgacgcccgatgcctctcccgccgccggtgatgaggacgttctcccgcgacaggtcccgcagcttggcgggcagcaccagtccgacggctgctttcaccaccagatagatcatctgtagagggaacatcaccagcgcgcccagccgtttccacaccatcctccgcgccgcggagccgggcagggggcgaaactccccgggccgagcaatacaggaattaaaaaacaccccgaacaataaatagtaaaccgaataaggaggagagaggcgtcccacctggccactcttgaaatcacctcttcccaaatgcaaagcaccgggtgagaaaaagaaaaaaaaaaaaaaaaaaaaagataaattctcctctgggggagaaaaagcgtctcctaaggttgggacggtaaaagaggtggagggggaagccggaggtggaaagttctaacaagaagtttcttgccccagcagccgtttcggctggggaattctcaggtaatgtttacagactgacagaggagtttagggaggggaagaaaaaaaaaaaaaggcaccaaccacacgcgcgcaccctgcctcggtcccgcggtttcaaagtgcaagattaaaaaaaaaaaaaaaaaaaaaaaaaagctgattccaaattgtagcgcccccacccccaccccgtctccagaaaaaaaaaaaaaaaaaaaagtggggggaaaaagtgcttggagctcccaatttcagcccgcgaaagtctcccgactcattgctattcttgggctcaggaaattgcttaaacgcgatctgattgccagcaacgtgcaggagaagtggggggtccgggtgtcagtttctttacgtgcagcgctcgccctcgcgcgcgctcgctcgctccggctccctccctccctctctgttccagcagaggctgggagttgccgctcgatccagctccccttctctccctttttagcatttattgccttctttttgtcctttccaacttggagagggtccgggtgtggagcgcgcgtggatcggacgccttggtctgcgcggccctattcattcgctccccgggcagccgcgtcgcggagagggcggcccctttttcccccattttttcaataccccattaagtctgattgacagttaaagttgttgggaggcttcactaccgttcctctgagtggctgctgcggcctcccctccccctgcgccgtcgcggggagcgcgcataaggcgcgcactcgggctcgccgggactcgcgctctcccgggactggctcccctctctgcaagccgggacttgccgccggtgtccctgagggctcgcagctgtaactcgaacacgctggaaccgactccggcgagccggctgccttctcgagacgttcctccttgcccgggccgcccgcgggccaggtgatcaccccgagtgtggagcaggcccgggggagcttgcgtatgccttgatccaaccaggtcacccagggttttatttcaggtcatttggtcatcctcggcctccaggtaggatcaggaagccactcctcacctttgctcggacctcttctgtgttcacgtagagtggacttttaaaagcctgacccaagtgcctcacgatgcttagggggaagccgctggggagcaggactttgctttgaggggagggagtagtcaaggtaaaggaacctctgctccgagtgccaataaaatccccacaagattagctgggagcatatttattgctcatctgagctagaattaccttgactgacaccaatttccttaataacaaaagcctgtaaacaaaacgtcctattcgtgcgcccctgtgctgtgcagccagcgtctcctgtccttgggtctccctggactgccctggcggggcacccaccttctaacctcctgcccttcccgaccggaatgtctcccctgctggagggtgggaccgagctatttagagttgtctgttgcaggaagtctgggaggtgagtcactaaaaagcagccccagttcaaagtgctgatgggacttgcctcccgcccccctgcacgttcccggggccggaggagcgagagcgaagcagggagctgccctgtaatctggggcagccgtttccagcccgcgacttgttcagacggcgattcctgggcctcacccccagagattctgattcagcagggctgggtgcgctgggatcggtactttcaatgctccgcctggtgagaaagtcacttcgaaaaacgctgatctgcggggaggggaggctgggattacctcgtcacctgcaaagacctagttctggggagaggttctgcaggggaggatcttccttctgggtgaaaagccactggaagagcaaaaggcaggagaggcttaggatgagcaactgtcctgcactgagggcctatattctgacacagtccttcccctgaccttgcaatcgggggactgttatcccatcgtccaggttacccagccaggaagtgcaggaggggggatcccaatccaaacctcttcccactctgaccagacgggaggagagaagtggaggatggggttcagctaagggttgcagagcagagacccccccacccccctaacgcccccaagagtctgaccgaagggcggaccaatgtctccatcagaccccagggccggaatccattgtggtgacggcctcctctcatcttcgaggtctgtaaaaatgggaaagcgattccagcctgggagtgacaggcctttcccacccagcagcggctggtgtccgccaggcctgcgaagaagcctggaaagatctgaagacagaaccaggctgcaaaagcgggctttgctcatctgttgtcctcggagccgcctggtggcccagataggatactgcgcctccgagctgcccggcctccaacccagcggcgttcctgctaactagccatgcttttcttccaggcatttctctcatgtaaggttaacaccccaagtctaaaagggcttgtgaaggtcatagtcctcctcccccaccccaaacacacttttatggctggggaaactaaagccaaaagatatgaagcaactcatatacagagatgcattttcaccccggtcagatgccagaccggctgggtaaccgttaggtccctcttacatctctctggttgtgtgcctgggatggagggcagacggtgggaaggaggtcgggaacccaaattggcctttagtgcctcagggcctttacacagtttctgattgaatttccttaacagcccagggaggctcgtgcccatttattgcaggaggaaacaggctcagtaaatctaagtaacttgtgcaatgccacgcaacctgcttctcaaaaggtttgggatgaaatcagagggaaaaagaacatgtcagacattccccaaaggaactgac

SEQ ID NO: 32928 - DNA, 549 bp, Homo sapiens
ctgggattacaggcttgagtcaccgctcctggccttactgacatattctggatatcactccacatcaatgtctatacggatttcttctttattttttatagcttcattgtgctccattatgtaaattgttttatactttagtcaaccatttcttactgatggatgtttgggtggtttctaatctttcgtcattacaaataatgctggaatgtataatacaaatatgtcactttcttgtggtttgtttgtttgcaaatgtatcaccggattaaagtcctagaaataggattgccacatcaaaggataaatgcatatggaattttgccagatattgccaaattctcctctagagagtttatattattttgtattaccactaacaatgtatgagggttcctatttcctccacagcctcactccaggcatctgatgtcaaagttttgaatttttgtcagtctgttagagtctgaaagagtgtcttaatgtaattttctcatttctcctatgagtgaggctgagtaccttttcatatctttaaagataatttgc

SEQ ID NO: 32929 - DNA, 2025 bp, Homo sapiens
cctttttatttacttgttcattccttcctttcttcattcattcacatgaggctggactcacggattctcattttattcagtgggttttagatagaattttacttgtattgatacccttgtaacttttttaacagatcatttgttgtgagagaaaccaataggctgtttccccaaattctaggggtgtgaactttgcactcagtggatcttttcttcgggatcttgttctgggtggaatcaatttgatggtggccctcactacttccagtcatacgtggcttaagaatgtgatggtttaggagcataatacatgggagatacttcctgctgtatttaaaagttaaaatgtggaagtttgatgtccggtccgaagggcgaggcacggacctccctggaccagagcaggttggtggccccgggcggcctcccgttggcggctctgggatagaaaccgcggcgcatttgtaagtgcttgcgcgtggttcctcctcgttgtcctgttgaagttgctcttggtctggaacgcgcgctagtcgttgtctttcagcactccgctttccacaccgcacgcttttcagttatgctttacatttctcctcgacttagatttcgtgagcaaaatgggcccatgttttattttttctcgtgcgtgggccgtcgtgaggctttaaacaggaaactgggacagcacccgggctccgctacccgtcaccgggccttccgcgcccctcgccccacgccgcgggtgcggtcctccctccagcagagggttccgggcgccggcgcggcccgcacggggccgggagcccttcctgccggccgggtgcgcgcggcgccgccgacagctgtttgccatcggcgccgctcccgcccgcgtcccggtgcgcgccccgcccccgccaacaaccgccgctctgattggcccggcgcttgtctcttctctccccgcagccaatcgcgccgggcgaggagctcctggtctggtacaatggggaagacaaccctgagatagcagctgcgattgaggaagagcgagccagcgcccggagcaagcggagctcccccaagagccggaaaggtaggagccccccggcccgcccgcccggccccggcgccacgcccgcccaggacgccgccctgccgccctcgctgctgctggcccgaccgcgaggcgggtcgcgggctcgggcggcggcgcccgcggcatctcggtgaccttttccggactcggccctgccccggccccgctcccgccctgcggtcccgctcgggccctgcgatcgctgccctcccgccctgccgacccggccccgctgctgaatcacggccgccgcgcgctcgggctgtttcttaacttgtgacttagctcctgggcggcagaaagtgcgcggacggcgttccggggccggacgttcccccgctggcaccccaagccgcgctccgcagccgcgcgcacggcgggcgcccgagctttctcgcggctagcttgacagccccggctccgcagactcgggcccgccgcgcaggacgcgggccgcgtcggtcgcggagtcggggtgtgggagtgggggaggcagagacagtgagagacagagacaggaggcggcggggagggcagggagactgcgggtgcggtgggcttccgaaaggatgcccagggggatgtggaagttagagagcgtgttgttttgtcgttttgactcaattctcatagttttacgacttctgatgatttcgaacaaaaggtaaagtgtagtcacacttaaaaagggaggggataatttctgggtaggaaaatagtttggttggctgtatcatatttccagtgggcatactgacacgttggggcttttttttttaatgaagaattttaatgtgaattggggaatagttcatagatcccagtttgaaaatatgccaaggcacagtatggttagtttcttattgatacaaatacaggtttgtgttttttgtttttttgtttttttgttttttttttgctctccttaggtcttaagtagattt

SEQ ID NO: 32930 - DNA, 509 bp, Homo sapiens
agactgggttaacagtctggttgttccaccaataaaaatacacattttaaagttttcttaagctgaatgttatatagacaatgaacatgctttttaattaatgtgtagtctaaagattaattacagaaactgtaagtgcaattctgatttgtttgtggatataattgagttacatcatgcttgttagtcttttcagctttaggtggtgacattttgttttttatttgttttgccaaaatgtttatttgcagaggtggatagcttttttttttttttttttttttaactttcatttaagaggaatgcacatgaactatttgaagcagtaccttcctaagaggttttgtttgctgataaagctttcctattctagctgcttgactcataccagaggagaagcattaaagaagaccagaaggtgaaaagagtcaccctaacctatccatgtgtgctcttgaattttcctaaggaggggcacgcgttgatttcctcattgtctttatcccaca

SEQ ID NO: 32931 - DNA, 409 bp, Homo sapiens
ttgcacattttctgacttttgctcaaaataatgaatcatcttcttagggtttaaacactgatgggtttcatggtgccatgtgcatttgaatgggctgtgttaacaaagctgttccaaaaaccggatctgcaacacagtatcgcttgccttggagatttctccttcaccgtggtgagtcagagctgctgggtaatgtgacttagtcagctggatcaaagggtaacaaacacaagcactccaggcaaacacagaggtctccgccacttacttcgtcactaagtccggcatgttcaccattgcctaaggaagaacagagaattaagaattgtgaggccgggcgcggtggctcacgcctgtaatcctagcactttgggaggccaaggcaggtggatcacctgaggtcaggagt

SEQ ID NO: 32932 - DNA, 539 bp, Homo sapiens
acattttgcaaagcacaaggccttggaaagtggaataggaccagaaatccttctgaacttttttgctggaacgccaactgtggataaaacatacagttgaaacccagctgactttagtttgagcgacccaccaatattaatgcatgttcttcattgcctctggaaatcctgaccactgctcatagggagagtccgtgtgcttccattcccagcagccaagttaaatgcatgccaaaggtcagttgcatttgttcccaaacctgtttatgccgcttgtatttattatcacacttgcacaatctaattaaatattatacaagccaatgactagcatagagctatttatgaaaaacaagttgaatacttagaaaggcacatagtaattcgcttaaaaattgcagtccaacaaggtgtgggtgagaaaattaaaaatgtgccgggaccagggcagagatggtaaaggcataggaggattttgtactcagattccccttataagtgtcttagtttctctctgcacttttaacaaaaactggaag

SEQ ID NO: 32933 - DNA, 660 bp, Homo sapiens
tcataaggcagacccaaacttgcctttttgtggacgccaaggttctgtcgagctgttagggtgcaagttaagaagccagaatggcgggctgaggggagaaatgcccgcatgttacaactctgcaggtgtacacacgtggacaccatatgtacccatgaattccgcctttggaagtgaacttgattgcagcctattttcgtctggaggcggtggattcccggtaggaggcgccttcagtcctcggctcgatcctgtgacgccagccagctgcctatcggcttctcagtgtttgaacttcaaagggctggacgctcacccaagaaggggaccccggcctgacctctctcggaattcaaaaaaatctaaggctcagagagggaatgggagctggctcttccctctgtgtttagcatccacgttttttggcggtctggctgaaaccagcccaccctagttcgggcgccagagcaacgcagttccgagggcagatctccaaggggcggaggcagagccgcgggtgagaggcttccgcgccgacttcgggtttgcactccccggagccagaactccgtggcggctccgggcctccgtggatccgagcagagactggctgcccgcctgccactcgcaggctgggaaaacgccagccggtgcctcgcc

SEQ ID NO: 32934 - DNA, 609 bp, Homo sapiens
cacagagggcttgcttctgcaggactcgtgggcctgcagagggctggctgtctgcttcacgtacctcgacttttggcttaaaagccctcatataatgagtacttaaagtaaacgtcagtcttgtcctgtcgtcagcactttggaactgcagttttgagcccccaggaagtggggtgcctgctgactcaagcacgagaatacctttatcaagtttgttggtcccagcaatgttagaacaagtgtaaacttggctcgttagcagaatcctgggttaaaatgtaaacttggtagaggagcaccgccatgccaagcctccctccaacctggccacacgaggaaagggcgcataattcaccaagcgattggttttatcaggattgagaaactgtgcctaatcaaatcagctattgagtaggtaaacagtctgtgctggcaggcaccatacacaggtgtgaacgggaatgccacctgcaggagttgcctgggtctgccataacaaattaccccaaacttcatggctgaaaacaacacacatttattgtcttgcaataaatgtgttctggaggccagaagtccagcctcagtttcatgggttaacatcacaatgtg

SEQ ID NO: 32935 - DNA, 1335 bp, Homo sapiens
catatacacgtatatttaaaatccttttcttgtgaactttatgttggtgcgggggaggtgtataattgcaagagtttcaacagctgcagatagagtttttcaaaccctccctagctgtttacctcccagggcgtgtacaggtgagtctgggcctccagttccctccaggtctatggcgtttgtgttctcagctccaaactgacctagacaggaattttgaaaacccatggctttgtagactggaagtggctgcctgggtcctcatttggagccattggcatgggtctgcagggacagaaggcacctccccagcactgtctctcctgccccacctcccaaagggccaagtacttccaacaaaagccagcatcggtgccagcacatgccagtttatttagtaactcaatgccaaacaccaggacccaaccattcaccagcatgtcacttcctgaacaccagccctgaagtcttgaatgatgactcactctctcctttacacacgtgactaagatatggctcccgggttctcaccatggtgggcatgccatggttctcacctctgtccccagtgggtgctttgttctttgagatctttctctccaaccctgacttggtggcttccacggtgactcgtcctggtttccctttccagtgtcatttccctttgagggcacaggccctcaaaccactttcattgacttccagatctcagagagcaacattgcgtacgagaaacgcaaagcaaaggaggccatggagaaggaaaagaaaaaggtgcaagacctggagaatcgcttaaccaagcagaaagaggtatgagccgcagggagggagagacgagaggggcccagcacagcgaagggcagtgctctagagccaggctctgggttcaaatcctacctctccccatccctggctgggggacttcaggctagtaccttaccatctctgtgccttagtttccccacttatgaaatacactcaatacacacagatcaatctccttgagttgttgtgagacatgactgctgttatacacacagaacatatggagaggcacccagcactcagcactccgcatgtatgtgtcagctgcccatgttagcatggtgaactcatggctgggaagtggagggacaggatccgaagcctggactgtctgactccccaatgctaaatcttcatccctccttctctactacacttcagctttgtgtgggctcagctgcctggcttaagagaggagatgttggctgggcgcggtggctcgcacatgtaatcccagcattttgggaggctgaagtgggcagatcacctgaggtcaagagttcgaga

SEQ ID NO: 32936 - DNA, 761 bp, Homo sapiens
tgagatcgcgccactgcactccagcctgagcgacaaagcgagactctgtctcaaaaaaaaaaaaaaaaaaaaaaaaagagttgaaaaccttggcataaaaaatcctgcttccctgtgctgtcgcagcacctttaactcagggtcagcaaaagccgtatcctggatatgtccctgattcctacccgcactgagtctctgactcaatgccaaggggcgcagggcacattctccagaggactttggacctctgcactgaaatgcaacttacttcttcagggataattttcctttagcacagatttgcttctggaagcaaaggcttggagggcaatcctgggatctccctgcagcaggccagtttgcacaagccccggcactcactagctttgggacctagggcaagggggcctctccaggccttctcttcctcagatgccaagtagagacaacacaccttcttcctacggttgacatggacatgagtggcccctagagtaggggcaaaataactgagttctgtgctgttctggacagacacaaacaatgccgccttcatattcctgctttgttcctccttgtctctgtgcttttacttctgcctccctccttcttgcatctgatagcagcctctctttcccatctctactctccctcaagccaaagggcataaacaggcaggagctggaagatggaactaagcccggggaagtggaggaagggaagagaatgctcttatcttgtccccatcccaaaccctacag

SEQ ID NO: 32937 - DNA, 1847 bp, Homo sapiens
cctcgggagagaggaccaccagccccttcccctgtccctcacccgctgtctccaggggccctttcaggggtgaaacccagtcccatctccctcgcagctgctagtctgtcctcttccaagaggccatcggcgcccgccacggttcaccctaaacaggggtttctgctccccaggtccgcctcggaacccctgcaaccctcattgagaacgccagtgtttaacagcgagtcgtttccatagcaaccgacagggtgtcacagacacaggattatgacttcacggcgtggggattccggagaagggggtggggcggcgccccccctcgcttccccgccccccggcaagccccgctcctcacccaagccgcgggggaggagccctcttctttcccgcccggccccggcccccagcaggacccctcccgctcagctgctacagtgggcacgaagaggggcatggctttcggccgcgctccccagcctcgcggggggcagacgacggcgggcggggcgcgcagagtacactcgacccccggcggccgggagcgatcacgcgcacgccgcgcgggcccgggggcgggggcggggcgcgcggtccccgccagggcccaagtcccaccttcgggggcggtgcctggcccggggagtgtcaggaagaggaagagcgcggccggcggcgctgcgctgagagcaggggcccggccaaggcgagtgccgcgcgggccaccatggccacggacgagctggccaccaagctgagccggcggctgcagatggagggcgagggcggcggcgagaccccggagcagcccgggctgaacggggcagcggcggcggcggcgggggcacccgacgaggcggccgaggcgctgggcagcgcggactgcgagctgagcgccaagctgctgcggcgcgcagacctcaaccagggcatcggcgagccccagtcgcccagccgccgcgtcttcaacccctacaccgagttcaaggagttctccaggaagcagatcaaggacatggagaagatgttcaagcagtaagtgcccgcgcgacccggccccccgcccgccccgcgacccggtctcgggccccgaaccccccgatccccggatcccgctccgccccgggagcctgccgtcagccaagcttccccgaacccagacgcaccggggttggggacccggcggccccttccagatcgagacccggcatctcaccgcgcacgttagtctgggggacccccggcccctggcacgcggcggagactcgtatttgtgctgcctccggtacaccatagacgcgtccacagagtgggggaccccaggcttccttccagataatcgccaggccccgcgagccccacccccaccaccacacgtgtgggtcccgggccctccgcgctgttagtggggcttctccaccaccccacaccgcacacaccgaggctgaggacccagcggccttccttccccgatcccagctactcgcgttccccacccccaccccaacacacgctggccaaagatacccaccccagtgcccctcgacaccacatgccaaccacattccctcccttaaggtcttttcgtttcctctgcgatctcaggtctccctcaaggtgggttctgggcagggatccccccaacttcctctccagttacttagcgtctaccagcaaactgggggcaaagacttgccctttccatccccacccactcattagccaggacccaaatccttcactcacaagtggtctccttaggaagggacccctcggcccctgttgcccctctggtgtaaacctcactccagtcgtccctgtgggccgagtcccctccgggtttggaa

SEQ ID NO: 32938 - DNA, 966 bp, Homo sapiens
tagtatcatagtaggcatgtatgaagtgcttcctgtggaccaggctctgtgccaagagtctgcttgtatcgtctcttttaatccttgcctccatcctgagatgagttctttgatctccatgatgtagatgaggaaattgaggtctgtggggttaggtgacttgaccaggtcactctgccagcaggtggcagagctggggtttggacccaggtcagtctcagcggagttgatgtaaccacaaaccctcaaggccatcttcaatcaggttgaccctggaacctggctgatcccctgcactagaccacatcagagcccagggcacagggcagatggccactctccaggagtctcttgggaatggcctcctccacggctacctctgggggcttcaccgcccaccccagcacctggcctctcgcagcccccgtcacctcctcttggtgatggactctttggcaccgcagccagcccctgtattgtccccctgggggccagagcctgccctggatggagcccagccccagtaattgattggcctttgattgatagaggcggccgttcaaatcatggtttgagccacagcccagccaggcctgggagctgccaaagacagagggatccacagcccacgtttccatccaagtttggacactttatctgcacttcctctgaaactgagctgcccctggctgcagaagaaacccatgcacttgagcaataaataaagctggggctcagggagagacacgtgggacccaggggctggggcgtgaacccctgacctgctggttatgggacctgtggcctcaccaacagccctcctgacctaatccggacctggaggattgctgagcacagggattgtaaagagaaagtgctggtgcgttgggagtttagtgacggtgattcaatcttgttttagcggtggtgactgccatttatgcagctagctctgtgcgctgggag

SEQ ID NO: 32939 - DNA, 1998 bp, Homo sapiens
caatcaggtatcctaagtgacctaaatcttgcttaaactgcaaacataagcaaaatttaacttgggtcatatctgataaatgcttatgttagagagaaataaaacttaagaccagccaaaagcagtcaattaacagaccttaaaaaaaaaaggcaattttgtaactgcaaaccaatcaaataatttctttattttgcttccacattttcccaataaatacttgcctctgacgttttgtcattgcaacactaaagctctttcagtctgatgttctccaattcatgaattgtttcttattcaaagttctcaagatgtgtctcacatttttcctttacacaagaaacacaagcactaacagtgtacgctgactgagtatggcatggaatcgctttagcgaacacccgactaagaggtgtttgggattctttggctccgctgaggggtttgaagccacagggaaggctaggctcccgcacaacgcctcctcgaggggcgtggggacccggccgtgcagcgcggggacagggggccgggggcgcacctggatgtcctcgatcatatggggcctgaacagctcgcggctcagcagggcgtcccagagctggtccacctgcagctcttccaccagccgcagccggcaccgccgcaggagccgccgatccgcttcgtccatggcgagtagccaactaagactccaggccgcctcagtccgcttccgggcctcggccgcccgccccagtccccaggacccgcccccgccccagggcctgcccccgcgtcacggccccgggtcagtcttcgctccccaccgcctccggacgcatctccaaggcctcgccccgcccccaggagtcgctcttgcgtcaccgccccgccctcaggacgcacctctgcgcctcgccccgcccccagggccaagcctcccatcaccgcgccgccccagaacacgctccgcgtcaccgccccgccccagaacccgccccacgtcaccgccccgctccagaatccaccactgcgtccccgccccagaacccgccccgtatccccgcactgacctcacgtcaccgccccgcccccgcgttaccgtcccgcccgcaggacgcatctccaacgcctcgccccgccccaaggattcgctcttgcgtcaccgcctcgccttcaggacgcctccgcgcctcgccctgtccccagggtcaattctggggtcaccgcctgtccccagaacctgccaccgcgtcaccgcccactccccgggacgcatctagaaggtctcgccccgcccccaggattcgctctgcgtcatcgccccgccctcaggacgcacctcagcgcctcgcgccgaccccagaatccattccgcgccaccgccccgcccccaggattcaacccacgcccccaccccgcccccaaggtcaatcttgcgccaccgccccgcccccaagggctagcctcgtgccaccgccccgcctccaagagccaatcccctcccctcgctccaccctcagaatcgtccttgcgtcaccgctcagcctcagactccagttcgcactctcgccccgcccccaaagtcaatcctcacccccaggatccatccttctgtcaccgccccgccccaaggcggcacctccgcgactcgccccgcccccagggccccgccccgcccccgcatcacctccccactccgggcgcaggtgcccttttgcaattctggcaccagttcctggtccaccgcgggcccttcgccagaattcactatagccccgcttttacagagatccggagggagtcgtcacacttccagcaagagggaaaccatgagtggagccgtgatctgtcccgcccattcaacctcctccggggcatggcttccccttagccccctcctccaccccaagtaaaaccataagctcccctcaccgcccttgtgcccagatcgcagttgactgttccaaactcgagtgtctgatccaaccaagcccaccttacacagtcttccat

SEQ ID NO: 32940 - DNA, 1374 bp, Homo sapiens
ccccgtgcttaaggcacagactggtacattcttgggtggagctcggttttcggtaaacgggattaaaagtcctggattctctcaaaaaaaaaaaagataagtaaacaaaaataaaaggaatgctggattctaggccttgggcaaatctctgcccctctctggacctcggtctccctatcaatattgcaggagttggagagttaaagaatccctaaggtcacttccaatctgacgctctaaggttctacgaatagggttaaagagaatagggaccagagagtgcgtccccatcctagcaactgttgctagacgagggccatctcccggtaggagcggaaacaccttcctggatcgaggaggtccttctggtatcccatcatgcatagcgacttcgcctcgctaggaggcacgttttggcctctttggtcacgatcagccttttggctgcaaccaaagagcgcgcctcgtttctatagcaaccaccccaggtccacgcctagacggcgagtggcaagggtcaaaatagattcgcccagtagacgccctcgacctgttcggtcctcgccttcagtgcgatagacctttaagcgtcacgtgactcccctcgggcttgtcccctcctctttcccctccccaggcccaggcgagcgctggtgtggacgggaagctcccggcccggcgaactaactggagcacggagctgcagccggttgggccggtgtactttcccggtaactccttcccggcgtgacgcgcggaaccgcggacgcggcggggccaggccgactcagggatttcccctcagttccttctcgtttccagtcactgctggccccggggggagccgggagccaacagggccgggccctgggctctcggagggcggcgggggagggggctgtctcctgcagggttgcgacctccggcaggagcgcgaggcggggcttagacctggagcttgtctctgggagcttcttcctggtcctggatatgctgcccagagagctggcagcctacctgttgggcaggtgtttgctgctccgaggtcggcgccgtctatctcgcatgtcagctaaagaacttcccagaccaccgccacttcggccctctagctggaaggaactgacatggttaaataaggcagcgatcgtactgcatggtagaaataatagcactaacgaccatttgttgactgttgactctgggctcagtaaaccctttacatgcatttagtccccacatgatgatccttcaaggtggtagtattcattcccattttatgaataaggacgctgatgcttagtaagtttaaataatttgcccaaggtaataaagtagtggagaatagatcctagtcttcaacccatatgctta

SEQ ID NO: 32941 - DNA, 821 bp, Homo sapiens
gccaggctggtctcaaactcctgacctcgtgatctacccacctcagcctcccaaagttctaggatttcagatgtgagccaccacgtccggccatgactgacttttttaatttgtcagcataaaacagtgaataaaaattctccagtggaaagtgtacttgattttccctttgacccgaaatagctgcatcattgctttcagccctgcattgctgaaatagatcaccacatgtttattcgctcaaacaggtctgtcttgtttggttatattactttagccaaggtcagctacgtttttattaagctggtaagtaaagaaagcccatctatttgcattgagaacactgcataaaatctagctgattcttggtttttctctaggcccgaggtatgaagaagcaaatcattgacgacttcatcacccgaaacaaatatctattggcagccaggctcaccagccagaagttgttccatgaactctgccctgtgaaacggtcgcatcgacagaggaagtaaggacttaaggctttgcctctgcttgttattacaatagaaggatcatgattcattttactatagggtgactagacatctgccctgtaacattgagaacttattcttcatttaacaaatactgggccgggcatggtggctcatgcctgtaatcccagcactttgggaggccgaggagggcggatcatctgaggtccggagttcaagaccagcctgaccaacatggagaaaccccatctctactaaaaatacaaaattagccgggcatggtggcttatgcctgtaatcccagctactagggaggctgag

SEQ ID NO: 32942 - DNA, 489 bp, Homo sapiens
atcacagcccatcacgttcaggccttgacaacccctgatgatctccagagcctattcaagatcaagactgagttgtccacagtggtaatcatttacagtgaaaagcacccagtagagcttttcccagcccacgccaccctttgacttggaattggctttccctccataaacatttgttgactgccaggcacactggcaggcctcccagagaaacagataatgcgtacacagtccctgctcctcagggctgcatggtgtggtgatggagacaaggaaaccaatcgtttcaatgtcatgcaccaagggcttcaaggaaagcaagcccagaatggtatcagcataggtaatagcctggagaggtgggtaaggcttccccaaggtggaaatacccagttcaagggataggccaggcagagggaaaaacacaggcaaaggcaccaagatgggaaaagttcaggtagtaagatgtggccagaagacagagtaagt

SEQ ID NO: 32943 - DNA, 1607 bp, Homo sapiens
aggagaggggaggaatccacagcagccatcccagcaaggccccaggatggggacacagagaaggttcaggctccagaatcccttcttttttctttttttgagacggagtctcactctgttgcccaggctggagcgcagtggcgcaatctcagctcactgcaacctccgtctcccgggttcaagcgattctcctgcctcagcctcccgagtagctgggattacaggcccgcgccaccatgcccggctttttttttcttttttttgtacctttgtagagacagagtttcaccatgttggtcaggatggtctcgaactcctgacctcgtgatccgcccgcctcagcctcccaaagtgctgggattacaggcatgagccaccgggccggccaaaatcccttcttgaccaatgatgacactaagatgtgggaggccacgcccatgttgagccctggggtttgcttattgagggtccaggtaaatcaaccatctcaaaccataaggggcattttggagccggccaccagcttccaactcgacccggggccagcaggggcgcctgtctcggtgctttccatgcccgacagccagcaagcagtccctccacgtgtacccggcccccgtccttccggccttacctcgccccaggccggttggaggtcccagtatccaggggcaccccgatgaaggcagcgtccagcccctcgggggaggtctgcaccggcaggcgcatcatggagcagacgcccaccggccgggccacgaactcggggctggggggctggttccggggcgcgtcggaagcctggcggctctggcggcgccccggatgaaagagccctgcggcaggacgcgcgcccacgccgggccccgggccccgggcgcacccggacgccagcagcctcagcattgccgcgcgcggccaagacctcaccgaccaaaccgcccgcgaggccgccgcgatctggctggtcccgaacggcgaggcgagtgtgcacgcgccagagccggaacccgagccggctcaaaggtcaggggcgccctaggatcaaggcgggggaggggccccaggacctgccgtgctctcccctcaacccctctggacttcagcctctggcaaatagagtcaggctgggggtgcccactggccggcactgtgccaggggtgtctgcgccctgctccccactgtggccttcagcagcctcttctcccattcagagtaattgtttgtttttatagagacggtctcactgtgttgcccagactggtctccaacttctggactcaagtgattctcccaccttggcctcccaaagtgctgggattacaggtgtgagccacagcagccaccccagagtaatatttttaaagccagaaagatatgaaggaaaatgatctttctctaagccagaaaaataggaaatgcatttttttaaataatgtatttttaaatgtccagggataggaatctcaagaagcagtaaagttagttagctacttagctagctagctagttattttgagacagggtcttgctgtgttgctcaggctggagtgcagtggcacaatcatagctcactgcagcctcaaactgctgggctcaagcaatc

SEQ ID NO: 32944 - DNA, 1088 bp, Homo sapiens
aagcaacaaaacgtgaactaagccacagggtagctgcaggaagctctatgcctgggaccactacaggcaggcactagtttccctgtccaccactgcccgaaatggagtcgggcccggttctcctgagctgagcaggccaaagcagggagtccgtgagtggaccgggcatagccagagcgacgccgcagcaccccagccgcagggtcagccccaaaagcagcagggcccgcttgatcgcggatgccgggacgccctcgtgcaagcctcgaaggggggctgccaccccgaacattcgccagaacgaaagcggcagccaggagaagccctcgcaggtgctgtagggatccaagcgcttgagctgagtccgaaactcgcacagcaacctcgggaggataaactccagcaaccagaatcgggttggcgtcgcctagcaaccaggagccaaatgcgcggacgccaggcattggcctgcacgtgtcacgtgagccagcgccgctgcccagtgggagattacgccgcaggcacgtgatgcggcgcaaccgccctttggcagagcttttcgcgaaggcagttgtggctctgagcgcataggcgaggcattcctggggtttgcgccgtatccttttacaaagtcctggctttggctggtgcgaccaaagaaaggaaaccggcgcttgagacttgtctgggctggctatggtgaagcagtgaaacggtgcagaattgtgtcaatgaggctagttcagttgtgcaagagcatttcctcaaagtaagacagaagcttttagttacgtcaacacctgctaatgttaggctggccagaaatttcctgacaaataatgggtgaaggtcgggcgtgtggtcgctcatgcctgtaatctcagcgctttgggatcacttgaggtcaggagttcgagaccagcttggccaactaggcgaaaccccatctctactgaaagtacaaaaattagccgtgtgtggtggcgcgcatctgtaatcccagctactctggaggctgaggcaggacaatcgcttgaacccaggaggcagaggttgcagtgagctgagatcacgccacttaaaagaaa

SEQ ID NO: 32945 - DNA, 3018 bp, Homo sapiens
ccacagccatcttatttgctccttctctcctgttaaaatggaaaagggctccctaccatggagggggagtgggagtaaatggaaagatgctaatctggcatccattacaagttcatctttcagttttggttttcttactcatccgcaccttagttctgggcctctaccactcatcagctgtgtgccttaaaaacaggccattaaagtagcaaatatttattgagtagattctaagctgtgcccaaaaaggcactgcgctaggtggtaggagttgctagggctaggaaacagacacagtccaagtagagagaaaattatttacaagacaggggaatggagccttggaggaactgacctatgtggctgggagggcagagaatgtgggaagagctcggaagaaggggctggggaggtaggcgtgggccacagccaactggcttctgtagactagggagggtaatgattttggtttcaatcctaaatcactaagacaggaagtgaattactctgtcggagcctcaatttctacctcgaaaaatatgttttattactaactcctgtactagattgagagttacggagaaggatttatccttttattcatttctgcatcgccagcgcccgacacatggtaggcgcttaatcaatgcctgttcggtgaataaataagaccggggactcctccacagacttctgtcattaagtcaaccagtcagcagagatttccttctccgcgttcctttccttccctccccttttcttgcccttcctccctctcctcttccacgcccccttcccactcctccccctcctatcctctcctggcttcctcctcctcttcccggccccgccccccgctgcgttgcgaaggcggggaaggcgaggcgggctttacggcagccgcgttgcggcggggcggggcgccgggcggccggcgcgcttggcggcagccgtgggaggcaggccggcaggcagacggactcgcaggcgtgtggcggcggccgtgcttgctagtgagggcgggagggagtgactcactgagcgtgtgtgagggagggagcgagcgagcgaacgagcagccggcgccgtcctcccgcagcaccagccaggccacgccgccgcctcttcccctgcgccccgcgcccaggccgggccgagccgagccgagccgggtcgggcccgggccatgctgctcaccgtgtactgtgtgcggagggacctctccgaggtgaccttttccctccaggtcgacgccgacttcgagctgcacaacttccgcgcgctgtgcgagctcgagtctggcatccccgcagccgagagccaggtacgccgggcagcgagccgggcctgccccggagctaagccctccccgcctcggggcctcactccctccctttgctactggtgaagaattgggggctggggggagcaaggatagccattctcaggtcacccccgcatccggaaaggagctggggagctggcatcagtagctgccctcacacactccgagcatggggtggggtacgaggagagggagcggagaacctgaccgcagacgcacccactgcagcgtgaggggcgcgtggactgttgagcagcgctaaccctccccacctttggctctttggcccttccctgtttctaatcccgagtgtaggatatcgttgtggacctcagaagcagccctgggtttgctaggattcatacatcctgcaaaccagaaataccagtttggatcactgtggtagatagatgttcctctgcttttttttttttttttttctggagagggtttctgcttaaatatacgcagtttacctttaaatgcacagatttgcacttccggtgaaagaaaaagtttaagacttgcactacctcattttggggtctttggaaatgctctttacccaccacatgcgtttctggttaaattcttttgaaaaacagtacctattggttcaactcaagctgtttgtttgtttcggttctaccctggtagtaagccagaaggccctttttctttcaggtcacagttcagagtttgggtcagttcaaagctcaatgctttaaaaggatatttgcttggaaacggcctagtatcagtgctgtttggtggtttcatttccctactcagcttgctggaaagaagttcagcctctcatattttaactaagcaaagtaattctcaaaatgctttggggctgcccctagtctttatcaaacagaatcggtgacactaacgctgtaaactttacactaaaacacttagatcatgacttaataaatttagcctggaggaaatagtctaaacattaagaaaattatagaggtctcccaagtctccatcaagtaaatcttgattttctactgcagttatgaaatagtttacaaaacgattgcccaactgcagcttgttctgctgtcttatggtaaacacgtgtcaatactttgttcagaagtatgattcctttacacaatgtgaactttagaaccttggcataaagctgttcagaaagaatttaaaaagttaatccacaaaagctcaggaaccagttctgtcagtgaatgcctcatgtggagaactaggaaaggactgtttaaatagagaaaataaactcttcaattttttttctttttttgtttttgtttttgagacggagtcttgctctgtcgcccatgctggagtgcagtggtgcgttctcgactcactgcaaccccagtctcccgggttcaagcgattctcctgcctcagcctcctgagtaactgggactacgggcgcgcgccaccacgcctggctaatttttgtaatttttttttagtagagacggggtttcaccatgttgaccaggctgatttcaaactcctgacctctagtgatctgcccgcctcggcctcccaaaatgctgcgattacaggtgtgagccaccgttcccggacaactcttcaatttttgatagtggctttttcttttcttttcttttcttttttttttttcgagacggagtctctgtcgc

SEQ ID NO: 32946 - DNA, 2631 bp, Homo sapiens
agggaaccagagttgagaactggggtgtctgagaataaaaaggagggactaatctatgtgtcaggatatatttatttgggaacttaaggagggaagagagccaggtaggagactgacacctctaagtgcaggggctttatgagatggtggatttgaggagggtgtgtgggaagagagttgttacggtgggtttcaggggctgagggagttgaggcccttgggatacgtggggctgaagaagagggataaggataaggagtgggaatggggcattggggctgaaggtgaggagggtgtgttttgggggtggggaggaacaccagggacctcaaatgtaggactgggccttgagggtgaggcactgaggaggggaggctgtggagggccagggggcccagggagggtctagggctggggactggagtctaggctgacccggtgggggtgctgggtcctccaggctgcgaaagccagggggcctgggtctgcacattgagggggtggctgggctaaggaaggggaggaagataagtggggcttgcaggctaagagggtcttggggtccctggccagagttagtggggtgcactggggtctccaaggaggggtctgtggactaaagagggccggcgggagggggcccagggtctgtgggtgtctcgagtctctgaggagggccggggtctcagggtctgtgggggtctctggcctgtggggtcggagtctccagagtccttggggcctgtgggagtctctggggttttgtggggggatcctgtgggctgaggagggctgtggggagggtctcagggtctctggggagggccagtgcctcggggtctttgggggtctctgaggagggctgggggcccagggtctgtgggggtccccagcaggtggggttggggtctccggagtccctggagtctgagggtgtctctgaggtcccaggggggagtctatggcctgagggctgagggggagggtctccagggtctctgaggagggccggtgtcccgggcaggcggggtcggggtctccggagttcctggggtctgagggtgtctctggggtccctgagggaatctgtgggctgacgaggcctgggggagggtctccgaggagggccggggtcccagggtctgtgggggtctctggcaggcggggtcggggtgtccggagtccctggggtctgagggtgtctctggggtccctgaaggaatctgtgggctgaggagggcttggggagggtctctgaggagccccgaggtccccggcaggcggggtcgaggtctctggcgtccctggggtctgagggtgtctctggggtgccggggagagtctgtgacttgaggagggctgggggcgggtctcggggtctctggggagggccgcggccaagggtctgtgcgggtctccgggtccccggagtccccaggcgcaggcgggccctggcgccgccccgcctgacatcagttcctgccgccgccgccgccgcggcgcacagcccgcggcctccttccccgccggccgcgctccggagcctccgggccgcggtggagcgagggcccaggcgaggcgagggccgggcggcgggcgccgggccccgcggccggcacgacggagcccccgtacggccggcggcagcggttggcggcggcccccggcccccggcgcgggaagcggcggcggggcggcggcggcggtggcggtggcggtggcggcgacggtggcagcgccatggagccgggggaggtgaaggaccggatcctggagaacatctcgctgtcggtgaagaaggtgagcgcggcctccctcccggccggggccccttcctcgccgcgccccccacgccctccggcggcgctctcccgggccggggccccccgcccttcccctccgcgacccggggggcgacgagcggccgggagccccgggccggtagaggggaagcggcgccgctcacgtgagcgccgcggcctcggagctatttttaaagaacaaagttgaggtcagcatcctcggagcttccccaaacctggcccggggccctgccctcccggagaggggtcagcgaccctccggtcccccactggggcagcggcgcccccgggagctcctgaaggaaccccatgcagcctcctgtggaatccgctgcatccccgggtccccccgccaggctggcgtcgcccagggtctggcagtcagggtggaggccagtgataagcaacttcactttcccatggcctgggtcccggcgacattgcctctgctcctgggaagtcccctgaataatcttgctcaaggatggtagctttgaagaggttcactaggggctttgattataagaacctgaagtacatggggattgcattttggatgctgatccggggaaccgggtgacaccacagacaccttgctgtggggcttgccgcagtaaacatcactgtcccaattccaggtagaaatgagtacatacctgtcaagggcatgtatttgtgatgaagttggcatatccgcaaaagggtccgtgctagaaggtagaatccatattctgacgtttttgggctggatataaaaataataataataaatttaaaagaatccatattcactgaaaacctaaatggc

SEQ ID NO: 32947 - DNA, 665 bp, Homo sapiens
tgcaggaacagagtgtgtacagcagctgctgagagcctgacaagccttgtgctcgtccatctctgaagacactggcaggacagtgcagtgtggctgctaacccagtaggagatcgctgagagggtggtgggcaacagctatatcaagctgggtgccgtccaaggtggaggacatcacgtgtcagatttcaacacagctggtatgttggtaaggttaggccaggctggtaaacagacccagaggcaccatcgtggcttctcatgtcttgcaggaatgccctggtctgcagccacgatcacctgacgctcttcctgaccttggtgtccgggctagagttcattcgtttcgagctggatctggtgagacaccagggctctcactgcttgtgggaagcagaggagggggcagggtgggggcagggtgggcggtggcttcatttctcaggtcttgttgagggagcttgttgagtatgactgggcttgagcaaaacttgtttttttgggcgagggaaaggtttcagggtccatcgaattgagtgagaagagaagtgatggcaagaattcctggttcaggtgactttttcctatctccctatccaacttggagaaaagccacattgcctggagtatcttagcccagaagaactggccttcatgtttaggatg

SEQ ID NO: 32948 - DNA, 2018 bp, Homo sapiens
aggccctcaagccactcagcattgctgcctcaagggcctgggagggaaggggtgggccctgggaggtgggtgtgggactccaacttgggtggttctgcctctagtttggactgggccttgggtgactgagggtggcctggcaggagagagctgtctgggggcagaggccaaggtgggcatgttggtaccggccccagcctgagcagacacacctgacagctggcccaggtggcgttctcttctcagcgggcacaaagggcatcccagggcaggcctggcagcaagtccttaccagccaaggtcactcctcaagtcctactcacccaggtgccctgaagtcctgggagcagcgaggggggcataggagccagaggcagtgggggtgggggcgagcaggcgatgcgggtgcctttatcgggtgcagcactgacctaggcacactcttctcatcgccagtcctccacagaaccttctggagtggatgtcagtatctccattttacaaatgagagaaactgaagctctgagaggaagtgacttgcccaggggtcacacatgagagccacacctgggattccaatcagctccccagggctccagagcccttctctacttctgaccctgctgagcatgggcctatagacggtgggagccagactgaagacttgagtcctggaaaggggaagtcagtcaccaggggcatatcaggggcagggtggggcaggggcggagttggccgtgtaccccatgccagggacctcccagtcacttgccccctgcctagggctctgccaaagctggacaggctaagccagaggcaaggcaggggtgccagccctttgcccagggccagagggaggccaggaggaggtgcctgggctggttggcaccttctccctatccacgctctccctccagtcccaagtgacctttcccccagatcccagggtccaggcccgccctcggctggcaggtgtgggcacagaggcagctgggattggtcgcagctggcggaggcgcgtcccaggctccggcagaccgctggaacagctgagcagagcaggtggactgctgagatagaccagggacaccaggcagccacaggcctgtcagaccaggacccttaccctctagacatggcctcggtcccctgcaaaccccagccccgtagccctgcgaggttacagacagcctaaacgccaccaccacagggcctgtgccgtgcccctgacccgggcacagaaggccactggcccggaggccatggagacggtgcccccagcagtggacctggtgctgggtgcttctgcctgctgcctggcctgtgtcttcaccaaccccctggaggtggtgaagacgcggctgcagctgcagggggagctgcaggcccggggcacctacccacggccctaccatggcttcatagcctctgtcgctgctgtggcccgagcagacgggctgtggggcctgcagaaggggctggctgccggccttctgtaccaaggcctcatgaatggcgttcgtttctactgctacagcctggcgtgccaggctggcctcacgcagcaaccaggtggcaccgtggttgcgggagccgtggcgggggcactgggagccttcgtggggagccctgcttacctggtgagtggcttgtctccatcgtccaccctccaccatcccatgacccagctcccacaggggccctgcagcctccaaaggcagggctcagtggacctgggtggggtggggcagccggggtggggctgctccctggaacatcctagcccaagcctggaatctgccccttggcccagggccttgctctgatccatgctcccctgcggtccctgccccactggtcctgagccaggggagggggcagagggtgtcagatgtgctggctcaaatcctggcttggttacttctcttcccgcatggcctcatgtacgataagaataaaagctacccttgagggcctccgcctcgtgtgcactctgcaggggggcctcagggccaccc

SEQ ID NO: 32949 - DNA, 1052 bp, Homo sapiens
tggtcaggctggtctcgaactcctgaccttgtgatctgcccaccttggcctcccaaagtgctgggattacaagtgtaagccactgcgcctgtcctccctcaaggaagatttcaagtaaagtggatgccagactttagcagggacagagaccagagaccagcccagagacacctgtcccttcaccccacactgcccaaatggggagcccgggcagcagctggctccaggcaccccgtgtgcctggagctgggaccttgcccttctgggcctcgaagggttaacacccctggctctcctcccctcccctcccctgggcctttgacccctcccagcctctctccttccctccaccgacacctttgcccagtgacgttggtctgtccttacgcagacctggccggaggctggggctccttccggggctgccatgttctctcttccatccctcccctcctggctccccggcctcccctccctcgagtggggctctagcctccttgactccctcctgcaaggtgagcacctcgccccattcctgccttggccccgcccccttccagctctttgcagtgcagggtggaccccacccacctggtctcccgacacccctgccccttggccgccccctctgaccctaccaatgaagcctgccctcctaacacccctgcacgctgcctcgctgcctccctcccgccccctcaggcctgatcggggcccttggagtcttggtcctgaacagcctcctgaaagtttacttcttcgtgggctgtgccaagtgagtgcccacctcatccccccagggaatgtggctgggggcacggggacccccaccaggggtcgaaggtggcagttctgcacccctgcccacacccattctgtccccaaagtgacccgcagcggcgacccgaaaaggagcggcttcgggcccagtgggcctccctggaaacggtgcacctggcagggctggccctgtttctgacggtcgtggggtcccgggtggctgccctcgtggtgctcgagttctccctccgggccgtgtccacgctgctgtc

SEQ ID NO: 32950 - DNA, 2348 bp, Homo sapiens
gccaccacacctgactaatttttgtatttagtagagatgagatttcaccacgttggccaggctggtcttgaactcctgacctcaagtgatccacctgcctcagcctcccaaagtgctgggattacaggtgtgagccactgcacccggccagaagtggaagtttgtagatgtgactggagtgtagagggctggggttatggttaatgattaggtcagagagaaggaaaggactatggtgccaggctagagagtctggacttcaggctgcagagaggggtcaggctgagatgggcgagctgattagaagctggtgcagttgtcccaggaagaagggcccaggagtcatcacatgtggcttggtgatcagaagggtcctatgctagttttgaagttctgctattgctgtctttaaattcttgatttttgtttgtttgtttgtttttaatagagacagagactggagtcaggctggagtgcagtagtgtgatcatagctcactgtagccttgaacgaacttttgggctcaagcagttctctcaccttagcatcctgagtagctggaagtacaggtgcgcaccaccacgcccagctaatttttttatttttaaaatttttgtagagttgacttctctacaaaaatttgcccaggctggtcttgaactcctaggctcaagcgatcctctcaccttggcctcccaaagtgctgagatcacatgcatgagccactgcgcacggcctgaaattcttaaattttttttttgtagagactgagtctcactttgttacccaagctggagtacagtggcgctatctcggctcactgcaacctctgcctgtcaggttcaagcaattctcttgcctcagcctcctgagtagctggaatgacaggcttacaccaccatgcccgggtaattttttgtatttttagtagagatggggtttcgccatgttggccagcctggtgttgaactcctgatctcaagtgatctgcccgccttggcctcccaaagtgctgggtggcgtgagccaccacacccagtcaaaattcttaatttttgaacaaggggccccacatttttattttgtcctagatcgtacaaattatgtagtcagtcctgctgaggaggctcagaaatcctctcccaccccttctacagctggctccttgtcactgaagcttctgtcttctccggtgatggtgacaaggtggcaacttttatgcggggacctaagtggagagccccagagcagatctcttactcagccgatgagtatttcgacacacctgttcactcccatttatttaaacagatactggaacccagaggctattttcactgaggttatcaaaggagctgggtagagaagttgataaattgctgagtaattacattgtctttgttggttataggtcaaagtcctgctgataatgcattttgaaagcccagtgaggaagtttaagtgctgttatccccaacatcatcctcacgagttccagcagtgactggcaccttcctgagcctggccaggaagcgaataaacccccccggtagtccttgatgacttggccgaggtggtgtagtaagtcggcatttggactccagcagttatgtgtcagaagatgaggcttcttggccaggcatggtggctcatgctggtgatcccagcactttgggaggctgaggcaggcggtcaagagatggagaccatcctggccaacaaggtgaaaccccatctctactaaaaatacaaaaattacctgggtgtggtggcgtgtgtctgtagtcccagctactcgggagggtgagtcaggggaatttcttgaatccgggaggcagaggttgcagtgagccgagattgcaccactgcactccagcctggagacagagtgagactctgtctcaaaaaaaattagctgggtatggtggcgcacacctgtagtcccagctacttgggaggttgaggcaggagaatcacttgaacctggaggcagaggttgcagtgagcagagattgtgccactgcactctaatcctccagcctgggcaacagagcaagactctgtctcaaaaaaaaaaaaaaaaaaataatgaggctcttgaactgcagcagcctggaaggagttgagtgctgttaactaagaagaaaaatgggtttccctgcactgcccacacccacatctcaccatttctacttgctttggggtccatattatttatgactattgttggaaggataacaatacttttatatgtaggtagtattgttttttttttttttttttgagacggagtctcgctctgtcgcccaggctggagtgcagtggtgcaatctcggctcactgcaagc

SEQ ID NO: 32951 - DNA, 3538 bp, Homo sapiens
tttttttttttagagatgaggtctctctatgttgcccaggctgctcttgaacttctgagctcaagtgatcctcctgctttggcctcccaaagtgctagaattacatgtgtgatccaccacgccaggccaagacctgcatcttaagagggggagtttagactgcaggcctcttgcttgtaagtgacatataattttcccaatccatccagaaaggtccttgtatcctgtatgactcatactaattctcagagagtgagcatcagattagagagactctggagtgtaccctgctcataaccttccttctgcagaaaaaaatgtatgtgattcagtggaaaataatgcactatctacacccagcacacccttcctggttatcagattctagccttttattgtctttgagcgactttacagctctgtaaattataggtaaatgatatattgccctgtctagtagaggttctccctcgctttcttgttgaaaaaccagttttcatttgcacattcatttcaatattcctgacctatgaatgtgactgttcttagctgtccccccttttttttttgagacagagtctcgctctgtcacccagactggagcagagcacagtggcatgatctcagctcactgcaagctccgcctcctgggtttaagcgattctcctgcctcagcctcccaagtagctgggattacaggcatatgccatgatgcccagctaatttttgtatttttagtagagacggggtttcaccatgttggccagactggtcttgaactcctgacctcaggcaatccacctgcctcggcctcccaaagtgctgggattacaggcgtgagccactgtgcccggcccttagctgcccttttgagctggttataacatcacctggctcccttatgagttaaataaaatggctaatacctattcattttctatctgtgtgggagtcatgattttaccttcttttgaaaatgaaaatgaccttgcaacgcttccttcatcaggtgtttatgacagctcctttaggccagaggaggtggtggggtcccttgcagggcatcccatgaggtggaattaagagcagctggccggtggcctctgttccccagagtggtctctgaatgggaagggaggggaggggaggaggaagacaggagggaggggttctgcccagtggatgggataaggtcttagcaagacctagattctcgggctgggtgaagtggctcatgtctataatcccagcaatttgggagccgaggcaggaggatcacttgagcccaggagttctatttcagcctgggcaatagagtgagaccccatctctacaaaaaaaaacaaaaaacaaaaaacaaaaaaaaaactagactctctctctggttaagctcctagccagctatttgaccttgagacacaatgtctttaagttttgagggtgaggaagggtgtcaaaaactgacatttatttcctgagctcttgtctgtcttgtctggggtgaggctggagaggtgggatgattgactacgctgaacaggaagctaggtttcaggagttaggcagcctgcctgggatcgagactccttgatgaggatactgacagtaataacaacagcagcagctaccatttcgtgggcatgcatatgcccatatgtattatctcatttagttcccactgctgcctggaaggaaggaatgatctatgatcccatcgttcacacagggagacgaaggctcaaggtcacaccacatagattccagctctatatttagccaagtcctaaaccctttattccactgccttagcctcctagatgagacagggcaatcccttggccactgaattgcttttttcctcacctacaaaacaaagagaattattaccttgatcatacacgtaaaggaatgcaatggcagatgaccaaatgtcatgtggtttcctgggatggattctggaaaggaagaaaggacattagtggaaaatctggtgaaatcccagtaaagtctggagtttggtgagtcatgttgtaccaatgtcagtttcctagtttggacaaatgtgccatagttgcgtgagatttttttttttttttttctgagacagtgtctcgctctgtcacccaggttggagtgcagtggcgcgatcttggctcactgcaagctctgactcccgggttcacgccattctcctgcctcagcctcctgagtagctgggactacaggtgcccgccacgacgcccggctaatgttttgtatttttagaagagatgaggtttcaccgtgttagccaggaaggtctcgatctcctgacctcgtgaactgcctgcctcggcctcccaaagtgctgggattacaggcgtgagccaccgcacccggctgttttttttttttttttttaagacggagtcttgctctgtcaccaggctggagtgcagtagagcgatcttggctcactgcaacctctgcctcccaggttcaagcaattcccctgcctcagcctcccaagtagctgggactacaggcacacaccaccacgcctggctaattttttgtattttagtagagactgggtttcaccatgttggtcaggatggtctcgatctcctgacctcgtgatctgcccacctcggcctcccaaaatgctgggattacaggcgtgagcctccatgcccagcctcaataaatctaaagttattttgaaatcaaaagtttcttatctaacaaactaacgggataaaggggaaagtctttgagcctgagctcctggatgccctgcctctcactgatgacgtaagaacaagggggtgagaggaggccatcacacactcttctgccaacaggaaagtcgggctgagagggtagtcatgtctggacaagggggaggggcctactgactgagaagatggcaagagaagaggagtgggggacctgacccaatatctatagcatgtgggagacaagtgccaagtaggaagaggatggtgaggggtctcagaagatcagagtgaccttcacccagtgtgagtggtaatttttttccttcccaccttcatcctcctcctcgcagaggtgatcagatgtttgcaggtgcctgcttgtgtttacaagtaggtcttggaagataagagaggcagtgggaggggtgggaaagccctgttctggcagtcaggacacccagggcttggccactaaccagctgtgtgagctcggccggtctcacaccctctctgggttatggattcctgaggaatccataaacacgcaaggattcctcaggaaaacacaatacgggccgggcacggtggctcacgcctgtaatcccagcaccttgggaggccgaggcaggtggatcacctaaggtctggagtttgagaccagcctggccaacatggtaaaaccccatctctactaaaaatacaaaaaattaggccaggagcggtggctcatgcctgtaatcccagcactttaggaggccgaggcaggcggatcacctgaggttgggagttcaagaccagcctgaccaacgtggagaaac

SEQ ID NO: 32952 - DNA, 3014 bp, Homo sapiens
gcggaggttgcagtgagccgagattgcgccattgcactacagcctgtgcaacaaaagcgaaactccgtctccaaaaaaaaaaaaaaaaaaaaaaattatggcctgccgtggtggctcatgcctgtaatcccagcactttgggaggccgaggcgggcagatcacctgaggtcaggagttcgagaccagcctgaccaacatggagaaatcccgtctctactaaaaatacaaaattagccgggcatggtggctcatgcctgtaatcccagctactcgggaggctgaggcaggaaaatcgcttgaaaccaggaggtggaggttgcagtgagctgagatcatgccactgcactccagcctgggcaacaagagcaaaactccatctcaaaaacaaacaaacaaacaaaaaacacaatacgacccaggaatcctgaactggtcctttacagttagcaggatcccaaacttcagaccacagggaggggctggctgaagcaggagagaaacccatgaggggtcaccctgagggcccaatcagaaggcacatggggggtcagggagggttaagaatgctctctggggcctgtgagtcatgggcctggcagcttggggtttcccaagactgctcagacgggctgtggcatgcagggagctcagccagaacctcccttgcaaatctgcaccctttcccccagcaacccccccgcttccagcacccctctgaccagcaacccctccttggcaaggtagaactcccaatggcccaccctgagatggcttcaaatcaagtcccacgggcagaaagcaaacagtggctccactccagtgtgcctagagatcccgcttcattcattcatttgttcattcattcactcactctttaataaaatactcattgacccctcccatctgccagtcactgcccttggcacagagctcagtttaatggaaaaaggagaaaagagaacagtccgtgctggggaggcacagccaggagtccaggagggcaggccatggagaaagtgatgtcagagctgggcctaaagggtgtgcaggggtcagccaggcgaggctctggaacaagagctatccaggcgcttgctctctgagctgggcacagctgaatgtggctgagcatgtgggaagtgcaggatgagggccagactcaggcaggaaccaaagcagcaaggcttcctagactctgtgccaggattggggctttttcccaggggggcaacggtgagaaggaagaaccccaagccagtagaaccccaagccggtagaaccccaagccggtagggcagatgaacttgccatagagtccaactgcccataaccacagaggtggtggccgggcccagagagggtgtgagaccggccgagctcacacagctggttagtggccaagccctgggtgtcctgactgccagaacagggctttcccacccctcccaccgcctctcttatcttccaagacctacttgtaaacacaggcaggcacctgcaaacatctgatcacctctgcgaggaggaggatgaaggtgggggaatgaaggcgtgcaggtgaatcaggtcagtgttgctcataggctgacccagtgcggatggtcccgtcagtggcaaggagggcaggattctgcacgggtgagagcacttgccctagggggatgcagtgagtcactgggtgcaaagttcacactcctccttcctcctggctttgatctgagttccctggagggaggtgcagcctggattcctggaggcggggccatctcctctccctgccctgccctgtgggtccagattgggaggccggctgtctccactcctctctgaactcccacacacaccttttcgaggccctagtaagtttccatgttggcctcactggcggggtcagacttgacctatcacctaggacattcgctgcaggaagttggaagcttccctctcctgctgagctcagccatgcgtcttactgcctggtgccacattccgttccctcctgtctctgggaggatgatcagatctggcagagagcccaggcctgcccaaccagcggaacaaaataaatgaccgcagggtgggactccgcggacaccaagacaccagggaactcttggactgagcaccagaggaactaaccccagtagctgcccccgagcaaggacctactactgatgctgccaacagccccgggagacagaaatattatcacccttattttatagagaggagaaaagaggggtgcaagggtcatggggacagtgactgatcctgacatccactaagggccctcttgggttttgtgtcatgagttgaaagggaagcagctggcaaggtggtgtgacattgagctgcgcaagtgcaggtgagatgcggtggaggtggagcagtgggactgaccagtgttggggttttgtcaggaccgcaggagggggtgggggtggggcctgaccatgaattgtaggctgggcaggaaggacacggagggcaggcaggctgagggacatgcaaagggggcaggatccatggactgctggagccggggcactggaggaaagaaatgaggtgaggtcagagaggtcagtcaatagatattatagaggaggggcagtcactggtcacgggggacagatactggggtggcactgctcctagggtgtaaacccttggcacatagcctgcatagaacaggccctcagagagtatttgtggaatgaatgagtggctacttgcagtctggggttgggtgactcaaaggatattttactttcttctctctagcttttttttttttttttctgagatggagtctcactctattgcccaggctggagtgcagtggggcaatcttggcccactgcaacttctgcctcccaggttcaagcgattctcctgcctcagcctcctgagtagctgtgattacaggcacccaccactattcccactaatttttgtatttttagtaaatacggggcttcatcatgttggccaggttggtctcaaactcctgacc

SEQ ID NO: 32953 - DNA, 6186 bp, Homo sapiens
acccagcccagcccacaccatttctatactgccttgactgtcttaagaatctgggtgtaatcaaagttttggttaacatctaccctcttttagggaacacaaatgtggtacaaattaattcagacacctcagttttagagtaagaaagaaaaactacatgaacaatgaattggcaattctggaattcactagtctggtctagcttgacaaacacaaatgagatacaggactacataaacaaaggccttttcacctctagggcagatcatgaaattgtggtgattcaaaatctgtttatttgaacatggttctctgcatatttaaagttcactagttccaacagtgtttgggttttttcggtttaggaagctggaaaaagtcttaaggtcgatatgaggatgggggaggaggttagctctggatttctgtttaactgttttgcaaatgtacgccattggtcataagggagatgttaactgtgcaaacaccacccactcttttttttttttttttttttgagacaagagtttcgctcttcttgcccagactggagtacaatggcgcgacctcggcttaccgcaacctctgcctcccagggtcaagaaattctcctgcctcaggctccggagtagctgggattacaggcatgcaccaccacgcctggctaattttctatttttagtagagacgggtttctccatgttgaggctggtctccaactcctgacctcaggtgatccgcctgcctcggcctcccaaagtgctgggattacagtcgtgagccaccgcgcccagccaccacccactctttaagaaaatacaaatcaacgccattttttgtacaataaaagtatgtgctttctgtgttaaatgtaatggttaaaggtataaagcatctgttttgggctctgtcgcccaggctggagtgcagtggcacgatctcggctcactgcaagcaccgcctcccggggttcatgccattctcctgcctcagcctcccgagtagctgggactacaggcgcccgcccccaagcccggctaatttttgtatttttttttttagtagagacagggtttcaccgtgttagccaggatgggctcgatctcctgacctcgtgatccgcccgccttggcttcccaaagggctgggattacaggcgtgagccactgcgcctggcccaaagtatgtgttttataaataaaaatgaaccccaggaattaggagtgtttaaacagacccttctagtctgttcaagtgctgggcaatcattcttcgaatctaaactgcccagctaattagagccataataatttacctgagttatcaggctactgtaacagattccaaatttccactaaaactaatagttttacactatttcattttcattgtgcagacaaaaaagaaaaaaaacacagcatttaaaaaaaaattctgtaagctctcaccgccaaaaggaaggataggccaggcgcggtgactcacgcctgtaagctcaacactttgagaggatctcttgagcctagacgctcaagaccagccggggcaacatggtgaaaccgtcactacaaaaggttaacttagcccagcgccaggcacggtggcttatgcctgaaatcccagcactttgggaggtcgaggcggacggatcacttggtcaggagatggagaccatgctggccaacatggtgaaaccccatctctactaaaaatacaaaaattcgccgggcgtgctgaggcgtgcctgtagtcccagctactccccgaggcggaagttgcagtgagccaagatccactgcactcaagcctgggtgacagagcgagcctccttcaaaaaaaaaaaaaaaaaaaaaaaaaaaagcccagcgtggtgattcgcgcctattctcagctattcaggaggctgaggtgggaggataacctgagtccagggaggtcgaggctgcagtgagctgtgatttcgttactgcaaaaaacagagaccttgtcttaaaaaaaaaaaaaaaaaaaggatagttgatgtcaaaagatacggtataaaaatttaaagctctatgcagtgcttttggtcataatgaaactaaattatttggaatccaaaagcctcttctcagatatttctttcatctggaagccatcaaatcctgatcgattccttcaacagatgttcttttaccttttcatcctatcattatgagctttacctcctgttactgaaataactccctataattatacatagtaagaatataaagggctggctcttctatgtactcacgctgtgaagaaaaacttaaaaaaaattaaacaaaaaaaccttgtacgaaagcaaaggaagaagacaaatttagcagcagttctcttgaatttcctggctttgttgatttcgaaccacaaggttaacattaaaacacaaagactcacatttaaatatttcttttgaaatcagaaaaacaatagctctttgaaatgacgctggaacgcacacaatagattctactgggtcaatgtattatttatatactcatctgaactttcaaaagaagttaaatgggagatattctcaacaggcaaaaataagatattccaatctattgttcaagtttatggctccgatataaataatgggctataaacccgtatctggaaaacagttgcgcagtgcgtgcttaatggccagccaatgaaaaccaacgtctcattctactccgtctttcagcacgtcaaggacatcccactccgcctttttttttttttctttttaaagaggccaaccgctggggacacctggttttggcacctttatgaggcctcccagcagcacaggagctctaaggggcacgctctgcagttgagctatttgcagagctccatgatcgctcaaagccgagcacgcgcacgggtttgctactggcaccagcacaaggctttagacaggcacttcccacggctgagttctaggcatcccctttttgaaacgtgttctctccaccctgcaagggtggggtgagaaatctcactttcgaagggcttgcaaggaggaagagagtcggcgccttgcggattccccggccgcgcttcaaggttcacacgccgcgtggcagctcggatgcagcccggttccgaggcggtcggcggtcgagactggggcctcgagccgagaagcgaagaacaaagcggccgcgttagcccgccgccccgagggacagcccgggcgcgcccgccgctccgcccacaccccgcccctcggccgcgcgaaatggcggcggccgcaccacaaaatggcagtcgctcggtcgcggagaagcacctgctaaatcccgtgactccctccccctgccctgccccgctagcgccaacgtcgttctccccgcccaggcgccccggtcttcccacgccgccccgcccaggggcaacagggtccggagcccgccaacaacgcggcgcctttgtgcgggcgcacgccacctttactcagccacacgggcccctctccggggggctttttcttaaaggggcaaccgctggaagaaacggagcaccgccgcccgggacgcccctcaggcccggggttactacggtttccccaactcgcagcgttagcgtcaggccaccaaagtgaagatgggtggtgaaaggaccacagagcccgatagaagagaaaacctaggaaaaattagtgaaagacgcccccaaccaatgctttggcggccacgctgagtcctaacgtactgagcccactcgacggggcccgtgcgcacaggcggctccaaagggcgggtttcggctttccttccacctcgcaaaagtccagtgagcgctctaggtttctcatggctaccccctgccctctccccgtgctggggagtctcgggggctgagcagtggcagagggaggagcggctgccgcggtccctgtgctttttctctggcgtgagggtctcagtggccttgggctctgcttgggccgtggcttgaaggttggaggtgtcgcggtgcgcttgggttttttcgctttctttcaaacgcttgcttcctggcgctccccaccccccagcgtccctttggctccatctttccagaaacttctctgagaaactcagcaaaaagcatccaatttcgccactgcttccccctccgcgcatgcgcgagacgccaagcggaaagcctttggcgcgccggagtgtgagagtggtgcgtgagcgcgcgcgcgctcgccgtgcgggggcggttctctctgacaatgaagggaaagaattccccctcccctcaacattccgtcctcgcgcaagcgcgtcggagccacttccttggcctttgagggaagggggaggggtcgtcccgaagcgcgctagtcgtgtttccgcgcgcctgcgcacggggccgttttcgtctcgctgtgttgtccgcgagtctttgctgtgaagtgcgtctgaacagctcgcttgtgcccgacctactttttccttaaggcccactcgcggaaactagtttcttgtggggttatcgattctgtaccccgagtttcctggagattagtctcccctttgtgccccggggatgaggctggacggcgtcgcgctggcttgtcttccaccccttcccgcgccatgtttggaacggctgttgactggatcccgtgtggagtgtgatggagccttctcgaaacgggaaaacagtcctggccgaaggcttgggtggtgcctgggccggcttatattaggcactgcgtagaatgtttgctcactaagcccaaagaaaggtgtctttttttttttttttttgagacgggagtctcttgtcatccaggctgtagtgcagtggcgcagtctcggctcactgcaaccttcgcctcccgggttcaagcgattctcctgcctcagcctcccatgtagctgggactacaggcgcccgccaatacgctcgggtaatttttgtatgtttagtagagatgggtttcaccatgttggtcaggctggtctcgaactcctgagctcaggtgatccgcccacctcggcctcccaaagtgctggaattacaggcgtgagccaccgagcccggctttgcccccagcctgggaacggggtcttgctgtgttgcccaactgttttggaagtcctgacgtcaagagatccttccgccagggccttccaaagtgctgagattacaggtgtgagccgccacgcccggcctttaaaaaaaaaaaaaaaatcaaaatggttttaaaaggtgtcattttcattggaacggggtggggctcctagtgcccgccacagtcctccactcaggccggcggggcgggccctggcctcggcctcggtgcgtgggtgcagagggcctaggccgcagctgcttctccctctgccgaattgagctgggcggtggtaaccatagtggaccgcacttcctcttcgttcagtgcctcccctcattcttgtcctttaggggtgtggtggaaattattaccagggttatgggttcttcaaaatacaaaaagccaaaccaaaacgaaaaaaaaccctcttgtgtaatgaacttcccccgcgtgcaaaattcggggaacccgggcggcttgcctctgcctcccgcctgcgcggtctccctagacgaattgcctcccgcctagccgcctccctagacgtattgtcttgtgacgcacccccgagtccctgtaggtgcaaggctttaaaaagggagctttttcgagaagaaagcacatcgggggctcttagaggccagcgtggacgccgcaatcgcggggtgagccgcgcgacgaccctatggctctcggaaggtgctgacttggggcgggtgcgcgtgcaccactgaccgcgccagcccggggtcgggccggggcagcgcgctgggcggagccgctccgtggcccctaacaaagggcgagctcattgcccggtgggaactgtgagttggtgtcagagtcctcctaggaactcagtatatgaaacttatctagagggtgttgaagtaccagcaagcaatagaattctgacaaggctgtaatttgaggcttggaaatgaccaggttaactgtctcttgaattcgtagaatttgttatagattctgtcttaacataatttatgcttaatagagtctttaaaatcggcgttcctacggtaatgataccactgactactaaataagaggaagaaaatttgtggcgtgta

SEQ ID NO: 32954 - DNA, 4066 bp, Homo sapiens
tttattccttctataccacagcgatcagcaagggtatcttgcaaacggtttcgcaagattctatataaaaaagttgcttaggccaggtgcagtgactcccgcctgtactcccagtactttaggaggccgaggcgggcggatcacctgaggtcaggagttcaagaccagcctggcctacatggtgaaaccctgtctctaataaaaatacaaaaattagccaggtgtggttgcgggtgcttgtaatcccagctacttgggaggctgaggcaggagaatcgcttgagtctgggaggcggagattgcagtgagccgagaccgtgccactgcactccagcagcctgggcaacagagcgagaccccgtattaaaaaaaaaaaagttgcttcatgttacaagccagtgactcttggatgggatgcgtttctgaagccgtcgctgttcagcagagcggtgagaagggcaacctttttctgatcgctttcccaagcaggcaggaatctaagtgtccggaaacgccaggagctggccgccaggtgagcggaggacgaaggggtcctgacttctaggggacaggccttggcagccgctttgacccgtagccctgtggaaaccaattgcatttctcttcatatcttccaccaggccggggcctggggttgccgctggaggggctaaagaccgctcctgcttcctcagccgccccttgcccggcgcgggaacccgaccgagagcccgccaagcagcgggactccactagcagctgcgcgcctgcgcaccggggccgagcgcgcgagcgttccttccccgcctgtagtccctcacttcgtcgcccggtccgcgcgcctgcgcgccggctgggaggaactcagcttctccgccttggcaggcgggaggacgcgcgcgcgcccgcggcgagggggaggcagtgcggcggcgggagtcgggccgcgcgcgccagtgggaagcgtccggctgccacagcgccagctccgtcgtagtcgctgccgcccgtgtcccgctcgcccctcctcccgctcccccgcccgcccctgcccgggcgcatgcgctgccggagcgcgagggtcggcttcgggtgtgtggtggcggcagagctgagctgcgaggcccgagagtcagaacctgggggagagggatggtctctgcacgggggggagccggaggagccgccgccgctgccgacgccaccgccgcagccgccgccgccgccgccccggcacccgcctcccggcgctgacggtctcgtacgaagccggcgagggggagccagcagcggcggtcgccggcacgccgcccagcatggtccgggaaaccaggcatctctgggtgggcaacttacccgagaacgtgcgggaagagaagatcatcgagcatttcaaacggtgagtgacacgaggcccgcggccgcgctcgctcctcgggcgccgcttcccgccccggcccgttgccggcccctcccggagcgcggagctggtgaggaggactccggcccggacccacgggcgctgtgggacctcgtcagccgctcggcccgcgtcgcggcgttgggcctcgggtgtcggcggtgcgggcggccaagccgcgccgccttcgaagagcccgcggggccccggcggccgcgtccgtgacgagggaggtgaccgaggctcggcctccacgcagccggcgccccggggctgccctcgcgtcagcccgggagtcggtgggagatgcgctgggcggcggggtcgcgtccttgcgcgcagtgcccggcccggagcagccgggacccgagcccgcccgacagccgggtccggcgccgccactccaagctgctctgcgggcgctcggcaatgtctgacttcgggagggttccgtgcgaagggaaaggcggtgcgaaaacagaagtcgcagtaggtactgtggtcgcgtcgcggacccggagagaccatctaggacctctccggaggatttgcagccttgaaactcactgggaatggcaaacgtttctcgtttttgcggggctgggtggagagtggtgtgaaataagttggtgcgcccgtttgggcttcctcgtccccggcggaggagaccgcgtctgacaggaggttgctagccccggcgcccgtagcctcgggtcgcactcccaggccgccctaagaccctggtgccccccacccctgaattcccgaatcaaacggtaaaacattccaaaccttttacgatgagaagatgtagcttaaaaaaaaaacctcccctgaatatttttgtgaattataagaataaatgttgtcgttgatacatcttattgagtagcgtgtagtgcgttttctttgtgaaatgcctgtgtaccgtaacagataggcctccgcataaaacacttattaaaatgacgattggcttggacttggtgcagattcagagggaccatagcaaatctgtggttgtcctcgaaaatgacagtttattccgatatttaagaccctggaaggttttaagtttggcttttaatttcccttactatgtagtgagtgaaggaaattatggagcgtcctcattaatgagtcaccatgggaaaaatagattgcgtcgctcgctttgagccgcttggataaggaaatggaagcagcggcggcggagctcctgtcttttaaatggaggatcattgattgtgttggtggttgctgttactggggcattaaaccctcgccgctggagcgcgcgtctgcgcgtgtccgcgtgtgaaaaggagccgggaatcgtggggccattcataacctgcttgagctgtcctcggcaggccggggggaggtgcgcgcttccagggactctcccggtgtttactacgtcgtgcctgagaaaccaggcgggggcggggggaggcagggagcaaaaattcacctctgtgccctaggatgaaggggagaccacgggctggattgggaagcagatgggaactttctcttcctggcgctgctccaccccttacccgccccccacctcctggcttctcctcgagtatcgtcagtgttttgatggaaaaatcatttaggtgtacattattggagtggaaaaaccacttagatgtgctcactttaatcccctgtggactttctctgtaggtctctgcctgggaaattcgtatgcaccgatgtacaagcacgtgcattgcagcattcgctcgctcctcagtgttatgtgcctagacgtgtcatttctcattatgcagattccagagacattgcatgcttatggctgggagtttggcccctctgcaagatgagggggcagagagaagaaagaggaaatcgtcccaggcagctttggaagggttcttagtggacggtgctgcggtctggcttgtgtgaatgactttctaaaatggcggccaggacccactttatgtgggaatcagcagagccgatctcagaatgcacagagggaggagggggcggaggattcgagctgccttggaaagcggcagtctggaggaacattactgtattaaaaacggcttagctggcagtttgctcacgactgcattcaaaggagtatcttacctattgcagagtaaaagcagatgctactgataaaagcaggttattttaaaactaagcagatcatgtgtccctgaaattcttttattttaaaggtttttttttttcatttttaaacaaatctatttagttgtttaaatagacagtacatttttatgggttcaaagcatgtgaaaggtatacagagaaaaatctccacccctgaccctggaattcccagttgccacacttcctcccctcaccccccaaaatccaggtaatgtctatttctggtttcttgtttatctttctgcatgtacaagaaatgttcctgctgatccagctgtggagctaagtggaccttgtttggaggaactcaaggccttttatccctattgtgggatatattttgtaaaatgtgtgattgctactaggagtaaaagtgaaatctgaataatttaagtgaaaggaataaaaaggtagttgtaccagaacgatggctctgcaagaaaatgaaatggtattcacttctgg

SEQ ID NO: 32955 - DNA, 1781 bp, Homo sapiens
atttattatccaaagttacctataataatgaataggcaaataatttctggattcagtggtagatataattttgttttgtagctttgtgattctttattttttttttgagatggagtctcgctctgttgcccaggcatgagccaccacgcccagcccattctttgattttaattagtttgttctgcttcgttattacttttttagatcgtctagaggtttcaaaagggagaatttcttgctgaaaattagtgttatgattaaaacatattcattgctttggacctttccaactgttacatgaagtttctttttaagcatacaagaggaagtgtacgtggagtttctatcttgacgtttataattattctttgtgatggactcctgtaagagccaattaatggttttattgactgtgtatgattaagtatgctctttccttaaaatatgtgtatctaaattctttaaaaagttacctacttggaagggttagggaagaaaaagaacagcaggcatattagtgtctgtaatacttgagaaacattaggtcgtgcctcattttgagcggctctcttaaatactttacaaaagaataagcatttgcttgttccctgcttaatgctattttggtactgtttagcagcatggaataaatgttcagcagtgtgtgctttggacaagaaatacaccaaaaaaaccctttttttcccatcagtggcagacaaactgcagaggtcactgaagagcccacagtttggaaacacattattttttttggctcctgtattgcttgcatcgtttgttattgtgcaataagcaacacacaaccttctgttttagggggtcatattagccaaccaagccttttttgtgctaaatatggaaatggaagagtacttacttaattgttctggtaggcatagctctcataatggatacctgtaaataggtctgtttcctttctggatttccttttttggtcaaatacagcattttagtaaagttttgtttttttgtttttgttttagatgtgtaggtgttgtcagctgcagggtcttgtacagaataggcattccattttggaaacaagtactgggctgacccatattgctgaagtgggaaccttgcttttagttaggatgctcgactgcagaggaatgagaaccaggtagccttagctctggaagcagatgagaagcgctcatctgggcagcccctgcgtctgaatattgtgggggaaaataggaactgttgtttgtgactcgaaccagcctaaactggaaccatccagtttgagttggctgcttgccacctcccggaggcttccttgttttgccagagtttctccacagccctcagtccaggggcggggcgcagggacccggctgctgcgtggtgactgggccaggcggtgggaggggcaggacggctgtgccttagtgttcctggagaggaggatttcagatctagccagggtgaacgcccgactgcaagctggtacaaactctatttttaatacatctttctgttattaacccttgctttaatggtaacttttagtcttctaccttttagaagctacggcttctgtaaaactgcttctgcactgccagtgcttggccacatcacaacatggtcagcatttggtgacaaggagtttattaccaaagtccccaggagcgttgcttttagttaggttagtccatttgaaataaagaactgtccctctcaccccttctcattcttaccaattaggttgtactgaggttttttattttggtttc

SEQ ID NO: 32956 - DNA, 1179 bp, Homo sapiens
acaatcttaggaggctgattttattatcatctctgcttaaaggatgaataaacccaggcagagagaaaaagccaaaagtgcctaaggtcacagcagggaatggggattcaaaccccgctgctgggctccacggttcacactcctaactccaggatcgaggatcctggaggatcgagtccgcccgcatcactcgctctagcttcaccatctatcaggtgctgaaccaccgtccgcagtacgaatgaatgaatgaaatgcttttatacagggacagcgtcggcctcctctgtcagctcctcctaggcccgggcagccccgctccctcccgccccggccggccgacaggagctgccccggcactgcgctccctcgcggccgcagaacgcccaccctcgacagcgcgcggggtcaaggggcggtgacagccgtgcggcgggggcggagatgctaccagctggggtgtcatccagcccgggaggtgacacgcgccccctcgcccgggcggtcgcctggccgcccactccccgccagcacgcccggcgacgccccccgccccgccaccccacaatctcccgcccagcggtgtcccctcagccccggttggcgtcccattccacttccctcccctcccccacacaaccgtcaccggcgtcccaccgcgccccatcctccgccgcctccgccccggctcccgggacttccccggccccgggcgattgttgacactcacctgccatgtcccggaccccaccgcagagggaggtgcatcacggccgcgagaaggccggggacggcactccagagcagacaaagggcgccgccatgttagagtcgggcggaaccgacctcgcaggcttcccggctgcaacttccggcgcatgcgcagcgtcctcgctaggagagcgcccatagacagacgcatgcgcctagctatccaaaagttccaccttacagtacttcggcgctcagagttgtcctcattgtacccctgccttggtttctcttccaaatataacagtaacatcatgtgttcagctcttactgtgtgccaggcactgtgttaagcgctttacatgcattatctctttaaatcctcacaccaattataagatagtattattctcctaattttaaaaaagggaaaacagactcaaaaagtgtaaatcaatgtccatggtc

SEQ ID NO: 32957 - DNA, 720 bp, Homo sapiens
aggctgtagccatagtcctgctgcttttggctgatatctgctggcaaacaaggtcatggctgtttataattgcaccatagagcttcaaataagaaaagatttggggtttaaattcttggctcaaggcagggtcagataacctggggtcattcctgactactgcaatagatgtatcatctcttatagccatggggcttatgtagccaaaaattgaagagagttcatcccatgggttgctgatttgtaatgtaattgttatgtatgctgtattcacagcctgaccaggtgcatggaacaggaaaaagtggctctcaggaactgaaatagggatgtttgggtggatgcagatgattttgtgttccctgactacccatatccaaagtccagtgagattcctttgctgatagaagcagcccctccttccatctgaccaggctgattctgctttctctggggagtgtgtaatgacctcacccggggaagttattttgcaagaggaatctaattctcgtgaacactccactgcccattgtttgtttccagatctataatgaaagccagattccaggatgagccaggagacaggcacagagtctgaccaaggaggatatggcttctacaacaaaataaaacaatcaaacaaacaaacaagccttagctaagtaagtgagctgaagcctagggaatatgggtgctacctcagaaaggaaagaatataac

SEQ ID NO: 32958 - DNA, 1383 bp, Homo sapiens
cccaggctggtctctaaaccttgggctcaagagatcctctcacctcaggctcctgagcatgcgctacttccatctgactttgaagacagggtttgggaaggggctctgaacatctgcctgggctctttgtgctctggctctggagggcttcctggaggaggaggcctttggcctctgctaggccttcaaagtgaggaaaccttctaggtcctctctgcccctcccagtctctggtactacctgacctggactttctcacaggtctccagccccagagagctgcgtcttttcaatttcccctacctgctgcccaggcccacccccaaagctacaagacgcgagagccccctttccctgtgggggctgccagggtgggaggagggaagctgcctcagcccattggtggtggcgactgatccaggttgacccagcagatggccttccagagccatagcaaggattcacatcccaaccgtgccacttccaggctgggtgaccttgggccagttgcctgacctcgctgatcctccgtgtccttctaggcacaccgttaatcatagtacctgctttgcaggactcttgtgggaatcagcggcgcgcctggcacacactagttgctcaatgaatggggcggctataattactcttccgggtgggggcggggcgcagggcctgcagccaggcctatatttagcctggaagggggttgggggcgctgggagacaaagcgccgcggccagtctgggcgcccagggggcggagccggcgaaagccccgcggccgacccgccctcccctaccgcagggtcaccttggccgggctggcggccaagggctccttcagacccgacgtgccccagcggcccagcggccgcttggtcccctgagcagtcctcatcctcgcaaactgctgtctggggagggggctgctgggggctgggggtggttttcggccccactgaccacttgggaagctgccccctttcccagcaccggccggccgagggagggctcgctgagatccgtacgccaaggtgagcctgaccccgggtggggggcgtgggagggggagccaggctggctcctcccccaacctcgcgccaatgagtgtcggggctgcaaatagcccagtggaatcagtgagtcatggaggctggaaataccgcgccccctctgatcccctcccctcctcctgaccgcagccggtggagctgcactggggagcaagcctgggggtgtgaggggtgggggacccctccggagagctcccctccccaggctccctgaaccaacccggacacccccgcccccaagttccagctggctttgcctctggggctgtgtgaccctgggccagtcactcagactctctgggccgcagaat

SEQ ID NO: 32959 - DNA, 1117 bp, Homo sapiens
gcccactgcaagtcaggttaagtattactttatgaagcttctgtttatgcaaacacaagtctgtgcagatgtgtgtgcacaacacacacagagtaaaaattttctctgtgtgtattctgggtcatgatgcaaaatatattattcctatgggtccagtcaaaaaagtttgcaagttgccaatcctgaggttctggaaattctgcatgtcctgtacaagccagggcccgccaaggtgcagacaggtggctctggccataggctgaccctaggaacttgagaggtgttagggtatttctaggacccctggccatcccctgaagcttttttacaactctccagccacagaccagggagcgaggttgatggggaggggagccgggcacagaggaggctggtggtgatgccaaagcctggcagaggcatgacttgaacaaggtcatttgttgagacggtggtgggcttggaggactcctggctcccaccccctccccagcccgcctggctccccacctcagttggggttcaggtgcctccaccaaagctgcctgctccccctgaggactttggccccatgatgtcacaggctggttgccatggggacgtcaggtaatgaaccagcccagggtgaaatcacaggctgttcttcgcccagctgggactggtggtcacgtcaccactggcaactggaaaaacacagagtgtcatgtggggtgggggctgggaggcagcccgaagggaccgctagcacctgctcctgtggctccctctcccagaaggacaccccctttctttcagtccacaccctagtctcctgacctcaaggtcagaattcccttctcagacctgctccctcccccacctcctctgtccacaagagtgacaggcttctggctgccatggcaacctggagagggccatcttgattcttcaaggagagggtgtcaaccagatgtctcctccatccctctgtcttcaaccagagcttctcctctgcatcttgagggtgcttcctgccttcctatgccagctcctcttcaatctgctttagagtctaacctcccagacagttcctcctgatgtctagcctaaacccctcttgttgcagttcccatactgg

SEQ ID NO: 32960 - DNA, 689 bp, Homo sapiens
caacctcagagcttcaacaggctcctctgccttagagcccaggctctggaactccactttgcatcccaggaaaccagagatgggcagctgcatcccaagggtcacacagcacacgatggcacgtgcctgagccacccctgggggcctccctctgccaactgtggtccagctgggggtgcagagagagcccagatacatggcttctttgttccatccaccccggatcccaggtccctcttctctgagtccccctccccctgcattcctgaggtgtctgggcagagtccggcagggctgtggcaggaggggcagctcccccactcaggggtcaaggccagggcagcagccgggcctgagcaccgagcagtctccagctgaggcctggggctgtgctgggtctgtagtgcccagggggagacttgggggctcactgtccccctccctacccatggactggagctttaattctcactctgctcctctgggtgaccctgggcctctcttcttggagtctcagtgttctcatctatacaaagggtgccaccatcaccggggaggccagttctccttcctgccctgggctgagctggtggtgcggccccaccagagcacttaggtggccttcaccagccttccctgattctggtccgtgcccagtcaggctctgtggccttgggcaacccctgctc

SEQ ID NO: 32961 - DNA, 4258 bp, Homo sapiens
aatgggtggcaaacctaccatgtgcatgtgaaatatgcactccagggccagagaaatgagcagtgtttcagcgcccagagagacactgtggagaaggtccaccaggatgcctacctgccttacacaagagcctaactttggcacacctgtggcacacctgtggagagctgttctggccccggttgtctggcaggcctgggctactccgagcaggggaactggggcacagtggctgcacctccggctataccctggtttttccagttcctgatgcccgcccctcaggtggcagcatgaggtgactcagggacagacgcccttatcgtgacgcaagtccagcccccagtggagcccctcctcccaaggcacagccacctcccaggctggcaatggcaaggttgtgaggtcaagaggtcatggtggcaattcacctagggccagtcaccgcccaagccaggcccagcaggtgaccgcaggaaccaccttggcccagggatgtggagcttggactttgtctctgggccctgacagacggcaaatggcgacctatgggttactgacccagcaaatgagggagctgacaacctcaggccctggtggcttcttgctcccagcaggccctgtcgtctctgcagaaggggggctgcccccagggcctgacggctgccagcaccctgtccctttcacacacaccctagggagctatctgcaggcacattcctccaccattgataagcaccactccccacctcagcccccgcctaccgctcctgtcctgcctccagcctttcatcttctgtttgctttccctcgcctccttccttccgttctggggacccacttacctccaggagggagagagggagggagggagaagccggtgcccgcccagcggagatgccagcgcctagctttgcccccagtgtgagctgagggtggggcagacagggcacagaggtgagagccaccatggggggctgggggtgctgccaccgtggtcccacctctgtaggccagaagaaacatcacagaaataaggcctggtgggacttcccagcaggggacaaagcctgcgagccacagccagcagctcccagagtcttccacctgggggaccaactgtgatctgatgaaacaggaatcctgccagcagcccctgccatggcccgagaccaccctgtctaaagaccaccttaaccacagacataccctggccaggggactcctccctgtcagctatggactttaggccactggggctgtaagcagtgggacccctcctcaccacacttgtgtcacacagtcaacagcttccccggtgttcagactgagccccagtgggaaaccacaggagggaagctcggatcaccaggttgacagcgtccttcagggccacaggtccagcccactcattttacagatgggggtgggaccccaaggggacctgctaaggtcatacagcctgtgggtggaaggacacacaccaggggcaactgccttcctgtgccaggcccccgttcttttggtcactgttcactgcttcctctccggacctcagtttcctcatctgtaaaatggggatcaagtcctcatcctctctgggttgtgtgtgaagatggaagaaagccctgcttatgagatgtccagcatggtgcctggaatgcggtgtccctatgaactaggggatcatgaaactacagtagggaggggacctccccaaggggctgggccccttgagggagcaggagcctctcaggagggaatctccaactccccacaaccccagctctggcctcccagctgttcagctgagccactggccaaggctgctggccacctgctcacctgaccagcggtccccagggctgaggcgccagcaggggccccgccagctgctgaggccagcacaggaagcggagacatggagacaaagcagcccccgggggacagcggtcagcccgagcgactccactgtccccgcaggcagggccgggggcagggcgggggaaccaagggaagctggctcattcctgacatagttcatgggagcgctccgggcagcgtgcccacctgccgcacacagcacctgggaggtgcctcccttcctctgcccacttaactctttcctgagctctgggcttcctggggaaagaaccctgaggagaaacggacaaactgggaataacctagacaaggtgccaggtgacctcagggtgccccgcctcgctctgggtctggtttgtcaccagcaggagccccagtgaaagaatctgggtctccaggcctggggagggtccggcagggagggcagaccctgtgcctccctctggttctccctcaatgtacccagcagtgccctctccaggacccctgcctccaacagagcccccaagcccctgcaacagaccctgccatccccagggctggccagagagcctaccccagggccaggagctgagtcagggattccaaaggaactggtcacttcccgccccatttcctgacccatcctgcagcctgggcgccgctgcaccgcctggattcagatcctgatgcagccacatcctagctgtgtgacttcaggcaagcctctttagctctctgaacctcagtttcctggtctatcaaatgggattgatcacagtccctgccacgcagaaaggcggtgtggattccgctcgcatgtctgataaagcgcttgcttggctcagcgcctgcccctcggacgacacccgtctacggtagcgactgtcatcacttccagcagcagcatggccaggggctgctgagagaagtctagaggtataaagaggagccagccgggcgttcctggcatctcgcgcaccggcacccagccacactgaaaggaattttggtgggaggatcccgaggaggaacaatccggcagtaggtgactagcgattgacagggttccacgaactaagtcggaaatttcgctcttggaaacttgtcctcctgctgggctgatcttcccaacagggggctgctcggctctctgcaaacaaaatctgccagaaccctgaccccccacctctagaggagggaaggctgccccgcttcctggagagacacccccaccccaaccgtccacttatctctgcggggcctgcctcaccagcctgtggaaagttttcagctgcccctcacccccacccccgcattcttgtgcgaggatgtcatgtgggaggagcctgctcgccccactgggctgcctcgtcccggccccctcaaccgcactcattgtctgaaactgagagtatgcattcgaggtcacctaaagcaggggccgcctggggaaggggggctcgctcagcagaggggagctgggaagacaagggggcgatggcatgggccggagcagagcctacaccacaggcttatggccagaaagctcgtagggaacttctcatcggggggtttacagaccgtgttaagtaaggttctgaggacttgctttaggaggcaagtagggcccatcacaaagggcttcagtgtcctccaacccttcaaccccctccaggggctgcaggatccatggctagaaaacaagcataaagtctgctggtgctgttgaactttctcattttactcaaaggaaacccaagaccagagatgaggggggagttagccaaggtgtgtgcaacgcagccactaaacctccaattccttaacgtcccgcttatctcagcaaagaagctgccagagagagggaatgagccagccctccaaaggttggcctgcattccacaaatgctctgcctcatggccatttccagaaaaagtcacccattgaaaatccacattgctgtggagatttccgctgtcacaggccctggccacaccacgccacggcttcctccatgtgaactcactaatgcccaagcctcattccccaaggagagtctgaatgaattggcccttttctgggcccagtgtgtcatctatagaggccccagtggaaaatcaatagaggtcccaatgggaaatttgtggccctggggacattcagacaagaaaggcagacccttggcccccctccaacctctccctcaacagaagcatttcccaaaagctccgcgggtgatcctgatatgcagccaggggatgtgcaccccgggtccaactcagtcacttctatgtacgaaagaggagtttgaggcccagggagtttaagtatcttgcctaaggccacatagtgagctgataacagacatggaacttgctcctggtactccac

SEQ ID NO: 32962 - DNA, 3740 bp, Homo sapiens
ctccagccctcttcccatcagcagcaccccagctcagcaccccctgccacccgcccaggcccctgcccagctatgcctgcttcccaggaaaatctaccatgacaccaaccacaaagcaggcagggccttggctctggcagccaagaagcgggatgctcaggtctggtcctctgtccagaaggccctggttggcaagggctcgggcctccctcagtttccccatttgtaaaaatgagggcagattcagtggctgttgatgacctaacaggagccacgtgggcaaccaagtatagcctaggggtgagggggcaagaaagaagtctgaagcagcctgggggtaggtgaaaaaggcacctgtgtcctcctgcctgccccctaagccacccccaggcagacccaccacatacagcctgattcccaggaactgaaaccagcagctgccagctaggccatcatgcccacccccacctaggcacacttctctagggactctttcacggggactcagagtcgaagcaaaaatgtacccccaccccagtgcaatacacaagcctttccccctgcatcccatggggtgtgggggtggggtttaatcacacaggctggggagaggtggacacaggggacaaggacaaggcagctccaggcttccaggccagcttggggactgcagcagcaaagcacccgcctaatcccccacccccccatgggcagccgaggagaaaggcctatagtgattccagctgtctctccccttctctccaaccacagtcccccaggaagggggaggaccaaacgttggtggggcggatattgagggtggcagaaatccttgccatgagctcctgcaaccagaagtcccggttgagaccccaacccgggccctgtcactccagagactgagacaggatgccacccccaacacctgccactgcccaacggctccagatccggcctcttttcctcccaacacagaacagcaaaacctccaaacccagtttgggaggcagaaaaagaaggaaacaggccgggggtggtggctcatgcctgtaatcgcagcactttgggaggccgcggcgggtggatcacctgaggtcaggagttcagaatcagcctggccaacatggtgaaacctcgtctccactaaaagatgcaaaaattagacgcgcctggtggcgggcacctgtaatcccagctactagggaggcttgagacaggagaatagcttgaacccgggaggcagaggttgcagtgagccgagattgcgccattgcactccagtctgggcaacaagtgcgaaactccgtctcaaaaaaaaaaaaaaaaaaaaaaaagaaggaaacttctcaccggcccaagtttcctcccggcttcccccttgtggagcctgcggaaacctcgctctgcccaggcaggaggggaagccttgccctcactgttggaaattgaagctggcctgggctgggtggacaggaaggtcttcggccagggcaggagcccccatcctcgccctgaccctagcggagggacaacacccccaccacgcacccgctgcgccatgagcaaagtctgcggcccctcactcggcgcggctccgggaacactggggcgggggtgggtgattcagtcccccacccccgggtgtcctgactccctggtggccctgggctgacagctccacaccttgggaggccgcacccccacctgccgcatttcctcgttctgagtcacccttgctcagaacgcttgactttgggacttcctgtccgcactcgcggcccctaacctgccccgggagcccgggagtgcggcttgggaaggagggaaaggagtgtgtgagcagggattggcccgaacctatctccacgctctcccccgggactggaggtgaaggggggcgtggagaaaatctcagggaacaggggcttcgacagggggctcccgcccgcccgagccccctccccaaaatgcgaggcctgcacagtatgccttctccgcaaaacctcggcaagcgggttagtgaattcaggtcactaagaagctgagcccgcggaaagctgcccaaacacccccttctctaggggactccccacgccccccgccgggacgcgttcccgaagtcgccgcctggactgcaaccgcgtggcctgcgccgcgtcctcttctccgcagcctccgaggcccgtgcgaccaagctgaaaccgcttattctccggagcccctatgaccccgggtgggggccagggctcgcctcgatcgcagcccgtgcgccctccggactccagttcgccgggactgggcgacaccaggtaggttccaaagttgcgcgcgtcaaggagcgccgggctctagggggcactggggcccgggggccaggggtccagacgccgcgcgcactcaccttccttgccctgcgccgccgcggccgcggccagcgcacagccccacagcagggcgaagcaggcgcgggctgcctggagctccatgccgcgcttctcgctctcggtccgatccccccgagcccggctcccgcacacccgcacgcctgcacgccggcctcggtgtccgctcccgcccgccggcctgcgcgcaacttctgcccctcctgccccgagtccttaatggaagttgggtgagaaccgactcctgttcattcatgccctgcgtgacgtcaccaacgcccgccctcaggaatgtctttaaaggggccgggctggcacccggaggagagggaggggaagtccggaggggtttggaggaggaccttggggccctctggactcgcgggctccccgcaggccttccaaagtttgagcgtctcaaagcgccagcgcccctacggattagcccccagggatctctgagcctggtatcctcggtggaaacgtttaatggttttgcgctgagccatacccattctgcccttcacctctgagactgagctcaatgcgactgagctcaacgctggcctgaaggtctgagctgaaatggattgggggtccaataagcagttgcctcctaagcagcaggcctgagagagtggcccagaaatagacctggatgccctccttcctaaaacccttgaagagtatatcaagctgctgatggtcaaaaagagtatctctgttcagaagcctataagcctactatgatctgagaataggttcatttcctctgggaatggatcagacatgcactatcttatttattaataattctcatctgggaggcaggggtcatcatccccatgttacagaagaggagactgaggctccaagagcagaaacaacatgcccaaagggtgcacagctcacgggtagtagaagcaggatttgaatcctggtggtctctgcttgaaccactgcttctttttggggaagggggcaaggggcacccctggcccccgaccctggcatgggttgataggttttgacagtttggaggacacctgcctaccacctgccccttgataaggcctcttcacaaaacttcctcagacatgagctcatctcccttcctgacagaagcggctagtgtgagtgaaacaaacgggaaatttgctctggcccgcctgcccagccacccacggctgcctgttggccaatcaccatttgaccagtccaggaagagcaactgtggcaggcctgatttcctgggaggccccagactccctttgcctacctcttcctctctgaccccatcctcgctttgatgcccgggacctgctacccaggtacgtg

SEQ ID NO: 32963 - DNA, 1397 bp, Homo sapiens
cagcctctcaccccactccacctctggactccctgtcccccttccttgctgtatttttctccatagcaattaccaccaccagctgccacactccagagattaccgttcgtttgtctattgtctgtctccccctgctcacaccacccccattcgtgtgtgagctccaggagaagggccggggttgctgctgctctgtgagtcatgaaccgtccccaccccctagtctgtcctacaaatttgttaaatgaatgagcaaataaacatagtggcttcccagctgaccagtgatgaaagcttacactgcgtgatctaggctagtcactgctgtctttccctccctctcctcatcagtgcattgagagatgacagtagctcggcctcttagagcagtatgacgatggcacaagttactatttgccaagcacagagcatgacgtcatgcccagaagcccaggatacaatccagagacaatgacaaatgggggattcccgcttctgcagaaggtggggcgactggtgcccaggggcccccaggaagtgcccttacctgactcccaggatcctcctctgtgaccctggggccttccaacctgccaggtacttttcctgtattatcttattttatcctcccaatagcctctgtgagcagcacactccccatttcacagacaaggaaactgaggcttacacaagtgaagtgacctgctcgacgttgcacaaggaagtggcaaagtcagcctctgaatccaagccgttgggctctaaaggccctgatgccactcagctaaccatgtggcctctggacatcactgccatcttttctcttaccctcctctcctccttgcactgtgttctgagggtcagcctgacaacccgtgtcccctgggcagatgtgcagaggaagatcaagttgttgttcgccaggggccgagggcaaatttctggcttcccacggccaccacttactgggagtttcggatgaggtgcttcactgccctgagctcttcttccgggtcaagtggggataaaaataaaacaatacccaccttgtgggaagacatgggatcctgaaaaacctggcaacgtgcctggcacatggcaagtactccgtaaatgtcagctaggattatttttatcattgacaccatatttgggggccccaggctggcagagtacctgccaggtgtcacccccttcctgagtcctgacagtttggctgcaggcctgcgtggaggcttggaaggaagaagggaggaaaggaggaaaggaggaaaggaggaaggggtcagggaagcccctctgtttgttttctgtctctgagaacttcccagtctgactctagccccttcccctccctgcaggcactaacacacaagtcccccattcaccagaaatct

SEQ ID NO: 32964 - DNA, 1864 bp, Homo sapiens
ccctccatgggccctggggtgccggggctggccccataccccagaagctccccactacctccgggtgtggagctatggtgggcgagcaaacctgggttcagatcccaccttctactcatcatgagacttgggcaagtgttttaagccctcggagcctcagtttcatgatctgtaaagtggacattagagtcgctcgggatgcgggatgcttgaatgagatgatgcactcagcacgcggcaggccctggggccctgtgtgctctacaattgcagctgctattagaccagcttctttcttgcctgggtatgtggggcttaggccagaacaaatcttgggactgagtgtaaaatatatgtgagggggtgggagggggtgggatggggctcggtgcgggcctggcaggtgtgctgggaggcaaggcctatgactcctgtgggcctgctcttcctcccatcccaccctccacagtccccacctcaggggccctgggcctggggcagcaggggccgggatgtgtctctccagagcaggaacggaggggcctccgcaactggttggggagggggggtggatgccagcccccgctgattaggtctcaaattaaagccgagcttgctcctgtcgctgctcaggcaggccctcctcctggccacagttccctgcctggccctctgcttcgggcctcatggtggctggttgctcccagcctagaattgctaaaaggctcccgtagtgggtaggagcctcaggggacctgggagaggcttcaggggccctgcctgtgcgggggtctctcctgtgaccctcagacctgagccagtgtctggggacaagtcaccgtgtcagaggctgcggagagcaaagcccaggcggtgatgacttgagtttccaggccgggtgccaggaggcccgcggtcacactccgcctggggcctgggctccggccaactgtcagcagcagagattgttgggttggttttattttaaacaaaaaagaactttgagtggaaacatgtgtttcttttttctcccccttccctctctccctatctctctccatctcatcatggaatatttctcttttttgtacctccctttctctgtttttctctctgtcttcctctatttgtccctgcctctgtctctctctctctctctctcattctttctttgttttcctatctcttgatttctctgtctctttctctatttctttttccgcagctttcaggagtcaggagaggtaccagacttcctccctcggggtgtggcctgggcccctgccataaaatccccaggcgtgccacggccctatgtcgggggtctgccgctccaggggagggagggggtgtctagcagcggaggctccaggacccaaatgctccatcctcctccatcctcctcctccaagctcccactgcccctgcatctgcccttcctgtgtctgttttctctactaagcatctagaaaataattctgcagcttgagacaagttttaaaacactggtctggcccaaaccacccatctacagccagagactggcgccgaggaggggaccatggcctgctcaacaccgcacggagggttaggggcaaagccaggccgacccaggtcccccactcccaagtgacattactgacacccccaaacccacagtcaccacacttctcaggtccctgcgtctttcagaggggtggtctgcttcctaggaagtgatgtgccctcccctaaggtggtcacccagcacaagggtccccctggaaaatgtcctgccttggctggtcacccctcccccaggacagacaagcttttgggcccccacctttcagccccttctgccaggcagtagagaagagagaag

SEQ ID NO: 32965 - DNA, 2213 bp, Homo sapiens
cttgggtgtccggggtcatgccaggattcatgcagggataggaggggctgcctgcgtgtcaggggcccattccacccctgtctcccacagccccaggagtaaagtcagggtaagtgtgcgggattagtaaggtggggacacgggagactgtctttccagatttgggcaaactctgtcaccagcacctggctactccgacctccccactgcctggcttctgaaagtggcccaaagagaagggcagggagccacatggtcacctctgctggtagggaaagaaagacatgctcccaggagcctatgaagggtgaggcaccagccctatttctgccatcccctgacacacctccaagggctgcaaaatgtgaccttctcctgtcctcaccagtccctgaagatcctgccacctctagtttggaacatggaaatgactccttataagagccttgaaggtagcagccattaccacccactttacagatagggaaaatgaggcacagaaagaggaagcatttgcctgagtttacactgagtggtgtgctcgcccagttggctcttgcaggctcagggagagtagattgttccattttcatgcattttgcaagccaagtttcattggttgcttgaagtcaactgtagtgggagtatttacaccacagcaatcagcagtgacactcttctttttccttttttttttttttttttttgagacagagtctcactctgtcgcccaggctggagtgcagtggttcaatctcggctcactgcaacctcagcctcccgggttcaagcaattctcatgcctcagcctcccaagtacctgggattacaggtgcccaccaccatgcctgactgattttttttatttttagtagagacggggttacaccatgttggccagtctggtctcgaactcctgacctcaagtgatccacctgcctcagcctcccaaagtgctgggattacaggcgtgagccaccacacctggccttctttttacccttttcatttttttttctcttttccttttagaaagcaggttgttaaacatttaccagctcaccactggctggaggccacagcatttatagcgtctcagaagggtctggagcttagaaagtttaagagcttagcaagactcctcctgtgtctcaggacctgtgatggatctgagcctgtctgacaccaaagccaaagaaatgccttccttccctcacgaggccaagagttagcgtctctttctaccccatcatgacaacttcctgtccagggcaagaaactgtcctgattgtcccttgggggcagggattaaaggtactacaggttcagagcccctggctagcgtgccctgccctctgaccacgtatgatcaattccataaatatttacccagcgcctcacttaacctccctgagcctgtttcttcaaagctgcaaaatggggcccttcagcctgactactttaattcatccatccacccattccttcagttagcggctcccctgtgctgggtggtgtttttgaaggatactggagtcgggatgcctgctttgagtcctggctctggcactggcttcctcggtaccatgggcctcagcgttcccatctgtacaatggcacccacataagggttccttccaactcctttccccatctcagggggttgttgcgggatatcggggctggggaaccttggctagctgaggaactaggctagctgacacacaaaggaccagcaacagttcacgccctggagacagaacgcgcccacgtgattcacaccggcagcagcggactctgtttctgttgccttgaatgaggtgcgctctagtcttgcagagtttagaaaacaaggaggtgtggaatgttcagggaagacttcctgatgaggtaataataacacaggaacagctaatatttgatgagcacttgctgtgtgccagggcttgtgctaaacacatgcttcatcttatttaatccttgcaaagaacttgccgggtgggaacgcatgtgctacccgttttgtaaatgaagaacctgaagcccagaagcccagagagtggaagtgatttgaccaaggttttttttttattattattattattattattttatttttttagacagagtctcactcttgtcgcccaggctggggtgcagtggtgcaatcttggctcactgcaacctccaccttctgagttcaagtgattctc

SEQ ID NO: 32966 - DNA, 4655 bp, Homo sapiens
tctgccttctgggctcaagccagcctcctacctcagcctcctgagtagccaggactacaggtgtacaccaccacacccagctaattttttgcgtgctttttgtagagatggggtttcaccatgttgcctagtctggtctcgaactcctgacctcaagagatccacccaccttggatcccaaaatgctgggattacaggcatgagctactgcgcccggcctctagatttaaatagtacctaccgaactggccagtgcagctctaaaaggtcagcagcatgtgagtgggagagctgggcctggctgtgtgttattcacgttcttgagtgttggctttccacagtttgggcctctggcagcagaatcacctgggaagccaaaacttcagatccctgggatcccagacccactgaatcagaatctccgaggccagggcttgggcgtctgcccgttcaccacacaccccagctgattctgatgcacatgaggtcaagtttgaaacccaccccactgccctagttgttcaagactcccagcgctggctggatgcaaagtcttatgcctgtaatcccagctcttttgggaggccaaggcgggcagatcacttgaggtcaggagttcgagaccagccgggcctacagagtgaaaccccgtctctactaaaaatacaaaaattagctaggtgtggtggtgggcgcctgtaatcccaggaggtggaggttgcagtgagccgagatcgcgccgctgcactgcatcctgggcaacagagcgggactccgtctcaaaaaaaaaaaaagactcccggccaggaagagagcttgaatgaagtctgacctgcaccaggccttctgggcccagaccaggcctgcttaggggcatgtgccctgctcagaacttccccatcccagctaacccagaagatagctgggatgaagatagctacttccggctaccagcccatgattctttgccagcctgcactgttccctgaagagcaaaaagacttggaatttccctgctctatccagaggggctgggatgaggggtcctgagttcccttatcccatgtcctaccaacctctggagctctccagtcagccagctcgaggctctggccctagctggtgggcaatgggagggagaggcttggcccagcaccccaccccacagatcagcctggtccggcaaggggaggaaggaagcagaggcagcctgggccagcggacacagggttgggggtgacacaggcctcaggaatttgaaaacaaacacttcgccagggaaggaagaggctgctgttggctgctgagcccgggcgggcccaggtccctccctttcagggcaggggtgaatcccagtgctgctgaccatggcccccggctggacccagtgctcggggagtttccactccgctggtgggatgggaaggtcatgggaggtgtggggggatccaggctctgtccagatacgggagcatcctggctggggtgaggacaggaagggacaaagagctgggaaagccacgagaccccaggagaaggctcagcagcaacaggatgccgcctcaagcatttattgagcacccatggtattccaaaaactgagaatataagcactgcctagctggggagatcaggggaagcctagagccctgtggccttcctggaggaggtggcattgaactgagccctgaaaggtaaactaggaccggggaggacagaatcttacaagtctccccccttcacactcccagagccggcgctcagtgagtgcatgagtgagtaagcggctgaccagcgactatgcagcatgaatgaatgacagactgaatgacatgaagcctggagtctcaaggccgagactgcaaaagaagagtccatcctcctatcccctctgctctgaactctcttcatgatcctgaaggtgcttggtacctggagactacggagccagcctgccggggttctagtctgaactcagtcacttcccagctgtgtaactttggacaagttacttaacctctctgtgcctctggtcccttctctgtaaagtgtagtcatcggccgggcgtggtggctcacgcctgtaatcccagcactttgggaggccaaggcagacgaatcacttgaggtcaggagttcaagaccagcctgcccaacatggtgaaaccctgtctctactaaaaacacaaaaatcagccgggtgtcgggggcaggcacctgtaatcccagctactcgggaggctaaggcacgagaattgcttgaacccgggaggcggaggttgcagtgagctgacatctcgccactgcactccagcctgggcaacagagtgagactcaaaaaaaaaaaaaaaaaatacagaggtaatcatagtgcctccttcacagggtttttgagaggactgaatgagttttacaagtgaagtgcttagaacgacgttgcacatgtagtgagaactacatgagtgttggccaatgctattactgaggttccagcttacgcgttcattgagtcactcactcactcactgttcattcactgattcgctcctacatgccatccgccacttacacacccctccctcttcaccgtcatctgttaagcaatccccgtgtgcccggctctctcctctcggtcctcccagcccccctttgccagtcttggatggtgcccgccgtgctgccaattaccctaacaatttcattaattcctctcaagcccaaaacaaacaagaaggacctatctggagcaggggtcacgtgctaagaccagaagcaggtgtgggacaaaccctctaggacgagttctttgaccagagttcatcaccggagctgctccagagatggccaggcctccccacctgcaggtgcccggccagtgccccccaccccgggcagcctcacccactcccctctttgagtaaaggtaaagggacttgcccaaggctgggttctcccacatcccgactgcacctgtccacatttcaggcttcattcatgccaggagccccagacctgctccatgcaccagctccgcccaagcctggagccccgggctggctgaggtgagagccccaaagctcgagcccatttcagcagctaacaattagagctggtgtgaacatgatgactgcatgctgattaatgtaagatggctgagcagaagatcccgccatttccttccccacaggccctgggagaacaggtcccgctggggaagactctgtcgtgttctgcaaaagccatttcttgagcacgtcctgcaggccgggcactgcgctgggcacttgattcctttcaacagcatgacatggtgggaggacaacttgcctctcattgatgaagaaacggaggctcagagaggtaaaggaacttgcccaaggccacacagccagtcagtgtggtcctggaattccaatccaggtcttctcttgctgattcctacccccagggatgagccagtttgacatttgtggaactggagagaggctgggtttgggcataaggtaatgtttaggccagagggtggagaaggagaggacagccagagaggcagagccaagcgccaggcaggaacaatggtacagggcaggtaacgggagcccggccagctctgggactcctgggcaggccctgctgggccctgcgagcaacaggctcaccctgtggagctgccagggtgacagcagcctcgatctgctgactcaacgagtgcatcggccttttcctggaaaacagtagacgcagtgtgggtgtcggagggaggcacctgtttgggaaaagggtgtgtgggaaccctgtcctgccctgcagctccccacagccagtgtacaggtacttagctccaggtgccccccgaacctcccaccacctgcccagaccccagaagccaccggatccaggagtccgagccagctgtgggctgagtccatggtgccaccaaggctctgcatgaccagtgctgccagccaccacctcagccaagcagcacagcctctcagggcatgtccccacttgctgtctgcagagccttgttttgccccaccctgaaggggcaggtgtagacgagcattgaggcaggtctatgtgacaccacttgctgtcactcttctttgggaggtatcagggccactctgccacggggcacagcttagggcctccatggaatctggtctgaaggatcccgctgcccagaggggggtcaagaatacggaatgggttcaggagcaccccctgtcttcaggatccagttgggggaggtcccagcagggccagtcacagacacttgtcacaccctggaggggataataggatctggggctcagcctccaccaatttcatcaccacacaccacacccaggcaagggagagcagaggcatcagcagggcctggctgaggggctgaagcctggtggggaagcagggagggcccctgggcctctcggtcctatctcttcccaatccaggcctcagcggactccagggcaggggtgcgggagctgatttccaggtgcaatattcactgtcaccatggccgcttccagcacccagcctgaatttcctagtgcaatgctgggaagaactagtctttttctttttttttctttttttctttttttttttttttgagacaaactcctgcactgtcgcccagactg

SEQ ID NO: 32967 - DNA, 646 bp, Homo sapiens
tggtgggcagggctggggccccagtttgcggaaaggacagggtcagagacctaaagcgagtgaggcgggaattgcctctgaggcacgccgaggaagggcaaatcagccttggctgggctaaggcttctgctggctccagcccctccgcggacagaccctgcccacccaaggggccgcctggtctcacttgtccggctccgagctgcggaaggcgcacgaatcctacggccggctgggcacctactgctgcagagggttgcgcaggcgcaggcgtcgccgtggctccgccgagccctcagagtcggggttgggccgggcctggggtcaagggcagggttacggccccctagggagactccgcccctggcggaccccgccccacccctccacatgagacggcgcgcgcaggctcagttcctcggcgtagcacagcggctcccaggcgcgctcagctcggcgaagggtgcggcgctatgccggggtactctcctgggctgctctcccaggaggagagggaaggacccctaagcccctcccctcacgatctcggccgggaggtgacagatccctttttttgttgttgttttgtttttttgagacaacatctcgctgttgctggagtgcagtggcgcgatcttggctcacc

SEQ ID NO: 32968 - DNA, 1292 bp, Homo sapiens
actaggccatgggagctctcaaaaggcacacttgcaggaatggaaggggttaaagcttcaagtagaaacaaaatgaattttcaataaatacggataaatatttgcttcaggtgctcctgagggttaaaaaaaatttagtctcatttttctcagtgaattttaagacaaaattggtatcatgtgaaaaatggggtcatggttcaatctggcctgactgcagcatccacggcattgtggaaatgctcgccttggccgagacacgtgaagtcccaccgcacaggtggcttcaggaggcctgaggagacaatcaccttcactgtgttgaatcactttcccatggtacacgcccacagtgcccaggagctaccaagaccaaccataatgggggcagacaaggcagatttttcttaaaaagctgtaagcaaacagtctggttccaggcagtatgcgtcaaactggaattcaatggagttcagaggaaccagattactttctaagacaatcaacatatctgttgcctgcctacttgggggaagtggaaggaatcaacacgttaacagctggcttaggaaggccacaggactaagggaaagactgtaaggttgagattctgtactttcaggtttctaatatactttatatttagataggaactactgagtttggaggcacagtccatgcacaaacacaatgtcctaacacaaggtacagcaatagcggtaacacctgaattgctagccttctggcccagctttcccttgtaaataaggaccccacatgatcgaacagtctttgccaagcaaggattggcaacagcaccagagcctgagtcgcgaaagggaagtgtggagctccaagcagttggatgccacataagtagacacatgttgtttcctcattgaagggaacacaaagagcagtttctggaacacatacccctccccacaagctaggcttggcaccagggtggctttcctacgaagaccacatcataaaagctaatggctaagggaaaggattcagcatgatgtaacaggagaaaacacacttatcagtacacttaggctgccagatgctggctgaaagccaggacccagggccagctgcagcaggctttgtgcctgagaaacgctaataataaaaagaggagtgtcagggtggcaaggtgatgttttgaaattaggatttaaatttcaaaacaaaacaaaggcaaaacaaaaatcctctttccactgatgagaaatcaccaaaaatccctatttaaatggtgccatttgaaataaacttatttt

SEQ ID NO: 32969 - DNA, 2142 bp, Homo sapiens
gataattcacctgaaaggatacattctttgttgatcaaatattaacatgaatgtcaaccacataaaatgcaggattctcttgagaaatgacacagcaaagtaaatgctttggggaggagcataatataaaaccactataaataatatgacccattagaagttgaaaaataaataccagtaaaaaagaatgatacattttctttggcttagtgcatattggcatcttacctgactccctcctccctctcccgtcctaactgaaagacgctacagtgtttgctgaatagttattttaattcctgagcacctgagattggccacctcgaggatgaggactggggccagagatgttcggcttggaccacgcccactgctcaaggtcaaggacccagacatcattgctcctgtgaattaaggacagaaggataaaggtagttaggagctcccagggaccataatggtggctggggagttccacatgcctgtggcccatctggcaaacttgcaccattttcactttcacagactgtgtgggctggagcaggttttagagatgccctactcagagttcaggggcttctgaaccagaaagagaccatgttgctgaatcccagctctgtagcctgaacaagtcacttaattttctctaactctgactttatctctaaaatgaaaatactgttactactgtctgaggagctgatataaaatgaagggacctttataaagatgcgcagcaaagtgttatgctcctacttagcacttaggctgtatctttcttcccctactttccctagaagtcatcctgagaccctccctctgctctttccacgaggcctcatctgagccacgtctgcggccagacactagtgcctaatgagattatttttttaaccatctattaactgaagtaaaagcagatgattaaaaaatagttaattggtgacagcaggaaatagacactggttaagctacagttttcaaaagcaaaaaccacaaagaagagaaaaaacgattcaaaaggcagcttcatcattgtccaggagttaaaagctttatcgattctggctacaaaaagtaattgcacaatgactaatgaaagctgcagttttatcaaggacagactggcatctctaaccctcaagggaccaacatgacgaggacagactcctggatggcagtctctctttcatggtcacttaaggtcattgattcacccacaaaaatacaggaataatagttccaatatctgaaatcctaaactctctcattgggagagtagctcctataatctctctccataactgttttaaaatatgaagatggaaatgccctaagggaggacaggtgtgggatggtcttgctgctgacagctcatcaacttccacttcagagcacagggggaatgaccacaactgctgctaccgctgaatcagacagtgatacagatggaatgctctggctcctgactatggcttgagctgtccagtatggccagaagtggacaggacaggaggtagggacaatgacctcacagaaatgtcatgcctgacacagttttcctgttcctacccattccacaacccatcccatttgtttttttcttttctttccttctttctttcttttcatgccctttacatgtggctcaaccaacctatcacatttggagggcccaccatttccacttgtcctgtcaatctccccctcttctcctctaaagcccaaaagggcaagagctgggtaataaagtagaataagtaaaagcattctgttctcgaaagttggccttctgcaggcacagcacagcaggcaaggtggaggttccatcagaatttgatcctactgaatagaaccatatgtcaaagagattctatataactatgattttatagagcaaatttttcaatttattggtctgtgattaagggattaaagaacagaatgctaggatgagataactaattggattaattagagccatgctcaggaatactgaccctaacttactttttttttttttttccttaagagtctcgatctgttgcccaggctggaatgcaatggggtgatcttggctcactgcaatcgccacttcccaggttcaagcgattctcctgccttagtctcccaagtaactgg

SEQ ID NO: 32970 - DNA, 585 bp, Homo sapiens
cacatataaaattccattctttgagcaactactatgtgccaggtactagagtcagcagtgactaaaacagacaaaaagccctcagccccaggaagcgtatagcttgctgaggggaagaaagacagtgtgacatatggtgataagtgccaaggggggaaaaaaaaaacaaaacaagaggaaaaggagtcagggaagttgtcctttcaaactgtagttagggaatgcctcacagagggagacatatgaataaagacctgtgaagcaggtaaaggagagagtcacaaggacatgcaggaagagtgttccaggcagaaatagcaagagcagaggcccaggtgtgaggctaaaatacagtgagggacaggaatgcagcaggcaatgaggtcagagagatgaggggacaggatgactgtgcaggaccttgtttggccatactttgatccctaactactgtgtgcgtgtgtgtgttggtgtgtgtgtgtgtgtgtgtgtgtgtgtgtgtgtgtgtgtgtgttggcatctaactctgttgcccaggctggagtgcagtggcatgatctcagctcactgcaaccttcgcctcct

SEQ ID NO: 32971 - DNA, 883 bp, Homo sapiens
taaagagttaattcagggccgggcgcagtggctcaagcctgtaatcccagcactttgggaggccaaggcaggtggatcgcctgcggtcaggagttcaagaccagcctggccaacatagtgaaaccttgtctctactaaaaatacaaaaaattagctgggcatgatggcaggcacctgcaatcccagttactcaggaagctgaggcaggagaatcgcctgaaccggagaggtggaggttgcagtgagccgagatcattgcactccagcctgggaaacaagagcaaaactatgtctcaaaaaacaaacaaaaagagttaattcattgactaaaacaattctgaaatcacaaagataattacgtatttgttcatctttgagatagcttctccctgggacctcagtgttctcataaaactcagacgttttgttagcattttctttgcttgctctccataataggtaggactcaccctgctctgaatcttactcagggtttaaaccacataaagctgttattaaagacccctctagaaatcagacaagaagaagcatcctaagctattttttttctgatcctgttctttttgtaactaaggtaaggaattgcaaaggtcaaaatctggagagcaaatgatgtcatggatgtcatgaagttgcatcaatacctgatgatgatttagcataacagtgcaacatattatgccaagaagcataatgatgagccaccaggatgttttactgcattaatttcatgactctttattagcaaattgatatgcaaagtagctctccaattttctaccacagagaagctgctggttcagatttacatctttagcaaagacactaagaaaatcgacaaatttctatggaaaagtctttg

SEQ ID NO: 32972 - DNA, 2607 bp, Homo sapiens
cagagagccgagactgtgctactgcactccagcctggatgacagagtgagaaactgcaaaaaaaaaaaaaaaaagaaagaaagaaagaaagaaagaaagaaagaaagaaaatggtcaaataataacctaaacagttgtcattttaacaatgaaaagctttttaagatacgcaacatgcctatggatcaatgtagattgaatcatctatttatactggcttgtcaaaagcaaacagttactgggtataaaatgacaacatacaatagaaaagacacccaatcagattacacacgtgaatacactcaaagttagcaatttaacacagcatcactaatggccataagatatacagacttaattctaaatattcaattctaaatgatggtacttcccccaaattttccttgcctctttaaatccatgatgtcatcattcttaagcagaagtaaagccaatttgttacaaaagatattttggtgtgtccaagcaaaagcaatcgcctcaacaattctgcatagcacaagttcagtgaagccatcattcctcaagaaagagaccacaaggcttcaaaccgacttccctacatgacagaaacacaatcgaagtctcccaattagcatttaaacagcaataaaagttgttctcaaaaaggaacaacatagtttcaacgtcggggccagcaactgccagcaagtaaaactggtaatgtgtcagaatcttcatctagatcgatcagaatcccaccacagaaaaatccagactctggcaattaagaaatgaggcttttattttcctaacagaaatcgggagatttaacagacaaagcaattggttattctgaatcttaacaaaccgaaggtttcaaacgaactcagcgctgaagttactctgcagcgaccatcaagatctcacaatcgttttctcttcgcttacaaattcgttcccaccctccaccgttccctttgcacacacaattctcgccaagagaagccttccacagtcacagcatggattgctgtctcaagcaaggagatccgcagttcccatttctctaagggaacactcaacaagctaggggataggaaaggccttttgtgttttatttaacgtaaaccaattccaaaattatccctttgcagctgcaggttcagagatgctagcccccagccgcagccccaattttgatgggcacccgacccccgactcctctctcgcaaaggagtgaaatgttcggaggagcgatgaaagattacctgacaccctaaagccatccttgcccgggccacacaccccttcactgcccgggtgaggggacgagaaccaccctgctgaggagagggggtgggttcgctcccaacccaagggctggctggaaaggagctgtcctcctcctcgcctcactcgaggacggcgatagcaagtcaccctgcccaaccaggaccgacccccgcgtgggatacggggcctgcgtcagaccccgggcgcccgctgccccttgccagtcccgggcataaagggcagaaggcgccggctcccctctgcggcccggggaggaggagaggcctcacctggcccagcccgctccacgctctcgggttcgctccgctggcgacggtaatgagggagccagggacagggccagagcagaggcgctctgcctcaggccgcgacagccgtgctcggggctcctcacagctggcgggaccccgagccgcccggagccgccatcttcctccactcaaacgccgccgccgccgcagctgctgctgctcaggccgggagaagacagcgcagagcgcgcatgcgccggggcgggcgcggcggacgcgcgcgcactcacgtcagcgcggcgggatggcgaggggcggccagggggcggcgcagtgttgagaaaggccgtggtcacaggccgaggttctgtggagggtggaatgcgctcgggggagctaggcctccgcacccgccttcgccgcgtctctagcgtcgacctgatagccgcacccaccctccgctgcactgtctggggcaactgggtggttttcccggtggtttgagactaacatttagccaggaattaactcacttctaccccgagggcccgatgagcagagagggctgtggcggatgtgagtgctcttggatatcgccaaggggagggaaactgtgcttgaggtgtgcaggagaagtcttcccttaaccgtagcctcgtagcaaccactgtgagttcttactagctccacttttcagatgaggaaactgaggcacagaaaacgatcacttatttgcccggagtcacacacctatcagtggaggtggggcggcgcgggaaagaggatttaaactcaggcttgtctggttcccaagctcctttacttcctactagctaggttataggatccagcaaagtcccccttctcaagggagcaacctggtgtgtaggtgagaaccttcatgagcccagccctacagcatgtggtctaaggaaatgccagatacagagtcaaaggcttcagtctaaactctgtaagccaaaaaaacaaaacaaaacaaaacaaaaaactaagcccccaccccccccccaacaccaaaccatctgaacggacttcc

SEQ ID NO: 32973 - DNA, 2064 bp, Homo sapiens
ctgtctcggcctcccaaagtgctgggattacaggcgtgagccaccgcgcctggccagtaatttttagaggtaatactaacgtatttatctaccattaaagacccaggagaacttagtagctgggaatcccactggttctcccaactgaggtgcaatattatctttaccgtctttaccttacggtagcggatatagtgttaataaatgattagaatactgctttatgagcaggaaatactgtaatgattttcaccctatcagaaataataaaatgttttctgcatcagcagatatttttcatcatttgttggtgtttaaaaatgttttcagaattctgaagataccattatctgtagtttaggaaaactacgactcactttaaaagaaaaaaagttttctttaattgcctgcccttagaaaagatggttccacagaacacacttccggtactcgagatgaggacttcccttgaacgcccattctgtaagacagataacgcgttggcccttaagaaagatggcatctttccgccttctctgcccccttccaagatggctgccctaatgtacacttgggaccttgcctggcgcctcttccgggcttggcagcgggcggggtccattgagtaaagccttgcgtgcctgcgcccgcgacggaggcgcgcttcaaagcgcaggcgcggggagggggtgggggaggagggaaagcggcgagtaagatggaagatgaggaggtcgctgagagctgggaagaggcggcagacagcggggtaaggaggagccgccgtcccatggcagggccgggcgagacctggcgtgaggggagcctccggggagcgggtctggagatagttctccccaaggaagggccccatacgccgggctgggggtggtggagaggcccccagttcctgagcgccgtgaaggcctcttaaaggggccgcgatccatttctctcctttcctttgcctggtgcgcctccctccgcccactaacgcgcgcgtcacccggggcgccccacccgccacccggggcctcctttcctgaccccccgcgcccacttgctggccgtgggcctctgtgactctttccgatgagccttgtggcccgaggcaccattttaaagttcttgtgctctgaccgggacggacacaccatgtgggtggtggtggggcttgcgcggaccaaggaggcatgtccggcttcgcaggaaagcgggaggaggcagccgagggcggggggaaattgaatcctctttgggctactcaactctgctaaaatcccccaccatccgtcacggtggacgagtcgggttttttttctctttcacttttactccaagaagagtttgtgggcaggcaggcaggtctcacggggactctgccaaagcaaccgaaagctctgcggggcagctcctctgccactcagcgatccgaggccccgggaaggtctaggagttcgcttgtcggagtccagggtgtgatatgtaaaacagccacattcttgggagaggagtggggagatggaccgttcgacttgtttttggagtttttgtttgcctccagaaactgtaggaaaatagtttatctcaaagaggatctgtcaattctcttagatttgtgaataatttggtcttttcagagtttgtctgtggtgacccttgtgaatatggggagatgctttttttgtctccccgtgttcgcgtctgttcaatgctggctgcactgacatccaccttaaaggtttacgtgtgcgaggagtcgagcgtaccagggtagagtaggcgctgggttttttttcctaagcgctttttgggggtgcttatgagctctggaagaggccgggaaattgaccctggcagcagtcagtgggtgtatctagctctacgggaatgttgaaacttggctttgaagttttttccgctggttcagcatttctctcaacggttgtttatgtttttccatttagcataattgagaatttgaaggattcgttcgttcagaggatatttagtagagttcttaatgtgacaaccatctttcttgagttttggcttaagaaagtt

SEQ ID NO: 32974 - DNA, 1324 bp, Homo sapiens
agagggaaggatattcaggcagaggaggcgccgaggcaaaggctggaggacagagatactgcagggtgggctacagctttgcctctcggtcaactgggccccaggcctaagaaactgaagcgatggggatgatccacacccagaccacgggttacagaggggtctgtccatggcgggcgcagggcgctttctttgcgtcggagggtgtctggagggaaggagaagcctctggagggagggagaagcctccggaggtcgcccgccacgtgtcttgagccgggtttccagcagagggcgcacaaacgaggcggtgctgaggcccgcgagctgccgctctagccgaaacctggtcagagagtcgcaccgcttccgtccgtcggacagaggaacggtggaagtcgccggaagttcggtgggctccaggcgtcgcgatggaggagagcgggtacgagtcggtgctctgtgtcaagcctgacgtccacgtctaccgcatccctccgcgggctaccaaccgtggctacaggtgactacccaccgccagaccaggctagctccaatttaaccctttctccgccacccggacacacccactgcgggaaccgaggacagccctggccagttttggggcgagggggagctaatgctgctgcttcttccagttccaggcccgagcagggaggtggatccagagtttcgcccgtctcagttcgacgcacgggactcctggcggcggggagggcgttaaagccgtatctagcgcttagggaccccggtgggctgccgggtaccctaaacttggtcgggggtggtgatgtcacagacgcttctctttcagcgctaaccggtggccttgaagggatcctcgaaaagccttaagcggggaggtgccctatcacagacggaaatccccgagaggaggggagggagcccagagccggctgaaaggaccggtcccggggagctttaaggtgacggtcgaagcccagggaccccttcctacccagatcccttcgcacgaatttcacccttgatcacagcctggagcagttgggaggaccccttctatatttctctggtctctacctgagacgaataaacacacacgcttgtaaacatactgagtatctctgcaaaggaacacaggaaactgccctaggggaggggaaccgcccttggaaggaaacttcctttcccttttgtgctgtttgcgttttactactctttgtatgcgttatctatcaaaacgacgaaaaatattaaaagaaaaaagatacacttcatacagacaacctggcctatggctattttgtgccactgagtggtg

SEQ ID NO: 32975 - DNA, 1042 bp, Homo sapiens
aggatcgcagggcatttccgccaagacaggtgagactgcggttctgacctgcgggcctccgtgcatatgcgctagggcacctgggggccggcagagccgttcccctacgcaaagtaagcgtgttatgtctacaacccaacggggacactgagagccccaaaggccctgctttcttcccagagaactgcccatctgcataatttctacctggctctatgaggtgagaacacattccccgctagcacagaaatcctacaaactcctgtgggggctgcgcttggaagcagaggctgtgtaagaggtgactggggggtagggaaaaacacgaagattttcacacagggtgagaacccaagagactggagaccacggaccaatccctgcaaaaagcagccagggtagaaagggaagagctgagcggacttcacgatagctaatttgtgttacaaagccgatacggctgatgctcgctttttctcctatgacatgcaggcgacatgttacttcctattcccataaaccctccactgtaggattaacacctaagacaccaaccaagacacaaaccaatacaaaaaaagatatgacccttggcgtacagtctgtttttgaaactccagaaagtcaggggaaagcgcgaacgcagtcccccactaccacaaattatgcagtcgagtttcccacatttggggaaatcgcaggggtcagcacatccggagtgcaatggataagcctcgccctgggaaaaccaccttcgtgatcatggtatctcccctgccaggtaagtatgaaacgttgtgcctctgccccgacacagcctcatacgcctcactctttacacacacggtcacttgccccgcgcactcccgagccctttccagccctgacacacagctgggattctcacttccgatcagcggtcctgaacccgctcccagggcacgggaactcccttcgtggcgaagcagcaagtggcgaagcagcagcctctgcgctgcctcatctacatagaagtcgccctgtccgtgatgtcaccgacagt

SEQ ID NO: 32976 - DNA, 500 bp, Homo sapiens
acttctaggttccctcaacagtttctcctccgctttagagaccgcattgaaaatattcttgttctgctgttgtgttttggctttggaatgatgtgatgcagctcaatgggtcccacccccaacttgatcaaagtaagaaacagctgggaaagtcagtgcaaatacaagttcattgtcctccttgcagggattctgattcagagggctcaggtggggcctggaatgtttgttaacatgactcagatgtgcagtcaatttggggactcactgacagcattgaccttacagtttatgggatgattctttctgtttggtgatgaagaaactgaggcacacagagtctgtaacttgcccaagttccccttgttgtaagtcctggagccagatctcaggtggaccagtgcttctctcccctatacctcatttctgagaaaaggaaatcttctgcaatttgacttctttcatctaacacatttcctcacaacatgcagccagcatca

SEQ ID NO: 32977 - DNA, 1440 bp, Homo sapiens
agagcagggcctactacctcacagtcaccccatgaatgctcagtgaaagaagacgtccaccacaaggtcctggggaaccaagaattccactgtggcccataaattctaagtctacaggattctggaatgggagatgggaaaggccttcaaaagtggccacttttaacccattatactggcaactgagccatgtttccccatcctggacacatccagagggcactgcctaaaaccagacacatctccccacccaggacagtgtaggagccttagcctgggggatgcaggtggacagggagggggtgagccaccaaagctgaagagcagaaagcaggtgaaaggggacagcagggtggaaacagagagaaatgggggcagagaatggggggtgagaggggaagagtgaggagagggatgcagatctagctagtaaggaaaagtcctggagagaacactgtcctctcctgaagtaaaatcacttctacctgaccacggcactgcagctcatgggcagcacatgctgtggatatttgttcattcatttaacaaatatttatttaatatctgttgcatgccaagcaaggccctgcaatgtttagggaccttgacatcttcccttcacatctgagtcataatacaaagaggactctctgaccccactgagctggcaatgcctcgggatttttacctgttggatctggcagctcttgatgtcagcccacaccatgtgaggctgctcttggtgcacccaatggggaagtttctacatcagggcctcggagaatccactggaagccctggacagtgggagtcagcggcatccccagtgtggaggccaagagcacacagtgcttaagctccaggcaccctcaggaggacggcaagggacaattggctggtgagagcccgggtcaccgggaaccttcgcctgggtctaaacaggatttgccttcagattgcctgtgagataaaagagagaaatcaaggttaacgttgagatttagggcttcggtaacttgaaggatggagctgccatttacggagactgggaagacccagggaagagcagattgaaaggtggtgggaactagaggtggttgggtttctgtcatatgtaatcaacagtcctgaccagcctgggcaacatagtaagaccccgtctgggaaaagaaaaaaggaaaaataagctgagcatggtggtgcacacttgtagtctcagctacttgggaggctgaggcaggaggattccttgagccttcagttagcggttagtgagctatgatggcaccactgtactccagcctggggggaaaaaaataaagagtcctgactaaatactagagtagccagggaagttttcacaaagtaagtaatatttgaggcagatcttagtgaacaagaattccattatttctgttagggaattaagagagtgtgggt

SEQ ID NO: 32978 - DNA, 1549 bp, Homo sapiens
aaaaagctactaacgcatatcagctcagaacactaccagcagatcttttctttaacttcctgaagcactgggattcattcttttggcaaagaaaggatgaacaacactgtaacccaaagaaaagataccactgccagaaaagacttcttttcgaaagcagctctaagcaaaagataggaggaaaacaaggaagccaggccaaacgtcttggttaactctccgctgaaaggacgccacatgagatgatctaagaagccagccagccagccagacgcagggaaatcacagcaactctttggagtgcaaacagcaaccccacaatccaatctacccgaaatcctgcggttcatttgaggcttgccccgctagtcaggaggtgattcagtgatggctacaaatgctgctcatgtgcatcctggagctggcacacctggcttgcccatcaccagcctggagacaccgccaggagcagaagcccggaggccagtaaagaccccaactttgcaagtcaggggcgcgagcgcgctcgcctctcaggtccgcagagggaacggatttctggcctggagggtggggtgcggggtcagtgtcctctacaggatataggaggacgtgcccccgaagctgctccgtccctccaccccctgggatgccacagaacacccgccagcgagtttcttccccagcgcccacgagagttgggctgcgggcggcagcggcaggcgaagaatccagcgcggggaactcaggccccggcggtgcacgaccccccacagcccccacccgcccccgcgctcgcgcaacaaaacttgccacggccgcgcctcgacccagctgtgcgcccgcgggtcccggattcaccgcccgcccagcctggcgcggcgccctcacctcagaaacgctgggtggacttcgcgtaacttcccattcacagggcagccggcagccgcgccgccgcgcctcggcccagctcctggcgccgcagatcgcccgtcccgcgttcccaaaagcaccgcgctcgctcagaagctcgggcagcctcgcgaccctcacctacgcctcccagtaccgccgctgtctcaaccgccacccagcccctcgcctgcgcctgcgcctgcagcccactggctcctcaggatcccgatgggcgtgtcaggataacccaaggcgcaggcgcggcggggccttaaagggacccggcggcctcttctgcacaacgggttcgagcaggttaggggccgcgcaggcggaggaaaggagtaacccaggggaaggaccgagtgcagcggggacggggaaatccctctctcccctccgcctgtctttcaaagcaccagccctcgaccctccaaatcgctggtttccccggccacttgaacagcccctgccaggttgaagaggcaggagacacaccccctctggggctggagcgaccccgcgcttaggactgcaggcctcgcgctgccgcaccgccccgaatctgacttccaggcacgggcacgcggtgcagtcgggcaggcttcagaagagcccccagctctcccagagg

SEQ ID NO: 32979 - DNA, 1006 bp, Homo sapiens
tctcagttgcctcagccacatttcaagagttcaatgaccacatgtggctaacggttactctattggacagcacaaaggtagaacattcccaccatcatataaagttctattagacagcgcaggtctagagtttcgctctgcagcactgccttagccagcactccctactctgccgttcagtctcttatctcgccccaaacagaccctctactcccgccacaaacccctgtgggtctgcaccacgcctgctcctcgggaaggtgattttcccgacctcgggccctcggtgggcctccatgatcggtgccccttcactaccacagtagttgaagatctgattaaatgcagtcattcatttgatgagcagaccttccagacacccactccgggtgtcagttgctgaggacccaggtgagaggcggaccttgtccccgcccggggactccctgtcacggctatcccgtccaacctcgccggggtatccgggctcagaactgaacctactccgtctgggagcccaaggatggctcccccaagtcgcccccgcctggccccaagctccagaggacctgccagaccagcttccgctcggagtttcgcactcagatcccggcgctgcaggtgccctcgcagtggactaaactggaccgcgaagggaatagccggaacccgccaggctcagagccctgccgcccctcactcaccccgagcctcggccgccgcgacccggttcacaacatccgcccaacctctcggctacggcgtccgttcagggccaaatcacgcgcacgctcgcgcgctgagcctccagccgcgcacgcgcaccggcccgcgcccagcctccgctaggggaccccctccgtggcttcccaccgggttgttccaggcctcagcttcgccgaaaggcctcaccacctccgacctccgcctgccccggggatgctcccagccctgctgcggcagaacgcgacgtgctaaccggaatccctaggccgcctgtctccta

SEQ ID NO: 32980 - DNA, 970 bp, Homo sapiens
ccagtagctccgagttgtcgcccatcgggaacatcacgttgaaagacttggtgcctatgcagaggcaggagatgaggcactggccagggtggggctgcatccctgccacccctcacccgcccctctgcagcccccttcccaactccagattggatgggtgcccatcctcggggccagcgggcagctctccagatcccaggtcctgcaggcagctttcagggcccccagaggcaggcccttggttccccgactgtggcaaccccaccatcctcccccaccctactcacgggatggagggcccctgcctggagacccctgggagttcatggtggctcttgggcatatattcctgcccagccactgactgcccagccccaaaacactacctggaatcagccaccggacctttgtcccaggtttcctggctcagcccggctgggtggagcctccctctggccctctccctacatcagcaaagcctcagtgacccttgagctgagtcaattggggcctccatggacatgcagagtccagaccccagagtgccagtaccacctgctcccctccctcgccaccacacccacagacagacgcacaagcagacacattggttgcaagccgggagcacatttatggcaaagcacggctcagctctaggggaaagcagagcccttactaaggccacaggaggcacccaggaagaagggcagcaggtaatatgcaaacacccagggcagagggtgcattttctggcttagccggaggaggcgaatggagatttggagagataggtctcttgagtcccgatgaaggggtcaggtctgggagggaggaataaaatgggccgacagctcttggattcccaggctggggatcccagagtgcagtcaccgggaggagaagagtaggagaaagggaaaatcggtgtggcttactcatttatttaggcaaaaccatcagccaggcgcag

SEQ ID NO: 32981 - DNA, 743 bp, Homo sapiens
cctttcctcccctctcgcccactgtcaccatgagtccccacaactgctgtgtctgacctctatccctttcatcgtgtgccccctccatctggaatgtccttccatcctcctccctcttgaagactcagtacccatccctcctccatgagggccaccctgatttatttcccccttgctggcctccgccccacactgcccagggccactatgagcatgacctgtcatgcttggttgaccataactgattttgacctttgcctcccccagaagactgagttcccagcgggcagggtggtaagggttgccagacaaaatgcagttcacacagttcaaccggaatttcggatgaacggataatgctttagtattctatatcccaaatattgcatgggacatacttatactaaaatacaacttttttatctgagattcaaagctagtcaaacatcccgggttttgttgttgctgtttttgttaatctggcagccctcgggatgtccactatgtactgaatgcttctgctgtgctagctctgggctacggcactggcaagcaggttcttctttttttatttttatttttgagacggagtctttctctgtcatccaggctggaatgcaatggcgcaatctcagctcactgcaccctctgcctcctgggttcaagccattctcctgcctgagcctcccaaacagctgggactacaggcatgtgccaccacgcctggctaattttcgtatttt

SEQ ID NO: 32982 - DNA, 1284 bp, Homo sapiens
tcaggttctctctccatttccccattctgctacaataaacaaacaaaaacaattctcacttccagaagatcccgcctgtgcctctgcatgcgcctttcaggaggtctggatgtctggtccaccgctcccgggcttctttcccagcttttgcttttccctttacctgctctcgccctacggccccagggccggaccacggcccagctgagccccgcggctccaccgcgcagaaggtgcgccggaggccctgccagtttcccgccctgcagggtactgagaaatcaacgatttgtaaaaagaacttccccatggaaaaaaatctgttgatttccgctctcagggctcttcaaaggactaaaagctaaaggcgacaatgaattcattcgacaagtcctagtcgtgagccctggtgagtgccagaccctgctccccccgaggggacccacgagcgaccctcaccaccatccctgccctggtggagcccccgtgcggaacacaggatccgaagatggcagcggaagctcctccgcggccccgagagcgactgggcagggtgggcacaggctcttcaatgggtgaaggcggcgcaaagaacgggaagaaccatcccaggagcccacagggcgttcagcttcccttggggccccaggcggctcgggctgggtcgccgacccgggagttcctggaagcttctgaagcaggcgaggggcagggcgggcgaaggcaattccgctgttctggctccagaatctcctaacgcgcaggcgtccaacgtgaccggcgcgactcaccgctctaatctctctggttttccaaggccttgctcggtggtcctgccgggcgggctctgggagtagagggaagggagttagttcagtgagtgggcccttcccatatcaccagtagaagcggaagcgcttgtctctgtggcgcaatcggttagcgcgttcggctgttaaccgaaagattggtggttcgagcccacccagggacgcttattggaacttttgaagcattcatgcattgtcaatcactaggtaaatggggaagattttatcttcccgaagtcccaagccactcatttatgactgatccatgtcaagggccgcccacctccccgaccagattcttaaccggctatctcctgaaatgccgggtttacacctgtgtaacttaggaatcctgaaacagagacctaggaacccacttctggtgtgataaaattctaattcagtcccttatacgcttaaacaagtaattcacgtgcctccattttttcatatt

SEQ ID NO: 32983 - DNA, 1498 bp, Homo sapiens
aagtgaccgtgtgtgtaaagagtgaggcgtatgaggctgtgtcggggcagagcccgaagatctcatacttacctggcaggggagataccatgatcacgaaggtggttttcccagggcgaggcttatccattgcactccggatgtgctgacccctgcgatttccccaaatgtgggaaactcgactgcataatttgtggtagtgggggactgcgttcgcgctttcccctgactttctggagtttctaaaagtagactgtacgctaagggtcatatctttttttgttttggtttgtgtcttggttggcgtcttaaatgttaatcctacagtggagggctggcgaataggaagtaacatgtcgcctgcacgccataggagaaaaagcgagcatcagccgtatcggctttgtaacacaaattagctatcgtgaagtccgctcagctcttccctttctaccctggctgctttttgcagggattggtccgtggtctccagtctcttgggttctcaccctgtgtgaaaatcttcctgtttttccctaccccccaagtcacctcttacacagcctctgcttccaagcgcagcccccacaggagtttgtaggatttctgtgctagcggggagtgtgttctcacctcatagagccaggtagaaactacgcagatgggtgctgttctccaggaagaaagcagggcctttggggctctcagtgtccccgttgggttgtagacataacacgcttactttgcgtaggggaacggctctgccggcccccaggtgccctcgcgcatattcatggaggcccgtaggtcagaaccgcagtctcacctgtcttggcggaaatgccctgcgatcctcccggagatagaaggcgggaagttttatgaggagccaggtacagtttccctactatctccggcagttcatatatctagtgtttcttcagactttatttaagcgacagcttcttgtttgatgtctcgctcccacatcctacatccattgccaggcaactttctagatagcacccagacccatccttcccacccccaagcagccgtttcctatttctggtgccagtgtcctccccagtccctctttcttcaggccctcgcttatcaccttcatggacagaaaatacttagctctctctcaacctgcggtttatacctgacacgcgtcagtaccctgacaaattccttaataccctttctcaaatggcactgaaaatgcatttctttttaactcccagaagtatctaattggttttgtccctgaactacatgaatactagtattccactacagaggaaaaccccaggcctagcgatggcggttctgggcattgtgccagcctctcccagggtatgttttctgacatcacctacttttgatcaactgaggtcaggagttcgagaccaccctgaccaacatggcgaaactccgtctctactaaaaataaaaataaaaataaattgccgggcatggtggtgtgggtctg

SEQ ID NO: 32984 - DNA, 2249 bp, Homo sapiens
tactgttccaggatacagattctctttgtgatgatcattcttgtatgcattatatttctactactcaaattattaatgttatgtatttctcattgttttacttcttttgagaaactaaattcatggtactctgaaaactagagatgattcaacaagtgacagcaactatagaattggccgagatatctctctctctctctctctctctttttttttttttttttccatgttgtgatgccacaccagttcagcttttggacgctgttaaaaagagaggtctccttccctcccctgacccccgtgtgggacaggactatctgggaatgagccattctggcaaggagggacacagcttttgatcgacaatgctttcaagaaatactttttttttttttaaacggagtctcgctctgtcgcccaggctggagtgcagtgggcgatctcagctcactgcaagctccgcctcccgggttcacgccattctcctgcctcagcctctgcgagtagctgagactacaggcgcccgccaccacgccaggctaattttttttttttatttttagtagagacggggtttcaccgtggtctcgatctcctgacctcgtgatcggcccgcctcagcctcccaaagtgctgggcttacaagcgtcagccaccgcgcccggccaagaaagacttttcatctaaagggagaatggggaaagaagagaacttttttattttcaaattctcaggcccagcgaggcattacattgagacagcaaccacattctgcttcctttttgtacactactgtatttgaaaaacaaaaaaacaaacctacaagactcataaaactggacaactttctttataacactactactcgtaaaaccagtaaggatggctggtttgcagttatctgagcagcttctctagtttcatagacatgatttctctctgttattaaagggctcccaattttaagtggaatgctacttcacaaagataaccaggtttgaaagggtccggtttgctttgtaatccgaaacgttccagtctgctattaaaagccattatttgaagacgggtgcacaggcttccagctgcccgccagaagggtcctccgcaggacacaggttaagtaatcacttcttcgggggagactagatgcagggtctcggcgcacctccccaaaagacaagggcgagacagaaaggagggacaggcggacgtcacttcccccgccggctgcggcaccgggttggtgggctgagtggaggagggtggggcggaagaacagaaggggactgggaaaggcactgttggtgacatcaccgatagggcgtttctatgtagatgaggcagcgcaggggctgctgcttcgccatgaaggatttcccgtgctgtaggagcaagtccgggaccgctggctggacgtgagcgtcctagctgtgcgttagggctaggagggctcagggtgattggggattggctggggtggtgctcggggcaagtgaccgtgcgtgtaaagggtgaggcgtatggagctgtggcggggcggaagttcacatgtgtggtatgtagagcacatgttatggttatcaaagtggtttactgtaaggctgagggctatgcattctatggctatgttgttgtctcttatttttccaaacgtggaaacctctgttttgtaacttgtagtaataaggtagaaattaaaaagaaaaagtattttcctgtacttgcttggctgcaaggtcaggaacagatagtttctgaaaaaccacatcgctgagaaatgagttctggagactctcttaacagtctgttatccctaggaaggataagagcaagaaacagcaaatgcttttattaccttctcttttccctttaccatttctcactattcaagttttgttaagttcttgatttcccttcagtgcagctgcaaggtcaccagctattcttgcctcgtgagacctgtcacagtttgactagctgcctttgttctgcttctgtaagccctcttgcctgccccgcgagtttggtgccatcatagtcccaccatgccattcaaactagccaaccccctttttgaagtgtgtataaaagtcaaaccctgtctttgttcggggctcagcctttggattttaatcctctgggcctgagggcactcaataaaatcctcctgttccacccattggtctctctgttctcctgattcccacaacagtagtaggggactgtgtctgcactttcccctggtc

SEQ ID NO: 32985 - DNA, 955 bp, Homo sapiens
gcttcgttcgcctggtatcctcgttcgtgcgtgtaggaggcgcctggcttgccgggcggtgccaggcggcaagagggagggcgcacggagcgtgtccgcccagggcggcccctgtaagcgctgcagaagcgctgctcccggcgcccggccccgccccagcctccgccccactaccgcgcagcgcaggctccgcccccagttttccccgccccgtggcggggacgccccgcccggtccggcccgctcggcctcggcagcagcggctgcggcgaaggcgcgcgaaggtaggtggccgggggcgcgcgcgtgcgcgggggcgggacggacgcgctcccggcggaggaggccgcgcgcctgggggcgggctggagccacgtaccggggctgggggcgctgtgtgttccgcgactgccgcggcccggcaccggaggccaggagagcgttcccaacaggctccgcggatgccccgccgcgtcctgccgcccatcctgcccggattgtcgcgggccgggggcacgacaggagactggggcctgcagggcgcagccgtccctccgccggccggggtcccctcgctccgcgggcggccgtgggaggccctcgcgacggcctctgccccccgcagatgccctctgcagctcctgcgtgcgggccccgccctgcactgccctcctcgtgtgggatccggtttcgtcttcattgcagccctgccgagtcggaagcatctccattgtgcggatggggaaactgaggcccagagcgcatagttgggctggccacggaggcagggccgccggatgctgtgcggggatggggccctgcaccccttgcgcctctcaccatgcggcctcaggcctctgtgcccggcagcgtctctggagtgggcattttgaacgagctccctcctgattttcacacagacttaagcctgacgaccatgctggggcggatgtct

SEQ ID NO: 32986 - DNA, 712 bp, Homo sapiens
ctatgggcattacaaggcttgtataaagaataaagagattaataaacaagttctagtatttcctcccacggggatgtttttgcaccgcctgcttgagtggcgagcactaaaggagaaagggttgtactgaccacacagtcagggatggtgggctccagtctgggccttaggggtggggcgtcgggttgggagaggtcttgccgacctccacctcctggcatcactccagctccaggtagcccagcggaagctgcaggaacaagaaggcgagttccggacccgcgagcgacgcctgctgggctccctggaggaggcgcgtggcactgaaaagcagcagctggaccacgcccgcggcctggagctgaagctggaggcggcgcgggccgaggctgcagagctgggcctgcggctgagcgcagccgagggccgggcacaaggcctggaggccgagctggcccgcgtggaggtgcagcggcgcgcggcggaggcccagctgggtggcctgcgctcggctctgcgccggggcctcggcctcggtcgcgcgcccagcccagccccgcggccagtgcccggttcccctgcccgggacgcacccgcagaaggtaagggcagtgccgcgcgcagggaaggggggaggtgggcgggccgcactgaggccccgcccccacatggcagggtgtttttgtttttgtttttgttttttttcaaggag

SEQ ID NO: 32987 - DNA, 1144 bp, Homo sapiens
tcccctccctcgccggggggtgcactctaggctgtggggctgggggctgagtgacagacactgagatgagacctttctggataggggaggaggactggccccattcccggcaggtgggatttaaattagaccctggaggagtgggcgtaggacatctggccagggatgggttgcatggagggtgtggcccttggccctgggtgtgacgggttttctctggggtctgaggcaggaggtcaggagtggcgctgtggcccaggacatctacccaggaaatggagtcccgactcccccaacgccattcattcattcattcagcccagaggggttgcccagaggcccgaggatgcagccgtctcccccacctggacatccgtcactcggggtgggatccgattaagtgggcgtggggtggcctccccgtccccgcacggccccaggaccctcttgcacaagcgcccggcttccaatcccgcggctgaggggtgcaggggaggggagggaccggctgcgagcggcggcgccatccccagccccggcgtctctgggaagaaaccggggccgagtccccgtcaaaagggaggggacgggccaggatccccaaccaggtcccgcttcctgggctcgcgaccccgcggtggggggcgtcgcctcccctctccctccaaggggtgacgacaactggcgggccggggaccgcgccgggctcggggccgacccggactccgcactcacctgcgctcatgccggctcctcgcgctcatcgccggccccggcgctgcggccctcggcctgggccccggcgtgcgcaaggccctgggcgggggcgcggtccggacggcccggggcgaggggcgctgggctagcgcggggctggagcagggctgacgcgggcggggcacctgggccaccaggctcggcgcggctccgacactgccgcagtccctccgtgcgcgccgcaagccccgcccggccctctgcggccctcgcagcgcccgcgccggggctgccgggacttgtagtccccgcctgctcctccgcacacaccgggggcggggcgaccggagacacacacctcacggaggtagcccccgccagcacgtcccagtggttagggactgtgcgtgctggtccagctctccat

SEQ ID NO: 32988 - DNA, 1500 bp, Homo sapiens
tccttagtcccttatgtatacaaaagcaatttcccttccccttctaaatgttcccacttagaaggcaggtcagaaatgtgttgtttcttggccatacaaggggcgtgggaaaatctgttactgcacacggcatagtaataaacaagaacagcgccaagccctctacctgtcattccatgtcaactctatgaggtccgtattattatatgacctttagagtcagaaacactgagaggatactagtgaaactgtggtgacactgctttaaggaacccagtctttcctgcaacccccaccacccacctccgggatccttcgaggtagggggctgggtgcatttccctccatctctcccttcccctgccctgtccccaacaattcacatgtcctttcctcacccatcccggtcctcaacctcgcacccttgaggaattacctcgcttcccaattcccatccttcacaccccgcaggtctcccttttctacagaggcgatagtttggtggcagaaaaagggcttggaactccaatgtctggattcaaattctggttccagcagtcattcgcttgccatgtgaccttgagcaattcaagtcccctttctgaacgtcccccccccccgcacccttagctgtaaaaaattgcccgtgccctaactcacaagctgctgcgaggcgcagaaagataacttgacagggatgctcgaagccaaaccaaagcactgcaccagggggaggaggtcctccatctccctgaggccttgccctatgcttcctcagtctctccgcagccccatcagctccaggcagtctctgtggctttcctgacttttccctctctgaggctccaggactcacctgcaggcaggctccgccaagggttgtggccggcaaccggcgcctcaaggagagggcgaccaccgccgccatcttggctcctgacgtcagccccaccccttaaccccgaggtcgctctccgccggtgtcccgtcgaacatcgcggcgcccagcctacatccactgaggacccactagccgcgtacgagcaaccaagtgggaggcggcttccggtttcccgggtgggcggagggaaggcggggcaagcacagcgagcgtgcgcaatagcgcagtagcggcgcatgcccatttggcttcccccgtgaccttctcagaaaggggaggagtctgagaggcagggcgactttcagggggtggggctaagacttagatggggcggagccatcctatccgggtccctgccccgatttcaacctctttattcctggaatttttgtttgtttgtttgagatggagtctcgcactgtttcccgggctggagtgcaatggcgcgatcttggctcactgcaacctccgcctcccgggttcacgcgattctcctgcctcagcctcccgagtagctgggattacaggcgcacaccatcacacccggctaattttttgtatttttagtagagacggggtttcatcatcttggccagact

SEQ ID NO: 32989 - DNA, 905 bp, Homo sapiens
tcggctcactacaacctctgcctccagagctcaagcgattctcctgcctcagcctactgagtagctgggattacaggtgctcgccatcacacctggctaatttttgtattttagtagagactgggtttcaccatattggccaggctggtctcgaactcctgaccttaggtgatctgcccgccttggcctcccaaagtgctgggattacaggcatgagtcactgtagctggccggaaaacattccttttaaagattgaacgtatctcttcagctcttcagtaacacagtagcctgcgcatggggccttagcatgctggtcagagactgttagtcatctttgggtataaccagggctgtcagaaagcagacctttgcttgtggaaggtgagggattgaggccaagctggcgtggcctgaacccagcagtttgcttagagactacccagagaagacctttgctttttcaaagatcagggctgaaaaagagcccagctggccagggggatggggtgaaggtctttcacatcagccaggcttgagacaaggctgcagagctgggctttctgtctgggagcattctttttctgcatgtccagctggagaagggatcctacatgctgccatttgatgtcactcctatatttagttgctaataacttttccatcagccccttggacctgataccacttgcttgaggatcctacatgaatctcactggagaggcagattcattcctggctgctttttgtttcggaggagagacctccccccaaccacttccgtggggttttggctatgccaaggtgtggctctgatcccatctggaatgccggaggaatctgagataacgagctgctctcacctgggactccaagtacacattttagattaaatgtagaaccag

SEQ ID NO: 32990 - DNA, 481 bp, Homo sapiens
cgtggaaggtaattgcttgcccaaggtcacatggctgctaagaggtgcaattaggactcaagaccgggtccacctgacattccaaagctctgtgctgacaccattggctctagcatctccttgtgaacagggcactgggtaaggaatgtggggcagaacaggtgtgaacctggcacagggtcagctctgggcagccctggcgtctgacaggaatgctgtcctgcatgtgaccttgggaaaagtcccctgatctattccagtctcttgtttcatgccctgttcaaacctcccccagcctgttcagggcagaagagtgcagacaaaagaaagattggtttcggttctaacttcacacactaggttgtcaagggcctaaaaggggactgagaatggcttccagaatgggaggagtcagatgacttaaaaacaaacaaacaaacaaacaaagaaacaaaaaacatggctgagtacagtggctcac

SEQ ID NO: 32991 - DNA, 892 bp, Homo sapiens
accgaagttcccagaacgcagagccaggctctcagcagggcctcggactccggctgcctgctctctgctgttccctgcaatgaacccaggctgacctccctgcaagctgtttccaaaagcccagcccaaagtcaaagacacaagacttgctcccttgaaggtcattcccagaggaagtgcccatttccccaccttggtagccctgcggccttcgtctctaggccgtaaggtgacattacattgggactccttgtggcgagtccattaaagcagtggggccgtgggctaggagagaaattatggtgcagtctatactgcttcatttcattatgaattcttaaatggaaacattttattcatgtaatatttggacatagtacaaacaaaatcaaataaaatagtaacacactgtttctaaagaaagacagcagttccttgtccagcccttcttctcagctgcctaaggcaacctctctcatgcttattgcgatttcctgatttactgaattcagacaggtttcgttaccttcctgttacgaaatgtgggcatttcacagtgtggctcccttatcgtcctcccagcctctcacagggcttcataactcctctctgatgacccatgacctgtccccataatccactgaaatgaccttctggccccttcaccctcagagaccgcccaccctgtagtcatgcccatgggacttcgcccctgcaaggcttcccccaatgtctgatttaactagattccagtgggatgctgcgggtaggggcagagaacagggctggtgtgacctgcccagagcattgcctcttgggatggctctgccttcccgagggggaggagggagaggagctctgcttcagggcctccaggctccagacgacattt

SEQ ID NO: 32992 - DNA, 1544 bp, Homo sapiens
ccctggtccctccagccttgactccttcggcaacctggacgtcagcccgcccgtcacggtgggcggcacggaataccccctgggccggatcctcatcgggagcagcttccccaagtgaggggctggggcgggaggtggggaggcacaagggaatgactgcagcatccaccctccctgtgcccccatcacaaacacaattccccagtctgagaagtgatcttaacttcctgcgtggaatcctggaatcaaagactcggcaacctaggatctcagatttaaaagatcagagaatcttaggagaaaagtcacacgcttgtggcctgcgatcttttggcctacctcattttatgagcttaatgagtcaccaacataaacagatatcgggagggcctcccataaaaaggcaggtttctggcttctcatgaaaaattggagaagctggggaggtgagatacagtctggcacagagacagaggaatagactcattgacttctcccattaggaagtcagaatagcttctgtcctaaccatggcttaaaagggtcctgaggtcatgaagttcccagggcaggtggctgcaggtaagcaagtgattggccaggataccctgatgacagaggtgagtcagtggatctcaccctggacagatgtgatggagcaggaaacaaggtatttaggttttaacgctcaaacaggtggcgatgtctgttaggtcctgctgagtgggtgcacaccctccctgcaggtaaccaaagaatgacgtgtgcagttcagggtcctggtgggtccccctgtttcctccctggagatgacacccactgtaagccctggagatcaccttcctgtttgtggggtttttgcatagcaggggtgcccccacttaccccccaagccctggctgaccatctggtctccagcccagaggagtcaggcagtgctgagaaggtcacagcctcacctggtgaatctggcagcctcagagctctggatcggatgaggcgaggcttcctggcacctacccaggcacgtaactgggtgcccagacaggatgcctggggctgagactggccaggcgagaggcatgtgctcaccctgttggtgactcatgcccagacactactgtgtgggctgttctacccacacccttgggggcagacggtccttgaggcctcaggacagtctttctctaactcagggaggaacccgtgaggaaggagcacaggctttggaatcagatggacttgggtttgagtcctggccctgccacttgccagctacatgatttgggatgagtcccccaaaccagtgtataccacagtgcctggcacacaataggtactcaattaattcacttaaaaatatttattgtatgccaggcacagttaaaggtactggggatacatcagtgaacaaaacagatgcattttaaatgagcaaattattttgtactccatgcctcagtttccttatctttaaaacgggcctgatgaaaatcccagtcctagctacagaatcagcattactggggataaagaattcgtgt

SEQ ID NO: 32993 - DNA, 1246 bp, Homo sapiens
aaagaaagaagaggcagttaaagatgtggctacttaggagaatattccagggtgtagaaacagctgtgcaaaggccctgaggcaagagcaggctggagacagcagatcagcagggaggctggtgggcctggagccaagtgagcaaggaggggcgcagtggggagtgaggccagagagcttggccgagcacgcttcagatgtaacttggagctggtatttctatgtatatcatagggtcatcaggaggcttaaacaagacacttactgcgaggaccctaaggacagcacacagtaggtgctcaaatgcacacacaaatgcacagtccattctctgctgtcttggcttctccacgctctacgccccacgtttaaagcgttctttgagcaattccgccccctggtggcagatctgatgatgactcaggcaaggcctgatgcctctcaggcacaaggtgactgcccgccctctccctcctggccaggtccggtgggcggcagatggccagggcagtgcggaacttcctgaaggcacagcaggtgcaggcacccgtggagctctactcggactggctctctgtgggccatgtggacgagtttctgacctttgtgcctacctctgaccaaaaggtgcgtcccctccttccctgcctgagccacctctgcccttgtctgacctgatgggatgagtcagggcaaagccatctggaaccagctcaaccctgtgccccgagtaagctctggattgggacattttctgggtcagggcaccctgacacgctcatcctcacacttccagggtatttgtgcttggacccaaatcccttatccaatagtcaggaatgatattgataataattggtaatatttattgagcacctactatgtgccagatactcacatgttttaattcatttaatcctccaacaagcccgtcaagtgggtgcaattattattgtcccattttacaagcgaggaaattgaggctcagaagggcaattaacccatccaagctcacccagcctgcaggtgtcaggataggattcaaatccgggttctgggcctctacagtaagccttgcagaggtggcttgggaaggcatggccagggagccagcagcctgggagaggaggcttcccagtgaccagtggttacagctctgctagggacagctctgacagtgaaggaggagacatctgaattgggtattttgtttgttttttgtttgtttgtttttcgagacagaatc

SEQ ID NO: 32994 - DNA, 3757 bp, Homo sapiens
acggacgtagaaaatgtgttattagacactgcctgcgcttctctggaggaaagcactctgctgttaacccttaaacacccttaggagatgggcacttatggaaggaaaaaaacctctccgggtgtcaggctctacaccccaggtggaagttcttgctctctgggggttatctgagaatctggtgaaaacttagaccctcttctgaaaaacatatcccacaccacaccaaacttaaagaaagttctgtgggggtggggagatgctgtggcggcagatgccgggttcagatctccggctctgcaggctttttcgggaacgttaacttgagtcagccacgaccttaattaagatttgagaaaacagaagcccgcccaggaccctaggagatgcttcttcacttgggggggctacaacagagccctcgcgagcatcctgcagcttcggaccaccggcggcaaacaaagcccgagcaccgctcagccggggggcttccccgacctcgggggagggctctgcggagcatgcgcggcggccgtcaggccccgccccccccgggcgccggagccgaggcggcgggaacctcaaagccccggcgcaaacggccgctccccgcagagcgccggccgccccctccccgcggcgcccgggcgcagcggcggccacggacgtgtggggcccgctggccgccccctcttccaggccgggcgaacttaccgaggtcccctttcccggggcggggggggaggggcgcagagggagctgtgggggcggggccatgaccccctcgtgcgggcttcggccgcccctcccccgccgcgggcccgggcgcgcgccccaaccgccaaccgcccgcgcggtgcccggggtcgggtaggccgcgggccgcgcgccccgtaccgagcccttttgttgcgcggaggcggaggcaatgattcagcccgcggcctgcgccggcccggccgccgggagggagcgtgacgcgaggcggcccccggctggaacgcgcgccgtgccgcgtcgctgagcccgccggccccggccctgcgcccacccgtctaccctgaccctcactcacgacgcgctccttggtgtgctcgggttcggtgatgaccacggccgcgccgcccgccttgcctgctgtcgccggccgcgccgcgcgcttgcccccgccgggggccccgtcgagctccaggccgtcctcgtcgccgctgctgccgccgccgctgctgctactgcagcgctcgggccgctcgcgcttcctgcccgccgggccgccgcgtttcctgggcccggcgcgggcagtgccgttgcccgagctcggctcctcccaggccgccgccgccgccttcttcctgggcatggtcgcggctggagggagacacggggcagcggcgcacaatggacgggttataaactgcgcggggggaggggagcggagacgagccacccggcctccacttcctcctctgccctccccaaagtggcggccgcagggtgggcggagagggggcgagttgggagaggaaatcgcgcccctccctggccccggcgcggctccttcggggaatcccgcagggcagccgggagccccagaggcaatcccctggagggagaattgagacccccggcctatccgtaagttaggtttgcccacaaagcatcacagttgcaacctcgccccccaaaagtaaagggaaagtaaaaccagcctccagtcccctagattttcattaaagaaggcttcgggacacttccaggattcccccttggcacctgggtggtaagggagcccctgctccccggctaccccacctgctgcttttgtctccgcagtctccccccaaacccactcatggcatttaatgcaacgctctcccccaccccgcatcagccctggacccccgttcggccccagctcaggggtgccgacctcgggctctagttagccgaatccctacggcggactgcccccggcgacgggggaagagcccgaagaaagctggaccccagccccaaacacctgctcgcacagacacgaaaaataaaaactttaatggtgcccaactctctcccagcccccttgccggccgtgcggcccggccggtctccgattcgactgcaaagtgtccagggccgccgccagctccccggcgtccctgcgctctcccctgtctgcttttttttttttttttaattgattttgaacaatgggatctctgtctgtctccgattaaaccacgtggatccgccttccttcctctttttattccttcaatcacccagcccccctcccccaggtttttttttaaccttttctctttaaaaaaaggaaaaaaaaaaaaactttcccagaccccacaaactgatcactgtcgattttcagaccctacctggttggagtgatgagaaaccggagagaaaaaaggaagagaagcaactaaaagacggatcggagggcttttttttttccggcccagacgagggctccagcccactcaccagatacacttaaaatgtaaatacgagcttccagaacaaatgctacaacacaaaacagaaacacatgtgcggccgcgcggcaagcgagcgcgcggcggggcgggaggcgcggggcgcggggcgcgcgcgccccctgccggccggcggacccgttgccggcgcccccgccccgcccggcctggccctgccctgcccacccgagcctgcgccgcgcgccgcgcgcctcgccgcccgcctcggctccgctgctcctgcgcctttcgcgggcccgcgagcgcgctttgggccttccacgcagtgcggcctgcgcgtcagggacttctttgcggcttaggaggatgttggattgtttttcctgggcacgtctagacaggtcacatgaggacactcgctggaaaatagttacttcgctcacgcagcagccaacaagggacgtgccctaattgagtgattggaatgaaagatgaatacaatttgaataattttttcctgtgcagagagaagctgagttttatttgcctgtggatgtgtcctcagtatgtaacaaggtgctgtgacacggaagaatcacataaaggtttgctgtattagtgaattaattcataattaatttgagggccgtggaggcactggaagctggctttgaggggaactttttcattttttgccaaatatttactgagcccccggtacatgcaagacccacagtgcccggggctgcagagccagtgaacaaggtttccaccccagtggaacgcacagcctaacggaaagacagatcagtaaacaagtaattacaacagtggtaagctttacaaagtgatgcctgtgtaggaacattatggcgaggggatttatcctagtccagggccagggaaggcattcaggtggaaagttatgctgaacaacttaaaggatgaataagacccgatgaaagggggcaggaaaagtattccaggccaggtggagtgaacgggacgctccacatttcgagatcttgagagacacctcctgggagggaagctgtctggtggggctggggtgagaagagccaagaggctgggttctgaggaggtaggcaggggtgcgagggcctgcatagaccctagtgaaccgcagtgaggcttgatctcgttcgcgtgtcctgggacgggtgaaaaaagccttgcttgcttcctaccggtctccaccctccacctctccaccccacttccattacgatctcaccgtcacttgctctcctctcaaagcttttctc

SEQ ID NO: 32995 - DNA, 1010 bp, Homo sapiens
ttcctgaggcgtaccgcacaaggaagttccttcttcaggcaacttcttgaaaacgcataaagttctaggatttttgtgattcattcattcattgttagtgcaagaaacaggactgggaagcatcaagtgtcctgtaaaggaagacagagaaaccaagaggcccaaatctaaggtatttgatcaaagtcaaaagtctgtgtgtcaagagagctgagagtgcttatgtaaaagaactttggaaatgagaaatcaactggtacgtttcagagattttcagaaaagtcaagatggaatagaagcaccctttgaaagcctattcttaatagacctgcatttaaaaagattttttagaggttaaactttgacgctttgatataaagcataagtagaaccaaccagaaaagaatttcgcctaaatatgccatcaagtccccttcaggaaatggcatgctgatgcttgtcagccgaggcgggtggctgggtgtttatcctctaaacaccctgtgtggccaattaggaacaccactgacagtacctttagatttcagtctgcaagtcttttccttttttctcctgcccctttataatgctttttgccagcttaaaagactcatgcctcagacacactgatgcaatgagacgctaatatcatattgcatcatctgatcctaggtgtggtgctcctgaaactggtttttcttgaggttatgctgcagtagaaaagcactttgggtataacaccctggaactggccctacttgtcagaagacaaaagtaatttttgcaactccatgcctcaattccacaccactattctcccagggaaagcctgcgtgactctcccggctggaattgggtgtgcaacagacattcatcagttaggcgtgtcatgctgccacttatgtaacaaatgttacatagtgaggtgcacctacaggcaagctgaaaatgacacttcctccttcaaactgtgcttggaatttcacctcgcttctaattgagcaaattct

SEQ ID NO: 32996 - DNA, 942 bp, Homo sapiens
agagacatttccacccttcaacagatgggggctggtccagggtttcaagtgaacacacaaaggccagctctggcagctccacactccccgtccctgtcccctgacctctgctgctgctgctgccgtgggagtggaaggcccgggtcagccttcccggtgggtgagatgagaaggcagcccttcccaggtggagctctgggaatgagaatgcagcctcccaactgctgcaacctcctccttgccagggttaaggaaagtgcaggaatcaaggctagggggtgggagggggcagcatcatcccctgcaaaaccccagaacaagggaacctggaatcgcccctcccatctctggccaggtccccgccaacgaagaggtctccatgctattacttctgcaggtggagcagccggtttccaccttccctcctcttctcttacactccaagcctccatataaggaccacaaagctctcacagtggcagaaggctttctgcctggtggacgctgttctaggtgctatataggcaaacctgcatttaattctcctgcatggttgtattcctatttcataatcagagccaggactcaaatctgggcagtctgactctggtgcaaaggtcggcagcctcccaggagggaacccagtcaaccaggcatgtgtttactctcccgtgctccaggacttttcaatccaacagggacttcctcatttgggtaaccaggtgagccagagactttggatttggtcagcccttcattcaaaacatccatgtactacagactttcagtgtgaccttgggcaagttactttagctctgagaatcctcagtttccctctttataaaaaaggggaaatcttgttgtgaagcttatatgaaattatgtatggagaggtgttttttattattattatttatttttgagaccaagtcttggtctgtc

SEQ ID NO: 32997 - DNA, 1025 bp, Homo sapiens
caggcgggcggatgtctctaagtggggccgggatcccactctgctttctagcctttttctcttcttcattttcttgaaaagttgttctggaaactacaaaactgggccacaggcctccatgcctgctctcctgggactaccgacttgtttcatctctgagtcttgcttctcccaaaggaaactagaaaccctgggctctgatcagggaatgcaggggtgggggaagggggcaacctgcttcacattgatctcaccccagaaccgggtggctggctgacgccgctgatcagaattcatgtggtcggaggatttgtaggtcagcatgagatcttttaatacaccagagaataatctccctaaagctctagcctcctggcgggtgctccacacacaattctgagacagcacccagggaatgggttgggattgactccgaccagaacttgagaggctggcacggctctgttcccaggccccaccctggagccacagggcagggagctcactacattggagacattttatggcaccacccgtacccctcacccggagccgatccagagacctgtagtttgggattgagcaggttaaattccctggtggcttctgggaaaatgcttgatcagactctgtgcactgctgtctttactgagctctctcaaagttcatcacccccaagacactcctttttttttttctacgcctgaaacatcaacatactcttctctgctttgcctggaatccttgccaggggattttccagttagcagaaaaactgcatccagtttccgacctattcactgagggggtaggtgactgggaggcgagggttattgccctctagtgcttttcctcttgcttttctttctttctttcttttcttttttttttttttttgagatagagtctcactctgtcacccaagctggaatgcagtggcatgatcttggctcactgcaacctccgcctcctgggttcaagcgattctcctgcctcagtctcctgagtggctgggaccacaggca

SEQ ID NO: 32998 - DNA, 717 bp, Homo sapiens
gcaatataggcactacaggcaccaccatgcccgcacctgtagtgccagctacttgcaggctgaggcaggaggattgcttgagcctaggagtttgaggttacggtgagctgattgtgccagcctgagccacagggcaagacccagtctcttaaaaaaaaacaaagaaagaaaaaaaacatagccaaggaaggggttggagtacactgtgaaagaccgcgatgctggtctgggatgtgtacttggctctggctatgacggcaggactcaaaagtccatttctggtccaaagcttaatgccatgagcctgaggtcactcaatggacatctgaagtcttcttcctgctttgctagcatccccaaacctctcctgtctgctgtcctgccatcatttattcacagcagggcaggggccgtgcctgttgtgttcactggtgtctcctgcgtgcctagaacgatgtctggaacagagcaaaaatgctcaaagaatatctcctgcctacttaaactatgagccagtgttgccctagcctggggctcaggacaactctgtggtgcttatgttcttgtgtcgagagggacaataaacaaaccaacaagtcggtgaataagatgatttcagtgcgtggcctgtgtggcttgtctcactgcactgtagccgtttgtttatttgcgtcttctcctaagcctatgagctccgagggggcggggctggggtct

SEQ ID NO: 32999 - DNA, 2297 bp, Homo sapiens
ctgaggctggtgcctgacaaatagggagtagttaaaaaaaaaaaaaaaaaaaagtttttgctggctgtgggctgtaaggaacacaagctgaaaatgatttcaacctacgtgcacctgtaccctttggaggctgcagaacttatcattatcaacccaggagtaattgctgataagcccgcgtgtgaatttccttgcaaatagaggggtagcgggggagtgtttaacaacaacgcggataatcttaattaatgacctgataactgtaattaattgcatcatatccagaggccctctttggaatttcaggagggagtacctagtgtttggcagctttggagctgcaaaggcaggggaatgctaggatctcagtctcagcactttgctgctcagtgagctttgccaagttactctcagttctgagcctcagttttctcctagggaaaatggggctacatcactggggtgttgccggtctcaaagccgtcaatgcctgaacccgccagggttgttcttggaggtttggctgcatggctgcaaggttccccatgttgccatggcgggggtggggggcaatacggggccgccaagactggttgaggggcaggtcataagtctagggtttcccctggggccggtccaggattctcacccttttgggggaacctcagggcaaaatgttgaagtgggggaggagaagccagcaccctgcgcgcctgcggggtctccccgcggagaaccggggaaggagaaccgggaggcgggaagtggggaccccggggtaggtgaaggagcgaggaggtcgccgtgtggccggggccgggccccatccccgcgggcctcagtttcccccctgtactgtggggggccggtgggctgccgggaccgctgggggctcgcagcgggtcgggggaggccacgtctccctcgcggcgcgctgggagcagggagggggcgcggcggccgctgccccggccaccaggggttaagcggtgacctcagccgcggcgccccgggaccgggcgggcgggggcggcgccgcgtcgcgcacggcggcggcggcgggaccaggcctcggagcgcggcgggcgcgggcgcagtcccggcgggcccggacctcgcgggcgggcgggcggcgcggccattggctcgggtggcggcggctgcggcggtgggggcgccgtcccggccatgggcgcccgcggcggcctgcggagctggaggcgcggcgccggccgccaggcgcctttgtgagcggcgcggacgacaaaggcgcgggcccgggcagccgaggtgggtgagtgagcgcgggggccctgcctccgcgggatcctcgcgtgtgccggagtctgcgagtgcgcgggaggcgctccaggcgccagggtcctccgggtgtcctgggcgtgtcgccgtgggcgggcgggggccgtgtccgccgctgtgtccctgtgtctgggtgtgagagccccgagcccgcgtctcccctctgtgtgggtctctccttgtgtcactggagttctggtgttactagggcgagtggcctttgtgcttcagcttgtgtgtgtgtgtggcctccagccggctggagtcaggacagtttgggaacccccacccccaccctgtgcctcactttcccctgtggtccacttcttcctgcgctgaccttgggggtccctgggatcgggtgaagtcagggagtgcccctgtcgcctctgtggtgagtcagcctctcccaccctggacccccgcccagaggcggaacgggacggcctcctgcaggaggagactgtgggaggagaggatgccgggtcagccggaggccgtggctgcggagccgccagtcccggatcctccctggaacagggatatatgtcagggagggccctagatgaagaccagcccccctggagtcgctgggatggcctccgagagggagagcaggcctgactgtagggggcatggggacaattcttcctccctctgccaaagcggggccctggggcgggggtctcgaatcttcctttggccctgaaagccaggaggccctgcgttgcatcagtgccaagtagagaggtggtggctggtgggctgcactttcccactggctttggagctcagtttctgccccagagtccttggcctcccttaaggatgctactgggaagccacgccccacctgccgggagccccatctgctcctcctcgggttctggggagagagggcaggttgtgcgggctcattagaatgcatagctcttcccagcatccgcccagcactgtgccccccacggtgttcaggc

SEQ ID NO: 33000 - DNA, 1122 bp, Homo sapiens
gggcttgtactttatcttgtgggccctgcgagccagtcaactgtttcaagctaggggatgacgggattagaactttttgtttggggtagagattgggctgcaagggacagaagagttaccagggagagctttcaaggctgttaaaaggctctcgattcctaggtcattctctgaaccctgctgcttccttactccttcccaaattctgctcatttttctcttccaaaaagatttccgagtcagagaggttaagcaacttgcctgaggtctcccagcgtgccaggtcatccaggctgggactggtcttctaactaaaacaaccacagtcccaggggtggaagcggatggtgagtaaccccagggagcggctcactggaggcttgagttgaaggtcaccgtccacagtccccgtgtggctttaaacattgcctttttgcagtctcagagaacagttggtgcttctgggcaggaggagctgggctgctgctgggagccagggctggggctttcccagagctgcacgggttatttaagcagtttcctgggcatctgcttcctccccaatgagtgatgggaaaactccatggggctggtgcaggatttgattaacaggtcacatgaggccagtgagggaggcagtccctgctgggaagggcagatgccaggcagagggcgaggggagggggagatggggagcacttcccagagccctgtgctatgagctctgtcactttgggcaggtgtctcacctctctgcagtcttggttccctcgcctgtagagataatatgaaatgtgaccaataggactgaagtaataaccagtgtccactgtaggcctgaagtgtgccaggtaccacgcatgatcttgtttcaatctatcttttttttttcttttgagatagaatctcactgtgtcacccggctgcagtgcagtggcatgttcttggctcactgcaacctctgcttcccgggttcaagtgattctcctgcctcagcctcccaagtagttgggactacaggtgcatgctaccacagctggctaattttcgttttttttttttttttttttttttttttttttagtagatacagggtttcaccatatcagccaggctggtctc

SEQ ID NO: 33001 - DNA, 2289 bp, Homo sapiens
tctagtgggctgtcagaaaactaagcaaatgattccagtccagagtgttaggtgcccagagggacaagtggccagctgtctgtcccagtggtcatcatgggagactgctctgatgccagctgcatgtgctaagcaaagtgtatttgggagtggcccaggcagatgaggtggggaatggctttcaggccctggaagggtcttgcctttgggaaggcaggtcatcgtggctggggcaggtggggaccttttcctcttttgacactcaggttctctttggttttgcaagtggtcccacgaggtctgggcctcagtagatgcttagccaacatgagttgtcagtgaatggggagatgagtcagaaaggatgccctgtgaacctcactgaggagctgtggctctgtggggccacagatagggtccaggcaggggacaacactgtgccacaggctccctgggctgggcagggagaatggtggggagggctgaggggcccttccccagcttcctcggctttcagctcttttcttgtgtagattggagcctttgcattcatgaaagctgatgactcctttccaccagtgaatttcctgcaacccacagggcccggcctcagttggggtgtggggggagcagaatgatgtggggagagtggtggatgctgtggcagctaagagccttggcctccggaatcagactgcctgatgtgggagtcttacttctgccatttgtcagctgtgtgtcctggggcaagtgtctcaacctttctgtttcagttcagttattcagttggggataatatcagtccctatctcatatggctgttgggacgattaggagttatttctggtaaagcacttagtgcaatcctggtacatggtaagtatcgacacaaggcagcttcggtgtggagctttggaggcagccctgtcacaggggcgggacactagaaggggctgggtatttattagccttggagccagaagacctgcttggaatcccacccctacctctgactgattgtagagaccttggcaggctgattcaatgctctgagctcagatttgtcatctgtgaataggggaccgacaccccccagggccgctgggaggagtcactgggtctgatggctcattctctgcattgggcttatgattgaggtaggaaaactctaaacaggaggagtgaaatcttcatttgctagggtggcctggatggccatgcctgggggtcagtctgtggggtctgtagggccacctctcttggccctggccttttcccttagttgccctcactgttgcaggttcctaaggaaagggaccgtcatgtgactggggcccagggtcttcagaacaaggtgctacaggggcagagggtcaggctggtgccatttcatttgcaggagtgctggggagggtgactgtcctcctccagccacactgggtctgggtgcctgggagagactgaggtttctggtgcctgccctgggttcagcactcctgtccctccacacctcatgttcctgcttgatttgaattctcagggttgggtgactcaggcatgcctgatgccctgcaagatttggttcacaagcaggtaaatattaacccacacgcatagctccaaatgcaaacctgtttgggctggcttcttgggggacagctaggctccgagtgtccccctcttcccccagctgatggccaaggtaagcaggtgccctccaggggaacgaggtcacctgctttgtgccaggtgattgtactgaattcgcaccactgtccgggggcaggggctgctgtatctattttacagcagaggaggaaaccaagacatcaggaggaggccagctcggtttacacagttaatgagaaatgggcctatggctagaacccaggagtgcctccctgcaaagtccacactttccccacctggatctccagctgtctccttgctgttagggtcacaaggcaatgctatgtgtatcagaggcacctgaggtttgctttctggctccactttgcctgggcctcaaatgccccttttgtgaagtggggccaggctggtttggggtccctgataggcaggaaccagcccaggacacttgagtgcagtaatggggcctgggcttggatttgggagtaaccacctggccagccaaacaacgatcttttttttgagacggagtttcactcttgttgcccaggctggagtacaatggcgcaatctcggctcaccacaacctctgccttctgggttcaatagattttcctgcttcagcctcctgaatagctg

SEQ ID NO: 33002 - DNA, 1270 bp, Homo sapiens
tttttagtagaggtggggtttctccatgttggtcaggctggtctcgaactcctgatctcaggtgatctgcccaccttggcctcccaaagtgctgggattacaggtgtgagccactgcgcctggccctcaagcatctcttgaagacctgccaggaggcactgtggggacacccagggaggagccacagtttctgtcctctgggagctgacacgtgagcaagagtgagaacacaggtttaggggctccaggactgggtttgaatcttgggtcttagtagctgtgtggtcttgggcaggtgcctttgccttgctcagcctttggggctccctccaaagatgggaataacaagccttacttcagagtgcattgtgaggctaaagtgagatggtgtctgcaaagctcccagcacgtagtaggtgctcagtaaggtggtttcccctgcccagaacctcagatgactgtcttctaagtctgagagcaaccagtgggcctcaaaggcgattgagggctgcttcccctgccctgcacctcccccccgccccgtcatgctggcagcccgggagcagtctctcacggttctgtgggcagctggagatggggcagaagcgggcgtcagctccacagtgggggcactgggaggtggggccaggcttgactgggaggagagggagatgctggcttttccttggtcctgccccccgcagccttgcagtcagaggcagccccaatgagccctctgcagttctgagtgccttcctctcctgtctcgcagagggggagcctcacaaaccctgacagcagaagtgacttgcccagcgtcgatgggcgctggtggcagagccaggctgacccccagcctgaggcccacccgatcccgatgctgcactcctagctccttggcgtaggtccctggggctgtcgggtgccctggcctccctggcctgccctggagccagctatgaaggaatattctggggcacatgactcacaaggctggcccttccactttttgttttcctttcttttacttttccctaatacggtctcctgtggcccttgcttctcctttcttggggctctgagatggcagtgccttttgccctggaaagcctgtcctggcagagctcctgttagctgtcgaccacagctgctcaatcgggaaggttccaagggaggccgagcaaaggcatcagagctgcacagacctgggccatagcttggctgacctactccctagctatgtgaccttggacaagtcgctttgcctctc

SEQ ID NO: 33003 - DNA, 1308 bp, Homo sapiens
ccagacaacagctgggtcagtgctgcaagtgacagcagatggctcctgccactaactcctgttctgatcagtgggtgccctttcaaggagccaggttgggagagagatggatgctgccagccccaaggaggcccttccaggcttggtctgacatcatcgttatcctcagccacagagcgggagggtgctggctctggcacagctggcacatagtgcttgctctggcctgcacagtggggcccgtgtctcaggtcacccctgcctgggtgcatctccagggtggtggctagatggcctgggtgaatcccaggtgttcacggggacatgtgcctgccctcagcccccaggtggttctggaccagaatgcccaggagcttagggctgggacccagagagacttggaggggggctgctttgagaggctctgttaggggcagtgccgctgcaacacttcaggggggccactggtcttgggcacttgatctgagtcccccaagttctcctcctgatgtgctgtcccactggggccctgtcctacttgctcccatgggtggaggcttcatggtcccacctgagtgtaccccagcagcacaggagcccagctgactggtggctggctcgtggctgaggttttaacctgtaaatactgtaggggctcaagacacaggctctgcagccacgtggcctgggttcaaaggccagcgctctcatttattgactatgtgacctcgagcaattttctgaacctctctatgcctctatttcctaacctgtaaaagggaatgagagtggcccctgtctcagagggtttttaggaggaaattataggagctgtaggagtaaagggcttggattagcactgggcccttagcacgcagttaacacgtgttcggtgtctgatgttgattttggcactgacattgggcaacccaaggagccactgcatttctgctgtgccctgtggctggcacctggattccacttcctcagtaatgcttgtcatgaatgggccaggtcagcagggacaagaagagcaaaggcagcacccgggcacttcactcccacccaaggccccattcgggcagctgtaacgaaatgccgtgactcttaccagcaacaggcagttatttctcaaagttctgaaggctggaagcccatgatcaaggcaacagcagattcggtgtctggtgagggcctgttccttatagatggtaccttctcactgtgtccctgcgtggtgggagggcctagccggggccttgtttacaaggatactaatcccattcacgagggctctaccctcatgac

SEQ ID NO: 33004 - DNA, 1944 bp, Homo sapiens
cttctcagattgtgaagttaattgcaagggagtgggatggacccattggcctgatcctgatggatctttccagtcacagctgaaagaccttgggtctaatcatggatccacctttgatcagattcttggctttgaacaaatctctctccctctctgagcctcagtttcctcctctgtaaaacagggtcaggtacctgccattcgtgggttggctctgcccctggaggaactggtgggaggattaggggaggcaccaggcatcccctggcctggagcagtgctcagagccaactcccgccagaggtgccccagaacagctggaactgcactcacacccttatctggggaggacagcacatcactgaggggtgtggtttgaatcataagtgctggctgctctgaattcagccagagctatcctgggctgtgtggctgagggcccccgggggtcctggggctccatgctgggcttgcatttcaggagacctcagatgctgctggcctgcttgccctgccgttgttgggtgggttgagctgtttttagctctaagctttgcaaaggctgtttctttcctgcccagagctccctcgtgggacagagtgaacaggcccctccctgccagacagagattgggcctgaagaaagagcttggagccagatgggaccctgtgggctttgaaagggaggcctggtttgctctctgtggcctgccaacctgggacaccggtgcccagccttgctccttccctgggaaactgaatagacgccagggtctcacacctgccccgtgggaaaggctggggtatgtgcctgcctggtgacggtggcagccgcggaggctcgcggatcctgtcccctttgccggccacatgcttctgactcatcagaggaagaatgtggtctttttgggagagagtttttaaaaatagtccaagtcctcctctggccctgtcccactcctccccttctgaccatttcctggcatcagccccagacctctttccactctggttttggggaactgcccctttgcaacttggctgtgaatctgtttgtgaaccttactggggaggagctgtcctgggtgcaggctggtttcagaagggaggggcccagctgtggccgcctcctccccaggggcccgacttgggacgagggatttctgcattcctttggcaactgtgccttgggtcgcctgtgtgtcaggcctgtgccatgggtgcagataagagcggtgaacagtggtcacagtcctgccttcatggagtccacattctcataggaggaaactgataaataactaaaatttgtagttgccagaggtgttaaatcctgtgaggatggggacactgggtcagggcatgtgtgtgggctgtcaggagaaggcctctgatacagcgaccttggagcagagccctgaaggtgagggcagcagtgtgtgggtatctgggggaacagcatttcaggcagtgggaacagcaagtgcaaaggccctgaggcagaaacatgcttggggcattcagggagctggaaggtggtggtgactagagtgagctgtgtggagagaggtaggacatgaagtcgggggggttgtgggggctctgacacgtggggcctcagagatcaagatgagggcttgggtcttccttaaatgaggtgagaaaacattccaggctctgagcggaggatgaacttggccgctgtgctgagaacaacatgtcagggcaggggtagaggtgagagcagagggactggtcaggaggcgttttgaatagcccaggtgagagatgatggtggtttgggccatggtggtactgtggagggggtgagatgcgctcggattctgggcgtatgttgaaggtagagccagcaggtttgctgaagggtgggccctgggtgtgagacagaggtgtcaaggatgactccaaggttttggccttagc

SEQ ID NO: 33005 - DNA, 1055 bp, Homo sapiens
gacagtgatggggaagggtttgaagcaataaggtgatgtgacaggtgtgtttgcggagtgtctctgtggcagcggaggtggcaggtgggttggcctagcgtgtgtctaatgagagttgaaagccagagagacctctcagagaacacaggtacgtggaggagttctggtcctgaccagcccaagcacctggtctttccccccattccccaccttctttctgcttcaggaggtgggccctgcagagggcctctgaggccagagcttgacaagcgtgcttgggccagaaccgattccttgcttctctctgggcagggctgggtggccgctgcccagctcatcccagcagtccagctgctgcttcccccgcttctgcctggaccttgttagagaaagaggccggcctttcctgtcctcaaggcacgacttgcgcagccttccagactttcagggcccccaagtgttttcttcctccaggcctcattcaggtggaagagggatggggcagcttgatgtgtgaggggtgggagatggtcttggggggcccggggtgggacaggggcaggcaggaggagggtttcctagtggggcctctgggcagatggactttgaaccctagtgggaggggaactaataagcactgactaaattagccaagccaggaagacacctgctgtgatgagctgggcagctgagggcagagggaggtgccaatgccgggctgctctgggtggtcccgtcgctgagcctaacctgctccgggcctctggtgggcacaccccatagccgggagctggggcctcccctcttcctcccttgtctgagcactgcctcctcctcagccattccacgcagtagcaggaaggggaactgttcagtgtccgcctgttccttgggtttggtggtcattgttaaaaaggtgacctccaagagaaaacaatctcctataaccccaccacccaagcatagcctggatagggtccccatggtaacagaggcccctgtctacccagagcttactccgtgcagggcatggagcgtagaattcatcacaccca

SEQ ID NO: 33006 - DNA, 4564 bp, Homo sapiens
tcattttctcatttataatttggaataatagacgttaatatttgtaaagtgcttaaaattatgtctgaggtatcgttggcaatgcaagaatgtctactgttactaatattgccattaacctgcatttcatttttgtttagtaagccagtttaataaaaataaagcctttaggaatggaaaggaaaacaggaacacagccggtttgtggcctgggcagattagaccagggggctgggtgctttccctccagggtgcattctctcctccacaagatgtctaggaggacagcccccagtgcacaattgaaggtgacagtagggagcgggggcagggttggctccagggcccaggaagcccaccggaggcatcagccttttgcttatgtgagctcccactgtgaggggagggcggtgccaccttgggccaggaggaactgtgcccccacgctgagcatttgggattctgtccctgtcttatgccattggcctctggagccattgctttcctcacacccatgtgccaaggccaggttacctcctgcctgctggtcaacccatggggcaggacaggaagaggcagagtcagagtggccttcagcagggctaccggaagggactgacaggagtgggcagacctaagggagcccatgcttcctgggcagccaggaggaggaagtatccagccccatttgtgacagtcaggtgtgatctgattcctggaaggttgggggctgagcatgatcctggactctggggccagatttcacctgtaagccagaggggatgaggacggacacccagcaggtccctgcaggtcccttggcactggcaacaggaaggtctgtggctgcagggttttctgggaagaaggatttgggctgcacagctgctgatgtttctatgggttaatgatttatgaaggctggaggctggggcctttctggggctgccctgtgctctgagagccactgggctgaagcacaggttgtgagccagtgacttgtctcagtagctgaaactgcagccctgactccagctaatgcgatttctggtcttctttccacaggtgtgtagctgggacggtgctggtctgagctggaccttgtctgatggcttcctccaaccctcctccacagcctgccataggtaccgtacccagggcttcctgtccctctcatcctttcttagaagggggccgctgggggccggcggagggccttgctctggagcagcatggcgccgggtgggaagtctgctctgctggctgctggccctgcctgggccgcatcctctatctcacgttccttgtctacaaaatagaagtaactttctgctcacggaggaggctctgagcaagggtcaatccttttcctgtctccctgagatccgccggagaggtgaacacacgggggtctcaggctgaagcttataaatcaggggtgaggaactgaggttggaggagagggttgcgccatagggtcaggccgttgaacagtggtagcattgccgcatttagtgaaaaaaagagaaagtaaaagaaaaatacagccaggcatggtgtctcatgcctgtaatcccagcactttgggaggccgaggcgggcagatcacttgaggtcacgagttcgggaccagcctggccaacatggtgaaatcccatctctacaaaaatacaaaaattagctgggtatggtgtggcacttgtaatctcagctacttgagaggctgaggcaggagaattgcttgaacctgggagatggaggttgcagtgagccaagatcacaccactgcactccagcctgggtgacagagcaagactgtctcaaaaaaaaaaaaaaaaaaaaaaagaaaagagaaaaagaaaaatacatacttatactaacaaaattattcgtcgtttatctgaaattcaagtctgtgtcctgtatgttatttggcaaccctggcactggggcctcagacactgcaggtggaatccaggccccgcctgggaggaaatgggcccagggctgtttcacccaggcagcagcttcctgtcctcttgtatcactatgagagaggcagaattgcagatggtaatgagtgagggctttgtcctcagccccatctgagtttgaatcctgaccctgccacttagactgtggggctggttaagtgacatgttgtctctgtggcttagtttcatcatcagtaaacatggggacaatgataccctctcctgggctgttgcaaggtttaaatatatgtcaggcgtgggcatggggtaatcaattgctcactgacgggagtgcttatcatcgtgggtgtcagcaggacagacagcgtgtgccatgccctgcacccctgggagagccaaatgatgcatctcctcctccctgagcctcggggttcttcttgggcggggggtggggagcagcacagcagacctgtcttccctgtggcaatgggtggcttcctagggtccctcgcctcctggactcgcttgtattttctcacaaggaccgggtctgtccaggaacatcagaggcatgagtgaccagctctggctgtgccacctttgcaggctattaggaagggcttccttcagctctcagctgtgctgggatgggcctcctgagttttccttctgataaggagcaatgcctgattgccggggggaggatagaaggcggccttggagacaagcacatctcacctcccaattcatgactgggatttgggtcccagcatgcctggccttgccccatcccgcccctgctgccatgggcacctgttccctttcctctccccaccaagaggcctgaacctgaacatggggagtgagaaaaaaaaatttatgactaagtcaattctgttctgttcagcaaacatttgacaaatatttgttgttccagctctttctaatattgctggctagtatcatctgggtgaacccagctctttgccattttctcattctctgagagcttcccattaccttcccaaattaaattcaaattcctgagtaggggattccccacgcaccttgtcaactgtctaatgaccttcattcctgcgcgtgtcttcagcacccccggggcacttggtgtttgttctctgtctttgctgtggcctctgcctggaatccacgctttagttggagcttgtcaggccttttctcatcctttaaggctcagtgcgagggcagcctcatcctcggagcccttcctgaagccccagagagccccagccccttcctcttggcaccgtctcagtctctgaggtttttggttttctcctgctggctctgtcctgtcagcctcacagtgagctccggaggggagctcacagtcacccaccccgaaccccaggactgtgtcttacctttccttccccctccctgcccactggatgctgggagctgctcactgcatgcatggataactgaagctatttgtactcttaaagggaggaggtgcaggccaggcacagtggctcatgcctataatcctagcactttgagaaaccttgcttgagctccagagtttgagaccagtctggacaacagagtggaaccctgtctctacaaaaaatgaaaaaaaaaaaaaatagctgggcatggtgatgctacctgggagtctgaagtaggaggatcacttgagcccaggaggttgaggctgcagtgagccatgatcgcaccactgccctccagcctgggtgacagagtgagcttcatttaaaaaaaaaaaaaaaaaaaaagaaggtgtagaaatgacctgagtccctggacatggctgggggcagggttgcctgaggccgggtcttgcctgtgagttggagaggactgcccttctcacccagcagcagggactgggctatgacaaggctgtaatcataataataacagtgataatggtggtaataatacgacagtgatgatgtaacgatggtgataataataagcagaatcatcatcgtcagaaaagctaacatttggtgagcacgcaccctgcaccaggtgctttatttatgttcattcattccctcctcccaacaaccctgtgaggtagttgctgttattgacctcattttagagatcaggaaactaggagggggtcaaataacccgacactcatccagctggtacctgggtgagctggagtctgagctgaacccaggtggcccgactctagaaccttagtcactgcagtgacaccatccacatataaagggagacccccacccccactccctgcccagcagattcacttaggcaaggaccagtgggcactgagaggctaagaaaaccctgtgtaagtcaggatgggcctgtagctggtacccccaaaatagtgggtagggactttgtggtcatttattccagtatttaaacaaatttttttttgagacaggattttgctctgttacccaggctggagtacaatggtgtgatcatggctcactgcagcctcaaattcctgggctcaagccattctcctgctacagcctcctgagtagctgagactgccggcacataccaccacacccagccgattttaaaattattaaaaaatttttacttttgtt

SEQ ID NO: 33007 - DNA, 1562 bp, Homo sapiens
ctgaaacaaaacaagctatcaatccaaacaccaaatacaatgctgattgggaatcccctaattaaacttatgagctaccaggggttgggaactgcgtccgaaaaccacagatccagctcccacccaagccctttctgtcagcgcagggcagaatgtctgagggcttagtagaagagtatggagggtgaatggagctgggttccagtccatccccatcctcttagctgctgactgtgggcacattgctttgcttctgtctctggggtcttgggtaaatggaggtgatcctgaggctggatcaggaagctgcctggggcacagctcgggatctctcaggacttgcttcatgacacctggggaaggagtttgctctacaggccacatcgctgcccagagtccacccctgctgacctggcctgtgggatccccaaagccccaggaggagtggctgtgtctcctcctccgtggcctcagaggaagttgggtacttctcattctggggagggagggcgtactctgggcttccattgcagtcgagcagctgaagaaggggtttcttacatctgcccccaaaatattatgctctgggaacctccaggtcattgtaggggagtgactggatttttctagtccaagagactgttggaatcagatatgtccatctgtccatctgttcatctgctggaccatctgcccatctctctgttccagccacctcctcacccatcactcatccatccatctaatgtttattgagcatttgccagggctgggtccgcagacccatgggctagaaaatcctgtttgtcctcaaggatctgcggctgttgttgtcataatccttacatatacgggcactgtgccgagggctactcctacccagtggttctctgatagtggtgattttaccctccagggggacatatggcaatgtgtggagacatttttggttgtcacagctggagggtcccctgggcctgtagggtgtagaagccagggatgctgctaatcgtcctacagtgcacaggatagccccctctccacccacaaaaagaattatccagtcccaagtatcaattgtaccaaggctgagaaaacctaagctgcagctcagctgatgttcatgtcagccttatggggaaagtgctgtttttattctccagtttgcagaggaaaccaaaattcagagaggcaaagtgacttgctcagaaccacacagctagcagggagctcagacagggccatgtgagcgcagagctcatgcctaagctgtgtgtcatgtgcccacgagagggctgcttagggcggtcagcttggcagatgtttaaaaacagaaccaaactgcccgttggttttgcaatggtttgcataaggtaggggatggagttattgaactcctgaagttccattcagcccagagtttaggaaggaagtcttctaggaagaggactggggaacctccatgtggtgaaatggctggaaatggcttctcgtgctctctaggatagagaattcatcccttcactcatgtaacaaaagccgctgagctcctggtctgggcc

SEQ ID NO: 33008 - DNA, 1664 bp, Homo sapiens
cttagagacctaacccaaccccctccccccggccttaccagcactgtagggccatgtggcttgagtttgatggctctcattccctggctcagacctgaggtgctcacccagttccagccatgcccacctaccccagccatctctccattgaccaaacctcggagatcctgcagcctggccaactccttctctcttccaggagatcagctggttccaggagtcccaggcccctcctctgaggcagaggacgacccaggagaggcgtttgagtttgatgacagtgatgatgaagaggacaccagcgcagccctgggcgtccccagccttgctcctgagagggacacagaccccccactgatccacttggactccatccctgtcactggtaagatgtttctgggaacttccggtcctggggctacagggagcatggagaactgggcggaagctccaggctctcagggatgcctggtggcccctccgctgtccccagaaagcaggaagggaaaagccagtgggaagaagctgcagtctgtggcttccctggtgaattggaaattcctagcattcctgcaacatctggcgcactttggcacattgtaaatggaagtggttggcctgagttttgctttggagacagttgctgcccagagcttgtgtctctgaagtcctccctgcagcttctcctaaagaatccacaccagccagaagagcagcctcccagaggttccctctcctgtctgccttggggagctggcaaccctggggggcaggagggccctgataagctggtgttaaatggcagcttctgggctcttagagtctgttatctgagagagagaatctggggactggaccagctggaacttcctgcaggcttggggacagcgggctcctggagcagctgggggtggagggcaggcccagagcaggcagggtggctgccacgggttctggctggagttgggaagtgggccacggggtgggtgggggtggtgcaggccaggtaggggagctgatgactgagccagggctgggggagggaggcggggctcagcaggcacccagactggccaggccctgtctgcggcgcccctggggaggctgggaaaggggcggggaaggcctgagtgcctggggccagcctctggcctgacaggctctctgtctgctcttcttttgcagacccagacccagcagctgctccacccggcacagggtaagtgaaccttgctcctttgctttggcggttggaaacagggagacaccgggcagtgggtggggatggggtggagctgaggcccagaggacccgactggtctttggctaaggaggaaagcatttcactgaggccctgtgccctgggggaagaggtcagttccagaaactcatggtactttttcctttattttgcccacaaacctctgaaaccgcaggaggcaggcctggctccaaaccctacctctgtggccttggaggagtcacagaaactctccaagtgtcagtctgtttgcggctgaaggggaaacaatgagagcaccccctctgttgggtttgtcttggagaagcaaacagctggagggtccccagtgtgtgtgtgtgtgtgtgtgtgtgtgtgtgtgtgtgtgtgtgtgtgtgtagtgggggaggttgggggggtttga

SEQ ID NO: 33009 - DNA, 2961 bp, Homo sapiens
tatttttagtagagatggggtttcatcatgttggccaggctggtcttgagctcctgacctcaggtgatccacccacctcggcctcccaaagtgcagggattataggcgtgagccaccgcgcctggcctaactttcatattttttgtagagatggagatctcactctgttgcccaggctggtcttgaactcttggctcaagcaatcctcctgccttggtgtcccaaagtgctgggattacaggcatgaaccactgcatctggcctgtattatcttattacttgtacccctaggagccctagaagacaggtactattgaatatgcccattttgcagatgagcagctgaggcttagagaactgaagtaatttacccaaatctcatggagctagtaaatggcagggctgggactaggcctgtctgccctcaaagctgtctactgaggcccacagggtttgcttctcctggtggactctgaagcacgtgcactcatgtccaccctgagctctcgctgggggagtcgtggttgaaagagcagccctgagtacccagcagtgcctgggaaacgtgagcgccacagatcgctggcttcctgtgtttttcctggactcaggcctgcacccctcacctctgagtgcaatagccccatggactctggccccctctggagttgtttgcttttcctgtttagttttgcctttatccccctgtgacctcagcacttttctgtgggtcagggttttggctcctggccctggtcgcagggattctcatgggctccctgaaggtacctggcctaccccttcctgggcttttctggataagatggttgtactgcctgttggctagtgtctctcattggggcctggagccaggggaagtgatggggcagccgtattctgggagaggacagggagactcatcttccctggatgtatcaggggctgagaggatcagggcaagaggagaccaggctcagcaaagcagtattggcacaggatggaaacagggcgctggtggcctgtggcttctgagactgctaggtgtgggggacataggggctcatgggaagggcaggtcagcaaggccggagtgggtccgcagcgtctggaggaaatcttcaagatttcccagattgccgcagacctagtctggagttgtttggaatcctgggcttctccttacatgtgctgtttcccaaatccggaacatttgagcctcctgcgtcctgtcccgcagggtccatgcgggacgtgaggcatggcagataccggctctccgcccatggagtcccccatgggagggttatggggaccaggtctttctttccattaaaaatctttctttaaaggtcccttgccaaatccataaattggacaagctggtttttgtgttttctttccttcttttccttctccgagggtagaaacaagggctcccagtttccaatcagagccaggacctttggatcccaggccctttgaggacccccacagcctcttcattgaagaaggcacttgcagggtacctggttggcacatctcttcatggtataaatatgccttcaaggaatcctgtgacgttcctccctgcatccctgcagcggtgggactctgcctcactcgttttttatcccagtgcctggcagagatggtgcaacaatactaacagcctacacgtgcacggactttacagtttacatctcattttgattctcacaactgtgggaggcagaatcatggcccttccaccccttggagatttccgtgtcttcatccccagcacctgtgaatctgtgacgctgcgtggcaaagggacttggcagatgtgattaagtgaggggttttgagatggggagatgaccctgggttatctgtgggcccagtggcaccacaagggttgtgacaagagggagacaggagggccagagtcagaaagaggtgggaagatgccacgctcctggccttggaaatggaggacgggattgtgaccaaggaatgcaggtggcttctcgaggctggaaaaggtgggggatggcttctcccctggagctgcccctgctgaaacctcgcttttagtgagagcacagccctgccgaaacctcgcttttagccctgcgaaccccttgatggccttctgacctccacacctgtgagaacagatttgtgttgtaagtcactaagttcgtggtcatctgttacagcagccataggaaactaacacgacagccctggaaagaggaaattatcgtgggcaccattttgcagaccagacctgggagagagcgtcacttgtctgtggggctgggctggcaggcatggtgcttgggctcaaagcctcaggccaggggctctgtttgccctttctctatggccctctctgtgcatctaggatggtgctctgctgactggccggtattcccctgcccttcccttgcgtcttcctgtcctttcacccagcacctctttactgagtgactgcgatgggggctgacatgctctgccaggccatgttatttttatgtgcctgtgtgtgtgtttggctctagggccagatcataatggcctgaatgtacccagcacttcttacatgctgcgctctgagagctttccctccccagtgccattcatccttgcaacactctcacaggacaggcgctgatacaatctgcattctagagatgtgggaactggcacagagaggacatgacatcagcccaaggtcacagagaaagatgagcagagccagagttaaccccagctggcttccagaacctgtgttctaatccctctggtgcaaccgtctcccacacagagctggtttggatcccgcctgccctacatgttagctgcatgacccaggacatgctctttggcttctctgcctaaccctcagtttcttttcttttctttcttttgagatggagtctctgtcgcccaggctggagtgcagtggcgtgatct

SEQ ID NO: 33010 - DNA, 1270 bp, Homo sapiens
tcccctgggctctcctgtggcaccaccccatcccacctgtgacctcaggccagcctctctacctctctgagctccatgtccacaccccagtgggggtgatggatttgcacagctcgaggtcccaagggagtgtggggtgagtgcaggcgcccttctgctccctgccttgaggcggcctccctggcccacacctgcctcgtttccttctgctccctgcattgaggcggtctccctggcccacacctgccttgtttcagttttccaagtccatggtgctagatgtgtacagtgactacgtgaacaacttcaccagtgccatgtccatcatcaagaaggcctgcctcaccaagcctgccttcctcgagttcctcaaggtgggcctccatggtggtaccgtgcctggtcagggtgggcagggagattgctcaggaggaagggagcattttggccccagctttgggtatgacatcatagctttggcctggacagctcccctctttcttttggggcagcccagtcccatgggaagaaaatcgttccctcctgcccctgggaggagcgtagccaagtgtctgtaagcaactgggatcctggagctttggcagggtggagggaagacctgtgtcatcttgctgaccctttgcctcctgtgccctggtgagtgggtgggtctgcctggctggccctgtggtgggctgtggctcccgggttgctaagctggttccttttcctcatttataaaagggtgaggaaattccttataggggtatcttgggcattgcttgggagagtaaaggttaaaggcttcgaaaagcttctgagttctcatgtgcccagcctctgctgatttctttgggagtgtagtctggtgagtcagagcccctgcctgtagggagcctgctggctggcagaggatgcaactgggctaggtgccaggacacgcacacatgtgccggcagcacaggttagatgccacggcctcagtggaggaacccactgtccccatcaaagagaacaggggatcaggaggagccaccatctgacatgggccctggcgggggatggtgggattgtgccaaataaagacagaggagagcctatatcaggtgtaaggatagtggagcaaaggttagaggcaggaggagagggatgggcaggtctgtttggattctgggagcactgatgcctgttggggagtcccaggagagaaggcctgagtgtgcacactaagaggcggctgagttcagttgggtggttctagacctccagg

SEQ ID NO: 33011 - DNA, 1218 bp, Homo sapiens
cgttgacggagaccgtgtacggtgaccgcgggcagctaattaagtccaaggagcgtcgggtcttcctgctcaacgacatgcttgtctgtgccaacatcaacttcaagtaagtgggcctgggttggagggggcaatcacccctccctggagaccccatcccgccctactccagtctcttggccggccgcactacagtgggaccccatgtgagcttggtttaggcttccaatattcctctcccatccctcttgccctgctctgccactggtccccaacgctgggaagtacctggagcagtcatcgggggcagccctcagcctcgggcacacagctgtccatggtacagagttgtttgttttggaactctgcagttggtgactaaacagtggttttgtccacattgaaattcaagagattcttccttgtgtctaccccagatccctgcggctttaactcaaatctgttttgctctggccagattgcagaatttctcagtgtgagcctttgcctttcccccacagaccggagcatcatcatcggcccagaggagcctggtttgctggttctgggccggggattgtggaaatgcccaaagcccggctgctgggctgtgcctgggagccggagccctggtgtggggtgagggtgaggctttaggccagagcctgaagatgtggcccatcagttgctttaggctcctgggtatcttatgttttactaacacagggagcccacaccatgggtgagacataggagagatctgacattctggggcctggctgcctgaggccacgtgggcctggcactggggcttgggccctgccattctccagcctttctgctttgcccagctcacctgctcgcatcccctgcttggtcctgcaggggaccctgtatcaaatactccctgagaacttcagctgtggtttttctagccaggctcttaggagaacctctgctctcaatatttgacaagactttattttattttattattttttgagatggaatcttgctctgtctcccaggctggagtgcaatggcatgatctcggttcactgcaacctctgcctcctgggtttaagtgattcttctgcctcagcctcccgagtagctgggattataggcatgtgccaccacacctagctaattttttttttaattgtatttttattagagaggggtttcaccatgttggccaggctggtctcaaactcc

SEQ ID NO: 33012 - DNA, 551 bp, Homo sapiens
ctcgacaccactttaaaaagcatcacagaagcaatagtatggctaccatcaccgaaatccaggagggaaacaatcacctcagtggaatgtgaatcccagcatagctctcccgcctcccagctgaatcagttctaggccctgtaccgagtcagcttgggccttcctgggtttggccacagagtaggtttggggattttccatggttaccgatcacgagtcctggaaggggacaagcagggctgtttcaggacctgtgcactcattcaccatccacccatttgtccacccgtctatgaatccattgaatgtagtccgagacctggctctgtgccagttcacacctagaatgagatccagcccctgcctccgggagctcagggcctggttggggactcaggcaaggaagcctctgtcacacatgggtctgggcagggcttatggctgacccattcattcatttactcactcactcaatcaaagaaggtaattcttcagtcccgtttatatcctgggcaccgtgtggtgccggcggtatgatgaataccctctct

SEQ ID NO: 33013 - DNA, 627 bp, Homo sapiens
accctgtgtcttacacccccacccagcctagctgtgaaggaaatgggcaattatctggcagattggctattaagtcaggcgtccattcaaatcccccagctccccaacttcctggatggcctgagatgacattgatcaatctggacaaggctgccactgccatttcagggaaagaccacctcttgacccaactaccaccccactccccaattcattcactcactcactcaccggctgacatcctcactcactcatttgttcataaatcaagcacttcagtcattcatttgttcactcatacaccctcattgtacattcacaaacactcttgcatcacctgggcactgggcctggtgaccgagatgcaggtggcaggagcagccgtgggggcaaggtcactgagctgcctgggctggatgcccagggctttacagccatggcaatgacatgagccaacccaggggctgctccagcaggaagctgggcaagagacccaggactaggggcaggcgggtgtgcacactgggggaggtgcatcaactgagtcaagtgcagggaaactttaagcaatgttggggaagattctgggctccggacccctaagcatcagtggtctggagttgtagc

SEQ ID NO: 33014 - DNA, 1126 bp, Homo sapiens
actatttaattcacggtgggctccctcactaaaggagagagggcatttaatcaggtcttcattcaagggaagagattagtgatactcttggatattattattattgttgttagctaatactaatggataacttactactcgtttatccaatatttattggtctcctactgtgtgcctgggaggtggttctgaacaggaggcaagagctttggctgcatgggctgacattctggtggatgagacaagaataaacatatggataaataacctacttctggctgtgaacctctgtgaggggagtaaagcagggctgtgggattgtgagggactcaggagcagagcagcttctctagattgggtggtcaaggaaggcttctgggaggaggtgccttatgagatgagtagggaagaaaatagcaggaaaagtctggctcagccctggtgttggcgtctcctggccagggcgtatgtttgtagctgattccttccctggatggggccttctctggactctgaccccattgctgggaatctgtcactggtaattccctcccaccagtgatgcaagctcagctggcccatgacagtgtcccctttggccctggggagacccgaggaaagagcattccaggccccagggaagcaattctagacctgttcttatttaattcttgcagaactccacgtggtgggccctactgtattctccatttgcagatgaggagactgagactcagagatgaaactcccctagtgggtttgtggaggagctgggatttgactccatcactactgagttagccactgtctcttgctcattcgctgtgtgtgtgtgtgtgtgtgtgtgtatgtctctgtgtcacatgggaggatgatggagggaaaaagcccacccctcacctccttttatttcaccttgaaccccaggatacctctggacagggttggagcctccagcgcttgggtgagtgggctgagtggcctggagcccacagagtattgatggctctcaaagctggcaggcattgggaggcagaaaggtattaattagcagttattccccagcagtggggagatggatagagattaaggtggcggtccgtgcatccgttttgtagcagctgag

SEQ ID NO: 33015 - DNA, 1252 bp, Homo sapiens
catatgtcacaactcttagcagctgtcccagcactggttcttttccctcctggcagtgaccagagctgtcattaagtgactcattgtgagagcagagactgtctctgtcaccactgttgaatgaatgaatgcatgcatggatgaatgaatgaatgaaacatgaaactctttcctgagttctgtcctttcattgctctagcatgctgccctctgagcacttcccacccctcgaggggggtcatccgtataggggtgggaacagagccaaggtgcctaatggggtccgaagcctctccacctggtgaaattgcctgtagattccatgtctgtgtctgtccacttgacccatgctccaggccccgctgccctcatctctcgttcccctgatgaatcacacgaggcctggtgacacagcatcatcactctccttatccagcagacgcgacatcaccctccttcacccgctgcaaactggctgcccaggcattacaggaagccaccctgccccctcctgggcctggctgccctcgcctctgtaatatcctttttctaatagagtgacctgaaccctatgtgctgttctaaaagcagcctcagaagcccctgagacaggcagccaggtaattcccctggcggaggcacgatcttaccttgccctgcatgtctgaacctgctggctggctgaagaatgtccgttttatagaatataataaaataaaacaggttcattccacaaattttgaggcaccatctagctctgaggtttgggggctcttcctttccattaagttgtaaactgcatgagaactggaccatgtctgtgaatgggtgaattttattttatgtaaattaaacctcaaggtagctggtaacaatgaatgcaagtagataggatatatggcagctgaaataatattccaggaacaatgataaccttgtgcatctggtacccatgaggaggaggtcagaggtgagcctggaaagctggcacaagcccaggtcatggatagccttgagcagcatttgacatcatgagatacgtaacagccatcgctgtgtaacagccagcccaaaactcagtggcttaaatataaccatttattctcctaccacagatttatggtgggtggaggtcagcttgcgtgagttgggctcagctgggccatttaagctgctggtccagctgggcttggctccagatggtgggttgaactgtgtagttcattctgaggtcccagctgagggagcagca

SEQ ID NO: 33016 - DNA, 936 bp, Homo sapiens
agggccattcccaggggccctgccactaggacagagcttacttcaccagccacctgctgatcttcagcaacaaaacagctcctggcagaatcagactcagccatggggacactggaggtcatttggcccaaggcccttatcttacagatgaggatctaagtgctcagagatggcatactgcgctcttagggacacacagcaagtcaatactgtagccaggaccaggacctggtctcctgattgtccatctagcactcttccctgccctcagctcctcccctctgctctgcacacacacacgcacacacacaccgttctccctgtcatatgcgtgcagtgtcaatattaactttggtaacagttgtgttgactgttctctacatctgagctatttaggatctactcagtgcacttattttacaggggaaactgaggctggaacagcaatggcctaagccaaagctactcagcaggtatgaggaaagtcagggcccagcccaattctcccgactcccgatcctctgctgtttctggctctgccgcacccttgcccacgcaggtacagctgatcacagatgtcagcaccagcctcccttttacttcaccagcctacagaggcagaagactgtgtgactggaaggttctggaagagcaggttccacgtcctcctcgtccagacttggaacagtggctgcctcagactcagatctggagcaagaaaagccagttccaggaggctgctctggggctacttggggtcaccttccggcctttgactttaactctgccatggggagaggcagtggccgggtgcccaggctgggtgaagggttactgggtggagcctgaggttcaggccttgcactgcagaggagtgatggccctcccctaggtacttctggtttttactctatgtcatttagcccctctgagcct

SEQ ID NO: 33017 - DNA, 2502 bp, Homo sapiens
gtccaccagccttccctgccaagaagtcaccctgagcccggtttgctaggcagtgatcaggagatgcatctggaagagtaaaccgaagctggtacacagagagttgtgaacgtcggcatagggagtcaggattgtctcctagagtcaaagccttcagagccaaattcctcccatgcgtgtgcttcctgtggcccacagtgtttttcagtttcatttttgaatcagatgccaacattttaaaattgagagtgattatgtcactactgggattctaagctttttgcgacagtgggaggatgaggcaatgctgggcctgataccatcggctggggtggggcggacagacgtccttacttgttcactttacctacccagcctccatatgcagcaagagtttgagacccctgcacaggactttggggactctttgaggaccttggtcaggagaagggtagaattagttctgtgctttggaaggtcctctgatgacaattgatactagcgatgatggtgccgatgatcagaaagaggaaaaggaggaagaagcagagaatagttcatatttactaagctttcatgatgggggctctgccccagtgtttattcctagtagcccatttagttctccccacaagctgatgaggtgcgtatgctgtcatcctcctttttcagacaaagcacagagcggtgaggtctcttgcctaaggtcatatagttggtaagtagcagagccaggtagtctgggtccaggacccacagcactggtgatgggggaggggaaatggtgagggggggtctgggagacgtgagtcttccctcaatctttcaccgtaggagattgtctggttttaaaagagaagatgtgtccacatctaaccccgatctgagcactaatgcaatgtctttctccactgttctcagaaaggctggtttttcttaataaacttgtcaggcagggaaggagggcagaggcactcaagggccggctcaggtggcttggctgcatgccctggctccagactccactgccatgttcccgttccctgcttggccagcataaagttgaccccactgtgaggaccagcagacctcacaagaatgaccccatccacgcctactggggctccacctgcccatgactcaccacacccaagcctctgagcccagtggacttgcaaaagagaaaataaagcacacacataaagaataaccaaccccatgcatttcctggcatcgggtgactgtttggttaagagcttcctcctcttttgtatgcccactggatactcctaacatcccctagctgctgaccacagagctggcttaggtggctgatcacaagctcagcccctgggcgggccccccaccccagccaccagggaagcatggaaggaggccagccgctgggatctgccagctctgggccccagcggccaccctctgcagctcaaagtcacctttgctcctctcctctcctcggctggccagccagaaccagcccagaactccctcccctccgctcagcaggacccaggaactggtccctactgggcaattattaatcagattcttgacattcctcagccccaggttggctggagaagcatgttccccagaggagcagaggcccaggactggcatttggatatgcagctgaccggcaaggtggtgctgtcagccgctgccctgctcctggtgactgtggcctacaggctgtacaagtcgaggcctgccccagcccagcggtggggtgggaatggccaggcagaagccaaggaggaagcagagggctcagggcagcctgctgtacaggaggcttctcctggggtgctcctgagggggccaagacgtcggaggagcagcaagcgggctgaagcaccacagggctgcagctgtgagaatccaagaggcccctatgtcctggtcacgggggccacttccacagacaggaagccccagagaaaaggctcaggtgaggagcggggcgggcagggctcggactctgagcaggtgcctccttgctgccccagccaggaaaccagaacagctgttggcagtaaccctgaccctccccatttcccccgcttgggcagcgaaccgaagagctccccagctggactcattgcagcagccgacggcagctgtgccggtggtgagccttctccatggcaggacagtaaaccccgtgagcatccaggactggggcaactagaacctccccactgtcactacgtggctcccttgcaaggcagcagtgacatgaaccagagctgggtcttcacccgtgtgataggggtcagcagagaagaggctggggctctcgaggctgcctccgatgttgacctgaccctgcatcagcaggagggcgcccccaactcctcctataccttctcatccatagcccgcgtccgaatggaggagcatttcatacagaaggcggagggggttgagccccggctcaagggcaaggtgtacgactactatgtggaatctacctctcag

SEQ ID NO: 33018 - DNA, 523 bp, Homo sapiens
cagtgcccctgtctggggctcggggttcccgacaactatgtggacctctcccacccaggctgtctgggagctgggctgcacctcccccacaggcctgggacttcatccagtaatagccaacctcactccgataatggcagaggagtgacttgaataccatcaaccccgagagagactacatccaaatctttctctgctccatcatttatttactagtcactcagtcttgccaagtaagtcacggctgtgtgtctcagttttgtcatctggcaaagaggcagagtcacaactccctctcgaagctgctgagaggatgaaatgagatcatctccatgccgtgcttgacagcagcaggcacgtggtgagcactgaaggtcagcggtaatgatcatcaacagagccaccaacactcagccagctccgggccagccctgcctgctgctggatgtgtctcatttgagcctcacaacccagtcatggaggctttcctattatttccactttgcagatgaggaaactgtgc

SEQ ID NO: 33019 - DNA, 640 bp, Homo sapiens
ccacacaatgccagttcctggacccccagccaccccagcccctcctgctggccctttccagtgccaattcttggcctagctttccatcaatggtgtctccaattgccctgactcagccttccagaatccacctcctccccagtccaaggtctgccccaccacaatgggcatgtctgggaatgtctcagccctggctgaggcagcttgtgtttggctcaagttaacctttgtatgcctggcccagtcaaagacatcacccagggactccctcagtgtcagccaccccctgcccacctacccaccatggccaaagaaggacacagcaactgatgccccctgcccccgccatatcagcagctggcagggcagagcaggggcagcaaccctaaccccgggtcaccaggcacacaggctcactcaccttgtctgcataacagaacttggccaccttatgtccatggttaaaaggctgaaaggagagaagagtgaggtccttgcccgggagggaggtgccaggataaggatgaagaggactggactcagagccggttttccaggaaagtcctggacacgcctgctgtcccccctcccccgctcccatgaaaccctccccagtgcccggcccacaggttgctccctg

SEQ ID NO: 33020 - DNA, 1014 bp, Homo sapiens
cccagtcccacggttgtgtgtccttgagcctgtgagttgcctcctgtgaacgtggttctacgtctatcaagtaagaataatcgcaccgaactcacgcggttgtttgaagtttaaacacacagatgcaaaaccacgttgaagtattttccacatgcaaagcgttactctccctttcttctcccacaaggcaggctttatcccaaaaagacccaaactcctctctctaagctgaaagggcagcacattccagaacacagtctcagaatgtgaaccagctgagatccccttggcacaaagggctgagagctctggctgggcaggaatgtccaagatgtggaccatgaacttggagagctgccctgagctcagctcacagccccgggagggctggccctgggggtgaggtgcctgattccaggacactgagtctcaagaactccttgctcaaatcctctgacctctttccaccaccccctaccacatctgagggtcacaaggtgggaggtcaggtggctcaaagctaggacgctggggtcagtcattccagagctggagcctcagccctgccacctcccagctgtggggcttccccttcaggcctgtttccccctctgtaaatgagaagaatgatgatgacaaagtcaactaatgcccaaagggcacttgaaattgacaaacttcccatctaccgtggcataggacgggcctcaccagccacctctctacagaaataaggtcattttggtcctaaaaggaaaatgactagttcaagatcaagagtaggggaaacctgcacttgagtccagaaggcccagataccatctctctctggtgtcaatggccccagacaacccgaacagctggaagtgcacaggtggggttcactggtcggcgcaatgagggaaaacacacagcgtagggaaccacagggcatctcagtaagatgctgttaggaaacccatggggtttggcagggtgacttggggagggtttaaggaagccacggttagctct

SEQ ID NO: 33021 - DNA, 1144 bp, Homo sapiens
aaatatataaataaatgtagtagcggccagttctcctttctccgttccctcccaggaaatgtcagagtcagagatcctgcaggcctccctcctccttccacagggcagaggcccagatgcccactgtgacctcaggatcacatgcccccacggctttccctgtgcctggaagtctccaagcactggcccagctgtccgtccatcagtctgagtgtggcctggagaacagacactagttcaaagttcagcctgagtcgactgcagctaaaaataacctaaggactcccacccatcagtgctttcttttttctttctttctttctttttttttttttttttttttggttcatgaacaattttgggctaacaggagtatccatccactggctgctcgggtgaaggcagagatgaatcagtcacaggacttggggcctctctgaggatccatgaggaccttcttggcaggacagcattcctcatccattcacgcatttatgcagtcagtacacatttattccacatggcaacgatgcagagataaattggatcaggtcaataacagctcactcaattattcagcatgcgttttccaagcacccaggaagtgcctggctctgggaggcagatatggatccaacccaacctttctcagagcagccctcagtcctcccacttagggaaggcggcacaagacagagtctgaatctgactcaggtttccctgaaaatctgcagtgccctttctgctcatgccctgagcctgagacctcaagttggtccccctcaccctctacaagtgggatctaatctacgaaggccatgcaccgtttcacctcctgcactggaagttgtcagggctacaaatgctgggatctgatccacgaaggccatgtaccgtttcacctcctgcagcgggacatgtcagggctgcaagtactgggatccgatccatgaaggccatgcaccatttcacctcctgtggcaggagatgtcagggctacaagtactgagatatgatctacaaaggacatgcaccatttcacctcctgcaccagatgtcagggttgcaagtactgggatctgatctacaaaggccaggcaccatttcaccttctgcaccaggagatgtcagggttgcaaggagc

SEQ ID NO: 33022 - DNA, 4093 bp, Homo sapiens
agctggagtcatgtctgggcttggcacaagaaataaggaacagaagtgaactcttataagcctactacatgcctgggctggctattaatctgtatcctgcctgtttccaaagagaactgaggatactgatggtaaagttgattgagaaaaaaacaggaagtcagggttaaaggaggaaagagacagtcagttgggaggcctggtgttcaccagctcaaggcctcggacaagttttccttaatttccatgggcctcagttgtttaatctgtgaaatgggggtggtaacccctacatcataggttgctgagaggctgagtaaaataatccacatgaaaagtaaatggcagtcattgtcaccagctgccatccctgggcccacctataaaggccacactttatggtgattgtcctgaggctggccgtgataaatatcgattgacaaggaagggctcacatgattagttcattcattccctaaatgtttgccaagggcttaccaggtgccagacacagttccagggcctgggaacatactgtaaggcagacaagtgtataaagggaaaaaacaagctacaataaagtatgggcagatgagcttgtttctatgaggttttttttaaaagcatatctattcatggaaagttaaaggacatgaatcaaaatgttaacagtgggtacctctgtgtggtacaattccaggtgatttttctatttttttgccttatctgtacttttcacagttgacatgtattaaactaaaagaaaacatgtatcaagggtattttttaaaactagcagagattcctggcactcaaggcaaaaaagaaaacactaagaagcatctcctatacccgttcctcaaaagcagcggtttttctcaggactagagttttacacgtaggacactgagggatgtcactgaaaatgccctgcgactgtttctccataaatgcagacatggcatgtcacgggtgtgctctaaatgttcactgagtaaatgaacaagtgatcaaacatcaaagctgttcctctagagcactggctctcaaccggaggtgacttttgtcccccaggtaacatctgacaatgtctgggaacttgtgtttcctgtcagggccagggtttttttcgtaattgtcagggccgggggtgcccctgacatgcagcgggtaaaggccagagacgctgctaaacattctacagtgcacaggacagactccacagcaaccaaaatgtagccccaaatgcgaatagtggtgaggttgagaaatcctgtctagggcatgcggccagctgctgtatcaaaggggtaacttgagcccagggaaccagctgcaaaatgctctttctctttcccctctcaattcaggaggcctcataattcagagcataaatctggatttagaccaaatgtaatttcagtcatatatctctgatggcagatcgtttcccatgataatacaggaatgagacagtacttaccggctcggtgttaggcccatggtgcttgattgcttgataatcattattgttatcatgggcttatcttttagaatatggattgctttctactagatattggagggttttcctatgcatttctcccctattaagccgaaaactcctcaaaggccccaccccatgtaaattccctgggtacccctcatctctagggtgtttggcagagcaccagctcacagtaggcactcagtaaacacaggactctataagctccatcttcctgagtctcagagtgcagggaaggcctgcaaacgggatcacacagggagtatggcaagtgtggccccagtctcagcctagaagaggaacccctctgtcccatgtcctcttcctgcgccctttcctatcccctcttcacccacagaggacacacagcagtgttgcaactcacttgtgctcagagcaccaccatgccatcccttgggggaagggagagggccactgattaactcagaaagggcacagctcatcaggaaagacactgccactaacagccccaggggtcaagcaaacaaacctcaaatgggagggggggctgatccacaggtgggcagccccaccagactaggaacccctctggggcagggtctgtgtcccacctacctctccaaacctagctccgagctggaggggctctgagaatatttgtcattgagtgggcaagggtccaggcacctggctccacaatgtcaggtttgcaaatcgggatttgaagggcaggtccacccctgaactgctcctgggtttcttcattatttggaataatgacctgcctcacaggagtgagaagtttaaatagaggtgataatgatgatgatcgtggcaataataataaccgggcgctgcctttgtgctgggcactgttcagtgcactccccatgtattaactcatttaatcctcataagacacctgccaattgcccggccagcatttggttcattataagcactctataaatatgattattccacctacaagaagaaaggaatccttttttctgtccaacatttaacttgaaaaaaaaaaaaaaaaacgggcggcggggtgtgtggggagcggaaaagagagaggtagaaatcctggtagaaggagaggactcggggaatccggggcgggatggggacactgaacgtgagacgagggtggggaagtgagatgtgtggtgtgctaaaaatagaagggcccctcaggggaagccagcaaattgcgaagatccagtattaggagtgaggtgagtgactacagaggctactttccgagcgtgggaaccggcagggccaccgaggcaccctactcggtcgcaggattcgggaagaggggtcccctcgctaaaggaaggtgactacctgagggaggaggctaagggatctcagtgggagaaaggcctgggtgggggtcggaggggagcccctgaggaacccggcgttgaccgaggcagcttgggggtccggcagggagggagtgcggcgcgggggacgcccagtgactctcaggctcccgggccccaggcgcgcgctcgggccgccccgggccccgtgctcactcacccggccccggtccaggggcgggacagcagggcgcggcggagcgcgggcgccggcagcagcatctcgggttagaagcggggctgttcgctggatcgtccgcccgggcgcggcgagaatgcacaaccccgtccagagcgcaccacctcgatcctcggggggaaacggatcaccccggctgtcctccgagctcgggatcagccaaagtcccactatatttagcttcggctaataaaaaatatttctagtgccataacgggggcattacacaacacaggacaagggaacccgaaagcgaagtcctgaaatgcatgcgttttcccctcctctctttatggtatgacccgggagagagggcgtgaactctgtcgaccagtcagagtgacacaccaaagcttctgaaccaatcagcggggcggtcctgcggcagccttccaaagcggagcagagaggggctgaatagagccaatgagataaccgaaatgggacacgtgctgaagcggggcagaaggactcgctgcgtccggccctctggcgtgcgccccgggttcgatgggagtccgactgacttctctcgggctgccggtggcttgtacaaggctggaaacctgtccgctaccagactcctcgaccccgcagggccacagcgcggccagccccctgcttcttcccgggggctgcggcccctggaatgagcctgccttccagcttcttggccaggacccagccgctctccacctaccctccaggcgcggggccggccagcttcttagcttccttgcagattacgatcaatgcaagataaaacctgagctggccaacgcttagcttttcatttaaagcctttggccgcaaaaccagttgttcctgagccttttacccccaagtaaaaatttcagctttctttgcaaaatgttgtgtgcttggtaaacactagaatgctatttaaaacttggattctgaagtcttctctgatgacgaggtctcagggacccaatctattcctaaagtaatgttacgtttcct

SEQ ID NO: 33023 - DNA, 843 bp, Homo sapiens
attcaatcctcgtaacaacctatgacgtaggcaccgtcattatccccaggtgcagaaagcaaggcccagaggcacaagctgaacccaaggccagggtgagatagtgtggaactaggactgaaacccaggtggggacgctccagactggttgctcagaatccccttgcggagctcctcatagacccaggaactgtcaaagcctaaaggccctaacccagctcctccaacagagttcctccctccctggaggaagctgggggcaggttctttccctcctcggatgtctgtccatcctgggacagacagaggagtttctttccttcctcaccccactgctaccctccctacatggcctcggagcagggcagtctggaacccttttaggatgctgtcagggccagctaaaaataggccagaggggagggaggggtggagagccggttacgtcaccggcttttggaaacaagagaaaacggatactgtttgcacacacagaggaaaattcctcctctctcccacaggagacagcccagccagggctcctggaggacacacactctctccctctcccccttttctccagcctttcccagccccagcattagctgttaggctgagatctgcgtgggctcccgggcccggacctggagggcaaggggctgggattccttccagggctggagggcacagagaaagctaagagggggcagggagggaacctaagggcctaatccagccaggaccatctcactgaacctcccctcattgtacagatggggcaactgaagccgagtggtcaagccatttgcccacatcacccagtatatcaggagcaaggctagg

SEQ ID NO: 33024 - DNA, 1716 bp, Homo sapiens
aggcaaacccagaccaggacctgggctccacggaccctccagagaaccaggcattgccatttgccaggtttactgttgggtgaaaactaccctctcttgtaccaggtctagaatgagaaaccacatcctgctcaggaagccaagcacccggtgcccagtgtgggtgggaggacactcccctcgtgggcaggcggcggcaacatcacaaaccttcagcagtctcccatctggcctggaattttctaaacacctcacagtctggcaatgctcaaagggctgtgcaactcacagatgctgccagcaaagggcacgggacaccctctcccagtttccagcttggttctcaacctctgcccaccccacagggccagcacagatctgcctctgtagggcacccactctctgccctgtgaaatcattctgaacttgactgtttacacgccctgtgctgtagctaggcgagcctgtctacttcttccacaacctccggacacagagcttagcatccctgttttacagatgaagaaactgaggctcgagaggcagtgactagcccaagctcactcggcttttaactcctgccctggggccccagcaccctgcactgccaggcttgggggttcattcaaactttgaactttggcccaggccttctgattccaagtgcaggccctcccctccacaaacagccgaatccctggacgtggtctgtgttgtccgtcttctgtcccatcctcctggaggcctactagctcacagcagccagacacagaggcctccctgctgcatgagtatttactcagcatggaccttggccaggtcctggctgggatctgccagtgggagacgaagccagagttggagccggcccccacagagcttccagtcgatgcaggggcagacacatgccaggtagttacaactccgggtgtggggggctgtgatcgggaggtggtgggtgcttaggaccgcctgacagcagaaagtcaggaaaaagcaacacatccctaatcctgagcacagggacatgacagggctgcctccttcccgtcccgggccttcagccatccgcgacataggaaataaatggaatgccagccggccttcacctctcaatgcgatcaaaagccaggactgcaaatgcaaagcccacagcctccggtgtcactgacacatggcacagtttaaatcaattctcctggaaggcaacgcatctcgttgcagcaaagggcgtgttcaaattccgggtctacccttctgtgtccttcaaacacggtcatgtgtggggacgtgggccacaggactgaacggagagtctggtgtgtgcatctgcatgtgtatgtgaatgtgtgtgtgtgcacgtacatgtgtgtgagtgtgagtgtgcatacacgtggggggaagggggacccggggacccgcatccggtctcgtttgccaaggcaaagccccgcctcgcattcctctgagaaggaatcttcagcgtcagctgtctccctgcttccttttcttttctgggacctcattcccctccctctagcttgaggctctgagaatcgctcccaaatttgtccccagtgagaatgccaacccagccaagggattctgtaatatagttctcaagggacccgaggcgctagatggaggggtttgtgtgtttctcttaaaggaagttgggagaaagggctgggggatggcgagagatttccggaggca

SEQ ID NO: 33025 - DNA, 704 bp, Homo sapiens
ggctggagggacctttttcttgacagccttaaagatttcctgcatccttccttggagccaatgaagacaggggaaacggttgaaccggttaagcctggggatgggatggccagcgctgcctatgcctggagcctggaccctagttatctggggcagagataggagagggaaggggaagcccagaacagagaaaggcttcagcgaacacagtgtggtctccagaggcagaaagatcagccacaacacgggcctcttggagtcactgacctaaagtagagagcaagctgagagagatcacccacaggaactcctgcatgtaaaggtggaggagctgaggcccagagagggcagcggttggccagaggtcacacagcacctagtggcagagctggacctaaagtccaggtctcctggatgccaactcagggaactctccactgttgagttcagataaactcagtgggaaactccagggaaaagcccccagcttgcaaagtcagaacaagatattttagtggccctgggtggtgacagagtagagatgtttgttttggtttccaaatcaacgcttgacaacctcgtcctcattgcggcttcagcgaccacatttcccacgtggtaaagacctggttgggccaagggaaaaccaaagcagtggtgactggggccaggacccaggcaccccaggccaggggctctggttt

SEQ ID NO: 33026 - DNA, 411 bp, Homo sapiens
aacttcagaaaataaatggaagacaaggtgtgcacgcatcccagaagggcgggaagagagacgcccgcactccacctgtctcagcagcaccgtctcattccaggccagcgccagaagctgacatcacaccccacgccctgggtgcaacttgaatagatcgttgctcaatgccaacccatctccctccaagactgggcacggtttttccatcaccttagtagccaggtccaaaaagcacacacacaataaaacaaacacaacacaagcctgaggcatgacaacacaatcaacagtggcagacaggagggcccggcccatccctccccagtttcaccattgagagcaagtgcctgcttccctagcctgccccaatgacattgaccatgaggggcggcgaggtggcctccctgt

SEQ ID NO: 33027 - DNA, 1913 bp, Homo sapiens
gtagttgtggttatccaacccagcaagctggaccttacagagctggagcaagacggcagacactggccccagggggtaggggcagatccatccattttcaaaaacgtgatctcatttaattcaagaaataaaaaggcagtgggttggttagagtttttcttttcatatgttgagggaggggagcatatttcctacttccttggtaaaaatacttatgctaggagacagactagccaggagtggttaaaatctctggttgaaatcccggtttcaccacttactcgccaagccaccttaggcaaatcacttagcatttctgcacctcggtttcctcatctgcgagatgaggataagactgccttacacaatacgctgtattgtgctgagaattaaatgagatcgcataaaacacagacagttattatgtcacctagaaaacaatgtgcctcaccagtgacagcatcgaggtggcccccacggtagccagcgcccgcccccatcctgggatctagataactgggccttcctggcgtacgtaagacgctctgcaaacacagcttccagcccacctgccagtaccagctgcccgcccggcccccgtcccgcatacgcattccgcggcagcctggacctgggcgccccgtcccagggcggcgggggaggggcggccactcacctccgcttatactcgtcgcgctcgcgcttcaccttggccagcacgttgtagagcgcgcggatctccggcgtgatggtgtcgatctgcacgcccacgccgtcggggtgcacccacgacacgccggggccctgcacggtctccacgccgccgccgcccgtgcgccgcacctgcgtgtagctccagatggtcccgggcaggcggccgtagtgctgcgggtgcgagccgccgccggggggcaggccgcccagggccacggcattggcgttggcgccggccgccgcgccactgctgaggccgtgcccgccgccgggcgccgggggccgcagcaactcgggcccggtctgcacggcctgctcgcgggagaaggtcttgtagcgcagccgccgctcgcgctcgctctgctgctgctccagctgcttctccagcagccggttgcgccgctccagctcgtgcaccttagccaggaagcagcggaagcgcacgttgagccccttcaagaggtggatgttggagcccaggtcgtcccgcagcgccgccgtcaccggcgacggacccggccctgccccgccgccgccgccgcccccgccagggcagcccccgccgccgccgcccggcgggcagccgaaggccaaggccatctccccgaacagcagcgagttcaccatgcgccggctgcgcggctcagggccccgggcccgcggctccaggtgcggctccagctccgggcagggctcccggcgcggccgggccagggtgggcgcgggctccagcgcggccggccgggcggttccagatgcgcgccagatgcggcctccgcagagacggcaggacggatggccccggatgcgggcgccgaggcgagagagggcactcggccgctcctcgggacgcggtggaggccgcggtatctgcgcggggccagaagggtcgcgggtctcaccgcccgggctgtcagagacgctgtggaggggccgcggcagccgcacgcagaggactctcggccggcactgccccttctgcggcgggccccgcccactgcagacactggccccgcccccgccgcggccccgcccacccctcctccctctgcggcgttccccgagcccgaggctccgccccacgaggcccgcagcgccgggccccacccacagaccctcggctccgcccacctccgggttctcccgctttctccgcagcatagactccgcccagctccccggcggggccacgccctctc

SEQ ID NO: 33028 - DNA, 3585 bp, Homo sapiens
ctacaagacctaaagtgtgctggcgttattcacatcgctacagatgaagctggggttcagggaggggagatagcttctcaagattaaacagccaggaaatggtagaggtgggattcaaacttgggtttgtctctcttcaaagcagatggaaattgacgctgctatccatgtggtgaaaggagagaaacctgcatttactgaacacccacaatgtgccaagtcccgtacgactctgtctcatttcatcttccccactcccttatgaagtaggggatctcacattctcgttttacagatgagactccgaggcgcaggaaggggaggtgacttgcccaaggtccacagctgggaaacagctgaaatggggcgcaaagctggaagtctgctccccaacctggggaatggacaccaggtgacgacatatagtgccctcgctcggcagcaggcactggctctcaggggactgcggggtcactgcttagctcacacctgtcctttctctcccctgagagagcttgtggccttgggccacatccatgctttctttttcttcctaaccctcagccctcagcttagtcattctccagccctgatggagcacaaatgcatgctgctggtgacgactggctaccaaggtgggatgtcaccctcccagctattcccatcatttgtcctggcgggcgccaagaattcctgaggtcacctcaaggccccttcctgcattcctagcgttcttgtcacagggctctcctttctgaccccacatgtgaacctccgctgcaggctgggctcacaggcaaatgcatcacaccgtggtgactggggcaggagagtgggatcagtgatgccctgcctgttctggatgtgagaccttggcagattcctttgcctgtctgagcctcagcttctccatctctgagaggggcgggtaataatcggacctcccaaggtgtttgtaaggagcattcagggtgcatggaagtggctgggccttctgtatctctcactgccagcaatcaaaacatggcccaggactgtctgatgggtcagccagcgggactgggcagcacacgagcatccatttgtatgagcagctcgcagggacaggggtcacttggaaggagaggagggaaatgggattgggcccggtgtgtgccacatgaagaggtggctcttgggagacccaggcaggggctgggcagtgctgcccagggaggaatatttgccccaaatctgcagagaacacacctccatggccccagggagggaggggagcttcagtaaacagtctcttggcatgaatctccacatttccacagaggacaccggccacagtggccagacctgtttagtgacctgaagggcaaacagcatagaagaggagaggggtggccaaaagaaaggaggagtgggcaggggtcggtggtggttgtggctggggtttgtgagcactcaggacacactcgactctcagacctaaccaggtaaggttttgcagaagccagacatgtaggagagcatctggcaaccagatccactgaaattgggtgggtgctattaacgcaacccgtttataagtacaggctggggatggctggagagacgggcaccgcatagaggaggcacacaccaggaggagatggcaagggctccagacacgcagccaccagagcccgcgtccagccgaggctgggcgccctgcagcctgtgttcaaccacttacccttgtccagacctagatacagggcaaaaaggcatgcctatgggagccccagtaaagtccttataaagtgaagacttcttggtgagtcagcccgagccaggcgggcccagctcattcattgcgaaagtattttcttttcagtgcttttctgcaaagcctttcactgccgcggaggtgaagtcatcggctggtaaacgctctgccttgcggtaaatttcctctgaactttctgcttctgtttaactcgccaaacctcaaggcgagctggcagtcagagtcgtgcaaaggtcactgggctgagttggaggcctgggtttaaatcccagcccagcctctttctagtttcgggatcttgatggatgtaagtcacatctttgggctttagtttctctgtgtctaaaatgaagtcactactatcaaaagtatcctaaagaaatacaatgctacgcactcatgtaatcaaaaatatttactgagttcttagtgagtgttaagtaccatgccagaaaatggaaattatggtaaggaaacacacatacacacacatatgcacatgtacacacatatgcacatatgcacatacatacacacacacacatacacatatacaagcatgtatatgcgacgtgtatacatacattagcacagacacacacacatgctttcctgattcttgccctcagacgtttcatattctggtgggaaagacagacgtgaatcaaatgatcccatcagtgaatattaaaatacagctgtgattagtgcggagctctctggtgctctaagagcttgcaatgggggcttgagccagtctgaggtgagcaggggtgggacagggaagacttcccagggcacaaacagagtgggagatgggaaagacgaccagccatcacccaggcagagagaaggggcaagcagagcccctgcagaaccgtggcttatcccaggccaggaaggtcagcttaccaggggcagagcagtgaggggccaggaggactgcggacataggaaagatgggaagatgactgagctggcagccctgagggcagcttcctgctccgatatcccagaccagcagctcccagtgtgatcaagtggctttgcagcaaacgttatgaaacatcaatggattaaacttaatttggggctagatgagacactatcatatacctacacaaagagcagtgggtaccgaaaaactgatcactgaaaatattctacccatcagttttatttttctgttatttgaaaaacaataccatggttgggtttgagttaacagtaaacttcagcccaacacacagaacaacagtttcccatgggaggcctccctgagcccagctaaactcagcacttgcctttccaggaaacggcatccgtgaggccaccagggggtagcctaggaggggcagtggaattcctggacgactgctgaaaagcaaatcacacactggcgatggtgcctacccttttgttccagaagtagaagaaaattcaggtccgcgatccagacaatatttgtcttacaaatatgctaaataatgactttttttttttgagacacagtttcgctctcgttgcccagactcttgttgccaatggcgcaatctcggctcactacaacctccgcctcccaggttcaagcgattctcctgcctcagcctcctagtagctgggattacaggcatctgccaccacacctggctactttttttgtatttttagtagagacgtggtttcactatgttggccaggcttgtcttgagctcctgacctcaggtgatccacctgcctcggcctcccaaagtgctaggattacaggcatgagccaccacgcccagccaataatgacctcttattgg

SEQ ID NO: 33029 - DNA, 1033 bp, Homo sapiens
gctactcccgaggctgaggcagaagaatcacttgaacctgggaggcggagcttacagtgagctgagatgccaccactgcactccagcctggcgacagagcaagattctgtctcaaaaaaaaaaataacaaaaagttgatctataagggtggagatgaagacatttccccttcctcgatatatttttcttgcaacaaccatcatcatccaagatcattccttgggaacaaagggatggaagaaggaaggaaaaggaaaagcaaaaagcaattcctcaagcatctctggcacccgctctgtgcccagccctgtgctaagcccaggttatccagggaatggccagtggggcattctaggtaccagataataattaaacacaacagacatgggttcccataccagggctccatccgcaacgtaagcaggaaaagattccaagccatgcacatgattcacaaatgacccttggacatgggcagggacaggcagctgacctctagagacagatgacctgccttccaatcccggctctgttgctttcttgtttgagcaagttcccgctctgctcagagcctgggttttcttggctatcaaatgggaccaccaagtgttggtagggctgtgtgagcaatgagtgggatgagctgtataaagacctcagcaccaagtacagctctcacgggtggagagattaatttcagctggggcaactgggatggtttttcgggtgggattgacatgtcactagaatcagggcgggactgaacaggcgaggcacagggcaggggagggcggctgcacacccacagtgagggctctctgtgcacaggtaagtctggtttgtcgttgatgatggtagcggaggtgactacgccctttgaaaagtgatttatttttaaaatgagggctgaccacagactaagccacttcatgctctgttaccacctgcctcggtttattcaaacttcagtcaagctttgggttcaataaaagtcaccaggaaataactgcctcgcgcttcataggaaacccat

SEQ ID NO: 33030 - DNA, 565 bp, Homo sapiens
caccgctgcgactagcctcctcatctggttcattccccaaaacccggcaccccggagatggggcagcaggcgggcatcctgaggtcagtgcctccctgcctgcttggctgtgtgcctcaggtgtcctgggtgctaggaacgtcatggtaatctcatgcatgagtaaggctcgaaagatgtactgaaagttagatgcagtgattaagaagacggaaggggtgtcccccagcttcccacccctgccccactgtcgtttcccaattccttctactggtttgacagaaggaaccagtccagttgacaggagggaggtgctggcctcaggcatggctgcaggaagcaggctgggcaggagcagggcacgattgcaacagcaccctgccgccagccacctgccgcctgccgcctgccgcctgccttgctccatcctgcctggcggccgtgtgaggctgcctgtgtgtctgtcattgctactgggacccctcggggatacccaccccctgggattggccttggatcctgctggtcctctactagcccaacattctgctcctgtttgtggatg

SEQ ID NO: 33031 - DNA, 1597 bp, Homo sapiens
cccgacgggcttgtcatcaaggagagaaggggatccataaactccactcccaccatcaccgccacccctcagcaccctcagcctcctcagaaagcccccgcccccgaccacaacctcacagctgaagtggtgtgggtgagggtggtgaggaagtggtgccagtcggggcagcacagtcgaagccatcaccgctgtgggtgatcgggccagaaaccaggctggggaagacagggtgatagccatgaacagagctgcctttgactccagaggacaatgcccccccagtgtcccctgaggctggcccttgctgttgagtcactgtctgctccctcagagcggtttgggccaatgctgagttatttcaaaataataatagactagcgatgcagtcatagaatagagaatagagaggcgtgcagggttgcggctctgttatatgaactgacacttactgagcccctgctcggtgtaaaggccgtacatgtactgactcatctcaccctcacgacagtgacgtgaggtgggacgtgagttatgcctgacctgcatgaggctcagagaggcaacagcacctgcccgagccactcagctagaagtggtaggtggacccgggtctgtgcaactcaaagcctgcagttgacacactgcagccattaattttgcagaagacgacactatttggtcaccatcatcaaatcttccaagggtggaatggaagagaattccatgagaattcagaggacagaacaatgtctaacacgggggtgtgtctgggcagcagatttcaactcgacccaggaaagaacttcgtggcactccgagggccagggcagcctggtggtgtggaatgagccatctattactggaagtgcccaggcaggggctgaaggtcatttggaacaatgtggcgggaatttccacactgctgagggttggacaaacagcctaagagcttccgtttggctctgaggtgctgggatttcaagttgatttatgtaatgggccccctgcctgcaatctcagcccctccaatccactctccatgctgcagactgtaagctttccaaaacacccctccagcgtgctgtccctgcagaagtcctcgggcggctcaccacctgttccagttaccactgctggctaacaaccccttccaaaacttagtgacttaaaacaaccacctgacgctcagtctgtgggtcgggaattcagatgactctgctccatgatgtcctgggaagattagatgggtaggagctggggttaactggaagagtcctcttcccatctggctgtcgatgatggcatagtcgggaccacagcagggctgttggttggacacctagatacagtctcacctgtggcctctctgcatggatggattagtttgggattcctcactgcatggtggccgggtccaaagagtgactatcccaagacagcaagacagaaaggtatttgtgtgacctaagcttggaggtcacagagcatcacacaaaaagcgccaccgtacacacaaagtatccattatacacaaagctccacccaggctcaagggaaggggacagaccccagtgctggatgggcggagtgtcaa

SEQ ID NO: 33032 - DNA, 3561 bp, Homo sapiens
tcttagaacccacaactccttggcatctgctcagagctgggcactttgcaaacaaacatgtcacatctatcctgtgaggcaaggctgctgactgccttttacaaggggcaaaactgaggttgctggggaagcagcttgtccaaggtcgcatagccagaattagaacccaggactgtctgacaccaaagcccttgaactttccacctgccacccagcccatagagttggaaatgaccgttgacattgtcacctcccaagtgacacatctgaggcacggccagtagactggcctctgcttggatacctccaatgacaggggactcactacctccaaacagctcttgtcactgtgggagccctgctgtcagctgtgttttccttagacggaacggaaaccgcttctgtgaagacccttcctgggagtaggtccttcataactccaatgacgcacttccagcgccgcctctgtgccaggctcttggtgaatccaatgaggcatgtttgctttacacatgaaaccgaaggcctggccaggtgaagggctgttgcccagccagccctgaacccaatctggccccagactccaacctcaaccactttccacccagccctggcttcggggccccatgcagagctggcaggtgtggtggggcagaggagggagcggcctcagagagacgaggcagggaggggctggggagccgcctggagcagcccccaccccctccccaggactcagcacagtcctgtggagaggaaacgctgcagaaaggcggggtcctgaggcttctggaacctgcctcccctgctcacagcacttcagggccctcgtggcgctcagattggccccttcaccagcccctcgacgtccctgttcctgacactccaggcctgtcctggcttccaggcaagggcacctgctgctccgacggcctccatgtgggaacctgtgtctgggacttgtctctctgaagcagagggggctccctgaggtcagggcctgagctggcttaactcagcacgtcctgtgagcacctgtgccaggactgccagatttagtcaataaaaatacaggctgtccagggaagtttgtatttcagagaaatggtgagtcatgtttttttagtatactccatactaaagactgtaatagttcagggcgctggctgagccccctgtaaacttggcacctggatctaattctggtcctgtcccagcccactgggctcaggaacctagcaaagcacagatcccactgcccgatacccgttgtgggtcccgccaccgtcagaggtttacatgtatttggtgtttatgtgagattcagatttaacttggcaccttgaatttcacccagcagccctaacccaagcccctcctttgggtgaagcaacctcatcctcgagccccgattccctcattggaatgggattaacagtgcctgcctcagagaggtgactcgggacacgaccgtcgggtatggaatccagccctgcacagtgggttccaagtggggccccaaggcagaacccagagcgagggaaatgggaaggtgctgggcccgcgtcccatggcctgggccacccctgtgatcgatggctcttgaggtgactggagcccttttggctgccgggacaggaagggagggagggactggtggccccattcacactgtgctgtgaaaagcagcagccctccagccatcacttctgaaactgggcgaggaaacagagtggcattgtccttttgtctgctgtgacactccgcatgtgaccctgtcccgtgaacgagcagattcccgccacatgagggggtaggggctgaagcgccagcagctccatgcccagcattcaggccccaccaaacaaaagccacctcctaattgccctgtttgttctggcacgagggctgatgggggtgcctgcggagctccctgtcagcccggcctggagctggttcccagggccttgcaccttgtccgcccagccccgagcacggctcccagcctgcggccagttaacccttggctgtggctgccctgcctgcctgctgggcacctggccaaaccctggatcccagagctgtgccctcctgctgggagctgggatgatctaacccaatccgtgcccagaccagatggggagcagggccaggtgaagaagcagggctcaggctggctggacagggaggctgcatctcacttacgtgctgtgcagccttgggtaggtgagtttgcctctctgagcctaaggttcctcatctgtaaaacaggaagaacaacagtaaaaggactggagatcacgtgaggcatggtgatcctgctggagtgggtgctcagtaaatacaactctggtacagttcccagatctctgaagccgggaacagcctaacaaggggtccagccaggactccttgtcgggaccaagctggcttgtggacagaaggggtggatggggtgtcaaggtcattggccaaaggcagcagagggatctaaggaacagagtccaaagaacaatgagcctgagaccctgtgcccttcactcctgcccatgcccagaacacccccacctcccatcctgcgtgagagttcggggctctggatgacttccccctgtaaacttggcacctggggctaattctggtcctgtcccagccccctgactcagaaactcagcaaagcacagatcctgctgccccatacccactgtgggtcccaccaccgtcagaggtggtgaccttagatacctcccaccacagcttcctcaccccagcgccccagaagctcatctcccttttcctgagaggcctgcccaacctctggcaatgtcccgagaggctgccagaggctggcaccccacacccctcaggaggaagcccgcaacctgctgcagatgctgaaggtcactggggcttgtggcagtggccggagatcggcaccgactcagagccaggagtagccagaggaggtgagctggcgggatacttgtcttcatactccatcgtcactttgacccctaaaacagagcaccagctccccccacacttcaagccaggcacctcccaccccactctttcctccaggaagtcatcacactgctgggtgcccacctggagtgctgccaggccccacgtgcccgggaccctgttggcctgtgtgcgatgtgggaaagtgatggactgcaagttgggggcctcaggcaactccgctcctgctctccatgcccactgtccccaaccctagagtgaaggggtcagagttcaccttcaagctctgaagtcagggcaaaggggcacagagtgaaacgcagtgggtgccgaccccggcacccttggccaggggcagctcccagggcggatggcagccggtagccctcccatcccaggctggggccctgatgctctggagggcagggtccctctgacccggccaggcggcagcagaaacggttctgcctctgcacatgccttgctcagcttctccaggcctgttaaggaggccaaagggggcaggttggcaactcatgggtaccaggccaagctccaagactgagcaacagataa

SEQ ID NO: 33033 - DNA, 2347 bp, Homo sapiens
cccaagcccccactttctctcccgcatacgtgtgatgatgctgcagcctaaagtcctggaaggtggacccgtggatgaggacaagaatccatttctctgcagctctttaccctggcagacaagataacagatcaagttctgacagacgcctgagaatgtcccaggctttgtacttgcaagttcctggcagaggaactttttttctgaatgtcaagtgtgcagaagaggccagcttctgctgagctacatttctgtgtctctgctactaccccttaccccatgacttacaggacttaggacaaagcctgccgccagtgaggctgccccagcatcaggatgatatctctacacgcccttccagccgcggtctctcccccatgggtctcctcccagtatcgggctaacccacagtgcctttcctagtctgcctgatgagtgccgggctcacggccccggaccacggccgtatttggccctttgctgtggctgttgtgctttggtaagcagaaatcctgagtgaccctgcccaacttaattatttaaggccaattagtaaaggtgacgaaactgctacagagaaaacagcaactcatgaatgtagtagctcacactggatttcctaattaagctgtgaccaaatcagcttttcctgaactgcctgggacaataatgaatgctagtctcctaagtgagagcaaaacagctcctgtgggttcagattgcacacccgccatggagagactgtgcccaataaatggccactctatttgctgtggatgcagcatatggatactggccaagcctgacttatcaacttagtattctcaagatctaacttttgatttccagcagctagttaactattaattcaggctcttgggaaatactggaaagtgatatgttaggaatgggggcaggggttacctaggaatctaacaagacgccccctcccactctccagtgatgatctggtacaggccagattcaacaggacagctccaatctggtctctctgggagcgtgaagtgcccacagaccagcaacgcttgatcaatcagggctaatggaaataaagacaccaggtgtgccaatgagggcacaggctattttccacttggcttgtctttatcacggccctaaaagtttctctctgctccctggatggcctacaaatgtggacatgatccctcgaatcctgggctaaagcagaatcacaaaaatcacaaacccgatcttccagaaatgaagcagaggcacatttcactcgagggacagaagcaaaatgccaaacccagagcctgctccgtagctccccaggaaaggtagagactgtgtggggccattggcagcctgagtggtacccatggggtctcctctgcgcacagcaatccatgggggtcctcaaagagatgctgtggtggcagtttccagctgtttctcttgagaccatctgtcccaaatcacagcccaaggtcataaatcaaagaccacttcctttctgacatgctctttcttggggaggtgtccacacgtataggagagtggtctagaggaagaaaggttcatggaatgtgggacgcatgggataggaatgtaaccaagaagagagaatgaagacgagtttttaattattagaaaataccccatgtggccacactgaaactttcctggcttatgccaacaccagcaagatgtggaaaacctgattactgttcttagccctgatcatctcattggttttatcaccctgtgcctggctgccttcctaacattttctacagtaggtaagactggctctacctttctagtagcggaacagaaaacccagaaatgaccaggcaacctgccagccatcagcttagactcttgacatgacagactgagaagggagaagggctggtgtcaaccaccgcagtcacaaagcatgccttcacctagcacgtgcgtaccactaagcagcttttcaaaactgatgatgggaaatagtgagcagcagcttccggaagcaggtactgacctggtggctccacctggagccactgcccgagcctgcgaggtcaccaacagcctccgcaagatttccacacgtgtggctctccactgctcagggggcaggatgtgaagggccaagactgtgaaatagtagggcccgtccacttcaaaggcactctccacccacttctccttgggctgttccagaaagccttggaggttcttctcttctcgggaagttgctcgggttctagaagaaaagcggcatgataaaataaaagcagggtggaagcaggacccggcagcaagagcaggaagaatttgctcaatttgtcgttgtcttgtgacatttgct

SEQ ID NO: 33034 - DNA, 2514 bp, Homo sapiens
ggccatgtcaggtcaccccttgagtaagcctccatcccccaccctgtatgctctggacagctccccagtcagcaagcagacagacatggattcccaaggaaggtaacaggaaatggtgtcaccaggggattgggctgatagcgggtcttgtcccatcccctgcaaatcccctccattccaccatgaaaaatactcaacactcaccttgccaagcaagtggcaaaagctgattcagggacatgaggtccccagaccggaaggagcccgttgcacttggtgttggcattctgcagggcggcactctcccactcttcccggcctcgagccaacctggatagggaggagagcagggacaagcgactgctggcattaacgtggcaaccaggcacctgggcgggggggcgggggtgggggtgggggcatgccaacactaagaagtcagtcggcccaggctcctgaccctgcgaagagaatttgctatttgtagcctcaatgtggtacacactggctttgctgactcaggtaggcagggctgttctcactagccttgggcccaggccaaagcatattttcctatcattcaaataactgcttggggacctatatggtgtcaggcagaacaccctactctccagagactaaggagcagatttaaaaccacgaggatggcagtcccacccgctccaggcccacaggcaggcctactgaaggagccattccgcaagagccagggcctacctgacggcagccagatggcagtcgtagtgcacaatgttgaagtgggacacggtgctgtagccctgctgtttccggggcttattctccatctcctccaaggctacccgcttcgtgaaggtataaatgcccaggacctttgtgggctgcaaagacgacaacataaggagaggggaggagaaactccaagtcaggctcaggagaagcagaatagaggggaactgccgcccttcttgggcaatgccttgggtttcaggttgctctcactagggaagttcagaagagcaggtaaggccagcccctcagtctgttggtgaagcacttggctggccgcagccctagtgaaacaaggattatgggagcaaccagcaagaaggggatgcggtgcagatgcagaggcatacacataagcaagcctcggccatctttctttactttgtgcttcatctgtctgaaaatgcagaagtgacttcttgatattcccttgcttttcaaaacctgctgggcagctctgaagagcctgcattacgcaggactaacgagccctgtggcccaggcacctgccctttcacagcctgtattctaagcagtaagttccagctggaaagaagaggccacctttgagccttcaggagagccagcaggtcactggctgctctgctcctttcaggtggaatctagtttggataagcctagaaagttctgattttctccccagttaccctgaatggaggcagcatggtatgtttttaaaagcccaggtctggagtctgagaagcctaggctggaattctggctctgccatgtgacctttgtttgcttaaccacaagttgagactttttacaggtttaaataaaattatccagtttacacaaagctctgagcatgaggcctcacatataggaagaatccaatgagcagcatttgtcatgatgatgataaagataacaaagtctaaagttcggatgagctcgccttcctgcctctaaagaggacagctggtccttttgttaatctcctaagatgcaggccttgatcttgcctagctaagaacaaaatggcctggaggagggggatgctacctagaacaaggggtcaggctgggccctcaggaccgaccgtaggcccagcagctgtacctggaacttgtatccctccctgcagatgcagcacgtgaggccaggctcctcgatcagctcttccatctgcttcaggagtgctgtcttggtcacgacctggcccttttcatttgtctgtaggggaaccccggtggcatgtcaaggggatttccacacaccctctcccaccctagcttggagatgctcaggaacagggctaaccttctacctccactaaaaggacaggtgcatgagaggaaagcccttgagctgtcttctaataaggataaagacccaggcccttctgctattctctcttcctacaggaaccactgaagcaaaggaagtcatccagctggagccctggcaaggtgccacctgccatcagaaaagccccctttcttcatgccagcatcttcgtgccagcaatgccaagtctcagcttccaagggttgttgcactatgattcattcactgttcccaggtgagcttttcaactgctgacactcaagtctgtgctttggaaaaggagcttgtaggactctgcttcctccaaggtgggacagttagaagagcacagaaccctttgtgtcaaccacttattagttatgtgccttggcctatttacttcacctctcagtttcagttacttcatctgga

SEQ ID NO: 33035 - DNA, 686 bp, Homo sapiens
cagcctgggtgatagagcaagacttcatctcaaaaaaagattgggaaggtgaagcttagagaattaaaattaaatatctcattcaaggtcatcaggctagggaagaagcagagactaacaaacagaaaacattttcaaagtcaagcagaactaacgaaatgcaagtaaagacctaacaggatatcaatctgttctatattactgactggcaaagaccaacagctaatatgccttcattattgatagccaaaaaggggcagaccagaatactcaatatactgttagtgggaatacagactaaagtaaccaattttagaccaaataaggctggcctgtaatgcagtaacttaaaaggaatcaacaactcaagataagaagtcatatgatcagtgctaaagtccaaaattcactggataacagagttatcccctacaccatccccctgactgtagactaaagcgagatcacaaaagagtcggtgatttttttttttaaccacatcccttatccttagctggggaaatgccctcttctgaaaaaatctagagaccaactaggtttaaaggctggatacatttaaagtcattgtatcaaatcaggtgctaatccacaattgatgaaacatgggccgggcacggtggctggccgggtgtggtggctcatgcctgcaattccagcactttggg

SEQ ID NO: 33036 - DNA, 2579 bp, Homo sapiens
caaatgctctaaaaagactggaacgttactgattctacgtaacatgagtatgagtcaggaaaaatactgccaatccaaatgtttaaaacaaaaagcagccacgtaatttgaaagtagtatatttgaaacctgtttacatcttcagaacattcctggcctgatgattagatagcaaaatccgtctgtaaagctgactgtgaagttaccaaactcaaccattattttattataatttgttaaaaactctgcatccaaaggattacaagtctacaacaagaaaaagcacaaaaacaatttgtcaaaccgtgggcctcctttgagtaacaaatagcaatttttaacctctggatagcagctagatatacccttgtcatcgtgaagctaaaatgacccagttaacaattgcagggagttgctgaaatgaggtatggctagaaaaatgaaagtcagtctggctttaaaagcaaaagtctaccattaaactaatgaaagactgctctgagcacagtatgtcaggaaaaggcaggcactctgagatcaccatctttgtacctacataactgtcactagctaagaatcgctgtgcaaaaagacaaaaacacacaaaaggaaaccaacagatagtaccgtttgtaaaagaatgtgatgatattttaatgcgagggggatgggaggcagcaagagaacacacacaccacacatcctctgggaaaatgatctctcagacacacactgaaatgtttttaatcaaagaccgatacagtaggaatgcacaaggagtgcaacgtaaaaagaggtcatcaatgtagctagtggcttcagtcacagaaatagcacgtgcccccactgattacagcaccgcggggagaccgttattaaattataccgtacggctccgctccggcccaggctaggaggatgagtgcgggcgagaaatgcaaactcatctgtgacttgacccaaggggcagccccgtgaacattcccttaagagggcgaatgcatctcactctcaaccatgtccggccacgccctcccgcagggaggccgctaaagttttgctcgagaggggaaactgaggtagaggtgatttacatgcgttggcggagggaaacccaggcaagccagtctccccgggcccgggaccccgaagccgtggctgtggcggggatcctcaagggggcagggggcggcccggaaagcgggtccagacgatccggctcgaaatcccctccccccacaacagcgtcgcccgccagagccgccgcccggtacctctcgatgactgaggccaccagctgcggcaactccttcatctcgaaggcggagtaggacgcggacagcaggggccgcacagccacctcccagcccggggtcgtgtccgcccccgttgccggggtccccggcgccggagccgctgccgccgcctcttcgccgccgctcgtcgccatcttccgtcgtactactgcggctccctccgggggcttgccaccggcccagcgccgcctcccaggagggggcggaagtgacgcaatctgtcgcgtcagactgcgcgccgccgtcatgggtcaaaaacgcgacgcgcggagcggcctttgctctcaccggggtcgagccgcggcgagggaacggatcggagacgctgcgcctgctcagaaggtagcgcagcggggaaaggcgggagagcgttaacttctgagcctgcgcggtgggagttgctcaagcaggtggtagcgacttggcttccgggcagcgggtaaaggtgagtctggggcatgggttcagtgggcaagtctagggcagcagagttgactacgcctcggcgtatagaatggccctggcctgggacagctaaggacgacaagaggaggccgaagcctaaaacgctttcacctgcttcttcccctgcctagatccccccaatagtaatactaaagagcgccatagtttacaaagatttctccctctcacaacaccttttaatcactgatccgtattcccttagcactcaaatctcttctgtttggattgccctcattaacaatctgaccagctcgtacaatgcatccctctttgcaatttgccacgtatgcttacgtgttccccttttttctactggcaaggaaagaatgtaagcttttattcacaggagatgtctgagacttttgccggtaaaatgatctggctacaaggtctaagagggaaaagcagtttgctcgaggaaaggtattcgtgcattaaggacagtcctgtgagtgagatattggtggacggcttcaagctctagcctgtggcctacagctggcctaaataagactgggaaggaactgtgaagacggtttcaaattcctaaagccctgaaattctccccctaagtttaggaagagcttttgttcttggtgtgtaacactgataaatgaattggtacctagtgattaatctgcacttttattaagatatgacctactttaccttttttgagacaggatcttgctctgtcgcccaatagcccaggctggagtgcagtggcagagttgcagctggctgcagcctccacctccctggctcaagtgatcttcc

SEQ ID NO: 33037 - DNA, 2040 bp, Homo sapiens
gaggagaaatctgacctgggccctgaagaataaagtgtaaatagcaataataacagataacgcttaatgactgcattcaatgagccaggcattgtgctaagtaatttaatgggattgtctcattcattctcacaagtactgtaagagataacggactgttagtaaacccattctacagacaaagaaaccaaggcacagagtggttaagtcactttccccaagatcacacaagtcttaactagtaaaattcaaacaaaagcaagctactccagggccttaaggaagacgtgggtgggtgaatgaatgaatgagtgaatggcatattctagctgcttagtgttttgggcaatcctgctgtgagcccagggccagactaggttgatgagaggggaaaaggactcagtttaggacttttaagacgaaagctcctgttcacttgcctacaagacaccaattcgagtaggaattaaagttcactgacagcttggcgacctctgacacctggtagaccagaaacctcacagtcaaaaaaatcgaacctgacgagggaggacgggatcagtgatctctgaccggcaccccaagcattcctggatggcagggccggcttacacgcaaggatcagcttagaatgacccctaacacttggtttaaggctctgcttccaacgactttaaatccttaataattttttaacaaggggccccacgttttcattttgtactgggtcctgcaaattatgcggccaatcctgttaagtgacaacctttagcaggtaggagacaggtactggggaaacagccacttatctctcgaatatgttccacacgtacgcaccaatcaaacttgcccacttggtcttcgtagaccgcggccgcaggaatcagcagcgtagcccaaagccagaaacgagaagcccactcagccgccatgatgcgagcgcatgcaccacccaccgccgtcccggcatgcaccgcgccgcgggctccgcctccgcgggaccacagagctgggatagcgcgcgaggccctcggtcggacgggacgctcgggattcagggactgcctcggcacacgggaagttgccctacaggcgcgggagaaagcgcaggcggcggcttggcagggagaggcaggctgcagtgcacattgggtcaggcacacgcgaggggcagcccccgagggccgtcccagagtcccccgcgccgccggggtcctaacggggtgcaccgtcttccgccgcacgtggattcagcgcgatgcccaaatccaagcgcgacaagaaaggtgggcgaagggggagtcgggaccctggggggagctccgtgggctggctacccagcctgcggtgagggcttcggggcggcgggggcgcagattggaacgccaggacatcctcgaggtgttccgctgcctcgctgcgagctggaatgggggcttcggggctgtaaaaccgccagaggtggctgacgcccggtcgggtctggggagcggagactcgttttgcctagtttcaggtgctcttgcaaggccaactgggtcgggaggcagctcctgaacaccgcccccggctatgcctgctgccgtttcggcccacttttcccaacttcggccctttctcatcttcctgcgctcccgccaccctggctgcctttcccttctttcagcacaggtttgttcccgtgtctggcgttgtgtgtctgcggttgtttctgcctggcatgcttacatcttcgtatggtttgcgccttcttagttgtcagttaataggatccctctgagacagggtctcgctctgttgcccaggctggagtgcagtggcgcgatcgtaacactgcaggccggatgcggtggctcacgcctgtaatcccagcactctgggaggccgaggcgggcgaatcatctgaggtcgggagttcccgaccagcctggccaatatggtgaaaccccttttctactaaaaatactaaaaattagatgggcatggtggcaggtgcctgtaatcccagctacttgggagactgaggcgggagaatcgctt

SEQ ID NO: 33038 - DNA, 3623 bp, Homo sapiens
aaaaaaaaaagaattgcatgaacctgggaggtagaggttgcagtgagcccagatcgtgccattgcagtgaagcctgggtgacagagcaagactgtcaaaaaaaaaaaaaagaagaagtaagcttaacactcttctccctgccccgtattaagaatcctagttggaggctggtttcagtggctcaaacttgtaatcccagctactggagaggctgaggcacaagaatcgcttgaacccaggaggcagaggttgcagtgagccgagatctttcactacactccagcctgtgtgccagaacaagactctgtcccccccgcaaaaaaaaaaaatcttagttggagattaggcacagtggctcacccccataagccgagcactgagagaggcccaggagggtggatctcttgagcccagggatttgagaccagcctgggcaaaatggtgaaaccccatctctacaaaaaacacaaaatttggccaggcatggtggtacatgcctgtaatctcagctactggggaggctgagttgagaggatcacatgagcctaggagatcaaggctatagtgagcaaatattatgccactgtactccagcccggatgacagaatgagaccctatttcaaaataaaaataaaaataaaaaatcctagatcctagtgggctggaataacaggtgagtggagagtcctcttcccacttttcacacttagaaagtcacttaggctggcaagagggcagtcactagagcccttgagacctgggagggagcaggtttgatgaattattcatttggaatttttccattccaccaccacccctctgcttctcaatgtgaacttaacttcagatctgagatctgaggactttcaccagccaaccttggactcaaagacagaagacaaggattaaaaaagtaaacaaaaaaaaaatcagaaataagggccaggcagagggtgcagatctgtggtggctcacacctgtaatctcagcactttgggaggccagggcaggaggatcacttgagcccatgagtttgagaccagcctgggcaacaaagtgagactctggtttcgatgaataatacaaaaaattagccaggtgtggtggcacaggcctgtagtagtcccagctactaaggaggctgaggtgggaggatcgcttgagccctgagaggccaaagctgcaatgagccatgattgcactccagcctgggtaaaagagcaagaccctgtatcaaaaaaaaaaaaaaaaaaagaccggaaataagatcagagctctcaccgagtggcagccaggtgatctagaaagagtgtggcactgaaatgcacgcacaggcctcttttgtttgggatgtaccatgtggtgaatcagaggagaaatggacaagactccactcagacactcagagtggaaggaggcaaatggtgctaatattaagaacaaagaaacagctaacatttcccagccctcactatgtgcctgccaggcatcggcctaagcactgcaaatggcatcagactgagggcggctcctcctgcccctttacacacatcttcccctcgggctacacctgcttcccccagcaccggcggcattgccaagtcgcatttgcctttccacacccatgcccactgccctgacgcccttgccccttgtactcttcctggcaaactcctatcctatctttcttcacggggtccctcccaagaagggctcactcggctccccagccatcgctagaattggagattcctggagtgggttagtgtccatttctctccaatagcctcagacagagcatcccacagagagggcagcgagaccctgtaccacacccaattccccatctcactgagggagctgccaaggctcccaggcattgtcaccctggtgagttaccagagcaaagtccagggacccgagcagtctggcatgagcgtaggaggaagcagatagtgtgctgggtccaaactctgattttggactgtgccaggcgataagaacagaatttctgcagatcaggcccgtcaagggcacctgaagggcacaggtggggacaggagctgcacaatgctagattccaatgtttttcgtgctccagagaggggctagccaagtcattccaggcaagaccaagtcatccaggcgtcagtgagggtgctgggctacctcccggaagagaagacgacagaaaaggagtccggacaaagcaccatccagttgtccagagctagatgtgcctgaggaactggcggttcccagagttgcggtgtggacagggatggggtgggggacgaagccgtgggtgctgcccggggccagggagagcggggcagcgcacggctggtgacaggctcagctctgcaccgtgcagagggaggatcaggggccactgttacctctgcagtcgctgctgcccattcggagccccaggccgccaaggatggtctcggactggccgtcgctgtacaggaaggccgtgtctatctcggtgtggccgcgctccaggaaggcgcgcgtgactgcggcgctggtgggcgcgtccatgcggcgccccatctccatggcgcccagcaccgtggctggccgggcccgcgacagctgccgggacatgacggcggcaacgggagactgtgacagcccaggagccgcgcgcagcggtcggaagcaccaggctcggagcgggcggcctcgtggctttagggactggctcgggccgcgcccaccggtggtggagcggagggcgcggccaaaggtgcccaacgccgcccacgcgctggactccgctctcaaccacgaggaccgtctgcacttgcaccgagcaagcagcgaaatggctgtggcttcgtaccggtgactcgcgtcttggagattttaacactcctcaagtccgcaagggtgagggggtccaagggtggcgaagatcccaaaggtctgggactcctccctgccccgtcgtcccccatccctcggcctcgcccgccccggagctgtcccaggtctctgtctcctccaggagggagcttaacgggtgtggtggacctaagtaagggctgtcctgcctgcctgccgtgtggtcctggaggatgaggcttaccaaaggctcaaaacagcgtccccgtggagtgacatggttaaagtcttgaaagaaaagaactgttggcattgaattctgtacctaagtgaaacaaacaaacaaactgactgactgtggtggtttacgcctgtaatcccaacactttgggagatcaaggcaggacgatcgcctgagcccaggagtttgaatccagcctgggcaacatagggaggccctgtctcaaaagaaaaaaaaaaagaagaagaagatagaaaaatggaccaacgcccagctgcagtgtgctgtgatagctccactgcactccgccctgggtgacagagggcaaatctgtctctaaatacaaaaaaaaaaaaaaaagaccaatagacagatggaacaaatgaaaaaccaatagcaagattaatttaaacccaaccatatcaataattacattaaatataaatgaaaaaatgcttacaagtaaaaggcagagattgttagaatggataaaaaagcaaaacacaagtatatagtaaatattagaaa

SEQ ID NO: 33039 - DNA, 2238 bp, Homo sapiens
aatgagccctatcgcaccactccactccagcctgggcaaaaaagcaagaccctgtctcaaaaaaaaaaaaaaaatcagaaatatggttagagctctcactgagtggcagccgggtgatctagaaagagcgtggcactgggatgcacgcacaggccaggttcgttctggatctaccatgtggtgaatcagaggagaaataagactccactcagacactcagtggaaggaggcaaatggtgctaatactaagaacaaacaaacagctaacatttcccagccctcactatgtgcctgccaggcatcggcctaagcactgcaaatggcatcagactgagggcggctcctcctgcccctatacacacatcctcccctccggccacacctgcctcctccagcacccgcggcattgccaaaacacatttgcctttccacacccatgcccactgccctgacgcccttgccccttgtactcttcctggcaaactcctatccattctttcttcacggggtccctcccaggaaggggtcactctgggctccccagccatctctagaactggagcttcctggagtgggttagtgtccatttctctccaatagcctccgacagagcctcccacagagagggcagtgagactctgtaccaccccaatccctcatccccctgagggagctgccaaggcttccgggcactgccacccttgtgaggtgcccttgtgagtaccacaaggtactcagagcaaagtccggggccccgagcaggctggcatgtgcaaaggaggaagcagatagtgtgctgggtccaaactctgattttggactgtgccagggagtgccaggcggtaagaacagaatttctgcagatcaggcccgtcaagggcacctggagggcacaggtggggacaggagctgcacaatgccagatcccagtgttttttgtgctccagagaggggctagccaagtcattccaggcaagaccaagtcatccaggcgtcagtgagggtgctggctacctcccggaagagaagagagacgaacagaagagaagacgagagaaaagttgtccggagctagacgtgcctaaggagcctggtgttcccaaggctgcgaggtgaacaggggtgggggcggtgggggggacaaaactttgggtgctgccccggggccagggagagcggggcggtacacggctgtggacaggctcagctctgcaccgtgcagggggaggatcaggggccactgttacctctgcagtcgctgccgcccagccggagccccaggccgccaaggatggtctcggactggccctcgctgtacacgaaggccgtgtctatctcggtgtggccgcgctccaggaaggcgcgcgtgactgcggcgctggtgggcgcgtccatgcggcgccccatctccatggcgcccagcaccgtggctggccgggcccgcgacagctgccgggacatgacggcggcaacgggagactgtgacagcccaggagccgcgcgcagcggtcggaagcaccaggctcggagcgggcggcctcgtggctttagagacgggctcgggccccgcccaccggcgggtgcagctgagggcgcggccgaaggtgcccgacgccgcccacgagctcgactccacgctcggctactaggaccttctgcacttgcaccgagcaagcagcgaaatggctgtggcttcgtaccggtgactcgcgtcttggagattttaacactcctcaacgtccccaagggtgagggggtccaagggtggcgactatcccaaaaggcggggactcttcgggcctccctgccccgtcgtccctccttcctcggccttgccccggagctgtcctgggtttctgtctcctcccggagggagcgcttacggggtggggtggacctagggctgtcgcgcctgccgtgtggtcctggagaatgaggcttaccaaaggctcaagacagcgtccccatggagtgacatggttaaagtgttgaaagaaaagaactgttggcattgaattctgtacctaagtgaaaaaaaactgactggctctggtgacttaacgcctgtaatgccaacactttgagagatcaaggcaggaggatcacttgagcccaggagtttgaacccagcctgggcaacatagggaggccctgtctcaaaagaaaaaaaaaaagatagaaaaatggaccagtgcccagcggcagtgagctgtgatagctctactgcactccaccctg

SEQ ID NO: 33040 - DNA, 2150 bp, Homo sapiens
tggcatagagtggatagaaagtccctacaccctgacccgtccgcactccctaacactcctactctcccagccagccttacggcatcgccacagttctccctgagagaggcagaggtactgccagctgcacaggtcaaattctagtggttaagaaaaggccaggatgagaaaagggtgcccagggtgtgcatgcgtgatgatggtaacgaaggggtagagaaaagggggagagcctgggtggggaccggttgtgggcacctggcaggtttggaggcgggggcatcaatggaggtgggaagcgatgggtcagaccaggctggggggagactctcgcgctgcaactcccaagggaaggagagtgggggaaaggagtcagggcaaagcactgtctagttgtcccggggttcccagagctgcggggtggacctggggtggggagcgagggacgaatccgtcggtgctgcccgcggccgggcccgagcggggtggtgcacggctggggacaggctcagctctacacgatgcatggggaggatctgcagctactgttacctctgcagtcgccaccgcccagcccgagccccaggccgcccaggatggtctcggactggccgtcgctgtacatgaaggccgtgtccagttcggtgtggccgcgctccagaaaggcgcgcacggccgcggcgctggcgggcgcgtccatgcggcgccccatctccatggtgcccagcaccgaggcgacccgcggtggcggtggccgggacatggcgagcgcgcgggcctcgggcggcggagagcgaagcgcgcagtggacggcggcgcgggagactacgcgagacgcggcactcagcatagcagcggcgcctgcgcgttgggagccgggggccccgcccatgccggggaggagcgcggaggcagttgggggcggggacaacaggcgcggccccagcggcgcctccaggcccggtcagcccagcgcgcggcgtgggggcggggcctgcggttcccgcgggggcggtggcgcgcggtcagctgacccggcgggccttgacccagaagctgggccctggcggcggatctggacgtggtgagccggaccgggggcaggtggcaaacttcacggctgggggtcggggctcctgggcttccctgccacatccttccagccctctcctccggccgctggactgtcccggctcctgcgccctccttgtggcgcgatatcgtgggacgaggctccgggccgggactgggtggccctcgggaatccgcagccagtggccccccacctcaaaggcgaccagcgcggcctctcgagctggcctggccaggagttgccctgccccggccgaccggccccttggcatctgatggcttcgtttttcccgggccggccgggcgaggggccctcgcggcgctggccccagcagctgtcctatcattatccctccaaacaggcggcccgcgccgggctgagtcaccaggagggagctgtggccgaggacgccgaggcctggagtgggtggtagccccgagctgggacgctcctccctccacaatctccccaggtctgcagggaccgagggcctacactgcctcctcccacgccgtgcttagggtaggtttccaaacgtgtaaatggagagtctgagtctggaagtgtgaggggtcccgggcctgggtcacaggtcatgtctaatcaacgcttactgaaggcgcctgtgtgcccggacgctggaggggctacaatgagaacaaataatagtcattttgggctgttggtgttgagtgccagtgccaggcacccttgtaatcgcttggcctggattgtctcatttaactctgcagtcagcctaggtggtgggtattgcattattcccctacttttcagatgagaactacgaagctcaatcacttgagttccagactggtaggcatcgggcaggtctgttccagagtgcttttctcctcaaccctgggctgttcgagctcacagctttctccccttcctttctcctttccttcctcttctctctcttccaccctttctcctttctcacccgtttcctctcttcttcactctgtccttctctctacctctctctttctctcactgtctctcaacatttgctgaacctctaggtgtgtttaca

SEQ ID NO: 33041 - DNA, 970 bp, Homo sapiens
agaccagcctgaccaacaaggagaaaccccgtctctactaaaaatacgttagctgggcatggtggcacatgcctgtaatgccagctactgaggaggctgaggcaggagaatcgcttgaacctgggaggcggaggttacagtgagccaagatcatgccattgcactccagcctgggcaacaagagtgaaactccgtctcaaaaaaaaagatgttgcatcagacccagggacctcaaacacatgggctggccaggttgtggagcccgctgattggccacggacagatggggggatggtctcggcagggactttgagatctgcttcagatcttccctggggcagtttggagggtagaaggcagactctgtggctctgtgcagccttggctgagttactgcaactgaacctcggctgcctcacatttgtactaggcacagtgggaaggcggcgggaggtgcgtgctgcggcgccagaacagtgtttgctggtgcttctgccctccaacggcagagggcggaaagggacagggactctgcacctcatcacatacctggtgttttcagggcggcggggctggggacgggacacttccttgctgccgtgagcggggcccacacgcgtcccagcttggagccagcgcacggccacggccacacgcgctcggaaagcgaggccggcgagaaggaacacagaaggccagcgctaactgcgccccagtttctttttattgatttcttttcttttctttttttaagtatggaggctcaagtataagatgtagatttttttcttaagctttacaaaaaaacaaaataaaacaaaaacctccttttgcattccatagaaattgacagaaaagcacctggccggaagagcggaacggtcggcggcaccccccccagcccccaccccgcggcctccgtgggacgggagagtctgcgcaggacggcaccgagggccacctctgctcc

SEQ ID NO: 33042 - DNA, 853 bp, Homo sapiens
ctgtttctgatgctgagtggtgaacataaaagtctctgctcctcatggagcttatggtgcagtcaaaatcagtgtggaaaaaaaaaatcaaggaagagtccttgttaggatgtcaaataataaggaggggagttaccccattttaagctggcaaggctccaaggggtaggtttagggggttttttgtgttattttcttattttggtatataaactgagataagaaatatttcacctcctgttttcacatgatttaaagaaaaagcataaaattgcttaaatcaccctgcaataaataaaaccaccattaatacggactaaaacaatttttcagaataagaaatcagtcaaataaaaccccaccatctaaatatctgctacagtgttcagacatccgacggtattatgaaatcatctgcatacaggaaaacttggcctactaggcaaactccagggcaaagtctgatttggaaaccatcaagtgagatgtaaccagtacctacactccaagtttggtagagtaaacacaccatctacaacaatgtcaatgtcagagtacaggtgcccactaagtagggcagggagccccagaagatgtctcagaatggggccacaggagcaggttagccctggataagcaggtgtgcctttccaggcagcaggtgcagcaggctaaggagaggtgagccaggtgcgtggaggaggaggtggggaaccatggggcatggcctggggaggtgactggggccttgtcacaagagccagatcacacccaaactactcagggggcagctatgctggcccgaggagctaggctcagaatctcacttctccccgcagttttttgctcctgt

SEQ ID NO: 33043 - DNA, 464 bp, Homo sapiens
gacaccctccctggcaaggaaaatttccacgcgcctctccctggcatatttattccagaggaaaacttagcaacctacacactacacacaggctctgtgtcaaactctacaacagccatcagttgatctttcccttacacatccctccaggaagtgaaatatccgaaatgagtcatactcaggagtcggagctatacttccactgtagtttttttggataaccaattcactgtttacactccaaaacctctaattgctgaacacagaacagttcctttgcagagatcaaagcttacctggtgaacctggcgaaatgacaaaaattctccaaaaggagttagccatccagagtgccagaggagggtggctgtacaagcacattttaattggcaaagcagagtcgctgcccagcaaggaagagtatgcaggggtttattctgctgctcttctatttcccctttaag

SEQ ID NO: 33044 - DNA, 613 bp, Homo sapiens
ggggtcttggagtatatcccccatagctaaggagggacaactgctatacatacattatactgttattttaaggattatgtgggggtaatcctcattcagcatctggcacatacctgggacatagtcactgctccataaattctacatgttaagtcaacagaaaagaggaagaaacaagaaagtaaaagcatataatctaacaatttcacaacaaaggcctcgctggccttctgccaacctccagaaaacagtgctggactctgtgtacccgcagtgtggctgggactgcagacaccaggaagaccttgggacctgtggagcctggatggttcagttgtctgagccaaggagggctggattaggctcagtgatcgaagctgagcaagtttcagcacatacctctacaaagtggacgcccagggatggctgatatgatgattctttaggaagccaaatgctcagtttctcagaaaggtgttttcctgtttcatgacagataaaaaggtttctcatccagacaaataaatctgctgactgagagctttcattaaaagcaaacagtcttgcaataaggaaccgtaagctaggaaggccttccatgaatatatgaaat

SEQ ID NO: 33045 - DNA, 372 bp, Homo sapiens
cagattaagcatttcccctgaaatccaaccctcacagctcagtccaaacttttcctcaccgtgaaaaggtgaactccagaccagcctaaggccaaccgttctgaatggcaaccactagattcaaagcaaggtgctgtgatgttgctaggtgtttggtttgtgctcctatgaccagtgtggggggaagggacttgggcagacatccaagctgaggtcccctgggcagagtgactcagaattagtgtctggataggcatccgtgcacccaacgctactgacttactccagttcatcctgaagacagactattacagtaaaagccatgttttaaaaaagttatagctgctaggccgggcgcggtggctcacgcct

SEQ ID NO: 33046 - DNA, 602 bp, Homo sapiens
gtacaaaaccgcactgtacacttaaagctggggaatcttatatgtaaatcagatctcaataaagcagctgaaaaaagaacaaaacaaccactagaggcagggagtgctgggctgtgcaggagggcagtccatggctttatgctctgccctcaagagcacatggtaagaccctgtagcaggaacagaggaagctggaggcctctcggcatcacctggacaaacagccctcggcagagaggctcaacagataacctgagagcggcagggtcagcgaggtcagttccagtctacacgggaggcaggaagagcgccagccctgaaaatgcattcctgaggctcaggctgcactgccaggctcgctttaaagccaggccaaaggaaaacagcactggccggggtgtccaaatactttaccaagttcaggatgcactgcgtgcaggaaaactgagaccatttttctctgtttcaacagaaacttgaaaaccacccctgacaacatgttagtccctggaagtactcaattacggtgaaaagccatcggcaaaagttaaagtgagtaatatgacagtgagccatgtaagaagtaaaggtgagtggaagat

SEQ ID NO: 33047 - DNA, 531 bp, Homo sapiens
agagaagctgggcacaaggccccagggaagcaaaaacctgaaaaactatcctttcacacttgtgcagggtcagttgatgttaggcttgtattgcaaaatttatacttctgaagaaggataaagcagcaagagggaaaaagtatctaaaatgcagacacatataccacatttgttttggaaaagacaagtcaggagcccacaaaaggttatgaaaaaccccagtgacaccaccaccaatgtttgtctttggaataatggaaagagatgtgtattacttgtaagaatgatctctgctattacatgactcattcctgcatgcaaggactgctctcatctggtgccaaggaaagactgctgaattatggaattgcaaacattatcactgactgttactcacaacactgcagggcaaactgatatgcgccaaatcagccatgttaaggggttgttattgcacctctcctcaggaccagctgttgctatttcgcattaagactttaaccatatcttagtccaagaactcatcaacct

SEQ ID NO: 33048 - DNA, 2985 bp, Homo sapiens
tctggcccttccaacctaagtgctgggcctgtcctgcagaagggtcaagtggcaggagggcaggtctatctgtgggggcctatgtgaaaccccaggttcctcaaaagtctggatagcatctgccttctttaccaaaacaaacaccacgagcggagccagcactctccctaggcgttctgctcacctgatccgagggacttccataatcagcagttccaacccttgcaagctgacagttcagagggaaggggaggctgcgcctgcttgggtgcatcgtgtccaggccatatgctggatccagggcctggtggccccccaaggccacggcctcacaagggcgattgtgcgttcatccttgtcctgtgggccacccatcctcgcccctcggctcccactcaggcccgggcgccgtggaccccggcctgccctgcagaatgcttcgcacgcacagcacccacggcggcagcctcgagaagggcccgcagagcagcgcgctgccttctgggcacaccgatgcccgcccttccctcgctggctcctaggcggcctccctagaagcggcaactgagaaggcacagcaccgggaccaccccatccctgatggagagctcccctcgctccccaaaggctgcaaagaaggcgcgccccaggtacagggaaggggaccctgggtcgtgcaccaggcagggggcaggaccctgatgagaggctcagggcggggaccgagcggggctgacgcaggttacgctaggagtggcgaaaagtccagggaaggggatcatggtggggagggggcagtgaggtccagacgggggccatgggcggagaagaggaggtccagatttaagttcacagagagaagaggagattcaggctgaggccacggagaagaggggaagcaaacctaggccgctgcagaaggggctgaccggggtccagcctgaggccatggagaaggcaaagggggagggacagagggaggcagcggcctagcctgggccatggcagggagaaacgacggcctagcctgggccggagagacgggggaaagcagacctagccctagaccgggggaggaagggggcccacgccagggtcaccgagggggtgcctggctggggacacggttcgggagggagggtctagcctgggctatgggagagaccagcctgaacacagaggtagtgagtgggactccagcttgcgccaagggcgggggctgggagcgggggcagggtcactgccacccaagtcgtccgcgccggcggcaccctcctgggcggggagggaccgggtccacccagggtccgggaccccgcccctcccccaccccgggaagccacccgtcccaggccagggatgggcagggggagggggacgcgagctccggaggggcccccgggccggggagggggccgtgcggcctttaccatggtggcggcggcggcggcggtcccggtcccggcgtcagtggctctcccccccgcagcagggcccggcgcttccacttccccgggtgcccaggagtgaacatccgggtcagcacccccctccccccgcgccgggccgccgccaccttccttccccgccccggcccggcccgggcccgccccccacgccgccagctcgcggccaatgagcgcgcggggctgcggcgatcgccaagtatggagagcggcgcgagaggcgggcgccgacggggtgcgggggcggggcctgcgaggcggggcggggcgcggcgctgcgcggcgcggctgccgggagtccccggcacgggttgcgggccggggcggaaaggtctcctggctgtctgaggtccagtccccgactctgggcctgcagcagcgagtggcggcgagggaaccgcaccccacagtccccgcgggcggggatgcggaaggcaccgcggctgggaggggaccggccctccgcgccccaccccgtgcacgcgctcactcctgcggcgcacccggaactgccgccgagcgcggaccggcccggcccagcccaacccagcccaacccagcactgggggagcgcgccgggagcggggcaggagcccagcgctgccgctcgctacggcaggatctggagcgccgcgctgcacctgagcccgggcacgaattgaggagcctcgggctgacgccatttattcagcacctactatgtgccaggccttgtttaggcaccggaagataacagataagacataaagatccctgccggtatagctgcagacagaatatctgtgaggatgacacaggtagagattagaaaattaagttcaacaggtcggccgcggtggctcacgcctgtaatcccagcactttggaaggccgaggcgggccaaggtcaagagatcgagaccatcctggccaacatggtgaaaccccgtttctactaaaaatacaaaaattagctgggcgtggtggttcgctcctatagtcccagctactcgggaggctgaggcaggagaatcgtttgaacccgggggcagaggttgcagtgagccaagatcgcgccactgcaccccagcctggcgacagagcaagactctgtctcaaaagaaaaaaaattaagttcaacaaatgctagctgttatgagtactgttgaatgtgctacagagaaccattccattagcccagaagggcttcctcgctccacaaagtgactcaagtttctctctcccaatctctctctctctctctcaatcaaatatttgttaagcttagtctaggtagcaggagagatctggattgctaacaatatctgcctccgtggcctgtttgctttggttaaatcaaattaggcgatctgtgaggggatggtaaactgcacagatgacaggaattgtttccctgagccaggccctgtcctcagggagctcatagacaagtcgaagctttcacaggtagccactggcagaaaaagcatacgggtaagtctcgcaagaatggtattggatgagtattacagaaattcaa

SEQ ID NO: 33049 - DNA, 572 bp, Homo sapiens
caaatacacaccactggcagcagtgtatgagaatgctataataaaggctttgggccaagttgacaattatgagcaaaaaaaaaaaaaaaaaaaaacaaaatcaagaagataagtgtttgctaaaggctcaccctacgccagctgtgtttatttgttgaactctatcaccatgttccttggcccaaacactgaaggtcctttagattcttagtttatttagtgcctctttcaacactctagtactttgaccccagtcttatctgaaggaaagaggatttctggtaaatagtttccaatttggaaactcaacccaagcacttccatccctcatcccagtgtggaccacctctgtggttttaactgctggggatgagtcagaaagtgatgctggctgagttggaactgagaactgtaatgcttataagaaataatagagaaggtttgaggtgaaaaagtcatgttccgaggtacaaaggaaaaaccaataacaacccagagtttggagtttcattctgccctgctctgataatatcactatggtgatgttctccataaacaattgcaaaatagca

SEQ ID NO: 33050 - DNA, 2467 bp, Homo sapiens
gccactgcgctggctcccatatactttaaatcatctctaggttacttataatacctaatacaatgtaaatcctaggtaaatagttgtactgtattttaaattttgcattattttttatttgattcaaaaatgtttctggtccatggttggttaaatccatggatgcaaaacccacagatacagagggcaccctgtgtatgtatgtgtatgtgtgtgtgtgtgtgggtgggtgtgtaaatatatacatggataggaggcctgaggtagacgttttacctggagatataatttggcagtgtttgcaattactcagggagagtctgtacagtgaaaagagaattgatggaagcttgcgaaccaacagtccttaaacagctggcagagaaaaggcagccctggaggaaaccaacagacaacagcagatggggagaagaggaaagagtggcgttaccgggagtgaaacgaatagaggagccagggaggatcagagggagggaaaattgtgtggaatgcggtacagaggtcagaaaagagtccatttgatttggcggtaggtaatctttcccagagcagtttcggtgttagtggttcaggcgggaattccaatgcaagaaaccagtgaacgaatgagagagtgagtagggaaagtgaaggtgagtacgttaatgaatgaataaatcaagtctgtaccctctcttgcccgggggatttccagggccaatgtcgcactttggtgaggaggaaaggcctggtcacggcttggggtgacgcctaggaaactgtcagcctcgcaaacccataggcgcagccccaaggtcagggtcacctcgagcctccagacaactcgtcaccttgacgaccaactgaaaaaaccggaagggatggaagcagcggatcatctcgcgatatctggagcgtctgcgcctgccttcctgacctgggacttgtttccagctctcgcgagactttcaggggtcggagcgcgggggccggccgagaggaaagctggaggcgcgggtggggaacatgtctgagtcggagctcggcaggaagtgggaccggtgtctggcggatgcggtcgtgaagataggtaaggggcttttcgccccagcaggcccggccggtgcagagctgctggctccaggctgcgctgcccaggaggaaggaagggaagccccacgggaggtcaggcctctcggccttttccggcccctccggccagggcgagccgcccgggccccggcgggaggtcactcgggcggcgggcacagacccgaggagccggagcagcagcccgggtgcggggtggagttgcagcccggaggaggtggtcggggttggcaggtggcaggagagtcgcagagctcttgagtggaagacagtgtcggggcacaccctcgtgccggagccgcggggttctcctcccgggtggtgcattccccggcacgcggcggggaaccggctcaggaggccacgctgctccccggcggaaaccaaagtgccttctggagaaggtcacctggagcatttcatagacaccgccaggccctgatgcgagttgctgtcattcccgacttgccacctgatttatttgaatcagagtagtctggggcctgaacttagaggggtgatgatctggaatgagaattgcgctggaaagtaagaagttgttcacgttaagtttttctgcgtagtcctttaacacgtgctcagtgacggcacaaattatgaagtcactgtatggtggggaggagaaaggaaactcgtttattgagcgtatattgtcttcattgtgcgaaataatctttttacaggccgtgaaatggagagtcaggtgaaggaatttgcccacggtcacagctaacaaatggcaaaattagggattttacccagcttttctggggtcaagtcccatgttccttcttcgatgctaatttttgttacccaaatgtgatatttttgtgtggtaatcttagggtatttaagaggatttaggattgtgtctttgaatgaaaacattgaggaataagattgtaagctccatgagagcagggatgttttctggtttagtcactgccccatccccagcccctaaaagagtgcttaataaaaattgttgagagtgagtcaataaatgaaacagtttataagttaccatttcacctctgaattcagcacttacagtcaagtgatttggggcaagttatttaacttttctgtgcctgattcctatttggaaatcggcagtaataattattactatctcatggagtcgttgggaggattaaatgagttagtttgtttaaaggcttgaatatggatcacttaggaatgggttattttggaagcgactaaacagtcacttttgttttgttactgttaacagcttgcagttcagagagaagacttaacacctagctatgaaatgaccaaagtagttactaggcaatgtcatatagttaagaaa

SEQ ID NO: 33051 - DNA, 825 bp, Homo sapiens
gctaaattaataacttcactaatttacacctcttttttggggccattgtgaaacattgataaaaatgtatggttattatagtcattagtatgatgcacgttgaatatttattgaaccctaagtaaatgtatttaagaggatggggagctttatcttctcttaataattccctattgggattttcccttttttgctcactaggaagaatgtggccattagccttcggttctggcatgggattaggaatggcttattccaactgtcagcatgatttccaggctccatatcttctacatggaaaatatgtcaaagtatgtacagaatatatatttctctttccttcagaagaaaaagatttctcctgagccctgaagaattctttagactgtttgtaatgagtaaaccatgtgtgtcattgtggcaccactctcagatactaattgctctttggccttcagtgatgtcatcactgctttggtgctaaagtctcccctgtgccttcagatgcgtatgtacgttcagatatatactcatgtgctagccgattggaattaaggagcctgcttgaatgtttatcatcaatggtaaggtagattgtgttaactatctgtaagtagcacttttcatttaagagctcagagtgccctgtaaacatctcacatatacttaagctaaacccaaagacttccgggactcagccatgattctgctttttattaatttgtttcatttttttgagacggagtcttgctttgtcgcccaggcaggagtgcagtggtgccatcttggctcactgcaaccgggttcaagtgattctcctgcctc

SEQ ID NO: 33052 - DNA, 2013 bp, Homo sapiens
accctgcctacctggacttcacatctaatgtgaggctggagagcggacacaaaatgacaagttctgacatctacacaacactcaccacagttccctgtgcacagtaggtcctcaggttggaattcagaggacatttactgagtgtacccaaactggggccaggaattctcacattcgttatgtcatccccccatgatcctttgagataagtgtacaaagctcatatcctttgaggaagctgaggcccagagaggttaagtgactagcccaaggtccgacagccagtcagtggcaaagctaggagccaaatccaggtctgcctaatatcaaaacccaaaatctcagctatgggccatgaggatccaggggtgggagcagcgagcaggaaagatgctggaaggaagctgctttgggaaccatcccccaaaaggctgtagtgcaggaacttcccagtgtcacacaaaccagccctgtcaccaagaagccacctgcctccctcttccctctttccagtttccagcctcacattctggggacagctgagagtcgacctcacttccggttaccacagccaaatggttcatggtaattaattcaatttgtttggcaggggaattaaagtcttgcctgtactaacgatcttaagttaacatagcatttatgctaactggaggcagagacatgccctctgaatgaagaattggttctattaataagactacatctctctaggtaacgagcctggcagatagacggtttgctgccagagagggaaagatgacaaggaaagaagcaaaatgatgacagcagagaggatggcaacttttcaaaggcttccctgggaaaagtagatttggagagcagggaggagtctgcattggccgacaaccagcaccgatggccagatacacgaatgaggtcaacttggacctcctgggtgttccagctctgactacaactgcatgactaagcccaggcaggagaggcaaatggtcttgccaactcatagaatcgtgagaaatgatcagttattgctgcttttggccaccgtgtttggagaggccgttttgcagcaacaaataacaatcatggtggagggcaaaggagaagtaaaggcacgtcgtacatggtggcaggcaagagaacgcgtgcaggggaactgccctttataaaaccatcagctctcatgagacttattcactatcatggaaacagcatggggaaaacccacccccctgattcaattacctcccaccgggtccctcccatgacccatgtggattgtgggagccacaattcaagatgagatttgggtgaggacacaaccaaatcatattaagctccaatccttctctcccatccaccctccactcccaggttcaacaatttctctctgagttcctcctcttgccttcagagtcctgccgctgctaccttccactgagaggaggtgagcccatgttccaggagcagtgaaccactccaagtgccccaggctcggcaactcactctcccaaccagcccctccacaggcagcccctgctgacagatctgtccaaaaccagcattctgccctggagacctcacctacccaaggccaggagcagcagccctcaagcttttcactgccttgcacagaaaggatgacactggaggcatgacacactcccaaaggtgtctgtgtgtggttgaatggtgaacccccagaagatatgtccacccagaacctgtgaatgcgacctcatctggtaaaagggtcgttgcagatataattaagtaaatgatcttgacatgggatcaccctggatgagagtgggccctaaatccaatgactctgtctgtccttatgagagaagacaacaggcagagactggaatgacatgtctacaagccaaggaatgctaaggactgctggcagccacaagaagttggaagagacaggaaaaatcctccactagagccttcagagggaaagtgcacctgccaacaccttaattttgaatttcttgtccc

SEQ ID NO: 33053 - DNA, 680 bp, Homo sapiens
tttctctctgataataagatttccaaataataactgagaggttccttaatttcaaggcatataagatcctataaattcccgacatatccaaagaacctaggatgccctcgtgattatggtaattggcatggatccaggtatttctatactgacacaactctgggagtcaaagctagtatgtctacaggttatttcaacaaaccaagtttccccctttctcaaggaaataccccttttctttgctccactaaccgtggcatgagggtggctctgggtctcaatttggctttaggattaaattcccaggtgggctgacctcgggtaacctggctggtcaaagaacaccacggcagctaaaaaaaacccagacctgggagacgtgcctggtgccaggagcctgggattaggctgtgactgaaattgatttattgctctgggattagatcctgtgtaaagcgttctgcaaagagctgagcaccggccaggttaccagaattatttccttctacacattcttgaccatatatagacagcaaagcaactctacaactgatgggtccgggacacgtcggggaaggggaggattcacatctaccaagcacttgctgtgtgccagccctgggccgggcattttataatgcgcagacattcattcttcctaatgatcctgggagggcact

SEQ ID NO: 33054 - DNA, 1935 bp, Homo sapiens
ctacttcgagttaggtagtagtctgggattctagcctggccctgctcctaattcccagtgcaaccccagggaagggccaggcagcctggtcagggcaaaggcattgtggaggccaactctgtgcgaagcactgggtcaggctctccaggcaggtagcccaggtttttatctcttgcttcctagctgtgtggtcttggggaagttacctcacctctctgagcctcagtttacccagctgtaaaatccactcaaaagtcagcagcagtaattcttccctcctgtaacttcaggcatgggcaccagaagacatggcctccttgtaacatgaggagcctggtttttctccagaggctccccaagccctcctggaattctctgtttgagagtctgcggggggacagggagacaggaggcgggggagtcctagaggccttcctgacgggggcgtggaggggccacgtggggcaaggggaagcacagggacctcttgtgaccttgggcaagcccccttcctctctgaccttgaccagcgtcctcatttgtcaagggagcggctgggtgacctctaagaactcggaggccgaggccggagtcgcccgagtgctccgcccagcctcagtttccccctctgcctccccaagatttctaaaagcacttccggctctgaaaacaaaccaaccaccagcaggcggcctgggcttagggcaggcagcgccagggagcgcgcggccgcttcctggtgggtccagtgtccccggggtggagggcggggcgcagggcaaagggccccggggctgggccgggctccgagtgccccgcgtggggccggcggggagtggcccagcgaggtgcgcgccaccgtggcctggcggctcctccggggcccccttacctggaggcggctgcgaaggcaaaggcggaggcggcaaaaccggcgagcggctcctcccgcccggcccggcccggcccctcccctccccgccgcgtcccggccccggtcccggcccgtcccgccgcctgccccgagcgcgcctggtcgccaccggccgggcggagcacttagggagcgcggcgcgggggcgcggggccttccaggctctgactcgccagctgcgggtcccgacctggctcgtcccacctctgccccacctccaccacccatcgcgacaggggtgccggcctctgcaggtgaccggcaagcccgcggcgccacatctgtgtgtgggtccatttaccctccaggaagcagcgagacagcgcggcgcgggagaagggccctgcagggttggactttgcagaaactgcccgcgaaggactcggccccgagagtggcatgccccaaagccacattttgaagacaaagtcttcaaaaatgtataatgtaaacaaagaaccagccgcagaaaccgccttcccgcacgtgtatgcagcactttgtagtttgcaaagtgttcagatatctaagttcttcctgattctactttcattttccctaacgctaagtttggtcctgtctcagggcctctgcctggaggctcccgtgcctgggactctctgccttcagacctccctttcccccaatccatttcctgctttccattctggtctcttgggatgggatctgagagtcttccctgagcacccagcacattcagtcattgaacaaatttaccgagcacctactacgcgccaggtacagttctttttttttttttttttttttttttgagataagagtctcgctctgtcacccaggctggagtgcactggcccgatctcagctcactgcaacctccgcctcccggatttaagcgattctcctgcctcaggctccctggtagctggtactacaggcgtgtgctaccacacccggctaatttttgtatttttagtagagacggggttttgctatgttggccaggctggtctcgaact

SEQ ID NO: 33055 - DNA, 1701 bp, Homo sapiens
tcccggcacaccagacactccaggtcacattctgtggagccagaatgacccccagcaggggccacagcggtggtggttgtggtggctcctgcggagatgggctgggactgttgcagggtcttggtgcaggccattctgggcacagggaccggtgggacactgtcgctcagcacctgggcattggcagagagtgtcagctggcgccgctgggacttggatggaatctgcccctccttttcactctggccaggtgcctgttgacaacagctgtctgacactcctctctcccagagctgcccagcttgtttcttggcttacgtcgtcccttcagttattattatttattttctcaaaacctagggttaatcagtaacttgcgggtctggagactttgaattgcctgataggagggcaaagtgggcaagggtctagtgaatcaggactttcctgttggggccaggtacctggtgggtgcccacagaactgtggctcaagctttaggaggcagcagaatccaactctctcacccccacttcccaggtccctgaaccttttattaattttttttatttaacttttttttttttttttgagacggagtctcgttctctcaggttggagtgcagtggcccgatcttggctcactggcatctacaaatctgcacaataaacagacagccctatgagtcggacataggtggattggtggacactgctttctcagacacaaacttttggatgtcaggatgagtggaaaaaagtttgtttgcacttggagcacatttacaggcaggtggccttggaaagaggaggggagaggtaagaaaagtgagtggaaggaggacaaagcccaacccaacgcagaaaaacaaaaccacatacagcgcacaggtgtttggcacctgctactgtattcatttccttagagccacagctgttgtattcacagttacgggtgtatgaacttcccatcggtgccctgctgcacacttcacatgcctaatcacaggtgtcctgttttgtgctaggcatgctgcgtatccagtagtactaagaacagctgccatttatttgggcctactctaagccaagccctgtgcccggggtccccagcccccatttcccggaaccctgatacagccttgtagggaaggctgggaaacaagggcagggtgtggtcagggtaggctgctggctgcctgccaaggggccttccatggagcaggaccttgtggaatctaccagcgtccaaggtctggttgaatcaatttcattggttcatttggacacaactggccccagccgggtggcgtaggctaagaggactcatgtgagacaggcagatattagtaacacagcagttaggaaaacgtgatttccttactttgccctcaagggcaaatggcggggtggcatgtgcactccctcaaacaaatgtttcattcaggccactctgaactcagaagcccgtgtgaaggatcctttggtgctcatgtcacctgccaagggccacacagagtcctgtgcctctgattcagctctttcccttaccccagtagctggcactgcaggccaccctctgtgtcctggagtcaccagccccaaaggggctccctcccttgtgggatcggtaactcccacctccccactccccctgggccctctatctctgaaatccaatactctcaccatcccatccca

SEQ ID NO: 33056 - DNA, 1247 bp, Homo sapiens
gtttcctgtaatttggggataattaaacaagaatgagccgtgtgaaagtgcctatccaactgtagtaggctcgcagcaagagtttaaatcgtttttattcatctccggtcctaacttttgccgctgctctgtgttccactcttctatcatctttaatttctctgcttgacttgttcctgctttgttctctctggtccctctccggtcgctcctgccactcacgttgagtaccatccaccactagagggcggaatagaacaaaccaagatgggtgcccctccagctctctatggcgtctgctcgccgagccccgcaaaagaggcggggattccatcatgtgaccggggtgctgggcgccggcgcaggcgcggttgctgcgtagtcgtcgccgggctccgttgcccgcgctgttttaccttcccaacgcttgaggcggacgctggggggtcctgcgcctttccctcctgccgctggggactgcaggctaaggccatgtcccgaaagcaggcggcgaagagccggccgggcagcggcagccggaaagccgaggccgagcgcaagcgggacgagcgggcggcgcgccgggccctggccaaggagcggcggaatcggccggagtctggcggcggcggcggctgcgaggaggagttcgtcagcttcgccaaccagctgcaggccctggggctgaagctgcgggaggtgccgggggacgggtgaggcgggccgggagcgagggaggcggcgccgggggacgcgccgggctcggcctggcgaccgttgcccgctcgcgtccatccatccattcattcgggcggcccgggcgcctcccgcgagccagccacgctccgagtgcagggcgtccagctgcgagtgaggcggacaagcccctcgccccgagacgctcgcggggatcccaaagggtcctaatcatggcagacgccgcgagcgaaatagaaagtgggtgctgagaccgtatatgggagcagggccactggattgtggccaggaagggctctctcaaaggtgacatttaagctgagttctgaaggaatgagatggagccaggcattggaaaaacagttatcatgacgataagaccagttgaaggagtttgagtaagccccacttggtagaacgctttgcctcctttgagtccttggtttttgggtggtgcccccatttacatttgtgaaattaggtcgcctgtttactgagctgaaggcagcttctctaattcttccttccat

SEQ ID NO: 33057 - DNA, 545 bp, Homo sapiens
tcgtagatcattttgtactttgctatttttacccaacagtatatctaggaaatcacttcatataagcagatagagatcttctttctttaaaaaaaaaaatgtttaatttttttcctcctaactcagggaagtctttcctggtggcttccctgacagggtcaaagcccctcttgcatttctatagtcctccattgtgggaatgtactgtaattttcccaaccattctccgagaataggcatttaggttttttctagtgtttcacaattacaaatattgattcagtcagcaacctgtgcatgtgtattttcataacattggagatgtatcttctggacagattcctagaagtaggattactgggtcaaaaggtaagtgcatgtgtaattttgttaggtaatgtcaaattcttctacagaatggttgaactagctcacattctcactactaatgtttgagactgtcttttcctccatggcctcagcaacagaatgctctgttagacttttcattttgcgttcattcttcttacagttttaaaaatatc

SEQ ID NO: 33058 - DNA, 3626 bp, Homo sapiens
cgcgcctggcccagagcggctgtttctcatgctccctaaagctgtgggcttccctggggacatcagccggtacccctgtgttatatggggaagctttcacaggcgaccctgcaagaagagggattcctcaactcaatattttaaaagtttgaaaatccctggacaagctcaccccacgggttcgttcacccagcagccctgcatgagagtcccctgtgtgccagctgtggtgctgggcttccagcctctgcccgcccccaccctcccgagaagcctgcagcccaggcgggaggcagacgctgagctcttaaccttgacacgcggtgccaagtggtgtggccgggagcacaggggtgaggacccaggtctgtgtggcagtcccaaaggtgccaaaaggggatggatgcagctggggtggtgcagctggggtctccctggcgtggagaggaggagcagggggtcacattttgtgaggagggggcccttctaccgcctggggatctcctcccctggggacccatgaagactccatccgggggactgaggtcttccacgctaaagcgtgaggacggcgctgttagtgctcctccctgtcctggggctgccatctctgcccagacctaggtccgcctaccccctcgggacacccatgcccctcccggctcctttccgggttcctcggacctgtggggcgtcgctgacagcttttccagaacgcgggcgacacctagtggacatcacgggtcacaaccggtgctccactgcacccctcccgcccctctgccctggacccagagtggaattctgttgagggcctgccccaggcccacagtgtccaggagagcacaggaagccgtcagtatggcctccaccatcctctcattgttgtcatcaccgcctctcgagaagcgctgcccttaaagcaaacagcacaggctgggtggcaccctggccctgtccctagcgggcagtgtagatgtggcaagtcgcttcacccctctcagcctcagtttcccccttctgtaaaatgtggttgataatgaagcacaccccatagggtttgaggatgacatgagctcagggatgagaatgcccctagcatagggcctggcgtggagaagggaaattttctagagtgggtgactggtgccctgggcaaaagaccttcaggtcggggtggcagacagcggcaggtagaagaaggtgttgctgatggaagtggactgcctgtgatattcttccccaaacagaaaactggcagaagcaaagctgttatttagcaagacaatctggctccctgcctgtgagtgtgagggggaaagggagcgggtgggaggaggaggagggagaggatgtagaaaggaagggtctgtggacccttgctgtccctaagccatagccaggcacccggggccttgactgaccctgcccccagctgggcctgagagccgccacttcctcggcccggccctgactatgaatgcagagaggcagcccttcctccagaggctgccgcagtaacactagctgttggcttccctagttgtggcttcctgacaagcagctgatgccacccactgtgacaacaaggaaagttctggagaaaaacaccaaggctcctagcaacaggagacaggggtgcacaattaaaaaaaaaaaaaaaaaagacatattgggccaggcgcggtggctcactgctgtaatcccagcactttgggaggctgaggcgggcggatcatgaggtcaggagatcaagaccaccctggctaatacggtgaatccctgtctctactaaacaaaatacaaaaaaaaaaaaaaattagccggacatggtgggggggcgcctgtagtcccagctactcgggaggctgaggcaggagaatggcatgaacctgggaggcggagcttgcagtgagccgagattgcgccactgcactccggcctgggtgacaaaacgagcctccgtctgagaaaaaaaaaaaaaaaaaaaaagacacattgccctgccaaagtcaacccccctaaaacacccatgctctgccaaggaagggggtctgtgatctcaggatgtcagggcccaagtaagaaaagcagagtgcatcgatcactgtgcccagagctctgtgtgtcctctcatttaaccctctcagcagccctaggaggtgggtgaggagagaggccatttctcttactgtctcctgtctctgaagagaaggaggaagtaaaagttgaaaaacaacaggaatgaagtcagtggcaagaccagccagtgccactgatgaccaggcctgaggttaaaagtttaaccacctccccccaaccccgccactctaaccacatgtgctctcaatctaccacgaccatttcacgtggaaccccttagaggtgtaagcccttaaaacggccaggaactctgtcttcggggagctctgttcttgagacgcgagtctgccgaaactcccaggcgaataaagccaaatccttccttaacctggtgtctgaggggttttgtccacggctcatcctgctacctttcttagttccctgaccgggaaatcgggtgactgatggacggtggaggcagccccttaggcagtttaggcctgccctgtgaagtatccctgtgggcggctctggccagcttgagtgacgcagatcctgagagcgctcctgggtaggtatttgccccggtgggatgccttatcagagtggtgcatggcaggcccccgtggaggatcaacgcagtggctgaacactgggaaggaactggcacttggagtctggacaactggaatacggtaggaccggtcctgggaatttccccactccgtttgagtggaagcgtagcctgatcacccaccgtgtgcccttatcggcacttgggtctcagcattgattttgatttggtttgacttgtttgcaatcggcactttggtctcagtattgattttgatttggcttgacttgtttgcaaaaaggaaagtgaaagtgagtgcttgagtttgagacaggcgagactagagtgacccctttaccctttccttcttgtagtgtgagtgttgttttgtctcgggaggaaggtgggtggaacgcaaagtaagcccactcttctaggaactatgttgaaaaatttcaaggaaggatttggtggagactatggagttaactatgacactaggaaagcttagaactttgtgtgagatagactgagcagcattagaagtgggttggccaacagaaggaagcctagacaggtcccttgtttcaaaggtgtggcacaaggtaactggtaaaggatacctagaccagtttccatacatagacacttggttacagctggttttagacccccccacagtggttaagaggataggcagtagtaatactagtggcaaagggacaaacagccaaggaagaatcctggtccacctgccgagggaatcaactcctaaagtcctgtccgacccaacatcagaggattcatggcaagaaacagcaccagtgacctcccccttttaccaagaaggaaggccttccattcctgagcccactgcacccaagcttccacaaggcctatatacccctaggccatcaagagtagaaaagaaaggatgtgaggcctcggg

SEQ ID NO: 33059 - DNA, 1540 bp, Homo sapiens
aagtaagcattgtgtggacaaggcaggggattccgagacaggcaagttcctgccttcaaggagctcataacctactgaaggagatgtacactgtaagtgaagatgatgcaacaagagttagtagccctcactaagcacttggcacgtgtgttacctcatttcagccgcacaacaatcctgtgcttatcatcaccattctagagatgcggaaactgacatccagcgaaggtaaatcatttacctaacgtcttcagctggcaagtggtggagccaggattgatactcaagctttgacgtcagaggccatgcctgcagtccccacgaccagtgcaacggacagcacagataagggccatgggggaacacgcaggtgaggagcttgggggtgggactctggggtccagggtgggctttggaaactgctggatgcaggttgtaaaattgctctgctgctccttcaccagggggaaccctgaggctccactgttttctaaagcaaaggagggctatgatgcctccattaaggagcgttgtgaagatgaagggagccgacctagggagggtgcacagcaccatcttgggcatgttccactggaccaaaggcgaccagagagagcacatgagcttttgtggggaggctgtggtcaggaaagggcttcacggaagaggtggcttttaagatgggccttgaaggatcagtcattttggcttaacttcaaggaagagagcagggtggggcaggcatgggcaaagacactggagatgaaaaagctggggcccatctggggagcaagctggctgcagcccagggagagagctggagagtagattgggacatggctagaaaggaaggtgagtccacatttcagctggcagggcaatgacctctgcccatgtttactgagatccactctgggtatgtgccagacaccaggcattatcaggtctgtcctttgaagacatcctctttatagaaggtcgggcacaaaggcagcagaggcacagcaatggactggcgccttcctttcctcctctcctgcctccccctggggctgggcattacacaacactggagagcaaaaggcaggtactgctgacgttaactgcatgtactgctgacattaaacagaccgccatttcactgtgcactggcaaaggcgcgcgtgcgtgcgcacacgcacacacacacacacacacacacacacacacggtgagaagccaatttgattctccaaaggattgtataattcttaggtgattttaaaatagctgatgaagaatccactttaatcttttttgggtgggtgatgaagggctgaagagcatcgctaagacacttttgacagaatcattaacaagaaataagccgtcagcactcagttgcaaaaccagcagctcctaaaaccaccatcttttacacattccgagggccacagaggcttcctggatgaccagagtgtgtgagggggcaacccaaagaagaggcctggcccagaccaggccctccccagcaactcccacgggtcacagacttcccttc

SEQ ID NO: 33060 - DNA, 1307 bp, Homo sapiens
agattgtggctggggacatcaaaggaggtgcagatgctgttgataaggttcccagtgtggccccggagtgggaggctgatgtgaaaagaggtcagggaactggcgctgaaagggctgtactgaggatgggggccctgctccccgcaactcagataccctagaagcatccactcagagtttagggttccgagaatccatcagtcccacagcctcattttaaaaccagggacactgagagggtcagggcctgacccaaggtgagaaacggattttgagactagtggtgctgctccccgctcctccatgccccggccagggctctccctctcccagacactctcccccagagagaaacagaggcggtgacgctaggaagaggaggagagaaggaggccgcgggtccctgtcgcctccaggccaggcaatccactccaggctcgcaatccaccgacctggagttcacggcctccgccctcctggcccagcggcccccacccgaccccacccgaccccacccgacccaggccggttccggtcacgccggaagcacgtggccccccaccctgcggcgttgcccgggagaccagggttgtttaccagcaggacagagcccgggcgcaggcggcggatggagcggaacggctaggtgagagcggctgcccgatcccgcggcctgcccttggcctccgccaggcctggaaggggccgggggaggccagtccccgagaccccagcacatcacccgggagggcctccccagacccagcccgggggacgcaaaccccgggagacaggcgaggagcctggagaaaagtctgctcccgaggcaaagcaagcctggccagagctcacctttaccaaaatagggtgactcccgggctctgcagaaaccgagggacctatgcaaccgctgggccatgccctccaggctgggatgtagcgacggggacacagacccagggagagaaaaggatgtcccagtctccggcagggcagagacgagaaccagagggcccctcccccagtcctgtgctctttctctgaagtcaattctcgctttctaaacgctctttctcgcccctcccccagatccctcctctgcctcttaagcctgttgccttctagggcgctggaacttggacttaattgagttatccccaccacctccctgcccttctgacgctggaatcatccccagttctctatccaaacatttgatcacttggtggcttgtggttcagtgtggcactctgcataggacagtgtattctaatccctagtttggggtagaactgggaatggtacca

SEQ ID NO: 33061 - DNA, 497 bp, Homo sapiens
gttggcttggaaaactgaactgtctatgagtctacatctcaacaggctcccgggcactgaaacaaagcccagttgtaaccaagtgcgttggaggagaagcattttggagggcaggacagtgaccctggagaggggatagaaccaggtggagcaggccctggagaggggccagctctctgtgtaggggcagcttggggcaaacctggggcaaaccaggccatgtgatgctgcactgtgactcaggcacccgagggtttgtcaagtcttggccagttcaggacattccagtccacaaaggtccctgagtcagattccctaggctagaagagaaaagggcattcaaagtttcccttactcaaatcaacctcttaaaaaatgaaatcaaagcattgagtttaaaggttaactgcgcacccttcatactcacgtatacagcctgaaactctgccagcaaccttcggtttaaggcaagatgggcttggtccttcctgctggga

SEQ ID NO: 33062 - DNA, 711 bp, Homo sapiens
ttcgacatcagcccccagcatatgttcacctccacctcagcagagctctgaaatgccactcaaccgaaattagctttttcaccttctggtttcctcaccgtggcatggtgccaagactgctgaactgcgcctcaaatgatgaggttctgtagcgtcaaagctgccactggctggctgtgtgacactcaggaaatccatttccttctctggatttgctttggcctcaagctcctttggtatcaaacgagaaaggttgattctcagtccatttcaaggtttctccactaatttaaaaaaaaaaaaaaaaaaaaaagcaactggggcttttttctctcttccactagatggcgctgtgtctccaactgcagccggccaggccgggagcgctcccgagggcatttgttcaggggttccacttggccgagcacagcggaggcgccggaggcggctgctctcccaggacccggccaagagggtgcaatccggctctgcaggttgaatcagggcaaaacaggaaatggccaggagcttaaactgcagagagcaatttggttttaaaagggcaaagcttcggattggacaggccaggcaggttcctgaaggcaggttcctgggctctgaaccccgtacgggcaccccgtttccccaactcaggccaccagaggattctggcgcaggctatgtgctgggtctttcttcatctgcagctca

SEQ ID NO: 33063 - DNA, 1444 bp, Homo sapiens
tgattcctagggctgctgtgagaattaaataagaaaatgtacacggaacacttagcactgtggcacatgacaagaaggctattaagaaaatttaaataatggaaaaaaaatagaataccgatagtgataactgcgcactcatacaatgccttggttgcagaggtcattcccccacattaccttgtggggtttgatcagcagttctggaagcacctagggcaggaatcaccaccccagggtcacagatgagactgctgaggttcccagaggacccaagcagggctgcaggtgccctggctcccaactcagtcagtgctctctggttccggaaaagaattctgggtgaaagcgggagggggtgggaagctccttccccccaggtacccctgaggtctaactctggaactccttggataatgagaaaaggggggcttcggaacccaggacgtgggttccacatcctgcgggggcagggaggccgcgcgggaggccgccagacgcagtaaataattcacacagatgaactggagataagggcggcttcgtggaggatcgagttcaggtcggaggaggctcagacggctggggggacttgtggtctccccggtctgagaggggaaaattcctgggactctggctgccaggaaaacacagtccccaggtgccggcttggtgccactccctgccattggcgggagggagctccccggaactgccccgcggggcaacaggcctggccagccgcctccgcccagccgtccccatggcaaccggctggcctggtccagggttcacggacaaccggatcctctgtctcccctcccccacgggaggctgggcgtcttagactcccaactgtgttctctgggagcttccagctgcaggaacctacagaatcatcctgtctgaccccctcgttttatgggagtagttgagaccacggactctggggacctgcccgtcctggttgcaagccccgctccaccatttcctgctgtaggatcctaggcaggggacttggccaccctgtgcctcggtgttcattatctgtaaaatggggatgataataagtgactgtcttatagggttgtgaaaattgaatggactaaatgcaaagagggcagagtggttactggtctgtagccagcactgaggaagcattattttccatgttgggaaggtgacggtcacacagcatgctattagcagatttgggattggaatgcagttgccaattcttcctaaaacacccagggtggccacattgggattctccaagggttacctgtgcttcctgcgggcccacccaacccccctctctaacctcttgacagtcacagtcattgaattgtctttgaccaggcagtaaaatccctgaaccagaaaaggtcttgctctagccagcccggtctccccagtgccaagcacaaacccgtttcctgca

SEQ ID NO: 33064 - DNA, 1302 bp, Homo sapiens
taattaattagttcatctcctctacccaaacaccctcccagagcaagctcctgaagcccctggccacccagctctctctcttacaggacaccccttacgctgaccacttcctgccatcagcccccaccccaccccactgccatcaccatgctgttcacagttcccatggcacattgcctgggtcctcctcctcccttcagcctgccctccctcacttccctccccggttagtgaccctttgtcctcaaaatggctgttttggggtcaaggaccctcctccaggtccagaggtgtacatttcccctgggttaaggaaaaaccctccaatgtgagaggcaacaaagtaaaccgtcctcatcccccatcctgggggagacaaatgggggcctggtactgccacgatgggtgtaggggtaatccagcggctttctgggactctccatcccactagggaggtggcaggggcttttggacgcagaatctctgcccttaggggccaccccacaagctccagcccagctgccaggtttcctcggatacggcccagtcgcctctgatttatttttgcatgtggtttgggagaatctctgttgctggaataacgacaacctttttttttctctctctcttttccttccctccaataggcagactttataaaccagagcagctgcctgaaggtttccaagaaaaaaattctgcacagtttctaaccagggtgacagttcccctccacaggaagttacttttattaatttttttatctcttcttttgtaagactatatactggtcatcaggcagcacctgtgggcattttcttatttccccccactgctcccatttgcctggaattcattattaaatctaactcatagtggccttgcccaacacaggggcgaagttcaaactactgaaaaatgggtcactcaaatcgcctgtgcagaagaatcccaaataatttatggagatactcctccctcaaggcggtgaaacataaatccctgtccctgaagtgtgggctgtgcataatgatttccttctatggagtatagtatggaaagcagggggaaagagtaatcttgcaggagagaaacctgacaagcactagctcagccagatggccaaggtcaacatcagcagcgatcagtcgtgtctatagcatggacacttgatatgatgtgatggaaacagcacatcacccccaaacccataaccacagttgaaccatgagaaaaacagcagacagaccccacctgagggacagtctacaaattacctgaccaacagtccatcaaaagcaa

SEQ ID NO: 33065 - DNA, 2617 bp, Homo sapiens
ttcctggcacatggtagtcacttcatatatgttaatattgatggatgccatttattatgcaccaggccctgtgcagggagaagggaggagtttccatctaatgatgtgtgagaattgtcattatccctattttatagaagacaaaacagaggcccaaagaacttgagaaatgcccaagtcacagctagaaagtataggagatttcaaatccaaaacatctgtgtcccaaacccatgtaccagccaccctaatgtctgacccctccctctaggccagagcttcccaccaggcccccagaccctgggagtcccctccctgctctctgcagaggcaccccttactcatcccttcatctgtctcctccagacagcagtgattttcaagtctctctcttttaaaacttaatttgccaatttcccccttagaggtgctttttgatattccttcaggctgtcagcctggacaggccacgcaagcagaatccagggagatggatgcttattacaaccattcaattaattaagtttgaataatgcagcgctggcatgctcccatcgatcagtggaggcctatagacctcccccaccttggacttttaatagccttttccatatttattgctacctaaccggacacttcaagcatatcctgcacttggtataatttgatatctgcccggtccccaaagtgccctctcaacaaatgtttacctgatgctatagtgtatttaaaagatttatattcctttttgctgaatggagtccttcggaaaggaggactgtcttcccaagcagaggatccggcattcgctggcggggtggcctccagcaggaatgttttaatacatcacttattaaaatggacctggagccttggccgagggctcccatactccctgcttcccaacagaggacagccttaggccttagctgaccacttccaagccctgccccccttctaaacccttacacaatgactatcagagccgacagggcctcaaaccaacaaaccaacaaaggacctttaaggctgaaggacagtgactgcagctgggactgagcctggtcctggggtcagatgaccctgcatccccctcctgaagggtggaccctgggtttcagtcctggctcagtgacttactagctgagtcaccttatacaagttacttcacccttctgagccccggtttctcctgtacaatcaggataataatagtgcctatttcacagggttttgtgagcctggtatacagtaagagctcaattaatgcagaggctgtgcgatccttttggcctctctggggcctcgatttccttacctactgaagagagcaactcatgggtttctaggggtgctgggatgattgcataggaaaacaggagagaaaacaccttgtaattacacagtgctttgatcacgtcagtggcaattactcctgggtgtggacacaaatcgtgtcttctgaaagaatcttttcacatggcttctgcccctcggcagattgatgccttgtccccctcagcctatcagcgggaatgccaggggatggctgagctccatggtgcccatcagctcccaggtgctgggagtccccgggtaagcagggaggagagcaggttctggaggagggtcaggtgcctgggaaaatcaatctggcattcccactcctgttggccccgccagccccagcttgctcaccattcccaataataactgcttgcatggagagctctctgctgggacctcctgagcccttgggcctccactgcctgggaaggaggttgagacatcacccactctgggccctctggagcccctcttcctcctgcctgcccccctcccctagcctctcacctgaagtctgagtcactcttaggctcctgtcactgtgagctgtgttgtgacgcctggctgacagctttaccacaaacacattaaaagctcccagcacttctgggtgtgtaatagcccaggagaaaaaaaaaaactctcccagtctttcttcagccaaaatcctcctcccaaaccctcctcccccaggggcctgctccacgacctttgactgccccaagcctaacaaggggctaagatttgtcttcctatcaagcccttctaactgatgattagagaaaggctgataagtgcaggtgcctgagacctctcaggccgtgcacccccaggagcagcgcatcccttgacctgtgagccccggaaggtgaagatgaagacagaatgcaactcatctgcagccccgcctctgaggacagggggcccctggcgaagtatgaaaggtgcgtagagtggcctgatactgagtgttcccatgtgctggcactgtgttcatcctcctaataaccctatgaggcaggggctgagttatcctcactttacagattaggaaattgaggcacttgctcaagtctaaagacctaggaagtcgggtagctgggactcgcatccaactctgccagcctgcaaagtcactcttaacaagactgcctgcttccctgcacagtatccctctttctcccctcaccccaccagagatggcagaaacctcagggatgcagtgagagctcaacctgcaaatccaaaatggaataaattcaccttaggg

SEQ ID NO: 33066 - DNA, 3790 bp, Homo sapiens
ctcccttaactcattgtctttgggggagttagacaccaggaggtgccttgtcggtcatatttttcagcacgtcatcaatcctatcatcttcaataacaactgcaaaaaaaggggggaaaagagaggtgagcgcgctggggcctagccagaggtctctgacatttcccgttatgcccagagtgggaggtcgggagaggagagggcgagggagcagggctcactgcgcggtgaaacagctccatcctccgtccctgccaggggtcccttccctgctttcctctgaaccacccaccaccctctatcctccagcctgcgtcccagctccattctgagaaaaggaaacagagggcgccaacccagccgctcctgctgcagccagggcgcgcactggcccgcgtcctccccgcaccaggcgcactaatttagacagaaatgtctggagctgggataggagagggagccaaagtctttgggtctcgggaccccaggtaagtcccgagcgcagctccggtgggcaaggctaggtgcggagatgagcggaaccaggaggggacgccaaaaccggttcccacgacgcgcagcgggtgggggttagggcctggcctgggcgggcgccccctcctgcgcgccctctcccagccgctggccgactgactcggccgccccgcgctccccgctgccgcagaggtcagagcctcccttcgctgcctgccagggacacatgccgtaacctcggcctctcttaccgtctcgacttagcctcgcctttctcagtccctccatcgtccctcggcgcgacggccggcagccgatcgaggtctctgtctctccctgtctaaggtgtcggtcgcccttattgtttcggcggcttctgcgtcctccccaaacgcgcgtcctcggctctgtctctcccgcttcagctcccctctcgggagctttgtctcggtctctgccaccctcggtctcccgcgtaccccctcccctccatccctgcgtctcagtctctctctgcagccgtcggtccccctcattgtccccgcgtctctggagctcctctcggagcctctctgcgtctccgcctctctggggcttttccagctctcgcgcggatcgcccaggcctggcaaaccccctcccaagccaagtaacaatgaaaagcccgtgcgacccgaacaccctagccttccccgcaggaatgggatcctccccacgcaggtccccacgccgtcccctgggggtccctgggaccccctccccacagggttatggagcgagtgcagctgtgactacactgcgcaaaaggcgggggtggggggcgcaaatcaaaaagcaaactttgccgcgcgggtggagacccccagctgctgctagaagccgccacgcccccagggtgacccagccggggatccggcttagggggacgcgttcctgcgacccgcttcagccggacccgcagtgcgggatcccccaattctgcaagaagggattccgtcaggtctgaacgggctccagcgggtgggagacctccgcaacccttgttcaggccgcggcgcgggaaaaagggggtgtcagacaagggggccgcgaactcaccccgcttgctccggccgatctggcccagcttgggcggccgcttgttctgcccggcgccgaagaagttgttggtgtcctgcaggcggcaggagaagatctggcccacgtcgccgccgtcgccgtaggggctcagcttctcgtcgccgtagggcagcacctccgacatggtcgcgtccgggggctccgccgcggcgcctcctccgcccgcgtccccgcccgcggcggacagggtcagcggcgctggggccgggggcggccggccggggacggcccgcgggctgctgcggcggtggcgccggcgagaggccgggggacgccgctagggcaagagcgcggcactcgcgcgagcggcccggagagcgcccgcggctgcgctgcgctgcgctccggctccgcgcgcgagtggctgctgctccgccagaggcgagcaggactcacatcctcggcgcgctggggctctgggcgggggccgggccgggcggggccgcgagccgggagggaggagacgtccctgcgagcccggagggcgcgggaccgaggagggcgcaccccgggagccgggcgggccggtcctgcggcgagtgcgggcggcggcgccggttcggggaggcagactgggagctgcgagcggcggggctgcgaggggcggagggggaggggagggagagaggagggagggcaccggggaggaaacccggagggagggtgggggagagaaaccgagagggagacggggctgaaaaacagggactgaaagacagggaggcaggggagacggtggaaggagacagaggagagggggagaggaaggagaggaggagaaagaagaaaaggtggggtgggggacgagctagaacggagagacaggggaaagatgagaggaggagggaaaggatcgggagggagaggaagagggtcggagagggaaggaagggagaaaaacagaggggggagagggaggcagggatagaggaggcagcgagctgcgaggagaaatgccggccgcggcgccgaggcgaggcgcggggaggagggcgggaggaggcggggaggaggggacccgcgggcctcggggagagatccctgcgagcggagcgacgtcacggggccgcgccggccggcccgggctgccgctagcttcctgcccccgcccccagcccccgccgtcccgctcacgggtgtttacggggcccggagctggtgcgcgcccgccccgcagccggctttgcctcccgaggggacctcggggggagtgggggttccgggagctggagagggagcggacagacgacgcacacgcggggaagggcggaagcatgctgacccccctggggggcagatgctgcggggcaaagatcggagggctccagggcgacccgcggacatagcctcccccgccatctgcaaaccggggagcccttcctccccaccacacttgctccccaattcagaccctgagggcccagccactggggcctcacactctcctcccgccccggctcagtccgacctggaaggcctcactcccccacgcccccgcccaactgcgctggactccggctcccgcagggcctccaggagggggagggggagagggaaggggcagccccgcctcccgcaggagaagggagcgcctcattacgccgggctcgcccgggatgcctggctcccggcgtccgctgcctccgctggggacgtcccgggtctgccgccctctgccctcgggggtctcccttccagcaacagccgtgcgccctgtggagagactatggcctctgagaggaggagcgggctcctcgatgccgggagggagactggggcagccccagaggcctgggaggcgcatctgccaagcagatggtaactccgagggggcaaggtgcatgaggagcgctcattatcctcgccggagccaacagcacctgccctccgctggagaccgtctttgcttagtagagccggcctgaccacagggaggggcaaccaccccaaggtcatgccagctgctggaggcagggctaggaaacacatccaggtggcccaggtgagtctcacctggctcatcctgctgccctgcaaggggtcccatcaacagtgaaaggagctctcccctcctatctagaactctggcgggtgggagctggaggcagaaggggaaggttttttcctggtataacatctggtggaggggggagtc

SEQ ID NO: 33067 - DNA, 2202 bp, Homo sapiens
gtgagccaagatcgtgccattgcactccagcctgggcaacagagcgagactccgtctcaaaaaaaaaaagaaaaagaaaaagaaaagaaaaggagaggaaagaaaggaaaaaaaattattgttaagaaaaaaataaaatcaagatgaaaatgtggctgggcgcagtggctcacgcctttacatcccaacgcttcggagagccgaggcggggagatcacccgacgtcaggagctggagaccagcctggccaacatggtgaaaccctgtgtctactaaaatacaaaaaagttagctgggcgtggtaatcccagctactcgggaggctgaagcaggagaatcacttgaacccgggaggcaggggctgcagtgagcccagatcccgccactgcactccagcctgggcgacacagcaagactccatctcgaaaaaataaaaaataaaaataaatgcaaatgtgttgtgtaaaccgtaaagcacagttcagaaaaaagcgccatttataaaaatagttgtaatataaaaaggaagcgtctgtaaagcaaggagtggagtggttcagtaaatggatgtctgcacttgctgttccttccatctcccgctagatatctgcatgactcccctcatctcctcctaggctctgctcaaatgtcaccttatttaagataggagatccccctttctccagcattccatgtcctctctcccctaccttactctaaagcattgctcaccatctgttacaccgcctgatttacatgtttgctgtctagtcgtactaaaatggtatctccacgaggggatggactttcatctgttcgactcactgcctggagcatcgcaggtgttcaataaatatttttcgagtaaagtaatgaagtcaagattcattctgagtcataagagggacttgggagaaaaggagcggagcagccgttatcccgagcccgaatcctgcccctcgctcctccatctactggctggatgacacccttcagaggctgtttccttttttggacagtttccgacggtggggcggccaaggtgaatcatgggctccccagcacctgggacagagatgacccggctgaggccaggccggctccagcactgaccttgagctcttgggagacccgggccttctgccggtacacggagtacagggcggcggtgaccacagaggtggtgcccaggaggatgaactggcacagcgagggccgccctccgctctccatgacggcggcgagccccggtggccgactgtggcgccaaggataggcctggtgacccccgactctccacctccttccgaccaggaccgcacccccccggcctaacctgaccggaaactcgaaatcagtcgcccagcgatgacgcacgacgccggaaccggaagcggggcaaggggttgtagagggaaccggaaggtggggttgcccgggtgacaatcaagctgctgcggcctccagggaggtcctgtctccccagccgggtgtcggagagcgattggggagctgagcgaccacccaccgctccatggccgtccccttcgaaacacggcgcactggccatgactgactcgcccatcgccctggtttccgtccctctggtttcctggggttactgggctgtttgatgggttattccatgtcttcgccattagattggcaggaaataaaataattgtgtattaaactcttatgagtaatatacgtttaagtttcagagcaaactctcaagacttggaatttattctggccactttacagatgagaaaagtgaggccatagaggttagggaatgatgtgctcgaagtctagtgagtgctagagaggaattcacccaactccaaagccctcaactctaccccaggagggcagattatatcaccaaagtagccccttaatctgccatcaccacatagaacaacatatttattaaataataattacggctacgcttagtgcctattatgtgtcaggttcgaggcgggggaggttttgcaggcaccatcccactgaaccttcacaacacagctataatgcagattaccgataaagaaactgaggctcaggtaagtaacttgctcaaggttatacagctaaaagcaataggtatggccataaaacccaggggatccttctcagagactgttccctgatctctgtaatgcatctcctttctaaaataatcggagataaccc

SEQ ID NO: 33068 - DNA, 4391 bp, Homo sapiens
agagtgagactgtctcaaaaaagaaaaaggaattctagagccaccactggcacccacgctccatacagctgggtttggaatgagcgctgtcctcacgtatgaccacgtgcaggtaaagagctttgaaggtgccaagggccatgagtagcttgggaggtcatctaggttctcccagcactgtggagtcaaggagtcctgaaggccggtcccaggcctgggcagggctgggtggggcagactgagacagggcaggggacaggaacgggatgacttattgaggtctctgacaggcctggcagaccagcagggcactacaactcttttcccagtagtaattatacttggcctgaaaaagctttagaattattcccacgttgagtgggcacacagtgtcctgagacatccttggccctctgagatccaggaaactgctctagatgccaaagttatagagacagtaggaaagtgcatgggtggagaggccctcagccccagcaggaggcaataggctgcctctctgagggctggatgcagtgggaggggaggggatctgaagggagaggaggcaaggaggaaaggaagcaaactttacccaactcttcagcggcccagctgggtgtctgcgatgtccacatatggctgagagctccaagtctgggacacagagatgccagcatgcaggacacgagatactgccttgttttctcctcctttcccctgcctttccccctgccccttccccattccccatccaaactctcctgctggccaggggtgtggaaacagttggatgtctttggccactctagctggagttctgccctatgtgatcttggctgagtcacttaatgacaataacccagtttgtgtggagtcacaaatggtgttcacatcataacgtcaccagactctccagccacacccattgtacacgcattatctcattcaatcctcatgacaactctggaagtgaaatcatgttagtgcacccattttgcagatgaggacactgaggcttagggagatggtgtgtgaccttcccaatgtcatatgtctaataaatggcaggaatggaattcaaaccatggtttactaaactccaaagctggagcccttctacagtctcaggatctagaacagggattattactatctctgctgttgacatgaggaaactgtggttcagggaggtcaagtgacctgccaaagcttgtacacatggaaagtagtagaaccaggatgcaaacacatttctttaccaccaacaccaatatctattttgccaacaaaacaatgagggggcctgagtaaataatctcaacggttaactccaccctccaattgagatactttttttttttttttttttttttgagacagggtctggctctctgtcacccaggctggaatgcagtggtgcaatctgagctcactgcagcctctgcctcctgggttcaagccatcctcccacctcagcttcccaagtagctaggactacaggcacatgccaccatgcccagctaatttttgtattttttgtagaaacagggttttgccatattgccaaggctgttctcaaactcctgggctcaagcagtcctcctgcctcagcctcctaaagtgagccaccacacccagcagctgagacactttttaattctgggctagggcaaagagaagttggaaggaaaatgggtgaaaataaagaagttctcagttatactgcagcttgttcatgcctcctgcctcgggatgccgcagtggctgccccagccctgccctttcagcctcagcccttccctcagtgaaggagagaaaaagtgatttaacaaagtgaggactgtcagcccttggagcttggacctttgagatctcacactgccccacccagtagcttccccttccagtagcgtggcaccaccttctgacccacccctcagtgtgtccaccagtgagagtggttcctaagggagagtgtgaagcacacgtaggcactgtcttacaccacacctgctgagtccaaaccatgggaggctcctctcctagaccctgcatcctgaaagctgcgtacctgagagcctgcggtctggctgcagggacacacccaaggggaggagctgcaatcgtgtctggggccccagcccaggctggccggagctcctgtttcccgctgctctgctgcctgcccggggtaccaacatggcccagaagcgtcctgcctgcaccctgaagcctgagtgtgtccagcagctgctggtttgctcccaggaggccaagaagtcagcctactgcccctacagtcactttcctgtgggggctgccctgctcacccaggaggggagaatcttcaaaggtaaaggtgggcaccccagggtcccccagcccagcagcctgggtggtgggtcagaggaagatgtacaggaagaggcgcagaggcacaggcagtggcaagagcgcggctctgtcccttcttcccccagtctccgctggaatgttcctaccctgccgactgccccagaccgcgctcaaatgtggcttaaatccagggtctttcaatgcttagaggactgggatgaggaaggaagttggatgggaggcaggaaggggaggccataaatcaaaaacatcaacagtcctggggtgcaggcagggagagcgttcgtgctttcccagcctcggatatgtctggcaccttactgaggcttccacaacactaagtccacacctcctgcccactgacctaagtgttaatgctcgtctttagatgaaactacggaggtctcgagaggtgacatgacttgcccaaggtcacacggggcgctggtggtgaaaccctgggctggaggttccccaaagccctgctctcttccttccacccactgtgctcagtgctggccagggtggtgacgtgtttgtcgggggtggtcggtggagaatcttggaggagaaaagccagctgggctttcggagtccagcagtgagcagcgccctgcggggcgggggcgggtaatggaacctgagcccatctgagtctgctctaatctgttcctaaactcttttctttgatttattgcttttgtagaaaagttcatgtgagcaaaaattcaagcttgtttttgctaagcttagaggcattctccttcagggcagtaggggacatggtgtggaggtaccccttggtattattccctgtctgttgaggttctgtcgggtgtgacttgcctgggtcttaaacatctttgagtgggagaagcaggtttgattgagtgctaacagcctgtgaaaggaaggtgattaatgctatccatttaacccctgcaaccctgaaaggcagagaaggaaacaggtttggaaagtttcagagctcaaaatcacagagctgggattggaacccagacttcccctgactccaaaagctgttgctctgtggggagtgaaggatctctgagtaccgtgttgaaattcagacctgttttggtggctgaggtgaatattaaacattaaccaccaccacaaacaacaaacattcaccaccaccgcaaacaccattgcaactcacaacattgcagaatcttgaatgtggaaatcagcccttgattctttcgaaagcctccacatcctttccagatggcacagaaagggccctcctacaatcccccggcacccacactgacccctcctgccgtgcttatcacatggtgtcatcactgtccacttatgtatctgcctctcccttgggactttgtgctgcagagggcaggagctgtgtcttgaatctttgtgccattgactttctcgtgctgtgacgtagcacctgcctggctcagaacaggcactcaataactgttgagtgactgattggatgaatgaatgagatgagtacgtttggagaagcagaaggaagagggatggtggggcaggtggtggtgatgggggctcagcatgttcggccacagcatttcctggcctgtggggccagcatggctgccttccatccatgctttccagcactggaactggtgttctgcttggaacagcaggaggtcagacagcctcatcgtgcctccagagccaggggacccccatgccagaatgcttgggtcctttcttgttttaaaacccacaatagtcgggcatggtggctcacgcctgtaaccccagcactttgggaggccgaggcaggcggatcacgatgtcaggagatcgagaccatcctggctaacacggtgaaactccatctctactaaaaatacaaaaaaaaatagccgggcgtggtgatgggtgcctgtagtcccagctactcgggaggctgaggcaggagaatggtgtgaacctgggaggcggagcttgcagagagccgagatcgtgccactgcactccagcctgggcga

SEQ ID NO: 33069 - DNA, 5025 bp, Homo sapiens
acttgaacccaggaggtggagattgcagtgagctgagattgtgccactacactccaacctgcatgacagagtgagactctgtctcaaaaaaaaaaaaaaaagaaaagagaagaaaaagaaagtcatttcaggtgaggatcaggaacctggctggggagacaaggtggggagcaagaggcattattcatttatacattcaactttcattgactcagcagagagactgagcaataaggggccagttatctcagctataataactaacatttaaataaacaaaagctctcagggttgcaacttcctgattgtaccctgccccatattccaactgtattaactgatctctgtatggtttcaaatgataaaaatacacatgaactattttagacaaaaggaggatgtatggattcctataactaaaccgtgggaagacctggagtgtagccagacctcaggggcaactggcactggccagactcctttctttccatctctcttctctcatccattcttctgagtgtccatttcagcctctctcattggtctcttccataatgaatggaaacatggcggcccacactcagtgtctcaagagagaaactgaagttcccacacagagatgaactctgattggccagtttgagtcaggtgttcatctttatgcccatagcaaggtcataggagacaagatggcagctcccatttgaactacatgctggggaataaagtaagagtcattcctcaggggaaaaaatgtaagaggtgttaagttgtcaaaacagtagatgctcactatagtctaccctttggtgctcagtatacaagcctgttttcttccccaaagtagaattccaaaccagcccccatctaacaccatacagccatcccatgcaccactgtgaccacattcaccctcaccctgacaagggacctgcagctgtggcacccagtagtgtctaatgacatccgtcaactctggacatgaatgcctgcgatcctgagaacgagttaaatgactaatcactcctaacatgccaatgtaaataatgaagggaccagaaaatatgtgaggaaaaatatacaagaagataatgaccaaataattcccaaatgtgatcaacacggaacaaaatactgcataatcacaatgaagacttggacttataaaaggaggtgtaggctgggcaccgtggctcacacctataatcccagcaccttgagaggccaaggtaggtggatcacttgagcccaagagtttgagactggcctgggcaaccccatctctacaaaaaaatacaaaaaattagccaggtgtggtgatgtatacctgtggtaccaactacttggtaggttaggatgagaagatcagtggagcccaagactttgaggttacagtgagctatgatcatgccactgcacaccagcctgggcaacagagtaagatcctgtcaaaaagaaaggagaggggagaggaggagaaaggaggggaggggaggggaggggaggggagggaaggctaagttgatgaaatcaataagtatacagtgactcaaacaagatgtggtggcttatttccctcatctaacagaccaggggcgggctggagtccacagcataggagatgtgtttctctgtcctgcaaagttgtcctggagaccagattccttctgtctagatgtcccaccatccctagagttgtgtcctcatctgcatgttcaaactgacacacatcatcacacccacatcatggttttttttttttcgttgtgttttgaaatggagtctcactctgtcgcccaggctggagcgcagtggcatgatctcggctcactgcaacctctgcctcccaggttcaagcaattcttctgcctcagactactgagtagctgggactacaggtggctgccaccatgccaggctaatttttgtatttttagtagacagggtttcaccatattggccaggctgatctcaaactcctgaccttgtgatccgcccgctttggcctcccaaagtgctgggattataggcttgagccaccatgcccagcctcatcatgtgtttttataggccaggcttgtggcttctttggcgatccaattctatcaaaagttggaaacatcctgatctatttgcttccaattatttccatacagaaatgccacacccagagatcccttctggacatggttctgaagcctgccaactctggcattttcctaactggctcccatgcctggcccattcctgctgccccatcttaatgctggctattgtggtgcctgaaacaacaggctgtgtgggcagatgacacatcacatctttgccacagggctgattcccattgccagggagagaaatttcagtggtgggtaccacggcctgccttcctggttattgcaggtggagctttaccaaataacagactaggaggagtcaccatctggccatcttgcctcatctgtgttttctcctttgcgttgctcaaccactaagccaatgtcacatactttagattttttttgttcaagttgcatctcaccttcagcacaaatgtctgtattagacataggttatgctactataacaaacagattccaagatgcagtgatataaacatggtggaattctctttttctctcacacaacaattcagagtaggccccaggcaaacgggcaactctgccccatgagttgaccaggtttccaaattccttctctctccttgctgctcctccattcccttggccacgcagtcaaaagtgtcccaccccatcacctccaccttccagtctgtggaaggagaaaagaatggaagtaacaggcaagcaacctccttaccaaaagtatgatccagaaatttcccacatcaccttgggccacatcccattggccagaactgcatcatgtggccacactgtgctgcaagggagtctgggaattacagtccctagctgagcggccatgctggaatgggaggcacttgtattacttaaaggaagaaataggaaatgaatactggggaacaactcctatctccgcctcagggaaaaaggcaatttacaaacagtgatacagatggaataccacatcttgctggtcaggggaaaacccagctcccatagtgatttgttcgtagactcacttccctgaatatggggactttcttagccaatctggttatgccaacatcttgcctcctaggagcagccttggcttattgtcccccagcaacaaccctgagagagccaacaggaaggactcccttactgagagctgggccatcttaggagcccacatcccactggaggcccgaggattgttttaagtcttgtgaaatcacaggcaactcgcacaaagctcgaggtgttttttttgtttgtttgttaattgatttcgttgttagttggttttgacagtgtgtttgttttgcaacacaactgacacagaaccctggctgaactctgacagccagtacctaacccccaaaattttgtccaggctcaaacttggaatcaggatctgtcttagtccattcaggctgctataacagaataccatagactgggtagcttgtaaataacagaaatgtattgctcacagttctggagactggaaagtccagggttcaaggcactggcagattcagtgagggcctgcttagtcatagacggtgactccttgctatgtcctcatgcggcagatggggcaaggcagttctctggttttataagtgcatgactcccattcctaggcttggtccccttcattccattctcattatctaatcattcctccaaaggccccacttcctaataccatcactttgggggctaggatttcaacatatgaatttgatgggacacattcagaccatggggctcttagatctcttagatgcaggtgtgggggctctacttatttttgtaagcctcgggatctaccctggccttgacctctgcaggggtgatggagctgcctaatctgcctgttgtgctgccctgctcccaggctgtgcttcatcatggaggcattgggtaaattaagacagtgccaggttcttgggaagggccactaccatgggccaaagaatctaccagtgccccaggtcgaattgccctaattgccctgtccttctccccaccttgtttggagtaaccagttccttcctgctttggaatggggcaaacttcttactcaacacacgcaacaggaagtgtctctgccagacataccactggactctgctctcttctcagggtgcaacatagaaaatgcctgctacccgctgggcatctgtgctgaacggaccgctatccagaaggccgtctcagaagggtacaaggatttcagggcaattgctatcgccaggtgagtgggaaagccaggttgcaacaatattcattcatctctttagccaacatcttccttacacatattattcattcattcattcatctgacatatgtttattgtggacttcctatgtgccaggcactgtacagggccctgggatgagtgctgaggataaggagataaataagaaatggagtttgccctcagtgagcctgcaaagcaggtaaataagcaaggcaactctcatacaagggccagtatgcccctgttccagcaacacaacgtgatacagactcctgtcctacaagatataacagaaaggcagcattgaaacataaagcggggggaacctgagccaggcgcggtggctcacgcctgtaatcccagcactttgggaggccaagatgggcagatcacgaggtcaggagatcgaaaccatcctggctaacacagtgaaaccccgtctctactaaaaatacaaaaaaattagctgagcgtggtggcggatgcttgtagtcccagctacttgggaggctgaggcaggagaatggtgtgaacctgggaggcagagcttgcagtgagccgagatggcgccactgcactccagcctgggcgacagagcaagactccgtctcaaaaaaaaaaaaaatttttttttgctgatggtgg

SEQ ID NO: 33070 - DNA, 2555 bp, Homo sapiens
ccaaatcctataaaactgccccaccctgatctccctttgctgactctctttgcagactcagcctgcctgcacccaggtgactaaaaagctttattactcacacaaagcctgttggtggggcggggcggggtggctcatgcctggaggccgaggtgggcggatcatgaggtcaggagatcgagaccatcctggctaacatagtgaaaccccgtctctactaaaattacaaaaattagccgggcgtggtggtgcatgcctgtaatcccagctactcgggaggttgaggcaggagaatcgcttgaacccgggaggcggaggtttcagtgagccaagatcacgccactgcactccagcctgggtaacagagcgagactccatctcaaaaaaaaaaaaaaaaaaaagcctgttggtggactctctttacacagacgtgcgtgacaccaggctgctctgagaattccatgaattaatgaatgttgagtgcctggtacagagcctggcatacagtagacattcactaaatggtgacttatgaactctacacttcctccaaggaccaggacacatgcctcctcctccataaaatcttccttctcagtccacaggcagggatgagctccctcatactgtgtgttccttctgcaattttttttttttttgagaaggattttcattcttgttgcccaggctggggtgctatggcacggtcttggctcactgcaacctttgcctcccggattcaagcgattcttctgcctcagcctcctgagtagctgggagctacaggcgcccaccaccaagcctgggtaatttttgtatttttagtaaagacggtgttttaccacgttggccaggctggtctcgaactcctgccctcaggtgatccacccacctcggcctcccaaagtgctgggattacaggcgtgagctaccaagcccagctgcattttgtttaacatgataactcagctggttttttacataacagagacaaattctctttgacctttgtattcccgggtgtgggtgatggtaagtgctcagtaaacgtttatggatggcactaatgaaagtcctgcccatggccctgccttgtggcagtgtggaaagccaccacgtggccttctcagccttcaggacacagtggatctgtgaatcaggaactgcctgatggggtatgacccaaatcaggaacagaccgagtctcagggcctgaatcttagcaattgtcctcagtccttgggagagactaatttgagtttgattctttgcttccccagtgacatgcaagatgattttatctctccatgtggggcctgcaggcaagtcatgagagaggtaagcagcttctcttgctgtctggaatgcaaatatcttccctgtcgcaggctatgggagccacgccaagttgcaggcatggcaggcatggcaggcgtggagacacagctactgtcctgtttgcttggttggctgacttctaaggcctccctacgcttgcatgagtcactggaaattattccttcatttaacaaatacttaccgagtgagtgtctgctttgtgccaggccctgaggtagctctggggaggcacagggaaaagatgggccaggccctgccctcacagagctcataggctaatgcaggagacagatgataaacaaggagcaaaataaataaacaaacagtggcgtttctgagtcaagagggctatagaggaaaacaaaatgcagaaaaaaaaaaggagtccagtgacaaacgggcaaacaggggacactgcagattggggtcagcaaacaacagcccttgggccaaatccagcctgctgcttgtatttgtaaataaagttttatgggtatacagccatggccattcattcacctattgtccatagccactttgccctgacacagcagaggtgagccattacgacaaaggccacatggcctctaaacctaagatatttactgtctggtccttgacagaaaaaggtttgccaacccctgctttagatatccaggaaggccctctttttgagcatgacatttgagcagaaatataaataatgaggaaaaaaatgagacagacaaaggtcaaaaaaggagattcagaaccagcaagttcagacccttggtgaatttgagaagaggcaagaaggccacgagggctagagagctagggcctggtaggtggaaggaaagcaatgggattgaagtcagaggggtgggcagaggccagatcacatggggcctggccatggaacgaagggtacattttattccaagaataaaggaaactgaagtgtacacttttttttttttgagacggagtctcactctgtcacccaggctggagtgcagtggtagagtctcagctcactgcaacctccgcctcctgggttcaagcaattctcctgcctcagcctcccgagtagctgggactacaggcgccagctaccatgcccggctaatttttgtatttttagtagagactgggtttcaccatgttggccaggatggtcttgaactcctgaccttgttatctgcccacctcggcct

SEQ ID NO: 33071 - DNA, 2440 bp, Homo sapiens
gtctgaagagttctgtcccctgggcttacttggctatggggtggacccctggccaggagacagcaaactgtttcagtaatgtgcgtgtcgtgcgtgtgtgtgttctgtggtgagcaggcctatgccattaaacaaacggtgtggctttgggcaagctgctatcttgggacctcagcacactcattcataaattgtgtcttttgggtgagatttgtcttggggtcttcaaaacccctgagactgtggacacatacagcagcctaacggcattgaggagggcaagcattcaacagttaggacaatgtgaactgtagctcagctctgctaggtaccttcacaagacctcgaatgctgccccttactatgcctcggttttcttatctataaaaacggcatttttatcttgttggtggagctgttaaataaattaaaagacgtaaagggtctggcaccatggttggcaaaaaatatcagtttcccttctcgacttctcgattttgcccaggaccagtgatgttcacattcaggacctgcctgaaccggcaagccctccacgtgggtccaaagtgcaaagggaaagtcactgctagaggcgccagtaccagcatagcgcccccacgcgccgagtcggggaactgccgcgggggccggccccgcccaccagcgcctgcgcctgcgcagaggcaccgccccaagtttgttgtgaccggcgggggacgccggtggtggcggcagcggcggctgcgggggcaccgggccgcggcgccaccatggcggtgcgacaggcgctgggccgcggcctgcagctgggtcgagcgctgctgctgcgcttcacgggcaagcccggccgggcctacggcttggggcggccgggcccggcggcgggctgtgtccgcggggagcgtccaggctgggccgcaggaccgggcgcggagcctcgcagggtcgggctcgggctccctaaccgtctccgcttcttccgccagtcggtggccgggctggcggcgcggttgcagcggcagttcgtggtgcgggcctggggctgcgcgggcccttgcggccgggcagtctttctggccttcgggctagggctgggcctcatcgaggaaaaacaggcggagagccggcgggcggtctcggcctgtcaggagatccaggtgagcggggccgggtcctaagccgagcggaggacggagctaagcgcgggggcgggtcctcagctgggtgggggcggggctaggtgtggaggcggggctctgagcagatcgagggccgaggcgagggtccttaaagctcatctatttcaccattactgatcggctgctataaataaagccagcacctcccatttgttttaatgtttcccttcctcaaatgaagacatgttgccgattacagctcctgtcgcagcacagcaaaaggctttgtgtaaattttctaaaatgtacggacaactaaatcataacattcctatccctttgaggtagttgccgtccctaatttatggagaaggaaagtcctcaggtgaagggacttgctcgaagtcacacagctaataaaatgcagtgcccttaaccactgagccaggctgcctccgccgtttaaccaaaggattagtagtgacagagctgaaaccgcagtaaaaactatgaacggcgagaaaaacagtcctaacattttagttacctgtgtagagttatccctgctgactggatacacaagggttcttagggttttttaatgcttaaaatagcacaagacttctctttttgcccaaccaaagtctgtattagggttctccaaatggaatcaataggatgtgtctatatagaggcaggtttattttgaggacctggctccctatggggattggcaaagtcttaaaagccgcagagtaggcgggcaggctggagagccagggaggagccagcggtgcagttcaggtttgaagcctggccgctggcagaattccatcttcttccagggaggtcactcttcttcctgggggtgtagaaccactcactaaattagcatagcccctgcattttacaggttagggctgaggtggtggaagagggagtgacttgcccaaggacacagctgttagggccaagcagtggctcctgggtttcctggtttccatcccagttcttattgctcatcaccactgtctcatgtttgagctctggccagtttggggtgacaggtgacatctggcctagtccccagcccctgaccttgtcttttgccacagcttaactggcagaagctaaggatgggaaatttgactaatcctgcttaaaactaaagaggcttttttaactgaggagattgatcctcctaaacttaccattcacacacaccttcttcgcacacttcaccctcctatgcctgaaaatgttattagttatcaattaatttcacattaaaaaaatttttt

SEQ ID NO: 33072 - DNA, 1897 bp, Homo sapiens
gccatttcctctttccacccaggcaaacccaacccaggagctttccatctttttatcaggccctttacagagtaaactcccttctcagcagagcagcagggccctgggttccacggtctgcagcaacacttgactccacaatccttagctgtttcttttagaaagatgtaccctcctagggtcaggtcagaaatgagcattttccttatctccgtggtagcaccatccaggactggcaacccatcctgtgacccaggacatgcccaagaaccagaagaaagcaatccatcaagtcccgggtctcgaattccagtgctaggggcgacgcggaacccttaccttctaccgaaggggagaaaatgatgagattgtcatagaggaattccccatactttatgagagacaggctggggtcatcagcggtcttgaatgtgagctcaaagccccggtctggacaagaaaaaacaggtagttgaggaagacgggacgcgaagggaaacccctgctgcagacatcgcggacccgcacgccaagcggcaggccagacccgggcggcctgctccaggaaagggagagggaaggagagtggtcaatgccctcgatgctgtaccaaccccaggcccccacacgctaccccctcggaccccgctctcacccttcaggctccggaagaaaagcgaatgagtctcccgcacgttgaggttgtccagcagcactaaggtgcggggtccgctggcgcaaaccgcgccaagcaagggcagcagcaaccaaaagagggcccaagcccgggccgcggtgctgggctccatcttcctcctcctgccgaaggacccagcacgtgcacaccggaagtaccccatctacggtagcccaatcgcggctcgtgcccgtggagcactacccggaagtgatcgggatacgccgcggctgggcgtccagagccgcagctttggcgataaggcgcggagagcgccgccggaagtgccctggtgggaggtggattccttgaaccctattggtgggagtgaatcaaggccccgtccccctaaagaaaaggctcaatcctagagagacagctctgcagccgcggccaatcaacgaggccgagcgccctttgctccgcccaggccggcctcccgccccctagtctggagcccacttccctctggagcttgcggggtcctccccgggcttgaccgtcgcgtcctggacagggtgtttggccaccttcttgctggcggggtcttcactgggcctgggaaggctcgggaccaggaactaggccccacctccaccatttctagggaggaggagttggaagaataagatcagggtcagggcacttggagcctccttcctgccgctcacggctccaggggccatggcatggacgggcctgtgctgcccagctcggtggcccacgctggagactgtggatgggcagtagactggcctagcgatggttccatttccaagttgcatctctcactagccgttacccgggcattgcacttctctccaggacagtttccctggctgtaaataggactaaggacgaggtccagctccgctgtttatctgtgtgccttaggaacagccatttaattacctcatctctgggctcttgggaggaacatggcaggttttgaagcacttagcgccgggctagagtgaacatccattcaataatgtggctcccacctcttctaggttaatacagaggccacccggttcatctcagacctgcctttgtccaccaggggtttaagtaaaaactaccacaagcagcaagacttccaccgtcctctgggtcccaaccacaatcctgaggccaatggtgacggcaactgtagagacagaaggtagcagttcctttcggacacttgtccaccaaccc

SEQ ID NO: 33073 - DNA, 1360 bp, Homo sapiens
gactggggaccggaacccggctcctggcccgtgtcctcttccctacacagagggggctcctccctttccctgaatggttctggaatacaaagggaaacacggtcccaggagcatagcaggtgctcaataaatatgagagttgagaaaaagaacaaatggcaggcaggagggacgcagggatagcggggtgggggaggggcacagacatcttcaacgcttcctccaagcatggctcacagaagaaacctcagggtttcttggaatcctggtggcggtggcgtcagccagcaccactctgacgcagtgtccactaggccgccccacgagaaggaggcaggcgaccccatccccagggcagaaggcacccccatccgtggcactccagggacccgccaggaacggcgtcgctactccctggtgaccaccagggggaggcagtgccctacttactggacagcgggggccgccggccccaccgggcttcccgggaaggaagcctccgtccccgtcctgcacagcccgccccacccctccatctgtgaccagagccccccgggctgtgactccgtgtgtgactcccagcctccgagccccgctgtgtgactccatgcccactccgaacaacagcaggctgacttctctggtttctgcgggcttgtctgagctcagccatcccccagggcccctccttgctaaagcctccccgggagcctccccagagctacaggaagggacctgacacccgggctggaaacggcagtggagggagaaaggcagtgcccgctgccgagctccagagcctgcaggggcggacggcgttcactgggggcaccatcgagcctctccccaaacagcacaggccccgcccgtcacgtgcagcgcccgaggctcttggatggatttctcccacgcctccggcccacaggacagagatctccacagtccttctcctgtctgccccagaggctgggccccaggtacccacagcccaacaggggcttctggggcctgaggacggaccccagtgggaggtggtaggtgagtggcaggggtccagcagcggatacatccaggcctagccccgggatagctcgtcctgcctggcatcaggtttcacatcaggaaaagccagggttctaaagggactatcaggcccggcacagtggctcacgcctgtaatcccaacactttgggaggttgaggtgggaggatctcttgagcccaggagttcaagaccagcctaggcaacatagagaccctatctctacaaaaaaatttaaaaattagccaggcgttatgacatgcacctgtggtcccagctacttgggaagctgaggtgggaggagcacctgagccaggg

SEQ ID NO: 33074 - DNA, 3346 bp, Homo sapiens
cagccaggggtcaagaacttagattgtggggtctaacatggttggctggcgtgaccttgggcaagtcacttaagctctcagcctccaggtcctcagctgtagggtggggatcccccagcactacctcctggggtgctcgtagctctggtccttcttggaatgtttccgaggctgactgtgtgtcaggccccgccgccggtggacgaaggtgcccgccctctgggggcacccagctggggtggtggaggcggcatggggggtaaagtgatgagaagagaacagcggggtgaggagaaggcgaggtgcgtgcgtgtgctgggggtgctgcttcacggcctctcgaaacaggcgacacgggagcgggaagcgctgttccaggggcgggtgggccgaggcccctgaggggcgggcgcgggggtgcgaagcgctccagagtgggctgccggtcccgctgcgctacctcgctcggggcgctgcggggaacggccaggggccccggcagagtccccggacccaggagcgtgctgggctccgctgcaggggacggaggaggctacagtggcagggagggcagatgacgacggagcgggtgacgggcgcccctcactcccgagaccctcccgcgcccgtgtcagcgtaccaagccccccgcccctgcccggctcccggcgctcgctcaccgcctctcgagtccggtcccggccgctccggcccgcgacccccgcgtctcccgccgccgcagccccgcgcctgggtgcccgcttcccgccgcccccgaccccggtccccgcgcccccacacgtggccgcgggaaccgacccccggatcacctggcggcggcgacccgcctcactcaccaatcggcgcccgcggagccgctccgctcggccgcaccacccaatcagcggccgcgaggggccctggcactgcccacgcccggcgctccgcctggaagggcgggaggggctcgcccggagctcagaaggcacctcctcccgggctgggggcgctgaatcccccgcgcctcactcacgggtccctcctcctggagggcctctgcccctcccctctctggctggctcctccgcgtcatccgagccgcggctaccgcaccgcctcctccgggaagccttccacgaccaccactcacgcttcattctctgcagagcccttgtgactccgttgctcgcctgtcatccctctcctcttactcgaggacaagtgacactggaccggagtgtctccgttcccagtgtgaaggatcgagcctggctcggaggaggcgctcagggtggttcgggcccggcccttgtgagtggagggtcgttgcgcatcctcctcctcactttcttcctgccgggacgttctcagccgggaactgacagatcctgcttagcccggggcccagcactgagaaatctgggaaggaacgttgctcaccgcacatgggccgtggccccatccttcgggccctttaggtggggaatcgggctagcagctccagccacggcactgggacggggagcgctatcgtcccaggagaccgggcgatgagccaaggctgctgtgtatccaacctgacatctgcaggaaacccccccggaacctgcccatgcaccacaccacagagaaaccaggacacaggggctcagggccagtgggggcgcaaaggctgcagaccgggagcggggcaccctgacaggtgggcacagcgcagagggcctgagggcccctggagttccaggggaggcgggtttgcgccaagaggccatgctggccactcctcctcaggggatctggaaacccagaggcagcagtgaggcgtggccccaaatctgggctcttcttcttacaaacgtggggctttgggcaaacgccttcatcactttcattctttgagcgcctcgtgtggaaaggagagttactaacgcctgactcacagccacgtgaggattccaacgagcaaagtgcgtagcgcagtacctgacccacaggaagtgaggcacccaataaatattagctgacattagaccttacttttagtcttgattttcttttgtatgtgacagtacagcaagggtttgtttaagatagggtatgactctgtcactcaggctgcagtgacagtacagcaagggtttaagatagggtctaactctgtcgcccaggctggagtgcagtacagcaagggtttaagacagcgtctgactctgtcgcccaggctggagcgacagtacagcaagggtttaagatagggtctgactctgtcgcccaggctggagtgacagtggcacaatcacaatcaatgctcactcctccatctctcaggctcaagtgatcctcctgtctcagccaccaagcagctgggactacaggtgcatgccaccacacccagctaatttttttgtttgttttttagtagaaacgaggtctcactatattgcctaggctgaagcaagggctctttgacttctagatgtaagtgctctgggcaacacttcaccacagccatctgccagccttgagtccagtgacaagagggaacaagatggtttacaagtcacccctattctctgcaaatccagtttattaaacttggagttcacaaagaataaacggttaattcctagctttcttgggtgggggcagggggagaaaagcgcgtaagttttaaatagaggactcgacaatttctagctccacagtccccgttttgagaatattcagagacagcaacacgaggcaagctccattaaatactaactctaacaagttttctgatgcatacaattcattctgatacatgcaatttttaaaatagtggcaggaatttgtttgaggtcaaaatgacaaaagcttaaattcagataatgaaatagtcaaaaccagagggagaatcctgctttctaaacctttctcagaaggaaacagagggtcaagatttgagtggcaggcactgtgctagatcccagggacacagagatttacaataaaacatacaaagcgctgcaaaaaccagatctagaggccgggtgcggtggctcacacctgtattcccatcacttgggaggccaaggcaggtagatcacctgaggtcaggagttcgagactagcttggccaacatggtgaaaccctgtctctactaaaaatacaaaaattagctgggcatggtggtgggcgcctgtaatcccagctacttgagaggctgaggcaggagaatcgcttaaacccaggaggtggagattgcagtgagctgagatcccatcactgcactccagcctgggcaacaagagcaagactccgtctcaaaaaaaaaaaaaaaaatctagaaagataagtatgttc

SEQ ID NO: 33075 - DNA, 2488 bp, Homo sapiens
taaaactgatgccccagaaagaggcaccatatttattttgctcctacgcgtatcccatttgagatgcagagaaaagaggaatggtttatagtaccttcccaactgaaaagcacaggtctggaaaaagatggctccttcccagaaacactttttacaaagtttgttaccacagacaaataaaataggaggtcttgaaatgcattccagaaagtacagtaaggcaggtattacccagtattaaaataatgcctatgctgaaaaactgaagctggtattctttaatggagattttaagaaataaagattgcacaagtagtttcagttttctctgcagctctgctcttcatctacacggacaggtgagccaattgaggcaccagctttgacccgggtggcagcagatggctgcctaggcatctggtggccacagctcagaaggaactcatgtctcttgctcacctggcttctcttccctgctccctggcttttgaaactcaaggctgtatatgcttcctttgttcttgttcatcttgtgccaagtaagcttctaacagtttaataacctgattttaaaatctgtggatcaaaaaaaaaaaatatgctaaccaatgcccattaatttcatggcatgaccctctcatccttgctgtcagagtttgctgcttgagctatcagtgtacaaaaccactagaggaggcctggaagaaggatgagtggtctagcctggcttcaatctaaccccatcaacttattacatctttaatttgggggaaatcaactaaatttatttgcttctgaaaattgaggataatttcatatatctttgaaaatgtatctgtgagaatttgagataatgtgatttaaagcatctagcaataagaaactacaatgtagtttaaacaaaacagaacttttgtgaaactggacgttttggctctcttattttttaaaaagtctttcctaaaatactaaatgcattcctaactgtagtgtagtaaacatagttcaatatttctttggaattgaagactctcacattgcttctaggtgttattctgaaaaaacaaggattgtcaacatgaagcccatcattttaaagatgaggaaatcaaggctcagggagattaagtgggtgaccagggtcacacagctggtaagtgacgcagtcctcaaagaccaccgtgcaggaccacagccacagatgttaggacactggactcaacggtatactctgacagggagtcaatctctatttgaaactgaagaacatttattattctatagactgtatcagcaagtttgagttacacaaacaggtaacaaggaatttaggtctgacagaataaattcatcagagcaaaagttctcaaaacagtagaatggatgagcaggatgtgaaactctgggaattaggaaaaagagtatttatttgttggtattaggcaaacaaagcacacaaagataggagagactgaatgactaaggtttctttccgaatcataaataaaagagcaaggatttctaacattccagctcatgattactaagcagatcccatctccaaaaaattcagctgtctgagaaaatccccattctggaatttctcttgcttcctaaaatgaagctgctcatttagcaacataaagttctgatagaagctgtggctcctgtgaggggaaaagctctcacgagtatcagcatcctgcaaactggatgaattcacaggatgaattctgagtgtcccacaactaggatatgagaatgaccaaatacctggagtgtcctaaaaaaagacttaagggattgcttagtaacttgtgacataaaaacaaacaaacaaacaaaaaacccaaagtgtagccaagatagtattttccagtaatccaaggtctaattttgacagttaccaaaattaaaacaaaagccacactgacttgactattggcaaagttggcaataatttcatttccaagccctctgctctcttaaacatgtgcttggctgggcacagtggctcacacctgtaattccaacactttgtgaggccaaggcaggagatcaactgaggtcaggaattcgtaatatgcctggccaacctggtgaaaccctgtctctactaaaaatacaaaaattagctgggcgtggtggcacatgcctgtagtcccagctactcgggaggctgaggcaggagggttgcttgaacccgggaggcgggggctgcagtgagccaagattacaccacttcactccagcctgggtgaaagagtgagactccatctcaaaaataaaataaaaatagtatctgtacagagcccgatgtggaagaagctcagctagtgttaatcgttatgactattactacttacattaataagccaaacttacaactatactttatgagacatactctaggcaccacagagttctcttttgctaagcaaagatttaatagtgaacagtgttaattatacattatatacaatatcag

SEQ ID NO: 33076 - DNA, 2962 bp, Homo sapiens
ctgtaatttgactgctgacaccacttgtttttcattttcaaatgtaagttatataagcaaacatatactcagtgtctgttttgggcatagatactaaggacactacagtgtctcatctcaataaaatcacaatctaactgggtaaggagttaaaactttcatccggaaatgaagagttcagtatacgttctccactaacttccagccctacaatcttccaagcaagcttaaaaacaaagccaaaaccaaccaacccagcaaactttaaaatgttacttctattttgaaacaaattacactaaacttttgagaagagcaatgaaaaatcaaaaagctaacaagttttttgcctatgtcaggttaaacaaaattagagcacctttcaaaaatgacactagtcacctctaatttcactctaagacaagacagcgtgctcaaaaagccccaggcgatttttagacgttatttcgaattggattctcactttttaatgcaatgcaaagtcaggaagcacaataaacaacagagagaacgtgcacgcggatgcggcagcacagttcacccggtccggtctccgtacgggagacaactctttctcaaaaaggttaagtggctgtccccggtcacagctgttaatgcagtaccaaccctcagatctggggctctcacctcaccactcctgcctccatctcttacaaacgctcagatgggcgactgtaactttctgacgacctaccgaggcaccgctctcattcaaaccccaccgcctaaggtggcgagtaaccagttctacgtttcccaccgggggagcgagactcaaggccgccgtcgcggagcagcaaagcgacagccgacagccccgcccgcagaaggccgcgggaaggacggcaagagcagcggagacaaagcagcgaggcgaggtagctacaggccacagcggcgaacgcgcacggcgggggagagcgcgggccgccagcgaggcggggaaagctcggaccgcggacaccgacggatgaggctggggctcggcgcggtgacagttcggggctcacgctcggcagggacaccgcggcgcccgccccggcgacggaagcagcggcggaacgcgagcctcggcgctccgcacactcaccactgggagctccgtaatggcggcggcgggggcggagaacccggggggcgggcccgccgcagccagtcaccgccgccggcatctttcgaaccggctccgaaaaccgctgagggagtggggtgaggggagggcgcgggcggacgccggaccgcggcgggcctcggagcatgcgcagccctcagccaatcggggcgggcagaggacgccgacgcaggcgcgctgggacgcagggtcgcacggccagagaagagctccccctcctcccccaaatccaaacaaaacaagggcgggagcgcgcgcgccggagggcccctgaggaggagtccaccaaaagggcagggggctaggtcgcaggagagaggaagggagcggggcggagcggccgggtaaggcagacaaaaggcgccacctccggggacccgggcgccccgccccctcctctctgggagcggcgtcggcgccccgggcgagcggcctccgccactcgccttcggggcccagcgagcccgcgcccactccccggccgcctgttcggtcctgcgttacctctgcgttcggccggtcctggcgcccgcgtcccgcacggcctctcggcgccgctcccgccgccgctagtcgcctccgccaccgctgtcctccagtcccagccgccgagctctgccgccccgcccccctacccgcggccccgcgcgcgcccccgccggccccgcctcccgcgcgtggggtgcgagggggcgcgcggggacgggcggacgccggcggagcgcggggcgtcggcgcgcgttcccggcgctgcgtggtggcgcccattgccttggcgtggcggggcggtgtcggtttcctcggaggggcgccgctttcccccgctaaccttcgctttctgtgctctccagggcagtcccttctcttaactgggtttccgcttctgccactcgtccgcctttagcggggctagcctttcccgcttctcagtttaggcgcagctcaagagcaaacctttttttgaagaccgtagaattggaaaactagagagcggagaattcactgcctcgcactcgctcccattaagtctccagacggtacagggcagagtagtgactcgggactcagaactgaaaagttgaaacgggctttccgggctccctaatcctcacatgcagggagagttccccagaatgaaaaccctgagattagaagacgggattccctttgaattgtcatattgcgttgctatcagcgtacttaaacaacgtacatacgaaggaaaagtacagctcttcaaagctagtttggaaagattgtttttaaagtttcaggtgttgggggacaggggagggactgggtaataaatgtaaggaaataccagtagaattgtcccaagcttacagtagatgaccagtactcaaacgtatgtgccaaggtttataaagacttacgacaccatttaagcactcacccagtcgtctggccctgccattagcataattgtctcaccagctttccctgccacagccaccccactctatcagttcaaatttcacagccagcataaaaaattctttacgaggtgtgcgttatcattcatatcctgatggcattaccagtctttagtactctggtgtcatattccagctgttcagaaggggttttgctcttttatgccattcttcattctgctcactcccttcgttgttaacgtttctgttgtcttccttttcaaagacttccatttttatgtattcgtacatttaaaacatcctaccgttcttcttttaccctaaaatgtctttagacccatctcatgtaagaagcagactcagatgagagcaa

SEQ ID NO: 33077 - DNA, 938 bp, Homo sapiens
cctgaggtcaggagttcgagaccaatctggccaacatggtgaaaccgtgtctctactaaaaacacaaaaatcagctgggtatggtggcaggcagaggctgaggcaggagaatcgtttgaacctgggaggtggaggctgcagtgagccaagattgcaccactgcactccagactgggcgacaagtgcaaaactccatctcaaaacaaaaaacaaaaaacaaaaaaagatacccttgcgtatcagataaatgatctcttgaacatcaggactgatctggcactaagaacagatgagtcactgttttttttttttttttttttttgagactttgcactgtcacccgggctggagtgcagtggtgcgatctcagctcactgcaacctctgcctcccaggttcaagcgattctcctgcctcagcctcctgagtagctgggactacaggatccctgcctcagcctcccgagtagctgggactactcagctaattttttagtacttttagtagagatggggtttcactatgttggccaggctagtctcaaactctgacctcgtgatctgcctacctcagcctcccaaagtgctgggattacaggcatgaaccatcacacccagaccagatgaatcacatttttgcacattcttgctaaaattaaatgtccaattcattgaaaaataatttggctattgccagttctatgtgcaaatatttgaattagcagtatttacttttcagggtccttcccactgcctatcctttactcattcaattatacagtgttatgtacttgtacatttggaagtataaccacttaaaaacatattttattcctcaataaataatccatattaagatcatctactcaatctatgaaagaacaacaccacaactgcagtgtattttaatgactacttactcagaagcatgtaactattt

SEQ ID NO: 33078 - DNA, 756 bp, Homo sapiens
tggcccagggctcatgattctccaaagagtcctcctattgtactctttaggtgttactaaggtcttttactccctatacctccagttcatcacaggatcatatttttccccttttaaagggttattcattgactttgtacatccttcaaattacatctgaagccaatctccactgttttcttccttactgtcttggcgtttcatctttcttggccattctaatttttttgcaattcgttcacatttccctacttccatgcaagaaaaaggctatgctgccaatttataagaatacccctaattttccaggaggctaactgatgaatcacagtacatcaggtttattctttggctatttcccgttaatgttcatttactttggtacatttccaacagtttctgcaaagcactcacctccacctcactcatcatcaaaaacttccttctacttcttctgaattttgaagaatttcagaggcttgaaggctttagaagattgaactatagataaccaaggtgatttttatatgtggaaagcagatgatgattacactgttaagaaaacaagtaatattttctttttttttgtttgtttgagacagtctcactctgtcacccaggatggaatgcagtggatgatctcggctcactgcaacctctgcctcccgggcttcaagtgatcctcccatctcagcctcctgagtagctgggactacagatgcgtgccaccacacctggctaatttttgtatttttt

SEQ ID NO: 33079 - DNA, 1020 bp, Homo sapiens
aattaaaaagcttatcaagtaaaaagattaaggtaagctaagattaattcattattagagaaagtacacattttaaaataaatgtagtgtgccctaatgtttataaaatccacaccagcacacagtaatgtcctaggcttttacattcactcaccactcatctagaacaacttcaagtcctgcagtctccattcatggtaagtgccctatacagtgtaccattttaaatcttttatatagtatttttactataccttttctatgtttagttatatttagatacacaaatacttaccattatgttacaactgcctactattcagtatagcaacatgctgtacaggtttgcagcctaagagcagtaggctacactatacagcctaggtgtgtagtaggctagaacatctaggtttgtgcaaatactcttttgtttgcacaaggaagaaattgcctaatgatgcatttctcagaacaaatcaccgtcattaaatgatgcatgacctacattccctaagagtacaaaccacattccagtatttatctcttcatgaacaaacaaaaaatagaagggaacaatgaaatacagtcagaaaatatgtaaagattttaaaccatcacttgttctttcatcccttctaaatacctttgagtagtaaaataatctaaagcaagtaggaatcacttcacatacacactaagtaacctttggccagggacatgtaataatcctcattaaataaataacttagaaataagacttaaataactaaataacttaaataactaagaaataaggaacctgatacaacccttggcttcataaaaaaggctactttggttgttcactaggaaatgttattttagagaaaaaaaaaaaagcaaaaggacacaaaacacagaaacaacttatttaagataatgaactgtctatgcagttagatactaagttttttctcctgcctataatttcatctaaaaaaaaatcacagttttcttattttaattaataaaactcatcaa

SEQ ID NO: 33080 - DNA, 2098 bp, Homo sapiens
gaataaaccataacaactcacaatttctcagacaatgagcagattatgattattatgtaagctcaggcttccaagtgctctctccttcaaagccaagcatgtaacaggtatacagcataacagtaaccatactctgacatacttaagattctttctttctttttttttctttatgtggagacagagtcttgctctgtcatccaggctggagtgcaggggtgcaatctcggctcactgcaacctctgcctcctgggttcaagcgattctcctacctcagccttccaagtagctgggactacaggcgcgcagcacaatgcctggctaatttttgtatttttagtagagacaggatttcaccatgttgggcaggctggtctcgaactcctgaactcaggtgatccacttgcctcagcctcccaaagtgctgggattacagccatgaaccaccgtgcccggctctgacatatttaagactcaattacagtacatggtaggcacaaaccttcagtacaagatgaataaatcaagaaaatcaaagtaaaactattgctactataatttaatattaacataaaatccagcaaatacgtaaatttctatttcaaaacaacatttgctatagcctcacaaaaaggttcctatatgaaaattttggtgcaaaaatacctcaacgatggcactaagcaccgaaaatgcatatctgtccaaagtataatctaaaatggtacagaattattttatggataatttaaaggctatcttcttttgctacctttcatttaaataccaaagattgcaccttaacaatgtaagaaatgaaatagtactggctgactatatatccagttatttataagggaaagcactcaatgatgggtgtccattatgatttttctatctgattatgctaaatgtagtacaaaaaccccacaagttatttttaggtcatcactgagttggttaaataaacattatgtctgcctgtgtaatgtgactcccgtagtacttactctgtcgagaataaacagacatcatgcacactgaatcatatgagacaggttcagaaaacagctgagtcaccgaccattagccctttacttcctgttcacagtaacacagtggaaatttctacctcaccacaacatcaggcttcttttcccattcccactaataagttatactttccctcaataacaccaaccagtttgtgttaaagctcaatttagacatcacatagttctattatgttctaatattcccaacccacacaccaagttcctgacaatacaaaaacaaagacaagtaacattaggaggttaattaggttggcatgcgtcatcacaattaagctaggtctatttggaaaaaaccaagtctctccagttgacctacaggtggaagtattacagtatcacctcactgtccatgtagcttgtacttttttgatatggccaacagatcccctaggttttctttctaaagcttccctgaattacatggtaaatgttcttttactatgaataacaagctttaaagcaaaatcactttcagttttctttccttcgaggatgctaattagtagtaccctcagttaaaaacattaggcacgcaaaaacttttactcacattagaatgaaaaaaactctcaaactatacttgacttcagatgtagcaatctaacaagtttgtgagtttttcttttttgtttgcagtagcaattctaagtcatggaaatcaagttgaaaaagacacgattcctatgcacagggatttacaatttacctaacaacagtaaaaatgacatagaaagtggtgtaagggctctccctctccctccccctcccctccccctccccccctccccctccctctccctctccccacggtctccctctctttccacgtctccctctcatgcggagccaaagctggactgtactgctgccatctcggctcactgcaacctccctgcctgattctcctgcctcagcctgccgagtgcctgcgattgcaggcacgcgccgccatgcctgactggttttggtggagacagggtttcgctgtgttggccgggccagtctccagcccctaaccgcg

SEQ ID NO: 33081 - DNA, 710 bp, Homo sapiens
tattctatatattttatataatatgaatgaaaacatactgctttaaaaagtatagtaattaatcagttactaaaagaataacaggaaactccaggattcctatcaagtaaattaatttttcagcaacaaatgattcctataaaggtaaaaggcacatggtttatatgtgtgacatcccttattttctaaatcccaagataaagtttatttagtgaggtcatctcaaaacatttcagcagctgcaactcatacacagaaataacaaagttcaattctgggtagttttgaaagatcccaaagcttttcttatgtgggtaatttctatactttatgctcctcaagcagcagaatagataagtcaagtatttttcccttcattaatattttgtatcatcctagttcttccttcaggtcatttatttccccaaatctacagatattgagaactaaataaaagctggtctgctcaactaaaaggagcactacagtggatatgaggaaggaagttttacttatacatgacaccatttgaattctgttaatatcattgccaatccccaaccaccaagaaaaaaagagaaagaaaaagaaaatggcattcctccttgctctactcttacctatacttaataggttgaattacatgaaattccagatttacagatattcaagtatattttaaccttaaaaaagaaaaataattttatatg

SEQ ID NO: 33082 - DNA, 1023 bp, Homo sapiens
atattaagtgaaaagtaaaactgacattttgtttgttttcaatgtgcatgttggggaaaaactcaatcgttattattagctcggtttggtaccactaaccttgatttgtgctaaggtgccagcagcaaatcaattgtgcaagtcactttgcttatgcctgtaatcctagcattttgagaggctgaggcaaaaggaacacttaaggccaggagttctagaccaacctgggcaacatggtaagaccccatctctacggaaaaaaacctttttttaatttacaattacagtttacattttcacagttggcgaaaatgtatacaaaataagggcaaaaaatatcttagtataatcttatcatgtgttcactggagcagcccttttaatttccttcaaaaacttttcctttgcattcacaacttggctaacacgttccttgcaaagcttaatcatttctagctattgtaaagtgagacatgtaacccttcctttcacatgacccacagaggacactgcagggttattggcctaatttcaatatatctcaggaaagagcaaggtccatggggagagaggggaatggcctttcagtggagcaatcagcacacagtattttttactaggttttccttattacatgagcatggcacctcaaaacaattacaatagtaagatcaaagatcactaaaaagaattataaagagacatgaagtgagcacatgctgttgaaaatgatgccaaaagctttgcttcattcagttgccacaaaccttaaatttgttaggaaacaaacaaacaagttatctgtgaagtgcaacagactgaggtgaaataaagtgaaatgtgtctgtataagattgtttcttcacctgcaaaatgaaggggaaaaaaaatgtgtactacttcagagagctgatatacagctctctgtatacagttaaatgagacgatttattagaataatttgttgttgttgttgttgttgtttttaaagaaacagagtctcactttgttgcccaggcagga

SEQ ID NO: 33083 - DNA, 700 bp, Homo sapiens
atctaaagttcagaggccagatgcggtggctcaagcctgtaatccaagcactgtgggaggccgagatgagcagatcacttgagaccaggagttcaataccagcctgtccaacacggcaaaaccctgtctctactaaaaatacaaaaaattagctggctttggtgacacgcacctgtagtcccagctacacaggaggctgaggcacgagatatcgcttgaacctgggaggcaaaggttacagtgggccaagattgcaccactgcattccagcctgggcaacacagcaagactgtctcaaaaaaaaaaaaaaagaaagaaaaaaaaagtattaatagatcagagcatttgggccaaaaacttgtcttaaaatttactggcattaaggttaaaataaaaagggaagtgagtggcaggaaaagacaaattgtagtggataactttttaaaccacagaaaacaaacttatctgcagagttccttcctagattatgattaagtaaaattctgccacataggtcctataaaaaatacacaaaccttatccagtgctgtaattccagtgttgacaaagagcaggctttagatggaaggcatttctaagagacagaattgctatggtacacacagccttctgatggtctatctagggatcaatttaggagttggaaacacatgatactgtgtttaagatattcttcaaa

SEQ ID NO: 33084 - DNA, 3418 bp, Homo sapiens
catcaaggacacctactacaggtttccttttatttctgttcaattgccaaaacagctcaaagatgcaggtaatgagtaatttacgtggtagcacaattcagaaacttaaaagtcctaaccgagtataggcaatcaaggtaaaaaatgaaattagaaaggaatttaaactcacaaagtagtaagcaaagacaggtttaaaagattcaacactgaactctgcctttaagtaggcaaaccagccaatcttcccccaccccagagacactgaacaaaaccaaccaggttttccataagcaacgctaagttatcaccacactttctcatcggtgaacaattcctaattgaacagaatcatgcaggataaaaacattatgaaatcagtacacacgtcacactggaatggaatttatctttacactgcaccgcggtgcctggattgaaaatcacgaactaggtttaaagaacagagaaaatgacacttggcagaaaacaaacaatgacctgaaatgactctagaagggagattgctttcccttctcaaagtaatctatacagacaagaatcaaactacagactgtgaaataatctggggacctcacagcagttagcttcttacttgctcaaacatcctacaatctctaaaagtcaaacgcacgatgacacaaacataaaaacacaacacatctaacatccaatcattatttattgatttacacaaatacagtgggtgtagggaggaggtgatgcatgatgaaatgttattctcaggtacgcaatacctttctaaatctccgtggaatacatgaattcaacgttttaccttcaccggctagtttttgactaaaataccccatcaccaagtcttttcaatcaaagctctccaaaattctacaatcgagcaaataacatgaaattagaaacattcaatactagactttcctccagaagccctggtaactctctagacatcaggcctatgaggagtaaattaaagcccattaaaaatattcagcctaacacaaatcttccaagaagtgagacttttgtgggtgatgggtaatgtcggtgaacttcctcttcctttaaaaaggtcaaagacagggaagcgtccggcgtcacatttcctcctcagatctctaccacaaaccacatcacaactctcccattactaaaaaaaattatccagaggaactgctttctgtacattttcaccttagactgaaaatccaacatacctcggaaacgagctgattggtttcaaacaagaaatttaccgataaagtttattatgtactaataataattatggaagcccactgtgtcccgctgtagggggagccgaggggaggtgaagagcaggagggtgtaatcctcacaacaaccagagaaaagccttccctgcagggttggtcccaggcaccaagcaaattctgcccaataaagggggggagggtaccttaggggaggaggggagaagggaccccaagctctaaaaggaaggggctgcagaagcatggccaagtggggctagctttcacagtattgcagagggtctgggggtccccccgcagtgctgctgccggggcaccccaaaagctccgcccaagcccgatgcaggggcttgagccgctgtccctttcctggctgggctgtggcggccggcaggagggtcccctgggctgcggggtccccctggactgcgacgacgagaaccgaagggccgacaggaaggtgaaaaggatactgttggggcgcctgagtctggagggccctgatgttcgggtgaggaggggggaccgctgccgccgccgccgccgccgccgccgccgccgccgctgctgccgccgccgggtgaggaggcggtaccgctgctgccgccgccgccgccgctccggtgccgggtccggttcctgctgcagtcgctgtgcctgatttcagagccggtttctgcggtaaactcatggcaaagcgaagccaccaacccccccagagcgggaccgggcgcgccggggtgcaggggccgggggcagcgggggggcgggatgggggcagacccggggaggcggcgggagcggggggctggggggagcctggggggaggaggaggagggggccggggccggtcacacacgcccgacgccgccgccgccgccgccgccgcctccgccgccgccgccgccggcagcagcagccgccccgcgggccagcaccaccggctgccggtctccgtgacaacgcgaccccagggggggggccggacccggcgggggcaggaggcggagagaccggacctttcacggcaatatcctcatgggccggcggcgggggatctttatccccctccccggaggaagcggcgcccttctcggtagcggggctcaggcgatgccggtggattttcttcactcaacgagcagagcatccaacatggcgctgtggccgcctccagcagtccggcaggacggctgctcggaaaacttcggactttttcggaatggctcgggaaaccgagggtgggaagcctcttcggctctttccggagactgctaggggtcgggattcttcggagacgctcgggtgcgtcctcggccgccgttcgggagggctcaggggctaactcgcttcctcggcaaagatcggcgagggaggcttcgctggcttacagcggcgcgggtgcggggcggagggaaagaccaaaggcgaggtctggcttgcgagagtcctcccctgcggcccagcctcgaagaacaatggtaatggccccggagtcggctgttcgctgagccccgctcgcaggggcggagaggcagcggcgaggcgaaaaacccctggagaaggaaccgcttaaccggaatggaacccgttggatagggaccccccgcggggacttcgcgtaaccaatgccacccgccggcctgtaacccacgcatttcacacccattgtgtcgacacttcctcagacgctctgagaggtgaatgaggagccccatttccagaggacacagaggaaaagtgactagcccaaggtcaccctatcgggaaaggacagagcctaaatctaaatgccaccttcatctggatgaaccttgccgcctcccatattggctggggacatgacctgagccgccatatctaatcagcagccttaactgagctctgtggatggattcaaacctaggccttccccaggactggagcgccctttgaccagcagccagtgatcagctccccaatgtcctatgctgggtgacatttgttgataaggattttcttcccagctagacctgccaagatcactcccacccccaaccccgcacaccccactccttagcaggtgccttgtcctaagcacagtggcattgagtgggaaagaatggcaggcatcggccgggcgcggtggctcacgcctgtaatccca

SEQ ID NO: 33085 - DNA, 497 bp, Homo sapiens
ctgaggtgggaggatcaccggagcttgggaagttgaggctgcagtgaccaagattgcacactgccctccaacctgggtgacagagtgagaccccatctcaaaaaaaaaaaaaaaaaaaaaaaagaagatggatttatcaggacataacctcattgcaagtggagagcatcagtaccacgtcctgtgactaaagtaaacaaaagcgacaacagcccagttcaggcaggactattaacggtccaggaatttcaggaatgaaggtttgggtcaccccaccaggcaaagaaccatgaccagatgaggtgcttgctaagggaaaaggaatatggaaagggcagtggaggaagaggaattataaagaccagctctgaccacatgaccagttgcagaaatgaggacagtaataactatgagtatttcttccttattttgttatgaatgtttgtatatagattagccaaatatttttgttttcttccctcttattcccttatcat

SEQ ID NO: 33086 - DNA, 1318 bp, Homo sapiens
cagcctcccctcccagagctgatagatctgtgcctcttatacctgcttgcccaataaccctgagtttcttttctctttaccttgtcctctctgccctcctcctggtaggaggccctcaggcaggtaacctctgaggctaatctttaacatttctgtgactacaaaaactggagctgtgcttgtgagatcctcaaatagggttccaccattagagccacctgactgcatgacctgttggcaaaggccttgggaaaatcgacaagtttacaaactgtcagtgtttacacagtggacgagagctccataaactgcagacaactggaactctctgatcaaggtacagatataagacggtgagaaatccctgtgtactcttcaacacaaccctggccctttagggaaagcaggtgttctgtgcagggaagttcccatgactgtcagataagatgtgttgaataccaggattttcacattttccatcctggctgctttagtgaactcctatcttaaacacatgtgcctagctccatctccatggagacggctgttttaactgactaggacattccacttgtgactcacaccctctggggcacaccagtgagctccattttccacacctgcagccaaggagtactgtgggtcacaaaccaaccaattcaaataggtttgaaactgggagagaagagaagaatgcttctgagcttcatctcagctggagaaatggggtagaaaatggggctcaggcccaaacagcctttggcgtgagggtcctagaaaggaaggggaaggtcctcaggcccccagaagtaatggaagagtgtctgattcacagctctgagttcagactctgctggggactagcctggaagcattctgtaccccagcagggctagcctagaaccacactgtgaaacctggcgtgcttttccctaagttacctggagtatgggaagaaaaccccatttccagacaccagggaacaagacattctctgtcccagagtagaatgaatcaaattgatttagtgctgggttcctgggtgacatcgctaataacaaaggaatagtaacaataatgatgaatataatatgttatgcttgtactgggttgtgcaaatgagtttactgaatgaactctcatcctttacctcaacttattctccaacaaccctgtgtggcaggccaggaagagattcttacttagaacacaggcttcagggggccaggacttctttattattttattttattttattttattttattttatttttttgagacggagtctcgctctgtcacccaagctggagtgcagt

SEQ ID NO: 33087 - DNA, 2600 bp, Homo sapiens
ccttaccccagacacccggagattctgttcccttctccctcacctcagtgccctggtccagatgccacctgctaaaggcaatgctccggtgggtgcacctggtgaagatgaccgcttcctgccactcaggtccacaagggacccactatatactggggctctgtgcatgagccttcttctcagagccctgctccaggccatgccagatactctaaacccctcaattccatctgtccctcttgcctcctctgggaaactcactgctccagacacattccctcatttcatgttcatttctctctggccctgaagccccttcctttgcctccttcaaagatccctcaaaccccagctccttcacaaagactttcctggcagaactgtatccatccaccctctgaccagatactagatgcttactctatgctaggccctgtgtaagctgtgggacacaagagaaaacatccctgtccccaaggagcttctgcatgggaccctgttaaaatcctactcaacctcaaggcctctacggggacatctttttgatgaaggctctcctaagatgttcattcccaaaggccctcaccgctctgcatacctgtgtccaccattagaccgtgagctccttgggacagaaagcgggtcttatttatgcctataaaattcagagcccagccctgtgcctggcacccagcagaaactcaaagaaatgaccacaagacacgacagtgctatgaacaacgcacgtggctatggaacacagagaaaagtcactcccttcggaggggtggggagaagaggggtctccagagggcgttccatttgagctggttctgaaagctgaagttgttcaccaggtggaagggaggggagaggccactgggttgcgcggagcaggacaggacagtgtggggacaagcggggatgcctgaaagggcaggcggactgcttggagaaaagaaagctgtctggcgtagtcacttggagcaaaggacatgagtcacttcctggccagtctttcatcagctttcccagcctcaccccgagagctccctgccccccgatcctcaccataaatagcaccatggctttcactgatcagagcatcgagccccggtcttgctgacctcagggtgatggccctgaaagggggacgggaccagcttggggctagtctgaaggaagacacagagacaagagagccccttgagagacagggtcaggggcctgaacgaggggctatggagggttcgtacagccctggagaccatgggctactgggttgctaagtgctggaaacacctgcatgtcccccaggcaccacggcagctctgagaagaggactctgtgaggggagggcggaaatggggaagctgggatacagaagatcagggagagcaaaaggggagtgcctcgcccctcccaggggcctcgttcctatggcaacactcccaatgaagctcttggaagaaaaagcaggagaatcgtcattgctccccaggcctcagatgcagcgtctcaccctccacatctggctccggccaaagccctgaaatgccagggccagcgctggggaaggcactctgtgtgctctggcccatgagtgagcctggcatctccctcccccaaggccacaaagataagaggcctaaagaacagctcccaggagcagcctggctgtgctaatcacagcgagttccgaggccctcttccctaacacctgtctgcaagccccaaattatcaccgggagggagaaggaatgcctccttcagacacagcctcccttgctccttcgctgagaggctgccacaggccaggttcaaactccattcctttggcccccaccacctgggtgccacgctcacttgctttcccacattgtttacaaagttccttttgcctggcaaccgccaggccgggtgtgggggacagtgggcaacataactggaggcctgtccacgtgaggcatgcagcgtggtgagtgaggcaaacggcagccaaggactcgcgggagcatctgattacgcacggggtgaacgctgtgagaacatcccagaggccttgaaggggagggcgggaggagaccagggaagccaagcaaggccccggggaagcttcgtttgagcttcgggctgaaggatgaactcaatgtggagtagaagcaggggctgtgcctgggctgcccctccgccattccatgtcttagtggtccctgcagccccagaaccagccctggatagggacctagtaggcccctagcaacaggtggtggctgcaagaacagagcccagtgtccctttctggagaggaaggacatctggaagatgagagggtgatgaggccggatgcccacctaaggtttcctttttttatatttattttttttttttttgagacagagtctcgctctgtcactaggctggagcgcaggggcgcaatctcggctcactgcaacctccacctcctgggttcaagtgattctcctgcctcagcctcccgagtagctgggactacaggcgtgtaccaccacgcctggctaatttttgtatttttagtagagactgggtttcaccatgttggccaggatggtctcaatctc

SEQ ID NO: 33088 - DNA, 1045 bp, Homo sapiens
atctgagctacaagcacagttggaaagtccaaggcagggccaagtctaagggctgaagggcctggctgcttccttcctctgatgaagtgaggccacccactctcatctccccaaaacctacaaggacagcccatgctggccacttgggggagtggcagagtgaggtgcgaggcatctgtgtgtcctgcagctgaggtcagcatccccagctggcagactgccaggtcatgccacagtggcacctggcctagttcggcccacctgctacagaactgcctggattgcctctgaggagcctagcatgaattcacctggcagagaaatgcatggcttgcccaaggtcacacaagcagatggtaataactatcttgccggatcggctgacacaatccacactggcactctaaatgtcccttctcccctctccgcctagagggaagccctcgcctcagcaggtcagagtggcctgggcacctccggcttgttcccgtgcccatcagctctggctcccttccgacgcctgttggctgacccctttgtcttggagacgctgaacccagcctggccttaagcccaagaatgcactggcccacactcctgcatttttttgtcacccactcacctgccatctgcctcttcaggagtttccatgtatcaaagtcccaggtatcaagcccacaggtgaggggccatttccagactagttccgaggactgagccttgagggagaggaccccaggatatgtcttccggggaagcccctagtcagtatgacatgggggtgaccccagctcctgtgttcactggacctgggctggggcttggctggcctgggctgagaactctgtggagcagccgctggggaaaggaggcaggcgaaccacacttctcggctgctctccctgccagcagtgccgacccagggcctctccctgctgaatctgacagtagagtgagtagagaaagaatacaggctttgaggtcccacagctctgggtctaatcccagcctcaccatttcctaggaaatacatttccttcatatt

SEQ ID NO: 33089 - DNA, 1434 bp, Homo sapiens
agggtggtactgcctcccggataaggtgaccaactttcccagtttgccccggactgggggagtgggttccagggatgcagggctttccacgctaaaacagaaacagccgtagactctgccggtaaagggcctgggcaagtcccgggacatgcacaaactgtgccttctgtggaaagggaactggaccagttcgggtctcgggggtgctttcaactctgccacctgggctgtggccccagaagcaggtggccgggaggctctagggatggcgggggcaggtgaggggagactggtgggctccggaaggcttctcagcgcggagctccagctgcggggaggcgcggcccctcccggatgccgggacgagggaggggaagggaggggaagaggcggggtaggtaggggcggggggcgcggcagcggcagcgcgcatgcccgggcccggggcgcctggacctcgggagggagcggagggcgcctacctgcaggccgttggggtatgcgtcgccctcggagagcgagtccaccaggtcctcctcgtccagcgtggcccgcttgtacgtcgacatctgcaaggccaaatgcagcacggactccctcagcgcctccatggctctcgcgcccgaatggggaagcggccccgaccctggcgccgccgccgccgcgccccgccccggcctggacacccgagaccgagaccggcccacggagcggcccgcgcggggaggggtcccgcccgcctcccgcccccgccctccaggccgcgcccgcctcacccccagcgccgacagcagggcggacaccgggggcggccacacgccccgcatgctgtgccccagacgcctggtcccgctgcccgggtggccgggatgggatgggccgggccaggcgttgcaccaccttcgcgggcggggcctgatcggttcgccggcgcccggttcccaacctccggcctcccggggagaccccaagacccgagaggcccgggggagatggggacccctcccttccccggaggtcgggagtgggggcccccaaactgaagcccctagcaggcaggaaaggccctcacagtgacccctccttcgagaaaatcttaagtcccccttcaacaaccgggtccccagtggcagataacaaaagtatcaggaaggtgccctcgatgtggcccagagcaatcaagacaggttccccccggcatcagcccttaggtgtgtctagggggttaatgctagaaagaccagacaaaaaaggtggggtaaaaaggtaggtgtcccctttcagttcccctttctagctcagaggcctttaagccagagttcgtgaatgagtttcagaaaatttcagagaactccctgacacgggatgaaaggagctgtgtgtgtgcatttggatggctgcagggtggtccggtggtcacccccgtgctcaaag

SEQ ID NO: 33090 - DNA, 1033 bp, Homo sapiens
caagcacaaactgcaaagcagaccagaaagcagctggtcctgactccagggctacccacagatgcccctgcacctcctcatgctcctgtgctcctgtgtgatgtcctggactgtgtgatgaccaggctggggaagtcccaatctgaagagaccaagcgctctctgacaatgtgctgatctaatcacgtacaacttaagacaaagttaacccgtctcattgaatgatatggtataatggtgatgactgagctgcccagtaattgtgctcaaccaggaagcagctcatggagtcagttgtaattagtatttgtgttacacaggtgagtgggtgggtgagggctgggcagagggaggaggaagtgggtggggcaggaagctctggggactccttggatccatgaaccccatgccagccaactcatgtggttgatcctgtctaaccttcatgatgacctcatgatgtactgttatctctcttctaaggtgagaaaacaggctcagagaagtccattcacttgtccaagatcagacagctagaaaatgacagagccagggttccctcttcagcccaggcgatgtcttggacagcagaaggaacaggaatagggctgggaggctggagatccacatctcggtcccagttctaacactgccttaccctgggcctcagcaagtagcatccctcttcaggatacaaagagatagtatgtctgtcaggttgcagacggctgagggtgtggacttgggagctaggctccttggattctaatccttgggcaagctacttcaccatctgagcctcagtgtcctcatctgtaaaatggagatgacaacagtgtctccctcataggcttgtgaagataaaacgagtaacaagacttagaacaatgcctgaatattattgtcatttatggggaaaaaatgagctttgctgtccatttttcatctgtaaaatggggaagtagttgctggatctgaacagtggtttgcaaacagattttttttcattccatagagtcctttatttaaaaaa

SEQ ID NO: 33091 - DNA, 2824 bp, Homo sapiens
gcccaggctggagtgcaatggtgcaatctcggctcactgcaacctccaccacccgggtttcaagctattttcctgcctcagcctccttgagtagctgggattacaggtatgcaccaccatgcccggctaatttttttgtatttttagtagagatgggtttttgccatgttggtctggctgacctcaaactcctgacctcaagtgatccacctgcctcagcctcccaaagtgctgggattacaggcatgagccacttcacccggcctgttttgtttttaaagagacaaggtctcactctgttgcccaagctggagtgcggccttgaccatagcccatgcagcctcgaccatagctcatgcagccttgacctcctgggctcaagcgatcctcttgcctcagcctcccaagtagctgggactacagatgtgcaccaccacacccgggctcatatagcttcttaactgggtgggcagaggaagcagggggcagaggcccatccccaagggagaaaccatccatcagtgcgggactgacagggacactccacccactcagcccagtgtgcttctgtccagggagactccaacggctgccacagctgtggtttactgacttcaggtctgactgccctctccagagctgccctagaatccctttgtctgtggctgaagtgtccctcagagctgaggaacaagtttggagaggaccaggaggggctctccccacccccgcccctttcccacatgaagagaaacatttcagggttgaaaaaatgactcattctccccagagagggctggagctgagctgagtcaggcagaaggagcccgcgggtcacttaatcggcctccctgctctggcagagatggctctgggccccaggaagccagggacaaatggaggcggaggtggcagagataagcagctagtggagtgtgccagcctctccttccccaaccgagtgtgtcactgggcgtcacccagcactgctcaagttgaacctgatgcagaagaaaaattcctctggactttcctgaacgagctttatggctgactcactgccacctggagcctgcaagaaaagtcacaaatcacgaaagaaggagaaaaacagttctcgttaagccatgtcttcaatggaggtatcagaggtcgccaggaggaaagcacacatgttttgttgtgggtttccttctctaaagaaacacgttacacaatagaggggggttgagactggttgcaaaactgcaaaatccaattttgtgtactggattcaatttcttcattagctgacactaaacacagagacggggcccttgtgactagatgaaccataaactggctccaggaccaccaacctggtacctgatggcttgtttctgctccccactctttccctccatgcatctttctctgagcttctgctcaaggcaggtgccaggacaagccagcgtctcgagcggttccccttcagcggtgagaagtaacgtcacaattaaggggcaagaggggccagaggacagaacagtgccagttcctcatccagattgaaatttgcttccagctgcctgtccccacaccagaaagggcactccctgctccccatgcaggcttctcatcctcttttgctggcctcctccctcctcgctgtccctggtctttttcagccacaagcaaaacacactcagccttgaagtcagatgctctacagaagcctgcaaaaacagagtcaggagttgtgtggccttggccgagtcacctcacctcaccaagcctcagcctcctcacctattaaatggggacacaataggacccacttccttggagctgactgaggtatgaattgagtcaatgcattcattgctcagcacacagcttagctcaaagttaatgctcaataaattgtggttcccacctcctgctccacggagcagacatgaaacaggtacgagaagcaacgagaaggggcggcagcagagcatcaacacacagggagtcctgcctactgtcccgacgccacccagaggctcaaggggtgccccggctgctctccgaagctgccggtggcactttcgccagccaccttgtttccaaacttgctgccagcttcccctagcgcagtgatttccacaacggagctcccggctgtgggaagggggctttctttgacttgtcctaaaatggcctcacctggacccagtggggtgtggggaccagggggctgggcctggacctatgagcatgtttcctgcctcctctcagcccccatccttctgccgccccacgttctcagccaacaatagctgcttcccagactcagctgccacacagcacgagctccctgagcaaaaatacccatgcgggggagggtggggaggtacaggaggggccacaaatggggagggctgggagaaggggtggcaggatcaagcttgtctcttgagtgcctactgtgtgtcaagctgagaagggtgaagcccctgggggttagagaaacctgggagaccgtggggtgtgtgtgtcgggggtgctggtctctaagacagcagagcctccagtccccagagagggatcagacccaggtccagggtctaagggtgaagaaggggtccagggagaagaaggtgcctaagcaggaagcaggtcctagaacctagtgagaaaaaaggggggcctgaaccccaaagagagatccaaatcttaaggaaaataggggctcaggttcgaggagatgaggttcataataggggggttatatttctggtttcaggagggggatggtttggagcagcgtagggaggtggggcgaggcctgcagagctaa

SEQ ID NO: 33092 - DNA, 1419 bp, Homo sapiens
agtttccttatccaattgatctaaaggtggaatggacatgctggctgttcatcatgactgctgcgaatctctctctagactcccacctccctttgcatccattccccctaccaggcgatgttctgatggctgaagtgaccaaataaaatgcccaggatagtgttggacccagagaagacatgtaataaattagatttctagcatattctatggtccaccagcatcagaatcaggcattctgctggaaatgtaggttcctggaccctccccccgacacttactgagttagaacctctaggatgagggcaatgaaacttgcatttgtaaccagcattcctgatgattctcatgcacatgtccgttgagaagcactgaaatcaatgcaaccttatgcttgctaccgccgacttgcaattcctgggtgtcctgattaccagcacagaggtgagactcaccagaaaggggcgtggccttcataacctggtattcttcctgatggcttaaaaacacgagtacaggccttgcagttagattgaggtgcaaattccagtccctctacttactggcttagctgtgtgaccttggacacatggctcaacctctgtgagtcacctttctcatgcttaaaacggcagtaaattacctctacctgccagggttgttgcaatgatctgaggaggtgccttatgcaaagcacagttcatgtgctcggggcaaacagtggaaaaacaaaccaggaaatgcttctctgtctgtctgtgcctcctacctgccacaggagaactgagggtagaatctgtgtacccttctcagcacaccacaaatcctagtcacttagagagacacagactgcctacaaggctagtcaactcccaaccacctttgcagaagggggagagagtgggagtttgtgaagagcaaaagcaggaattggatgggaaaatggtctagggctcacgtggagtgacccaggacccagagtctcacctcccaaggctaggccttgtagggcagcagggccaagcatgctgcaggaaagaacacagagtctggagccagactgttcaggtttaaattttggctctgctactactagctttgcctggctggcaaactcctacccatccttcaagacccaactcaaacatcacctccctggaccaagttactgggcctttaaaggctcctgcccacatactcactaaatacttttttttttttttttttttttttgagacagagtctcccaggtcctattcctctgggcctttaaaggctcctgcccacatactcgccaaatactttttttttttttttttttttttttttgagacagagtctccctctgccacccaggctggagtgcagtggcatgatctccactcactgcaacctctgcctcccgggttcaagtgattc

SEQ ID NO: 33093 - DNA, 2395 bp, Homo sapiens
gggaactgtgggaatggttcacactttggtccaggtagtatgcaggtgtgtgcatttgtaaaacgtgagctgtacaagatatgcatacattacttaagtaaattatactataccacaatttttagaaacgtacaatctctgccctcatgaggtccagtctggcatcctgtgtcatcatcgtaacagtcatgacaataacagcaggtgacaccgactgagtcctctgtatgtgccagccctcagctgggctactctgaaacaggatctgattgagcgtttctaactactgggcaaaatactgccccaggagctccatattagagacaggagaataaagcttagagaggtgacacgctgtccaaggtgacaatgcaaaaagtgaggatgccaggtttgaacctgggcccatcagtctccaaggcccactcctgctgcacgggcagatcccgcctccctgccctctcctccccacactgcctgctcagatgtggcacctggaggcagccagtcctcgcccctcgccccctcctctccagtgctggaaggaacagctcatgtgtgtaatggactcgaagcttctgtgaaagagctgctgaggaaatgagtccttccttccccttctgccccctctgccctccctcatccctctcatggccacatagctctgaggacatttcagccctggacctccgcccaataagaagggactccaatggccaggcagctgggggtgtgtgtggtattgaccaaggagctttctcaacccctggacaccccagcccagcctgtggcctctcagaggaccaggaggacatgaggttagagtccccacccttggctccagtttccaagtgacgcaaccaagtgtctggattcagagaatcgcaaaatgtttatctggaatcacaaccaccaccatgaccatttaatcaaaccttatcctgtgccaagtgctacaaacatagctcatgaatcctcaccagcaaacaaaatgggtactgctaggctctcattttacagaggaagaaagtggagctcaaaggggttaggtgccttgccccaagtctcacagtgaggaagtggtggggctggaattcaaacccagatttgcacaacttcgagtctatcctctgaatgagagtattatacttgtcatcctgcatgtcattactgaagacggccctggagtcagtctgctccagccatgtcatttcacagatgggaagactgaggcccacgaaggaagaccgtggttcaggaggacaaggattagtggcagagcctgggctggaagccaccctggccttgctttcaatgaccagatcagagcctgggagcgggccatgtgcagctggatgggcagctggagggagtcaggcagggaggtgggaggctctgcttccaggcagaggtaaatattgacatgactgtgtttacgctgtaacctaactctgcctggctgctgccccaggcccaccctcctgccttcccagccaaggagggaagggagctgtgggaggaggatggggagaggaggcttctgggccaggggctgctcctcctgcttagagggctatgtggtcagaaaggctgggacatcaggtgttaggggtgggggttagtggagacccaggccaggggaccaggtggtgccagacagggaggggctgttatctgagctggggagctggggatctcagggcgggggactgggctgggagtcacaaggcctgagttcaagttctagttctgctactgattggcagtgggaatccaagaacagtcggtgaatggggaagaaaaggtctaactgtcaagtgcggtgcaaaggtgaacaataaataaccagcatttgagcctggccagtgtccagccccagtgagctctcaacgcctctggctaccggctcaacagtcctatccctgtcccagtgggctttcccaggaaggccaagtttctgccaaactgagtggcagcttgggactgaagccataataatctagaggaatcggggagccactgtctagctcccgtccctaattccctaagtgacctttgagcctcagcttttacaactctgaaataaggctcaccctcctccctggggttggtgtgaagagcagagattacatttaagtgccaggcacatagtagatgctcattttgtctctcagtcttcccacttgtcaaacaggggcctcgaagttggtggttcctaatccccttttcatacaagcgctctagcgtctttagaaggcccagaagccaggcccacctccctgatgttagatccccacctagccgatttcctgaatgctctctagaaacttgctcccctgtttacacctccccccaggaagtccaaaggggccctgttgggaggagggagccattc

SEQ ID NO: 33094 - DNA, 2288 bp, Homo sapiens
ggtgagaagaggccttggaagggagagatgggggggcgggttgtaaggggactccagctctgggcacagcaggggctgggaaccactgtgggactcttcggctttacagggggtcccatcctgctcccatccaggcgccctcgggcttggcagcatcatcacagagaagtggaggggctggatcacaggtactggcagccaccatcccaggcacatgccctcctcagccctacatggtgactttgacccacttcacagggcacagaacagaactaggagagggaatccgagtggctcgtctatagggaaagaaaccaaagagaagtagatggctcccttcccgtgatggagaggccggcacccggccctggacaagtggacaaagggcctttgctcttggggtccagggacaatgcccctcccaacagcccccccccaggaagcccagcctggatcaaatggatttctcttctggggctttagagagccccatgaaacgcccctccccagttccctttctccctggtactcctgcctatcgcagtcagcactcggcctcagcaagcccctcctctgaggacccatcaccgggagatgctggggagaccggatcgctgggtgcagggcccctgagtgtcccctggtctctgacagcaccgacctagctgcgtcgccaccacatacaccccttaggccacagctggatcagcagtcccagagggccgcaacctagccctccgaatgcgccgggcgtggccacccacagtgccccaaggcgagccccagaccgacctcagtgtcccgggacgctcaggtccagctgcatccaggcacctcgaaatcgccgccacccgcgagcccgacccagcccggctgccctgggtctccaagccaagctgagtccagggacttcagaacaacccaaaacagaccgcagcaaccgtccccaaagcgaaccggggaccccgagccccccacatccggctgggaccagaaccaagctcggcgcggccgcccccgacgggaccaagcgcagcgccgccgggagagccgcgctctgcccgggcgctccccgactccacgccttccgagagccgggcgggggctgctgctgcagccggcgcccagccccccgcgagccagggcggccccgggtgccacccgcggcaccgctgcccgcgaccgtcgaggctgggctggaccggaccagacctccgcgcgcagcactcaccatagctcgcgtgctccgccccggcttcgcgcagctccccgcgcccggctcccgattcccagctccgggttccctgctcccagcccagctgctcggacggctcggctgcctggcccaggcggcgcgctcagctccagcgggcgagctcgcggcttcggcgccgagtgccggaggggcggggccgccgcggggccaatggcagggcgcgggggcctgggtggcgcagccaatcacggcctgaggctgcactccccgcgcccgcgcgggcccttaacccttggcgcgctgggagtcggctgcccgggctgcgcggggaacctggagggcaggagcaggcgggagttgttgcttcggggcgcagggtccagaccttgccgagaccggcgttgggagctagcagaaccgggaagaggctcgattgtgtccggtggggccgccgggagcctcggcgacctttgtctcctgcctggctcctgcactggagtgtgacccggggcgctgcagctgcttgtgtgtgtgtgtgtgtgtgtgtgtgtgtgtgtgtgcgcgcgcgcgcgcgcgcgcgcgtgtgtgtaagagggaggagaagaggagacagaaacggtgggaggggtggattccgcgtgcccgtgtgcttatgtgtgaaggaaagtcctgactatatttgggatttgttgctctgtgtgtatatgtgcgtgtgtgtgtttgctatatttggggttcgttgctgtgtgtgtgtccgctgtatttgaggtttgttgctgtgtgtgtgtgtccggtatatttggggtttgttgccgtgtgtgtgtgtgtgtgtgtgtgtgtgtgtgtgtgtgtgtaagagaggaagagagatgaggagacagaaagtgggggaggggtggattccgcgtgcccgtgtgtttatatgtgaaggaaagccctgactgatttatttgggattcgttgccgtccagggacttcaggacaacctgtgtccgctatatttgaggtttgttgccgtgtgtctgtgtgtcgctatatttggggttcgttgctgtgagtgtctactatattt

SEQ ID NO: 33095 - DNA, 1063 bp, Homo sapiens
aaccaccccccccaccgccatccccctacaccccagcagagtgagctcatgcagccccactgaggcagggctccctgtgcctgggatggctgaggcacgagctctgccattggtgaccgaggttgtcctggcatgtgactgagatgggggtggcacgtacactggacatggagctggacggacctggcctgaatcccagcgctcccacgtggttgctttgtgaccctgaacctccctcctgttctgagccttggtttttcctcctgagccggagctgatcatttgcacttcactggaattcgaagactgggtgaaaagcccccggcgcgtagtagttgctccatagagtttctccctcttcctctttgggtcctgttagtagctatgtgaccttggcccagttccttgacttttctgtacactgggagcaatgagggcgttggtgtgaggaccagatggctttgcgtgtaaagtgcttagagcagtgcccggcacactcgtgatcactgttacttctggctaacacctattgtttaatgcgtaccaggccctgggtctttctctccttgtttattgtctcactgaattcttgttcctccagtgacgtaggctctcaccaggatggtccccatttgacgggtgaggtggtgtgcccaaggtcaatgggggcctgctgagctgcatgcccttgggtgggacctcacctccataggccccagtttcctgtctggggctctcggcgtcagccctgccctactatgtcccaaggtcgccgcggagatcaaacgcaaaagccaccggagccttctgtggccggctggagcgtcctctgggaatgcgaggaacgctgttatctggagcccagctgccctgagcactgtctctgggaacacccgcgtccttcctcctctgatctgagccctctgcgcccgccacccagggattcggcttgtgctggccgctgcccagcaagctacaagttcattgtcccttttcccacagcccggcgcctcctcagcctcctctcacagggcctgcgtggggccatctgcacaatggacac

SEQ ID NO: 33096 - DNA, 1310 bp, Homo sapiens
taaatcttcttctactaagtggctgcgctggttcctactccggctcaggaggctgcctaatttgcagatcgttcattgctcaattaaactcttttaaatttatttttttatattttattttattttattttgagacagagtctcgctctgttgccaggctggagtacagtggcacgatctcagctcactgcaacctctaactctctagttcaagcgattatcctgcctcagcctcccgagtagctgggattataggcacacaccaccatgcccagctaatttttgtatttttagtagacacggggtttcatcatgttggccaggatggtctcgatttcctgacctcgtgatccacccacctcagcctcccaaagtgctgggattgcaggcaattcttttaaatttaattcagctgaagtttttcttttatcaatagggctaataatccccaccctgccagtatcactaggatgttgtgaggatctgacgcaatttgagttacgggaatgttgagaaagaaaagggcgtaatggagtaacgagattagttttcctgttatggtgaggtcagtggcctttctggggtcaagaagaggggactttccttggcaccaagagggtaaaagtgtctcctcctgaccttgggtattttggaccatgggatctgaggtgtaccaggagacaggaagtgtgatcagaaaaggcctggtctaatggtgcacagctgtgcatatccaagtggcttgacctctctgggccgtttctgaatctgtgagatgggaatcataaccactctcctgacttcacaggatgttttaggagagattggatctgggttggggagacaattttggaagcagaaaaggcccctccgtgctggcaacagctcgtccacctccagcctgtgtgtgctgcctcctgggtgactgctggctttaggccagcgcctggcagggcttcactaaagcctccgtaggctgctgctatctcagttctgaggtacgggccgtggagacccccagatttgggcttaaatcccaactccaccattgcacctctgagcctctgtttctctgcaaatggggatactagtccctagcccagatggggcctggtacacagttggtgctcaataagagcagttcgtcttcttctgagcatgggtgcatccctctggctggggtaagcaccaactcagatttctaggcccatagatgggctggaacagctgctgctgttaggggaaaacctactgtgttactagccaaggggttcccttccatgtttttgccccacagggcacctggcaca

SEQ ID NO: 33097 - DNA, 2157 bp, Homo sapiens
tacaggctgaagactacagagtgctgataaaaccgaagaactctgactgaatgagtggagagacgtggtgtcttcatgactgggcaactccatgtggtatagacgtaaaccctcccacattgatctgtggatttaataccatacctatcaaaaacacagtggtggaggacagatcagggatcgccaggtttagggatggggggattgtgtaactataaagaacgcaagagagatttttggggtggcagagctgttctgggtcctgacggtggcggtggtggttacataaatctatccatgtgtcaaacgtcagaacactcattttacacttgggggcaacagaaatccctccctctggagggggtgactgatggtaacctgattgctaattctggaatcaggagccctgtggtcaggtttctgctctgcaacttcctgttggtaaccttgggcaagtctccgtccagagccttggttttctcatctgtaaaaggagatgataggtccttttctgtccactgcatagctgattagtgaaacatcatggtgaaattctttatgaactatggagtgcagcacatagacttgctttcattttgtcagtatcctttatagattgttcatgtaagctcccaaagagtagtatttattttattgaaataaaatgcacgtagagaaaaatgtgtgtatcatacattgacagctgaacccaccgtgtaaccagcacccacccacccagatcaatcataaaccgaaccgcaccagcaccccagcagcccgttcccgtttccgtaccctccacgtggagcctccgttctgtctcccaacgccctgggttagtttttatactttctgtcatcggaatcacactgtaagtgctcttgggtttagcttcctttgctcaagcttaccttgtgcgattcattcatgttgttgtgaggagctgtggatcatccattctccttgctgtctgtggtggtttctgtgttgtgaacacacacaatgtattatccagcctgccgtagatggaggcagttttgaagccattataaacagggctgatgtgcacattctgctggagagaaacgggtcccagggtacaggtaggatgatcagcttcggtagatcctgccggttttcccatgcgctgtgcctgtctgcactccaccaacggcgagcggaccttccggtagttaaacatcttcacgaactcttggactttcctgcacacacagagaagataattttggatggctcttcccttccccccacaaccttccttagggcactggctttcaactgatgtaaatatttactatgccaagcactaggagggcagagacaaacaagacaaagtcctcacacttagaaactcccggtgtggcagctgagatggcccaggaaagaactatattaccttcaaaaagagaggtacatgcgatgtttgaggtggcatgaagctcagtggtgttatattggaatgagtgagtgaccatcctggagccttcctgaaagaggtgacttcatttttaagtgattttaaataatagtttaatgaattagtatttcgtattcagttaataacatttttctgattttaggatttgctatagaaatatttggaaaccgtaaagtagaacaaaaaaaaaaatgtaggaatcatctgaaattccaaattctaccactcacagttaagtgttgttagatgttagatgtgggatattgccttttaatttccactctgcgccgctacccccagcccctaccccagagccgtcacttctggcactggagcgcagcttgcgtggttttttttttttttttttttttttttgagacagagtctcgctgtcgcccaggctggagtgcagtggcgcgatctcggctcactgcaagctccgcctcccgggttcacgccattctcctgcctcagcctcctgagtagctgggactacaggcgcccgctacctctcccggctaattttttgtatttttagtagagacggggtttcactgtgttagccaggatggtctcgatctcctgacttcgtgatccgcccgcctcggcctcccaaagtgctgggattacaggcgtgagccaccgcgcccggccatttgcgtgtttttaaggttgaatcaagatccttcttctggtgg

SEQ ID NO: 33098 - DNA, 621 bp, Homo sapiens
tcatcttccccgcaaccagccctggagggcagggactgtgattttccccattttacagatgaagaaacagaagcagaaatgtttaaacttatgggaagatacaccactaacaagggctggagccaggactctagccatgcagtgtggctgcagagtacaggattttaatcacccgttgcatcctctggcgtcgggcagggctggacttcaggctgggttttccccgttcccagctgcacccacgtcgtgtctcctcctggagtctaagtttcctgtgctgtgactgcaggcggagaggagggcccaacgtctaggggtgagtcaccacgtgccgattctctgctcctagggtcggggcctggctggtcactgccacccactggctgcagtccagcgccctcatctgcggactccttgatcttgaagccgccgcctcccatgtgctgtggtgtgggcaggcagggtgcggggagggctcggaggccgtgggtggggaggagtaacgaggacgactcaggaatctaactgcaagggttgaggtgtgggggtggcggtggaggtgggggttcagtggctgggaattctgtcctcctggactgtaaacagggcacccatggctgt

SEQ ID NO: 33099 - DNA, 2541 bp, Homo sapiens
cagacaaacatgcctgtcaacacaacacactgtatgacagcaactttggcttctgtgcccaggtcagccacacaacctcagctgggcatgaccccaaagagtcacactgatgatgggtgcattaatgtcccccattaagacaccccactcagggtgaccaaacgtagccaggaacactctaatacaccttgttgcattgggaatcagtcacataaacactgacacatggtcctgtcacccagagtgtacacacagcaacaagcaacacccacagctacagcctcagagggagcagcagacgccctgacacacgcgagggctctgagagatggggtccagatggggggtgccccacatgaaagcaccaccacaaagtggccctggagcattcagagccccccaaacggggcaggggcagggtaaagtggtcccgacggtagcacgcacccacacacaccctgccgctgcagcccagagccacagtgccacccgggaggccacagcaagagccccagggtccgggaccccagggtaggggtgcgccccgtggccagtgtcagcccagaagctcacacgcccaccatgacggagccttgtccgcccgccctggctggggcagagccggccgggctccccagcagtcggggtgacccagccccggggtccctccgccatgccgccccgcccgggtcctcacctgccagctggcccccgcgggcagcgagcccctccgcggacggccgggtggcaccgcgggccgcagctgtgccatcctgagcgcggcccggcccggcccccgccggggcggcacttcagctggcccagccggctcctggcccgcgcgcgcccgggtccgggccccgcagcgctgagctccgcgctcccggctcccggcggcggcgctgcctgcgatgggctcgccccacggcggggcccggagggggcggggcgccaggtacgggcggcacggcgcggggcggggcggggcgggggcgctgaagccacgccccccgggcggcccggcccgcggccccgggacaccgcgcctgcgcgttccggcccgagcgctagaagctttgggtgcgtcgggctccccgagggggccccccactcggttctccccagcgcgcccccacctcactttctccatcttcccaggctctgggtaccccgcctcggcatcaaggacagggttgggttaccttgcagacagagggcttttcttgagcacctacttaatgctgggcccttcgcatgtgtcgtaatctcgtcacagcccaggaggtacaaatgtcatctccattatacagatgagaagccggttccaagaggtgaaatagcttgcccgagaccacacagtcaggaagaagtcaaagtggaatccagagaaaggcctggtgctactctttggggtctgtcccttttcctcctcctctcctccatcctgcttcccatgcctcacagtggctggcctgctccgtcccttcccccgccctagctgccccagatcctgggggagatggccacagcacctagggaggggctgccaggcccgtggtatggaggaaaggacccaagtagattttgggacatgtggattctagctacaacttgctgagtggccttgagtgagtccctgcctcctctctggacctcagtttccccatctttaaaatataaggactctgtaggcccttccagctggctctgcagtgtgtccctggcctggtatagccactgtacagcagggacagggacagggccttgctaccacttcctccagacagatgttgggaacacagcaaatgcttcctgaactgtggccaagcagacacagctgctttggatgttgcgggggcagggctgcccaccagctcagagccatacctctgttcagcttcctgaaagagctgccagtggctgcccaccaccctccagccccagaactaagggctcctggaaggaaagcactgtgccctccctttccccctagacctggccttgaatcaggtttgggcctggagagccagcaggaactctggagatgggtgttccagacacggtgtagctttggttttaataattaacaacagcaaatattgatttatgcagccacttccaggcctgaatgcttccgggcacccatcgaaatccagccagagaaacatccattcccacactgcccccgggggaggcgagacctgctcacagcactggagatggctgtgtgccaggtggcatggaaggtgtgtgcacatatgcgtgcagccatgtgtgcgtgtgtgtgagactccacgaccggatgtggctgtatgtatgtgggcatactgtctttctgtgtgtatgggaatgccttggtatgggaatttgtgtttgtacatgtgtatctcatgcatgtgcaagtctctgaatatatttacagaccagtggctgtggctgtgtgttttgtgtctgtgactctgtccccatatgtaggtgtgggtaggctgtgtatgtacgtgtgtgcaggtttctgaatccccgagtggagaaacccctgta

SEQ ID NO: 33100 - DNA, 1766 bp, Homo sapiens
aaaaaaaaaaaaaaaagagagagagaaaaggggcttgctgcgtatgggaccctgaggcccaaaagccctcagaattttgagtgggatgaagcccagttgggctgtgtctgtctgtccgtcctctttctctttaaacaaaaacaaaaacaaaaagaaagtttacatggcttatctctgagaagcaggaccactaggaacttctgctttctgtggcaaatacttttctgcacggtttggatgtttataatgaacacttagtatttgtgtaatcagaaaaaaattaaagattttagagagctgagcactcactatgactcagctccctgagcacctgactgctttacccttttccatcaccttgagagggaggtatgactcaccccttattccaagggggagaagctgacacgaaaagagactaaacaccatgaccaatgtccctgagccaggcgtcacagagctgggttgcacccccattctggctggctcccaagcccacactctttcccctacattaggcattagacaacctgctccgagggtcagggaagagcagaggcagcacagaagtggcccaggcagctgggcccagggatgtgccctgtgacttcagctgtcacgtcctgcaagccaggccagccgggttagcatgtgtggggacagggctgtctacttcatttgtaaatgcaaatgtaggctctgctcctagcgcgggctccatgccctgagctgccccaggctggcaggtgcccagccccacccctggcactacccccagaagcctcagggtcaccaggcaggtgggcacgtcccagcccaggcccttccctggagctctaaataactttctgtgttgatcaacctgtttgtggatggatttggcattgaaggtcacttgtcaccttctcagtgacagcctggaaaggtgacagtcacacctgagtgtgtctgagtctggatgggccagagaacaagacctgaaagtcaaacggaactgagttcaaatcctgcctgtgccaagctctagctgtgtggcctagggagagtcccttcacctctctcagcctctgtttcctcggctataaaatggtgttgagaatttctccctgcagggctgctgagagcattaaatgagagaatgcacgtgaaagtacgtcctaagctagaagccaccttgcacgtgtagagaagagttatgacctcactcctgtgggggcaggcggggggcacaggcacatctgtgcggatgtggagtgagcaaggatccaccctggctggaccccagggccctgccgcacagactcagccggtgggcggggcagcgtctgacacttttcctgggagtcggcaccgggtgttccgcagctctgcctggtggtgcgagagggtgtgtgtgactctgtgggtgagaatggagatgggaggccccggcaggagcgtgaatgggtgtgggagggaaagcgcttgtgtcgcatgtttggatctgatcacaccacccacctgcctagaaggccccaatggcttcccgccgcaagcaggatccagacgcccgcctcacgtggcccacgaggccctgcgtgtctgctccccatccccggcccccctcccacccgcccactgtctctggcctcatccagggcttctttcctccttctccagactcctttccgctcctcaaacccgaggtgctccttcccacctccaggccactgcacacgctgtgccccctgcctgttacccccttcccgtccgcttggatcacattt

SEQ ID NO: 33101 - DNA, 1450 bp, Homo sapiens
atcaccgccctccccgctcagggtccttgatctgaggcccccacttccctcctctgaggacaggagcgccaccctctggggggcgctagggcttgggcccctccccagggatggaggaaacgcgcccacttcccacagtccctcctctaaaccccaggcgcccccacctcgaggtgggcggaaaactggactccccacccacccaggggggtgggaccaaagccccctggccgcggcctggaccaagtccaacaggctgggggttcagccggctcagtccaggcctccccccacttctccagctgctgtcaagaccgggctgcgcgagcccagctgcgcccacccctcgcccctggagacccgggtcccccacgcgttcgcccccaccctccgtccccgcccgcccgcgcggggtcttcgctgcgagccgacgggagtctggacacctctgtccccttcccctttccagggccgcagccctggcggggcgcactcacccaagggcctgggccgggggcgtcctgggctcggcactctggtgcccgcggccgccgctgcagctctgctcagatgcggccggcgctcgccgccgccgcagttcggggagggggacgtcacatgaccgcggagcgctccttccccggcgccgctccccactcactgcggagcccaagccgcgggcgcgggagcggcggggaggcccccgccctgccgccccgccccgccgcaggtcctggaggagggttctcggtgcccccattttacaggtggggaaactgaggaccagagaggggcagggactggctcaaggttacacagctagacagtggcagaacctgggcgacagcccagctgtccaggcaacagctcatgctccaaggggactgggacaacttctggatcaagtggagacgtcgggataggtggggcccacggcccccatgggctccgcttgtctgcaggcgcgggaggaaggcgcacaggcttcgctgggcgagaaagctgctgtgccctggctgacgccctcctcacccgggcgctcggcgcgcttcctggcagaggccacgcggttgaccctcgccagcccattcgcggctcttggactttgtctctggactgggcagctcgcccccgccccagcctaacccgggcccagggcgggtgtggggaggggagccacaggctacggagaagtggaagggaggcacccggaagagagtgggatcagaacaagagtgaaaacccaggcagggagggggcggcagagatcacctcggcctgacttccaaggcccagggagagttagagacttgcccaaggtccacagcaagtgagcggcctgcccactcgagtcccttctttgatggtcaacagagcctgaggctcctgtgccccactccccaccaagggggagccctcacccacacctctttctgttctccactgagct

SEQ ID NO: 33102 - DNA, 800 bp, Homo sapiens
caggtatggtggcaggtgcttgtaatcccagctactctggaggctgaggcagagaactgcttgaacccgggaggcggaggttgcagtgagccgagatcgtgattgtgccaccccacaccagcctgggtgacagagtggcactccgtctcaaaaaaaaaaaaaaaaaaagacttgattacataggcatgactgattgaatcactggccactggagattagcaacctttagtcctctcccctcccagaggtcagactaaaaagttctaaacctctcatcgtggttggttctcctggcaaccagcccatgtggaggctaccaagagctcccagccatcagtcatttcattagcatacaaaaagacacttagtcacttcagagatcccaaaggttttaggagctgtgccagaagtagtacaaagactaagcatatatttcttataaatcaaaatatcatataaccctgcaggaaaaataactaaagaaaacatctcaaaaatgttaaatgacaacaatgtttttgtttcaataattctacttctgggcacaggtccaccaaacttgagtaataacagcacaatggcaatgccatagtacgataaggaattcagataatttaatgggtactttgttccaagactgcactgtatgagaacaccaacgtgttaggcagaggataggttccaaaaggtttggttatgacgtactaagcagacatctgctgtgattttaggccagggacacactttggcagcagtaaacaggacagaccgggcggggtgtggtagctcatgcctgtaat

SEQ ID NO: 33103 - DNA, 2302 bp, Homo sapiens
tatacacagacttcaaacattccagaacttactgttaaagtcagatttaccctccttgtgagacagacgcccagagcttggacttattcgtttgctttatagaaactccctaacttatttcacttctcatactagactttaagctccaaagccagagaccatgacttccattccttccggatcccccagcggaatgtaaaaactccagaaagcatttcctaaatgcctgccgaaagacggctactgagcatgcccggcttggccaagtcaatttcaacaacattctgaaacaaaaactatagttcccgcgttacaaggtggaaaaaagggaataaacgggagcaaagcctaaggattcaatctatatgagggggttaaggaaaggtaaagttcaagggcggcgcagacgtgaaggacagcactatcacagcttaaacttggtactcggtaaactggtgtcgaaccagaacgaccaaagaaaggcttaaaaaaaatactagattaacgagtgagggaaggccaacgggggtgcagggtatcgatgacgtaggctgaccacagttttttctaaagctgccctctacaaaaataatactaagatgatcaggccttcggtgtcaacaccaacaagatacactgtgatgaagctcacttccaaaaagttcctttttacaaacgaaagagccgtgctgtggccaagataccccaaccatcaacgcttgctaagctctcagctcctgccttcatctccaccgccatcttctggatgggaacccaaaccttcctaaagtgctttggccagcatcacctccgcgcacagcccgggaagcctgcgtttcccaggtcgcgcagacggcgcaaagggggaaactccacctcgctcggctccgcgcctcccaaatgcacgcaaagggctgccgtcttcctttcccctaccccgcccgggctttccaaggtccggcgcgaggagcccgcgaggcgcggtgcgcgggcctcacctgcacacgccgcgaatgcagggctccagccagatgcggtaagcggtctcgatgtgctcctgcgacacctcctcgggccgcaccgtctccgcccagcgccaggccgccttctccagctgcagccgcggggccatggccttggccccaggaacgcctcccgagccagaccgccgcagccgccgccgcggtctgcaccgccgccccaatgggcttcgccacctgccagcaaggaggacctggcgctccttcaggcagctggccagtcaatcacctgtgcgcgccactgccgccgcgcccgcccgcgcccgacccgcacgaccggccgcaaagcgccgccgtcgacacccgacacaccccgcgcccgcggacgttaaaggtggactccccgccgcgctgagcgcatgcgcgttcccagcagcctctgcgcctcccgcgcccctaacccgacgggctgaggtagaggaagcgtacgtccgaggcggtcttgccacgtcctcactggcacttctggaaaagcagcgtctcagcccccgttcagggcggcgcactacgtaccactactctaacaaaccagtgcctcgaaagctatttcttgcctccggtacttcccttttaaccatgaagttttcacgctagaggctactcaacgcacacacaggcccgcccagactgtggagcgggacctgtttagagtagaaaccgagtcgccaaagaaaccagtgttggctctttagagggagatttaacttgagcctagaccggttccgaacccctttcccgagccctcctgacgtcatgggaccttccggccttttcccgtgctagggtgggactacgtgtcccggcatgccctgcgtcctgccactgactgtgaggcatgctgggatttgtagtcttcgaggtgggagtgctcagtgcgccgcagactgtgcgggcgggggtccgaggtgccagggtggagtttctctggtgcgcaaggtcatgtttgctgttggctcccttctcaagactgttacctctatgccaggattttctagttcctctctagctcctggtttaaaacatttcctttctgcgactcctgccccaggacataaagagtagctttatgagaattgttttgcaaactgtaaagaactctactaaagtgaggatatttaagaattttgaatttgaattagagctctgccagaatctaagcgctaacttctgactcagctgcttgcctgctggaaaaccttaggctgaattctttagataaacattcactgggccgagcaccgtggctcaaggatccaatccca

SEQ ID NO: 33104 - DNA, 894 bp, Homo sapiens
cctctgccccgcacactcaccgccagcagccgcccgtgcagcagcagcgccagcagcagcgcgcccgccgcccgccaccccatggcccggcccgcgccgctctctcgctcgctcgctccgcgccgcccgctccgcgccgcccgcagccgcccgctcgccggccagctcgggacagcgcggccctctccccaccgccccctttcctccccgcccgccccgcccccgcagcgccggccccgcccccgaaccgcccctccccggagcgccaggccccgcccacggaccgcccccgggccgcgggctctgctcgccccagccggccgcgcagcctactaggcctttgtctgggcccccagccccctccgcgcgggccgcggcccggcccggctccccgccaaacccggcctggagtatgggatgggacggggcgggggaccgggggcccgggcccgggcatgggatggggccgccgggccaggcgctctcgcctccccgatccccggctcccccgcttccccgcgcgcgccgccgacttccacgcccctgcacgccccgcacggccgactccactcgcgcagcttttgaagatcccgggatctccttcccacgctcacacgcacgcagctgccgctccgcgccacacgtgcacgccaacttccacacccaagaacaccttcacaccataactttactgcacgaacacacttgtgcgctacccgggaacactttcacactctggacccaactctgaagtaccaacaatcctcaccggctcacatgcacacttaactcgcttccaaactctcacctccaccagggacacaggagacagccctcacaccacactcagcccctcactcacgcatacatcccaacaagtcacggagcgggagg

SEQ ID NO: 33105 - DNA, 1080 bp, Homo sapiens
tatctccaaaatatgccctgtggggcatatttctgtgggaccagctcagagttgtaaagaacagaaattgcatccacggtagtcaggccaactgcctggccccaacccaggctccaggcacagcactgaataaggtctatctctgatccgcacagggagataggggtggacagaggagggacgcccaatcttggccctcagtaaactcttaatctgatagaggtgtggggaagaatagtccctgtccgggtattgttctcagtctgatagagaatcctgcctccaccacctagccgtgcaatcttgagcacatgattcaacttccatgtctcagtctctgcatgtagaaaatgagaataacgttaagacgtctctcttagtgttgttatgagaattaagataaattaatatatttcttttaaaaaacacagccatttcagacacttggtaagcatgaaataagtggtagccatttctcttattactatttctggtgtgctcccaatctaaagagagagacatgacttggcccttggggagctgaggtctgatagaggagcagcctccacagccaccccagggacctcccatttgaggggagagtacaccaggtttgcacttggaaactccctgtccgatgagaaaggcttcaaaactccactgacttcagagctggcaggtggccagccctagtggcaggatttttccaaggccttgcctgtccatggatttgtcagcatccgtgacaaatcgcatttcatgagctgcctcagtgtctgttccctacctcgggccctttaagtaccagagctttggcttcttggatgatttgctcatgagcaaagggggaaaaaaagggaaacaagcaaccctttgtagatgtttggtcaagactaacccagagctataagtcttccttcctcaaaggggttgaggaaagagatggtaaggccgactagggactggaaggagctgggctgacacgcagaaagcaggaatatatggcatgttgagaaagtcttccagggcggctccagcagcggaggattggtcatccacctatttattctgtgtcctctc

SEQ ID NO: 33106 - DNA, 1796 bp, Homo sapiens
gatcagtatgacttcaaagcttcatctttgagatggagtcttgctccctcgtccgggctggagtgcaatggcgcaatctcggctcactgcaacctccgcctcccgggttcaagcaattctcctgtctcagtctcccgagcagctgggactataggcgcctgccagcacgcccggctaatttttgtatttttagtaaagactgagtttcaccttgttggtcaagctggtctcgaactcgtgacctcaggtgatccacacgcctctgcctcctaaagtgctgggattacaggcgtgagccaccgcgcacggctaaagcttcagttcttaaccatcaggcgacagtgcgtagtctggtagcaactggaaaagtcctgctgagatttagcctcccatacacacagagtcccaccccggacaggctgtatcaaccccccacggccatatgcccactgctgtttgcgtacaatgaggcgggacctatagactgtatccactgactcatctggagtgattccgcggggcgccaatacaaggaccactgtctccaaacagcagccagccacccctctctcttggtttccttcctttgagtggtgcaaaggcttaagggtgtaacctcagaatggggccctgaatcagctgtgggcgagctcctagagtatcttaattcctgcttcatctctttccattttgcagttgggcaaactgcggctcagaaagataaagaacttctccggagcgaaaaagctgctaagaatgtatccaaaactccgcacggtaaggactgaggacggtcaaaagaccaccaagagttaaaaccatgaagctgcgtagtaccgcggaggctagagagacccggcccaccccttccaacctatgcccctcctcttaacttccgggcggggcatgacttccggttcccgcgcggcgctccaaagctcggggagtggtggtctccctttcctggagtcatttgtgggagttagggtcttatcctgatctttcctcgtcccccgctcccccgtcctccgaggtggcagctgcgtaggtgaacgttccccctgtccccttccttctccttcctaacccgagtacgcttgctcgcggccacagtggctgcctgccccaggagcggggagtccctgcctttggggtagggaaatgactgaaatgtgggacctgcgggctcctcgggctgacttggacctcactgcagctctggaggtggacctcgtcctgggaccctagaagcccatttccgcactcgggctaggccttcggagccgcggcagcatagtgggaggagtcgggctcagctcccccccaccacaaccgggattatttttatcggttgagtcatcgcactacctttcatccttgtggctttgggcaagtccccgccctccgagcctcactttgcttatctgtgaatggaaataacagtgcctaccccatgggctatcgggaggatcagttgtgagggaatgcagtgtggggtgtctggccggcagaattccacaaatggtagcagcggttgatgtcactggaggttcctggggcagtaatttatcaagagtttatgatcctgaactaaggatcatacggaggaggatctgtgtataacgttcggcacaatgttagataggaagtaagggcgcagtgcactggagttattttttcttttttttttttttgagacggagtctcgctctgtcgcccaggccggagttgcagtgccgcgttgtcgcctcactgcaaccttctctgccacatgggttcaagcgattctcctgcct

SEQ ID NO: 33107 - DNA, 444 bp, Homo sapiens
gcagacaagcagggcaggggtggcagtgattcatcaagagtttggcagtcataagcaacagaaacctactcaacctcgttcaggcaatagagggaatttattgctaatgtgactgaagattgaagcaagactggatctgatgtctcatgcaatgccactgggacttggtttcatgtctccatctctcagttctgtttccccctctgtcttggtctcattctcaggcagcatctctgcttgcagtgggaagctggctgccagcagtgccacgattacatcctactctcagcaaacagagattcactgaactgaatagttgtgaccaaagttccagaattaaatctcattgggtcacatgcctgttgctgaaatggtgtggcaacagggctctctataatgctgtgattggccaagcctgggtcacgtgtccattcccgcaactag

SEQ ID NO: 33108 - DNA, 1872 bp, Homo sapiens
gcactccagtctgggcaacagatcaagactgtctcagaaaaaacaaacaaaaaagaactggtagaggaagcgctttgcatactatcgttcacagtattattacaaatacaaccattaggaaaacatgcagagcatagccccgaactcacgagctgcgccggcccgcgcgtgcgcgacaggcgggcggagccagggcagtccaggcaccgccttgacccgccccagcctcttccccttccctgttcctcccacttccgcgggcacccaactgtgcgtctcctgcgcgctgacgtcaggtgcgtgcccctgtccggcagccgaggagaccccgcgcagtgctgccaacgccccggtggagaagctgaggtgagtgcggggcccgaggttccccgcgggagctgccaccctaccttcccatccccgccgtctccgtcctctcccagtcctcggggacaccccgtctgcgggatcgtggggggcccgggagcacgggttgtgggggagtgcccggctcgcgctgcgtcctccgggcgggcgcgggtccgcgttctgtgggggagccggggcgggggtcgcggccggggaggcagggggcgcccgtctgaggaggggcgcgcggccggggctcggggcgcgagcgggaccgggctgtcaccggcagcggcggaaggaagggggtcacacccatcctgggcgcccgggctcccctccccccagcccggcccggcgggctcctaagggcggccgggggcctcagagcgactcgcgggcgcttgggccgggccgggcgccggtcttccgtgctggcaggctgcgttccgtgccctgcgctccggcctggacttcctgcttcgccgggcgccgccgcggacattttgcggcgggggtgggggggcgggggaggggagtggcgttgcggccgcggcggggcggtggcaggagggcagctcgctggctgctcgcggcggtgcctgtccgagctcccctccgcgccggccgcgtcctctgggcggggtggccccgagccacggcctccaggctgctcttcctttcggaggtcgagttcctagcatttccatccgctcctccagcccgctccctgccggtttagctgaagcttccctttcggggagttacctaactacctcccgaagccgtcgttctgctgcttggttaattcctcttatcgggggggaattttctttgttcgtttgtttttcctcccctttaagtccaagataaatgtagtgtggaagattacgtcatcgcggtataaggagtgagacttaactcctacaagtcagggacttaaattcaaacagcattttgcagccttagtcggtcacccagtggcttatcctgcctgcttcccaacacgtcgtattcacagatgatgttttgaaagcttgttacttgtgttcatgaccgccttcagtgcacctaaaagctaggaaggtttaaaatcccaggattagtttgtgtcagggaataaagtgtaagacaacaccgtccacggccccttgcgtggcattaactttaaatagaggtccctttgactatactagaatgaggtgggtttatttgtgggaacacttttcggtccaaaatgactttcccagactgtttattctcctttatgacttactgcatgctgggaatctccctaggttgattcaagtgcactttttgtggtgaagttgtgttgaaaagaggatcagtttatgcctgatctatgctagacattttagttttgttattaaaaacgagacttcgatctttaagcaaaaaacttaatattttcataattttgagatcacaatttttattttttttgagacagggtctcaaagacgttactaaatataatggata

SEQ ID NO: 33109 - DNA, 351 bp, Homo sapiens
catggggtcctgagtacccacgatggcttcaggccagcattgccccaggctacctccttccttgcgcctttgagtcctctcccctgacctgctttctgtcagtagatgacatccactgtctcctccatgccaggctttgccacctgccaagaaacaggtcaatgagccatgaaccttgccttcaaagggcccgagtcctagtgatgggggagtggagtcgggtgaggagatacgcatttcaatctaaaaggtgtgctagaagcagtgtgaacacaaatggcttagacaaaaatgtgtgtctatatatagaaatagagaataacaaagcaaatgggtgaaaatgtaagctgt

SEQ ID NO: 33110 - DNA, 730 bp, Homo sapiens
agtggttttctaatctggttggaccccatcccagacaaaatctgagaaggcagggcccaggaccctgcatttttaccaagccccacggggagcatgatgcagttggtccagcccccctgcctattcatgccacactggccagagaggatcgctgtgaatgggcttcagaaaggcctcccacagctttagctggggggagggcacagccgcctgtagaaggaacagcatggcaaggccagggaaactgtgaggccctctgggaaagtggtgggagcataggttgtggggtggggacaaaggtggtgtagctcaaggcctgggacagcaatggctaagcaaaaggaatgcatgtctaagagtaaaatttcaggtgctgggaatttccgtgcatgactaagagtgaaattcaaggccagcaaggattcttttcctgcatgaggctttccttatctcagcttcattctcaggccacctaatgactctcttctttgacctcccagggcactgactctctccctctctttctaactgaactgtcagttacacaagctcacattttgcatgactttatgcatttccttcttgacaatgatgacaatagcactgccttccctttgttacacactgtgtgtcaggccgtgtactgaccacttctcttgcattctctctccttctcttcacaagagccccatgaagtggtttctggtgctctccccacttgacagaaaag

SEQ ID NO: 33111 - DNA, 858 bp, Homo sapiens
tcctcccaggcttccacgccaggcccgaatgcaaacaagaggcagcaggggtggcttgggcccctcacacagaattagtgagattagctgagaaccagagcccagcagatgtcccctctctggactcggtgactcacttgcctccctggttgagaatcgtatccggctgggcctgagctgtcctggctggcggggagctggacgcagggcagaggtcggggtaaacacccgtgctccaggcgggaggtcgggatgggggtggtgacaaggaggacaacatttccactcagcagaaagaagagcctgagctgccctagagccggaggcgctgcctggagaggtcgtgaggacccggtcccagaggtgtgcaagctgggtaccctttgaagactataggaggattccagttggcgctgggagtactccaggcaggatgccagttcaggtccttcgtgcatgagactctcccagagaggcaggcaaacattttctgggaagggccagatagtaaatatttcaggttttgcgggtcatcctgctatctctgttgcaactgctcaactctgccactgtagcttggaagcagctacagacaatacataaatgaatggatgtgggtgtggttttgtaaataaaactttatttacaaaaacaggcagtgggccaggggtggaccctgagccaccgcttgccaactgtatagagcctcctggaagcttgtggattgcagggcaatgacgtgactcttctgcatttgaccttgcaggtggtgccgctccacctggatgggtttattcttccgttttctcttccctcgatgggtttattcttccgctttcccttccctccctccctccc

SEQ ID NO: 33112 - DNA, 708 bp, Homo sapiens
agtctcgtttgggcagtttaagtcagagggtcatttctgggcctgggctccaggttccattcaaatgggggatcccagagggtgcggaccatgtcctgtaaattcaccccagcggctccaggaaggctccttggggtgtgagacatgctggtggccagctaccccccagctggagtcctcacgctgaaggcgagacagcctcagcggcggtggcactggctgtgcctgacaccctcacccgggacatcaggctgccctgcccagtcacccacagggctgaggcctcaccacatttgctgcaatacccgctgcccttgggctcacggccatcctatctgcggcagcctctgtgtgaactctgccccgtgaccccagctggaatggaggatgccttctccagcagcctcccatcggtagccagcagcagggcagggcgggggcgggagccacgggacactgggggctgggccaggctgcactgggaaaaggggcgctttagtcctcagaagaccctgatggagactgccttccccatggcctctttgctcaaaggtctggtcagaacccctgtgagcatggagtcaggggatccccagaaagcagcgctggaggagggggcctgctcaccctgggggaatgggaccttcacaatttaggtaggaaaagagaagtggctcggcagagagcctgctccccacacccgctcac

SEQ ID NO: 33113 - DNA, 805 bp, Homo sapiens
ttggagtggaatttgtttgaagaaaaaaattcgactttaaagaaaaaaagatggatagccacagagaggccagtctgttcattttgtatttgagagtggaggtttagggaggttaagcaacctaccctatgcctcactgagcagtagcggtgagtcgagcagggatctaaaaccaaggcatttattcatttaaccgacatttctcgaacacagcgggaagagggaaatgggctgcatcctggaatctcagagaagacagacgaccagcccaccctcctgaagccgcctgatgcggccaggaggaggctgttgtggtcccctttgtggctctgctgaggtgggccatgagcttaccaggaactttggagaagggaagtagcctgtgaatcagcagcggcttttccaagaacaatagtgttctcctaacaaacattcgttccatcagcaaactttggaacattcaacaaacattggtccgttcaacaaatatttgttctctcaccagtgttgactcagctcctctcctgtgcacagggactgcagacgtggtgttagggacagagtcccaggtggcataaagtcgggttggtccttggcaaaagactcagggtggcagaatgctttcaatacctccctcctttcctctgtcaccccaaaccacagcaaaagagacaggatgaccccagccctttgctcccaagggactgactcccaaactcctcctttatcaacaaaaccgttcccgttatcaagcagaccctcccgtcccagattctgctttccagagagcaattcagcaagagtt

SEQ ID NO: 33114 - DNA, 2099 bp, Homo sapiens
gctgcagatgccttcctacctcccagggaggctgtgaccaccccatgtgacagagacaatgacattcaacatctgggtagcagcttatgtgaggtcatgactcagtgcccagcacatggcaagtacccagtgagtggtggctgctttcattacttaatagcaatctccctggcccagaccttcttaccaggctcatactttccagcacactgaactgggatcaggaggtctaattctactcccagctctgacatccactttctgtgggaccctggatgtctaacctccccgggcctccatctcctcatctgtagaacggagaaaatcataccctcctcacagggctgctgggaagacaaccagagagacaggctatgggggcactttgcatgctatagacaaggggcagcaaactaccagggacaaatccagcatgccactttgtaaataaagttttgttggaatgcatccaccctcatccacatacgtattgtctgtggctgctttcacacaacggtaacagagccaaatagttgcaacagagactaaaggtctgcagagtctaaaatatttagtatctagccctttaaggaaaaatttagctgctcctgctattgagcgattattcccaggtgttagcagccttcctccttcctcttccctgggagatgctcactctcaggccctccccaaaggctggtgcaaggcctgggtatctcctctttgacaaggtttcctggtgactctgatgaagaaaggcccttggtccagactgcaaaacacaccagggtagtggactcagacagacttgagatcaaatccccgttctatcacttcccacctgtgtgactgcagacaagttgcttaacctctctgagcctcaatgtacttatctacaaaatgtggacaacaatgcctatcccttagagctcctgggaagattaaatgagacaatgtctataaagggctcagtcaggcctgacacaggatgggtgcctggtaattgacaggtttttcttcctgcatccctaaactaatttagtccctgggtatgctgcatcttctcagttctcccagaaccctcctagcttctccctttctgccccactgtggcctcttagggggactctgccccccatctttgttgaaggtccttcttccccagcagggagaggtacatttgctgagaggcagcgctggggagctggtctgatagagcctggagtcctcggcccatttctgacactgaaacaccagctccgtgtttacacaaggactctcataatatttgctttctgtggccattatttgtccaggggctgacgtcagatgaagacaagcaactccccactagcgctttcaaagcacaaggtcagcacctccctgtccccgctccactgtcccatcccctggctccttgtctcagttttctaaactaaccacactccaggctttgggtgacttagcaaatgtgttggcgtgggaccagcagaaaggcagattctggtcccagcctgtcgctaactagctgggcgaccttgggagggtctgggtcctctccctgggcctcagttgcctcctctgtgccctgggagggtcgcttccagcgccacaattccatgactgtggaacttcaagaaccccccaggctgggagattccagcacccactgtcactctccttccccacccctccacccttctcaagctgcctaagagtgggaggaaagtgaacagaaattgtgaaaacaaagccacacttcgacttaactacaaccctgccgacagcacaatctttcatcaagatagaaaataagaagtgaaaaaagctacaaggcttcaactgggcattttaacatggaggtatgtcctccagcacagcaaataccctgcaccctgaccagggtggggagcctgtgaatggacataagtccagcctcttccacccatctgccactcatatgagaaggttgccgggtgccgtggctcatgcctgtaatcctagcaatttaggaggccaaggcggccagatcgcctgagagaggtcaggagttcgagaccagcctggccaacatggtgaaacgccatctctactaaaaa

SEQ ID NO: 33115 - DNA, 1045 bp, Homo sapiens
tcgaggctgcagtgagccatgatagtgtcactgcactccagtctgggcgacagagcaagaccttatctcaaaaaaaaaaaaaaaagttctaaatcttgatatggttggtaatggttacacaggtgcatatatttgccaaaattccatttttaatgagtacatttttatatgtaaattataccttggtaaagttgattctaaaggaaatgaaagatcatgctggcttgctgtctgcagaacattgtaaaggatatgaaaagtggttgcagggggagggtagtagagtagttaagaggtaaaggtgatttggactttggctgtggacctggacagagtgtatcagaggtgaaatcaagacttggtgagtggttgacggttagagagagagatgtctgtgacaattcccaggtgtctgacctgagcaagtgggcagagaatggcaggtgggctatcatcttggagctagaaaccctgaggggagaaacaggcttggctgggaaatcatcactccagttttggatcaggtaaatatgacgggcctgtgagccatctcagtggaaactattccatccttctaaatgtgagtgccttttgccttaggggcaaccaaggcgagggattcatagggtcaggcccgcagaagtgctactgttgtctgggcagccctgctggagcaaggcagtctccctcctcctcggcatttgtcatctgggatggataagcaggcaggcagttgacccttctgagtcatttggcaaattccaacagcagcctcatctgagactgtctggtatccactgggcaagagctgaagactgagcttcatttggactggaaaaaaggtagtgaaattctaacacttagaaagccaggaaagtgaatgccaaggcccagacacctactcgaacaaataaaaagcatatgtcgagcctccagcaaacttcacttccacaaataacaccactgccttggggaacagcagagacatttgaccggacagcagctgtgcagagggtgctatttaaagactcagcttttgcagccc

SEQ ID NO: 33116 - DNA, 1711 bp, Homo sapiens
gctaggactaaatcccaaagcccctaaatcccaaaattgggaggtgcgagaggcaggatcaggatgcctccaggatgccttcagcccactgcgccccaccagcgccaagcctgtcccacaaagagtgcgggctggggacgcggctcaggtcgcctctccgcctcgcacgtgaatgtgttgttttggaaaaacgaagccttttgtgttcacttccttgccctcctttgaaacaaaatcctaatcctagagctgccggagcgagactgcggagctccattagaactttccttagggccgggcatggtgggaggccgaggcaggtggatcatctgggctcaggagttcgggaccagcctggccaacatggtgacatcctgtctctactaaaaatagaagagaaaaaaaaaattagcagggcgtggtggcgcgcgcctgtaatcccagctactcgggaggctgaggcaggagaatcgcttgaacctggaaggcggaggctgcagtggggcgagatcgcgccgctacactccagcctgggaaacaagagcgaatctcccatctcaaaaaaaaaaaaaagaaaaaaactttacttaggaagtgtggggagggaaggagggagtggccaaggtcagaggtcagagaagagcctagcaaccagccggcccccgccgtcctagcataggtggagagcgagcgcgtgacgcaggccccgcccccagcacgtgaccgcggcgcgtggggcaggtcgggccgccccctcccctctgatacccattgcgcgccggcctcaagatggccgccttctggcgtctccggcgctgttgaatggcgaaagctttattgttcccttcgggcaggagtgttcgtgtcctctatggcgctgtcaataaagaacggcagtttgaatcggtgctgaacaggtaaccatagaaacggggctgggactccgcgtggagacccttcctgcagcgggggcccgggtgcgccctaaatgaggggtgtatacagacccttccgcgtggcgaactccgcgggactcggccgaatcacggccgcctcacctacaccccggacgtgccccctccaggggcggtccgcacccctggcgccggctctgctgtagactgcggaggggagagaccgcggggacccactcagggcgccaggcccgacctgacaccgcctggggctcgctgtcgccccgcacctccctctcggcccgtccggaggcctcttgtcgctgtctcactccccctcccttcaggtcccttcgccgggcgtcagcggactatggccttgggcctaatccatgccccccttctctcttcccctctcggtctttgtttacagttgcaaatggttagggggaagaatatttcatgtaatttgcgaaagttctatgaaatcaagtccataaatgaagttttattggaacacggccctgttcattgttgatgtattgtctatggctgctttcctgccaagagggcagagctgagtagttgcgcagccgttgcttggctttgatcggctggctcacaaagccagaaatatttctgtctggtcccttacagcaaaagtttactgacccctgccctaaacacaaggagattggatcagtgttgtcattcagctattcctctcgtcggttcttctggagtgggaaaagagttaaaactgcgcgatgcaccgagagcactttagttgacagaac

SEQ ID NO: 33117 - DNA, 455 bp, Homo sapiens
gcataatggctagaaaggaaatgtcacagtaggtcatatattgtgtcatgagccaagatatcttcactgtgttcagttcagcatatatttattggctggctgtaccattctaggtccttcgaggcttaactaggtctggttgaccatttcctagatcaagagcagtgtgtcctggcacaggatcctgttaggtctagttactttggcagcaactggctaaagcctggggccctagaagataggctgctggaatgcattccaaaagagtttgggttggtaccaggaggccacagagctatttgcctaaggcctggttgttaggatcctccatgtcatatggatttattcccagagatactttggacattgtttttctgtctggagccaagggcaggtgcaaaagagggatttgagggtgacttgtgactttctagaggtgaagtgttgcttaaaac

SEQ ID NO: 33118 - DNA, 1273 bp, Homo sapiens
aatttctaagaagtggaattttggaatcaagagtataaaaattttcaagcgtttgatatatattgccaaattgcccttcaggaaggttgtaccaatttactctcccaccagctagctgctaaaatcctcataaaactgctggcatgacttctcaaggcaactagataactatgtttgttggtgttattgatttcaactttgtgctaaaaatacttttatatctggaaggaaggaatagggatagagtacttttgtggcatcaattcctaaaaccgtgggaagcgacttaagtgttcaggagagaaaacgtttagaagccactgatataatggctaagccctgaatttacagtgaggactagatcctcgattttatttttctcagtgatcttatgttgcacatgtgcgcacgcacacacacacacacacacaatggaaacaacctttaatctcagaattacattttgtgatttaattgtttttaaatttttaagtcctttgaacttcttagagaaagaaaatatacaaagattaaacttctgttttttttctccttagtcttcaaattaagtgtaatttcaggcactcaatttaagtaagttgcttatagctctaaaagttcctgattccctctttagtgatttcattcgattactcattcagacctttttctttttagctagattgaatgtgtcctttgaactgtttcattatcttggtaaaacagcatttatagatagagtccaaactcagcttcattctctgcagcaagatagaccacactgtcattttcttctgtcactttcagtttacttgacagagaaagctgaagcagaagagcttaaattagttataaatcacaaaaacacttcttaagattggggttccaccagagcttctttaagtgattccttctcatgaaagttgaagcagactaagaaagtgggagtggagaggtgaatgttgattgaatagccacagtattttgacatcgtgtggaatgtgtacccaggccttttcaaactttttttctggttagaaactatgctaataatggatgccatggcctttataaatatgttgggttttgtaagaagcagtaaccaggaacatatttacatgaggactggaaacagaaaaaaaaggtaattactatagctgtcatttatttattgcttactgtgtgccaggcagtgtgctgaggactttttaaacattattaagttttgccctcatagcaactttatgacatcatggatattactcttatttta

SEQ ID NO: 33119 - DNA, 390 bp, Homo sapiens
gctttgcagcattcaataaaaattgagaaacatttgggctgaaatcgctgctttatctggaggagccacagcgccgggagagaccactgctgcgcggggggagcccggggtctcagtggcccgggcacgcggggtcgccgcgctccagcgcccgcgctgcccccgggtgaccctacgggcgcggtgtggggacccgggctcgcggcggcgcgcggccgccgggggccgggacgcgcgcggggggcggtggcctggcgaggctccccccgcgcccgcggctcaggtgggccgtgcccagcgctggcggagcccgggtccccgttctgcccgggctggatggctcattctgctggctgcgcggtggcggcggctgtgtgtgcgccgcgcctt

SEQ ID NO: 33120 - DNA, 2375 bp, Homo sapiens
gagtggtagttacatgggtatatgcatttgagacattcatcaagctgtacacttaagatctgcatgctttactgtatatgagctatacctcgattaaaaaaagcttcaaacatccctccccactttctaatggtttggctttgggcaagtgacctgtctgagcctcagtttcctttatctctgaaagggggtggtcacaggggttgagaggatgtgctgagataattataatccatgcagcagcctagctcacggtgggcgcttggcaatggggggctttgttgatgtcattcagcaaggctcgggctgggccttggatgatcggcagctgtgagcgcagcggggcctggcgtctgcccacagatgtggctggtgtgcctagccgacgctgctctggattctgtgacaatctgcagcttatctttcaaagcctatctccccacccatttctacacctcagcagtcagcctgcacagtggggacgcagcaggatcaggatgtttaacttctctatatgccagcaaggtttggtgagaaagacctccaaatacatagtgatcaactgctctgatcgaaatctggtaatgactgagtccctgccctgggccaggcattttgccagggaaggaggtgagtgcagccgtggaaagatcgcaccagacacctgccctatggaccttgcagcctctggcaacagatcagacagtcatcaaagaatgagcccacagacatggggcaactgcatctttcacaactgccaaaagaggctgtaatgattgggtctggtagggaggccagggaaggcttcctggaggaagtgacacataagtatggactgaaagatgagcgggagttgacctggctaaaagggaagggagggtgcaccaagctggggaacatcttgggcaaagatccagtaggagtgtgagttattggtggtcaaaaggaaccagagtggctggaactgagagctccatgaagagtggggcagggtgaggccagggaggcctgtgggctcctccttgagccccaccctgtgtgtcttcacacttggagcaacaggaagtcactgcagtgtgttctgcaggggggagatgagatggtgaaattagccttttgcaaagaataacaaaacttccatgatcgaccacctactgtggaccgtggaccatggaccatgttaggccctccaatacacatctctaaatcctgacctccttctgcacgggaggcctcacctccacctttcaggatgcagaagtcaggtcacaaaggtgtgaagtgtgttttcttcatgaccttcccacgagggtgtaggggagctgggattcagaccccgctctgaggccacatccacacacttccctctgcaccctcctgacctgtgaccccccgggggtgcaaatctcttaggttagccttgctttccccattcctggaagggggttaggaccagccctgcctccctcctagggagtgttttaaagtcagatgaaataaaggaagaagtgacaggtggtgagagcaggagagtccctcagtccaagcctcttcttttatagagggggaaactgaggcccagagagggagattggctggccccagatcacacagccaaactcgggttctgcatcagctgctgcttaccagaaacccaggcaaacagggagaactgccttctgctcagggttcagtcaccggactgagggcccaagcaaggcgggctcacgtcctctgttcactgtggtcacagcagctgtgggccacagatagcccaggcaaggttacttgtattaataatggctgaaatttattaagccctttttctgtgccaaagcactctgataagtgcttttacggagttatattacttaatccttgacattgcccccaggtggtgaagtggcttgcccaaggcccgactcaaaatcaaggtctgttgatgccagaccaactaggctgttccagagattctttgtcatcctggtagagcaaatcgagaggggcttgagattcctcaaatcccagctgccaaagcccttgcacagccacaggcaagggaggggggctctgagatgactcacccacccagctgagcaaagcaaacaccttggggtggcatgtggtctgtgagctggcattgccagacccccagtcatcagggacctctgccagcaggggcggcctgcaggagagcaggcaagcgagccgtcggggttcctctgctgtttggggactcaggtgcgacctgtctcctcacctggaatgaacccatttgttggtggcttgagctctagaacccatcgtgctgtagagcggagccggtctgcctggggaaaaggacaatgaagttgggtggccccactcagccactg

SEQ ID NO: 33121 - DNA, 2730 bp, Homo sapiens
caccttggcttcccaaagtactgggattagggtgtgagccaccacacccagcctcctttttactttctggctttgcttttggccagcatgttggtgccctggaaaaaaagaggaatgcagggcagggactgggatgtgcatttcttctagaactctctacccccaacactgcctcacccaggtctgggcacatgataaagatccaccagaaacctggaagtgaattgaaggattcagaccaaggtgtttggttctgtgggtgacaacaggtgtttcttggttgtcttgtgtcacagatcctatgtgacatcagctcccattgccaggggagctgtccctcctggctcctctttgagggaaggggaaaggaaggtgaaggtattgggcccaggatggagaggggaaggatgctgtctcctccccgtccacagggtggcttatgtctaccggagccattcattcattcattcgttcattcattcactcactcagctggacctccattgggttccagaccctatactgggggctgaagatactgagatgagtcagctggtccctgccctcatggaacacctagaaagacatacggacaaaaggatggggatgaggaggggatacatgaagttaccctaatcaagacgtgtggtttgacaaaggactttcttctcaaattttgaatttatttatagtaacaactgtcattcattgagtgccagctgtgcactcagagctgtgcaaagaccttaacctgcattatctcattaataagcccccaaggccccctgaagaaggcagttatattcttacttggcagatgaggaaacagaccagagcagggatgtgacttgcccaaggtcacacagcaagcaagtgtcagatgtggaatttaaagtccagaatccttatctcaacttctcccatgggccacctctctatgaaaagaaaggcagtggggtagtttatattggggcagccctacaatccagggaaggtagtggctggggcagtagaaggattttcagcaggcaaggggcagggggagcaggagagatgggctgggatgggtgctgaggcccggacccttctgtggcatcagagctttgctctcttctctttctggagtcctgggtcaccagagccagacttctgatgtgctttagtcctgtgtttacatgagtgtcagacggagcaggctccaggggaacacggaaatggcattaaataacgctgaatcacacagtaagaaagttccccttcccttctcctccgtgcctgctgattactcatggagaaagtctctgtttcctgccagcatgtctctaacacctctctgacagcccctaatctcccttttcaattgggaaaagcagacttcaagctcagaacctgctagggagctggaatgccaggacatcatcttgttttcatcatgaatagtttagcttatatatttttatttaacaaacatacaaatggcactttctaagtgctttgcaaatattacaaatatttcatccccattacgactttatgagacaggtgctattatccaccttccagatgagtaagctgatacacagagaggttgagtaacctgcctgggtcacacctccagagtgtcagagcaaggactaggaatccaggcagcaggccccagagcccatgctcttaagcatctccccagactacctctgattctcagaattggtgctggctctcttctagttccagcagtagcctgattttttcctttactgatgaatttatttccatgaaaataggtgagccaatttaaaagtaaagtggagttcaagtggttgtgtggaaatagccaaagtcctaacagtagttcaagggctactgaagtttgaagaacactggtcagtccaagcccttcatttggtggagggggatgctctgaagaacagagaggggatgggacctagcagaggtcacacagcgagtgagcctggaggctgccaggacagatgggagcgctcacctgccacccacgcccatctgcttcctgcacgcaggactgatggggcgccaggtggcaggagcacagaggtgtgctcacctgcccagaagtgtcccggtgctgtaacaggatccctgttatctctgctgttctgggaacaggcagatctgagccccaaggcccaagcccaagtcagcattttggccactgctgagctgacatctgttgtatgtctttaccttgtcttccaagtctcaacagagcctgagtggggagctctgtcctcagcctgctggtcagggctcaccttccctacctttacgcctttccagaagctttcacagcctctgccttgagagatgcgagctgaccctgggttcaagtcctggttctgccgtatacccactatgtggctttctttaggatgcttagcccctgcaagctgtgccatcctcaggtaggaaatggggatgtacaagatcaaagacagtgggctgggaggatcacctgccacacagaaaggcgggaatgatgtcagctccttctggagttgcctcgctgcagggctgcctcctttgtcatgaaggccaccagctttctccatgagggtcctgggaagcggagaatgaattagggccattgtccccatcatagagatgagaataccccaagttgggggctgtcttctttaaaaatcaggcttcggtctggagttccaccctgtgcacagtgacaccagtcacagg

SEQ ID NO: 33122 - DNA, 1364 bp, Homo sapiens
ggggaaatgactcaccaaggtcacatagcaagtttactgacaacaattgatctgggacccaggtctttttcattgcacttggctgtttggttaatcttctctgtggctcagaactggcagcccgcttcttggacacagactgcctgttgacaatgtaccacatacggtctttagagccccctgtgctatgtcctctggtctccacaatcccaggaggcagcttctattctgtctccattttacatccgaggaaactgatgctccggaaagggaggtccccaagaaatggcagaactgggtttggacccaggagtcctgtcgttccccagacactgacaagactcctcggttgctgtgaggattaaatggaatgtgctcatgaagcaagcagcccagagagagcctggcacctactaagggctccatgaagttcggcttcctacaatgactcgggtttttttgtttgtttgtttgtttgtttgtttttgagacaaggtctcactaacactacctaacactaatcagtctatgggcaaagactgtgtcttattcaggtctatgtccccagacctagcactcctgggttctgcagtccttgcccccaggacaccaccccctccctgagaaccactcccttgctcctagcccagttctgaaggcagccatttttcactgcagagaccagccctgcccctcccgaatttaactagacgggaacccacagcgtgtcatacagcacagtggccccaggatggcagtagatgcccatgtgtaagatctctggcccagcctgagcctcctttaaagggtaatttacttgcatgtgtctcttcctccaggcccttgtccaggggctttccatccatgaaccaagatattccccacaatatccccatagggaggaattattcaccatcatttacacacgaaagatcatgttcatcctttgcccttcatggccgcttcctactctttggggaaaaaccaaaaaccttacatgcgtagtttaaacctatccagtagatgtccctatgggtcaggctgcaagagttcaaattccagcttccccacttattaccggtgtgactttggttggatttcttggcttctcttggacctcaatgtgctcatccataaaatggggtaatgaagtagaacccacctccttgcagggaggagtgaggattgcatgaaataatacacctaaaatgtacaatccagtagctggcacgcagcaagtgctcagcaaatgttagtcactcttattaccatgagtctcattggcctctcctcctgggagaaactaattgtcctcaccctctgcatcaggacctttaagaaagaagaatgtgggccgggcatga

SEQ ID NO: 33123 - DNA, 2184 bp, Homo sapiens
aaccatcaccctaatcaagatataaaacatttccatcacccccagcaagttctttcttgttcttttgcagtcaacccccgacccccatctcaggcaagggctgattggagcctattactggagattagttttaccagttcttgaacttcatgtaaatggaataattttttgacaatttcacttcgaagagacagactattaaaaagacaattgtttgtgtaataagtacacgcatgctaaaagtacacgacctgttccagttttgggttagcaagggattcctcgaaaaattaaaagaataaaccgctactatcattattagaaagaattaacctggagtagaaagaggtgttatgtggatggggatgggggacatgaaggatgggggacatgggggatgggggacatgggggatgggagaagcgcaagacatggagtgcgaatgaggttggggtccagccagaaggaaaagcatgaacaaaggcttggagacaagagcaattccgtctggactcaaacctggatttcgtaacttgtctccattttactaccatcgaaactgctgtgctctccaagttttttgcccagtccaagcagggcaattatgaataagtaagacgctctaccaacatatttcagtgttttcccccattagactgtaagttctttgaaagctagaacttcataatgtaacccttgttacgtagtaggcaagcattaataaatactggttgaattaacgaataattgggtgagtgaatgaacgaacgcacgcatgcaaacccgaaagtccctggaggaaatggtcaccttcggaggtttagtctggcccagaagccctaagaccacggactgtgccaggtcccactccaaacgccggggagacgctctaggcaagctacacgttctttgctgcggtgccactctagccgcgagaacgccgctctatggctgcgggggaggggcggggctcgtgggtgtctccgaccctttttgtcccggcgcggcgggagcgcgcttggcgcgtgcgtacgcgacggcggttggcggcgcgcgggcagcgtgaagcgaggcgaggcaaggcttttcggacccacggagcgacagagcgagcggcccctacggccgtcggcggcccggcggcccgagatgttatctgggaagaaggcggcagccgcggcggcggcggctgcagcggcagcaaccgggacggaggctggccctgggacagcaggcggctccgagaacgggtctgaggtggccgcgcagcccgcgggcctgtcgggcccagccgaggtcgggccgggggcggtgggggagcgcacaccccgcaagaaagagcctccgcgggcctcgccccccgggggcctggcggaaccgccggggtccgcagggcctcaggccggccctactgtcgtgcctgggtctgcgacccccatggaaactggaatagcagagactccggaggggcgtcggaccagccggcgcaagcgggcgaaggtaaggctcgacccttccctcaaacgacaccgcctggtgccgagcttccccgaggcttctccgccctcccccgccgccgccgggtcttgggccctgcgaccactcagacctccccttgtatcgctgcgcacgccacgtcccctctagctggacgggtggggtgagaaaggaaaagtctttgccggtgttgactgcggtctttgtgctgggtcccgagcgacgtgggaaggggcatcgatgattgctgggaggggtattttattccttaggtctttcttgcacaccttttcattttcttgactggaaaatggctccctgacgtggggttacggttggcgttcttggagacctcacttgtttgttcacagataggtctggaagctgttgggcgatattgatggcgtttcagctgggtgcacgagggggctgtaggttgatgctgaagaaatcgccttagccggggagatgaaaagaaagggtcgtttttgcttttgtttttgtttgagcaaaaccctgctgtgtggtaggagttctagtctttttttttttcttttttaaaatcctctcagcgatcttttggcgcagaattttgcagatgaggaagctgctgattgagagagcaaataatagtcaaaatgcaaatatatgggaagaaaagatttgactccaaacagtatatacaga

SEQ ID NO: 33124 - DNA, 4096 bp, Homo sapiens
tacacagggttggtttgggaggacttaattaagtttagaccacacaccaattttaaatgagtgtatgatacaaagggtctgtgttgccatcgtagtcattggaagacaaatgatatatgattcatctataaagtgctttaaaacagcatatcctcataaatatgcttaaaccattaaattgtgtattttaaagagataaacttcatgataaataaagcatatctcaataaagctgttaaagaaaacccagcttatcctcaaactgtagcattctctcagcacatcttatttgtactagcttatactatagttttcacaatctctttttcaaaagaaggaaacgttaaaccttagtatagccccatctataaattatcataattctgaattcagagagtctgggaattataccaccgttttatttatttggcttttagtgccaattttatatgttttatcaagactctggatgatatgaatcaactagtacaggcaatgaaaaagctaaacccagtaaatatgtagcaaatacttactggaaacatacagagaaagcaggtattacacaccactgcttaaaactctctaaaggtcctggctactattaggataaagtccaaattccccatgatggcacccaaagcccttcatgatgtggccccgccagcctcttcatctacatcctcgccctccctcttccctctggtccctcactagtttgattccttctcatttcttcagatcccactttagacaatacatccttctggaaaattctggagtgccttcttcaaaccccaggccagatctgggcctctcttttttgctttcacagtctgctacatatttcccatcacagaacctatcacactctattgcagctttatttactcaattcttctctccaacttgtgtcaccactatattctcagtacccagcagggagcctagcacacagggaatgctgaaaattcgatgaatttgactgatgagtgagcctcctaattatcaaatagcttgtcggccctttggcaatgaccattaacagaaaataataagaatgtccatgacctaatcatggattacaaaggagaaaacagatggcaagagtgaacagacagcacagaatctcaggccctgtggtaatgctctgaatgatctcatccctagccctgtgccacttgcacaatgtctcaaccacaattctctccccctgacctgctgggaagccctttcttgcaggtctatgccacacaaacaggacatagacatcaaaaaaccacaacactcacaggatgttcagctctagttatcggaccaaatgttggagaagtagtagaaaacatttctggatcttcctccactcctcagaatgagatttcagagccagaaggtagctaaagatcatttagtcaactggttttcaaactagactcagcaaatccccttggggtcatttaggggaaagacaacaggggagatattttgagcaggctgaactccaggctcctttcacttactcaaccaaagcaactgatttttagcttcttacaatattgggcttctcctatatgactttattaaagaattctacatagcttttatttaaaataaaatcacttacttcattcaaaccccttattttagaaacaaggaaacggactcagaagtaaatactgtgctttttccagcagtttagcaaaagtcaaggacttcagtctcctgactctatgttcaggattcttcccattatgcaaaatcacctccttataaactcttaagcatttttacaaaatgaggagttctaagcactactctataaacaaactaacaatgacaaaagagtataaaggaacaaataagtacaaccacaaatagggcagtactatactacaggcaatactaagtaccttatatacatgatttctgcaggtatcaggaatctcagatcatttactttacatgttcctacgttactccacggaggttttccctcaatgtccacacaaaaacaatatggtaatccctggacatgtaaaatgcttagcagaataccttgcacataagtcacaacaaacagtaagctactactattattctattcagctttcacaataaccttatggggcaaggactctcaaattttcccaaagtacgcagctagcaaggacagtcagagtgaatctaggtccaattccaaagtttatattcttttaagaataccatactgtttggccaagtcactgattttctctatgctttagttcctctgaaaaaataaaagaatatcaactaccttacagcaacactatgcaataaagttagcaaaagcactttgaaaagtcctatgcatacctaaagtaagtttcatcagggaaaatcctcctaaaaatagtgattcactaagatcatcccttctccccagagtaaacaaggaactagactgaaaatggggttaggaggtcacttatctctgaccttttggccctaagtagccaggataagaaatgctttgctacctcctggatcatccaaaagcaaagtagacacctctctttctactgcctcccttactctgtgttaagtatgtttatccaggcaaaattcatttatttagcagacatttatagaacacctatgatgcacccagcattttgccaagataagtagaaaatcttacccttgcctttaaggaatcatacagatataaccaatcataaaactatgataaagaagccttccctgaccatcttacataagatagcacccacccttttgcatcctgtcttctatcctgcttttttttttccttagcatattgtatcatcatacatataaccggaagctcagaagaagtgattaaatgtgcctaagggtggggtctgggaaggaaactgtttatattaaaccttgggaaaccataagaaggtttttacaaagggaaggacagtctcacttttcatgccacccctacattagtacctggctcagttctaattcacgctagcaacatacagtgccaactgtctctcattcagggctctttctatcaaagttcctgaacccagttccaagtggccccatccagcattttggagggtggctcttcttcctgtcctggcagatcaggaaggtctgaaatagaacataatcaggcctgccctgccccttctcccaacacagctgccatgattcacttcctgttcccaatagtcatttaaagaggggtcggcaaacttttttttaaaaagtttgatagtatacacataagtatgcaaacttagtttgagagtaaatattttaggctttataggatctaaggtttctattccagctactgaactctgacaatgtagtgatgaagcaaccacatatatactgtacagaagtgaatgaacataactatgtttcaattaaacttgatttaaaaaaacaggcagtgggcagggcatggtagctcatgcctgtaatcccagcactttggtaagatgagcggggaggattgcttgaggccaggagttcaaggccagtcttggcaatactgcaagaccctgtctctacttaaataaaccattaaaaatttaaaaagcaaaagacagtgggcctgtctgccagaatttgccaatctctgatctaaaggataataggagcttttattttattttatatttcatttcatttcatttttcatttcatttcatttgatttcatttctttttttattgagacagggtctaccaggctgtcatgcagtggagcaatcacagctcactgcagcttctaccttctagcctcaagcaatcctcccaccttaagtctcccaagcagctgggactcagacacatgccaccatgcctggctaatttttctcattttttttttttgtagagaaggggtctctatgctgaccaggctggtcccaaactcctggactcaagccatcctcccacttcgcccttcgagccttctaaagtactgggattacagacgcgagccaccgcccctggccaagagctattttcaagcagcttcctcctgaccacttgtagttacctgttttaaaatcttaggctgtctaagcctcaccatcaactct

SEQ ID NO: 33125 - DNA, 669 bp, Homo sapiens
gggaggtcgaggctgcagtgagccatgatggcaacactgtattccagcccaggtgacagagtgacaccttgcctaaaaaaaaaaaaaaaaaaaaaaaaaaattaaattaaaaaataaaaattaagaaagtccactctgaaaacaacataagactttttacttgttatagatttaaccagagtcaagaccagaagtgaccaatccattttacacacgagccacagcaggactgaggagagaggaagagaaaacaggaagactagcaagtcaaatcaattatttacttaaaagtccacagagtacagagcactataagatgtacagtgccaacatgctccaccctttctctgctagtcagtacaggccacaagatgaacaccagagtccaacaaccagccaaatgccaggcaaaatggccttatcaggctagatggggtcaaacacatatatttttaacttatagtcaaagaggctcaaggaagatgatcaacaacttaaatattgcagcgatattaaggaaaacaaggctaggaaaatgtctgaatatacagacattgggtcttttgaatgtgcatttacagtagtgttggggacagaaacaagacaggaaaagtcttaaaaagtgagtgagtgtaaaagcaaaagctgcatacaaaatgccattttaaa

SEQ ID NO: 33126 - DNA, 1877 bp, Homo sapiens
aagaaatgtcctcctaaaatccaaacccctccctccctaatttgaggtagtcaaatcttattaggtgatctgaattctcccggctctgacaccagtccagctccttaggccagaactgcagccgtctgtaaaagaaataccctgagcaaaccccacccctcaaaacatccccaaaaggcagggaggtccagagagtattttctcctccaacgacagataaggcaccaagggctcagcagcgcaatccttctcccaaggtcattcaagtcagtgaaggtgcgacggtggagctgcaggcagtctggccttctggaaatcacactacaggggttttgggggtgcctactctcttcccctctcccacccgcaagggtgagcactggcctcggcattcccgaaacaagccacaacaagctctgcagtgttaggaaaggggttgacgcgatgaagaaacagatgctccaaagcaagatggtctttctcggctcacagaggctcctccaaggttatgcacagaaaccgcagccacctccaagagctctaaaccgggctccgaagccccagcgcggccgctgcgggtcgccaggttccctgcaggcaggctccgcagccagaggccaccagccccagaaaccgcacttcattcctgcgctccgggaagccatggctccttccctgcccgggcggctgggcgggggccgggggtgcgccgggaggcgggccccgcgctgcggaaagttcaccgcggcgggcggggggaggccccggccccgctcgccggcgtccccctgcagattccaccattaattagtcctaaggactgtctactggcaacttaaacaaagcgaatgcctcgaattccttcccggcccagcggtctggctgcgagaccagcagagcgcccgggacgcgggccggcgcggccgacagctgcggcggccgcgggacccctccccgcccggcccgcggcccgcgccccgcgcccgcagctggccccgcacgccggcccgacgcgctcccaaaccgccctcctcctcctgctgctgcagctcccgggcccttcctgtctgatcacttccttcctccggtgcccgccgggccccgcgcagccccctccacggccgcctcgtcgccccccgcccctgtcggcccgcgccccctcccccaaccccaaactctacccccgaaactcttcgccgccccctcgaaaatgtctcctccgcgtctctgccccaaacatttctcctcagagtctcgctcccaccaagaagtctcctcagaaccttccctccccctcccgaggaaaaatctcctcagagtctcttcctccaactccacaaacatgtgctgggtctcgccccaaaaggtctcctcctgagcccttcctccaaaatccattccaactctcccccaactccacaccccatctctcctcggctgcgcccgcggtttcttctgccccgtggccgcgggtgccccgacctcacccgggaccggcctcccaaccccgccgccctcccctccccgcgccgcgctcccgccgccgccgcctcacggaccctcacctctgcggccccgaaccgcgctcccgccagcgaagggttccgccgctcagctgccagcgaccggcgcctcctctggctccgcgggactgacaatgaggggcggggccaaattgtgacgtcagcgttctggaaggcggggtctttgtgatgggcggggttgtctgtaggccccgccccctccgtcctttttttcccttcccaggacttagactccaccaagtttttattgcctccgtagctgggtcctgtgctaggcgccctgggaaatcgaaatggaagacaagacttctcgatttcaggagggacactttc

SEQ ID NO: 33127 - DNA, 1202 bp, Homo sapiens
tctcaaactcctggaatcaagcgatcctcccacctcggcctcccaaagtggtgggattacaggcatgagccaccatgccctgcagagggctataattcttaacccttgttggatcactgacgcctttgaaacttcgaagaaaaatgcaacacacacaacatgttacacaattacaaggggttcacagacctctgagaggacatcggtagccccagggtacagaactctggttcttgaggtgcggcaagaacgtaacccccgccccccaaacaccccaaaaacctggagcagaaccacagacccgaggcacaaactttaggatgaaacagaccccgagttgcatcctggccctgccgtttactagccatgaccttgaacactcacctagaaaccctcaggcctcagcatctcaccacccaaaagagagggctggacacccttccctccccagcctggcccccgcggcgtgcgctccgtgacgggtggggcgctggcgcttgacaggactcagcctctctcccctcctgcgccagtgagccatgaatccggctgcggcacttcatgaaatactcatgggccgactgcaccaggcttgcgggcggcgggggagggggccggcgcgttcgccgtttgccgcagtgacagctccgcgccgccagccggccgcgggcctgggaagccgccggtgccgggcgcgctctcggcctttcccacccaccaggcagggcgttcccgccagccggcttcctgcagccgagggccggggaggagggacggcgctgaggggccgcagggcctggcaggcctggttcctggctttctctccgcgtttcctgagcaggaccggccgggggatgggacccagcgcaaacctcctaccccgggagcgcagccaggaaatcgcgtccttgttaattcaggttcctcctttgcgctgaacggggctgctttccgtccgcgatcaagtgggcatgatgcgacccacttatcccaggaggaagcggagagacgaaatggcagctcccgaccccacgacacagcaagattccaaccccatgatgtcagtgttaactccatcctatggatgagaaagctgaggctttgaaaaatgaagtgacttatccaaggtcatcataaaaatattactactaataaaataacatgcttactacataccaggcactgtgctacaaatactccag

SEQ ID NO: 33128 - DNA, 617 bp, Homo sapiens
agaattcctactccttcccttgggagcaaaatagacgggggccagggaagcaggtaaatgcactatcttaagaccctcagatgcagaggactactcacatctatccttgccagtgaccgtgtaaaaagggcacttctgccttcctcccctcagtccacctcttcctgtgacaggtggctggaatgcacctgagggagctgagggcgtggggtgcggcacaggcttggtggaggaccggctgtctggctttgtaatctgtttcatgcactttggtccccagaggaactgtgagctccatgagggacccagctgctgtatggagaacagaaattagtcaacagcatggggaggatcaatggggaggatcagaggttgccaactggtggcccagaggccaaaccttgttcacaggcttgtttggtgatctacatagttgcaccgtgttttctgtgtgtgtgtgtgtgtgtgtgtgtgtgtgtgtatgtgtttagttaattccttataagctaactgtggcctagtctcattcaataacctcccccagttttgaacgctccagagttgagcataggccccaaccaccctgaggttaacattattattacccacattgtaca

SEQ ID NO: 33129 - DNA, 2324 bp, Homo sapiens
aatgtgtctttttaccacatgaggtgatgccattagtatattccagggcctggcacgacatctattacatgggtgtgtaataaatgtggaataatttatttctggtaatttatggattatctacaaaaccaatataagtggatgttattagagacctttaaaaacctataattttactcatatttgctgcaaataagagtaatgcaaatgtaatgctgaatggaacttttgaggcattaaagatttttttcctatatagtgaggaataaaactaagacttgattgaaataacttttttaaaaaaaaggatttgagcacaacaggacaacaaaaattggccctttgtacacttcggtgcaatttctgtcttagctgctgagaagcagaggaaaagcaccaccttgctcagaaactaccttctccacaatactgagaaacacaccaaacaggggcaaggctttttgaagctaggaataaagaagctgcccatctttactaataggaaacaacgggttttaaggtacccagtaagagtctttcttcaaaacagacatctcacttaccttttcagtatacttcctaaaaacattaaagacagatgtaaggcttagctggtaatttccatgaactcagtcttttcctctgactgtggtggagcagacacgattaagcaggtttggaaatgctagaaatgaattcctacttccccttgtattcttcagatctcattttcccccaaatttctgcagtggttggcttccatttcagcatcagtcacgaaatcttgaaggtcagacacagtaaacagggaaggacataaaattaagtgatttgggcgtagttttgagtctcacaactttaacagggatgagtcatacattaaagtatgtcgaaataaattacaagttctgttccttaacgaaaatcaactcttagtcaagctaaaggtattagtttgctatagtctgaaattctgtatgttcctttaataaatgttgaggggaaaaaagatgtaattcccatgaagaccaaacacaagttgatcaattcagtgtgagtctttgtccttgatttattttgcagtacaaatgtgtaaaggaaaaaacaaagggaataaaaaatactagcagattgttctaagtgattttccaatttgccaatcaaatttgaagtattttatttacctaccaattaagtcagaaaaaaggaagtgaatgttaaatgattattagtagtataagctttaagtttaaaagataagggttatttaattcaactgttttcttggttataggaaattagcattcaaattaacttcattaagataggagaaaaaatactgaataattcatctggatggagttagccaggaaatgtctttatattttgcaaaattataaattgaaaccaaaatctgatatacttctaggttagcaaacaaaattctttttatttgcttcctataaatcattaaacaggtttgctgtactcactcagtgacacttcaactccctttgaaacccaagtgacagaactaggtcactactttgggaatggaattgtgagtagctagatcagagaaacactgagactgacaaaacttgcttttttggaaaatggaagaaaaagtcatcagtatgccataagagttagagcattctgaccataaaatcaggcagttatccttgctgactggtcctggattccaaatgacacattccttctcaatgtattcaatccatcagcagctcagaagcaatccacactggagaccatttaaaaacgtgcattttgcaataaccattatctatcttagcagctagaaaggcaaaacaaaagttagcatatcaaactatctttaggggctagagcagaatatgaattcattaacgataaatataattactagaaacaatgaaaactgatccagaggaattttaagaaaacaaaaaaaccctcaaaatgtctattatgccaagtacggtcaaagtattcaagcatcctcctccctctccacaacttctatttttttctctcttcttttttcttaaggggtgggagtcttgctatgttgcccaggctggagtgcagtggctattcacaagtacagtcattgtgcactacagccttgaaggcctgggctcaagcctcagcctcccaactagctgagactagaggcacataccaccgtccctgacttacaacttctattttcaggttagattccagaagtgtaagaagtataaaatatcatggatgatatttagtattcactaaactggaaggagagccaatgaatttacttatactgcccaattaaataa

SEQ ID NO: 33130 - DNA, 3092 bp, Homo sapiens
cacgacctatttctataaagatgcatcctaaaacacaaaatctccttgcgaacataaggttctgttttcccatgctcccccatccccacatactaccttaagatcatcagaactcaaaagttctcagtatcacaagacccttacagcattgtacctaggaatactatcagtcacagaaaagaggcaaatttttaacagaaaagttcaatgaacatctgttaaggtggggtttttaagtatgtgtaaagcaaaaagacaagttgtgtattaagtacaagacagaaatatttatgcctaccatttcattgcaaaggctctacaagttgatactgaaattggttaaaattttcaaaaaaagtttgtaaattttaacaaaaaaaccgtaaaataattagattccagaaaataaaaccttcggatcaaggaaagccctctctcttcaagccaaatacaaaatgctcattttgaaaagactttttatgtcatatgagaccatttgaaactcattcaaatgtggcattcaacacaatgccacacagccaaaccatatttctggatgcagcaaatatactaacgtgactggagtcatttgatctaaacatttttgcaaaaaaaaaggagacatttaaagatttaaaagggctgctgggagattcgggatgtcagcactaactcctccctgactttttctgaacctctctgtgcaaattcttcatattaagagacgggctttaaaagaaccaacgaaatgagactaacggttatctcatggcttaggagtgtcgagctctcatcctacgactgactcatgagacatcaattcagccacttgaggactgcaaaaatctcaaacaggtagtgtgaaaggactgaaccttccaagaagccctgggcttttttaaaaatttggcaatacggccactaccgtgtaagaaaaaggatcgcctttccaatttggtgcgcctctgacagtctcagaattatccatttcaggcgccgcttggagcctaagttctacggcctctagtagtcattttttccttcaaatctcagcccgcggcatgcagaatgtgggaggggagggaggcttcccacacaaatcggcctttcggtttctgctcacacaaaacttttctcccggctcagataaccctgggatctgcaccccgccttccgccccccacccccatcccctcaggcccgtccggatcatcagcacatccctctcgggctaggccggccgcggcgggagcgaagcggctccggcggggagaagcggcagggccgcgggcgcctcaggcccttcgcgggatccggccgcatggagcagcgagcggaggcgggaaaagcacggccggccccagcaggccgcgcggagagcgcccagcgggccggaccgcgggctaaaggggcggggggaggaagagcgagggcgagaagcgtttcggccgggctaggcccacagccgcgcgggcggactagaccgaagccgcccccagcccgtccccacccccaccccggggcctcggagcgcaaacgaaacgggaccaggcacggagcccgggctgagtcgggtcgcatcggggctcccggcccctccccccacgggccggcgcgagactcaccagggcagagcgggggccggcagccgggcccgtgagaatcagcgcgaggcgctttgaaaacgactagaaatggcgcgcgcgccaccccctcccccccctgatggactgagacgcgatcccggcagcacgcggggtttcccggaactgcttccagggactccgagctacggggcaatcgcttggcgaggcggcctgacaggcagctcagacgaccagtagtatccaggcaaaacggaccacgccggacgactcgagagccaatcgatgaagctgccggctgaaccaatgagggtgctcagcgcccctggctggggcgcctccggggcgggggcaggcacacaaaggggtctgtggtggaagcccttggtggctgcaaggcttgggggcgctgggtcctgggtggacgaagctcctccctcttcgtctgccgccgatgcgaggccgaaaatctaggcctcgcgccgcgtggccgcctccggagccccgccccctatggtcagcactggcccagctccgccatggcgcttgcgtcccgccaccggccgcccttagcccccgagtcctccctcgcacccccgcggccggcgttccccccagacacgcccatagccacgcgttcgggcctctttcggtcatcttttcgcctctagtgagcacacgatttaaggatgatttggctcgtcattttgctgaggattttgtctagataatcattccttggaacgatcggagaaatgcctctttccctccctggctgccgtccacacatcgttggtggcagactgtgagggaaatcgttaaaatgactcaaaagcaatgtgtaacacaagtgatagagcagggagcttttccccacagggtttggagctacttgatattcataaaataaagcagctatatacatctctgaagccaaaagagccatgcaggggaaaggggtaattcccaaaggacactataattcgtgttagtcctaaacctatttctcacctgccattcctactgatttgttccctgtccttagtccaaacctgtctcgtctcatagaaaccttccgaactcacttctgtggtgcaagcgcttttttcccaaccccaaactccaatgccccacccttaggaagtggaggaagtcaagcagtggtctgcagatttccagatgcactcaaggatgattaaatttctcagaacctacaaacctatatttaattattgaaaacgggcggggcgtggtagctcatgcctgtaatcccagcactttgggaggccgaggcgggtgtatcggtcagaagttcgagaccagcctgatcaacatggtgaaaccctgcctctactaaaaatacaaaaattagcccggtgtggtggcacgtgcctgtaaacccacctactccggaggctgaggcagaaaaatcgcttgaacccgggaggcggaggttgcagtgagccaatatcgcaccactgcactcca

SEQ ID NO: 33131 - DNA, 2518 bp, Homo sapiens
aataagaaataaacaagcaaaaaagagatgtggtaaagaaggcagcaatttatgagctgattgctctggtcccatggccagctatccctgccccactcaggaactttatcctctggctgtgactttctcaggacatatctggcacttgcatcgctccatacctttactcataatgttcctcttttcctggaatattcttctcacactagagaaattctactactctttaaggtcccgctgcagtactaactgttcttcaatgccccctacccctctgcacggctccactccccttggatgccccagatagacttaatcacgccgacttcttgggagtgattcccacactacagcactttgttcctacagcaagtagagcacttactacgttgtgccacgcttaagtggatgcgcctttctccctacagattgtgaactgtgagctgtgagctagaaggtagcgcccatctcgtccatcttttatctccccagtatttaaaggcatacagcaggtgttcgatatatgtttgtttgtgactatactggcctggtactaggcccctggaggcagaatatcgaagccagcgaattactaatcccagggaatttcccacagggacttgcagagcagagaaacgccggacgaggtgggtaagcagagacaaggtctgagaagccacctccggcttacctgggacccagccatgagcagggtggctgccatctcgagcacaagggttcgcctccagggagagagagcaggaaaagcagctagcagacagcgctgaaggaggcgaaaagcagggcgtgaggcacggaaaacaggccctgcccactccccagggctggagttctggccccaaggcgggcagggagggccctggaccagggccgggtcactctcctccctgaccctcgagcgcgacccgccctctgcgtctccgccacagcggggtggaggcaatgccggaatctactaggacagccccctggctgggtccctcccgcgccgggggttagaccgctgctgtctcagggaggaggtgctcagctcagcccagggaacgcctccgctctgccatctcgaggccgggtcctttccggcagctgcctcagccaatcagcgagcgaagttcgtgaaccactctgccaatcagaggcggaacactatgcccgcctcccacagcctggccaagagcctctagtgcgcctgtgcctgcccccatggcctgccgggagttggagttccactcccgcgtacaaaagctagccagaggccaaaagccaaggagggaaaagaacaaaagggtgaaaaagtaagcgcgtcctcccagtcagggcggagtattctcgcttttttcttatggagactgcagcacgattaagctagaggctgccctgcttcgcctcacgtccctagaagcttctcttgagtcgggccttattatctgcgaagtcaggccaatttaggcgctggcctgtgttgagctgagctagaatgagcccctgcttgacagcacaggctggagagggaagcggcagccgcccactccccaggggagactcggaggccgcgctggaactttgagccccgcccacgcactacatctcccaacagcgcctgcggcggcgcggctctgtacgcaatacaactcccgagaggccccgcgccgccccgcgccggggcgactcgggagtgcggtcggcagtagagcctggcggtgtcttggcttcggcgctttaaccctgtaggggcgtgcgactgcgtccttctcaagggggcgcccctcgagcggcgggctgagtggcgtccagcggcggggaggcgaaaaccctgggggactcagaagcgggtggcggtgtagggcgtgtaaggaggagatagccaggcccctgcggggggggcgggccctccttagcgtcccagagggcttgtctgctacaggggctcccagcggcctcccgcaccgaagggaccctgggcgtctgaggccctgatccgggcgggccttcaggatgttagcagtccctgtccggttgaaggtaggaagccgaaaacccgagtgggggacgaacagacttacctcctgtcccgcaaaagatccactagatcgtcgtctccaaaacctgagagaccgcgaacgggttccagagccgcagcgttctctcagacctggcgttcaggaagattctagagagcacgggcaggtcccggaggtctcagacccgcaggtagatctcgaattcgtagacttgcaggcgaagcccagatatcgtaggctgatcctaaagactcagattcccgaggcctcagactcgcaggcagctcagaaaccacaggctcataggcagatccctgagaccacagaggctggccgagaaaccaccagcaactaagctgcattcagctggagttcctcggaacgggaggactcgcagctctccctttccccagccaggatgagggaattagacaatggaagtcgagcactggggaaagcaggcattctgcgtgggg

SEQ ID NO: 33132 - DNA, 985 bp, Homo sapiens
tgatccgcccaccttggcctcctaaagtgctgggattacaggcgtgagccaccgcagccagcctattttcaagttcttttggccataacattctggtgagctctttcattccaagcgtgttgcctgttttacctcatttgaccttgtctttttcctccagtatggtaaccacctcccctcccctaggaagccctcctgggtggcagaggtgaatgctaactccttgtagctcgcaccttcttcatctttggttatgaaggagatggggttaaaccacttgttccagccaacagcatgtggaaagactctgtgacaaggaggagcacagcatgtcgtgaagaactgagagaaggccagtgtgattgcagcacaaagtgcgggggcgaggtacaggcccgcgctgcagggccctgtagaccttgccaagagcagtaggggggaaaaaaggaaaggttttaaatgggggtgtagagtggaggattctaaggatcagttttacaatgtggaaaagcctgttctggtcagttggatccggagtggacacgggaaggcccgcagtgagggttttgccgcctgctgatgacagtctgtggcctattcatactcttttgtgtccttttgtgaatgtggatgtatactgtatagatgtgtggacttgagctgacttgttcttttgctgtttaatctgactcatctcctttgtaaacagtaaggttattgagggtgaagattagttttcttttttttttttctatgctctaaatccctatgctatgacacaggaaacacaacagttatttagattgtgactactgaaaattgccccaaggtgccgcgtttataaaactcacccaaggttggccggacgcagtggcttacgcctgtaatcccagcactttgggaggctgaggcgggcggatcatgaggtcaggagttcgagaccagcctgaccaacatggtgaaaccccgtctctactaaaaatac

SEQ ID NO: 33133 - DNA, 757 bp, Homo sapiens
cttttcaacacatcaactgtgtctttaaaagagaggtttccagagtcctcctacctgagcaagactaggctgtttggagcatttcttcccaccttcctggcagggcacacccagccctggtcccgcctccccggttaggagctggctggctggctggaattcgtgtctgggcagcatttcaggcagccacactcattttgctttcaatgcacacgcctgggaactgagccaaactgcagagagggcatcatcggccggggtgggaggttggatttatcaacagcttccttctgctccccggatgtgcccgcaccgcaccagtccttagaaaatcctcctgccccaggtctgagtagaggcatctggaggccgggcccgctgcttctgtgcgccacctcgagggcatttcagttactgcatcagcgagcatgctctgcaaatggcaaatcattctgatagccaggtaaaaggacaactgagaacagtcaactttctcccctgtcaacatggtatcctccgtggtctgcttcctggtactccagctacagttcccagagcatcgtgctcactcccacttccacacctttgggtgtgccatttctttctgcttgaaatgactctcctgactcgcctcccaaactcctcctattgactttccattctcagctcaaatactttctcttccacgaagcctcctttgacttttatagtcatattgagacatgcttcctatgttcccacggtgttttatacctac

SEQ ID NO: 33134 - DNA, 2046 bp, Homo sapiens
acagatgaagaaactgaggctctggcctttatatggacaccaactcatgactgcccagtgtccactctagggctccctgccacttcatggttccagtgacccttccctgggccttggctactcttcctggctctaaaacttcccttagtgtctcttcctttcccaggctcctaagtgtcctggaaatgcaggtggctgcagcacatggctacggatggtgggaggaagaggaccctggaacaggaacgggaggtgggaagggcatgctcaccaggctccctttttttccctcccagggtgagcgcaggccctccaggacccaaggccaaatttgctctggccaggcgaccagtcggccgccagccccaggcaaagatcacggggaagatcaaacattaacttccagctgggtctgcgctctggccaggaccctccggtagggctgtcagccctgctcccaacctcccgccgagcccgctcctccctccgccctcgccctcgctgcacaggcctccagcccggcccccttcccccgccccgcgggcccccgcacctgttcggcccccgcccgtccgggccgcaccccaaggccaaggaaagggaaaattgccaaaagaaccgctcctgacgcaccaagcggtggggtcgcaggatccacggccttttacttctctcccgcagacccactccggggtgcagggatgcagctcagtacccccgtcagcccaagtttctctgccacttctcgggccacccggatttgccccccgccccgcccccgccatcgccgccgctccccgggctttgcacacgccaagccctgggactcccaaagtcctttcccacgtccagctctcttcgcccgctttcctgggccctgcactagctgcccagggtgaaccctacacgtccaaagggacgtgcacaagtcgcgcctccgggacccgcacgatccccctggcgtcctgggccacgcacacgcccacctcgaggtgctcagcaagggtccccaaggggccttgggccctgcaccagccgctcctccctcgggtccccgagtcccgtacgcgcccccatggcgccccgccagtacgtccccaccccggaatccggggcttgcccgcgcctcccgggggcgggggccgtggcccaaactctgcagcctcaccgtgttcttcctggccaccatcttctccagctttttggcgatcctcagcagctcctcttcctggcccatgttggcccgcgacgcccggcggggcgaggggcacaggggcagcagtagggcctcgggggcaggaggcgcgaaggcggagggcgcgcaacccgcgcgggccccaaacacacacgacacacacgcccggcgggggcggggctctccccacccccacccccccaccgcccgcctcccaactgtgcgggggaggggtggcgggcactaaatatagacttcaaggacttgcccgggcactgattgcccgcgccggccgatcgggcctcaggggagggacgaggctgagagaggggaccctccaactccggcccttccaggggcgccgggggaccgaagagagatttgggaaggagggctctctggcgagctgggaggctgtgacctggccacaggcggcggtcgcggcgcggagggcgcccgagggtgtcccaggggccctgggaagcgttctgggctcccgcgtctctgcaccgttgcatctcaaagcgggaggacacagttccgcgcctatgcccaagtggaggcaactcggtgcgctcgaatcccgtgtgtgtgtgtgtgtgtgtgtgtgtgtgtgtgtgtgtgtgtgtgtgtagatcactaaatccagctctgctttaacctgcactcactccatcgtgcacacggcctgtgcatgccacgtgtatccaggctcctgtttgcctctgtctacctaaaacttcctttgctggctgttttgttagtaaggctttgcatttttaacaagctcctatgtgctgggggtgctgctggtcccagaactacactctcgagtagtgagagcttatcgg

SEQ ID NO: 33135 - DNA, 883 bp, Homo sapiens
ttcaccgtgttagccaggatggtcttgatctcctgacctcaggtgatccacccacctcagcctcccaaagtgctgggattacaggcatgagccaccgtgcctggccaacacccagctaacttttgtatttttagtagagacggagtttcaccatgttggccaggctggtctttgaactcgggcctcaagtgatctgtccacctcagcctctgaaagtgctgaaattacaggcatgagccaccacgccccaccgtgctcttctctttttaagtggagacagaaagcgcttcccatccttgtagctaagagtaactggggccttccccctcagaggttggctgttttccctctttggggatgggtggatctgtgtgtaaatggtttcctggaaatcccacgcccagcagactacccactcacagccaggagagtatttccacatctcaggctgggtgcatgtgactccaaatcccatgtaaaggaaagggcttgcttaatagttctgctctcaagtgggggccagccctgagcagagaagacaaagacagagtgggattaatacaaactctgctgcttgctggctgcatttattcccctctctgagccttggtctcctcatctggaaaacggagattcttatctgtacccagatgaggcacagcatggaaaagactcagcacatagaagacacatggcagcttttactgtaggcccctcaaggcctctgttttcccatctgtaaatggaggaagcaatggtctacggtaagttctcaggtcccttctgactctaaagttctgggccctcctgagtaggtaagacctctgggatagtgttcatatacagaatctgtccctggggacctgtagagcagtttctcaac

SEQ ID NO: 33136 - DNA, 840 bp, Homo sapiens
ttgcatttttagtgagacggggtttcgccatgttggccaggctggtctcaaactcctgacctcaagtggtccccctgcctcagcctcccaaagtgctgggattacgggtgtgggccaccgcgcccagcccccacagctttaagtaccagttcaagcaatggatgcaaatgtggttcaggcagcacctgcatgggaatttccagggtgctggtttaaatgcagattcccagacaatcccacaagctggcaaacttgctgtcaagtacatctgtcattgtgtgccagtctggcatctgacctccttcctatgtctggggacttcctcactgcacaggtcttggcagagttcacctcctgtgaaagctgaaaacaacaaattcttgcttttccagcctcccttacacctaagctcaaccaatcagaagccctcactacagactttgaatcaggagcacagtggaagatccattccaatgctggtggcaaccacagcaatggtgtctagtgttcagggaacagtgacacagcgatggcatttagtgtgtggcagcagtgtcctgccaaactggctcggtggcatgattttggctgagatcctgcctgctgcccagccccagttttccaacttcccagaaattctgtgaactactgaacattccctttcagtgcagcccttttctgcttaaatcagctcaggatggtttctcttgcttgccataaaaagcctaagataccaccactgaatcatactctctgggaatgacgccaagtgattctgacacagatgcaggtttgaaacccacggtctcgatgctaacagctctcaaatgtgtatctcca

SEQ ID NO: 33137 - DNA, 1589 bp, Homo sapiens
acgaggcgggtggatcacgaggtcaggagaacaagaccatcctggctaacacggtgaaaccctgtctctactagaaatacaaaaaattatccgggcgtggtggtgggcacctgtagtcccagctactcgggaagttgaggcagaagaatggcgtgaacctgggaggtggaggtcacagtgagctgagatcgtgccactgcactccagcctgcatgacagagtgagactctgtctcaaaaaaaaaataaaaaataaaaaatgaaaaaactcctatacctgagttttctaaaggggttcttctatacctgagagtatgcataaatgatctaaaccagggaggtacagaacaggatggacacagcacctctccctggaacctggactgtgtgaaataaagaggaatcgccatagatacttctgaggggattttccaggccctgcccctcttctctgagaagcgccccctcccacaccataggtctcaatggccatgtttaccctgccggtcactttccctccatgacctctgctgatgaaaccaggggtggagacccagccactggacccaatccagaaactgggccgggctgtcaacctctgccaggaacttggaagtgggacatgagactggctcaatctagtgtccggttacctttagacactggcccagtgaggtcatgtgagcatgggggctgtgctttggggcctatgtgatgatgaatgagcgaaagcactgatcagatgtgcagagggaagcagaggcaggagagaacaagaatgacgaagcagctgccttagttcctgacaacttcccagcctccagttccaggccctggagaggtgtacttttacctccggctcttcagtctcatgaggcacctctaattctttaaagccaatttccctcaatattcttctctgacgatcaaaaaacaaacaaacaaatttccctccaacagaaacaagcttgacagggtttatgtttcttgcaaacaatctctaagattacacaatttttacactaaaatacattttacaaagcaaactgtaaaattcacaagaatattaaaaattaagaaggaaatcctttctaaaacaagattcaaaaaagcaaaagtcacaaaggaaaagaaaaatgtaactccaaaacaatttaaactgtgcattataagacctgataccaatttaggtaaacattcccccagccactcccattcccccactgataatatattttccatgaggagatacattgggaagcatgtacatttccatagcaattacctctggggagaatacagggattgagatagttgttcataggccttttctgttatgttttaaattacttattacaaattatgccctggccgagcatagtggctcacgcctgtaatcctaacatttttggaggctgaggtgggcagatcacttgagcccaggagttcaagaccagccgggcaacatagtgaaaccccaaccctacaaaaaatacaaaaattaagccggcgccagtaatcctagctactcaggaggctgaggtgggaaaatcacctgagcccaggaggttgaggctgtggtgagccatg

SEQ ID NO: 33138 - DNA, 1656 bp, Homo sapiens
tgtatctgccacgcagtgggtgcctagtacacttaaggtgaagggtggaaggctagagccgttgctgaggtccaaaatgccacccaaattgagggcatcctttggatggggagctgcaaaaacacattattctccgttggaccaaggccacggggtgtctgtcctagaatattctttgcagaggagctgcggaaagctgcagcaggttcagagaagaggaatggaaggaactccgaagagcatgggaatggggtggggcagcctgcaagaccgaaagaaaaggcctgggacgctttgctgggaaagacaaagaggagaggggaggggagaggagacgataaacttgccaacagcccggccaaggtgaaccccggctcctggcgccttcccatccgcattcattccacaaacgcgggccaaatctccgaaccagccgcaagcgggagggggcctctctgcagccggggggaagaaagttcaggactgaggcgggaagcctgcctctcagaaggggagtgactcggggggcacacttgtggggctccgaagatgaaaacgcaaactgaggctggaaggcgctaggcaaacacatatgtgatgaggcggtcacgcggggcacttggggtacgtcccccgacctgtggagtttgtcatcgaagagacctcgaggccccccaaaacggtccctcgggccttcccccgcctcgacggtgaggacgcagctgttggagatgcgctcggtcctcccagacctagggagggggcaggtttcggggcgcggtgaagggccatcgcagctcgggtgcgacacgcctgtggaggtcaaggccaggcccggcgccgacccccgacccctcccgcctcggccccctcacctcctcccgcgccagcgccgcccctcggtaccggggcatcttggcggcgaaggcggcggccccagccggggagctgaggtcctccgcggtgacggccaggaactcggcgacgctgaactgctccggcatggcgggcgcgagcgtggagctgccggagcggggcgcggggggcactgagctgctccgcgctgagccggcctcaccgccggccgggggcgccgtcccggcctccacacgccccgcccctccgcacgccccgcccccgaccctccagccgctctccgctcctcagctgggacggccccgcccccggctcctcgccttcctccaccgccaaggtccaggctccggccccggtcccggccccgcaccgcgtcaggccgcttccccggcccctcgccggccccctaggccacgcccccagcccctcaccgcctcagaccccgccccctggcgcgatgccccacccctggcctcagtagaaactcctccgccttcccccatccctgccccttcagggctctgtcccgtttcatcccgctctgggtcttccaaatcctcctcccttgcacggcccaggctgttccatctccgcgtcgagtcttagagccccctccctcttcctccctcctctgctgattcgttccgagttccccatgacctcgccccttctgccctaccacccccccgccacccttccctcctctctccccagtcccgcccaatctccttgcctcgctccgccccgaatcgccccacccctcctttgctgcgtacgccc

SEQ ID NO: 33139 - DNA, 608 bp, Homo sapiens
actctgtctcaggaaaaaaaaaaagtagattagtgattgctgggaatgggtcagtctctgtacagatgaagaacatgaggctcagagaagccaattgccacccatctgtgtgactttggaccagtgacttcacgtctctcagttgtgacgtggagagaatgacgtgcgcctgagatggtggctctgcagctcagtaaatgtgcctgcggcgcctggtgggtccccctgcgtcttcgttagttccttttccttctctcagacctttggctggaagctggtggggctgaaaggtgaaggctgccacctagaggtgaactctggcacctgccaaagcctgcgaggcgtcttatcttctcatcaaggtaactcacccgctatgggcttggggaggagaaacaggatgtgaaagaagcagccccgctgaggacagggctactagactggccagattctttccagatgtttgtaggccctgggaatgcttttcacagatgttgggtcccgtggaggtgatcccatgcgggaagagggacatccatgcgggagtcaggtcccagcagagctgcttagcgtctcttggggaaatgccacctataattccttcttct

SEQ ID NO: 33140 - DNA, 2991 bp, Homo sapiens
aacgacggcgagaggtgaatatgagttcaggggacttcagagaactcctccctccttaatctggtttgtcaaaggcaacccccaaagtcccggtctcaaggtgtctcactaccctgatcccgactgcccaccgaccctacccaaacacggactcactaaccttggcttttgacactgcccacagacggacccccacagcctgactacccacatttatccctaaagcctgccccaggctggcgaaaccccaaatccggccacgctctgacccccgatctcagccacaaagagactccgtgaccttgccactgactgacccctaagaggagaactaatcagagaacaattaaattgctcgactctcagcgaagcacctcatggaacagaggggcggaggtggggaaggacttcgagagggcagaggcttcccggaggagcccagcgggcctggggccacactcggaaggccgggaaggccctgtgcagggcacgtcgcaggcgctcgaggaatgcgagttgcctgaaagaacgaaggaaggaaggaaccgggtgcgatccagggcggcctcgcggacggggcaggaagcgggtgggggtgcgcagaggctgcagcggcccgagcgcagctgggggcagcgggagaggagtggggtcagcgactccgctgggtggggggccccccaggccgcgaggctgggaaccgggaggccgcgctgctggcggagcggcgggggcgccgcgaggctccggatgggctgcgagccccgcccgcaggctgcggagggagccggagccagagcggagccagagctcagacatccgggcgccagcgaacacctgcgagcggcccccagggcccgcggggggagcgtggggcgccgggaggggcggggcggggaggaggcggggccggctcggctccgccctgccgggctccaggccacgtgggccgaggctctgccccagcccgggcgccgcagcgccgccggtggggagcggctgtctccggggaggtctgggagtgggcagagtggagcccttggaagcagcgctgcgggaaagagcgcggcaggaggttctcaggtttagcctggggcatggggaagagtcgtggccacgaggggtgatgaggccgggaagacagataattgaaggttgtccggcgcgtccacagctagagagctataactggctttctgaaaagggcaccatttctggtgtcacagacatgaatttgaattctggctttgttacttagaagccgtgtggccaccggcaagttacttcgcctgttctgagctagttcatttataaaataaagacacctcccaaatgtctgtatttcacagccgatgcgatcagctctgaatccgatcgcatgcgacaatttgcacaagacactcagcagtgaatcttgtagttaaggaagcctcgtggatactttatgcgccttatagtttatccgaacaacacacatggaagggaggtaccgacatccccctttcacagatgagggggagtcctaggtctttcattccacaagcgctccctgggacaagcaccccctggggaccaagcatgtgccaggctttgggaatggcgagggaaaagagccaatttgaagagaaggcaagaacatgagctttgaagctagaggaagctggggttcctaaactctgctctgctactttcttgctgtgtgaactgtttcttgctgtgtgccactttcttgctgggtgatcaagttattcagcctgagtcttttttctataaaccaaggaatgttacccatcacggtggtttgtgaggattagaacaaaaatggaagataaaatagtctggaacctggcaggcacttccataggtgattatgacagaagacactatcctctctgggagttatctgacctagggccaaattgctttcactctctaatgactaatggattggcatgctggtctttcttttgtcctggccacctgaacaactcagtcctgggagtcctgacaggcaatttccttggaattagcttaataatacctcgtaggtgtgtgatgcatttcaaagaactttcccaccattatcttctgtcctgggaggcagcagggcacagaaggagcatggctcagagaggtggaatgcttgctcaaggtcactcggcagatgaccaccgcagccctttttagccttccacggtactgaaacttccgagcaaacgggaggcaacatgctgtggcagaaaagggtataagacgttgagctcaatgcctggctctactgcagttcatggtgtaatgtggggcctaggacctcagaaccgctgccttagaatcagcttcctttacagatgcagaaactggggctcaagagaggcaaagtccctagcctgaagttatacaggtaagaggtgacagagcagggatttatgtccctttatggtcgtctctaaagccagcacagcacacctaaaaaacaatccaagatagacccaacccaggccttgtaggtggtttggggcaagggttcctcacatgaggattgaagtctgctattgctctgcactgtgtgtgtatttttttaagagagtgttcatatcttccttcagatcagagtgaccaggacacagaacaggttaagaaccactgatcaggctgggagtttggttggcaatgccagaggttctcctcctcccccatgcccctgttcaccccagcaagctcaccagggttaaggcactaaaggtgatgacgtgacctgtttgttatgaaatattgaagtaattcatgccagggaccaacacacagatgagatcataccataaacaggaatctctagtaaggccaggcacctggtgaagcccacctggggagccaccaggggtgtgggggaaggcatgggttgggatcttgctctctgccccactgccaggcctggcctcaaggaatggccagtccccagccctgctcctgttcaccacaatcaagtcacgg

SEQ ID NO: 33141 - DNA, 776 bp, Homo sapiens
ggctaagctgagtgcctctcgggactccgggtaccagttcccgcaggcgggagtagcagtggttcatgtcgtccagcaagctcagcggctcctcagctgccgggcccttccctcggccccgggcgatggccagactgcgttccgacaggcagcacaccgcctcgtagcagccgcgcaccgggctcagcgccttcatgctggggagtgagtccagaggtgccccaaagagaaagaaaaccaaaagaagtcccgctacagtgacctgcaacgcgcgcacgctcgccgcggcggtcacttatagagcctgcctggaaggcacgcctctttattcaaaatggcccgcctcggccctgcccccgccggccctgggcgttcacagcccgcttaaattgcaaacaggcttcctccggctggtctgacgccgaagaccgcggagccgcggattcaaagaatgaggaagcgctgataccggggagaggcgggcctctccgccagcaaggatttaaaaatcactcaaaaccattaacttccagaatttgctttttcctggcagcaccccagatctttgagcttccctgccccctgccagtccgcctttagcccaacactggttcgagccacagctcctccgaggtcataaatccctgaacagcaaagaagctccccccaccccccgttttttttaagcgaaagatttttcaagggaaacttgtaaggaattagtgccgccttgttccccaatttgctgttcgtctgacctccagactcactggcgt

SEQ ID NO: 33142 - DNA, 409 bp, Homo sapiens
ctgcaacttgtttagcagtggtggggcctcagcctcttattccaaatgcctctgaactttctgttcccagttctgctccttttaccagctttttcccccctcttgcattttttatttttatgaaaggatgtcattaaggcttttgtctgcgctgtttttgtttcagaacttttctcacaatcctattttttgttgaggaatccgctcctttgcccagctgtgggtcccggtcccacagctgtgttgatctaagactcagccccagacagcctggcgccagggtgggacgtcatgcgttcacacagggatgcgtgtcccaggcaacctttcctcgggcagtcaccggccggcgactgcctcccccaccaatgagcgccggacacccgagaaaggggcggggtctgcatcg

SEQ ID NO: 33143 - DNA, 1603 bp, Homo sapiens
ttacagataaggaaactgagacacagagaggctaatttgcccaagaccacgtggctagcgagtggctacactttctgagcctcggctttcttggctgttaaattgatatgtatatacaagcgccctctgcatagcagggcttctcagacccaacactattgacattttgggctggataattctttgttgtgaggctgtcctgtgcattgcaggatgtttagcggtatccctggcctctaccacatagggtattcactgccaagagatgccagtagcaactcccactcaagctgtgacaaacctaaaatgtcccctgatcttgccaaatgtcctctgggggcaaaatcaaccctagtttagaaccactgcctaataggatcctggggaggattaaatgagctatttcatataaaataccttccggcaatcccttccccattccttccataactctatggtgagttctaactcctcagaaccctcttgttctttctgttcctctactgtttggaaaatgtgcccacctatggagactgggtgcttgagagcttcttgcaaatccaaagctgttccaggagctagacctgattccagtcctgtcatttccacagacatgctgtgggaccttggctgaagtccttcccctccttgagcctcggtttccccatgtgtacgagggggctgacccagaagctttccgaaaggtcttctcactgcaggaatcagtgactgggtgattcataccaagtgcaaattcccctcacaaagtccaaattcttccagcgacttagtcattccagggtttgaactttctcgcaaaaaccatttgaaaaattcttccagcttaaaaaaaaaaaaaaaaagctattaaaagaaagtaaaagtttcaaaaccaaatcctaggcaaacaaccctgaaaacaatacacacacatacatatacatacagcacccaaggtagctctgagaacaggatatgaaaccttgcaggccggcactaagaaatgattcacaggcctttgagatgcttctatttcaagacacagtccacccactggatctggtggctccaaaaacaaactttcagctgctgtttcttatcgcagtgtggttcgcctggccagtatccttgggtctcaagagctccagacagaagacaaggttgagtcctgtgaattccctttctgttctatttcaagcctcaagctgctggcttgtttaaagaaagtcttttgcatccaccttttggttggctgacccgagtttaaagcaacatagcctaatgggttcgtagcacagcctgcgaattcataattttagtttagcaaggcctctgtgtggctccagcaagtcctactggatcctgggctggtcattctagaagctgtctccagctaaacaatcctgcctggctttccttatacatatcaatattatacttgccctaggccaggattaagaattttagcacaaattcaaaatttcatgcttttatgtaaaatagaaatataaaagtaattcattcgatgaaatgcttactgagtgctcactatatgccaagcaccagcaatgtactggcgataaaatacagcccctgccttcag

SEQ ID NO: 33144 - DNA, 1058 bp, Homo sapiens
aatgtagcaagaccctgcctctacaagagtttcattaaaaaaaaaaaatgaaacaaagggtaggcattatttttggaatcttctgacacagactgcccaattgcccttgagaaaagactagacctgcaggggcagggtgtcccttcaaatggtgactgagcgccagtgtgccgggcactgtccttggtgctgagagtgccgcagtgaataagaagcaactctgctgttggagctcagtctcctgggagactgggaagagataaggcagacgatgacaagtgcttcagaaaattctacaaaaaggtgaagggacacagtatgggagagttactgtacatcaggtattcaagcaggggtgggctctgagataacattagagcagaaacctgaagcttcagtgcctgtttcccataacctgagtattatcacacatctcagctagtgagacacatgagtttcatccccacgtcctccaagcatttattacacacctactgtattctagatgccaaaagaacaaagcatgttagcctgcagctagtgaactagatattcaacttgtagtttgctgacctcataggcttgtagtagcaggaccatggattggcatagaaccaagtgagtcaccaagttcatcaaaccaacgggtaaagttcatcactacctcaccctcactgcaggctcagtgggaagaggcttgtatttgagtctggggagttggtctcattttcaacttctgatctggtcatttgccagtcactgggccttgggcaacccacttctgatcctcaattatcctttctgagaaagaaaaatattccttttacaaacttgaattatttatgtaaaagtgcttactaaaaaatgctttcaaagcctcttatccactactcctccaccccaaaaagagttgaatatgaatagaaacagtagctttcttccttgggataccaatttttgagtccatgaggcaagatatgctttgtgtggcttctatactgtgtagctctggttctctgccatggaaggtttcccttgtctagagcccccttccccca

SEQ ID NO: 33145 - DNA, 1698 bp, Homo sapiens
tcaaaaaataaataaataaataaattatatttgtttacgttgttacagaataaatttgcgtcataatttgcatgattgatttaatgtagttttggcgttctcatcacacaaggaccaccagctcgtgacactgggaggagagaacgtcctcaaggtccggaaactcaaggacgtgctgattcgggagctttcaaaaactatttttggaaaacccagatcccggtcttcagccagcgtcgcctgcagtggctagcactacccacaagggagaagccgacgctgcagggctttgccaaatgcgcctctcttcctcgtcttcatctctgtggttagcctgggaaaagagcccgcctcctggcccataaggccctcggccggaagctccgctttctcttcctgctctccatcatggcggtgagtagctgggacctggatttgctttcctttatccgtcgccatccatggcaggccgagcctgcgggggctacttcgcccgcagcccgaggaatatggagcccgcaatgcctgctggcccaaaactagcagagccgttcgagccaaggacgcagggttgaattctgtcactttccctgccatcgttttaggagcggctccgggcacttgcccggagtgctcagaagcacggtcaggaggctgcagcgggggcagatggggtgaatggagggttctgaggcaggggggtccgggccttttcctggtcccggggacttgagacttgctcggtgctaggaaaccttagtcggttgctccgcttagggaaggtgccagcctttagacagcttccgaataggatgctggacgtcgcataaccacgtgtttcctgttaactgagcaattaagttctgtttcttcgctcactccccttagttggccttacaatgggggcgctctttgttaccctgagcctcttagggttcgatctcagtgtccgtatcttttaacactcaataactgtcctgagttttctcttcacccgttccgttcgtggaggaaggataggttccgagctgtcttcttcccttgatgtcccctaaacattataccttttaaacattcagggtcttcgttacgatttgggatgagcagaaataaaaatgctgtgcagatagaaagtagtaaaactcagggccctcagctgtgagtgtattgactgctgctcttccctgttgcagcaggatcaaggtgaaaaggagaaccccatgcgggaacttcgcatccgcaaactctgtctcaacatctgtgttggggagagtggagacagactgacgcgagcagccaaggtgttggagcagctcacagggcagacccctgtgttttccaaaggtgagtagtcacaaggacatacagggtttgcctgcttgggtcgcttggttgtttcttgatttacctgctgtcgagtctgtttagaaagtgacagtcggcatcacttaaagcattaaattcatgagccggccaagaggtgtcttttttttttttttttattcaagatggcgtgtgggattggaacactagattttatttgagcagatcttaagctaagactagcccaagtaaagattttcctaagtaactaggatatgagatagagtggaaatgtcaggaacgaagtaaagatcattagatctgattagcagttagggttatataggctgcattaagaacagggctgtacgggag

SEQ ID NO: 33146 - DNA, 608 bp, Homo sapiens
attgccctatgcggatacctctcatacagaccctccactgggccgttcaagtccacgtacttatgggttcaccagctagttagtgcccccagcagggatacagagatggtttagtcacagtccctgcttgcaaggagctcacagtctagtgaggacatcacacaaagaaatggacagtgacgaccacacgagagactcctccagtgatgggtgcacgataatctggggcagatctggggtggggttaggtacaggctgctcagaggaagtgattctcaaactgagtcttaatgaggccaggaggctgagggctggaattttgggttggcatatttatagaccctgaggctgcaatggggcaagtttgggaaatcccaactctgtcatgatgactagaacaaagagtaagaggtgagaggggccagaagtaaggcttaaaacactaagagccacaaaaaaaaaaaaaaaaaaaaaaaaaaagcaaacaaacaaaaaaaacactaagagcctcagcccaggaatggtggctcatgcctgtaatcccagcactttgggaggccaaggcaggtggatcacctgaggtcaggagttcgagaccagcctggcca

SEQ ID NO: 33147 - DNA, 1082 bp, Homo sapiens
tctcagttctgcctccaattagctgtgtggcctttgactagtcatgaaccttctgtgccatagtttcctcacaagtaaaatgggcttagtaattgtttctatcccacagggttgaagtgagaatcaaattatttagctcacgtgatacatttaagtgcttagcatattaatatgcttaattaatattagctaagtcagaaattcttgagtttccattcctgttttgccacccattgggcaaatttcttaacttctttatgcctcagtttccaattgtgaatgaacaatgttgatgatagcatcaaccctgtagggttttaaggatttgggataataggatgtcagtatctcactgaagaaactgtccctggccgtagttcctggctccattgcagagttggtaataccagtctctgaattttcttcctgagagtggatcccattaaatctctagccaaggaggagcgtacttctgtgcttctagggctagacagaacggaagatggtgcagcagccccagcgtgggaggccggggctgtagtggggatgtggtgaaagacgtagggctctctctgttgctctcagctgcagccacgtgttgccccatggagactgggccaggagctgctggatcttactgtttctcaagagaagttgtgaaatctcctcattttaaactcttggcaattatttcatttttgtaaacattgggagagcaaacaaaacatgtcggtaggctgtatttagcccacaagctgccagtttgctatctatgttctaggctttctgtgcttgacttagcaaaatatttactaagcgcctgctgtacctgtagctcctcagtacctggtcatgtttactgttctgccacctcaggcgtgctggctcagtcatcctatcaggtactaaatcagtttagtgggcttgaaatggtgtttcaattcaaattaaaatgcaatttgcatttccctgattactgctgagattgaacatttaaaaaaaatacatctatagaactttcttctccctcagtagaatttttgttttaagtcttcagatcatcctttaggtatggagagatt

SEQ ID NO: 33148 - DNA, 957 bp, Homo sapiens
tcaagtaattatcctgcctcagcttcccgagtagctggaattagaggtgcctgttaccacgcccagctaatttttgtatttttagtagagacggggtttcaccatgttggccaggctggcctcgaacttctgacctcaggtgatccacccacctcagcctcccaaagtgctgggatgacaggcgtgagtcaccgcgcccggcctacagtgacttctctagagagtagttccttgagggctgcagaaggtcatgctagtttgaacatagtggttccatgtggctggttttacatctgtgctcagatgatttgttttttttttgtttttttgtttttgtcttcaaggtagaagaacactctagtcccacaggccctttaatcagtacccactggggagtatttgtggatgtgtttatcagtttcagggtgtcttgaccaagattcaggagggagggtatcccctatgaagatggcctttttctcttggctctccttcatgcacccttctcaagccgtgcttacatttcctctaacactgcaggctccattggaactccagcccctttacacctgctgtcacctcaactggagtatccttccactcacttatcatctggcaaattccttcctcctcctccttcaagatctaggtcagatggtccctttctgaaaccttctgtggctctcccggcagagttaggcctcccttctttgtagatattcattaactcacatatttggttagctaccaaaaaatcgtccttgccctagaggagttcataggctagtggggtagacaaacctaaacatttagacagccatgctgactgcattagggaagcactgaggaggagcacttcacctgccttgggggacagatgacagggaaggttccagaaggtggggacacctgaatcctaagagtgtgtgggtatccagataaggaactggcttgggc

SEQ ID NO: 33149 - DNA, 679 bp, Homo sapiens
cagctatagaggggggaagtgatgatttaggagggaagataatgaggtaatcttgcacatcttacatttgaggtgcccatggtgccctccaattggagatgcccagggtgagggttcagagcagagccactgggtacagatagtcctcaagactggggtatcagccctccaatagaggagctaaggaagcagccattttgatgagtgttttcctgcaaatcctcccagcctaagagtagatttttgccttcccttatggagcagatggaggtcttgagggcagcaaggtgcttagtcctctctgtctcaacagcttctagctcaccagaagagaggaaatttaagaaaaagatgacacattccatctctaacctgctgagtcatagagacgggggagtaccaatggggaaatgtccattcagatggattctgaactctatccaggcaactgaaagcctgggactagacctatagacttgggtagtaccagcctatagatggtggtagcaaccatgagagtagatgagaatgcccaaaaagggtgtgtattgtcataaaagtcatgcgcccaggactacatcctgaagaactacagcattcaaggtagagaagtagcaaaaagggagagcataaaggtgacagagggaatagtcagaaactttttttttttgagacagag

SEQ ID NO: 33150 - DNA, 828 bp, Homo sapiens
cttagaatccacaaaactttacaataaaattcaaattccttatcatggatcctacataaggttccgagaccctgtaatctacctctgcctttcttgccaagtttatcttataccacccttcccctttcttattccactccagccacatgcaccaaagctgcattgaatgaacgaatgaagtgttggaagtatcttcccaggtggcttcttgggcaacaggaagcaagacagcttacggtcaaagagcttgagtgtttgtgccagacaaatctggcttgggtcctggctgtgctgcttacaagccctttgaccttgtctaggtcatatagcctcagtgagcctcagcaagtctcagcttcctcaaatgtgcaatggagactatatgtctatactgaggattattttaaggataaagttcagaattactgcaaatttcttagcacagtgcctggcacattgtaagcactcaagaattagtagtgttagcatcatcattgttgttgttatcattactttggccaatcaaccctcctctgttaacagatggccagagtcatacagtgagttagggatggaggaggggtgacctgcatccaggtgttcagacacagagtacaggctagtgtgggctttggagctgagcagacttggctcacattttgggttagtcatttcccacatttgaggcaagttacttaacctatctgaacttcgagtgctctgttcttaaaatgatgtatgtaggcctggcgcggtggctcacgcctgtgatcccagcactttgggaggccgaagtgggtggatcacgaggtcaggagttcaagacca

SEQ ID NO: 33151 - DNA, 2706 bp, Homo sapiens
tcatgcaataagtatttatttagtgcctatgtgccagacactgtttgtggggaaaacaagacacatgggctattattgcctcatggaaggaactaagctgtttggattttgaaaaatccctttctctgggcctcaattcctcgacctgttcagaaatgtgcgctcacaatggtcctagacatcttagattcaggttccattttcagttctttcctgtcctgcggccatctgcaagttaatttggtctccctgaacctcagtttcctcatctgtaaaatgaagatcatacaactcgtttcatcaggttgtactgaggctggaaaagatagtctaactactgacgcatcgtgtgctcagcctagggtggctgctaccgcgggtgcctgcggactcctaggacgggcaccagcccgggacccctgacaaggtgttgattagggtgtggctaagccccaggcgggagaaagcgttggcatttataaggccagggtctggcgcggtggcctcattccgtcttgaagtagaccctggagaggtcttccaggcttgggctcagcacgcgagcacagggagcgggggtgccggcggcggaggcgcgtacggcccgagcagcccccagcccccagcgcgcacacttgggccaggggcgcgaggagtgcgcggccgccgggtgggcgctggggagcgggccctgggggcggagcctgcagcccaccgccccccacacaccccagccgaggcccggaaggggccaggcgcgcttccgtctccgccggggatgcacggagggcggagctgcggcccgaggacgcgacgcgagcccagttccggcgaggaggccgcgccagtgacagcgatggcggcggagtcggcgctccaagttgtggagaagctgcaggcgcgcctggccgcgaacccggaccctaagaaggtaagcgagggggcggcgcgtagcgggatgggcgttgggtcggtgagggccccgtaacggtcgcggcccgagcgtggcggggttcgggggctgggaccctgagccaggccccgcggggctggggtcgtgaagttcgcggccattgaccgctgcccgcgcgttgggaccccgtgcgtcgggcgtcgggacgcggggccccggccgctccccctccctcacgggcccgggatgggggcgcgcccggtgcggacaccgcgtgcctagcgcttcctcccagaggcgctccgtggcgtcccgagccagctgtttcctgcgggagagcgtgcccggggcgggagggcgctggccgccgcctcgttggcctcccggtgcctgcgctggtgcccggctccccgcggagcggcgcggactccccagcgggtgcgtgttcgctgggaggagaagacgggcgcccgaacgctgcggagcctggactcgcggtctggtccgcgcctctcggagacgcggttactactctccggctggatatcagagcgtggacctttcgctttctcagtgaatccctttcaaaacagaataaagcctcgcgtcacctaagcatactcctgaaaacttaggttggaattgaaaaagaggcgggggcccggggttggaagtcgcagctaggtttccttttggccattaataggaaggtaagagctaccgtttctcgttgttcgagtgatggacaaccatttttaattgtagttaactagtttttgttgtttattgtacaaactgaatattaagttaaacgcgttcttgtaccttttcatctttctgtcactcacttctctggtctccaggagacagtctggtggttgtcaggatttttttttttcttttttttttttgaggcgagtcttgctctggtcgcccaggctggagtacagtggcgcgatctcggctcactgcaacctccgtctcccgggttcaggcaattgtctgcctcagcctcccgagtagctggtattgtaggcgcccgccaccacgcctggctaatttttgtatttttagtagagacagggtttcaccatcttggccaggctggtcttgaactcagttgtcaggattttttaagtggaagtacaacgatgaaaaagcacttatgtgtttggcattctccgtcatcattctggccggggcgggcagttctaggagttggaactcagtcctggtggaaaaggaagtcgtggagggagggctagggccgtgggggaactgctctgctgagcctcttcctcacctgctgcttcctaggactaacctgaaaggctaaggtaccaggctgaaagtcagtgctcagaaaaccaatcgtcattctttggggttttttttcttgaagagccactttctctttaccttgttctagcctgttggaggtagggtttctgcaattccaaaggccgtacacagcctctcaccatcagaccactttttaaggctcttcgttcatacctagctcgaagattcacttcctcaggaagccattttagttacaaatctgggaaaacttaaaatgctttcattgtgccatgttttctgttgcagcttcagtaccgtacctagtggtcaggcatacttacaagtttctttttacagtaaccccttgtggacatctaataaatggtcattattttttagtactagtttgttttcctgaacactgtaagatctgtgactgacgtttgataccttaaagcagtgccatataataactacccactatttgttct

SEQ ID NO: 33152 - DNA, 1528 bp, Homo sapiens
ccccatgctctcaagctgtaaccccgctatcaagaaagtggttatgcaagtgggcctgtgagctctcaacgtctaagccgtgcgcatgtgagacagcgataagctcgcgttctccagtctccagggccttatcattcctcacgctttccttcatcggctcgcaaagaaacgtggcgatcaaggaagacagcgaaggctccatcctcgtcgggggaggataattcgaatctcagcctgtgagtttactcagcacacctgtttaatctcttggtccttcagtttccacacctaggaagctggaacagcagcagcatccagcgccaggactggagtcatatacgaactctggcacctgggaggcgcgcgtcctacgtcagttccgctcgaccccaccccccccgcccccccgccttctccccacgcgcatgcgccgcgcagcggcgctttttacgacgcggcaggcgcggcgcgcttagttgccggagctgaacggcgcggagctggtctgaggcgagccgagccgagcgagcgcggcggtggggccgagaggacgcgcaggtggcggcgttgccatgtcgcacggtcacagccacggcgggggtggctgccgctgcgccgccgaacgggaggagccgcccgagcagcgcggcctggcctacggcctgtacctgcgcatcgacctggagcggctgcaatgccttaacgagagccgcgagggcagcggccgcggcgtcttcaagccgtgggaggagcggaccgaccgctccaaggtgggccgcctggggcttggggcgggcggggcagggtgcgtgtggggcctcgggccgtcggtctactcatttctgatgttaagaataacgacagcctggttgccaagcgcttttccgtgcctgtctcctgccagctctttgggaggcgagcagcgttgtctccccattttgcatatagggaaactgaggcctagagggaacggggacagttttgtcaagctacacagcctaacgctctattccagggctgtgtgggctagagaggatggtcgtgagggccgttggaccattggtgctaatggctgcctcatcatattacctggtgaagatgagcctagggagatgaaaggtggttcccatatagagcaaatgttctttacattgtggggtcgcaggcccctttgctatctgtttgaaagcagtggaccttcttctcagaaaaatgcacataaacacctgcctttcagttcacacttcagaaggctcttcgaccctggaaattcattcatgggctttttgttaagaaccttccagttgggtggcctgtggctgttatgacactggataagactggttagcttcaagttaataagtcttggaaaaccaagggagagtgactcttcccattgcaccccagttgtagagcagggtgggagatgcctgaaattgtaggctctcagcaaatatttgttgctttctcctcccccctccccatcccctccagtttgttgaaagtgatgcagatgaagagcttctgt

SEQ ID NO: 33153 - DNA, 1975 bp, Homo sapiens
gtataggttaggctgggagagtgagtcctaagcggctgagggtcaagtgtgactcatttcctatttgcagatccccacacattctcagggacatgctccttcaactcagtttgcctgccttctgacttttctgtggtccctgatacctatttccacttcagcttgatggcagcgttttgtgcactgtctgcatgacattgcttgtgaagggcagcgctaacactgccagtgcctgtccagctctcctgatacggcctttgtatttttcctaggtccttttttgcgtgattaacacctcacgctgtgattttactgtataaaccatgttcacacaacctcatttaagcctaccaacaaagctgtgaaggaggcagggtggttattaccattttatatatcaggaagcagatccagagaggcagaatttaaatggaatcccgaggttgctgtttacatgccttccttgagcctcagtttccccatcttcaaggctggagaactagatgatctgtaaggtctcttcggttcagagtgtgtcattccattcatgatcctggaatagggcatgaaagccagtggcagacacccgaggccttaagaggtgtgtcccatgaggatgggaaggtggtaaagtttatgcaaacaatagtgtgagggatgcctctccttccggtcggccctcctccaggaggcgcatgggtggtggtagcaagtgggagtcttgggtgccctgtctcgaatctacaaggtgggagcgggtgagaacccagcgactgcgcggctgaatgacagggagtagccccgccgcctccaacatggcagcttctatccagcgaagccgggtccccgcttccgggttccgtactgtcggccaggctacttccggcagcgcgatggctgggttcccgggactcgaacggaagttccggcgggggcggccgagggggaagagtgtgtctgcgggagaaagaggagaatcgcccaagcggcctcggaagtcccagggagtggaggtacccagccggcggctgcggaggatgggcgtgtagggggaggtcggcctcgggagggtcccggagagcggggagggggaaccgtgatgggggggatgggggtggggagtgaggtgcgaaggcgctgtccagtcttggggacttcgggagtggagcggggctaggcaagggggtgtctgagtataaagagacagacttcagggtcggaaatagaagagcccattgtggggcgggggcttccccagagtcaaaggtacaaagctttattgtgggcaggtgggagtcctgggtcagggtagaaaatttcactgggtagggtgacctttggtcagaacagaagttcccattgtggggagcgggagatcctgggtcagggtggaagttctcaaggtgtatagagagagacaggtcagggggaaggcacccctccgaggagggagcctgggcgggaggtgcaagtccccacggtggagaaggaagggaatcgcagctcagggcaggaggtgcattccccatgggaagaggaaccccgggtcacaggtgaacgatcccattgtggggagctgccctcaggggtcagagatggaaggtgaggccagttgggaggggtgggcaggcacttgaggcaggtagtggaagcttccggcgagtttggaggacgccgaggatggggaggggccagccagcctgacattcttttgtgtgtttgggagtcccagagcgtggtcaagccagggctcgtttgcagtcagtggcagcagcagcaggtagctccgtttagggggggcgtggagcaccagtttgggggtgggtggagttcttacgctttctggggacatgggcagccccctgggggtctgggaatggatgggccagaaactgctgtgaaggctggatgggggctgggtggggggaggttgagatgggggttggaggcggcactgagtaggggatggaagctc

SEQ ID NO: 33154 - DNA, 3435 bp, Homo sapiens
catgtaggccacatcatcacgacatggggtgctgtgttcccagggactagccagacacacattccccgcccggtggtggaggtggaacccagggttttgcttctgccatcccctcaagtagccccagccccactgccccgctcaccacggaaggcattatggaagttatcgatgaccacaggcaagtagccagcctccagcagctccagcaccgtgtggctgccaatgtagccagccccacctgttaccagcaccttctctgccatggcacctggcccaggatacagagtctcagaggtggctgaggctgcctgctcagagcttccttcccactggaatcctgccccctaagctcgctttggaaggaggcggcagtgtgccctaggtaccagactggctcagaagtcagccctggggcaagtctgggtaccatcactttctggccttaggctttggaaattaattagcctcttggcctcagtttctatctctgtaaaacagagctaataattgtataaacttcatgaggcagcgtgagggttcagtgaggtgatcttaagggcccgccacagcagagctggggagacctgacacacaggcaccttattttctagttccacttgccttggagttggaaaagatggaatctgaggatccacacttctttgtccaaggtgactgaggactggagagtcctgggcagaaggaaaatggcagcacgattgggactccagggtcgcaggaaggggttctgtctgctcagacccaggcttgtccaatgcctccgccttcgctaggtgtaaactggctcctgggcgcagtgactaatacctcctgctctaggcggcccccaccccctttccctcaagggtcagctgggaggaagcaggaaatagatcacatggcctcaagggtgaggtcctttgccaggcaggctgaggccagctcaggggcaaccacaccgtggttggtcctggagggggccccaccccaacccccgctcagcctctgcccatgccagggccagcccggtcactcctggctcagagttaggaatcccgcccaacttaggctactctgggtgggccgtgtagacgtggacttggccaggtgcgcacctccaccctgaacaaactctgcgggtagtacggggaggaagccccagacactgaggcctttcattcccagcgaccgggcccgctgccgccttcctccacgctgcctctatccccttctgggctcacgcagctccaacccacttgaccaagagccctctgcgtgccaggctccgtaccaggcacttttgcatgattttcctgaattcccccagcatctcggtgagacaggtgttatcactggcactttacagatacagatactagggccagagaggtgaaacagttgcccttcggtcccacagctggcgacagcgggctggaatctggatcgccaggctcgcagcccggccctctccccaggcggctcgcccttcccccaccgctgcccgctggactctgcccgccgcgccgaagccgcccccgcccccgccccgcgcctggcgcggaccccgaaagtggtcgcagagaggccctgggaagcacgaaagctggtctgaggccggctgcgcccccgacagcggagtgaccttgctcagccgtcgcccactcggttttcccagtctgtctgttggagggaaggggagctaggccgtgggcatacgagggcggctgggtctcaggctgggctttgggctgtagcgcggagcggggccgagctaggagtcctcaggccggcaatgaatgaaccccggccgccccagcccgggcagcggggaactgggacaaagggggcgggcctgccctggagggacgctgccaggaacacgacccgcccctcggaaactccctcgctccccgcggactccccggcccctcgcgagcccacccggcccttcattccgtctcccgaacctgctcgggttcccgcgccccacgcttgctgcagaggcaccgcctcctacgcccgagccgcgggccctttaagtgctgacggcccactccggccccgaccccgcccctccacgcccccaaggaaacatgtcactcgggttacggccactacggggagggcgggaggacaaaaggcctccgcgctgtgacgaagactgcgcagcgcgcgcccgcggaaggcggaagtgggcggtgccaccccgcgagaggcgccgccggcgccaggtcccagtagcgggtgggtccttgccggtgccccgggtccccgcgctagctcgtcccaacccctggaagagggctgcgcttccgagggggcagggggcagagggtagggggcccacgcctccgccccactctgacccgcaggttttcagacttgccggtgtgtgccaaaccatgaattcaaaatcttgaactacccgatcccacgggactaaggcaggagggggtcgcagggggcctggtgctggaagtccagtttgcaaataaaccaaggagctggaggaagctgtcaggccacactagcggttccagcgctcttggctctcagcccccacctgccgggaagggtcggtctgcactctgccttccacgacggcaggttagaaaatgattgtttgtttacaatgaaaagtagtagagctagagaataatatgcacaaaatgtgacatcctgcgtgatgaaaccagagcaaaggagccctaaatgcaggagcgcacaggtgtccgcgcagccgggaatcagccagcgcctgcccgcagagtccagggaaccgacaggtgagcgctcccgggcccgggagcgccagggagaggccgggccaccgaggcccaaagcagcaagtgtgtcctcaggggagcttgtgcaatagccccagtcacagaggcaaagctcagaaacaaccccgtcgggtgttctggccagcaactgccgcaagcagcctcctgagtaagcccaaaaccactgatttccagtcactatggatttggggctcaggtggggaaacagggaggaaatccaaagattaataaactagttcatagtctccattttcctctcagagtgcaacatggtaaagtattttactcccccacgcgcatgtatacacacagctgcacaaccgaatgctggaattatgatgtgccattcaacctttaattacataagctgttttcaaaaatcacattcagcgtggagattttccagagatgctggagttggcagacggccaccacgtagctctccactttccacaaatggcctctgccagcttgggaagaacctccatgacctgtgtcctgagaagtcagagagcaagggccccacggccatggcagggtggagccgtgtagagggtggccaggtggccagctcgcggattccatccagagaggagactcaaggatcatgctaagtagggaacgg

SEQ ID NO: 33155 - DNA, 704 bp, Homo sapiens
ccatattggaataggtccaatatgggtccaattggaataagccatactggaatagggtgggcccctaatcccatacgactggtgaacttaaaaaaagatggcctcacccaaggagctgctgcccacacggggctgctggacaaggtgcagagggatgtggcagggaaaggggaccagaagacaccagtgatctgctaaataaatgaaatggtgacgtcgcttccccagtggccctgcagagtgtggggcggcagtggctggcctttagggggcagcagggtgcaggggaaggagcaggcctttgaagtcacgagatgctgggttaaagtcctagttctgctgttcactagctgtgggccttggcaagcaacttcacttttctgagcttcaatttctgcttctgaaaaatggtgatgaccctttggtcatacggcaaggattgtggcaactgaggctaagacctggagcagggcagctgctctcaagaaacagttgctactgttaccattccacctatctggatgccacaaagtatcctgggaagaagtgggctttggagagagaaaaaatggggtttgatacctgatttcaccatttgtaacctgtgtggcaagttatttagtgtcagttttctcaactgtaaaagggaataataataccaaatttgcacagtggttttgaggactaaatgacataagttcttg

SEQ ID NO: 33156 - DNA, 1353 bp, Homo sapiens
ttaacgtggctttctgagagggacccagtgccaggagtgtatttttccctctatacagttataactccttctcaactccctaaggtaaaaataccaccaccgactgatcacttattaggagccagaacactgccagatgtgttacttacattttctctaatttccaaaacaaccccaagggaatgttgtccgttttacagacgaaagagctgaggtttagagaaagtaaataactatgtcattaagtctagaaagtggcagaactattgggacaccctagcttcagcttttattttttctgctccatacagctacgtctcccacactttttctgcgctgagaatgggagaggggaaaacatcaggatcgaacaggatcaaagtgcaattccaagggaatcacagcttggctccaatcaacgcaagtcccgctcggtaggctgggatagttccccaagcatctctaaaagcaacaacagttggaaatggagacgaaggaaatggaagcgtgttcttgattttcactaatgaagagttggagaggtctgaagttcaattagagggagaaaggggccagggtcatcggaaagggccctgggcggggaatcagggcacctaggatggcgtcccaggtctccatgacccagacaagtcactccacctctccggacctcagttttcccatccccttcaaaggatttgaggggaaaagggagggtccaggactccaacgccctcccgactctggcctgagagctgtccggcctcgcctctaagagagcagtcaccacgggccaagcccccaaccctgacagtcagagtgcctgcagggccgccgcctcggcggctcggggcacttacagcccggagggacgccaagcccaccagtcgccgcggaagcgccttcctcattgctgccatcttggcccagaatcccccgcggcagtccagctgggccccgcgtgaccgatggctcgtctggtgggcgcggccccgcccccgcccctccgccgtgacttccgaagctggctccacccccagcctctctccgttttgattccgagcgcctcttccatgccaggccaagtgagacgctaggaatataaagatgaacagaatcagcctggacaccatgtaatcctagcactttgggagaccgaggcgggtagatcacctgaggtcaggaattcgagaccagcctggctaacatggcgaaacccccgtctctccaaaaaatccaaaaaaaaaaaaaaaaaaaaaaaaaaaaaaaaaaagccgggcgtggtggtgggcgcctgtaatcccagctacttgggaagctgaggcaggagaattgtttgaacccgggaggcga

SEQ ID NO: 33157 - DNA, 745 bp, Homo sapiens
catgctgccgtggggttggaggcccacagcctctgcctgtctgtatgcccccctagaggtttgagcagcctggcactgaagaagcgagccacaccgccctcgcacgccacactcccctcgcacgccacacccccgtcgcacgccacacccccctcgcacgccacacccccgtcgcacgccacacccccctcgcacgccctgagagggggaaaaggaactttacccgtttcagttgcacaacattgtgaaaataatgccactgaattgtacacttaaaaatgtttaaagtgacaagttttatgttacatatattttatcacacacaacaaaaggggttaaacatacagttaccatatgacccagtaatttcgcctctaggtatatgaggggactttaaaaacttattggaaaatggaatcaaaatattaaaataaaaaatataaacctcatttctcagtataagctctatcaagggcaagacatttttgtaaagctatgatatgcatttagtttacctttaaagggcagagggtcctgggaattaaaccacgtcaatgcagtcttttttgcattattaactgaagaaaaatgggtgccttttaaagattttttttttttttttttttttttgagacggagtctctctctgtcgtccaggctggagtgcagtggcacaatctcggttcactgcaagctccgccttccgggttcacgccattctcctgcctcagcctcccgagtagct

SEQ ID NO: 33158 - DNA, 1546 bp, Homo sapiens
aagaggctgcagggaggctgaagtgacatgtccaggttcacagttgaattagaaccaggctccacaccactgatttgaaaccctggagtcctgatagtgctgtcaatctgaaagggacatcaggtatggcctaactcagccctctcggtgcacaggtgcagatacccagggcttcccagcctgccatctccctgaaccttcatttatcagtccccagtcaaacgcacctcctcctcctcatcaggtgtgccaggctcactcctgtggccgcaggaggccacacgcgggccccggggtcatgggggcgaccggcagctgcgcgccccagctggccgcccagccccacctcctgtttgccgcccgagccgggaaggggcgccgctccccgggaccacactcacttggcgcccgcggcctggaagaggtcggcccactcctccgggtggaagaagcgcgcagtgaactgcggtccgaagtcggcgtagctgaagccgggcgggtagttgtcgcgcatgaagcgctggtactgcggccgcccctcgccctgccagtgccaccagaaccactcgctgccccaggcgggcaccgagaacacgccccagtggatgaacaccccgaacttggcttcgtcgaaccaggccggcagcggccgagaatccaggctcggccagtctggggtgtagcggcgcggaggctgggcccgacgcaccgactcggccgctccgaggaagagcagcagcagcaacagcgcgggacccgccggccgcgacctcatccccggagcccgcatcgctacccctcagcgacgcggcccactcttaacgcgcaggtgcccgcgggcggctccgcccactctgactaacgattggcccggaaggaaaaaggggtgggacaacctggacaggttggcccgagtcgcttcctcctcgggtcggaggagcgccctctggtgctcaagaagggaaagacgcagggaggcgttgacagcgcttcgctgaaggacgaataaaaaccttgaaaagggacttaactgcgaggttaaatcgtggaggtgagcaaggcccagtgtgtgcggagaactcacatttaagaaggagtccattgagccggacgcagtggctcacgcctgtaatcctaacactttcggaagtcgaggcgggaggatcgctctgagcccacaagttggagactagcctgtctctataaaaaataaacaaaatgagcctggcgtagtggtgcacgtctggagtcccagctactcgagaggctgaggtgggaggttcgggatcgcttgagcccgggaagtctgggctgcagtgaaccgaaccgtgatcacgcctctgggagtagtccattttgccgcagcaatcctgcaggggtaggctgaagtgagatcacgagttttatttagtgatcacttgggagccatagggggcttttgagttgtcctgtagcacaaggctggaggaggagataacagaccggaagggtatctaacagccctgacagaaataaggaggtagagggatgatgggaagaaacgtta

SEQ ID NO: 33159 - DNA, 1247 bp, Homo sapiens
tagatgctgttaacgtttagatgtgtttctttctgggctgccacaattccaggccagaggtattgaggaacccaggctgggccatgggggcagaggagagaacacagtggaagagatgaattagagggttgattaatagaaccagagtttggagccaaacttggggcttccagtgtctgaaaaaatgccagcgcccagcacgtgactatttctttagagctgccctttgccttcctgcgcagccccagcccagcccctgcccagccccagcagtaaacagtcaattctataaatagccatgtgggcagatgccaaggcagatctgagcctaccaggctgcgggacctgagagcatttagtgattgtctcgactctcaccatagggctcagccagcagtacaagcacaggctgataacgttcccctctccaaaagaggactgtggcaggcagctttggtagcagaagattatatttggattttccagcttccatgagaagcaacatagcacaaggattgagagtctgggctctgaaccagagggacctgggcctctgttcccagtttgccactgaatagctgtgtgacttaattttcttgaatttcagtttttccatctagtaataccacctagcaattacatgcaaaaaaaaaaaaaaaagaaaagaaaaagaaaaaatggaaaacaccatataaatatcaggggttggtataaacaaggtaataagataaatatagatgctgtcactgacaaacactctttttgagcaaactttagttaggttcctctgtcttttcaattagaacttgaacttggctctgtcctgtctttggttggcccagcccagtcctagcaaaaaatcctgctaagtcatccccctaccctggatatctgataaagttcttcatcgcccacctttgatgtgtatgtcctgggcctgcctttagcaagaatcttgttaggtctgtttaacaagaatctccatattcttgacgtctcctcttagtaatgttaaaatttataggaggacattgatttgaactgaacttcctgcacgaggcccaatagagcagaccgaaatggagttcctcgtgccgaagcccatgctaccaagccaaaactaagttgtttatctgaccttctgagaaaccaggagagagccagataaacaccaaacctccaaacaagccaattttggcaggcatgataacaaagtgctctctgctttttaaaaacttttttttgaa

SEQ ID NO: 33160 - DNA, 724 bp, Homo sapiens
tacctttgaattgcataagtaacagttaaaacaaaacaaaataaagatataacagtcaaaggcaaggagatggtataaatattcaatcacggtgaactggaatcaagagatcagactgaacttgagcaagttacttcacctccttttgccttggaaactgtgggcgaatggcgactcctttgttgcctgctctacccaagagtggaagtcatgccacggtgtcacctagcagtttaatcatgtgttaagactatgtcaatctgttcttttttttttctgctgtggcaaaatccaggctctcgggccatggaagcttgactcatagtctctttccaaacccaagccatcagccagagaacaaacactggcttgcctgactcagtggaaattccagacgtttgtagctcattaactgccaaattgacagctatggaggctgtgacgaataagtggacctcattagctccatgttccccagaaaaagctgtcccacaggcatactttgtacaaaggccatacgtaacacgtgatctttaaaaaaaccttttaaaattcttttgactatttcctgtcaaaagaaattcaccgccaggcgaggtggctcatgcctataatcccaacactttaggaggccgaggtgggtgggtcacctgaggtcaggagatcaagaccagcccgactaacatggtgaaatcctgtctctactaaatacaaaaaatatgct

SEQ ID NO: 33161 - DNA, 2508 bp, Homo sapiens
caacatgatgaaatcctgtctctactaaaaatacaaaaattaggagggtgtggtggcaggcgcctgtaatcccaactactcaggaggctgaggcaggagaatcgcttgagcccaggaggcggaggttgcagtgagccgagattgtgccactgcactccagcctgggcgacagaaggagactccgtctcaaaaataacgaattacatgagatttataaaaagttggtaaatataaattctgtaacgtaaacttgggtatatatgtgtatacacgaacaaactgtgaatgagactgattttgtaccgtttggcccagaattattcacgctcattgaaattagtgctcttttaaaagattcacattgggttacttatacatttactccaaagaaattgccattttccccttacctgcatctggctggcataatcaactgaacaatattctctttcttcccctttttcacttacaagtggggcagaaaggggaggagagcagtcctcattctttcagcaaacttactgtgcacttacaacgcgcgaaggcgctgtgctcagagaaacaaaacctaaccggttgtggccctcgagggtgtgtgggtggggagagctgcagccacaggaaacggtaacacggcgcgtaaagggctctaattgaacttaaggaccaatggggccaccaagcaggaagtgactgacttgcccgcgtgtgtctgaaccgccttcacagggaggcaacttttgagtaattgcggggctggagggtgggggcactggagggaaccgcggggaggcgccggcttcggacgcggagttgtgggtgtgggagagaggcgacccagaagccgaggcccgaggcgggagggggctgcgccctggcaagaggctttccggagtatcttccatctgtcaatacaggctacaggactcagtggccctaattcgagaaccaaacgtcccccgccggtcagtcttttcccccagggcagtcccaagggcggcgagcccgcgcgcacgagagccgagcggtaggaagagccgagagctagcggccggggcctcggcgggccaggggcgcggagaggccgccggagaaaggactaagacaccggtggaccgagcagttactcccggcatgctcctcctccccgggcagatttcaaaccctctgcagccccacctccgcgccttcgcccccggccagccccagcaacaggcggcggcccgcttctcattggccaggcccgcgctgtcgtgttttgattggccgcggagcctcccggccctgcttctgcagtcgctgccgactccattttgtcggtagaggcagaaggagaaggtcgggttgtagaagctggggtggccggcagctcgctcatcggtgttcgtgggctttgtcggtccgtgcctcgtctctccctggaaagggagggaggcttcgacgtcgagagggagccgctgccgcgttagttccgagcttgaagtcagtaagtagcggctgcgctaagggcgcggccatgttggtggccgcgctccccattgttggaggaaggaggcgagcggaggcgagatccgggtaacccgggcgggcgcgggcggtcacgggcggtcgcagcgccgcgacccctgcggctccggagagatggggccactgggaagccaagcccttgtggcgtcggaggaggcgttttccgggttcgagttgggaattactcacagtccggaaatggcaatttatttagggttgtttatctgtttggaaagctctcttacccctttgaaaggagggggcttaactatttggtaacttattttcttggaacatcaaattaaaaccaaaccttgaaagttaagctgttccctctagggagacatttttatatatttaagatgggcttagactgttagggcttgtgagaacttattttaagacggggaggaggcgagagcgttcataaccaaaggaaacactgcgtgatgtctacatgttccaagagactgaaaatggatgtgacatgtgtggaaagattggaaaattctggtgggagtttaaaaacacggtctctttagaaaatccgcctgaagccaattttttgatatgactcaacatttaacacttccttgattttatacgcgagagaatctgaaggtctttcccaggaaaaagataaagataaaacttattgcgggacttggagacacttacaaaaattccccaggagtgactggatctcaagggtgaagagtttttttaaatggtcgtggttataaggtcaaagaaagccatcttacgagaaattttctaccttttagttcaggaagtagccttctttacagtcaacgattttcgtagtaaatctaaatgatcactttctcaacgtgtttttgaaataatgaagtaatctttacttttctagctaggacttctctcaaacttgtgtgctgaggagactcagatgttggcctcagctcctaggctgaactcagcagatcggcccatgaaaacttc

SEQ ID NO: 33162 - DNA, 1717 bp, Homo sapiens
gattcattatttgtgaaataaaaagcctcatcttgtagtaagaactcttccaaaataatctgaaggcaactcgaaacaagggaatggtgagaacaaagcctatttaaggtacgtctgaattaatctaacttagctgtcaacgtcctaatgactgacgcttcccaaacctcccttttcaaagggtgaccagaatttccaggaaataagaaaaactactcgcaacatttaactggaaaaatctaactccccaaatctcaacgctccctttctccaaacacctccaactgattaaaacccccaaatattaacaacggcaacaacaacaaagataaatggtagcaacattcctctccctcgatcccgttatttcatctcactattttttggctggggaaaaaaaaaaatctctgggccaagggggcgtgaacctcgaagaatgtgaacttcaaatcaatggggggcggccgtcgggtcgcggaaaggccgcggcggggggctgctcgcgccggcaggaagcagggagaaaggggctgcaaactgcggagggggagggggaccgaaaaaccccgccacgcggcccggcgaaggcagaggcgccgccctcgctcccacgcggcggctgaggcccgctgcgcggcctagttcggcgccaaagcgggcgcgggacccgccatcttcactccgtcccctcccccggcccagtgccgccaccaccagggtcctctccaggcgcctgcggcctccccgcctaggcccggagtacctgccttgtacctacctggtgtcgtcggccacgttcctgacgaacagagacgtgttggggggacgcaggtagcgggacatggcggcggcgtgtctcggccgggcgcactaacgggctcagcaaaccgtccgcggctcaggcggccgagcctcagacacacacagctagagggctctgctacggcaaccgactcttctcgcgagacttcactcccgcctccacttccccctcctacctccgcgcaaagtcgggcgcaacggttctttcccgcgagaacaccaggcgtccgcctgcgcatgcggagggctggcgcacgcgcctcagcgtcggtgtcattcgttggcttcttgcggtgcctcttaccctcccccaagcctgttctttctttctttaggtcttcatttcccgccgttttctaccttacactccacttcatctccacccccaaatcaggaagcagatgttttagtctctaggccaaactttgcggttactactaaatggacagatttttaaactatttagttcagagaggctgccttaaatttcccggttggtccaagttaatgtcctgcttttattttgccttaaatttcccgtttggtccaggttatgccctgacctgcgaaagaaggatttacagcttgtattgagtgtgtaaaggaaggaggtgtgtgcccttgcgcagagctgggcctgtctctccagtgttttcagcctgcctttgcccctcacccacaccctagccatctccacttagtcacgcatttggctcccaacctgggtgggaccaaacctcacactgtaggttcatgactgtggtcatttgtagtgtattctttgttgctgacggcttcctgggtatgcatcggacctgtattgcagcagttctcaaactttttggtctcagaacgcctttatattcttgtgtattacggaagattccaaagagct

SEQ ID NO: 33163 - DNA, 700 bp, Homo sapiens
gaattgacagggcgggtactggaatctctgtctggctctaaggccagtgctctcctttcaacaaggctctttttcaagaagcagtgtcgctgtcgtccaagcaggctgtgtgcgtgtgatgctgtgtgcgcgcacatatgtgctatttaggaatgtgttatatttccatgggtagaccctgtggggacccaagcttccctactgacatcttccagaggctgaggcctcacattgttggttttcatggaaacttggcaactttctagttatcccgccctgagccctgcaccacattccaatggttttatttgtgtgccttggagctgtgccagggctgggcctgggacaggttgccatggcgacctccccactctttccagataagaatttctcaaggatgttgacgttgggcctgaaatagttctaccctgctctcagcccgtaggaggatgaactttggcatggagaactgagttaggaaacctactcattccctcagtctttcaatttgtgtacactgaatcctgggtaagaaagacttctcgggagggtactccagggccccccagctttaggattgaggatggctttgcttaggtactagaagagcttctttcagtttttccattccagttgttatattcagtgcttgcctttgagagccctgctaacataagatatttttttttctttttttttc

SEQ ID NO: 33164 - DNA, 496 bp, Homo sapiens
gccaagcatggtggctcatgcctgtaatcccatcctttgaaaataaactcaccctcatagctcagtaatttgttgctgctgagatgattgaaaagaatggaccttgagttcgaactgttcagttgtggttgtcacttaaggtccagcttgctgggcttctctggagtgctgaggcaaggggtgccccgccctatccaaaatctgtgttatgagtcagaaggcagagacgccaaaagtccatggggcaattcccaggaggagggcctgctctgagtgacatgtcctcttggttctgtggactcctcacctggagggggcatctgaagacagaatccaggacagtaagtcccaatgaggagttccattcatggtgtggcaagtaagctccaactggactgatctccgggcagatttcaactgttaactccgggggaaaaaaaaaagcactggagattaaaaaaaaaagcaggcagattctgaagaggagtcgacactt

SEQ ID NO: 33165 - DNA, 1050 bp, Homo sapiens
tccttgtgtaacgtagtttaaaaaaaaaatcacaacaggaaatagctaccgtttattgggcactgcccatgtaccaggcactattaagcactttaaagacatgacttcatttcatcttcaccacaactccatgaggtaggtgttatgatccccacattacagatgaggaaaccgaggttctgggcactgatttcatttgtttgaagtcacacagcttgtgagtggtgaggctggaatttgagcccagatgggctgaacccaaggcagagcttgcaaagttgtgacatcagtacagtgtgttattgtacccgtccaggggccacagccctcaccttcctttcaaaccccattctcaggatagggtctgaaactcctgcctgcagaaaaggcttgtgtgtctccctccctggtggacctgcatttcgctttgttctatcagaggaatgaagctgaaatcgtgcaacgtcaggcagttgccctggctgggaatgagctgcaggccacacccctccctagagtcctgccgtcctgctggccctggccttggcagaagtgcaggttgttctggttctgcccagcctccttctggttcttttccaggcctggttcttttccaggctctcttcccacctttgaacaatgacagaagaggcaggggcctcatgctctgtcgagctagattgtgaaactggccaggaatggggcaaggagaggcaaattccctgagcactttgaatccatggtgttaggaggtggggctctggacctcgggagtttccctgcatttcctccttgcactgtcatttctgccttgcagggctcagcgagcacgcgcttgtctacacaagctgctccccagagctcccccgctgcagtccttatcatgctgctttgctccggtgaggagcgcacccatggcaggggccctgcatgccactccctctgcttctctcaagggcacccgtctgaggccagatcgcagagtgtgtggcgtgggcaggcatgggattgacagccaaggatgtgacactgggtagggacagggaggaa

SEQ ID NO: 33166 - DNA, 712 bp, Homo sapiens
caagttacctaaccactctgaacctcaggttcttcatctgtaaaatgaggatgaaaataatacctacctcatagactgctcatgaggcttgcccttggttgtgcctggttcccagttagcactgcagaaatgctagttatcatgataccattattattatttgactttggaagatattgagggatctttttatcttctctgcttcccccctgcagattttccctccagtatatctcacctgggttaatattaaggtgagtttgctttgccaaggtacacataaggcctgtcagagaggggaaatccagacataggctggagggtgagaatcaaacatttgctttgataactcatcagccaactcttttatggataaacaaagattgacttcaataacacactgataacccttccatggttttctagagtgttgccaagtctcaccttggttacagggaggaaagagaagagtcaagacttgaattcgggagccccacctccctctggtttcagccgaactcacctggcagtgtcttcactcggcacatgtagggggcactctccttggcccaggtgggaacgcaaatcatgatggtgccaaggaactctgtgtcaggggtcaggccgaagaactcatattctctctgcttccctccaaggtgctgaattggacagagaatggaatgtgattcctgttacacaccgatctcca

SEQ ID NO: 33167 - DNA, 923 bp, Homo sapiens
agggaggcaatagtgaactcaagcttcgtttcccccggtccttcctcctcctcccctgtcaggccagtgccaagtgagaggcagaggaaggatggtacaaactgtgccgacaccgtttgagggaccgaaggatgtctgcctcctccaggccaattctccattcactgaggtgcagcgatccagcacccccagttcagacagctggctatatccctcaagacccgagggtcctttgggtccctggaagaacccagggtctgaggcaccctctcatgcccccagcaaactaagctgggcatttgcttctccgtgaacacccggcaccctgctcagccctagcaggggagaaactgaaactggctatgctcgggctggggagggtgctggggagatgaccctgatcgttggcccctgggataagggaggtctgaccacagggtagatgggcactcaccagccagggatcccacagtcaagatggtcagcagcgtcctcatcggggctggcacagagccctcccttggcctctactctgccgtgcacagagagagggctgggagtcttggcgccctggcagctggctccacccgggcatggggcggggagaagggggtgggtgggacctgtgccggtggggagcaggggtacaaaggtgtcctggccctgtgtgctctggaattccaggttctgggcgggatctaagggagttcccttccgacttgcagaaaacagcaatagtaacaggctggcttgtttatctggtccggtggctgattcatcccaagtggtttatcaaggagctgaggggcagaaaaggcaagaataatccacgatatgcagccttatcaaaaagcaatttggcactgtggatcaaaagcctacaccacatacatatcttttgctttaataattctattcctagg

SEQ ID NO: 33168 - DNA, 1630 bp, Homo sapiens
catccacttaaataagcagttgggggaaataaaaagactcagcttatataaagccatcacacctccatgtcatgtatcgtcacacgccaagggtggggctcccagggctggaaccggtcctggtgtcaaccagtatctcttgaggaactgactcatggagctgactcacgcatttagatataacttctagtctgttttctagaaaaaacacccccaaccctcattacttcagccccactttatgcacacaggaatgagctcagggaagatgcgcaggcagccattgatcaaaacctaaatcacatgggaaacaatcaattacagaataataagtcccagaccaagtgttaaggtcctgttctgtctcccgcgtactccctccaacatcactatgctcgctgagcagcaccagtgccccctcagagcagatgctgggcgagggaggacgggcaccgacgggcaacgggaatttgggatcaggatggtatcatcgcatgcgagagctcctgcaaccttatatgtaagtcagtcacagccgtccacttactgactccaattcatacgccaattcactcacttattctttcattcacttactcaatcccaagcttccactctgtgccaggtgctggtgccaagaggaaaagcaacccctttcctaaaggaagttttcagggcgtccattaccccagccctcccctctccaggttccctgagctcggttcgggtaagaccgcgcccagccgccctgacataccaccaccgtccaggaggtggcagcagacaggttcggagaagctcaagggcggcgacccagcagtaggaggaggaggagggcgggcgggtcacctggagaggacgtccttccctgtttcctggaaaggaccagatacccgaagctggccacaagcgggcatggtggcgggtgtctgtaatcccatctactcgggaggctgaggcaggagaagcgtttgaacccgggaggtggattcactgtctccttgtctttgtgaattagcaaggacatttggttacaagtaatagaaggccctggcttaaatgctggggtgggggaggaaacataatttctcactccttcatagtagagacagatcgccctgtaacaaaagacagattaccaagagaaaagcaagcaagtctgtaatacgtgcagcacacatcacgagggagaaacctcaaaagaaaggtgatggtgcagtggcttatgactctggcttagagagcatcttcaacaaagaacaataaattttatcctgacaaaacgctgtcaggaataacgctcaaaatcctaaggaaattgaacactcgaacaaaggattcttagcaaagtaattttacttctgcgcagacgggtgcctccttggccagtcgccatgagagcacacctgaacaaagggcaagagagcctttaattctgacgcaaatcctgcccctgtactctttccccattggccggggtccggtcgtacaatctaaacgaatcccggttggctaaacatttgaatttttttacataaggtgggcacgtaaaagaaattggagagggcggggaaggggtgtctgtcatgagctagaaagttagtcttctttccaaataaggaaaggaatg

SEQ ID NO: 33169 - DNA, 718 bp, Homo sapiens
caaaactccgactcaaaaaaacaaaacaaaacaaaaatggtaaggtttaagaatagaaacggagtggttatttcatacaagtctaagatgatgctgatgatagcttttacttttttgaagttacctccacgaagcagctcggctggtgccagagagaacatcggtacaggtctgggaatttccctgggagctggccccaagccacagccctccccagctccgtagtttgtttgttcttcctctcctgggctcaatcatctggacaagcctcactgcagggaaaacccctggggagacacaggtgtgtgtcgtatgtgtgtatgcatgtgtgtgtgtgtgccccagcagcggtgaaggcctcctgacccttagaaatcctggctgtgaccttcatattttactgacatggacaaggggtcagaggttggcccggctgtgcagagatcgaagctcttacccttggggatgtgcacaagtcatcagagcagcactgctgggcgaccttggacaagtgcctttgccacccttgacctcagctcctttgcaacaaaaggagtggtttgctaactttttcttgagtagtggatccctctaaacaaaacctcacgtggaaagccacagtgtgtgaatcagggcacagtgaggctgctctggtgaaagtgggaggctcctatagccccatggcgccccctgcaactgcagcccaaggcctctgggg

SEQ ID NO: 33170 - DNA, 1366 bp, Homo sapiens
acaaccaccaccaaaagaaagccgtcttgttagaaagcagggcacaggcgaccagagctccgtcccaccagaggcctggcaggaacgggaagggacatcaatcggtcccactttccctgctgtccacactttagggtcaagtgtggttttcacgcagggatcagtgctttctttaggaaacattaaaaagcactttattaaaaaatatgcagtatcaaactgccgctgtcttttttctccagttctcctgaagctggaagcattaggaaactggattcgtttcctgcgggagaggaatatcaaagacccggttctgttcagtcctgggaagaagcaaactgggggcgcgtaggcagggccgattcgcacccggctcgggtggctgcggaccccgtgcctgtcccaggagctccgggtccgagggtaggcgcggcccggcccggggagccctcttccccctccctcccgcggccccgcgcccttacctggagcggcctgcagcaggcacaggagcagggggccccagcgctcgggccccgccatggccttcctgccgcggcgtccccgcccgggcccaggtccccgcctcccgcctcccgcctcccgtctcctagcccaccgcgggcaggtgacgcagtcggcagccaatggcccgcagagccgcgggcccgtccctgccgcctaggattcactgagaaggtccctggggacagccccgccgcggggggaggggggggggggagcgcgccggtccccgcgctcgaaactcgcccgtacctctgcttcatctgcacttagttttgttttactcaattcccggaaaaaaaaatcagtaaatccgtgcacgggggaagggcaggggaggggaagaaaccggctgatgatcaataacccacggccagtccagtgctccaggacgggccattttggcaggattagggagagttcaaggccggtttggctacgcggcctcaatgccattggcgggatccgagcgcgtttctgagccggatgctgagctccgcgccttacacacgcgattccctttaatgcccccggggatcccggcggatccgtgctgcccttctccacgtacttctctcccggggagcggcaggccccagagcttcaggtgcttgttctggggaaagctgtctttctgaccccgaaggctgtggtgttcacctggacagcagtagcttcccagtaaggcacacgccacgacgcgcaatattatgcggccctttaggaggacgttgccgaatggtgtgtatcgacaccgaggtgtttgcaacacactgagaaacagaaaagcgagtgctaaaacataggcccattaaaaaagtgtgtgtgtagccgggcgcgg

SEQ ID NO: 33171 - DNA, 1822 bp, Homo sapiens
gatttccagaaacaattagtgtgttttggatgtgaacacatctggctctgccatcctgggagggcagtcgggagagggactggggaaaaacccactgagccagccccgcagaccccactcctcccttctcctcaatgctgtcagctgctagacagtcagtcatggtaatttctaatgacagatctcacgtttcaccttgggggcagaaaacaagaggctggacgagtgggaagaaaagaaaagaggagaaaaagtcaggggaggtgggcttccctggctgcttctgagagggaggaaggggtgctcgctgctggcccggggtccctgtggggtgtgggtgtgtgtggagggcccacgcctcgccttgcccatgagcccagccctgggaacagcaatcgaggtggcccgcctgtctctgagtcacccacctgagtttcacaggatgtgataggctaattttgacaaggagagggggagccccagcctttgaggcccaggaagggtgagccaggctgaggccagtgtctcaacccttgtctctgaaaggagcagtggatccaggtcaggaagcccaccagctttcccccgaccctacactgccaccgaggcgggcccttcacattcctagggtggaggggatggaggcttccagccgccacacttctaggagctggggagacagcagcacagagggcatttatggaatacttgcatttatggaacgcatgcaggctctgagctcattctttgttgtgactgctgcctttaaccctcacaataactggtgctttgggaactgttattatttccactttacccatgaggacgacacggcccagggaggaaagaactcgtccaagttccatgccagggagatgcggagctgggatttgatcaaggtttgtttggctctgaagcccagattcttaacctctgccctacaagttgtgccaaattactcatgtactcatgtgctcaggcacttactcacatacctgattatggagggcccactctgagccctgtgctagatgccagagatacagacaataaaacacactccctgtcctcctcaaagctctcggtctaccaggtgggaggcacggggagtgtagcattgagcaagcggacacgctattggaatcgattgtgccaagtgctgtgatggggtaagcagagtgtgaggaagccagaagaggctctggttgtaggatggggagagggaagctagggtggcttcctggaggaggtgatgtataaactactgacaagtagggacccccaagccagggggaagaggagcatcttggggtcacataccacatgcccttgctcccacttttgacttgttgctgggacactacttcctagcccaggaggagttccaggatttctgttgcaagcccccagcccctatttaccttctgtttctggggcgagaaccagatgggaccctcgccaggagaataccagcagccccttcccctgtaggaaaggtggggacagcagtgttggatggggtctcagggtggctgccaggccccaggggcaggaagccaagtcatctttttgagtagatatttgcacatgaagcactcttgccgggcactaacctaggtgctgcacataaagtatgtcattggaattttactatcctgggaggatgaatttcttaaaatatgaaagccctttcactaaagaccttatatcatttcaacctcacgtacttcgagactaatatcgacaaaggtggttcgtgtgtttgttcacctgccaaagtggtgcaaccctatagctatggtgtgaagagattacaattttc

SEQ ID NO: 33172 - DNA, 2527 bp, Homo sapiens
taagaactcaattcagaggagctgttatttaatatgactttggctcaaattcagcatgttacatatgtgctcctagggtgggaggagggaaaaaaacctgggcagaaattctaggccttgcaatctcactctgcgatctcctgtgaaaggggccgcagcagcttctgcatttgggtgggtgcgccacggtgcagttctgggtgtgtcctgctgcctgactcagacacaagtgccctctcccacctgtcccccacccatctcccacagcaccctgtgcctgcccatccatgtggtgattaggcctgaccccgaaagcagcaagattctatcactgccccagggccaggggtggcaggaggggttataattatgggtttcatcgaaattgtggaaatggcaaacgctgctttctgcggctcctctaagggccctgctggggccctccccaaaccctcccacctgggtgcccccagaagccggcactcccagtccatggcaacctacagttacagacaacttattacaagtgtgctaagcgttttatgtgaagaatctcatttaatcctcacaaacggtattatttcccccatcttacaggtgagactcaggaaggcaaagtgactcaccctaaagtatgcggccaagacagtctccaaggactttctggctctttggcccgtgatcttaacctctacctgagtttgtatcaaatatggcaccaaaatgtggttgtagtcctacagttagggaactgggccccgagtttggccatggctctcaccctgtgcgatctgggcagtcacgtcacctctctgagcctaggtttcctcttgagtttagcatgagggccggaggaggaaacgtgtgtgtctattaatgcctgggatggataaggctccataagggtcagctaccatattcttttgctgttgttggtactgttaggctttattggtggagtgatgaaatcaccgtctacacagacacaaacatcagggcattgggaaacctcttcgtactggatgtgccacaggcgagatttgatcatacattctccaatttcttccagatcctgagtcatgaaaaggtgggctgagtcatgcctggggcttccattttgcttatactgagccattacgttgtgaaatctttagtaagtagcaggagctttaatggaaagcaaattaaactcatcccccagtttgctgggggtgtggaagcccgtccgggaagctcatagtgatcatagcatggagcctggagctcttggaaggaaaggggtttgagaagtcctaggtcttcctccccgcctttcctttttctttttaataatgtgttttcttcagcctgtgataaatgactgggagtggaagatgcccagtagggggagggaaagggagggatgttgtttacttatctgggagcacatcgccaagacaaagcttggagttctaatactctccagtgcgtgacccacttccctctgtggcccagagcaagtatcgccctgatttgctggtgactctgcaataatcacctccctcaaacttccacacctctcccagcaaggcaggaaggaaacaccacgcctggccttgggcaatcccagggaccagccaggattccattaaccccagaagtgaaccctggattccattggtcaggccccaccccccaacttcgttgggcttccttgggtaatttatgagcttctccactttggctgttattattcgcctcttgttaatgagcaggcttagggcattcaggatttccttagtcagtgattcctccttctggagtagtctgtctttggacttttataggtcgttaacagccttgcaaagtctgacactgtaccaggcaactgggtttctttactggaaaggaaaagggggaggctgagggacggatggaagctacttcaggtcaaggggggctcttgctcaccacaggacataagctcaccattttctgtcccaaggggacaaacacgacacacgcggctacaggggactgaggagattttgtatctgcattcattttaaaatggagagacctggaaattggcctccaaagacagcaaagtaatgtttcattcactgctcttgggggcttcctattttctgaggtaaatgtgtgcagttgctttcctggaaggcactttttcctcagcctcaaggcctctccagctgaggtggctgagggaaggcctggagtgaggggataaagtcacggttgacaacaacacccttcttttcattcctcagcacttgacacactggcacgcttaataaaacaggtggcaggcatggtgggaccaaagtgctgattcagccatgccacttgcctttcatcttgggcttggactgtcgaacagacatgcttaacaagaagaggtggaggagtttatccccttaataagccaccctgaagtcactgtgcggaatcatgttcatctctcaggatgctgcgggggaatcatttctagttacagagtcttaataatttgcccagtgggcttaag

SEQ ID NO: 33173 - DNA, 1712 bp, Homo sapiens
tcagtttggggtggggtgagggaagccagttgcctgctgagtaattgcaggcggactccaagccaccatttgagattacagtggcagagcctgggggctcagctgcccctactggtaaggggagggcacccggcgcttggcttgcaagttctgagctgctgttgcttctgcggcctcgacattctcctaaaaagtgccaagttaagaggactggccatagcttacagcttgggccctcatggaatggccaactctggccaggccttgatatagtggcaaaagtgggacttgcctgtcactctaaattctgccacttaccaacagcaggatcctggtgaatttgtttgtcctccctgaccctcagtctgctcatctgtctgtaacacctacctggcaggaacaactgtgagctcccaaatgtggaccagagctccatccgcgcccgcccggtggccaggccccgggtgtaaggcggcacttcgaaggctggtctctgagaagcatggaggccccggcggtgtagttagaaaccagctggaggtggctggcgggtgctgagcgccgggcctttcatgtggtcgcagcgctctgggtgcctggagcccgcagccctgggcagccccgggctaccgcagggcgcaagggatcctgggctgcggccgagggcgccggaagtcgccgccgaccgcctgggtctcgcaggaaaacagccggcgcccgcgagctgcccagcgtcgggttttcctgaaggtgcgtcggggcccccggggagctggagccgcaggcgacctccccggtgacctgttgttcccctctggagggccggccggcgctccaggcaggccccgttgacagcccaggaagggagagtttcgccgcaaaggggcttggcacacagtaggtctaaggcaccgaggcaggagcgtcccccgcggcctcgctccctgctctctgggccccaccgctgccgcctggagtctcccctcagcctcgcagagacgcgactcggttgggggaaggggactagaaccgtcgcagtcctgaccgcggccgccgccgccgttctatctgatctccaggagcgccggctccagactgcctggagcgctgaaagagttaatcaggaacgcctccccgctgtggttttgtggtcgaaaccatgattgccaggagcaaatttttgtcgtgcacgaggtgtgttattaaaagtcggagctacgctgctgctgaatgaaaagttaaaagccctctttgagttcgggctgtaaaactggcggactgggccgagaggcttgagccaaccctaacggcggcggcccgggcggcgcgggggtcctgcggctccgccagctgctgggagcgggcaggctgcgcagtcccagcagtgagtggccgcagccaggcggtcggcagagctcccactgacccaccggaggagtgaagagggaaaacggggctgaaacccagatgggatcatccagctttctcttacgttagaacaaaaatgacagccaacatttatggagcgctgactccgcatctgacattgtgtcgagtgcttgataaatacacgctcttctttaaaccctcccaacaaactaatgcgggatgggagtgtaaatgcagttttgccgaagaggggacccagacctggttcaggcttgcccaaggtctcacggaagcactgggatcttaaccgggtcttagccgag

SEQ ID NO: 33174 - DNA, 455 bp, Homo sapiens
tccctccctacctgacaggggcgttgtaagatcagaggtgatgacagatgtatgagaagcacattgaaaaatataacactatgcaaatgtgagggattatcaaatcttggatttcctccttagtgggctggctttccttaaaacaaggtggcatatgcaaagtacctggctcacacctggcacacagtaggcggacaagctctgggagctgtgccaggctgatgcctttgatcttgcctttcctttgatctggaaggtccaaggtcctcccaactcatctccattctccctcttcccctccacccctcttctcctccacccctcttctcctccacccctcttctcctccacccctattcccctccacccctcttcccctccacccctcttcttaaccaacatccgtcactcccttgggttcaggcaggtcagaagtcctcttgtttctttttctt

SEQ ID NO: 33175 - DNA, 1763 bp, Homo sapiens
gcaattaattctcccacctcagcttcccaaagtgctgggattacaggcataagccaccgtgcccggccctccaaaggtaattctagatgtattcgactcttcttttcctcttgtgttatttgaagtcatgtgatttcctctcacaaggatggggaagatttttttttaatcttttacttaattgataacacttgggaatttttgcaattttttagctttatgatgatttttaaaatatattgttttcttaaaatagttttggtccagttcaatatttttggcgccataaatccagacacagttgtttttccctggatgtcccatttttcaggctcgttcttacagttagtccagtcggtgcccctcagtggagctggtgccgcggctcctgggagcacactgccctccactgtccacagaaagacacagcagccagacagaacgtgcctgtcccgcaaggctaaaatccagactaaaacgaaagaacccctgagacaacgtcattaccttcttatgaggaaatctcttggcttgactattgaatccttttttttctgattctgggattactgaagcttgagatttaaaaggaatggaggattgtgttggatatgcagcagtaaaacctaaacaacaaaaatggagtaaaatcaaaatgaatacaaaacaatgattgacaaatgtggaaaacacaaaggtgtatattaaagttttattttaaatggtagagaagagaaacttgccttttgacaggaaacagacacgaaaccggattaaaaaaaaaattccccactttctttccctctcggcaatttatcggacttcccccctccagctcttaaattagtgagatgtggtcacataaagtaccttaaacaggctgtcccggagaaaaggaaggagatgatagtaaagacattcttgccaggcaggaaggagacagcaaaactattctgggagcagcctggacgaggcgcggtcaggacagaggaagcgtcctcactgctccttggcctagattcagacaccagcattaggccgttaaaatccaaagaggttagggaaatcccagcctggggctggctctcacttttcagggcactgtgcaagacaggtgtaagttttcgtttctgttttgagcagacatggggttaaaaagcagaaagggatcatctatagaaactgaagttaaaagttcctttgtctaggctgcgatgtatacatgcatgtctgatgtataaactcccctcctgctgagacttccacaactgctagaacttggcagcatctgtctgcatagcaggttgattatagactctaacctgtaagtgtaatggactctgactccagttttttgatgtttgatggctgatagctcttcagcttcaccactccctcattcccttctgccctaccactgggcaagcggatgagaaagcccagagctccctcctgtggcaccagctggaagttcaaaccacgcagacccctgccctcagtccagcctcgctttccaaccataagaaaacccccaagccaggctcctttccctgctctctcaagccattattggatcaggttaggaaggctgtgctgctgtcctcagaaggcctcactatgtgggtgataagccttttcctacactcttcatgagcgtgtgtgtggcaccgtaagtcttgacatccaaaccaaattttgggtgggggggtgcatcctgactctgtaggctgttcacaacagtaagccaaattattttaacatca

SEQ ID NO: 33176 - DNA, 1185 bp, Homo sapiens
taggcgatttttatctactcagttataagcatcttggaagcagcttacattttttcaaagcactctcaggtaaataacccattcgatagtcttcataggctgagaaagtgtatcagggagctggaaggaaatttagcggcgggctagtgaccaccaggttccaatctcacccttttattttacagatgggtaaatcgaggcccagagcagggaagtcgtttgctgggggacaccccctgagctggggtgaacctatgagtagagatcaggtctttggcgtccacccactgccaggcactgaagcctcccaacttttgcgcactcgcggagcctgagccagaagggtcggacgcccacgcccctggcaggagctcggtggagcaggcaagccccagttgtcaccacttttcgggtggaaacaccgaggacacgccccgacgcaggggcaactcccatggtggcttcttcccgccctcggggctccacctagctcagccctggaattccgcaagcacccggaggccggggggtctccgcgggcgtcccatgcggaggacatggtgcgccgtgtcctcttccccacgacctcagggaccggtccccccgccggaactgcttcctacctggtccggtcccggcagctgaatctggccagcccaacctcccggtcgctatggcacccacaggcctaacattcgcgagtccaccttccgccgtccgcgaggtaactccagccaatggcatcctctgtttctttaacgtgaaaagttgttgaccaatcattagaggcgtttcaaagtccgcagagaagccggccgaattttagggcttaggttaattacatcagggcctgtagcggggtggggaactaataagaggtttatctaggccatgcttcaaaaatcttgtgataaaccaaaagcctcagaattttgctcactcaaaaatcctgcttcaaggaatatacctaaaagaattaacattcatccaagccctgtttcttttttttttgagacagagtctcgctttgtcgagcaggctgtagtgcagtggcgcaatcttggctcactgcaacctccgccctccaggttcaagcgatgctcctgcttcagcctcctgagtagctgggattaccggcgctcgccaccacgccaggctattctttttgtatttttagtagagaca

SEQ ID NO: 33177 - DNA, 2227 bp, Homo sapiens
gggcttcaagtctcactcatggctgtgacgatctgaaagcaaatgcgtgtatatgacaacgtgtgagcgatgagaagcttgtcatctgtaaaactccatgcgcatgttaattatcatggccgtgataattatgtacattatagaaacattaaccaagcgctgggctcgtttcaggaccttcagtattgctgggaggcttggtatccgacaggtgttccaggagggcaggaaaggagagatatgtttggtcccaagtctcgcgagggctctggggagcgctgggtcttcaaggacgttttggatttgaatacttggtgagagcgtcgggtaggggaacagcaggagcaaagcccggaaggtggctatgaggataagaagggaggacacctggcaggctgctaaaaccaggcccacctgccgggcaggtggaggcgagcaaccacctaagctctctgggacagcgggagagggggcaggggagtcgccgcaccattcttcctgtggccgctagggggtccccgctccaggtgagcgccaagctctagccccaggtcgctcccttatgcttcaagcaagctttgcagcgcagccaattgccaggggctgtcccgcctactccccgtcctcgcagccacttgcctgcgcgaaatgcctgccaacttctgactggcaggcagtctggcaaatcaaatcgcgacctttgaaagcaaaacactgcagcatcttggcagctctgaattgggaagggatgaaggaggctgtgcctccgggttgcacgaagagtccgagtcatttctcagaaggttttgataggtgggccttagaggagacgccgccggtgagtagtgattaacaccgggaggaaggggaattgaatttaaccttcgtttttttctggaaaaagcgaagtcacctaacgtcccctagtgtacatacccttccttcttactgtcaccagcctcgccaacctgggtcccgttgccttggaatgttctttccagttttgcatcgaggccaagaggagcgggggcatgggctaccttactaaaggtgatgccaggctctaccaaaccaggaagtgacatggagttaactttgccagaatttctcctcttcgtgccgagcggctcgggcttcctggcggcagcagatggtggagttagcaggtgggatgaggggaggcgttcttggtctaagcccgcttctggaacagaggtgctgtctcctcgagttgtaagtttccagctcagtgggacgggacggaagaatgtaaccttctcgtgagccaaagccgaggaacgggaagcttggcagggaactggcgctcacctccagaagccagatcgtcgggtggtgggaaagagcgtgttttattgatttgttcagaaagaggcaaattcgaatacagacgctatgagccacggctgtctcatttgtaaaacgtgctctgtgggattggtgaaatccgtcatcgagataaacggggtgggaatggaagcagagcacctagtgaattctcattccttccttgggtcagtgaccacgtgctctaattgtggggtggttgacaacgcagaggtgactgcttgcctctcgggcatatgtaggtcctgaagaaatgcttcgaaatcaggaaaagagagtcaccaggtgaaaagtatgtgtcttataagggagtacagcttgcaaagggttcctccaggctttcagtccggactcccacccagctgagggagagccttcaatctttgcaggcgatgcttcagaggcctgcgagttcctgaggcagagagggaagctgctttttaaaagaaaaattaaaccacagcaatgccaaccaccacaaacaaaagcaaaaccagaaaagcacttgggcaaactactctgaaggatgttaggaggcctgggttcccaccactcccttgattgacatgtcgctaaggtctgttggctttctctgacctcctgtgggtggggctgagtatatctgcttgttgaagctctggagttgtggttgattaggccttagaaaggcattcttgactgcgaaggggccacagtgcacccagtgcttaaccagcctgcatttagtcagtcggttggtatgtatacaagtcactgtcaggctctgggctagatctcatttagtcagttggttggtatgtatagaagtcactgtcaggctctgggctagatctcagctgggagcaactgaacagggtattcc

SEQ ID NO: 33178 - DNA, 1708 bp, Homo sapiens
cttgtaggtgggagatgagcccagttattttccctgctgtgtgaccctgcttccttctctgccggctaagggaagagacaccagctgccttccaagttgggctcaggagctttgtcatcatagttgttattggtggtaataatacctgccaatgtaagcctcggtcctatcactgaaactcgctcaacagcttagaccccggctcttccctttgcgtaatagttgtaatcatgtcccatggtctcctaaggcgtcggagacaagcaagactgcgtggaagggtttttacacgaaaaagaaagcattaaacatgtggattgtatgacaacggtagatagggcatagggtgaagaggagtaagaggaggagggagagcgggaggagggagaagagcacgagtggggaggagaggaggggaggggatgggaggggaggggaaggagtgggtaaggggaagagggttgtacccgccagggcgggacccagcctgtgccgtcccacaccttgtgctagctccagctcagctacctgcggccgcctctcctcgggcaatgaggcgccgggaagcccacagcatctgataatatccgggccgccggttgccgggaggtgaaccgaggtaaactcgccgcgcgcggggcgcagtgtacatagtaaccagccctgagtaaacgttcgtcatattcctatgagctgctccggggactgtcctacggggctagcaggaaaaggagatcggctctctccgctcccggtggaaaacgagaaggtcgccagaggtcctgttttcggggtgatctaaagcccccgccccagcgctacagcccaagccccccacaggctggggaccaggaacccggaggagcgggaggagggcgcgcgcggcgagacacccccaccccggcccccgcgcgcccccgccccggtccccgcccgggtccccgccttgtcctgggctctggcgcctgcgccgccgtgcgcgcgccctgccagaacaggaggggacgaggcgggcgcgcggcgccggcagcctagctcagccgggacaccgccctagtcccagcccagggggccgctctcgccggcgtcgagggcgtggcggcgaggctgctgctgcaggcggctcccggctctgccttcggccccgcccgccgcccaccaggctcccagaggccccgcagctcgcgccgtccggctccccgcagccccgtcgggcagcccgggcccgtccgctgccctcccggctcccgtcctgcggcggcggggcgtgcaggtgaggccccacggcgcccggcctctccagcaggtttgcacccagcgcggggcggggcggggcggggcgggtggggggggtggtgcatgaaaagttaaaaaaaaaaaaaaaaaaaaaaaagccgccccgagaagtccgggaggggtgggcactccgagccgcgggaccgggagatgctaccgcgcgcgacctcgcctcccgcgacctcgcctcccgccgcacccttctcgcgcgcggggtctagtctggcagcctcgagggtggtgtcccggaaaacaaaacaaaaatgttttgtcttctccaccaacgattttctcccaccaagtgtgtttgaccttttgaaaagccgacaggcccagcctgcctgtgaaggcaggagcggtgtaggggcgcctggaaggtggaagccccctgtctttctcccttgccccgctt

SEQ ID NO: 33179 - DNA, 2437 bp, Homo sapiens
tggtccatctttccttcttcctttttttgcacatttgcatttatatcttcctgtactaaaagaaacaaattatttataattggggtgacaatataaaggaacaaaagatggggcaatagttgcttcctagctggagctgtaagtccatgttacagaaactcactatttaaaaagttttaaaagatttatgaaccttgtcctacaattcgctgaatacttatttgtcttttaaactcccctcggtgtatggatcatcttcgtcagaatgccgttgtttcattgtgaatcaggggaaaatgttaatcatttggagactgttttcttattaccaaatgtacaatccataagacaactgaaagcaacaactgctgggttcactgacaaagattataaaaatcatcacgttcaaagtagagtttttagccaaggtcaagaactaacctggggctgagtcagcgtctctacccacttaaataacagcgtaaagatctttcactaaattcgttatgtggtctgtctggatgtaaacctatatatttccttttgaaacagaatcatatcctgcagactcttggcactcctgcatagctttgaccgaatgttcactctcatcgtaatggaagatttctatctatgcagataatacatgtttttaaatactgttttctgtttagtcctcaatcttcctaactcaaattggggactgaggagagagaaaggtggttacccctgttaccgtgccatattcttcttgctgcttttcaaccccacgtgattgttgattgacggttctgctataatgtgcgtgcccttcaagtttcagaaaactttcccaatcatttcacttcaatcttaattgaacccaagagtcaaagttattattttctccgaacgtgtttgtgatcttctgttatattttggggcatgttacctttatggtatataagctgtagtgcatactctttgtattgcaaaaaactggtcagtaatttatgtacatgtattccacattttagtgtgcttgaagtgacaatccatagtttgtagtagtttgttatttgtcaactttaccctgtgttttaaggacatctaaacattccttgtcctatcaagatgacaaaagcagaatgtaatttttttttggaagcttcgtgattacctgtaacaagttctgtttttaaaacgaatacaaataaagttagtaactatttttaaatcagtccattgagttgagtttttttgtgtgtagtattttcaatacgcatcacttacatttagctaataagacagagaagtgcaatattgtgtttgttcctttcacaagagtcctgttgaacattaatgccgtgcagtgccagagttcaaggtggtgagtcactgctcactctgtaaataaccactgcactttcagctcttccccaagaaaccttttaccctggtttcccctttggttaaaaatgatttattccgggtaaagacttactttttgtctcggttaaaaaaaaaaaatctccaaaatgtggaactataaatgacagtagaggttatctagtgcagtgggatttcgaatacttatttttaagccataggactctgctctttgttcaaatgaaatcttacacaaagccaatgtaaaactattacaaaaaggaaaggtaaacaaagctgctccttttcaaggggctgggggaagaatggggacctgagttcaacccctgtgagagctcagcagaacagacccagacacacccctctattgcccctgcctccctccacttcctcctccatcccaaccccacccccaacacacctttacaagaaagtggccccagaggcattgccaaatgcacacatctggatggtcatggacctgggactagaacccatttcttgacattctttctaccacactccactactttgttacaccaaaatctaatttttctggataaatgtatctggataaaaaggttcttgatattgttttgtttttgagacaaggtcttgctctgtcgcctaggctggagtgcagtggcatgaacacagttcactgcagccccaacctcccaactcagtctccgaagtagctaggatgacaagtgtgcaccaccacacccggctaatttttgtattttctgtggagacagggtttccctatgttgcccaggctggtctctaattcctgatctcaggcggtccacttgccttggcctcccaaagtgctgagattacaggcatgagccaccgaacctggccttttttgtttttaaaaaactaaagcggagtcgctgaggacatttccactttgaagtttttccaagctgtgttctgtggggctgcctccagggggcgccatgcttccaggttcctggggcctttcactcctgcttcaactctcctattatttgctatacctaaaggtcctagcatgttttcc

SEQ ID NO: 33180 - DNA, 1229 bp, Homo sapiens
aatcttagttcttagctgaggagagtttgaaagcatctcacaggcactgagcggcaaggcagtcggcccagatgcaatcactttctggaaatcaattgaaaatagaaccgggaaaccagcctccactcctgatactgttactaacctgctataagactttgtgctcacctttgcttcctgggcctcagcttccctgtttctgagagaagagatcccctctccgagatctcttcccgctttctataaatattgattgagtacccgctgcctgccagggatatcgccctgggctcctgggatacagctggaatctcgacagcctggggaggaaggagcctttgatcctacagcggcaagagttcttgacacttgccggctgccaagcctgtttcctcccggtctaacgttctgtggttgtctgaatctccagctgcccctcaaaaccttcaatcagattagcgccgtgctcctttaaagaccctactcaaagtgcctggagctcacctgggtgtgtttgtgaggccctttccctctctttaccccgcggaggagtccgacctggaagcctcctgctggacttctctactggactgagtgcccgggagtgccagagccagtcccaaaaaggacccaggagcggggacaccacggggaggcgccgccactccagtgtgcgggaccctggcacccccggcgcgttctccggcctccccaggatcacctgcacggggcggggccgggggcgggacgccccgggcgggggcgggatcccagggtggcagcgccgggcggcggcggggaccctggctgggagcgcggcggtgccggcgggaggccgagcggggctcgacagagcaggtaggaggcgcctggtcgccggggttgcccggggctgcggggagcgaggagcggtccggcccaggtgcggtggcttcctgtccacctgccggccgcgctgggcgaaggagggcccgggggtggggacgaggggtccccagtctcacccccacatctgttggaggaagtgcctggggtctgcgcgggagggcgttggtccggggtggtgggagggaggctgatcatctccagtgggtcttggagacgaggtcgtttccttgtcccctccccacccaagcatctggcggaggggccgaggctcgctggaagaaaagggagtcgaccttgacccggcctggagataaaggaacttttacccacttggggcctta

SEQ ID NO: 33181 - DNA, 1705 bp, Homo sapiens
ataagtgctataactaaggtacctatgagatgctgtgaagagtctcagaggaggctgacctccttcagataggaggagaggctttgggcaggtcttggagaaaaaggaaactgacattatcagcacccactagggcccaggcattctgctagggggttaacgtgcactgctaagtgacttatgcacacaaaacccttacacaggcctggtctatacagtaaggctaagtgattgacacttaatattaacaattatcatctcctttgagtgtaacaagaaggaactagagaggagtcgcaaagcctcctttacagttgaggaaacaggcatggaggctaagttgtgagcccaaggggacataactaagccggagttcaatccccaatttaattctaaagtcctgatctctgtctccaccctctttctagttcatggaggagggaagaagtggaggacattcccaaagaggggacaaaccttgggaaaactcaatagtctcaaggagccagggtgtggagtatgtgggtgcccaggtgggatgggagaggaggcaggagagaggtggcgggggctgaagtgtaaagggcattgaacaccaggtggggtaggagagtgggcttgattctacccatagagagaatcgaccgagggttccgcgacgccctggccgtattggaatctctccttccaggtcacactcccgtgaccgctcgtcacctaattaggcacccgcctgtgacccgttcacatccttccaggcagggctgggcctggaacacggggcaactcacagtccagagcttcctccttgtcacggcctccctctcaggctgtggtatttgctcagaacctgagcccgggggcagagagcacagaaatatttatttatgtcactgccaaccctgcctcctggaggcccgcacggggcacctcacagagaagctcagttatataactcagagttgacacagcaggaaggagagggaaacaagttctagttattcctttttctcagtcttagacacatttggaaactggatggcttgacattgccctgtcttcttcctccctcaccttactgacctggggtccccagggacctcggtgatgctagatccattgctgattttaacctcgattctcatgtggctgggggtttggggagatcttcctagaggtggaggaggggagagaaaggaaatatattaaagggctgctttgtgccaaacactgccagagactttatatttattattattagtagtagtattaaacagcaatcccatgaagagggtcctgttattacctccactttacagaaaaggagatgaaggcacagagaggttaagtaactttctaaaggccacccagccgagccaggtcagtctggctctgaccactactggttcattttcaagcatctcaaactgaatccataataaactgaatcccataatagggatcctttttgttgttgttattagagacaggggtctcgatatattgcccaggctggactcaaactcctgggctcaagagatcctcccacctcagccttccaagtagctaggactagaggcatgcgtcaccatacccggctcataatgtaggggttcttgagagcccagagcatgctagtttcttattgtggaggaagttcttccacagctttaattcctaatatatttgttttgttttgttttgt

SEQ ID NO: 33182 - DNA, 3131 bp, Homo sapiens
gtagtgagccgagatcgcgccactgcacttcagcctgggcgacagagcgagactcggtctcaaaaaaaaaaaaaaaagatatctggaagtagagcattctagattacatcaaagacgaaatagcgtgcatcaggtaggattttggcttttgttctaacaaaaatgagaggctgctggaaggttttgagaaaagtgtctgattaaggttttctaacagaactaccctgccggctacacttagagtagatgctgagtggccagggtagaagcaggaagaccacttagggggttagcgcagttcagggaagagacgatggtgccctgaaccacgatgacagcagggagggtttcttgatggtttgaaagccgaggtaaaggaaaggagtcaagagtaacacacgcttgcgtcctacaccaaaggaaagccactgcggtcagcgggagccagggaagaccctgggaagggcaggtggtttgtggttttggtggatggagggcgaaggaatcaggatttcaacttggggcacgtgggacggtcaagagagaagtctgagctggagatgcagggatgtctccagcacacagctagtgtctccagccacgagagcaaacacacacatactttcaggtgggctaagtgccatggaaaaaaagagaaaagggaggcgagagtgtgtgtgggggcgggaacgatgcaaaagatggccggaggaggcctttctgagaaagggacgccggctttccctccgagaaagggaagcgagaagggcgagaagcgcttgcgaaaaagctggcagagtggggccgggcgcggtggctcaggcctgaagtccctgcactttgggaggccaggagttcgagaccagcaacagagcgagacccccatctctgctttattagataaaaataacttttttttttgagacagtctcgctctgtcacccaggctggagtgcagtggcgtgatctcggctcactgcaagctccacctcccgggttaatgccattctcctgcctcagcctcccgagtagctgggactacagacgcccgccaccacgcccagctaattttttgtatttttagtagagacggggtttcaccgtgttagccaggatggtctcgatctcctgacctcgtgatccgcccgcctcggcctcccaaagtgctgggattacaggcgtgagccaccgcgcccggccaataattttcaaaataagaaaatctagcagtgcgcatccaacccaaggccctcgcagccagagcagaggcaccagggcggccaggcgaggcgctgcgaggaagctggtgcttctcggagtccgagacccgggctggggagagcccgaggcagagcccgaggaccacggctctctggcgggcgtcctgcccagcggcgtgattaccgggccgccgaaaccgaaacccatctactggacacttccagcttcctccaaaggctgagcaagctgagctacaaggcagatttcatgtctgctgccaggctcgaccgctttacagacaatcctctctcgtctggtaaacgcgtaaaacctacacaatcacaactttcacaacgagagggaagccgcaggcctctcgtcggcgcacgggccgcctcgcccgcgtcactctgaggtaacagcctttctcttcaatcgcttcatggaactccaggacgccaagcctcttccactacgggtcgaaggatgggtcacgtcacattgcgcgaacaaggatggtcacgcgccacaaaaggacttgcagggcggggcgactcgacggccttcccttttgctcccattggctgcggtcgtcaggttcgcctcctccactacctaccggggagtttagggcctgacagaagcccgcccccgctggcgctcgtgcgcacgcgtggcgggctctcggcgcactgagcaggcgcggcctcgtgtcggccggagggggcgggcgcaacgacgcgcgctgcgtcccggcgctcggctttccctccgccggtcccgccctccgtcgcggcggcgcggtgtaccctgggatagggagcgatctccgagcgaggcggcaagatggacgcgggatttttccgcgtaagtagaagcgccgggcgccggggtgaggccagggacttctcggtaaggcctggtaggagaccttagcttggcacagggtggccagcgaggggagcttcggagatcttaaggattcctcctagagccggcgcaccccccccccccccgtgcgctgcggcggagaccggtgcgcccctgcgcagtctcctcctccggaatggtcccccctacgcggcggcgacggtggccggaaaatggcggcgggaatgggccgggatggtacctcgctgcccgcctgcctggcggggcctgcaggccgagcgccgtgcgtgccgccgggtcctggggcctagcggagccggaggaggaagtcccgagtgggaggccaaaggaaagccctaaggtcactggtggcggcagggcagggagaatatggtttgggggtacatcttgggagagcaccttaggggagggagaacaggaagaagcattcagcggctttttttgaaaaagcgccctccccgccccccaacgtcctccctccaggtcctaagccttcgtggaggcgccaggtcagggttcgcgggagctcccgcccaatttgatatcccttcagggagggggacgtagataacttgttgggacaatgtgaatttaaggttctgtgagggtagagggtgcaacgaaaactatgcgcgggtatggaggcaggttgtggagtgattcaattccttcccgccctccacatccctcaccacccgccaccatcgtgttttactcttggagtccgctggtgaaaggtaactcttacctaggctctgccagcgtcgtctgcccatcgcctgcaggcagggaagttactccgtcgtagttggttctcggggcccacactttatcaggctcgtgctggagcctgtgtgtcccatagtcccctcctgtaggaaattagtactagatcaagatctagaagggacacaggactagagttgagcaccattggtctctcagggcttgcaaactgttaatgcagaatgaagtcgtatagaaactagttgatctaa

SEQ ID NO: 33183 - DNA, 966 bp, Homo sapiens
ctcccacttcagtctcccaagtggctgggactacaggcagatgccaccatgcccagataatttttaaatttttttgtagagacgggtctcactatgttgcccaggctagtctcaaactcccaggctcaagtgagtctcccgcctcagcctcctaaagggctgggattacaggaatgagccagcgctccggcctagaaacaatttttaaaccttgtaaatccaaaccccataaaagagaggaactgattggttctcccactcaccaatttgtcaggactgcccctactgggcagagctttcgcaccagcggcctccgccctcccccattcacactagcctataaagtggctgcctgagatccagggacccgcccattcctgggcagtggtggttaggggccctttgggctttggtttttgcaaacattttctttgcttaccctgattcttctctgggctggtgccagtttcgtgtgctcctactcccgcccctattctttgttcattgtttactgaagcctgttcttctccttcctgtggcttccccacctttttcctgctgcttgctcattttggacacatctctaattctaagtgatgaccacctacggtgctttcggcaagtcccttagctccttgggcctccgtttccccatgtgcatatttgtgctactcaattcccacttcacagggttatgaaaggagttaatgtatctgcgagctcctgctacacagcgagcactaaacaaacatcagtgtctgcctttctgtttggcttcagtccttaaagctgtcaacagaccagagaggcggagctggactaggagagaagaacctgagttcaagcctctgctgtgcgtctaacttgctgtgtgaccttgagaagcccctttccctctctcggactcggtttccccatctgtccaatgaggattggactagaggagcatttcccaaactgaaacta

SEQ ID NO: 33184 - DNA, 1872 bp, Homo sapiens
aaaatggcaaacacatggtgctcattatgtgctgtgcccatatcctaatacttctagttcttttatcctccctatgaggtgtaggtaccagtctcgtcctcttcccagtgataaagagactgaggtccagagaggttaagtaagcaaggccatgactaggacagagccttggacagacctagtggccgggtaggggatggaacccaggcagcctctgctccaagtcaatgctcttacccctctactgtcctgcctcttgaaaaatgaggatagtactagaaccttcttcttggggtacttgtgaaatttcaccttcacataatgtgtgtggagggtacagtagagctgaagcccttgctgttggcaccgcggtgttctcagcctagtggagtctaatctttccaaagaatcctggactttagggtcaagctggagggaggggggaggtggctagtctagcacagcatccacttggctgtggctgcttggcagaaggaccctgctcataatgcccatttgtccagaccgtagttcaatgacttctgcattctctgcacgtacaccctagaagggatgggatggatgggggatggcactggctctagcctggccagggaaagccagctgggaattaagaggtcttgggcagcaggacaaccctgtgtcgagaaacctcaactctgccactgcctagaagtgagaccctgggtaaatcacacaacctccctggggctcagttccttcatctgtgaaatgcggaccttaatggtacctccttcatcgggtggtgtgaggaagaagatgtattttgcaagtatgttgtggatattcagtaaaagacagttaatgatcagcctcatgctactgtttggttagccaggctggctggggttcaatcttggctctaccatttcctagtcatgtgatctcaactaagttacttaacttcttggctcagttcctccctggtaaattgggaacaatcaaaaaacaataatacaatagcagctatgtgcccctcacaaaaaagcgatccccaatttttagtgatcccaagcagctccctgcccctccccaaggcgtcagtttccctatttgttcagggaatttttttttttcttcttgagacggagtttcactctgttgcccaggctggagtgcagtggcatgatctcagctcactgtaacctccgcttcccaggttcaagcgattctcatgcctcagcctcccaagtagctgagattacaggtgtgcgccaccacacctggctactttttgtatttttagcagagatggggtttcagcatgttggccaggctggtcttgaactcctcacctcaagtgatctgcctacctcgacttcctaaagtgctgggattacaggcgtgagccaccgtgcctggccggaactttttttaaaatagagacagggttgggctctgtcaccaggatggaatgcagtggtgcaatcatagctcctgggctcaaggaatctttccgcctcaatctcctgagtggctaggactacaggcatgtaccaccacacccagctgattttaatttttcttggtagagataggggtctcaccatgttgcccaggctggtcttgaactcttggcctcaaggatattcctgcctcaaggatacttccacctcagccttccaaagcatgaggatgacaggcatgagccactgcacccagccttgttcatggaaatttcagcttcaccgtaagcgccatgccctaacagattcccaggctccgcttcatgtactgaattggtccccctgcgggagatgcccgatgccctttcttggggcagctgctgtgtccaccttgttcactgtgtccccagcacctgacctgggc

SEQ ID NO: 33185 - DNA, 1120 bp, Homo sapiens
tttatagctcttataatctcctgattagacatacttgcccgggtatttgtttattgtctgccttcccaaatagaatgtaatcttcatgagagccaagatgctgtctgtcctgggcctggaagcgtgcccagcacacacagtaggttctcgctgaaaatgtgcagcctgagtggacgaagagatcaaatgagactctgctgacaatacttagcatatttgttagtgtctgcagacagcacaaagctgtcctaatgagagggagagtaatagtaattggaaactctagacagtgtcttatgtgggtggtagagctctggaagatcttggccagggtggatgtgggtgggggttggggtgggggaggaagtatttcctctctgccaagctgcagcaagaggctaatggcctccacagggatccaatccaattaagggcctggcttcaagtcaactcgggttcccttcctggctggagcagcttccaagtgacaaaatgaaacctgtaatgtccccaggatgagatagtctccaggcgagcagggcagaaaggggctgatagtcaggtttctgctcccaggggaacagatctgcattgggcccgaatagttttaatacagagagagagagaaagagagagagagtgtgtgtgtgtgtgtgcacgcgcgcgtgtgcatgtgtgcgcacgtgtggtgggaagagccaggaacagcagctggattcagtccctcatggggaagcaacggaaagggttcaaatgccaaatgaggagtcctgggttctaatcttagttctgtttccacccaactatgggacagggaagaaaaccaagtgagccagggaacacaagccctgcctgaggctccagttccctacacacagaactggaaactgaacatgcattcaggcttaattgcactcagaagtctatttcaactgtatttatttatttatttatttatgagagggagtttcactctgttgtccaggctggagtgcactggtgtaatcttggctcactgcaacctccgcctccctgggttcaagcaattctcctgcctcagcctcccgagtagctgggattacatgtgcccacaagcacgcccacctaatttttgtatttt

SEQ ID NO: 33186 - DNA, 2590 bp, Homo sapiens
tatatatatatatatatatttgtgaatatgctggctgccaagatcgaaacgatcaggagcgtcaaagggaaaaacgaagtcagaggcagaagaaaaaggtgttccccaggcgatgaaaactttccagtaagttgtcttggaaaaggcaactccgcgtaatagagggacttggggaggtagccgctgcgggaaagggcgatgagtcctggggtgctgcagcgggggagtgggtaggaggcgcctcctagcttccccagggcggccgaggcatgaggtcacctggcacagcaacagcagcagctgcggaggacgcgcaggcgctgcggcgggaggcagtgtcaggctcgggcccctggggaattcctcccctcctttcccccccgcaccagtcccctagagaggcgtacccgggtcccgcccgccagagcctgagctttgtaccgcccaccaaggccacgccccctaccagctgtggggcgccgcagaggtcctttcttcggctccggagcggtccctccgccttccccgctcgaggccacgcccccgtgctcctgccgccttattttccccggagagtcccgaggcgccgcgccttggccctgcctacagcccgaggccccgcccccggcgcccctcccagccgtttgaagcggctcgggctgcggctggctcagagtggcgcggggggcgtggggcggtgctgaggagctgaagccgtggccagctcgacgccggacagtccagcgagcagcacggcgggaaccggcagccggagcagtcccggagcagaagcagcagcagcagcagcagccctcgccgttcgcggagcgcagccgagccggccatggcgttgtcgatgccgctgaatgggctgaaggaggaggacaaagagcccctcatcgagctcttcgtcaaggtgagcgctcgcctcgcggtcccgcccggcagatcccccggctccctcccggctgcggggagcggcgtcccggggctctcctgaggcgcccccgctcggcgccagcacccgtcccgctgcgggcacccgcgcccccggcccattgtctgggggccgcccgcgccttcccgcctccgagggcccgtcgaggggtccgggttggggacccgggcggcggccaccgtctccagcgcgtaggcatcggcggacgccagaccagcgtcccgcgcccgggtgggtcgggaagagcccacgggcgggacttgcctgccccggggccccagcgccgggcgcgcgcgggtcctgtcaccaccccccgcccgggcgccggggcccggccccacccgctccccagcgctccggtccgccgcccggagcccgaactgcggcccgccgcccgatgagctttcaaacgaacttctttgaacgcgtttttgaaaaagcatttgctccccactggtctgaaacggaaactttaattttcgatgcaatcttaaacaaatttaccaaagagcaggtgctcttggaccttcggaaaagaccgagattcccaacttgtgtttttctgtcttgggcatttactggctttctcgtttctcaagcgcggagtgttctgtatgatgcaacattttggcttctccccccggcgttgctgcttcgggaaggattgtgtgtgcccttttgttttgaaagaaattgagggagagaattcttaacttgcttgggctttaaagggttggttttcccttgtgtcttcagctttcatgtgtggaatttatttgcttacacatactacccctcttcctttgcttttctctttaatactttttattttagcaaaggagagagtcgaagttataaacatctggatccagctccttccctcaaaacttaaaaaaaacactttgagcttcttccagccacttaaaaagccaggctcattcagagctaggcaacataccggaaagtaaatggtcatctagaactattgggttcttttttttccccgagtttttactttaaagaaaggacatttcaggatgtgtttaagagatagagaagggctgggcgcggtggctcatgcctgtaatcgcagcactttcggaggccgaggtgggaggattacttgagtccagcctgaacaagatggcgaaaccctgtctctacaaaaaaattcaaaaattagctgggagcgatgttacgcgcctgtactactctggaggctgcggtgggagaactgcttgagcccgggaggtcgaggctgcagtgagccacgtcgcaccactgcattccagcctgggcgacagagcaagaccctgtctcaaacaaaagagatggagagaagaaataatctgcatttacctctgcagtcttcagtaatgactggaacagtgtttgccttaggattttctttcaattgtcaattttcgattttttttttttttttttttttggtccagggaactgaaacagcagacaggtatagaacccccaaaatatcaaagcgtttcggttactttgagtggcagatatagtactttgagatgcgtagaatgtaggaaggaacctgaaatacaagaaaggaaggaggccgggcgcggtggctcacgcctgtaatcccagcactttgggagg

SEQ ID NO: 33187 - DNA, 697 bp, Homo sapiens
gtagtggctaagagtgtggactcccgagccatgtggcctgtgtttgaatcctagttctacccttcactagttgccttggtgtccccactggggtaatcttgggcttttgtaaagattataagagttaatataagaaaagcccttagagtctaactcatagtaagccttgtttgcttactattttgcctttaggaatgcagaattaagaccatgttggcttggcctatggttagtttattatattcaatataccatatgtggtttcaaccttcaggattagaagcatctgccagactgccactaccaccaggtgggaacttttcattctttatcaaaagagcagggttagtacaaaaaaagttcaaggttaagcttgagtttgctcttgaattaacttcagtgaaccctgatcctgttgacacttactaggtaactaaaggacagtcagattggactctgccatcttagtccatcggcctcagcagctcttgctggacttgtagctaaagcttgagagtccattagtagtgagaatgtttttctttttttcctctctctcttttttgttaatgtgaaagtgcaaaagtaaagaggaataatctatgacataggatcttattggttctgtacaaatactcttaattaaaaatttttaattaaaattatatatatatatattttttttggcatggagttc

SEQ ID NO: 33188 - DNA, 2316 bp, Homo sapiens
agtggggctgaagcaggagattgaggctgtagtgagccactctgattgcaccactccactccagcctgggtggcagagtgagactctgtctcaaaacaaaagaaaacaaacaaaaaaacataatgtaagaatcatgaagtgactttaaaatctttattttataataatgttataagttttctgaagctacttaatttatcactatacagaataaacagatatataaaaaatgatcagtaagtttttgtttccctactaaagccagaataatggtcatgaggtaatagatagcattgggtgcttactatgggccaggcacagtgtgccagccgtttgcatgtgttagctaatttaatcctcatataaactttgaaataggtgctatcaatactgtttaacacatgagaattagagagatcattgtttgggtatggttgcagggccagtaagtagcagtactgtgatttgtactaacgtctttgggatttcagaacctgaatcaataactttgtttatgttatttttctctatttatttgaaacttgaatgctttcctaacagaatttcttatgttctgttttcagtcaccctgaaaaaaaaattctgagaatatttaaggatatttctaaaacatactaacaactagtgagcctagatggttcattagatgactttggttgctttcagttctcttggtaaaatttgaaaggcaactaaaatttccattacctcacctcgttgcattttgggggcctggttaattagtattttataaagcactttagagggtttatttataaacttgttaaggaacctgacttgaatgtcttttttttttttaaggcagagtttcactgttgcccaggatggagtgcagtggtgtcatcacaggtcactgccaccttgacctcctgggctcaagtgatcctcctcctttagctccctgagtagctgggacttgcagtgccaccatgcccagctaattttttttaaattaatttttttgtggagatgaggtctcactgtgttgcctaagatggtcttgaactcctggactcaagttatcctcccactttggcctcccattacaggcatgagccattgtgcttggcctcacatattttgattttaggattgttttccaattgagaaatgtctaaatggttcaagtttaacaaaaatcatatactaatttgttaattatttttctgtgagttcttttctttctgccctctccctttctcccttcctcccccttcagaggttggtagaaaaaaaaaaaaaaggcaaggaagtttctttttgtggagagaggaaatgactgttggttcaagactttatccatattaggtataaactaaatatagacgtgtaatccaggagtgaagtcacatctataaagtttcttaagcaaagctaatgagatcagccagtgcttttggatctgttttttccccccttgcttttggctcacttaccaaactgattagtcttatagtctgcctgcctttgcttctttaaaaaaagaataaaaaaattataaggaatctttctgtaaaacaagcacacaaatttttaaaaagttgctttgtatatgaagcatagtcacttatgcctccctttgaggggaggttataaataaattagcttctttaatttcttgaccttgtcattttcctcacaccaattcttcttcttttttttttgttttttgagttggttttatccttgagtctttgtcacatatttttactgtgaggctggactcatctttgtaagttgtaagaaacgtgttttacttagtattttcttggtttattccatttttaaccattaaagcagatctcagtatggctaaatggtaataggatttcttctgattggctggttagagagattgtaatagaacggaatgatggaataaatctgcttctggtcacagcacatgtccttctcaaataaggactttgaaaagtcccccaaagcattcttacaataattatttccaactcttgtgttccttcttagagccctttgcaagcattcctaaacactcaagcccttacgaacgtgctatgcttctgaagagaagaactatatacacacatctgtggcgcatcttactataaatactttggaatacaactaattgtgtaaaaagtttagcttaacatatttcggggttttagggatcagttcatgaaactaaatgttctccaagcctaagttggaatctgttctgaatccttctctgaccatgttgttcccttagcagaactactctttcctactgtttggggcagtttgtgcattttt

SEQ ID NO: 33189 - DNA, 1305 bp, Homo sapiens
gtaggaattacttgatttctttctcccgctttccacatccaaaccatccacgcgtctttaggattatgctaccccaattcaatttaatctacacttttctttccatgtccattgcttttacctaatccaaagcacatttcaccacaactaccacaagaggccacccagcttcaattcttcatcatttgatgcctctgatctgttttccatatggcagagtgttatttattgtcttaaatggaaatcagattttgcccttatcttgcacccatcaaaacccttcagtggtatcctgttaccctgttctggcattccttaccccctttcccctcccaccagtggaagctccatgaagtcaggaatatgttctctggcacatactgttttattgagcacttaaccacatgctggacaatattttaagagcttttcatctattaactcatttatattcatgataaccctgtgaagtaggtattcttcccaaccattatgtgtacaaagcaactaaggcccagagaggtttaagtaacttacccaatatcacactcatgcttaagtagaagaatcaatatctcaaaccaggcactttgccttcagtccttgctgttaaatgttgtattaaatgctttttttcgacatagtaggtacttggtaaacatttgttaagttaatgaataaattgttccctctttgcataaaattcaaacacttaatttggtctagaaaatctttcacgatctggcccctgccaacaccactttctcatgtactcatggcaatcttgtcacactggctctttgcatggctgtttccttctcattctttatgtctaagaggtcttccatggtcatctcatctaaagtaggtgcttcttgtcctctctctgagtactttgttttactttaggcaaatcatgattaattgttaaatacatggtataggcttgctattccctgggaatttgtaagagatgcagaatcttggttgtcaccccagatttactgaatcggaatctgtatttttacaagatcgtctaataagttgtgatgacatcagagtttgagaagctgggatagaaactgaaaggacagctgggcacggtgtctcatgcctgtaatcccagtgctttgggaggcagaggcgggtggatcacctgaggtcaagagtttgagaacaacctgaccaacatggagaagccctgtctctactaaaaatacaaaactagctgggcacggtggcgcatgcctgtaatcccagctactcgggaggctaaggcaggaaaatcgcttgaacctgggaagt

SEQ ID NO: 33190 - DNA, 724 bp, Homo sapiens
aaaaataaaaaagaaaaatttgtaattgtcttctgaaccagatataaccatctaatagcacttgatctgtaaaggactttggatcaccaaaattgtccttgacattctatttggcttagtttaagtatgagtttgtccaaatttaagacatgatagcgtgaagggaatagactgttatttaccaaatttgaccctaacaaacagtgaccagttactggcctacagatagctgagtccaaaaggcatcatgaggaattcaaagtttaaccatggggcaaacttcttcattccagttttgattttttttttttttttttgagatggagtcttgctctgtcacccagattttgtttatcttcagagtttttccacattcattctttaacttgtgtttcactctattttcatatgtttttgatgggagggtttttgtttgcttggttttttaaaatgaaagattcatgtccatattacaaatatcaaaaagtgtgaaaggtacacaacaaacaactcccctaaccccgtcccttgagtgttgtgctgttctaagtcctttatatgtatgaactcattcagttctcccaactatccaatgaggttattattcccattttatagaaaaggaaaacaggcccagtttttcagtcacttaggtaggaagtagtggagttgtctgagagtctggctctaaattagtggtcttaaccaccattctctgctgagc

SEQ ID NO: 33191 - DNA, 643 bp, Homo sapiens
ttttgtgtattttgacagctaatttagatgaattcatactaaaggtaaatgaggtattaaagttttaaagttcattctttaacaacacattactctatacgctccccagaaaatatgtcgaggaaaataatttaatggtcaggagcctgtccttactttcagatcctaacttctctcttcccctagtcatcaccaccccttaccctcagttccataaacataaataaagagaagaatgaagttaaagcttttcttcttaggtgtttaaaaatctgactattctaaagactgattaaactaggttttctaagtgagcagttccttaatcttgacttagtaaaacattaaaatatttggcatctgccattgacccctattctgcaatattggagttaatccagcagtttctgattaaataccagtattatgcaattcaagaattaccacaggggtgtgaagggaagagggtgaggctagtgaggaacacccagacagcaaagtaaagaaaatactccttttataagaataaaacccaaatgaatgctaagactctatctagagattcattgttatttctgtcagtgggattatttaagttttctctttaatcattcgagtttaaaaaaattatttttattttttt

SEQ ID NO: 33192 - DNA, 1315 bp, Homo sapiens
aagcccctggcctcaagcaatcctcctgtcgtagcctccgaaactgttgggatttcaggcgtgagccaccgcgcccggccaagagcacgtttggttggtttgtcctgaggggcaggtctctcgcaccaagcaggaggtagaggtctcgggcccagaggggccctgcatcccccacctcctgctgcgagaggcatcagccggccttgtccctaaagcccctgctcgctttcctgtcaccactcgggtgcggttccgaagtggccagcaggggccgcggttcccctcctttcggcgccacttctgcaagcagggctgggacagctgcaggacctcgtcagtttggggagctgccagacccgatcagcagcgttgtcggcttccttcctctttatcagatctgtcagggctgctgcgcgctgcgaaggcgcctccggcctccttccctccttcctgtgtcgaacggacgctccccggcgccgctgcgaaccgacacctccgcgcctcccccggcggggcagggcagggacccgctcacaccctaggtggggtggggtgggaagtgccagcggtctgggtgtgacggagccagccaatgtccacgcgaggtcaggtcgcacgtgggcctcgacgctggcacttctgcatgtccctggttctcggccggccaccggcagctagaggaagcgcttcgcccgcgaaccacagggctgggcggcggttgggtcgcggcagggcgagggctccgctgcggttggccccgagcggcgtccttcccccgggggcccccgatcactgcctggggactcgagagcgtccccgccgccgcgccaggcgccagttccctgcttctgagagcgcgcacgggagcccgagcgagccctcctggacgcccggcacaggccggagcgccgaccgcgggaggggccacctgggcactaggaaaaggggccacggttccaggcggggcggtccccgctctgctgactcggacgggcctcacttccccgccagaagaagcggcacccatccacggggagggacggcctcgggacatcctttggggaagccagtgacacatttctgatccaatttcttataagaaatagataaacctcagtttcttcctgtgcttcctttctctaatttcctcagtcagataataattgtcattaaactcgatgtaccagttattgtgctaaagtttttaaaatgtttcaagtctcttcatattctcaagtctattagaggagggactattcttgtccccattgttttatataaagaaacttaaacctagagaggttaaataatttgc

SEQ ID NO: 33193 - DNA, 437 bp, Homo sapiens
acatcctaaaggtcttgtctctccacgctgttacaatggcaacgaaatttcaacataagttttggaaaagacattcaagccatagcattccacctctggcccaccaaaactcttgtcttccttgcatacaaaataacattcatcccattccaatagccccaaagttttaactcattccagcaccgactcaaaagactgaagtccagagtctcatctaaatcagatatggatgagactcaaagcatgactcatgctgtggcaaattccttccagttgtgagtctgcaaaatcaaaacaagttatctacttccaaaatacaatagtgggacaggcataggatagatgttcccattccgaaagggagcaacaggaaaggagaaaggagtaacaggccccaaagaagtgcaaaacccaaaagggaaaacaagattaagtct

SEQ ID NO: 33194 - DNA, 1149 bp, Homo sapiens
ccatttgcagcacagcacgtgaaggcagggctggaactgagaggctcacggcagatgagaaaatcaaatcagagcgtaccaaggtcacagagctagctagagagccgaggctctcaggtcccctgcccagtgtgtttcccgggagtacaaggtggtttccacaccagcagctgcagacggactaatgaagacacaagggctagacctcccacctgcaccacttagtagctgggatctctgggtagtcaatgacctccctgaccttgacccctcaagggtgccaagtgcagtgtgtggtgcatggtaaatattcaacaaatggtagctcttcttaccctgatgccctagaaaaaacccactggagaggtgtcacctaacagcaaactcacctacgccaggtggcctggactgaaacactaggaggtgagggcagcagcgggcagggtgttggggttcaatcaggctggtgggaaaaatattaaagatagttacagtaatagccaaaaactatcttggaagacctgagagtttgcatagcttcagattgcttggctgaaggcagccagggtctctttgcaggagccagaaagattaaggtgcaagtacaaaggaatgtgggaagtctatcttactaacctgtttatttatatgggctttagactgacctttgtcctaccgggtactttactgcctcctactcagggaggtctgcaaaagtgtattactcacaaacggtgtttgctttaggcctcagaaactggcctttaatctttaccctctagtggtgtttacttgcaacttttgttaattagtgttgctgaataaatgcgagcctcactagctgatcagggccgagtctcaactgtttacagaactcagcttggagcctgtaagtggaccctcagctggaccggcagagcagaatatctgtgtgccagtgtactttattcatctgtcaccgaatcaggggtctgcaggaacagactccctgcagctaacgccccccgcaaaaggagcgctgcctcagcagggccccttaggggtagccccagatatggcaggctgccccaggcctcagagaggatccttgcagggagacctccagcctcaccccaaggcttgccagctgtgtggtgactgaatgcaatc

SEQ ID NO: 33195 - DNA, 2027 bp, Homo sapiens
gctttcaaacagtagtttaggtgtcacctactacatgaggcaccccctggagacccacaaactgcattcctctctcctcctctgcacctccagggcacttaaacatcagattccctatcaactggctgaactaccacactgtagactttcaaaagtttgccattttttttattttctttttattcttttcccccagaagtcccaaaaacagatgattattttcttttcactcaaacagattctgacagaagattattattttttaaagtgaaccaggtctcttactgacactagacaagtttcttcctgtctctagctctacatatttccctaggtaaaatgaagaatttgttggaatcacggagcagggaggttgttagtaatggagactcccaaacctaacccagatacattaaattggatgtgggtgggagaggggctggagtgaacagttatattttcaaatgttctcagaatgatcccaatgtgctgccagggttgagtaccaccgaacagagctttcctctcagatgatcctgctctgttggtctgtcagacgcagtggtgtggcttcctcgtcccctctacaaaagcgcacaggcttggccagatgacggatctaagccggcctccaagactactcacccgcatcaggtgcagctcccggaatttgcgcagtctctgttcgcgcttctgagcggccagctccgccgccgcagcgagggacccctcctccgcgctgtccaccagcacctgcgacaaggagaactggcttcaggcagagccggctcagcttctcccaggactgcccaggccgagtccccgccggtccccacaggctgggcctagggcctccaccgccgacttgaccccacagtgtctgagcctccctgaagcgaaactagacttcgcctccacctctctccaggccgctccccggaaccctcaccaacaaaacccccggtgtacggtgggtggaactcacctcggatgcagctatagccgccatcacaacctttctctcttcccacttccggcaacaagatagagcacttccgtcaaccttcagacaaacgggccgatacgtacgaatgggctaccataagccccgccccttccgggaggtctccggaagttgggacccttttagctatgaaatattttggattgcgtagggtcttgcgcagccgcgaaaagtagcgtgggccaggacagcgggaggtaagtcgccaagaaaagggttgggaagagctcagaatcggacggctaggaagaaatgaccaaaaggagcctgatagccccctattctgcacgctgttcctggaaaccgcctttgcaaagacagtgagagaaatctaacatggctcactccatcttgcttctagcctcgcaggccggctgtcttcgctcattcctgggcataaaccaagctaaccatgggagaatttatagtttaacttttaagcaaggatgatcatagtcccttccttaaacagggcccctccttgtttgggggctgaaactgcctttataaaactaatgaaagaccgggaggttaggattatgaggggagaattctgctaaaatgtagtaaacgataaccagccattgtttcggaggacatcggatgtgtaacttccccaattattcctgtagataacgttatcgtagcacctaagattggtcttttgaggcatttttcagactttcgcattctggcaactaactgaccccacccagactcgtgacccatgacccaaccgcttcttctgtcccactcctcccccaagaggcggactcagctgttgaggagtgtagtccacacccctgtgattgcatctccaaccaatcagcagcatccattccctagtgccctgcccacaccaaactatgaaataccctaacctctgagctgacccttcaggaaaacttacttgagtggtaacccttcttccctgaggccagcctcaggttaatacaactgtatactgcagtagcacttttcagtgaattggttttgtctgcag

SEQ ID NO: 33196 - DNA, 1836 bp, Homo sapiens
ggctcagtggcttatgcctgtaatcccagcactttgtaaggcctaggtgggcggatcacttgaggtcaggaattccaggccagcctgaccaacatggtgaaaccccgtctctactaaaaatacaaaatttagccgggcgtggtggcgggcgcctgtaattctagctgctcgggaggctgagacaggagaatcacttgaacccaagcggcagaggttgccgtgagctgagatcgcgccactgcactccaacctgggcgatagagcgagatccgttcaaaatttggggttcaaaaaaaccccaaattaactacattaaacaagcaactccacacttatgtaattacatgtatgtaagtgctgcaaagaagaaaatgtaaaaatgtatgaagagctgtaacagaggaaactgacttttaaagtggtgagctggcttccctaaagaaaggcatttaaggaaatctgaggaaggagagggatagtctgccttcagagttttgtttttgagataggtctcactgtcacccaggctgagaggctgagatcatagctcacttcgtcctcgcgtctccagcacaggtccgggtttctccacccaatgcgcctgcgcacaggcctagcccagtcggacgcagcccaggactgccaggggtggggattgcctgggtcccccaggaagggccgggttacgtccggaaaagtgaggcccggggttccagttaattgttaccggaagtggagggaagcgttgccaggggagggcggagactgtggctgacaagatgggtggcaggcccttccctgggggtatcgaggtagggacgtttgtggctacgtctgtcctagaggaggagacgatgccaggggagagggagacgcagacactgggactgggtcgccagcagagggcctcggaagccaagccaccccgtctgaagacgcttctccttacggagcccagaagcgcgaacggagactgcgcagatcccgtgcgctgcgccggaaacggatgcatagtctcggacaccagctcagacctgccgcctggccaggtccgtgcgcgtttgtagtttgtaaagaaatgttctaatgtgtatatttccacgtttatctgtatattattcacttgggttgtcttctgtttgtgtttaatgtgaagcctagagttgaccttgggagcttcagaggtagggtgctaatttttcttgcaagctatgtaggtagtgaaaggaaggtgacaatgactacaggaaattcaccctagtccctcttcttccccagaagtggtcacaattacaggtgctttcctgttccacgctctattgcatagcccaggtgcatttatgggaacaaaaccatggagatagacactgatctttaataacattctgtaaaatgccatccttcaaaaaccaaatatccttgtaagaaagttaaaacatttggtgaaactattattttaggccaggcacagtggctcacgcctgtaatgcctacactttgggggcgccgaagcaggaggactgcttgaagaccagcctagggtaacagaaatcccactcatctttacccccaaaaaattagccaggtgcgatggcataagcctgtatggtagaggctgtggcaggattccctgagccctggagttcaaggttgcagcaagctgtgactgtgcactacagcctgggtgatggagcaagaaaccccttctctaaaaaataaagtgtctataaaaatcagtcttacttagaccagctgtcaagattctccagttcataaagtgtaatacccacttaaaattttatgtgcttaacggtcaggcgcagtggctcacgcctg

SEQ ID NO: 33197 - DNA, 2589 bp, Homo sapiens
tgtagattctttatataattatcacaaccactgaaccaatactgatacactactaaagtgtatttctaccaccacccccggctaatttttgtacttttactagatagtgagctatgttggccaggctggtatggaacgcctggcctcaagtgacccacccgcctccgcctccgcctccccaagtgctgggattacagaggtgagccgccgcgcccggcctcctaggtcacttaggatactcgacaatccaattttattcagtaataatgtcaactaaaagaaggcgtgttttgatattgttcttcccaatcacgttaacttagaacctttaacttaatcataacatttaaaaggctccacccactaagaacagtcagccaataggaaaaaaagttccctacatcctgagccatttaacatccagttgacctttaaccctaaagagaatgctgtccacttaaatacaggtaatgtcctccctctttcctccaaaaagatttcgggcactaaaggaactaatattgaaactacacagcaacgttggttccctagcctactcatatactgccaccatacattaccacaaatggaaaggtaaatgacccacccacctttttcacttaagcgaaagggggttctgctccgcgacctcgtcctggatctgtccctccatctgctgtgctcctccgggtacactgtgcgaccaaagccgtagtagcgctgtccccgcgcgatcgcgtacgcccttccgcagtacgaccttccccgagagcgcgacctgctacgggaccgggaccggtaccgcgaaggagaccggtagtatctcctggtgaacccgtagcgcctctctcggtaacggcggctgcgggatcgcgaccggctccgcgagtatgaccgcgagtagcgcctgtacttccgctggtggcgccttcgggaacgggacctggacttgctcctccgactcctggacgaaaaccggctcgagacgcgggaatgggaccgagagcttctggaaaaagagcggctcctagaccgcgacgacagccggctggacccgcccgaccgcgaggtcgagggcgaatccttctcctgcggcgagcccggccacatgtcgttcacgtagttggacatcttcacctgcggctttagcctgcgctttctccggaaaggatcccgcaagcctcaactcaggacttcctaaaaaaccaagagagaaaaaacaagtcgagtcgcggaagccggcgcctggccacccggaagccacagtcggggaacctccgggaggcggagccacggcgcgggcggcgaccgccgcgacaggaaccgagccctagaaaccccgctcggcgccctgaggccgcggccttgaagcgaaacgctgcgttccccaaacgcggggcccggcacgtttcccgtccctcactcctgagagaccactgcggtggtcctgagagaccccgtcagcagaaaacttaccgcacgccgtcgacgcctccctcacgactgagagaaaggctcaacagacgccttcctttcggaacgtaagacgaagtggggcttttagtccctgctttcgaacggcgaattccacaacctccacctcctacgtccggatgcgcactgagggactacgttagcagacgcgtcaaaagtaccagaagctggcccccggcgcatgcgcagagatgttccgtggtgggcgcggctcttctcttgcccaaccaccgccctgcctcctccctccccaagccgcgccctgtgcctcgagcgcttgcctccagggtgcgcatgcgcgatggggctccagggggaggtgtttgatacatcagggtgtcccgttgcccttggcttcccccctgatctgagataattgcgggaccgacccagtcaccagaaaacttcgaagatggaacggccccgcgtggggctacaccaggctctggcctcactgcacgggcggggctggacgtcagtgccgggcggggagtagggccgggagaggagcggctgcaggctggagagggctcgcagccgggctcggagctggggccgtctgacgggctggtgcccacagggtcgttgccgccacccaccggcaagtcgcagacccggcctgagcctccctggacccttcctggcctcttcctcctgtcctaggtaccgcggcgccaggagaaggcgaccgcgtccacaccccgccatgacagagaggggacctcaccctcccccggaacaccccaagacccctggaaatgcagtattaacgtagaaaagatgttttacttccatgttttggctaggaaggtaataaggtcgagacaaaataaaaagactcaaaactgacctttaatctggggataataatgaagtctgcgatatctcttccaaaaactgtgtttggtgtgagtgtaaacaaaggtgactattttacttctagggatctacaaatgggatgcatttcaaacacttcttgtaataaagcataacaattgccttgaaaattgtgggttaattgcctttttttttttttttttttttgagacagggtctcactcgcccaggctggagtgtggtggggccatcacggct

SEQ ID NO: 33198 - DNA, 1537 bp, Homo sapiens
gcggaaagcccctgaacccagcgcccgggcatgcgcagacgcgttgttgtggtgggcgtggctccctccggacccggcgccccgccctccgccccgtgtccgcatgcgcgactgagccgggtggatggtactgctgcatccgggtgtctggaggctgtggccgttttgttttcttggctaaaatcgggggagtgaggcgggccggcgcggcgcgacaccgggctccggaaccactgcacgacggggctggacgtaagtgtcgggcggggagtgggggtaagagagtagcggccgcaggctggagaggcctcggagccggggccgtctgacgggctggtgcccacagcacaggctcgttgccgccaccctcccggaagccgcagacccgggctgagccgccgcggacctctcctctcctgggtccggcggcgccaggagaaggcgacggcgtccagaccccgccaagacggagaggggaccgcgccctcccccgggacaccccaggatccctggaaaatcccccgatcccccacttcacagctggacaagccgaagccccgagaaaggagcgtgacccggccagctccctcagcgaggggtgccccggctaaaggtggctcccccatcttccagcggcgtccctcgagacctaaaagtcccagagtttggagggcggggtctggcttgagcgtaccagtcgtcgtgcaaagaaaaatggattcggggtggggccattgggatgaaccgaaaataacacttattgaattgcagttcttcccggggaagaatcaaatgagtgaatttcctaaattgaacttgtcccaaaggcatcttagcattggctgtaatcatatattttaatatttaatttttaaaagagaagttaaaaatgggagacgttgctctattgtagggtgtcatatttttggacaaccataattgctggctacaaagtatcttaaggaagtcaagttcgctgtaggagtttgggtgttgttattcgcaagttatatgtatttcaggctttttcatactctgaaatagagataacatggctgtatctcaggtctctactgctcggcttacaggaatgttttatataatttgtaaagacagcttgggtcggctatatttaaatagcagttggatttttgtaatctgaattactattaaccacgattctgtgcttgcttttggctggaaacacccgttaggatcagagatagggatattaaagtggatgttctttatatagaaatgacaccaaaaggcaggcttgcagaaagaaaaataatgaatgaagtgaaaggaaatgatgtgggtagaggtaagaactgcagtgcagtgtttaatttcttgatttaggtgtgaagaaacacacgttctgtgataaaatatgtaaattagagaaatatttttcatttgaatctgtaattccactcagagccaaagtttatcacttgtctctctactaatgttagtgctcctggactgtaaatatcaaattcatttaataagtttggaatcaaaatgatac

SEQ ID NO: 33199 - DNA, 1573 bp, Homo sapiens
ccacactgcgctaatttttgtatttttagtagtgacagggtttcaccatgttggctaggctggtctcgaactcctgacctcaggtgacttgcccaccttggcctcgcaaagtactgggattacaggcgtgagccactgcgtctggccgtgtatttgttcattatctgctttcccctatgagaatctgagcaacataaagacagggacttttgactgctgtggttgctgttgtatcctcagcaccagggaagtccatagtaggtgctcaataaatatttgttggctgaataacagctaccatttctggaatgccaagcacggaaccaatcattttgcatatgctatttcatcggatcttcctctcaagcctgtgagtgtaggcatcattacgcttacaaaagaggaaactgctgctcagagaggtggcgtgagtacccaaagccacacagctaataaacggcagaggtgggacctaacccagatccatctgacaccatggcttgtgttgctaatcactttgcaattctgcctcccaagttactaaatcacccagtctcaatttccttatgagtcaagtaagatgtactctggtctcctcacagggttattacaaacgtgaaaatttgtcagcaggcctggcagcctgagttacggaaatgaagctgagcaagtggtgctatgtccacggcgtgctggtctgagcagccaggcttcctgcaggtgtggtgaatcaagccagggagcccacagctttcacgtgtaatcatgacttttctgtaaacaccagactccctgagaatacctgccatgccctcctacctgagtcaagctcagtcactggcagtgaccaatgaggtaggaggtcctccggtccctccctggaaatgtgtccacgccaagggtgtgaccttgctctgggcacgtttggctaaagtgcagctaagtcagtcgttcattgatttaacacacatgagctttggagttaggcaacctggttcaaattctggctttggaatgagctgtgtgaccttgggtaaaacagtcagtgtctctgtgcctgtttcctcatctggaaaggcagaaaatcagtgtcaatctcactgggttgttgtgaagattcaacgaggcagtgcataaagtgtcagatgtgtagaaaacactccataaatgttagcaattatgattatcacacaagcttggcaagtttactgtagaaactttgaaaatacagatgcataaagctaacataaaatgtccatttcagtctctccaaaaaccagcactatgttttgagtgtatatcctttcagatgtttttctattcctgtcgatttaggccttgtttttctccctacaaaaatgggattacacagcacatactgtttggtaacttgctattttcatgaactctatatcataagcagtttccaagccaggaaaatctttctacaacaatataacatggtggttaaagagcccaggcactgaaagcagactgcctggatttgaattcccaactctgttactatgtgaccttaggcaagtgccttaactcctctgtgccacagtgtcct

SEQ ID NO: 33200 - DNA, 2957 bp, Homo sapiens
tgacctcgtgatctacccgcctcggcctcccaaagtgctgggattacaggcgtgagccaccgcgcccagcccttcctgggaagttttaaaaatgcactggaagactaactgccccattgtcgttgagggattacactgataaagctactggataggacattctgcaatattttcagaaatatttataaaagctgcattaaaacatgtaaaaatgcttatgttaaaaacagtatgactactattctagtatgactactattctagtatgaccactattctatttaatagcaatagtaacattatcatccataggggaaaattggaaaacaagcaaatacaataaaatgtcaactgtatttgtgttaatgtgatgagactcattggtgttttttccttttcggccactttcctacattttccccagttttctctaatgataaacattctttttatttctcttaaaaaaaaacaccatgcggacttttctaagtgttactttgccatacgtacgtggcaggggagttataaggagtaaatgagcaaatacacgcaaattacccagcacggtgcctggcataaaatcggcgctcaatgagtacgaagcgtgaagggtcgccggccccgcgtccccgccttgcaggagcccggacccgccgagcaggctcccggtccggcccggcccggcccggaggccgatgcttcgcggtagtgccctcgcgggtcctgcggactcggcgcccgcggggcccacagcgctgcccagcctgtggacgtggagcccgggccgcaccgccgcacacgccccgggcatctctgcgctacgtcgcgcgcccccacggctccgccccgtggcgtaacccggggcggggccgccacctccgattggccggcgcgctgtcaccacgtcgcgggaagctggcagggtgtgtgtctgtgtgcgtgtggggtttgctttgtcattcgtacccccggtgcgcgctgacgcggtcggcctggccgagctctccagcatccgcagaagggtccccggcgctgttcctgggatgctcccttacataatgacgcgactggctgaagcgcacgtcagcgcagacaccgcacatgccgcaaacccgggccttccgatttcatacattgctagacgagagcctacaatgccatgccgtacggtatgctctagtagggattacaatacaatgaaacgcaacccaataataataaagcataccttcgcaacaaggcgtaatataggatgttatatttatagggcctatttataagcctctatttaaatcttttctgataggctcagccggggacccagacactataatgattggcgcattcttccgtccttcaaaggggcgggttctagagtcagttttgcctcagcgggccctgggattggccgacagcggtttaccggtggcttctattggcctcccgggccgtccgtcggagccgaggaggcggggcaggcggctggctggtgctgggcgggcgggccccggaattgtcatttctttgtttccgaaggcggaggaggctccgagccccccctccccgtgctaccccctccccccgggtgctggctccatgtctgtgtgaccggcctcaggggtagagtccaggcccgacgcggggcgggccagcggcggcggcagctgaggtgagagacggcggcggcggcgcgggcacccggccccccagcgggaggatgaagcggcggaacgccgactgcagtaagctccgccgccccctaaagcggaaccggatcaccgagggcatttacggcaggtgagcggctgcacccccactccgcgggcgcgggccctgcggtccccctccagctccgaggggcctggccccgttatgtaaccccgagtaggccgcacgcccgcgccgggggctctcctaaggagcgctggccccggagccgctggcccgcccgccggggtccgccccgggtgcgcggggcgtggcgagggtcggcccggccgggcgggcagggcgcggcgggcgctggctgagggagccgccgcgccgccgttggaagcgccgggcccgccggggggaggggcggagagcccccaaccagcccggcgttcctcagcatcccggccatgccgctgggccgggagggccgcttccgggacctctgactggccgccgctggcccccgagccccccggtggcctgggggcttgccggccggagccaggaggcgcgtggaccacagcgcgggggggtgggggaggctgacaaagttgagagcccactgtggcccctcgttcccccaagctgccagcatactggcctggggccatgctgtcacttctttcaccttctgcttcccatatgggatctcaaacttggcacccagggctgaagctgatacccccaaatcatgccctgtggccctgctccagattcggaagggtctgatgaccagtttttcagcaaatattgttttgacaattccaagcagatagcttgctttgaacgtttttaaaaagggattttctccaaactcttttttttttttttcatccgcaagaaaagcagtgtccctttaaatagaaattgaattcagtccaccggtagagaaagacaacaggttcatggggcaacttactatcatagcttccccaagtcgatttgtgtacgactgttattttctggttcttctcagaatgttacttgtaaatggtatttgccttgatacagatttcggtggagaagtaattagtttacaaagaagaattctcagcatgtggatgtaggcttaattgagtcctcatggtgttttacaattagcttctctagctgtgggatttcaagaaatatgtgaggtagctgatgacacccaagttgtcttaacataactgtacaccttgcacatgctcttgtttacagatgtggaatgattgctttccacaagcagctgactgatgtaa

SEQ ID NO: 33201 - DNA, 868 bp, Homo sapiens
agtaaaagattaaataatgatcttgtgggaagtacagaaaatctcttgaaagaggactcatgcactgcttcctcaaaaaattacaaaaatgccagtggagttgtgaactcttcacctcgaagtcatagcgccacaaatgggagcattccttcctcatctagtaaaaatgagaagaagcagaaatgcactagcaagagcccaagtacacacaaggacttaatggaaaactgtattcctaataaccagctaagcaaaccagacgcactggtcaggtaagtgcacatgctgcatccttactaacactttccagtaaacttgacatactcttgacatactcccatatgggcctgtagggattgtttgtaatcagatattgtgactagtgacgtgtggtgttttacatgagtttgttggccaccttgtgttattgtgttgaagcattgatttcagctctttgcagtgttctgaataatgagtgacactgattacttcccacatgtgacaaattgacctgtaacttgattcttctagtcgtgttgtaaggcacttctttggtccttgtccttttctgtttgcatgtccagagttctcttggcgtaaacacaaaaagaagagtttgtgcttgttcacgcaaatctctgtcaaacagatatacattgcaggagaggggtgagaaagttgtccttactactttgtgcttgttttgtttttctgtttgtttttctgcacttagaatatgaattatcctagataactctgggaaagttagatttgaaaagcaatctctttcacaaaaatccatggagaaacagtgttagacacaaagtttaattaggaatgttgcttttctcattttaattaaaagaat

SEQ ID NO: 33202 - DNA, 1585 bp, Homo sapiens
actatttcctaagtctcccactgccctggacatcgcattgcttttgtccctgaacaagatctttcaccactggaggagccctcagtctccccatctgtaaaatggtcactggaaatcctaggccgctgctctcaggccctcaggcccctacggggtggggattggggaaaaggaggaaagcgggggcgtctagggcttgcgatttgctatcttctggcgccttcgggcggcctcggaaactcttggtgcctggacctggagcctggacagggaccgggcggggcgagaccggccgtcgggggcgcggcccgtctgggggcggggcctgtcctctctcgccccgccccgtcggacgccgcggcggagctggcgctgggaggggaggagcgcgcagcccgcgcgccgcagggccgggcggaaagtttttcctgacggagttttggctgcggcagcggcggcggcggccggagcgggccatggacgcgctcaagtcggcggggcgggcgctgatccggagccccagcttggccaagcagagctgggggggcggtggccggcaccgcagtgagtgtgcgcgcgtcagccgggccgggccgggatcgggcagaggcgcgcggggcctccgcgggcgcccggagtgcggccaagttgggcagaggcggggcctcaccggcgctccggtcccggcgtggccctttcccggccctgcggggcagggggtcggccggggtcaagttgtgcacctactcgccggccgctcgatgccgctgcgaggaggggcagcgctgaggaaggagcccgagctcggggtcctcaggtgcagccggcatggggtggggtgcaggttgggagaagaggcccccgccacccgcggcacctcccgccctgctgtcctggccagctagggggaggcaggcgctcgtcgtcggtgcctaggggaggaggagagggcgcaggggcttgggaagacgcccccgtcccgcacccctgcgccccagccagcagctgcggcggtcaggagcccactggcccgttctcccgccccctgcccgacccaccgggccaacttttgactccgggtgcccagacacccatccaggtgtgagcccggggtcgcaggtacgtacttgaaattgggaacgaggccccgcctggggtgcctcgggagagccccacatcaggcgatctagacccttacgtcccttcctctagccgggtccaggtggcaagcctggcgtcccgactatttttgaaacctgttttctctcgcacctttcccctcgggcttccagagtcccttgggtgcccaggcaaacgacagactcgccgccacctctccctggggcgtctgggaggctgggaggggcctccccccctttctctcccccagtctctgattacgctcagggaacttgtcacctggcaccttcccctgaagccagaagacccagcctagcgcaggtctcgttgtttgggagggagaagagagtggcttgcctggggtcacacacaccttcctgctggttttggagccagagcccaggactgctgcacactcccacctccctgccacctacttcgggcc

SEQ ID NO: 33203 - DNA, 797 bp, Homo sapiens
cctctgggaggtgaatgccagcctcggaagggcaggaaggagggtgcacatcttgaacaccagcagcatccacacgtaccagctagtttaagctgctgcacggcccctgtgcttgcacgtattgttagcccattttagagatgatgataccaaggcctgtggcggttacatgatcagccagcctcacacagctattaggaggcaggcctgggactcagagccagtgtgttccccactgtgctgggtggccctgcctctgcaggtcacttgggacattggcaaatcaggatgaccttgcttgcttaggaacttctgaacccagcccagagtaaccttagccaagtgtccagcacagaggtactggatcagatggtgcgtttgtggccaggacagatgtgggctgtgtcatgaatccttgttgccagacagcaattctgactgcacctgctgagccccagcacggcctgtctcagggtgactgaggcacagctgctcttgaccccctcgcagtccaggggttatagttcatggtgccctggaaagtccccgggcatgagctgggcttgcagtaggccagcgggacattggaagtcagagctgaggtatggcagctggggaagccaggtcaggctcttagaagaggggcatattcctgctgggcatcaaaggaagggtagaatggttggcgactgcatgtgctagcctgggagctccctgaggacatgcctgtctgatttgccccatggcctcagtgcccagcctagcacctggcacagagtggccatcagtgagtcagt

SEQ ID NO: 33204 - DNA, 1500 bp, Homo sapiens
tctgcagctcaggctgctggccagacacctagaagagggggcatggagctgcagttccgagtgcagcctctggggccacagccgtcaggactggctttcaatcccagacggccgatttttagccgcagaaacaacttagtagcctgtatctcagtctcctcacctgttaaataggataaaggtgcagtccaaacaggggctgctttgcggggcggggggaggtcagatgggggtggggaagaccagtttctccccaggggtaaggcccacccagggtagccaaggtggggaggagacaagttgtgtcttaccagctcccctgatgcacccaggtgcacactcaggccccgccacgttgagaccaccacattatgccctcaggaaaaactcaacaaactctactgtctagtgaggaaagcgttgcagtctagctgtttccagtaggaagggatttagtgaagagcaccagatcacaaaagccctggcagggcgagggtgcaggtggtccctgcaggggctcagggatctggcggctgctgctcctgtaggtcccggtggctgcatcccggggcagagctggccggaagctgctggcaagggaagttgggaagaggtggtttgcaggcatcagcccttgcggctcaggagggcacagggaagggaagggaaatggtgctgagatgcagcagaccccctggcaccccaccaccccaacactgttggggggcagggagggtaaaaggagctgagggaggttagcccggagaaaacctggctgccacacctatgtcgggagctatgccgaggctttgcacacgttacgtaatccttaggacagccatgtgaggccatgaactgacctgatcgagatgtgaaaagctaggacagcaccccggggctatttcacacaggcggggcctgctcctgcctctccctgagccaggctcattcatccaatgcccagtgattgagtgcccaccacatgccaggatgcatgccaggcgtctggaacatggcagcaaacaaaacagcagaaatccccatcctcatggagctgacgctcccccaaatatgtataaatatttgtaaatacgtaaaaataggtgtggtgtaagcactccaaaggaaaaagggcggtggggggaaggggagtggcctggccggcagcgctgctgcacctggggtggtcagagttggacagagtgctggaggaggtagggaggccccagagaaagggcacctgagagggcaaagagcaagcgcaaagccccaggattgcagtttggaatgtgccaagggcaggaggaagtctgaggctggagaggagggaggaaggaggtggactgggaaatgggctcagagcaggtgcaggcctggaccacagggcggtggcaaggctcagacctgctgtgcagggctcagtgtggggtctcgaggacacgaaggctgcacagccaggggcaatgcagagactgaggctctaggatactgaggctgtca

SEQ ID NO: 33205 - DNA, 740 bp, Homo sapiens
ctggccagtatttttttttttttttttttgtgagacagagtctcactctgtcacccaggctggagtacagtggcacaatctcggctcactacaacctctgcctcccaggttcaagcacttctcctgactcagcctcccaagtagttgggattacaggcgtataccaccacgctcggctaattttcatttttttgttcattcgtttgtttgttttaagtagagacagggtttccgcatgttggcaaggctggtcttggacttctgacctcaagtgatccacctgccttggcctcccaaagtgctgggattacaggcgtgaaccaccaccccagccctgcccagtatttttatttgctaaatctagcaaccccaggggcagaggacatggccctgaaatgacttggcccttgtcctgtgggagtgtttgccttggctaaaggcgcttgactccatgtgggtaaacaggagctggaataccttccccctactttcccttagtatagtgggcattacctccatgggagaaggctggctgcctgccagtgagattggagcagcactcctttgtctaaatgactggtcccattgcctaggtatccaccattataactacaaccctttgacctttggaggcttccttccttccttccttccttccttccttccttccgtccttccctccctccctccctctctctttctttctttttctctctctttctctctctctctttctctct

SEQ ID NO: 33206 - DNA, 1322 bp, Homo sapiens
ttcctttcgctgcttctcaaggctgcggtcagcctccctccgtgctccacccaggagccctggccccgtttagggttgtgggaaaaggaaggcacgccagtggtctgcgagggggccagtggaaacatcacctccgccgacccggccgcggtcacagctctctggcttggctccagccaccagcagcacccctgcagcccggcgttagcgctgagaagcccggggcagccgccagggcgcgggctgccagctccctgacaaccccgggctggcactcgggggcgagagaggtcacccagcgacgggcacacccctccagagcaacaccgtctccggcccgcttccgggggccaccaacccgagcctcgcgggcgggctggggggtggtctctgtcgcttggggtccagcgaaggctgggcagtaaccaatggacgactgtggcccaacggggatccctcggatgcagccaatgccctcgttgcgctctccgcccccgccctcgcctgccccgcgccgctggaccattggcgcccgctggatggggggtgcgcgcgacgcctgcccttcggggagggcggggcttggagcgggctgcgctcccgcccgcgctcggcctctgccccgcccccggacgcgcggccctcagccggctgcggcgcggcggcggcgggagggggcgcggggcgcgcgcgtgggcgtggccggcgggcgtggccggcgggcggcaggaggcggggcggcgggcgctgtcgcagtgaaagcccgagcggcggcggcggcggggacggcggtggaggcggccgggtggctgtgcgcgcgtgtggggcgcaggctcggcggcagcggccggtctggagcggccgctgcgaggaagacagctgcagcgggggaggcgcggccagggctgcgcgctccgcggagccggcggggccgggaacaggtgatcccagtgggagccccgcgccctgccgagttcgaggggcgggagcccgcgctcccgggcgcatctgcagccgcccagccgcggctccggacccaggcatccctgcgctgtctggggcccgggggaagccccctgcccccgcaggctcggaagtgcctgctcctgctccctggccactccggctcccagctcccggcgccctctccgcggcggagaaagttgtggacgtgtcccgatagtcgagcccgggcgctgtcgcgaccgggccgggtgtgcgcgcgctcggggcggcgctgacacgccagccccccatcgcctcggtcccctccggaaactgcttctgaagctgaaactttgggcgcctaccagcgcgggcgg

SEQ ID NO: 33207 - DNA, 821 bp, Homo sapiens
ggtcaggggtctgaaacaggtctcactgggctaaaatgcaggtgttggccaggccatgctgcattcctttctggaggttctaggggagtgcattaattaggattctccagagaaaaagaaccagtaggagatggtagaggtgggacttattaggggaattggctcacatgattatggaggctgggaagttccacaacaggccatctgtaaactggagaagcagagaagccagtagcatggctcagtccaagcccaacggcctgggaaccagggaagccagcagcctaactctcagctcaaggctgaaagcctcagaacctgggggtggaggggcagttggtacaagtcccagagtccaaaggccagagaacttgttgttctgattccaagggcaggagaggaaggtgccctagctccagaagagagagagagagagataatttgccctttcctctaccttttctatgcaggccttcagctgatgggatggtgcttacctacattgggcgagggcgggccttcctaactcaacccaccaactcaaatgttagtctcttccagaaacacccttgcagacataccctttccagtatcctgaaaagaatactttcccagctatctgggcatcccttagtgcagtcaagttgacatctaccatgaaccatcacagggagaatcccttcgagaggccacctgcatctctgcattccttggctcatggccaccttcctccatcttcaaagccagcagtggtggagtctttttcacatctcatcacttggacactgattctcctgcctctctgtcctacttataaggac

SEQ ID NO: 33208 - DNA, 857 bp, Homo sapiens
gatttcagcatatcctggccaacacttttcattgtccatcttttttggtatggccatcctagtgggactaataggtttttaagttagtgatttgcaagcatttaggattaaaaatgatgatccgtaggagccaaaatgggttctctaagaacaatcatgctagtctaaccccctatttgccttaaaaaaaaaaagcaatttatttttctgtactagctgtactagggcagagtgtctttatatttcagcctgtctttcacaatatcttggtgtacaaaaatggagaatcgggggttgtacggattgcttggcagatttcttatttgctgatgaatgacatcaaaacaaacaaacaaagaacagagctgggtccaggagagagactcctgaggctgttttcccaacttagtccttagctggctgtttatgtttccgttcaaaacctgagggtagatgcagatagcagtcccatcaagtctgcagattatgcaaagcaggcagacacacgtgttgaataagatcttgttccagaaaggttggatctggaaccagagagatccttacagcatggaatgataggcagagtccaaagagatggaagttattagggacaaatgacaagtccacacctacacaatctggcacagaggtgaccagagcgactgtgcactttggtttctgcccatttccaaaagaacagccagccacaacaaatgagtgacagaggtgtggggctcctggaagaacactatgtcatgtgggtctgcagtttcagagggcttaataggtgagtgcacttcaagagctggctccccgtggctgaaggtctgtggtatggaagcaggaagaattgtctc

SEQ ID NO: 33209 - DNA, 1445 bp, Homo sapiens
gtgtggctgccttgggaactgcagatgttgccagatagatagtttgtgaaaaccagctgcttccctagtacgtggatctccacgtatgtttctgggaggtagcagctttgacttcagagatatgcctgggtttaaatcccatccctagcacttaccagctgagtgaaattgggcaagtcacaaacttctctgaacctcagtctactcacctgtgaaatggggggttagcacatagtaagccttcaccaaacattacattttttttcttccctgcaggtatacacacccttcccggtgtatacatttgacttatctggctgaaaataccataactacttgatgagttttggtttttggaggtttttttctggagaaaaaaaatccatagctcctggaaactcagtgttgggctatgttgctcactgattctggcaggccgcggtgcacattcctgacccaggctttgagtttgttttgagaaaaagctgtcatcagctttgtaagtggtgatgttgcaattccttggatagaatgggtcaggcttaagggcagcaagcaaaccttcctggtagtcacatgctttgagagccctgaaagcgccatccggaggccagaggatataaaagtcggaggaaatggcttaggagcactggtcactgatagccaggcccttagcccaaggaagataagagaacctgctgttagacagatgctacggccccatggtggtctccttgtggccttgagtgacatgtgcacaattcctcggccaccttctgatgatcagaacattcctggggcccaaggggtgatcatcagagcaaagcacgcctcgaaattagcttgctgcagtgtcgtgcactcacaccgccgaccgaccactcaccgctccacactctgcgctttccttcttcaaagagtttttgccaagcagtttctaattaagatgcatcttggccattttcttgttctttaaaaggctttccactagcacagagcataatttatttctctagaaaatatagtagcaagttgttgtcaaaagaaaattggaggttaggagccttgggttcgtgtccccgctctggcgccagcagccgagtgagccggcctcctctgggcctcgtctcttcatcagtacaaaggggtttgctttgtctctgcccagggttctgtgactgctggttggttactaggttgatttctttctgtctttctttctttttcatttcgaagggggtattgggctggtcttcttggaatctgagatttcagcaacaagtcttgttcctgtcaggagaggagtgagtcagggtgtctattcccagagcaagttgctggggatgtaggagatgattcatattgaaattgacattctctcctggtggcagcgtgttccgcccactttgcgaagacctttccttccttagaaacaaggctgagcc

SEQ ID NO: 33210 - DNA, 1188 bp, Homo sapiens
agatgggtgggtgggtgtgggcagttggatggatggatagatggtctgtgactaccctctgatcacaggaatctggccaggaatggtggtgcttaaaagacacacattgaaacggactgctagagccatggaccctttaaactgtaggctcagtaatgatttttccctgctcagctccctggcacaagacctcagtcatgaagcagcttctgggactgcagtcccatctcagtctgggtcccagtcttgttcactcctgtctttggctgagctcagaccagagccccggtcagagaattagtgtgcagctggtggtggccggagtgtgctgcccagaggccctttctgccttcccttgcagagtaaacataaagttaatgagcagccaggctccctgccctcagggcacacagtagttgagccatcaagggaagaaatggccatgaattatttaaggaaactcagagcacttgattttgtaggagagaactttgaatagaagaggctttgctctctgcatttgatcttcccagtgaagagcctggagcatctttgaccctgggtgaaggctgggcctctggcaagtttggggttttgaagaattttctggtggttctcaaccttgttgccatgttaaaatcacctagggagctgcaaagtcctgatgttcagactgcacccctgactcagaacctctgggcactgggcccgggccacacataaacctccttgggatttcgtgtatagtcagggttgggaaccacccaccaaagaccttcacccctgcctgcaccttaggatcacctggagagctttaaaaatcccatgtctagcctcaccccaggccaataaatcccaatctgagatttttaaaaagttccttccacaattctgttgtgcacctggggtcagaaaaccaccaggttagaccagtgtccagctgggatggaccggggagggtcagacagatcggactgggcacacccctgagtgtcacggcaggagacaaagaagaagaacaggaagagctttggtcactttggcctcctctgagctagtgctctaagtacctcatcttatttagcccccatcttacagatgacgaaactgagggtcagaaaggcccaaggtccatatagcaacaagtgtcagagccaggacacaaacacgggtctgactccagatcca

SEQ ID NO: 33211 - DNA, 1691 bp, Homo sapiens
agctgctgaggggctggagcctcgccttcccctcaccagaccagagcccggagggtgggggttggggggctcttttaactccttggtggagatgaggaaatttgggcccagggaagtgcaggttcagagctgcacctgctgtgcctggaacaaggccaatccccataacccatgcatctgcggaggtggccccccaactgcacatgaggggaacaggggctgggctttctttttaatttgtcttgctctagatgacagaggaacttttagaaaactggtgggataaggatggacggatgcccctcagcagtctctggcctcgtgcccggctgccagcagaggaggacacgaggcctcagaggcccccgacgccccttctccaggaaagcacagggtgtgtggcttctccccagccccttctttgtcccagtccccagtctggaatcgctctctgggctgggccaggcaagtgggccgcagaggcctggcttagctttgggaacggaagcacgggaaggggcgcggagaggcaggaagcggcctggggaggctggggtggccgggactacggacccgaccgcatagacgcgatcagcccctcttggcgttccggtgtagctgaccccgccccgggctctggccgggctgcgaagccgggaaccagcgaccccccgcccagcccctgcggccgccccgcccctccccgccccggccgccccgcccccggccccgccccgctctttcgcttcccgggccgccggcagccgccgccagccgcagccatgggccgggcccggccgggccaacgcgggccgcccagccccggccccgccgcgcagcctcccgcgccaccgcgccgccgcgcccgttccctggcgctgctcggagccctgctggccgccgccgctgccgccgccgtccgggtctgcgcccgccacgccgaggcccaggcggccgcgcggcaggtccgggcccgagctggctggggcgggagcgcgggagcggggactgaaggacccagcctcggcagcaggggggacatgggcatggacgagtcgggggaggcggagggcggagggggactggacgggagggagcacgggaaggaggggacacgggaggcgggtggggggtgcctggggccgggctgatggggggaaggcgaacggaggccagtgtggggctgggacagactggaggggtctctatccagaggggtgacctggacacagtgaagctggttcccgcagagtcttaaagggttactggggagccctgggacagtgaggaggggacacaggagaggacagaaggtgcaggaggaacagggccaagcagccagggccaggcggaaggcggagtggggacaaactgggagggggcagtcggaccagacagtggatgagcagggaccaggagggactggaggctctggggcagttcagaggcaacatttgcacagatggaccgggaggcactgggagagctcaggaagatggtgggagaaggggctccatgcggaagcaactgcctgttggggaccaggagaccaggccgccaaatggtgcccagcccagtctctcctcccaagcaggaactggcgctgaagaccctggggacagatggcctttttctcttttcctccttggacactgacggggatatgtacatcagccctgaggagttcaaac

SEQ ID NO: 33212 - DNA, 2287 bp, Homo sapiens
gaccaagacagtgagggctggagcacaaagagggagtgggttagtgagcctggaaggaatgtggctcttcccacagagcctctggagtcttgtacatcaagtacccatctaataagcaaactcattgaatataccgtgtgtgtgtgtgtgtgtgtgtgtgtgtgtgtgtgtgtgtgtgagagagagagagagaggctaaaatagaagaaagctgcaaagtgctggagggcaggagtcaagaggagaaagaggcccattctgcgcattcttgctggagagaggctttgcaaagggacctgcctgggaaccaagaactgggaagggggccagggtgaggattctgaagtttgccctaggggtaggagcatattttaggggtcgagcgacacacccctgggcttccagaagtcggatggggctaaacgtggagagcaacaagcagggagacgcgacgaataccaggccgagggatctccaaacgcagccaactcctcccggggacacagaccccgcgggggcacggtctcgatggaggggagtgtgctccgcggtatcggagcctacagccgccagcgcctcgcccactcgggggccgcgctcccctcgccaccgagctggacccgcctcctgagggtgcgcggaggtgcgcctcggtgcgcagctgcggaggatcgcttccggggggcgggtcagcggaagtgagggcggttgaggctgggcggcccaaggtggaaggaggggccgtgaggtgagagagtccgggagcccgagcttgaggtgagaaaggttctagggaggcgcggaggcgggagcgcgaccttccagcccgttagtagactgggtctacgtgccgggcgctgtgcggagcccgcagctcctgttcccgcgcgagttctcgcgggagccgcagctgtccgtctcacttggcccgggggaaactgagtccccgaagggtagttgctcgtcggagttccccagcaaacagtgaccaagccagacctcaggcttctagtttcggcttcgctgcttgacgggccgggctgccccgccgcgcattctgagacctggccgcggctcggaggcttccgcgcactcgggtccgggtcctgtgggtccaagggccgctgggcaggcggcgagcacttggccgaccttggcccaggtcgggtcgtctgccgcgggggaggggcgactcgccctggcgggtccccgcggggagagggtccgcgcgggtctccggccactgctgcgcgcggcaaagtttcactgagcgcggcggcctccgtgggggcccccgggaccaggggtgctgagcagggccctgcgctggaggagctcccgttctcctgaggggacgcctgtcagcagacagcaactgcagcctccggagggctgcggggcgcagaggtgacaagacccaccggtgctgccggcgaaccgggggaagatcttctagccagtgacacttgggggcgggggtgacagctgagttggtgttccccttcattcgtttagttcagcgcgttgaagcgctcactgtgtcctaggcagacaccgtgctgtgcgcggggatcacagttatctagttcctctcgcgaggactccgagggacaggcagggtgctgcggagcgcacaggaaaggacctgaccctgtcgcagggaaggaaggtgatgcttaagctgagctctgaggaatgatgaagaatgagctcggcgaagggggtgctggtgtttgatgcagggctcagaggtgggcccagtgttgggggttgagggccagtgtggctggagggcaagggggagagcaggagggctggctgcgaagcgtgcaggccttggtgctcagtgaatgtggtctagagacggcagagaaagatgggtttgggactgattgtggattttatcctgtgttggctctagtaagccagttttaaacggatgagcgatgtgattaactgtgtttgggaaggattcctctggctgtgtgtgagggttaggcccggctgggtctttggaggtaaggtcggagaggaagtggcagtaagcaccgttagtgcaatttgtggccgacacggacattcagcacagagcctggcacacagagggactctgataataaaggcttgaactgagccgagaagatggagcccacgcaggaggtggcaggacctggaccaggctttgggtgctttgcactggcatgaccactgagtgaccttagacaagtgccttcccctgtccaacttcctttccccatgtgtatcgtgaagtgaatgacacctcgtc

SEQ ID NO: 33213 - DNA, 798 bp, Homo sapiens
gctacaggtacatgttaccatgctcagctgattttttaaatttatttttactttattatagagtcagggtctcactttgttgcccaggctggtctcgaactcctggcctcaagcgaccctcccactcggcctcccaaagtgctgggattacaaatgtgagccactgtgctcttaaccactaccctaaaatgcactttgcaacacaaggtggcaagggctatttatcgtttcctaattttatactgttttacctggcttcaattacataattcaggcttaccgtcattcattgtgttattcattaactcaaatagttattgaaaaacctgccagacaatccctccctgcctgccaaataaattccctccaagcttacttattggactcagtgttcaggttcatcagatatttattgtgactacctctgcaccagtcaccagacaaggaaaagagattcaggcaggataaagcattcatgttctctgcccccagtggcactgtgatcacccccaaaaccaatcaaataagtcacacacagtccaagtaaatgcagagtgcttgctatgcaagggcagcatcaagacgaccccacccccacaagcccacatctccagagcctgatttgcattcctaagctcctcctgcattaggattctggcatcagccctgctccccagtctttcctagtccagtggggaagcaggagtcgttacactgctgcacaggggctgctacttaggacaacaggcatgtgcaggactcttctattccccagcgagcctggcacagggcagattt

SEQ ID NO: 33214 - DNA, 582 bp, Homo sapiens
agacaactttttctcagcatggaagggaaagtctaaccccattagatacaaataataaggccagaccaatgttaatactggggctattggaggaaaaccctcttgaagggtctttagtgaggatgacccaatatggcacctgaaatatcattaaggagattaggtgctaccactcataatatatagtggctgggtgtttaccaagaactttcacacacattttacctctccctcacaactctctggatccacagccaacctgggagcccagccctggaggcgggagggcagagcacatctatctgactccaaaaccagcgctcttgccctttgtccaccgtgggtaactcccaggcacccagtggtgaccacagattatacaggcaaagttttcatccctggctggcctcccagtctcttagcaactgggtcacctccctcaatgcaggctaactccccaacttggtccaaagtgtttaaagaaaaagtccctacatgtcttccaaaactgaacagaaactgttttttttttttgtaactttggcacttgggacctccatgtatttgtactggaaaatgtga

SEQ ID NO: 33215 - DNA, 1400 bp, Homo sapiens
tgtctagactgcttgggcccatggagcaagtgcccctcttggcccccagcagtgctattcccactgttcctggatccctaagtgggactccttcacatcagccggttctgggcacccataccccttcctgtcccggtctcacctacattcctcctccagaaagcagtgagctccctgactgtcctgctccaggaaggcagcggccttgcccgggccagacgcccctacccactccctgccctccatccttcattttctccaagcagccctcccctcccctgctcactggacaaacaggctctcaggcccccatccgcatcctcctcagccgtgctccttctgctcctcccacccttcccaagacgcccccatccagcgagctcctccttcctgcgccctccgctggctgcttccccgggcgggcgtcctctcacttagcccaggtgctcccctccggctccgcgtcctgcctgtcttccccgggtcccaagtccgcccctgccccgcggagccttgctctttccacgtccagccccgcagccccgcagccccgccgcgccccgtggagagcaccctcgtctgcggccagccaggcctccccgtcttggcagccccgtacctgagccggagccgagctgggagggccgcgggggccgggtcggcggagctggcagataaaagagcagccgggcagcggccccgccccaagccgggggagggcgggcggcctcgggcgctctggctacagccgcctccgcgggcccaggcgacgccgagcgccccgcaccccgcccgccgcgcacaagcagctctgccccgccaggcccacgtgttgcacgcgcgggagaggggtcggccgcgcagaggtggcgtctcaggacttcctgtggcgtcacacagatgggaagaccgaggcccgggagtggactcccggggctcctcggcgcagagctgcagccgcgcttctcgcacttcgggacgacgggaagcgcaggctccggcttctgggcccggctgaccctgggagggtcggggagggcggccgcaggagagtggctgcgtttcccagctagagctcggccggcccctacgcttactcagcccaccccgccccctgctcccgaggccactctgctcgagatacgccccagcgttcgcaccttcatttctctgctggggcagctccaccccctctttgggcacccctggcttcttcaagttcccacccgaaacccgcccctcgggcagcttccccggctctgcccagccgagtgcacccagcctggacctgtattcaaacacccactctctaccctctggtgttacacattcccagccctgggagcacctgaagggtgaggaatcccttcacatagcaggccctcggtaaatactggatc

SEQ ID NO: 33216 - DNA, 1496 bp, Homo sapiens
ccagtccaacagctcctgttatcttcaccatgacctagatcctgaatctaaccatgaccctccacctcactgtccaagccactctcatctctctcccttgtgcactccggctctccttaccgtccattctcctcctggtggctgaagaattctttacacatgtaatctgatcacatcactccccccttaaagcccttcaaaactgcatcatgcagactataaccaaaccctcgccctggccccaggctacacagctggaccctgagcacctccttgtatggggtccccttgcccacctcatccagccaagagggcctcacttaggctccttcctcacacctgctagttcctgccatcaggccttggcactagcagttccctttgccaggaacacactgcacctgcccacagtcattgtctgttatatcacccttttcatcctcacagcactcatcctaatctcttttatagtctgtcttctccccccaggatgtaaacaagggcagagaccttgtctgccttgtccatcgctgtatcctcaggacctaacactgcctggtaagtaggaggactggaggtgtattcattcaatgaatacgtggatggagaggcttgtttcgggtggtctcttagggaaccttctagctcttgaagatctaaagagaaagcagaagaaggagcttggggaaggggacgcaacacatgaggtatgtccgaaactggactaacatcccagccctcttccctgattgcccagtgtaggagatcagtcagagtggtgggagaaactacagggaaaaggagcaggccttctgaaaggtcagagggctctgcaaagctccaggagagaacagctgaaggcagctgttccataaccctgaggcagagggcaaggagtaggtacaagggagtgtgggggaatttatcttaaacaggcttgtttacttatgttgaccagaaactgacctttgattatctgcacatgaagttccctgaaaggggaagaataaatgttaattacctacaggttgtgttggctccaggtttccggcattgtgcctgcacggaataaaagcaagcagccccagcttctcggggctgctctctggccactagagccaggtagtcatctagctgctgttacactgcatacctgtctgactactcatttcatccgtaggtcggccagggtctacgggacacacccagcagcccaggagatcctgctaggcgagcgtatccagggactgagtcagagaccatttggaaaaaactggaaagaagaggtgagcacaggcactgccatattgagccccatgaattcaagccagaatgggacccccgccatctggaaaatggcattgagagagcaagcagcctgctggctctgcctctaattagcagtggatgagtgacctgaccctctctgaacctcagtttcctcatctataaaatgggataaaaaagaatagtatttacttcacaaggttgtttta

SEQ ID NO: 33217 - DNA, 1142 bp, Homo sapiens
aaacatgcaatcactttctttgcctttctatatgtcatcaacccaaaaaaatctcacatcacatctacatacatcgtcagaaaaatacgtggaataaagacgtctaaattaaccacgaaaaaaattatcaaaatctactaaataaacattgggaaatatgacctgaatatgatattggttccagaaaatcaagttaactgagctttctcggtcataaaactcttggatttttaaaatcagacaaagtcacaagggtgaagaatttttcccccataaactctttaacatttcaccgaaactgtaagaagatattccagattcaactcaacagtgcccccggagccatcttaatactgcctacaactcattgtgcaaatgaaatacccacccctgctttgtctgtgtctgacgtggtggataagaaaacgcccaagctaatagtaaccaataatgttgaactcctattgtccctcaggtttaagcttccttgcccaacagcaagcaaaatgtttatgaacctctagattttgacttatatttgctgccgttatgtcatgaaaaatgctgtatctcttgttgatctttttaacattatgacttttgtagacgccagctagtaccaaaaacgtaggatgacaggttcccaaaagctaggaattaaaatcagaggcagcgacaagatttaagaaaagcagagaattagacgcagcaccggacccaggatgggcgtggccctggtccgggcgaggaaaagaggaccggtcgcccccggccaatcagagcacgccttgcgctccggcccctggccccgcccccttcctccccgcgccttttcgaatctccccgaactcaacaccccggagcccgcgcgcgtgggaaggggaggggtgggcggggctaacggtccaatccgggtaactccgcccctgcctgactccccctgcgcggacgccccccccaactcccgccaaaaacacctccaggccgccgccaccacccccttcacagttcagcgggtggggcaggccccgggaacaggcccccgggtggtcccgcggtgagctcgccaccgcctcccgccgtccccatgcccaacctgccgccacccacgctgtccgcgcgtccggccgcgaagacagaag

SEQ ID NO: 33218 - DNA, 1033 bp, Homo sapiens
cggtcgcagggagggtcgcggccctggctgcccgcagtttggtcctaaagccgctggtccctggggcaccgccccgtcccttcagacaatggggaacccggcggggcccgcagggaagggagggagggagggaggtaaacgagggcccacgccccctattgtctcctcgacggcaccccggagcggacgcccggtgatcgcccagccccctgcccacgaacagccgcgcccccggagagcggggacaaaggcgaggctccgcccgagccacacacaaagcggagcgacccccgcccaccaacccctccgaggcccgcagccccgcccgccgccctgcagcagggggtcgctgccacggcccagcccctcccgccgaccgcgtccctcttgctggcctcagccagccgccgcctcctccgagccccgcacccacctgctcagtccgagccgcctgaccacactctgagcaccaacagacccgggcgcgcacaaaagcgccaaacagaggcacgtgacctccgcgcggggctccgcattggccgagagcggcggcacgtgccgcccccgccccccacaacccgcgtggagcgccgccccccgggaccccgaagcacctcgggaagtgtagtcctgtcccggagggcaggaggacaatgccgggggttgcagggcgcctggggagcatccccaggtgtgggcctgggactaggggggtggtctcgccgtggaagagggcgtggcagtggaccccggactaggtccgaaccagctccccattctcgagaacaagggcagggcggagcaggcggagggcgggggggtccttccctacctttccaaactttggccgcctggactccaccttgtagagccacatgcccgcctcgccccaagggcagcactcggacagagcagtgccccttctagtgcgccacccacatgggtgcctaagacgcccgagcccctgtgacagcacaatgccactccacgcccctgcagggccccctgcccccggcaccctacaccgacaccg

SEQ ID NO: 33219 - DNA, 977 bp, Homo sapiens
cagacccccgggcgcacgcggccgcgcccacccaggtcgctgggaggtgcccgcccgggaggcgccgcggccagtgcctgccgttagcttcaggaagaactaggattgagtaagaaacgactagggatggaagcacttggcactccgggtctcggagcaggctggggacgcccgcggcaggaacctggtcctccactccgggtgcggaccaaagtctgctagggcttccccgaagtggattcagtgactcgggagaggacccagcccctaggccccatccccggttaagggccagtcttggtctgggtgtttctctccgggagctggtcgcaggtttccgttttcctcttcaaggaaggaaagaccagcgagagaattcgagggaaagaacaaaagccgccggcaccgcccagcccaatttttggagcctgggaggctggctcccttcctctgaccgctgggacgactcggagggctggcgctttttccttcaccaccatttcttcccagcgaccaacttttgagtccttgctgtgtgccaagcacttcactgagtgtcatatctcacttcctccccacgacaattgtaagacatgacaggcttggaaaggagaagtcatttgccaaggtcacgcgtggaaaaaacgagggctaggaaattcagatcctgggttttaaatatttttgtattagaaagggtctaaaagttaaatatttgcaaacctttgctaatctttcacagatccttttgaaataatgactattgagaataaaccctgcagacatctccataccgttttgtgtgtgtgtgtgtgtgtgtgtgtgtgtgtgtgtgttttaacttgtcagccaggcaggtccgtgggaggagggagcagcgcgcgaatgagagtgtaaacaggtaacgaacacttttctggaaagcagtagtgccatttctatcgagagctttaaaaactgtgcgtatcctctactcg

SEQ ID NO: 33220 - DNA, 2252 bp, Homo sapiens
acagagcgagactccatctcaaaaaaaaagaaatagtaactactcacgagattgttgatgaggattaaataatgcatgtaaagcactcgatggatagaaggtactataaccataggaggcaactataattattttaactacatgcctctcaagttccttatacgtaaaatggatacttcgtaagtgaaaatattgcctagggcctggtgcattttcagtgcttataaaatgttaggaactaattaacaatgctatgtctctctttcctagccaaggtctctcatttttcctggattaagccctttggcaaaacagattctttcccagcagccttttcaggcctcagacacccctaccaaagccagtgtctactgaacaggcccagaggagcccagagggaatggatggggcttaggttgcagctgtcctctcctgctgggaccctgtttctggtgagcagaggactgctgctctgccagctgtgtgacactttcatcactggctatttcaagatacagtccaagataagcacttctcttgtgcttcctttcagacaaagctctctgaagactaaaagctcattggcctgacctttggtctctggaggaagtgaggaaatatcatccagctcgtagacaatgaagacaccaagcactcgagggatgagattgagcaacaaggtggcagagctagagaagaggcctgataagagtgttccagagcattaataattgtgataaaaataatctctgtctcttgtgaaggtcttacagtttacaaggcatcttcacacatactagcttgttggctcctcaacactcctcacctgagactgatggagcaacagtcatctccgttttagagaggaagaaactgagtcccagagttgtatgatttgcccaaggtcacagagggtgagaggcagagctggcctagaaccgggtctgctgacttcgagtccagggtaatcgcggatcggaaagaaggaatggggacccttcttccaccgccatgaaaaacagaaaactgagagtaagagtaaagtacacaaagggtggaggagcataaagaagcccggggttcagggatgtgaggctgcagggtgaaggtagggccgaggaatcagggtagggctgtggggtccaaggtggggctgcgggggctgggtcctgggacgggagctcagtggggattccaggggcactggccgttaaaagtgcgaggcgaccgtgggagggtcaagggagcgggtggctacaggtgtctgaataggaaacgtaaaggacgaagattaatgtgcaattcctatgactgagagacgccgaggccccaaaccgggccagaatacaaaagtctgcaggaagctcaattgagatataggtgttttctccaatcaaacttacccagtcaagctgattcctcagaagcagccccagacgtttaactcgacggaaatgagaaacgacccatgaacccgtggccctttggtcgtcgtagtttccaaggctcaaaatggacgcttggaagcacttctcgttcctcaatctagaactacaattcccgatgtacagtgcgcgagattgcgcattacaactctaaaactacacctcccagagttctacgcgaccgtccagccccgcgtggtcgtgcgaaaccgcccaaggcctgggatgcggtgtgattcctccccctggtggcctgaagaggtgccgccgcgatttctgctctcgagcggagggttttgccttagtcccgtgcgtaaccctccgcctcaccctcctcaaatagtcctcaggcgtgcctagaaatggtccccgcttcgctttattctcaaggaggtgggaggaggttggagtttgttttgtgtcttctgcacactttgcttcctgtaagaataatagactgatcattcaaattaaggggacattccctaccagcctgcatctgttgacacctgtgattttccattgtcctcaaaagactccctggcagagaaaggggaggaacccgagtaatctgctgggccgcatccatcccacattactgtctaatgctggttcttagcgacactgatggacaagataccgctcctagcctcaacagaatcacagtctagcagagaattcagacaaatgaataatgacagcacagagccgtgatctcatggggagacacagcaagcgtgggagccttgaaaaggggcctctggccaggcttgggggaaaagggcggtgtccgcaaggctttttaga

SEQ ID NO: 33221 - DNA, 2044 bp, Homo sapiens
agccctaggggggcgacccgcggagaccccagcagaggtcgcagcccagctcccagggggcccggcgcctgccggcgggctccgctcttgggacaccggagaacctatcatgtcagccagcgggcccacacgtcggaccccggttggccaatcacaacaggggggcgtggccttaccttctcctgctcgccctcagccgcggagcctctgcggaggctgagccccgcgaccggagcgccgctctccgcttctccacccagctaacttctgctcgtctttcagagcattgtctcctccagggacttgcctggccctcctccccctccgcccccaatgggttcggtctcctttgcgctttcgcagtccagtgtttgccgcggttcccgcacggtcaggccccaggactggcttgcgagccccggggggcgggtcgtgtcgtgtccttttctctctggctaggcaggtgtgccgcaaatatttgacgaatagatggatggcagacattaactgcgtgcctggccctatgagggcggcggcgggacagggtgagcggagagacagaactgtccccgccccaccccgccacccattcctagggttcctagtcccgggaaggcaactacccaaagacgcctgggttgtcaggctcaatccttgagcctcaaccaaggagcagaggggtgcgggtaaacgaggagtggggcgaggaaagcgggatgggaacaagtggcctgtccccgcacggcccgcggctcagcctcggccgtctgccctgcactaccaaggccgaccactagaggtcagcgtcgcgccgcactcttcacccgcatgtccagagggcggccgggatgtggagggtgagcgctgtgggcagctcgggggctgaaagctgggaagagaaatctgaagaacagccccatctctttcgcctgcacacttggaactcagcaagaagggactgtttctaggtgggctgggcgcgagcagggactgtcccgagcggtataggtgagaatggagttggggggggacactaggtcctccggggttcacccacctggagctggaattatcacttccgaaataaagcgcgtgtccttgccccctcacgctccaggctataaatacccttacagcagctgctcgagggaggggctcagggctcagggctcgcctgggagcgcgtgcgactccagagggtgagggtggtgggtccagcccaggtccagggtgtcaggtgttttcctgctttgatggcctggcagctctggaaactcccgtgactgtctcactggcaggaacatactgtccccttaggcctctccaaggccttccacccccaccccccagcttgacctcggcgggcccctggatgactcaggtcctccctagagccagtcacagctgagtggcagagtgggttacccttgggaggcgtggtgctgtgagatgcttgaggtacagggcggactggaaattaaagaggtgggggagaggcagtccggcccggagtcaagaactgagggtgggtgggaaagcatacagctggggcccaggcagccttcccagggtggggagggcgctggatgccaggcccagccaggtgaaagaggcacctttccaatcacagctgtgacacccaggacactgaactgccttggcatgtcctcacccatgggccgggcactgctggtcccaggggtttgtattgtaccaacaggcagcgcagaccgacaggcccccagaccctgctgtagaggaaggtctaccgaaatgaggcagaaatcccagacctgcctgcactggctgtctgacttcaggaaaacgattcaacctctgagcctgttttttcatctgtaagaatgcaggacagcagtgatggtctcctttttttttttttttttttttttttaagctggagtctcgctctgtcacccaggctggagtgcagtggtgtgatctcagctcactgcaacctctgcctccccggttcaagcgattctcctgcctcagcctcccgagtagctgggattacaggcacaag

SEQ ID NO: 33222 - DNA, 813 bp, Homo sapiens
aaagtactggagatggggttttggggatgatggagtaaattctaaagccttgggaaagagagggacgctccaacctttgagttggaaggatggaaggagaggaatggatggaggtgttgggaggtggagagaaaggtgttcatatttgatgaccttgatcaagagagcattgaggtcaacttctgaggcttaggaatcagtggtgaaaaagatttggactggccagtgtggaacacaacaggaagtgccctggagagaaatggaaggattgtctaggggcagaagagccttgctgatgtttcccagtactgatgtgtcatttgtgaggagccattcacatggccctgttgactttctccagccgcacttggcagtccaggtgcagatgccaaacaaatggacagtgggatcgattccagccggggcgctggcaaggccagtgctgctgaaagtcaaggggtgaggaagggaaattcccacgtgggctgtgctggacatcaaaacatgtcatttaatcctcaccatagtcctgcaggggaggttttatgatcttcgggttttttcccaggaggaaatgaggctcagagagttaattggcttggccagagtcacacagccacaagtggcagagccgagctggggttcatatccacggcagcctgattcttcaacctgtgctcccctcactggaggatttactgagcgcttattatgttcaggcattgtgctaagtcctttccatccatcctcccgttcagtcctccaaataacttggtacagcagggatcataattttccctgttttgcaggtga

SEQ ID NO: 33223 - DNA, 1497 bp, Homo sapiens
ctctaaatcctgacctcaggtgatctgcctgccccagcctcccaaagtgctgggattacaggcatgagccatcgttaccagcctatgtttttgttttttttttaattgtctctagaaagggaacttttcagagatctgagatttttttgatgcctcttggttcagaggagaaaaccctggcctagggcccagacacctgggttccatctccatctctgttggagacctgaaatgtgatgccctgcaaaccatacccaccctcagtttcttcatctgccaaatggagcatctacaggagatgatcctgaatggtccttccacatccccagtggccaagttctcagaggagtgctccggtgatgacacaggcccaaggggtggtgatgctggagaggaaacaactgtccatctcccctttcatgtccacatagttcaggcttgtggaagtgcttccctggtacatcatggagcagatctttttcacatgtgtgtacctgttctccctcatttcctccctaggagtgtgaggtctgccctgccttgctctgcatttcccctcaagcctctgcttggagcaccctcaggaagtggaacaggcgtggcacagggactgtttttttcttatggtttaagatccgtatcacatgctttgatgtcatcctcattgaagaatcatcccaaatcacaggatcaaaccaatgggtcatttgatctagtggctaaagctggagcagttggcagaggcaggtctatggggtctgggacatgaagcagtgccctcagtgccagggcaaagtccactgggcctggcctgcatgccacagaaggggagcagaatgtcccaggacctactcactcatggcctgggctgggagccacacaggcctcctcccactgtccccaggaccagataatgcttgtggacagctacaaaggctctggggagtgggtggtctttagagaaagggactgccccagggcaaatggaggcaagtagggtcaggagggggctctgcactgatgatcctgaaatgaagtattgaaagtgctttataaactgtgcaacatataaactgtgaaatgcaataaatccttactataagaacctaagagtgcagagcaacaaagaggctgccccaggacggatggatctgagttcaagttttgacttcttcacatatcagctcttttatcttgggcaggttacgtgacctgtgtgtgtgagtttcctcatctatgaaatgacaattgggtagagtaatgatgtctgtgggcatttctaatcctgagagtcaagggttcctagtgactatcctcccccagcattctatgccttgctgaaaactgatggcacagaagtgggagtccatttgcacaggcacgtagcacacgtttgacacatggcagacacttaacaaacgctgttaacattatcacagttgggaataacacgggttagcatttactgaacagttagtatgggtaaccccatggctt

SEQ ID NO: 33224 - DNA, 781 bp, Homo sapiens
gtagggacatgggcactggcactgctcttggccctgggggagcaggagagtgcaatctgacaaagaaaaatgttaacaatacatacatgtgactcagcaattatattctgaggactctatcttatcaaaagactagaaagataacagaaagatataattagatagatagatacagatatgcagatatagagagctatttacacaccaggacgtttttgcaattttgtttgcagtagcaaaaccttggaaacagcccaaatgtccatcaatgggacaaataaataaattgccgtatagtcacctagtggaatattatacagaattagaataaacaaatcttgccacacgtaacaacatgagggaagctcataaatagaatgtcaagcaaaagaggacatcctgtataattctgtttatataaactttgaaaaaggcaaaacgaatctgagctgtcagcattcaggatggtggttatccttgaggaggccagaaggaagcatggagcccctgcgagtgctggtgatggcctgtttcttgacctgggtgtgggtgatgcaggtatactcactctgtgaaaatgccttgaattgtacacttaggaattgtgtacttattttgtttttttgagacagggtttcactcttgtcacccaggctggaatgcagtgacgcaatctcggctcactgcaacctccacctcccaggttcaaccaattctcccgcctcagcctcccgagtagctggacctacaggctcatttttgtattgcttggtagagatgg

SEQ ID NO: 33225 - DNA, 2010 bp, Homo sapiens
tatataaagacctaacccagtgccagactctcgggagaaggggcataaaggacagaaaataaaatgagttgatctttgagcacagcgacagggattttttgtacatcgtgccttacagagcgagcgctgggaggaggaatcatcaccctgctgagaagtaatgggtgcagaataaatcgagtaagaaggaatggacttttctggcggatgcttactgatctaacaactggatgactgaggaatgcggtcctaagtgaccccgggctggctgtggggccaacagcgtgcgggatctgactaacagcgtgtggcagccgagcgactgcagcagcggcggggaccccattgactgtccagccccgagagcggcaggagcgcggtggatcctggctcggaccaaggcctctcccctgcgccgactgcagaccaaccctccaccaggagcctcgcgggggggcgccgtgggcaccgcagccaggtgcaggcgcctccgcgccctcactccccacgccgaggaggtggccctggctccctgcggccgcagccggggaacaatgaggcgccggcctctttaagggagataccaccgcgccggcggggcaggggacggcatcctcccagatgatcgcacccagccccgcgccgccgccgccgccgccgtctccgcaactgcaccgcccgcaaacatggctcagtgactcggagaaaagctgcagtctccctcccggcggggcggacgccaggcctccttggtcgggccgcacctccccgcaggcccgccaaagagcaccgcgccccgcaggcacccgagacccgcgcggaagatgcaccgggcgttccaccccagcgagccccgcaccccagcccgcagctcggtaggtcggaagggggcgggtagagggaggggaggccgcggccgggcgcgcgcagccccaggcccggacctgccgctgcagacggtccccggggccgcgggccctgagcgcccgctgcggctggagggtggccgagccccggcgtggcgtggcctcgcggttcccgagcccggccacccctgcggggagcagcaccagtggtgcgctccggagcgcgcacacctccgacgactcccggctctgcaaatcctcgagagagggaggaggcgagcggagcgccggccgcgcgcctcgtcggtggcgcggaacgtcccggctcgcgctacggaaagccggaggggggcggggccgtcggcgtaagggggtgtgtccgcgcgcaccacgggggcgcgcgccggctgctgactggaggcggcggcagcggaggcgcgagctgcccgataatggcggcctgcagagcccatgagagggagaagcggcagcgtctaccctgaggtaaatctggcctttcggcgtggcggagaggtcttgctgcagagccgatggccctgcatgtgcctccctccctgggaggcttgtcacagacgtgtcagcggagtcatcctggggaaggccctgcgctcctcaggccaccgaccccagtcgcggcctcctctcataccggggccacctccccccggccctcagcccccagccccgaggagttgaggcaactgcagggctggctcctcagagcgaaggggctcaggaggctcccctccgggcttcatctgagcacggccgaggagggggagggcctgacacttggccaatgagcgcggcctgagccgccgcgtcgggcaacacctctggccgcgactggcccttcccgggcgccggcaggtgtctggcctggccggctcgcgtcccagcgcctggttagagcagcgggagcgagggcccgccactttcggtcgaaagtcacttaggttcgcatcggatgcatcattggatccgggatcccacgggtttcataaacacctctctcctccctattcaggaaggtgctcttccccatggggactgtaccaggctggagaggacatggcactgcttcagagacacgaaccaccttgagtggatgtgattggcgatc

SEQ ID NO: 33226 - DNA, 1248 bp, Homo sapiens
atggccgggtttcaaatcccaggtccaccagttactagctgttgaccttaggcgtttcatttaacctctccattatatagtttcatctataaaaagaccataatagtatctatctcatcagattattatgaggattaactgaatttaatattctaaagagcttaaaacagttcctgatacatggtaaatactacctgttagctttattgttactattcttaaaattagatttcccctaggtatagcaaatatccttcaagcactgcagacagtcagacagatgacaagtaaatcatacataagaagaaatacaagccagtaggtatacataatttcaacagagcactttgttgatttttccagaaacctcgaccttgaagatggtgagtagccagccaaagtacgatctaatacgggaggtaggccgaggtagttacggtgttgtgtatgaagcagtcatcagaaagacctctgcacgggtggcagtgaagaaaattcgatgtcacgcacctgaaaatgttgaactagcccttcgtgagttctgggcactaagcagtatcaagagccaacatccaaatgtgattcacttggaggaatgcatcctacaaaaggatgggatggtgcaaaagatgtcccacggctctaattcttccctttatttacaggtatgtgttgttgattgggaaatagaaatgatttgaacatggcattggccagcaagaagaggaatgaaagggtcagacgaacgtttccctttaaatgcaggtgtttgtagttagaagtagataagtgtctgccaagaattgagtagatgtttgctttaaaacaaggttttatttaaacctgtgaggcacatacctaaaaataacataagccacctgttatgcaatggtacttgccagtctgcataggaatggggcaagataggaactagagaggtgcttgagactacagtctaataacttcatttctttgaaatcaataattttggacttgaggacagaagaaaaggaaaaattccacaaccagtagcaacacccctaggtaattgggcatctcttttataaatcactggtttgaatgtaagcctctgctgttttagagggatatctggtttcttcaccacgcagttccagttaattttcatgaagtacatgatttaacacctgaatgttattaacagtgctaacagctaacatttgaatttgcatgcagttcgatgctctgtgctgagtgctttaaaagcag

SEQ ID NO: 33227 - DNA, 1516 bp, Homo sapiens
ggaataacgggagcccggagaagtgagggctttttcagggactggagattatctcgggaagccctggtggggctgggattccaaacttattcactctcagtcatttactaatttattcatgacacagacatttatcagtgctttccagagataaagcatcccacccccaccgcggagtccaaggtctgggaaacaggaagggatgacaggagtacaggttggcactgatactggttggaccaggccaggaagagcagggcagcaagacggccccgaaacccccaggcgcacgcaccaccccgcgcctccccagcgagggcccgcggggccatgcccttcagtgggcacacttctgggagcccgtcctgagctcggtcactgacgtcgacggccgcctggcggcgctcgagccgctggccgagagtgacgtcatcagaggcggtccggccgagcctgcctagccccccggcgtggcctgacgtagctgatcggcccggaagtgctcacacgtgtgctccctgccctgctcctggccccttggccggccgggctgtttctggccatgggtcgctcccgccggacaggcgcgcaccgagcgcactctctagcccggcagatgaaggcgaagcggcggcggccggacttggatgagattcaccgcgagctgcggcctcagggatccgcacgaccccagcccgacccaaacgccgagttcgaccccgacctgccagggggcggtctgcaccgctgtctggcctgcgcgtgagtcccggacgagcccggcctggggcggaggagggtccgcggtaccggccgggagatgtgaagttgaagccccaggcagcgcagagtcttctctcttgggacccgtgggtccgcccgcctcccgtttctcagacccggatcctggcgtcagggacaagctagggctagggagataggtgcacttgggagactatcacctcctcactctccttctcacttccattcctacaggaggtacttcatcgattccaccaacctgaagacccacttccgatccaaagaccacaagaaaaggtatgaaggagtaaggagaggattgatggatgggtgctcagcagatagggctctcacctggtcagctcccaactcctgtttttctttctcccaggctgaagcagctgagcgtcgagccctacagtcaggaagaggcggagagggcagcgggtatgggatcctatgtgccccccaggcggctggcagtgcccacggaagtgtccactgaggtccctgagatggatacctctacctgacatggcctgaagatgcagggcagaggaattgcccatggacagtgacgcaaggactaggctgggagggagcgtgccaaccccttttgcctctgggtttggggagcggagggcctcttcttggtgccctgccccaaataaaggaactggacaaagagaacttgcctccaactctaacttccaggccgctgtctcaaactcctgccctggaagggcttctctac

SEQ ID NO: 33228 - DNA, 1262 bp, Homo sapiens
ttcttcacgggttcggtgaggatgaaatgaaacaatccatgtaaagttctcagcatgaaaccagcatctgcacctatacaagcaaacgtaaaaagtgggcaacggtgctcggtgttcatccatcggcaccgcgggcccctgacgctgcctctccccacagctgccccgtcagcaaccggctgctccagggcctgcgggccaacggggcctctctggaggtgaccttggccttcaacctgatccgcttctcgaccagcgatacactgtacctgcacggccgagtgaccctgtgtgacacgcgggcaagacgcccatgccaaccagtgagtgggcagccccgggacctcctgcgcagccgccgcagccttgcctgcaaagcagttcctgccgggcaggctgggtagccggactcccagctgcgccgtcttcacggaagcggtgctgatgcgggacctgggggactgcggtgctggggactggccagtcctaccgggggcggggcttgtggaagactgggcgggattttgaagacctaggtcttgtggatggtgaactcacttggggcggggagggaggtggggctaccctggggtcttgggcaaagtcctcgcctggccggcttcgctacccttgtgcttgcgttgcccacaagcttgtagtcagaagaactcgcctgggagggatcgctcctgggagatccgaacgcgggagggcctggagcgcggcggcagctggatagcattcgggcccatccgaataagcggtaaatggatcatttctggggcctccctgactcctcttccagagcctcctaccgacctgctctgtcccctccttccttcatgccctccactcttccctaaatgcaagtctcctccccaagcccatgtcctcctcggcttcccctctgctctcctcaccggtctcactcagtcaacttcaagtctgagccttctctgcctgtctccttccattctcacctttcctgtcacaccagatcactcttctcccaggctgtccctcgtgccaaacttttttggtaaatcttccttaatgatctagaaacagtctctcccttctttctattccataatggtccttcaaaaccccaaccctcgccgggcgcggtggctcacgcctgtaatcccagcactttggaaggccgaggtgggcggatcataaggtcaggagatcgagaccatcctggctaacaaggtgaaacactatctctactaaaaatacaggaaaaaaaaaaaattagc

SEQ ID NO: 33229 - DNA, 1908 bp, Homo sapiens
atacaattttttagtatctctccctgccaagtcaggtttctagatacccagaatttcactatctgagattcattcctttggctgatggttctgttctcctttcaaacaattttcctgtctgactcttcaagcgcatattaatgcaaatggacttaacagttccttttcctgtggaccaagtttggggagggaggcaggactgatcctttacccttcaacctgaaccttggtcacaggctgaccactgcgtccaacccagaccaagccttgaccctgactagtcagtgacccaggccacaccctaactcctggtcacaacctgaacccctgcttcaggtgtgagaactgatagaccggcgttggaatggaaggagggtgaggcaagctgagtgggattctcgtgtccccagccccgcccgcgggccgccagcttcccaacctgcacaggcccagcagggcccctccaggtctaggtgagcagagctccacctacaggtaaaacgcggcaaggggcagagaaggagccaagtggcgacgtggtcatgcgcagaaagatccgtccggctctctgagcagagggtagcgtgtgggggcgggataccgacgcggctcggctgccgattggtcagaagaggatagaaaggggcgggaagccggcgcggctcgactcccgattggccagaggcggcagaacggggtggggccaaacgacgcgcgttctgtggcgcgcggcctggcgggcgtgcaacggccgttagaggagctgagggagggaaccaccgctcaccgcagacgtggtggctgcagtcagtcttcccgagtgagggatttcgccgcccgctttcaggcccgtgtaagttttcctccttcgggagcctcagtcctagtggccgaccttgcctctcctcccatagctccggcgaagcctcagacgctcgcgacctgccaccgtgaggggccggggagagcgaagcgcatgcgcctcggctccgaagccagtgccccggcatacgccctctcgcgtcccattcccctcgcttcccccgttgccttgctttgccgtccgtggttcaccccacggcagtcactttacctgcgtgccaggccctgtgccgatagccagggacacagcgagcggcgcattccttgcccttgcggagcgcacagccctgggagtcgacgttaagcggggtaatccctcggcgcgcagtgagggtagagtggagaaatcttacaaagagcgcaaaacagaaggcgcggatctagtcggagaggtcagggagccctccccgaggaggagaagtttgagccgagattggaaggctgtgtagagaattaaggttgtgggacggaaagcacttggcggggccttaccccggtacttctcggccggggcgattttgcttccctggggacattggtcgatgtctggaaacacttttgatagtcacagctccagggcttgctactggcatctagtgcgaagaagccagggatgctgttacacagcctactgtgtgtaggacgcccccaacaacaaagaaaaatcccccaaaatgtcagtagggcggaaggtgaggaagcttccttcagcgagaaggagctggtgctttggttgaactgaaagttagtgtgttcaggtttatttgttcaacagtatattcaacgcttacttcacctcagttaatgagagcgatcctttacaccagtacattcccaacacgtggctcagagccaggcgcatagtaggcacgcagtaaatttcggttgatgaattgaacactgggataagtagggggcggtggtgatacaaggacgatgaagctagccaggcctcatttatttgccctcaaaccttgtctgctttatagtgatctggtggttttgtatgtctcacgacttttcttt

SEQ ID NO: 33230 - DNA, 5407 bp, Homo sapiens
gggtggagggcctgggactgaaggacggactctattcagactctataaaaatacaatcaaggtaggaagggaaggaaagtggattaagctgtcaggaagagagggaaacagacagacatacatgaatagatggtttttgtaataaagtctgactccactgaggtgagagtttgaaaaggcaggacttgttccagggctggatcctccaggttccagcttctccagccccccacctagtggctactagctgtcatattgtctttcttactctctttattcctctgacacactgtgatcaggctggctggtggccacttttgtcagggtggcagggagagattgaaaccagtgtctcctcagatttcacggttcacattaagccttctctaatagcctggctaacagagttggctgagggactggcttgagatagagttcctaggggcgggagcatcttctctggttcttgaacagaaacttggatgctgatgattcagaaccagttgagggttggcttcctctccagtgctagagccctgtgggcccaacctacccacaggaagaaccaggcctgatactgatagtgggagaagtgctaaaagcctgttggcaggggtagggttggggaaggagggacactgcctatgactcacccatcccttccacacccacacactcatgcacagatactcttcctctccctgggcctgagttaatgtgcttacccatctgtctgctcagctttcagtgcaaaaccaggacttgattgagaagaatctgacactccaggaacacctgcgccaggcccaaccagggtctccaccttcaccagacacggcccagctggcacttgagctgcaccaggagttggccagttgccttcaagatctgcaggctgtctgtagcattgtgacccagagggcccagggccatgaccccaatctctccctgctcctgggcattcactgtgagtcctcagaccagtctggggcccaggaaggagggtccttctttctcttctctcccccatcctgctttcccatattcttgtggtaatatgtagacagagtacatagtcctggccactgccctctggacatttatttgtttcacaaagtaggtgttcacaaatctgtttttggaaacaagctatggggtacttgcatgcaggacaaactaaaagtggaccttcagcagcaaattaacccactgtccccagatgctttttttaaagtgcatgtcccaagactgtgggttcaagatactgcctatccatactgcaccctccacatgaaaatgtctcataactaacattctcttgaaatgctcttctccccagcagcacagcacccagagactcagctagatttgcagaagccagatgtgatcaagaggaaactagaagaggttcaacagctgcgtcgtgacattgaggacttaaggaccaccatgtcagacagatatgcccaggacatgggagaaaactgtgtcacacagtgaggaattctgggggattcccccagggaggagctgggctgctgagagcctagtccagcaggtttctgccctgacattctcttgtctgctattcccagagaggtctcagaggggaggggagagcctgcatctgggggccaagggctgattagggaactgtgtcctacccacactggcatgttggattacgtttgtcctgttaattcactctagacggtgagttactaattaacttttggcaggtacaacagataagtcctcacaaactgttcccagccctaggctgacatgagagacgaacaggctgtccacctttcttctccatccaatgggatggatccatgttcattcccacttcacaccttggtcctgctgattagagagctcatcagaggggcctggaaaggctgagcaagtaccagtgacaatggccatttaagaattctcaggccccatgtgccagccttcttgggaactgagctggctttctgggttttctcatgcctggtcttactgcttcttcctcagggctcttgttctcccagaagcctcagggtaatgtgttggttagcacgtaactactaggattggggccctagggattatagccaggactctaatctgcctaccatgccatttaacaagagatcccactctccagctgccttgtgtccctagggtcctggccatgtgtttagtgtgctaaactttctcctttgttctcaggccttccaggtagtccccttcctggacttaagagtgcaaactcttctctgtggttctagccttgggcagaattatatcccagagaccacagagcaactgtcaagctgcttaccccctcacccagggctacagcctgtgcccagccctctaatttgtgcctctcttgtgttgggggtggtgggggttattcctttccctttcctgctctggcctccttgaaagttcagagtacccagtacaagtcagctttaaagtacagcttttagtgtttcctgggttgtttctctggggctttagtgagggacctttgccctctggtttttcttgcctcctggtttagggagcatctcacacttgttagtatctggttgttgggccagccgtgcctcctctagatctggagccaggccaggcaggggccacgtgtgggccagtcagccactacaagatttttgctaagctttgggctgttggcagcatcttggacctcatgcctgggcctgaatgaggctctttcttaagtgtttttacaagtttgtgttttatttatggagtgacttatcccttccattcagagcagccccacccagccagcccttcagcctctgggctcctgctgcttaaaggcagagccgcctggttggtctccaccctgtgcattgggagcccagccaccatgctgacgggtatttttcctcataaagtttataaccagttatttatatgaatctttgttatgtccatttgtttgtattgcgtattttgattataaaataaagtatcttaacagactcctcagttttccatacccttccatcaccaccaccacgctattctacccctcactttggcttgttagagccaaacacctgggtgttcagccaggtcccccaggcagcagcgtggaggaacctttggcaggtccagccagcctcatgtccctatctatctctgccacctctgctcctctgtcgttctatagaaccagatctcttcccactcactttctcttgggcaaaccttccctgagtcataacagaagtttgtcactggaaagtttcagcagtcctctcaggaagttggcagcctctgggttgctgtgaggaagtggctttaccagagcaagggttgtctttctgggctgttaacctgcctgagccctggaccagggggacatctgagaagcatgatgttgagtgccagacagctaggtctccaaagttgggctcgttgctggagtctgccccctcaaccgctgaattcttgctgggagtagtagcagtttgggaatgccatctgcagcatggagctggggttgagcttggaccaccccaagacctggggtggatcttaagggtcagcttgagcctaggctctcgagtcctgacatcatcctctaccgccacgctttccagctgtcagccttggtctccatctggttccttgagggtgtggcctctgcgtcctgctatcacccttccttgtctaaaccttcccacctgagtggagaggaacttgggggaaaatctctaagcatgggctcttcctgctgtcctatgcttcctatcccctagggttagtggtgcgtgttgggtggtggagcgagggatcccttggagcaaggttcttagagaactttgggtctgaaagcagctcaaaccttccaaagccccaagcttccctgtgctattagagcacctcctcctggagagagcggctctcgtggctggggagttggatgcaccaaacctgtgtgcggctggagagggaggcttctgccagaccctctcccgggcctgtcctgccacccaggcccctccccagtctcacactgagctccagatcagggaagggccgaaaaggacgatcagggcagccgcagaaggggcgccctgcgtgggacgggtccgttgcgcgcctggtaaccgagggggaagggaaggggcctctggcgtgcggggcggtgtcgcgcaggtcccaccccgcctgcccgcgccgcccattggtcccgagcgcgatgacttggcgggcggagcaggaaggaaaccgctcccgagcacggcggcggcgtcgtctcccggcagtgcagctgccgctaccgccgccctctgcccgccggcccgtctgtctacccccagcatgagcggcctgcgcgtctacagcacgtcggtcaccggctcccgcgaagtaagtgcgcgcccggactggcgctgggggaaagcgcagggctgtatcccggtgctttggaccctagcgcccgggacccacccccaggacgggggcggggtggggggagtgcgtcggcgaggtgctgggcacggtctcccggacccggtcccgaggccccatcctgaatgtcttcatcgggcatcctgggtcctttgcagccgcggcatgaacttcccgtgcccatcccccatcaaccccacacccattctctgcactcccactaccgggctgaccctgaccacgaccgcagcctgccctcccctcccctccccaccctgagcctgatcccacttcccttcactctgaccccctcccccgtggctgataatccctctcttcatcctgcaccacctcaagcctgactcatcctcccaactcctagaggccagaaccctcccctagtgtggaggggaatggggggacaaaagctcctggtcacagcctctctcaccctgcccagcatttcccccataaatcctccagcctatccactaacccctacccaccctctgtccccagatcaagtcccagcagagcgaggtgacccgaatcctggatgggaagcgcatccaataccagctagtggacatctcccaggacaacgccctgagggatgagatgcgagccttggcaggcaaccccaaggccaccccaccccagattgtcaacggggaccagtactgtggggtatgggctgggggacgggggggtggggggagtgttggaagaggactctagccagggtcatatctgccacaaagcacttgggccccctgcattcaggtgaccacccctcgcctccccttctccaggactatgagctcttcgtggaggctgtggaacaaaacacgctgcaggagttcctgaagctggcttgagtcaagcctgtccagagttcccctgctggactccatcaccacactccccccagccttcacctggccatgaaggacct

SEQ ID NO: 33231 - DNA, 618 bp, Homo sapiens
tcactgtcctctggccatggaaggatagaagaggatacagaggcggggacagaaagacccctgaggctggctccttacccaggattcataggctccgagggcaggggcacttttcgggtcttgctaagggaggccaaaggtgagctcatagttctacttctagaatccagctgtcaggaactccctagaggaatgcaggaagtcagcccctggggacagactcagggctccaagcccagggggtagcctgaagtttccacttccctggctactcttcctaatgggaagcgctgtctaggcagcagtaccttttgcctcttccactgtctccacagaggtttctggaagtttctgttatctgcctgctcctctgggtatacggctttctgctctgaactgagagacctttggcctggtggtgcttgggaaagtactgtgagggtgggatgggatgcagaaatgagtcagaagcctggaactttcccaaacttagagcctgaaaatgctactacccaggaggctgtccgtccatcagccagctgggtgacacaaagcccaagtatctccttccctcccaccagaaaccaggtgccactcccaacatctcagagccagaga

SEQ ID NO: 33232 - DNA, 1419 bp, Homo sapiens
ccttattgtggccccgtcacttccatccatctcttcctaggtggaggacatcacaattcattctgggtcattgtagcagcaaccccactgccttgccccttctcactggtctgtggctggcagggccatctttctagctggtcctgtcactcctccctgcatggaacatcaccttggcagcactggcccctgccccacccaagccctgagtgttagtcccaccatccccgcaccactcctgtatctggatgcaccactctgcatgtaatctttatgtctatgggatcatgggttccttacaggcagggctgtgtctgatttctttccatgtccccaggtcctctctcagtgggtgctcaatgaagagctagcaaactaaactggctttacagccccagagtcaaggggacctggggcagttctaaaaacactggaatcaacccctgcaccagcacacaggttctgtgtccagaagtcccacagcagcaacttctgcttccgggattgcctggaaccagacatggaaactcaccagggataccttctggagagagcccaggactgtggaggcgaggcagcccatggccgtgagagtggggaactcgccctcagagagaatgtgctggtcaccctcgaagttcgtctcatcaaacaggatccagctagggaaggggaagaaatggagggtatctgagcctacctgtccttggcctgcccaggttcccctgagatacagaagagggaatgcagacttgatcatgatcccctgtcccaggggaggtgggatgaacaggcactacagcagcagggaatgaggtcagacctaagaaaagactgaatgaaatcatactgcccctatggaggggaatttggcaatattaggcaaaactccatgagtaattactcagcaatctcatacctaggaatccatcccaaggacaccatttgaaaacatgaaataacacatgcagggggctattcattatggcacttctgcaatagaaaaggggggaagcagcccagatgtccatcaataggggattggagctgaataaattaagaaaaagtgggctgggcgcggtggctcacgcctgtaatcccagcactttgggaggctgaggcgggcagatcacgaggtcaggagatcgagaccatcctggctaacacagtgaaaccccgtctctattaaaaatacaaaagattagccaggcgtggtggcgggcacctgtagtcccagctactcaggaggctgaggcaggagaatggcatgaacccaggaggcggagcttacagtgagctgagatcacgccactacactccagcctgggcaacagagcgagactccgtgtcaaaaaaaaaaaaaaaaaagaaagaaaaagtggagtataatgcagcagttaagtggaatgaaaaagagct

SEQ ID NO: 33233 - DNA, 884 bp, Homo sapiens
tgcggagtccctgccttacctttgagacgaagtgcagatcgtgctccccgacctgaaggtagggaccgaatcgagaattagggagggtgccggcccctagccttgtcttctctaggtttcagtaccgtccaccccgcggccgcgccctcggccccgcccccttctaaggccccgccccaagcgcccaggcaggtcctccagcccgctacctctgcgtgggggcggggcgcacccgaactccaggtcccgccaccggggaggccccgccccccgcggccggcacgcacctgtaggaccggctgcagcgaggcgagggtgctgttgccagcgccccagtcctcgcagttacgatacacgcccttctccagcacgtactgttccccggagaagcccacctcctggtaggccacccacctgcaggaagggcggggcgcgagtcagctgggacggagcctgcacctctcctggaaccgcccccggctcgcccgggcccgccccgctcccggagcccgggtcacttacacgccgctgagcacgtggatggcctgtgtgctggggccgtgttgcaccagctccacatccggcaatgccttgctcacctccacgccgtgcccctcgaagtccatggcctcaaatagcacgacggccgggtccccgaagtcctgggtccccagggacagtcaggtctctcccgcccacaaaccgaaacccctgggagtgcccagaccccagggtcacagcccacccggggaattaggggtgaggctgtcagtacgacctggagaagagcagcaggggaagagaggctagacctctgggaacacttacagggagaacacggagagggggtacaaattcttccctccacaaactgtactggggga

SEQ ID NO: 33234 - DNA, 2578 bp, Homo sapiens
cccagtctggtctcaaactcctgagcctaagagatctgcccacctccgcctcccacagtgctgggattacaggtgtgagccattgtgcctgaccggaccagtggttttataggaagaggaagggacacctgaactagcacctcagccccactgccatgtgatgctctgagccccctcgggactctgcagagaatcaccaacaaggttcttaccagatgcacccccttgaccttgggcttccaggttcaggtattccattataagcaacagaaaatagactaagctccctaggaactctcaggtgaatttctctgttttactagttgcaacaacaacaaaaacagccatttggggagggctgactctgccaaacaccttgctaagtgctttagattcattgtcccattgaagcctcagaagaatcccaggagcttgagacctcataaagaataaattattaataaattagatcataccttcccattttgcagatgagattttttaaatgctcagagaggttaagaaacttgtccaaagtcacagagtaaccgaaacaagacttgaaccccaaccctaagtgctcactcaccataccaaactccctaatatatgtatcctataactgagtctctggtttgggggtttacatttacagggagccatgtcagtcctggagggcgtctccacccccactccctgacttccaagctacactgaccagggcaatcctattcttaggccccacgaaccccagagaggccagcctgttcagcccgagtctttgggccttctccatgaggtaccctcccctccccaagagacctgactctgggcaggaaatggacccactgcccccactcccctcccccatttcccattgtcctccttcctgagaagctggtggaattcagaactttgacccttccctgtggccacagcagtgactcaggctttatgaggggcagagatgaaagagactgaagccccgggaagcctgacctgactccaggactgctggtggctatgacagtgtcagggacagggtccaagggggactggaaggtggaggggttaggtagagccctggtcattttcccaggccagggcttcctgagagcagtacacagccagacaccaaaggctctggattttagcctctcactgaggccccagcccactcccctgtccccattagggagctccctttttcctcatgcaacccctgccctcctcgctgggactctgcccaaatgaagtttgacgccctcgctgagcacctcctaagcccctgtccacctgccttccactctccgagcttccttgtctctgatggtgcttatagtaagtggcaaagcttgagctctaactcattcattcattcattcaattactcactcattcagtgctaattgtatcaagggatgtgctaggccttggctagactcaaccagaaccagagccaactttctcatgaaaggtggcatattaagaagccaggggccaaggaattagacataaaaacagggacatttggaaagcgccataggcatcaggaaagcgacaggagagcaatgttaaaggaggcggccgatcatgagatcagatattgtcgatgacctcctaccaatcagaatttaacgtctttctcaaccagcccaacccctggacaacacccctgatagccagtcattccacaagcatgtggtcattggcttctgcctgcatacctccagggacagggaggtcaccactcgacagttcacctgccccgtccctgaacagtcatgagtgctagaatgtccttcagactctgctggaatgtgcctgcctatagatgcccccttttgtccttgctctgaagacataccccaatacaatgacccaggatgcctctcctgggccagcagaaggggccattcccagagccctttcttctgcagggccccagaccagaagtggatttgttggcagcgtgacctgtgacctccaaacaaggcgtgtggagctgggaagggagaggctgaggagggggcggggggagtgtgggaaagagccttgtctaacccaacaagtcctggattctccccacttacctgtgagtcacccccaaactaggccaaaccagtccacaggcccacatgcaggcaaacacatgctgtgtcacacagacgcaggcacagacacacagacagataccgacacagacccacaatcacacaggcacaaagatacacctagaagcctataaaaacatacacaaccagggacacacacacaaatatacactcacccaagaaatacaaacacgcacaggcactcagagccacaacagacacacaaatcacatacagacagaaacacaggcacagtgacacacacgtgcacacattcacaatacacacacagtcaattcacagccccaagctctcttccccttgaaattcacctacccctgaacgtggacacacacgcttggatgcacacgtatcttacacattcccactggcagtcccagctatgtctcacttcttctcgactcccatatttgccaatcttggcccagagaaccttctcccag

SEQ ID NO: 33235 - DNA, 1173 bp, Homo sapiens
cacctgagcctggggaggtcaaggctgcagtgagatgcgatagtgccactgcactccatcctgggcaacagagcaagattccatcttaaaaaacaaataagtaaatacataaaggatataagagcacagggagcattccacattaacatccaaaatcgtggtacattgatacacatatttttatgcttcaagatactcatacacacttatttgatcaaccacaacactctaacacacacacacacaacccctcagacatcagctaccagtgcacgggctcagagaggtgaagcaatctgctcagggtcatataaccagtggcacctacagctaggagccgggtcttgcagtctggcagtccctgcaggcaacaaagcttcagaaatgtgggctctgaagtcagactgccaaagcctgtgtcccagctacaccacgccccagctgtgtggctttgggcaggtgacgtcacctctctgaacctccatttccttatctgaatcatgtggaatacctgcttcatagggctgctgtgaggattacgtgagataatccaggtgaagtatgaagcatgtggcaaataaaggcttattgttattacaatctagagctatctccaggggtggggacgacaggggaaaacctctccgtggcatctaagtgcaaatgcagtacagtctcagacggaacctgtcaggttcatgacaaagggatatgaagaaatcagctgtgatgcgagaatcaaagtccataggggagggaagaactactgcctttgcccttaaactgtctctgtcgtctgcaggctacctgcctgacttaggaaactgtccacataagttgtaaagttttaaaagagcacagggaccattccacattcacatccaaaatcgtggtacattcacacacacacacacacacacacgtgtgtgtgtgtgtatacatatatatttttttcttcttcttcttcttcttttttttggagacggtgtctcgctctgtcgccaggctggagtgcggtggctcgatctcggctcactgcaacctctgcctcccgggctcaagcggttctcctgcctctgcctccggagtagctgggactacaggagtgcgccaccacacccagctaatttttgtatttttagtagaggcggggtttcaccatgttgtttggcc

SEQ ID NO: 33236 - DNA, 499 bp, Homo sapiens
actgcactccagcctgggtaacacagcaagactccgtcccccaaaaaaagtgtcttcattcatctgaaatgtgtcagtgttaccacagcgggaaccggcattgaggaaaatcaggttttctgggaaagacttggaggtgggaactcaagaagttattctcaaaactgtgagctgggaatcaagacagcgtgactcaattcagcaccgtggacagagctgctggagccctcaggaccctggacagagaagcaggccgcgcattcccggggaaccgaattcgcatcacttgagaacccacctagagaagccagagcgttcaactcccctttccctcccttttcttcagccagacctcagccacttgctcctgagtcttaggaacagaggtacacggagcgaatatattttaagggcgccactaacagcgggagataagacttttgggagaggagaattatgtaaataaaaatggctttggctgatgtactaggagaactct

SEQ ID NO: 33237 - DNA, 1670 bp, Homo sapiens
tagtacagacggggtttcacgatgttggtcaggctggtctcaaactcctgacctcaggtgatccgttcgcctcggcctcccaaagtgctgggattacaggcgtgagccaccgcgcctggcctagaagtcattcttatggcagaaatctttctggccttaccccttctcttgagttcgttgggataggtcttgggaatccacaaatcctaaaatatgcgtgccttaagtcggcacaaaatagattaatattctgcgcgtctgtaagattggctgcggctagaaactccttcccagacgattaaatccactaaataaaatacgaaacggtaacgagataatttttaagagtatgcaccagtgctctaatgaagcccggttctgcggcattccaaggtaaggacgctgccttacccagtctctcagcagtcctaagctgccttcgacggccgagaagcgcctcgattcttgcccctggctcatttccctggcgcgttttccagacgcctccgctcccaacgctgggctcaaccctgtcttccccagctggtctcccagcacgtggcctggagcccagcctcccgccccgctcggtcacgtgagcctggctctcacccgcgccggcttccacaccccgcgggactgagaaccgccctcccactagctcgcaggcgcaggcgcagggcagggtcccctcagtttgggtgacggaaggggcgtgtcgcagcgcccaaagatgacgtgttctgccagcgccacgtcatgaggaagtgccggcccactgaagccgtggggacgcgcccagcggagctaatcaggtgccactgaactgaaggggtgaactagaggagaagagggtgactgggcggggagcagctgcgggagaagcaaagggacgactgagggaataatcaggagaccactgaggcgtgaagtactaggcgtgcgataactgaaggagttagtaactgggagcacagagttggaaacagcttaggggaagatggagaaggaagaaacggggaatgatcaagatgtgggcaccatgatgtggcaggaaaccgacttagatgttcagaagaagtcagtgcagatacggaggaaatgggaatgggaagaagtctgcaaagccaggagaaccgaggaaaggcttttgcctccagaggtcacattgcgttataaaactctgggtggtaaaagattataggcttagaccagtgtctttggattctaatgctggctgctctccatagtccatctgattccccagaagtcagttatagctcttcgcaaaccttggtgacttcttattttctttcttgtttatccaagattacctggctggtgtttgcttgttctggagtgatcttctgactggaaaagaactatgtcatggatcaaggaaggagagctgtcactttgggagcggttctgtgccaacatcataaaggtgagcaatggcccagagcaccggttggccttctggtcagttggataatcttatataaaaacctgttattaaagttgatgatgttaagtgcaattcatgatgttaagtggaatttagcaaggaaaccaaagagtcttagaatggtaacttccaggtctacatttctggtagacttttgtcctaactctgatattttctggaagcccaggcctcttaatgtcac

SEQ ID NO: 33238 - DNA, 1632 bp, Homo sapiens
gcacggcttggagaagtgggttgctgggttgcataaggtggaaggaacttgctagtttgcaaaagacagctcttggcgggagccggaacccggagcccgccgactcgcgcacccctcctcatttactgccttcgacgcgcgccaccccgactgcgcccccaccccctcggcgcgccgccgtctccgcgcactaccccccccacacacccccctcctcactccctccagaggaggtgagtttaaaccccgcccacgtgaccccagctgggccaatgaacggcggcgggaggtgaaatccggttctaaccggtccggggctcccagcgctataaaaactttataaaccccccggagcccgagcagtgtgaagaagaggcgagaacgacccccggaccgaccaaagcccgcgcgccgctgcatcccgcgtccagcacctacgtcccgctgccgtcgccgccgccaccatgcccaagagaaaggtacgtggcgcgagggccccaggcgccgggccaccactgccgccaccgccgccgccgcctccctggtgcagggagcgagaatcggcgccgagcaggagccagcgcagcctccccgcgcgggggctggagacggtgtcgggcagctcggggctaaccctgagcggctcggctgcccgcgggcgccagaggccatattggaggagcggcggccgcggcgggaggagccatgttggcggctgtttatcccgctctcctcgggctcgccgcccccgccccgtgccccctcccccatcgcgagggccccttccctcccctccctgcgggcgggcaattcaaacccgaaagggcgggaaggcggcgctcggggttggcgggcgggggaaagcgctgccgccaaaaaaccgccgccgtgaggggcggggcttgtgcggtatggccccgccccctcgcccacgttccccgcgcacgagacgcgcgctgtcgccgcccacgagttccccgggctgcgcgcgcctccctctcccgccctcgacggctgccatagcaacggcgctgggctccgcctccggagggggtttgtttgcgccatctgcagctgttgctcctgcctgtcgcggtggtgcgggctccgctgccctccccggctgcgctccggtccagccctcgcttctcggggtcggcgagccggagctcctgcgcgcgcttcgttcttatacgaacgtcgggctcactcatttatgtcctagaaaagttgtgtggacgactgctttaattttcatttttagcactctaaagtttgggaagtaattaagaaccacctcaaaatctgcagttttttgttcttgtttcttataggctgaaggggatgctaagggagataaagcaaaggtgaaggacgaagtaagtcattctctcttcaagggtcaaagccttggactagcagaggccactggactcggtgattaaccgtaacctgtgtcctgaatttacactcctataatctagagcaaattgataccaaactttcaaagcgacttacctgtcctatttctaactttctcgttgtctttaatagccacagagaagatccgcgaggttgtctgctgtaagtgtatgcttttgaattttcgtgcttgtccctgaaactaaaaaa

SEQ ID NO: 33239 - DNA, 2078 bp, Homo sapiens
cccagctacttgggaggctgaggcaggagaacggcttgaaccttggaggcggaagttgcagcgagccgagatcatactgcttaactccagcaaaaagaaaaaaaagaaagctggggctgcgcgcgggggcttatgcctgtaaccccagcactttgggaggacagcctggccaacagagcgagaccctatctctatttttttttaaaaaaataacaaaacaaaaaaagctggttggttgttgggaggcctggctgcttttgggaaggataatcctcgtccacaccaaggtgattcagtgagcagggtgagggcagatgctgggtgtccacgccccggccccacagcagccagaggaagataccagcccgcgcacccgtcgccatggcaacctcaaccccactcctggaccctagctcggaagggggcagggtatcgaaagccgatcgccagaggctcctcggtgcctcgtgcgagtccccgccgtcagccccgaggagcctcctggcaccaagcaggcgctgcccccttcggccacacggtggcggcgcagagccgagctccgcgccccacctgggaggcggcgcccgcgggatggggctcctcggcccagctccccagcctcgacaaggatacggcccgacatccaggccaggagcgtcgctggggcttaaccgccgttccccaaggcgcccctccactcctccagcgggctcccgcatcccccattatccggcggaccccaacccctgctcacgtgactcgcccgccaccctcgaagaactctcgtggggccgccccgccctgccgcaggtcacgcgctgcgcacctggagggcatctggccagccgccagctagagcctgcccctgctcaggctcggctcaacccgggcccgcgcctgctccgagcccaggaagagcgtcctgtccagctcccaagtgcgccggcccgtggggaaggaggcgggagtgggctccagcggtgcggccctcgctcctccgacccggggccctctccacctcgggggaagaaagaggcctctgcctccgcctccttccctgagcgctgccaccctcactccggccctctgaccgcgggtcccggacattgcgcttaggggtcgccttgcagggccagagaagctggcagaccacgcgcgcgcacgtgccggggcggggcgtcaccgggggcggggcctggaagggcggggtcggcgggctcgggttcccgcggggcgcgcgcggggtgacgggagccgggactacgcggaagtgggggtaggggccgcgggacggggaggggcgtccccagtacccgcgagtggcttcagggagcgcaaggccagctgagtctgggcgctggatgggcggccttggcattaggtccagatttgggtcctaagtactgtgcccaaccggcccgaggggaagggggaggagacaggaaccgcgcccattttccggatcaggttcttggaaccagcccggaaatcctgggactcaatctgggggccagatctggaggcgatggtttttctagagacgggctgatgcagccccagtatgccgtcgcactcatttcccacattccaggaacggtccaggtctgcccttcagcggtttgggaactccgcgacgactccctctctccacaactgcagggtgggccgcgctctgaaaacctggcaaagcgatgggggtccctcagagcccctccttcatattcagtttcaaaaggatttggcattggggaaaccttgggacctcaagccacatggagaaagagctccaggtcacaagggcttggacctgagggcacctcggctggctcctttctcgtgcagtctttgcaaaagaggaccaggtggtggccagaagggcactttgagggctgaagagctcaaactgcacagggataggaccgaggtgcagagtccttggggccctttttttttctgtcatatcttgttttgccattcggcctggaaatacctggaaattcttcctgcctgtttttccctcagaaaagttttttttatgtaaaagtggccaggcacaactgtaatcccagcactttggg

SEQ ID NO: 33240 - DNA, 2524 bp, Homo sapiens
ttatacatatttatttatatatgtaatatttatatacattatgtaaaatcaatcgatcaatcaatcactctgtggtggcactatgggtcctgatggtggtaacaactgctgatgcccatcttggcctggggcactgagatcgcccggagatcacagtgttagcttcagggcggggtagaaattagaggataggggatctctagggcctggtgagttgagggcctaaggggagtgggtctcaggctccttccaagcctcagcctagatcaggcccaggaacccagtgtgaatgtgtgtgctggggtcggggataaggtgcttctctcccgttggaaggagaaggaacatctgggctgggattccaaaagagctgagcgggggagaacggtggccctggtgtggtgtgtccaggggtacaccactggaagggaaggagccagcagggcctctccggcggagccgagcgcgggccgggggctcgcggcaggggcggggccggccctcggggcgcggcgggggcgggggtccgcgctgggaatgccgcgccgcgggggctggggcggggcttctccggctccgcccccgcgcaggtagccaatgggcgcggcggcgccgggtgacggagggagccgaagtgctagtgccgcggcggcggcggcggacggcccagccggagcgcgaggggctcgggggggcgcggcggttcgggtcgcagagccagggaccccaggacccgggaggcggcgcagccggggccgccggaggagcgcgggtgacctggcggcggcgagatgccgctcgcccagctcaaggagccctggccgctcatggagctagtgcctctggacccggaggtgagtgagcggggcgggggacgggcgcccgcggccggcgagcccggatcctcacaggggcggggcggcccgaagcgccgctgcagtccggcgggcgcccgcgagggcgcgagtgccctccgatctcttgcccactgtccggctccacccccctatgcccgggtgtgcgtgtgcgagggacagttccgccaagcgccgactacctccccgccatagccaggagaggggatcctatggggcgctgagatctggtcgccttcaccccacacctaggacccgtcccggcatctgtccagagctgtcggagcttcctccattaatgcagacggggagatcttcagtgccagatgtctgggattctaccagagacaggggttatgggacccccacttctcccagggccctccgccaagagctccctgcttctggcttcaccgctgctgagcctagaaggattgctcctcttgacccctggcggatgcggagtgtgggatggcaccacccgtctggggctggaactcctggttttctttgccctgaggctagggccagaggacacctgtgtgccctaccccaggctgtggagacgagagtggggaagagcccttagaccttgtgaagatgattcctggcagggcgtggggggaccttggtgcctgcctcccttcttatgccccttccggtaggaagggctgggcccttggggagtttggcttctgccagcccagactccccagacaacccagctccttctctctcagaagcagctcctgacctcccttgagggctctgtggctccagtccctaagcgtgcagaaggccacctcttcctgtgccttttgaccccagggtcaaggtcaagcccctgaatgagctggtggaaaacttcctccttaacctcttgctgggaaggaagcaggtgatattctccttcccaggtggttgttgggggtatgcagggagggaatggagacctcatttgagcccaggagctgagatgactttctcccagcttgggcctggagcccctgtctcagtcccctcctctgccctctcttacctagggcagccaccaagtgtcctgcctctcaggaccacaggcttagatcagggtgagcacccagggtccccagcccccagggtgtgctgcccctttaaagggatggccgacactggctattggagggtgggcgcggcaggattaggtaaccaacctgaaggagcaatttggagtaaattgctctgggattcctgccatggggattttacaggcactgctaggctgctcagaggttctctcgctgactcaccctctgaggtgaggaacactgccctctgcagcccctgtactgccaccccgctactaggaccggggcgcaaggtcctgggggtggtgctcagaggtggattcctttgcccaggcacgcccctgggaccaggcctccaaaggagaaggtagggctgggagaggctggggagtgactttatgctgatagggagggtggacacccaggagctcgatcctggggcaccacttcctgcttctctttagggaatcctgaggcaggggccagcttcaccagggagccaggtttaactgggaaactcatctcagttttgagttctgtaacatctcaggtctgtgagaggggaagaccagcggacttcct

SEQ ID NO: 33241 - DNA, 3290 bp, Homo sapiens
acatgacctccttccactccccgcccccccaccccgcccccgaataaaacccacttttaaagtcttggtcatatagcagtttagtacagaagtctacaaaatgtcatgggttccacagaaacttacgtttggttgtgttgtatggtctacaatatagatgctacactaacactgaagaaattagcttagattgtgttaaatcgtgttaaaacacattaaataaatgcaaagagcccagaacaaagaaagtgattaagctggtttaaccgcattcagcccactatgctaaatccccttagggggctcaagttaaacaacaaatttggtttcttggcctaaatctttttcttcaaagaagaaattttcctgtgattctgataagtttgttttcatttttcagtcccaagggacgttgggtgaaaatatcctatctgattggagttgcatttgaggaagagatgtactagagaatagaatagagggcgacgggttattgggttccttgaacgaactgaggcatgggaggtgtgcgattgttcagccccagaaaaaggccagctagtgacacccgggatgaaaattttatccggcagtgaatcaaataaggctgcgagggagataataaggtgtaattatagcagtgctgttagtgcctgtttatggggtctggcagcaatttggttgatcacccctcattttgagaaatttgtaatttggcagtaagaattcttgccttaacatttggcacaaaccctcacagtttaatattgcaaaatctgggaaatgttgaaatgtggctgctattctaattgaactttttcaggctctttcgaattcgtgtttttcctgttggattcagaaacaaacgcctctcttttgaaaagttcatgaggtttttaaaaatcacaaactcaagtaagcttacaagcgaatgtactgctgtaaaaaactctcgtgacttaaatcttagtgtacagacgggggaaaagctgtcactcgaaaaacccgagttccttctgttggtagccctttaaaaattctccacaatcagtactttaattcatttggctcagagcagagcagcgtggcgtttgttgctcttcgttttaccaaccgaccgtttcccccaagattactccccgttgttttaaagtagaagggaggtcactaggcgagtgaaatgtggcccacgcagactgggacaagttggcccaacgtgcttctctaaagtaactggaagttttctgacaggaaaccggtcagttcttgtgtctctcagctctggttcccacggccccggcggcagctgcgcccccgacgcccctctcggagccccgcaggggcgcagagcactgtgggcggcagggggcagcagcgggaacccgttgttctagaggcgggggatggggcgggaagccgccccccctccgtttccgcgccccactccctcccctcccccgctcgcgccctccctcccatccgcggagagaagggcgggggcgcggagccctcccgcgggacagggggcgtgtgcgtcccctccgcacccctccccccggcccggctctcctggctccccgaggcgggagtttccaggaagagctcagagcgcggccgcaccaccgagcgcacggagacatcaagtagtccctcagagcgaccttgttagaggggaattctagttgcgaggggctgtcggagttggaaccccgaagagataaggggtagcggcccagccagcaggatctcaggtagttaggtctgagcgcccacttccattcctggagaaggatgtgtgggggaggcggaacgagttccggcggagggctcgggcgcgcccggtggagtgaagcgccgcgcggtcgaagggctcacagagttgaagtgggcgggaaaacccggagcggactcgctccgacacgcccagggcctcctgccctattcttcgtgggggaggggaacgaaaagagcaaaagagaacaacgtgttcccttcctcggcttcctaactcccggccgaggagacaggagcccgcccgccacttcgagggacacgctgcgggcctctcagatcccggcggggcgaggagggccgcgcggctgccgttctagcgtccgcaccgtcgacgctgagcgcgcggtcagaaacccgggtctgcggactagaggtgctgggcgcgcgcttcccgccccttttctgagcgcgttcacctccccctttcccccacgttcctcagccgccacctcagagccttccccgcatccagctctctctcttcgggagaggcggcccgtcttgcccatccactgaataaccccttcaccccagttttttcgacccgcctttcctgagcttcggtacaaactccgcagctagagctcagctttcacattcccgcctccgccctcagtctcccctcccaaccctgaagcacttcctgcaaactgccttgttctcgctcctctccgccccgccgcctccttgctcttactggatggctgctctcacgttggctgggcggcgggttatgatcctgtattcctgccttcctcagagagcagcctccttccccattttagagatggggaaattaaggtccacggctctgacggcctgacccctaaaggctcctcgagttcccgaaatccagcaccgtaactgccgctagaaggataaaccctcgactttctctaatttaagcaaccttagaaaaccagcgcctaaacctttcctcttaggaccctcaagctttctgaccaaacaccaccagcccagttagcaaaagccatagaaataatgtacatcgcaggtcaactgtgtaacgatgacttacgttagaagaagggccagtgagagattttagctggcatacggggtttatagacgtgagacaggttatcttttaaacgtaaagtcgtttttaagcacgatgtgtaatgctttctcttagattttgtaattatcctattcgctgtcccggctcaacactgttccttagggtttgagaacattttcatgaaatgtgacccctcaaaaaaacaccaaactaccattttaattttaaaagatagcttttcctggccgggcgcggtggctcacacctgtaatcccagcactttcggaggccgaggcgagcagatcacgaggtcgggagatagagaccatcctggctaacacagtgaaaccccgtctctactaaaaatacaaaaaattagctgggcgtggtggcgggcgcctgtcgtcccagctactcgggagactgaggcaggagaatggtgtgaacccgggag

SEQ ID NO: 33242 - DNA, 421 bp, Homo sapiens
gtgtgtatgtgtgtgcatgtgtgtggtggaggtgagggggagacttggtcctatagcacggtgtgcaatggtgaagaacctactaaattaattaatcttcacattagcagataactgagaatatgaatcactcacaggcagtcaaaaggtgatgtcagtgaacagttatggcacagcatgactgctcctgtttgacactgcatttagtcctagcactactgctattgcagggctctcctatgaattttattgtggaatttcagaaatttctactgccagttgggtgcagtggctcatgcctgtaatcccagcactttgggaggccaaggtgggaggatcatttgagcccaggaattcagaccagcctgggcaatatggcgaaccctgtctctacgaaaaaatttttaaaaattacctggat

SEQ ID NO: 33243 - DNA, 7107 bp, Homo sapiens
gtgagggtaatttttaatttatattgagacaaaataagctggctgacttatgcctgaggctctttttttcacagctactttggggaaaaaaagtctcattcagaaattaacatttctcaaaatgtgttccttattctgaaatataaatgaccccaaattgcttaagagtttgagatgagtggggaaaagatctagaaaagcatttattgtgtgccaaccaagtttgaggcctcctggtttgctcctttgggattctagatccttggcagtcacagttttaccgcgaagagctgttgaatgccattccgagttcattccatttttctccgtgtgtgcatccagttcgtattttacagctcccgtatgggagccggtaacataatgaattgccttgactctcgcttcaatccactttcctcgcttaatatgcagcccaaagttttgcagctcgctgtcagatggtagtgctagactttcacaccgatcccaaagcctccgctggggctgtttcttaacacggagttacaaactttaagaacagacagctccagacggaaatccacgccaggctttgaactctgcttctggcttccgtcaactgacatagttgcccttttgctcaaactcgcagctccagttcgcactcgagagagctctgctgggtgtctgctgctgttccgcggcgggaacgtgtgggggcaacaacctggcgctccagcgattctccacgccttagttaggaatctaagcaaaccctcgctagggtccctgggcttaagacgacttctcccacaaggattgggtggaggaaggagccgagcccgatcttctgtttgtttgttgagttttgtatttcagacatttaggggaagcaaattgcgagaaaggaagggctgtcttccctgcaaacgtttccctctcctagcaaaccctccaggcctcggttccacattttgcagttgactctctggattttaataggttgttcccttgtcctcgggcccaatccatgcacgctgtgcagccggataaaatgggagcacatcctctgccattttcagccggtttgtcctggcagccctgcccccttccttggctgctctgccgctggagttaatacgcccagaaactccgcctgatcctccaggcctcaaatccagtccgcgtttgctaagtgccgtgcggtcggggacggcgataagaactctcctgtgagggagagctagcgagactttagtccggtttccatgtcaacgattcagtccatatttgccatcaggctgttggccgaggtgctttcgcgagggtagcgctgtcctagtcctagttctccaatctgcgccgggattcctgagctgcctgggtgtggggttaaaaggcaggggccgtgggggaaaaaactccaccgaagggaggacccactgcccccagccggggtctcgctgctcgggccagccacgtgcccagctcctcccctcccccgctttcccgttgccactgcccctagggaaagctgatgggccagtttctaaaaaagttccctcagcccaacatttcctgggatcgtggtgtggggctctaaaagtaaaagtggaagagaaccctagtgaattaaaaaaaaaaaaaagtagagaaattccacattatctcctccaacccaggtggatagatttttgtgcactttaccttattgctagagaaaaatggtgactgttttcaaaacagcttgcccacgtgtagggaaggagatttttggcgctttccatatttcacagccattgaagaaaggggatgagggctttctttggagagaaatccattctagcttccagattttcactgggctccaggtttcccattacaccccagctctaaggaaaatggcagagtaatggcatgtaaaaaaatcctcatttgtgtgcaggactcaggactgtttgccagctcaggggcagttgattaaatagccaagctctatttatgaggcagcctataatttggtttctaggacctaatgcaccggggagagttgttgcccctgaggactgtgagtgaaaagagggcactggcccataccagtcagtcggatcttcttggtaggctggtttggttcttggcttgaggccgggggaggggagaagaataaaactgtgggattttttttttttttaaatctcatcactcttagattaacaggaaggttttgcctttctggtgtaggatgcagtaagttttcttggggagagaaatgagttcaggctttggaattattcatagtgaccagggacattgccagcactcccgggtcctgcataatctaagataatgctcctgtggccatgaagtctccctttacaaaatctgagggggaaaagagatcctggtgtctaggaacactggcctgggcctttcccaaggcagccttgggtctggtgaggagctggaatcccctctggcttttgtagcctgtcatatcagaacattccaagtcagcctgaggaagaaaaggctgctgctgggatttggtggggcctgtagatcaggagaacactggagctttctgtgtatgtcgatcttttcagataaacctggccttctacccaactccagctcaatcggggtctcttagaatgtaatggtaaactttaaacaatctttacgctacaggatagaaaacaaatctgacaagcatccattttctaagtgacttgttggactgtgccttttcttcaaggagaaaatggtttccattttctgcatctctcttctgtaatggtttgaacactcaggttcctgcagtccctggagcctcttctgtgggttttcagtattagaaggtactgtctttggagactggggctacttgtcatggtaggctaagttttcttaagagggagtgagaaacggtgtttaggttttcctgctgggtaactgttctatgctcctaaagcaacttcagtggcctccattttaagttagtggtgagatgatcagttttgacttcaaatccattttgatattctgatcccattgttgaatgtgctcacaacttgatttttttttttttaaaggcaagtagaccgaaggcagctttggtgactccacttctttttaaagtcaccctcctctgccctctgactttaagtgacaggcagttccctcccctctctttcaattctgtaaaatggggataatccggacctcatgcccccagagccttgtaaggaccggctaatgagggcaggcgagtgggaaacgaatcgtctgaacaatgatcagtcattctttcgggcttgcaaagagggtaaaaaaggttgggtctttagcggggtccgtagaaggctttgaagacgaaaagtgctgtagaggtgctaagcagcagccaacggaccgggcccgctgccagggggtcagggctgggccgaggcggccgcggtctcaggctctggccaattttgcagccgcgggtaaagttcacgctgcccgctcccctcggtacggccgggaggggacagacctggatagggacgccgggagggaggcggcgcaggctccagagatgcgcgggctccgggccgggttttctccgaagccttcggcggcggcgctgcctagcgaaagcggctgagggcctgccgccgccgcggcttgttctctcccctcctcctttgtgaagggaagggagcgagtccgttccacggcctgcgcccgctccgctctccactccgggtttgccaggcggccgcgacggcgctgggtaaaatggcagtgctgagcctcgtgtcggagtgagggggactcggaggagagtggggcgctctagccgctcagtccggccgaccgcttgctcgcccgcccgctgccgcgcagcagcctcgacccaagccgcagctggcgaggggaggcagggcgccgggctcggcccgcgctctgactctggctcccggcgccccggctgctgccgcgcgccctccagcccgcccgtcccgggtccccctccccccgctccctccctccctccccgccccctccccctcgcctccctccctccctccctcctcctttctccggcagcagaaagcggagagtcacagcggggccaggccctggggagcggagcctccaccgcccccctcattcccaggcaagggcttggggggaatgagccgggagagccgggtcccgagcctacagagccgggagcagctgagccgccggcgcctcggccgccgccgccgcctcctcctcctccgccgccgccagcccggagcctgagccggcggggcgggggggagaggagcgagcgcagcgcagcagcggagccccgcgaggcccgcccgggcgggtggggagggcagcccgggggactgggccccggggcggggtgggagggggggagaagacgaagacagggccgggtctctccgcggacgagacagcggggatcatggccgcgcaggtcgcccccgccgccgccagcagcctgggcaacccgccgccgccgccgccctcggagctgaagaaagccgagcagcagcagcgggaggaggcggggggcgaggcggcggcggcggcagcggccgagcgcggggaaatgaaggcagccgccgggcaggaaagcgagggccccgccgtggggccgccgcagccgctgggaaaggagctgcaggacggggccgagagcaatgggggtggcggcggcggcggagccggcagcggcggcgggcccggcgcggagccggacctgaagaactcgaacgggaacgcgggccctaggcccgccctgaacaataacctcacggagccgcccggcggcggcggtggcggcagcagcgatggggtgggggcgcctcctcactcagccgcggccgccttgccgcccccagcctacggcttcgggcaaccctacggccggagcccgtctgccgtcgccgccgccgcggccgccgtcttccaccaacaacatggcggacaacaaagccctggcctggcagcgctgcagagcggcggcggcgggggcctggagccctacgcggggccccagcagaactctcacgaccacggcttccccaaccaccagtacaactcctactaccccaaccgcagcgcctaccccccgcccgccccggcctacgcgctgagctccccgagaggtggcactccgggctccggcgcggcggcggctgccggctccaagccgcctccctcctccagcgcctccgcctcctcgtcgtcttcgtccttcgctcagcagcgcttcggggccatggggggaggcggcccctccgcggccggcgggggaactccccagcccaccgccacccccaccctcaaccaactgctcacgtcgcccagctcggcccggggctaccagggctaccccgggggcgactacagtggcgggccccaggacgggggcgccggcaagggcccggcggacatggcctcgcagtgttggggggctgcggcggcggcagctgcggcggcggccgcctcgggaggggcccaacaaaggagccaccacgcgcccatgagccccgggagcagcggcggcggggggcagccgctcgcccggacccctcaggtacacagctgagtggggagggggctggggcgagcgtggtcctgggggtgggtggcggctgcggtgagcgggccacagccttgggctcccctcagtcccgggcccccactgctggggagctgccattgtctggctcttctctcttaaaatggctgcctgtctgccttcctctccttccctccttcagcctttgtgttgggtttttccagaggtgtctgctcctctttttcctctcccctggtcccttcgaactccaggggtcttgatgggggtgcggggcagagtgtgcggggaagggcctggccgggggtgagggggtgagggggcgctgggggctcaggttaggagtgtaggcagtggtaggagcccaggagttgaatgaacgtttctttgctcacctgccgctcctctccgtcccccggccttcctctgggccgccccccatctgtgctttcaaagagggcccctagagctcgaggggacctcgaggggagggcaggggactgcttgggagctgctagaggccggctgcggttcacctagggcagcccggtccatctcctgtcttaggctccgccggcccagtggcctgggcttctccctggaagtgctggtaaacagctgagtgattggagtagtaagtgcagattgctttggtttgggatttgaattatggaggtaaaatccttctgtcaaagccaggagacagttggtcttaggttgacatcctatctgtgatctgattggctccccatctcctgctcttggccatttataattgcctctgatgtaatggtacaacaatcctgatgagctcataaacttttacactctgcttttctgccagtgataacccaaactatcgctgccactatctgccttttattccagagctgaaattggctgtgaccttgaggagggaggtttaagtagcaatactgtatcagcaagagcaaagcctcagacagcctgcccttgttacattgtgcccaaacaaaagaggaggcaatggcattttgcttgtaccttggatttattttgcttgttatgttttatgcagcctgaaatgaattctgtgttgtcagaacagtagctgagttttttctctacaatgggtttgctgtttgttttggttttgtgactttcctgatggtataaatgacttctttgatggctctgaagatgcatttatcttgagtaattttgacactggttgctttgcagaattgaaatgattttactgggctttttattgagtggcaaatgtgggatctttatggggggccagaaaacagtttttgttattttttttagaactgggagctttctgaggaattttatattaggttcaagcggtctgttttaaggaagactggcctcattctttgtttacatgttgaatcttgttaacactttcttttgttaattgaactttggaatagcagcttaatttaaagggaagctggtgtctttcatgatcttgagggactttctcctaaaggcttggtttggtgaaattgttt

SEQ ID NO: 33244 - DNA, 1875 bp, Homo sapiens
gcccagccttttttttttttccccccccctcaagtaatggtccatgacctgctgaaagtactggagtcttggataaacattctggtttagaaataccttttccactttttttgccttgccattttggcattttgcaaaagtgggttttcagttactcagaattgggcaccatagttaacctcctatggattacaggtgtttaggggcttgaactctgatcattcccaggttttagaggaatccaagttcgggtgaatattgacttagtagccttgagtattcttcctgaaattacccctcctctccatttaaatggatgaaattagttttttactgaatgtgaagggacatctgaatgaacttctgtttgtttttgttagtcacttgtgcatagctggaatattatcttgggacaggttgagtctatttcccagtggcttctgcattttctaagggtggactggaatgggaagaagtctaatgccaagaatgcattccaacatgctgcagagtaggaaatttgatccctaaaatgttgacttagtgttggtcatggtacatattagaaatcacccagtaatccaggacagatttttgtcaccctccaggaagttatgttgatataaatactaaggggctttgggtactgagctaagtgctctgcaggcccaaagcgctgcttgaattgctacccatatgaagaggaaatgtgccatgtgcctttttttctctcttttgcatttgggcttccttatggctttgttgcttttatgttcccaagtctgcaaagttagatattagacttcctcctcccttggcactggcagattcatgattttccatggctcatcactagcagccaagatttttgtatgcttttctctcttaaacttgttcgttttcagcttgcttgtttataggcatctctgttaaaaggaacccttcttttccccttaagatctagcaccaggggtgcttgggggttgttgtgatatcagtcaattaaaagcccatttggtgtgtgcttggtgtttttattttgctcatgttttctttgaggtcacaacgtgcttgccgggcatgagtgcctttgggcccagctgtttactctcaactgccgtgtactttgactttaagaaaagtgcaaattcagccacgtggtagagggattaaaggccacatagtgttggatgcttccttttggaagaaacagatatatctttgggctcttcttgcccagtgatttctcctgtctggggtagacattgttgctttctgttgtccttagagaacagggcagaaatgctgggaattggtttattactgtgtctctttggcaaatatgtatgtctttttctcttgccctttggacaacattctgttctggtcctaaggtgttggagttcacaggttgatctagcgttatgtgaaactcttggtaatttaggtttggataaccggcttttagtctccagatttctaacattgtgcttgtttaggaatttaggcttctaaagagaaccatattacaaagcttttggggaacaattctgtaggtagtttatctgttcttgggtcacagatcctcaccaggatcctgacttttttttttttttagacggagtcttgctctgtcacccaggctggagtgcagtgcagtggggcaatttcagctcactgcagtctccgcctcctgggttcaaggggttctcctgcctcagtctcctgagtagctgggactacaggcatgcgccaccgcggctggctaattttttttttttttttttttttttttgagatggagtcttgttctatcgcccaggctggagtccagtggtgtgatctcggctcactgcaacctccgtctcccaggtt

SEQ ID NO: 33245 - DNA, 703 bp, Homo sapiens
ggacggggtgcctttgtatagggagctctgaagccagacaatagtttgtgctggcggggccatgtggcgagtcatgtgacctggggctgttttctgctggggtccttacccatctgttctctcggctctttctgggttatcaggcgccagtccaagtcctcccaggcagccagcttcatggccagagattacgagcactaaccttcctggcaggggcggtgtggcttcgagtttatgcagattagccatgtgtttctcacttcaaggcgttccacaggaaaagccttttcctgtgtttggctctcagtgggcggttcccagcttactgtactgggactcagcaagcagcaggcatgcaccagagggatcacagtacactggcccccctctccattccacctccaatgctacgtcaccacaacacaaccactcgcgctctcatactgttggtgtcattcattcggtgccaagattgctttaaaaaattcccttggccccagttcaaacaggagtacagctgggatgtgttagattttaggcagtctgccctcaatttgagatgagttataaatagcagtgccgacttccttaactaccgctctctgaggtaaaatgcaggttaattactgtgggaatcaattaggggggttcttttggttaaagagccagggatgcatttttttaattattattattaaaagtc

SEQ ID NO: 33246 - DNA, 828 bp, Homo sapiens
tgccttttgttttttcgggtccctgttatctctcacctggtgtcttgccacaaacttctgactgttctgtttcttttcttcctcttttccttccaagtctgtcctcagcataatcaccagagtgatcatcttaaaaaaaaaaaaaaagaaaaaaaaaacctggccaagttatgttaatgctttaaaacctggctacgtgttgtctgtagatttaagtccaagtgtgacatacaagtaagtttttttgggatctggaggatgaggagagatgtaggtaagtttcctgtccctggagtaaaacctggcacactttttgctatgggtgttatgtagaagacaaacagacatttgacaagggttgaacttgtgtgacttctgaggtcatttgaactcttgggtccatgattccgaatatgatacgatgattcctaaaggatcctcctgtgtttcattagtaaaatagacataaaacagaagaccatgtgcctgtatgttataatgagtgctgtcagagtttggtgaagtcactgatccatttatgtctcaatagttgaaggaagaagtcatgttgaagttcagtcagtatgagctagatgtggatgtatttaagtggttagttacaaagggaaagtccagcttgaacagaggccatgcagggatggggatgaggtgcagtatagatacttgggggctggtcagcttccaggggtgggaagtaacaggaaggaaagctagatcacagggatcctgctgagcttaagccatttagatctgatcttatgggcttgcagataggtaactggggcaatcatgtgataaaactaatgt

SEQ ID NO: 33247 - DNA, 2982 bp, Homo sapiens
gttgcagtggaacatcctgagggtaaaatgaagccagctgcagatttaacacttcttgtggactatccaccaagcaagattaactttttcaattacctaagaactgtggttctacaaagatgaataccttacagcctgatggggcttggggcttatgggcaggaaaaccaggcgggagatatacctcgactcctttggtttggttatacaggtcaacaagaacaaaaaatggcgggaacttgcaaccaacctcaatgtgggcacatcaagcagtgctgccagctccttgaaaaagcagtatatccagtgtctctatgcctttgaatgcaagattgaacggggagaagaccctcccccagacatctttgcagctgctgattccaagaagtcccagcccaagatccagcctccctctcctggtaaggatggggtcagcggccccaccaaggctgagagggcctgttgccctggcctcttattcaggatatgaataagaggcttatccaacaggatatgccaaggatctgtgctctgccttgccctaccacagggcttaacaggttggctgactagagagtgggcagtggaaactcccttgggaggtactctacggcagctcttaagttttaatttttgttgtgcagctgacaacttgccaaatgtttgtaaactggtgaatgggaggggcacaagaggagtcggtggaacttataaatggcagcaaggcagggccatctgggagctttggcctattgatgtcagcaccttagaatgcagctcagactagagccctgaattccccagggagctgagatggtaatgaatgggaaggagggagtggggaagggttatgaatggaactccctgatgggagtggctctgctcaccctcctttctgagaggaggctgaggcctagggtgagcctagagagggaagaaggccagggtgcctggaaggtgggtgtaaacacatgtgccctggtgttgacctctgagggtgtaatgagtgcctgagatgactcatcagctggggaggcctcagcagtgggatatctactgctgggaatggtaactattggaaacattaattactagtagttttgtactcatcagcttagaagaacatttgaagttgaggagtgacaccatgctggatgctttagaacaggagctcctagactcctaaaatgcatcccagatttgggacccccttcccacccaggacttgggaggctctgactggagctcatgcaccagcattacagggtttagtaggttagacaaggtcctttggcggagtgaagagaaatagccagggaagctggcaatgactcagggaatcaccagcatggtgatgtcatggccacatcactcctcttttctacacgtaaaacaaaaacaaagagctacaaaaccctcagattcccgtctttatgacctggccttgtagatcctctgctaagaagggtgatcaggctttaaaggccttaggaagaactttcccaaagagattctgggtcgttcgtgtgtttgtgtgagagttaaacactgtcatgccaagcaaactactcaacttgtatctctgtccacagcgggatcaggatctatgcaggggccccagactccccagtcaaccagcagttccatggcagaaggaggagacttaaagccaccaactccagcatccacaccacacagtcagatccccccattgccaggcatgaggtaaggccaagagcaggggcagatggttgggaggatggctgaagataagtgcatgggaactccttgcagcccaaggtggtccttgcctctgccttcccagccagtgactcctgcgtgtcctttgttatattggaggaattggtttatttgtggtttacttggttttcctcactctggagcaggagcaattcagttgggatccaggatgcctttaatgatggaagtgactccacattccagaagcggaattccatgactccaaaccctgggtatcagcccagtatgaatacctctgacatgatggggcgcatgtcctatgagccaaataaggatccttatggcagcatgaggaaaggtgactgatctgattgctatttgaacttgtgctcgtaaagacagggccagtgaaatggggggaaatcttgagaatggctcagggttcttgtggagccatcctctgagataatgcatttcctgccctaactacccctcttcatccttacctcctttcttgtcttctccttggcttcaccttgtcatcccttaataagtacatgcttttcgctggttggggcctctttagatctctgttttgaacttgtctggaaaacaatgagatcaaacctgaactctgaagagggcctgggtcaaagggtagattaccaggcttgtcaacttaccagtttgttcaccgcttgcctttctacgctcagctccagggagtgatcccttcatgtcctcagggcagggccccaacggcgggatgggtgacccctacagtcgtgctgccggccctgggctaggaaatgtggcgatgggaccacgacagcactatccctatggaggtccttatgacagagtgaggtaagcatgaccccagctcctgtccactcccccagcaccctgaagctatagtgggctcaatctgcctctccaattttgtttaggacggagcctggaatagggcctgagggaaacatgagcactggggccccacagccgaatctcatgccttccaacccagactcggggatgtattctcctagccgctaccccccgcagcagcagcagcagcagcagcaacggtgagtaaagcctggtctcggtgctgctatggatcaggcttcgccactgcccaccctaatcctgtgtttctttgcctcctatagacatgattcctatggcaatcagttctccacccaaggcaccccttctggcagccccttccccagccagcagactacaatgtatcaacag

SEQ ID NO: 33248 - DNA, 735 bp, Homo sapiens
tttggtaagcaatattgctaatggctatttttgttctaggcctcgagctccgtttgctagtctagaaattgcatatctgggctgtgtgtggagcattacctaggagttcggtttcctgggttcctttcatctgctctcctgcaatgcagggagagcctagcctggtctccagtttctgactggagttaccatggccaagagaactgctggccagtgagctgtgagtaatttgcttttgagaagtaaatagaacctagccagcagagaacccaggggtgtggccagtagttcttttcccaggctcctccctccccaccccccaaatgaccttaaccttctttcatagctggagagcagccaagtccagcctaaacaatactctcaacctcattggctcttttgccttgcagccactgccacccccaagtggctaaggccttcccactaggcctctcagtggggtcaaggttttctaaccactgaaaggcaaacactgaaggaatggtgaaaaatacctagtgaccatgggctttaaatgatgagtgtttgggtactgcagttggaggcaaggcagagtctttgtccttgggtggatgggcatcttcaagtgatcgggcagaggccaaaaaggatgcttttggtatatgagacctgactggtgtcaccccaagtgtcaggatggatgtaaatgtcacccagcatcttggaaactgccaatgaatgccttttatccca

SEQ ID NO: 33249 - DNA, 4126 bp, Homo sapiens
cttggcaatatagtgagacctcatctttaaaaaaaaaaaaaaaaaaaaaaaaaaacagaacagactgatgggatagtacagggaaagcctctctaaggaggtgacttctctccggagacccaaacataatgggctagccaaagggtggtctggaagtagagtgcttcaagcagggaaaatagcaagagcagagccaggcaagttcaaagaacagaaatgatgtaaccctcttaaatcctaagcttctagaatagtaatgcattgcttgcattgttctggttagggatttgtatgtgatattgtttcttggtgatgtgggatatgtgcttcttaatggaaatggctgggaagtgtggagtctttctggagcctgggatatggctctttctcacttgctttccacagttctggtagctcagctggctccctgggtagatgcaggctccatcttagctgcagactctacaagaacactgagaggctgcctccgtcactactcaaagccttggagtcccagaatcccctcctatcccacctagccttcttccaatctgaaaccagggagtcagggctttgagagcacaagattcagcttccttgttttcctgtcagagcagaagtcagaaaatgaaacaggaaacagagcggaagaggagggggttgggtagcagagaaggaaaagagaaattgcaggaaagtacagctgaaaatctggataaagttctacctctacagggtgacagctgagcttttaaaaaacattctgacttgtcttgagagacccctggcctttttacaaatagatttttgagagaatttgatgtggacagagggaaccctgagaatgcatgtcttttttccccttgtgaatttacagagcaaggacagttcatttctcagttttgtctttgcagagagagtgctgcttggagcctcatggtggacttctagagattcaagtcacagccttaggccccagtcacaagtgtgtccccaggctttgccacgttactcacaggcctctggagctgagaacaagtgcgtggcactgaaaaacctgggggaagggccatgaaactccattttttcccccttctccaacacacaacgactaaatatgatttgccttttctccaccttgcacacaacagatatctgaaggcaatttaggtctcagggcctgaaatgagttacagagtcaagagatacagtcccaggcccccacagactgatgtgggctggtcttcgcctggagaggtagcaaccatctctttgttcccacccacatgagtagccgttgcagaagataaacccctccctgagccaggctgtggccagaggctaacccggcccctggcttcgtttggagggcagataactgaaaccacataaggctttggaatcctgagaaacaagaaatccaccaacggagaaggatttatcatctgtttcctttaaggagggtgcaaagttgttctaacagtttccgttacaagggtacaaactggccgctccccccaatagacggttttgttgagttcgcctctttttttttcttctttttttggccccacttcctatgagagaaactgcttgggtgagggaggtgaaaggagccctggagggtgttctctgaggttttcttcaccatcctcattagccacctgaggtggggctgaggactaaagtaggacagaaggtctctggtagatagaggaggggaaaatcagggggatcccccactttcttcacacccaggacgcagggtgccgctgccggccacagaaaccccaagaatgtttttctttggctattcagaggacatctattgtgtgtcaggccctgtgctgagctgttgttgcctgacagcaggaagagcgcggctctggtttctgtgaagaggctgcgggtcagcctccgactacaagagcctcggcccacaccgggaactcagtgaacgtcagcgggagctggggcaagagcactgactctgagacagcagcctccgctcactatttgaaggcggggtggcggggggccttgaaggagagcgaagtgcgagagaactcttcaggtgtcaccaaggtgggaaggtgctacgaggcgaggcgccgagcggcgacccccatcccgctcgcccggagtcaacatggccgccgcgcagggaggcggggctgctccaagtccgggcaggagcggggcggggacgccgtcggcggagccagcgcgcaggcgcgggccgcgtgggccccggatggaggagctgaggttcggtccccgccggggaggtcgggacgggcaggggctgaggaccccgcgccagcttgggagccctggagttctggcgggagggaagctgtcaaatggaagccggtagaaatgagacagacgcccggagaagcggggagccccgcccctccgccatagcagcctcgggcgccgcctcttcctttccagcctcccgccctcgtctgcttccggccctgtggcctggtggggctctgcaggctccctcgggagtggtccttgggccgtggcccctctggggtgagcgtggatgattagtacccagaagggactgtgtccaaaaggagccggccagaaacgggttgcggacacggctgggctgacagaaggcagcccccacgaggcctttggctctgaggaccctgggtcagagcgacttctccagcctgcgcagggggtgttagtcttacccagagggtccagagctgccgttcaacaggatgtcccagattctcagatagggcccaactaccctaagcatacctagcaagggcaggctgcggcatggaagtactgggctaggcgtttgggtgacctgggtcataatcctggctcggaaagggcgcgtaccctttggcgagggatgcgggctggtaccgtgaggtttaagaagcagaaaacatgacagcctctttaagtagccctgggtacgtcacttgaccccagtgagcctcagtttccatatccataaaatggcgatggtaattatactagcctcacagtgtctgatgagatctctggagcctatttatctcacgggaaaatttttgaagagtgaaactagttgatctgtaagtgtcctgccagttaagagtctgtgatttggcaaaggggttgttgggaagtgaggtgggcaattagctgagagggagaattgactagctttgtttttacttggtttacctgtaagcaaagtgtgggctacacacatctgtagtcgctgaggctagagcttgactcgagagaggaaaggaagaatgcaagcatggtcaagtggcagaggtgggttaggtgcttttctgatcccagcttctcttctgcatgcgcgtgggaagccaaggaagaggaaaaaagagtgaattcgccctaggatagggaaggagtagccgcgtgaggttgagtatgcccatttccgtgatttctctcgattcagcgagtcatacgttggaaacgtttagattcacaaactatcgttactgtctggggctttcagaagcttgcctttgaaccgaattttcgtgagccaaccggtgtggaattgggggcccctcccttcctccaggcctcctggcgatggagtaagcagcaggcgcccccttgtgccaaggaaagagtactgttgccattggccaacttggctccctttctggggaaattttattttcctgtggcttctgtgactttgtcgtcttgctcttgacatgagatatgatgggaagaatacttggggcactgatttcatatctagagtcagtgaactgctgatgctgtatcctgtccctaccacttccattcattcagaacacaggtttaagatgcctatttgtgttctaggccctgggatatagttgtgatgtaaagcccctgcccttagcaacttaaataagcaatagcaataacggcaatagggcagaatgtaatgagggcatagcacactgtctagtgaggatcagagaattccagaaacaagtgatacaggttttttaggtattcgccagataagagaagaaaaagagtcttccagccgtcctccttaaatttctcagttcaaattttttttttccttttaggcatagttcttcatcccaaattgatgagc

SEQ ID NO: 33250 - DNA, 2928 bp, Homo sapiens
aaaaaaagtaaaaaataaaaataatacaaatctttccatgtggcaaaaagtaaaataattttaaaaagttaaaataatataaatcagctgggggaaaaaagggtaagaagaaggcatcaggaaccctggattctagtcctctcagtaaaaccccatttaccagccatgtgacttgggagagttttcagaaccttagttaccacctctgaaaccatgggaaatgatgatattcttcagggggtggtggtgaatgatgcagtctcttgtaggtccctttctgctctaacatcttaagaactgccttaaacaacagaatcaccccagtctaaatgctaatgtagaggcttaaatgtgtgattttaggagaaaatatccagttctcctgttttcagcaattagaagaaactcctcctccaccgagtgcaactcttgggagtaatttaggtggtctttcctttcaatgagggaaagcagtaacatctggcagataaggtgcctgttgtgccgttctcagatgcctgcttacttgatcagtagacatgggtcagaggcgccaacacggcggcaggaattggtaaattgtacgtaagtccaaggtggaatgaaatggtatctgccctgcttcctggcccccgtttggtcatgagcctatcactataatggtagtaagatcactggcccctgctgagctacttttgcccattccttgagccagacgagagtttggctctgtatcatccatcacctcttttatttcccatttaagccaaaacatccagtaagcagaaactcttcaaaacagatgggtaatcataagcagcttctggaaagcctcaagaattggaattttgacacactccctctgaccatgacagaaagctcaacttgccagctgaagggaagctcctggctgagccccagcaccctctgttggagcttctggtcagcctggccaataagcatttcccatccatcgccccagcactaggacagctgagagaatttggttcagagtcaaatgcttctgaaaatgtacacacagatcagggcagccctctgccttctgccaagacaccaagtgcccttcttggcaaacgatgatcacccctgccctagtgtccctccagttagttggcagaaactgttccctttctccttgccaacagctgcaaatccagagacttccaccttgcgtgcaggaagtgttggggtcctgtttcagctctttattgccgaggtaggagcactgggttcttcgctctcctctttgcctccttttgggggataatcaggactgattattcctctactggaagaggtgactcagaccccacagagtaggtgtgatgtcactgctctggcagtctcagtttaaccttcacactagatctcatcatgcccagaaaccttgtaacaggagcccagctaggtgggtgcacctggcatgagctggacaaggttttctctctgaccttgcagggatttagttgttctctaaggagctaaggaatgggctgattttatgaccagcagctgtccttttaccatcctattaacagtctctttaatagtctgggagagggacatgaaggacccaaggcaggaagtttcctgtttaccctgaggcctaacaatgccacagctaggtggggtgtctacagtttcagagaaaagtcatttccttctgagaccctgctaaaacagaaaccagacgcctcagcctcacgtacctagaagtagatgcttttttttgttctttaatgaaggtgggaggagagtgtttgacatacctttaccagtcctcctggaaaaatgttacttttattgaatagaccctctcactgtcatctgaaaatgtaatatgtgcaggctcaagggatttgaaactgattgattctttcagtaattgtttattaatgcctattttaggggaataaagatgactcagctatgcctcctgtcctcaaataactgtctaataagagttgctagcagacacagaaacattaaggcagaaagcaataaattctggggagtgaaaggacactgaagcttcttgctctgtatctcactacttgaacttttttttttttttttttttttttgagacggagtcttgctctgtcacccaggctggagtgcagtggcgcgatctcggctcactgcaacctccgcctcccaggttcaagcaattatcctgcctcagcctccctagtagctgggattacaggtgcccgccaccacgcccagctaatttttgtattttttagtagagacggggtttcaccatgttggccaggctggtctcgaactcctgacctcgtgatccaccctccttgggctcccaaagtgctgggattacaggcatgagccaccgtgcccagccctacttgaactttttatgattagaatgaattcaagttttatttgtgtgcttagaaaaaggtaagtgaggcagagagcatgtactctgtaagtttacacgagatggagatcccttccagcttgggatacctgaaaagacttcatggaccaatgatagttgagctagactttgaatgatagggaggatttgaaagttcagggtacagaatgaatatagaaggcaggaaatggaacaggataggacagggagaaaccagtgtgaatggagctgaggtcttaatctaggccttgaaatcagccccaagcccagctctactgtgtactaactgtgtaaacttgagccagatactgactctctaagcctcagtttactcatctgtaaaatgtagataataatatctagctcatagataaaagaataataacatctcatagggtggtggtgggaattaaatgttaccatatgaaaagtgttgagaacagtgctaacaaagcaatagctgcattttggacatgttgggtttacgataccaagcagcacat

SEQ ID NO: 33251 - DNA, 1184 bp, Homo sapiens
gtataggtatgctccaacatgcctggctaatttttatttttgattttttttgtagagacaggacttctctatgttgcccaggctggtcttgaactcctgggctcaagtgatcttctgcctcggctttctaaagtgctgggattacaggcaggagccaccgcgccctgccctaaaaccttttctatcttactttgtactatttgttgtccagaagcagtcagcttttccaaccctgaaagacctatgatctttgttctttctctattttctatttctgttgaaatccagcatattctcacctaaactcacctctttcttggaatactttataaagacaacagtgctagggccgggcgcggtggctcacgcctgtaatcccagcactttaggaggccgaggcgggcggatcacaagatcaggagttcgagaacaacctggccaatatggtgaaaccccgtctgtactaaaaatacaaaaattagctgggcgtggtggcggacgcctgtagtcccagccactcgggaggctgaggcaggagaattgcttgagcccaggaggcggaggttgaagtgagccgagatcgggccgctgcattccagcctgggagacagagccagactctgtctcaaaaaaaaaaaaaaaaaaaaaaaaaaaaaaaaaaaaaacagtgctagttattaagttactgtctctcagctccaaacccacccacatattcgttacaatgagatactggagctggggctctgaaaatcacgtttttgcttgggtaggctctgtgtttggctttcccaataagggccaccagagggagacagtgaagccagaggaagaagaagggacacttttttttttgagatggagtttccctcccgtcacccaggctggaatgcagtggcacaatctcggctcactgcaaccctctgcctcctggattcaagtgattctcctgcctcagcctcccgagtagatgggactacaggcgcccgccaccacgcccggttaatttttgtatttttggtagagacagggtttcgccatgttggccaggctggtctcgaacttctgatctcaggtgatctgcctgcctcggcctcccaaagtgctgggactacaggtgtgagccaccgcgcccagctgggactcttctttttgcttcctattcctgtaagggtcactctggc

SEQ ID NO: 33252 - DNA, 2051 bp, Homo sapiens
tagatgccgtgccaccatgcccagctaattttttatttttagtagagacggggtttcaccatattggccaggatggtctctctcgaccttgtgatccacccacctcggcctcccaaagtgctgggattacaggcgtgagacaccgcgcccggccgataatgtttgttttaagccttaaatttgtggtaacttgttacacagcagtagaaaatgaatactcccagaattcctgaaaaaacactggggccctcaggcatgacccctctacattatgtgctacctaggaaaatctgggcctgggcccaggacacagaacttggtgaacgaggccagagggtgtgccacacacctccagtgggcactctggacttcaaggtagaagaggtcctggctttcaaagcaaatcgtgtgccccacctccccgcgcctgcctgcctctgcaaatgcctgtcagttcgaccctcagagatgggcgaagcctggggaattacagactgccagaagtagatcacgaagtccaccacctgaatctcggcgtttggcaccgtgcctggtacacagtggacgcccaacaaacggcttgcttgcagaacagaaagagccctcgagtgcgcgtctgctggccccctctttgtgcagaagggaaaagggagactgggagggccggggacctgcggggccccgccgcgggtcagagctgggcctccggccaagcgccatcccgggcccaggcggagggggcgctgcggcgggaggccgcggcgggcggtggcggcgggccgggggcggagcgatggcggggccgccccagtgagtgagcgagcgagcgccgcgcgcgccgccgctgccacctccgctgctcggcccggtcccggagtggcccggccggcccgcggggcgcggagccgaggcccgcggctggctgcatgaaggactgcgagtaccagcagatcagccccggggccgccccgctgcccgcctccccgggggcgcgccgtcccggccccgccgcgtccccgactccgggccccgggcccgcgccgcccgccgcccccgccccgccgcgctggagcagcagcggcagcggcagcggcagcgggagcgggagcctcggccgccgcccacggcgcaagtgggaggtgttcccgggtcgcaatcgcttctactgcggcggccgcctcatgctggccggccacggcggcgtcttcgcgctcacgctgctgctcatcctcaccaccaccggcctcttcttcgtctttgagtgagttccgctgcctcggcgccccctcccagccccctgccgcgcaccccaccttcccaatccctgctgggcactccgtgccttccccttcgcctccctggtcctcatcctccccgcccctttgggatcctcctcgggcctcttgtctgcccccctggcccctgcgcacccccatccccgccagatgccccatcctccttggtccatttgggtaccccatccgcgctggtgccctccaccctcccagcccctccattctccctgaccccaccctggcacctgtctgcctgccactgccaggaacaccagcctccatgcccctccacggcccccatcctcgctgccctctcagaacctgccccagggcttcttgaacaggcccctcctgctcacccatccctggaccatctcttgccaaccccccaagttctttctgacccttgtatcccttcctgaccacttctagatcttgtgtgtcctttggctgtgcacacccaccataaacatcctagtcatcctcgctgccctctccgggtccctccagggtcccctccttttctctagtctcagacaccaaccccgcttttgcttcccctcagccacgcacaccctaggccccaaggcatcttttctcaaaatctttgggcctctcgggccccctttccttctccagaaccttccttaggttctccagagcttcctgtccttccctcagatcccgcccgcctccacccagccggctcccaggcccctggcccccctgctgaccacctggctttctttccctgct

SEQ ID NO: 33253 - DNA, 677 bp, Homo sapiens
cactatcatgaagccattctcccaccagtgtccagaacttctagaatgttctagccctaagatggaggagggagcttgaagagggctgtggtaggcagcctccctgggggacagaggcatgaccattcagcaggcacaggctattctctgaggcagccagggtcagggggtctgaaagcactgccttggggatacctgcctaccttgggtcacagtgacagtggctggaccatgcagttcccccagccctctactcattcttcaggttggagcttaggattgtctccttcaggttgcctttcctgactgtgctactgcgttcccctcccccactagagcacacatcaccctgtgtggcaattccctgtttacatgtcttgttttccccactagaccataagccacaagggggagggactcttgtcttatccgtcgtcattattcctgctgcttattgaaggtgttgcctgccacagagaagacctcagtaaatatttgtggactgagtgagtgaatgaatgagtgaatgaacactgcaggatggtttgtctcaggtgacagtccactagtgtctgcctgaagctctgtgtgtagagggattctctggatgcagaggttaggagtgctgggatctattggacacatctgccatgtgctctggaggaaagtatatcaca

SEQ ID NO: 33254 - DNA, 3695 bp, Homo sapiens
tgatcttgactcactgcagccttcaccccctgggctcaagtgatcctcactcctcagcctcccaaagtgctgggattacaggtgtgagctactgcacccgacctcctctctctttttataaatgacattgacttttgttagagatcaggccagcagtcttgtaaatgtctcatattctagatctgactttttcctcattgtgttactcactttgttcctccatctcctgaacctcctgtaaactgggacataggtctaggcttgatgagatgcaaataaacctcactggctgggcgcggtgcatcactcctataatcctggctgtttgggaagccaaggtgggcagatcacctgaggtcaggagttcagaccagcctggccaacgtggtgaaactctgtctctactaaaaatacaaaaattagctgggcgtggtggcacactcctgtaatcccagctactcgggaggctgaggcatgagaatcgcttgaacctgcgaggtggaggttgcagtgagctgagattcacgccactgtactccagcctgggcgacagagtgagactctgcctcaggaaaaaaaaaaaaaccctcactaagctttctgggagtctccttctctgacagcccttcttagagtgggtaaggccggcaggtgtatgaacagaggcagtctcagtacatggtggcagttcctaatatttgtccctgccttaggccagacattttactccaatgtttgttcctgggaacctgttaccctgaggcttctcctggactggccaggcagcagtagctttcccctgctggggatccgggccctgggctgccttgggcattccccatctttctctcctccttccctcagacaacacaggcagttctacataccggccaccccctcggacccgggaggtgctgatcaacgggcagatggtgaagctgaagtactgcttcacctgcaagatgttccggccaccccgaacctcacactgcagtgtctgcgacaactgtgtgggtgagtaggaggcagcagggagggatgcagggattcctgagagagactgagtcgtggggatggggggcatcaagcatggggatggcgtgggcagggtctgaaatacccagggctgggcagggggtctggttcacccagatttgccctgactcaggagggcccaggggaggggccctcagcataaccaggagtgttttggcttcagctcaggattggtggattccttcccccagctctgaggtgtggggcagacagacaggctttgaacccttctcccaggcttcagcccggtcctcaagaggtccaagctcccaggaaacagactggaacaataacattccagatgtgtttgggccagaaagaatgagttactgtccagtggcccagggccagctgtactgaaaaactttgatctgattcccagagttgagagggaaaagcatctagcaacagaggcgtttaagctgatgaggtgcagaggatgtcaccactggaaatggctcctgaccctacagctgcctgcagtggttgttttgtcccctctccctgctctccagaggctgtgtagttctgatgggcaccctgagagggtgttgtaagggaaataatgcatgagagggcccaggtgagctgagccacagtgactgtgcatagttcccagggcagtgagctcatcatgccagctcagtactccctaagcaagagaacagcagggaacacccccccgtgacggcatgcagtgaagggggtgactcagtgggcaccattcatccccaaggagctgccccgcccacgccgtgcaaagggcactggccttggcatgaggcctgcaatgggcttgtgacccacattcccacaaggactttctttaccagtctgggtgtgcctccacccccggggacagtgtgcaggtgagctcagccctttgacctggcctgtgatgctggctggctgtgaaccccattgcagctcagcccctccctgggccgctagtcctagagcaggagacgggttgttgactgttagcatgtggttgggatggtagaccaggtgacaagtatttttgtgagtctttgtgccggcactgctctggatcctggggagtcagcatggtgtaagaccagcacagcccccctcgcccatggagcttacagtcaagtagggctgattggccaatccagttattataaataagcataaaaacacacatgggcagagtgtgacaaaagagaagtgatggggcagataacaggggccccctcccctagtctgggattggaagagactttcttaaggaggtggctttgcagctgagacgcgaaggagaagttccagttaaccaggtaaagagacgagagaatgtatcaggcagtgggaactggtacacaaaggaccagaggcaggtgtgtccaaggcctgggagccagctggtgctgcgagagtgaacggggtaggaaagccccagccatgggtgaggccgccaaatgcctgtgctggctgcaggccagcccacactaacccatcgccccttgcccttgtccagaacgatttgaccatcactgcccctgggtgggcaactgtgtggggagacggaactatcgcttcttctacgcgtttattctctccctctcattcctgacggccttcatcttcgcctgtgtggtcacccacctgacgttgcgtgagttgtgggtgagggcagtggggagtggaaggggtcagccagcaagctcaagggtcagcaagcttcagcagtcactgtccctctgagcttgtcctctcctgtttctttctccccaggcgctcagggaagcaacttcctctccactctgaaggagacaccagcaagatatcctttgtcagctagaggacactccagtgggaactgaggtcccttcactgggtgggtgccctgcctcatcctctaatcagaagggaacagcgtacagctcacatgtgtcctccagaatccaacatgccagctcttctgttcacacccaggcaagagctgatcctaaatggggcattgtggggccgggggttcctcgtcttcaggggcctggaaaagagtatgtcccttaagatgccaagctccctggaccgtgtcgtgcccaaggctctttgtgattggaaccctcagttttctctgccgtccatcaccctgaccttgtctggctcttgagtggggtcctgacccttccgaggggcccaggaggtgatcctgctaagaagtggggactgggccacaggaaggttccaaaacttctcagctctctggggaaacagctccatggaaggataggtgagacaggccaggtgtggctgggaggctccccaccctccacccattgaagtccttaactgccctcaccgtgctggagttggtgatctgcttcttctccatctggtccattctgggcctctcagggtttcacacgtacctcgtcgcctccaacctgactactaatgaagacgtgagtaaacctggagccacccctcattctagggcagcgccctcaggaggaggcagggctgagggagcctggggcagccaagcacagtcctgactcacggactgctgggataatgccttttaagcagccagatgcctcccagtcatctcagcttggccctggtgggtccgatgcaggcttctgacacctccacatgcttcattctct

SEQ ID NO: 33255 - DNA, 2448 bp, Homo sapiens
gtgtgcctggtgatcagtgagaacagaaatgccatcagccagtatctcccgcagtagcttcttgggtgccagttctgcagcacattaccagaggttaaagagaaaggagtgtgtggccaaataagtgtagaaaactctaggttaaagtcaaggtattctttattgctaaactctccagtgccttccatagctgacttcacagagctagagaatctggcaagaattaatctaatgccctagcaatgtcatctgagaattagtattattttccctgttttccaaatgaggactcaggctcagcgaagtggtgatctgtccaggtaacgtagccagtgagtagcagggccggggctcacaggcaggtcagccctcaccctgtgcccctgcgctaccctccttcagaagtggctggccggagaagggaggagtcatccgaaacgtttcctctggatgcttctcttgggctctgctctgtcatctcctctttggggcctcctgatctctgccaggggtcccccacattctcattgaatggcccacatgaaagacatgtcgccttctgtaaccagaattggtttcggaattgtccagttgtccccagcctctagacctgcctcctagaaaagtgaagcaaaaggaggtacttgacctaggcctccttcctgcttgcagatcaaaggctcgtggtccagcaagaggggcggtgaggcctctgtcaacccctacagccataaaagtattatcaccaactgctgtgctgtgctctgtggccccctacctcccaggtaagtgagcggggtgcggaagaggggtaacagggccatgcctggccagtgatcaaagtgttcctggatatcagccgacctccccctacaccctagatgccctccgtccactaccccctggagggcatttgtcatgtgacggaattccatggagaattgttatttaatcacgtgctcattgtagaaaaaaaaaattaagtacaaaacgtaaaacagaggagcattggatatgacatgtaattctactccccgggggtagccaccatgactgtttcagccatgtttgaatgacactgcccttccggttgcccactgcctggactgggtggcgactccatcctctcctggcagtaggaaccctggggactcagccctgctgggtcactccctgttcatcctgacaccagggggcaccagagttccagaacggggattacattgctgtgggtactgctaagacaagtcattcccacacagtcatgtcacctaccccacccagtatccctgtcacccagcctgcctagaggggaagggaacataggaatttcatagtcatcaaatacctattcatccttgctttcctccctcacctgcagcctggcttcttggcagccagacaggtgggccagttggaattaatagtgaataaattctgtggccaaaagccaggtggccagagggcagagagaggcctgccagaggtaagagtcttgggcccccagatgggcagcagctctcctttcctcagcctttctcagcctgggcctttccttggctgagatagactctgccgtccaacccctggcctagagcctcagtgttgggcagagccctcatgtgtctcccttgtgttttggaagcctaattgaccggaggggatttgtgcagtccgacaccgtgttgccctcacccatcagaagcgatgagccagcctgcagagccaagcctgatgccagcatggtaggaggccacccctgaccacggctcagtacttgccacctgctggcctgtctgaccctccgcactcacctgccgggaccctccctattccatccaagggaagcagaactgccaaagactcaagtcttttcatatttatttcccatcctgcgtggctttccctgaactgttccgtggctgtgccctctgctccccaaacccaggttcccacagccttgggccctaggtaccccagctgatcagtgccaggagagaccagagcctctggaggctacccaggggaccacaccaagtccttgcctgtgccgggcgagccctgtgtgagtgaggctgtgaactgagcgtgaggcctcccaggtgggggaactgcttgggccttgctgagccagggtcctcagggtgaagcaggactgaggagtggccagctctggatagctggctgtggagaggaagcctccatgggctgctttggtctgtgggctccttcattcccttggtgataatttccctttattctgtgggatttttggtggggttttccccccttttttatggagttggccaataggattgagttggggctccagtagagaaggcagggttggtggtgggtgggggcagcctgtatcagacaaaggtaaatcagccagccaggcacccacagcctcagctcctgtgcagttcctgggcagcacagtggaag

SEQ ID NO: 33256 - DNA, 3441 bp, Homo sapiens
gacacagagtccggcattggtcccaggcagcagttagcccgccgcccgcctgtgtgtccccagagccatggagagagccagtctgatccagaaggccaagctggcagagcaggccgaacgctatgaggacatggcagccttcatgaaaggcgccgtggagaagggcgaggagctctcctgcgaagagcgaaacctgctctcagtagcctataagaacgtggtgggcggccagagggctgcctggagggtgctgtccagtattgagcagaaaagcaacgaggagggctcggaggagaaggggcccgaggtgcgtgagtaccgggagaaggtggagactgagctccagggcgtgtgcgacaccgtgctgggcctgctggacagccacctcatcaaggaggccggggacgccgagagccgggtcttctacctgaagatgaagggtgactactaccgctacctggccgaggtggccaccggtgacgacaagaagcgcatcattgactcagcccggtcagcctaccaggaggccatggacatcagcaagaaggagatgccgcccaccaaccccatccgcctgggcctggccctgaacttttccgtcttccactacgagatcgccaacagccccgaggaggccatctctctggccaagaccactttcgacgaggccatggctgatctgcacaccctcagcgaggactcctacaaagacagcaccctcatcatgcagctgctgcgagacaacctgacactgtggacggccgacaacgccggggaagaggggggcgaggctccccaggagccccagagctgagtgttgcccgccaccgccccgccctgccccctccagtcccccaccctgccgagaggactagtatggggtgggaggccccacccttctcccctaggcgctgttcttgctccaaagggctccgtggagagggactggcagagctgaggccacctggggctggggatcccactcttcttgcagctgttgagcgcacctaaccactggtcatgcccccacccctgctctccgcacccgcttcctcccgaccccaggaccaggctacttctcccctcctcttgcctccctcctgcccctgctgcctctgatcgtaggaattgaggagtgtcccgccttgtggctgagaactggacagtggcaggggctggagatgggtgtgtgtgtgtgtgtgtgtgtgtgtgtgtgtgtgcgcgcgcgccagtgcaagaccgagattgagggaaagcatgtctgctgggtgtgaccatgtttcctctcaataaagttcccctgtgacactcctcctgtctctcttccagttcttggcgatgggctgggagtgggactggaatctgacttagagaccctgactttggacctctgagttagggccctgaactccctaggtggctcagtggcccgcacgcaagactttgagtccaggtgaggccggggtccggctctctccatcacggcggccccagtcaaactggacgggaccgggagggtcgggtgaacccacaggaggcgccgtggctcctctgccgggctgaggggaggtgagtgggagccacggcgcgggaggctgacgagctctggtggagcggggcaggaaatagtgaagtctccggcgtgagatctaaggacagcgccgcagtagtgagcggcactgagcacccgatttgcaggcgggtcacagtttcatcaagggctcagatctcagcggaggggagtacgatctgaggaaggggtatagcgccgccaaaaaagcctagatcttaggagagggtcacgtcccacagagttcggagatggagacaaaaggaaacgggctgaaggggaggaaggacgagctgggtgggaagggccgctgggagctgtgcctaccgagcccgctgcctgagctctctgcagccagcaacacgccggaacctgcagccgccttgctccgtcccgccttcgcagccctggactggaggcggggcccgaggccaataccgcccaatcacaggagggagctgccccagggtaccgccccgggggcctgactggccaatgggaaagtgagcggcggaacgcgcgcggcgagtttcccgccgcccgccaggcctggcggacaccacgactcgctgactgactgagaggcgcccccgccgcccgctgagcgccgaggggcggagctttcccggtttcactcagacaagttgccgcccgtccggcccgagagctgggaaccctctagagcagcgggacgagccaggatcgcaaaatgcagtgcttgcccgttgagtcatcagctcacccggctgggcctgggccgggccggccgcgggggttggctggaaaaaggccgccaagatgcccccaccacactccgaaatccaagcagccctggacctgtcgccgagaggcttggattgtgtccctggctggctgtgcgaccttggaaaagccgttatacctccctgggcctcagtttccctcttgtatcataaggggcttggactaaaggctaacacaagagtgaaaatggcggttttggccgggcgcggtggctcacgcctgtaatcccagcactctgggaggccgaggcgggcgtatcacgaggtcaggagatcgaggccatcctggctatcacaatgaaaccccgtctctactaaaaatacaaaaaattagccgggagtgatggcgggcacctgtagtaccagctactcgggaggctgaggtaggagaatggcatgagcccaggaggcggagcttgcagtgagccgagatcacgccactgcactccagcctgggcgacagagcgagactcggtccccccacccaagaaaaagagaaaatttgcgattttggactcagacagcctgggtttgactcccagcctgccttggccaaggctcttaatcttgcttacctttgtgtcctcatttataaacaggggaactgaaaaacagtaccttccttttatagttgctgtaaagtaacccataggacagactcaacaaatgttagctttttttttttttttaagacagattctcgctctgtcgcccaggctggagttcagtggcacgatctcggctcactgcaacctccacctcccgggttcaagcaattctcctgcctgagcctcccaagtagctgcgattacaggtgcatgccaccagcctggctagttttcttatatttttagtagagacggggtttcaccatattaaccaggctggtctcaatctcctgacctcaggtgatccgcctgcctcggcctcccaaagtgctgggattacaggagtgagccactgcgccaggacttttttttttttttttttttttttgagacagggtctggctctgtcacccaggtgcgacagtggcgtgatctcagctcacagcaaactcgagcttctggtctcaagcgatcctcccac

SEQ ID NO: 33257 - DNA, 2033 bp, Homo sapiens
aggtggacggcagtcagctgggagggaatagacagggtgagagtggcctggagaaacagggatcagcattccctcatgagaatgagggcttgaggacagaggggaagctttccccattagtctcctgcctctgtttctttctaataaccaccctggtttccttctcccaggaaataggagtcatcttttttttcttacaagaggtcttgcactgagcctcccagtgggcaaggggtttaaatcccatggcatctgactccactctttcatttacttttgcccaccaatttacaacaatctccatgccactttcgacattaaccccttccatacttccaaaatcgccaagttggctactaacacattttacacgtgaggaaactgaggttcagagtgatgaactgacttatcaacaccacacagccagtcagtagcagagccagattctgaactcatgcctgttttactccaaagcgacccagcccctacctccctgtgtgacatgggggcgtggcgtctgtcctccctgtctcagttactccatccgcaaaatgggcctccccgccctgagacgcaccctgaggtcccactgcgccatttgggagaagatgctgcgcaaggcgccgtgatgcgtgcagagctccacctggcctgggcagtcgaagaggaagtagtggccgcggagggggtcgagcttggcacgcagccagtccaggttggcttccaggtactccatgcagtagagcaggccgccgttgggccccaggcgcagcgcgtccatcacgtcgcccagccccaccagctcgcccacgtccacggcacactcgtacggcagcccctcgttggccgggtccaggttcaccaccgccacgcgccggcccagcgcgcgcaggaactcactcatgcccaggcagtacgtggtcttccctgagcccggcgggccgatcaccgcctgcccgaaggccgtggtcggagcggcccctgccattggcggcccgcggcccggagcaggtcaactcacagggaaaacggggcaggtagccgcgccggagacgagactgagggcgagggtcccagtacgtatacctcgttggcggccagcgtcactcgcctcaggcggaacagctgagaccgtgtcgcgcaaaaggagataacaggccgatactaactagactaactcgacttccggacagcgtcggaaacggcgagccaacgagaggaagtcccgccctcacggcggggacgaagctagacgccgaggggcgggcggcgcagccgcatttctctcgcgggtagtgggtcgaatgtggggtctttgcgggaaaatcgctctcggaatttctctaaccttcagactcgaattagaaaagtaagggagctccagtagtaaacgtctttattcttccgtgacgtcgcacacccaagccacctcccgcggactctccgctggcagtcccacccagtgagggtagaggcggtggagggcccacccaaggccggctcttccaagcaccacaaatcctctcctcgcccaggtccctttccccctttctggccttcgtggggacaccttcagagtccccaaggaaggctgtgctgatagcctcactcaacccagcttttcaaagttctgcaggaggcaaagggcaagcccagagattagggttagagaccaaagacaagcggtcgttacccctaatatccaaggggaggggacgggagggggctttttgtaaaaatgcccctgaggtatagaaccggcaggcaggcaggctcggaacaaaacaccctgaaccagccacgaagactgctgctcccagactcctttctgcttcagtggtagatgaggccagggcagagggttttcatcatgtagctatgaaaggaagcccccaacccggtcagtcaggcaatgaggggctgtctgaagcacaactggaacccctcacaaaggccatgtctgtccgaaacttcatgctggtgggtggctggcggcggagcagtgactccgtctggtcttggggtagaggctc

SEQ ID NO: 33258 - DNA, 2324 bp, Homo sapiens
attacaggcacgagccattgcaacccagcccacaatgaacaatttaacatgccctgaaagtttttcacgggctttcaaagctgtgtctttgcaaacgccatttaccctgaaacccagaaacaccattctctcctattaactcctatttatttttcaagacccagatggaaagccacatttcatgatccatctaggaagttagtttctcccttctctgtcatctcacagcacttggtgataaacagtataggctctggaacagatgcctaggtttgttgtagctctgacactaactaactctgtaacctcaggcaagtcacataacttcggcttccctcagtttcttcacctatgaaatgggagaaacaacagctcctatctcataggactgttgagaggggtaagaaaacaaaaggcttagaacagcgcctactaaatacagagtgctcagtgaatgctaacaattagaatgacatctctgtggcaataacctttttccaaatgtcttcctttgtggattctgagcacacactatgtccaactgttctctgcatacccagctagtcacactaggtctagcaatgtaagcatttgttgaatgtgtgaactggagggctctgcactgtcctgtttccccatcaaactgatttcccatgaaagtgggagctgtccagagaaaagattgtctcttcatttgtatcttactgaaaggactgggtaggaagcacagagagagcaggagagaaagacagtaaaagggttagagactggatttccttttttctttctgtgttagtgcaaaatcaaccccttggatagagaaagggtctcaaaagggacctaacaaaatgaaggctcttccgaataagcctctccggtttatttttctccatgtattggactaactccctgcaagttgagcctgaagctctgtctagaatatgaactaaactcatagagtcctaaccagaggcctgacttatcctcaccactcctctgaaaaggtgcctctgttccaggcccgtaggcccagtctattaactttctcactcttacctgatgcctccgtaggtagccgaagtctgcggatgagacagcgacccggtagccaagtcccgtgagaatccagccaccggcggcccgagtacatgcgaataagcctctgagcttgagccaacccccttaccgagatgacgcagcagcaggtgcgggtctggattggagtagagtctcgagtggagagaggccggacatcggtggccgaagtctgagagagaagctggccctcagcggctgggtcggtaggaattagggcagagttaggagcggcctgcggaggggcccgctcaggccgatgccggtagtggaaacagaggaagccaccgccgcgctcttctcggaactggctaaaatagctccgtaaatgggccgagcgcaacacggaggggataccgctcactaccaggtaaactgtcgcctcctcctccgcctcgccgggcaccgccatcttggattgtcacatgatcagctagaaccaagtctcgcgagaacaccgcgagcaacgttccagcccctgcgttgcgagattgtgaaaattctaactagtcctttgggattggggttgtggaacctggagctggaagatccgaagtcttctgtgttcctttcccacagagggaagccggcgatgatggaaaaactcacctggaaaatggggtcatagagttctttcataaagctctcatgaggaccaaataagaagcctgcgggaggggtcatttttgaggtatttagttgtggatattgcacacctaatctcaaccttcctcagttctgaacctttagtcgttcttccatttatttttccaaaatgtgttgatgaactcccacaaatcggtaagaaaaagataacccggtagaaaaatgggccgaagatacttcgcaaaagaggaaacacgcaggtccaatttacaatgaaagtgctatgagttactagaggcttacgttaaagaaaagatgcacaactcaataataaaagaaatgcagcgagacccactttgcatccactatgttggcaaactttaaaaccttagagtcgatgacaacatggtggaactgaagctctcatacactgttggtggaaatgtaagttgatacaaccactttgggaaacaattggcgttatctagtaaaagcaaagctacacatcatttgactcagcacttgtaggtaatattttatttatttttgagttggggtctcgctctgtcgcccaggctggagtgctgggaccacagatgcaacccactatgcctggctaattt

SEQ ID NO: 33259 - DNA, 5914 bp, Homo sapiens
ataagtgggtggttggagagtctgttttatgcgtctgtgtaggtgtgcctgagttgtacatcttagtatgtgtgtgttggggggtgtccaagttgtgttgtttgtatttgtgtgagatctcagctgtgtttttgtctctatctggtgtctgacttgtgagtgagaggctgggtaagggacagggttccccttgctcctggcactgggtcaccataatgggtacgaggccaattagctatagtcctaacctggggggcttagagaaaggcctgaatgatgacgcctagactgttatccccaagtgaatggcctcttattgagcaatcattaacttggcccctgtgacaagaatccaaactgttatggtgaagagggtggggactggtcagggcaggacttactgcgggtgaaagggggaggccggaaaatcctataggcatgtgtgttgttatcactccttcctgcccacccttcaggtcactcaccctgacccatggcaactgggtcaaaatatttaacaaacagtgaggcacagatattgaccagtcagaatagacacaagtcatattctgaatggagcagtcagggaggtcatggctatgccaagagttgcctctttagttgctagacagtgggaatgtctgggaggagaatcccaggagaggggctggggcagaggggcagggaaggaaactggggaggcctcagggtggtggctgtgagccaagtgtcatggaagggtttcagacttaaacaactgatgtagtcaaatcctggtggtccagctaaaccttggtctgccttggccttcaagcagttgccaggccagccctgggtacccttgtcccttccctttgggaaaataatggaccactctcttttgtcatctgcaggaatgggggaagtgaatgatctcaaactacagaaatggcagtgaacttgtctgtttcaattcgggagtgggctgcttcctgattggctgtgattgggctttcactgtggtaagagggcgcctgaagtgggtaggagccaggggagcggttagtgaagggtttgggaatgggagagcaacctccttcccctgaggataaagacaatgaggtgatgggattgtgaactgatactgttccctggaaaattagctccagcaaccctgtggattttttcccttgggctacctctgatagcagcagggtgggccctggaggtgagacagtcccttccatatgcacaaatgacagtatcaggctccaagtgtttcataccttttattacaaaaatcaataacttaattcagttctgtataaagtcgataggacttctggtccaataagcagcctaagctttcattctcatcccaagaagggacaggagtcttggcccagaggctgtggggaccaccaaaagcctcccaggcagctggaacactgtgtccaaaccaaggaagtccaatgtggggtgtggctgagtgaagagctgttcctaaggagccaagtgctgtctatacaggcttgccccctccaggagcattgggtcacctctggggatggccaggctgaatcagcactgccagcctctgcccacctgatctctgcctgggctggaacaggtcacctgagcaaaagcatgtccccaagaaggccagcgatgtcaacatctccaatgatagggcgaaagaagaggtccccaagcaggctggtcggaatggacttgagggtggaggccgtgaggaggacacgggtcaggcggccttgggctgctgggcaccagggttccaggacttcacacagcacccagtgagcctcctgctgcaggtgcccaatgtgggaggcggcttggaggcctggcacatctgtgggcagagagggagaagagggctggtgagcaccctactcccagccaccaaaggacaagactggcccaagatctgggccatcagagacacccctctgcctcctttgctcggcctttgaggtcccactactacctcctcctttagaggaggtaatttatttatcaattttcaatgtattcatccatccatttatgaagaggcagtgtggagtaatggttaagaattaggcttcctgggtatgaatcccagcactgtcacttattagctgggtgaccttgggcaagtcacttaatctctgggcttcagtttctttatctgtaaaacgggaataataatattaataggacctgtctcctaggcttttatgagatttaaatgaactagtatatgtaaaacccttagaatagggcctaacatatggtaagtgtgatatgagtatttgctactattattacaattaattactacgatttatgcgtgccacaagggactcctggggaactctcatctcagatgctctccagattacaaacagcactgtctccatctgccgctctcctggccgaattccataaagactcctttcctgtcctccctacgcccctttcagtcatctcttctatgtgatctttctgaacccacagaggagttttagctctagagcttcaccatgcagccttcctttgaggatgtgactgagacacagctgtgtctgcccaccccacctccccacagccttctgtaaaggtcagagcaaatttctcaggcagagtggcaagggccagtctctggagtgaatagacctgagttgccatcctggtctgtccctacctggctgtgttacctttagctagtcacttagcttctctgtgcctcttctgtgagatggctatttgatgaaaatgaggactggccaagcacggtggctcacgcctgtaatcccagcactttgggaggccaaggtgggtggatcacctgaggggttaggagttcaagaccagcttgatcaacatggtgaaagcccatctctactaaaaagtacaaaaattagccgggagtggtggcggccatctgtaatcccagctactcgggaggctgaggcagagaaaattgcttgaacccaggaggcagaggttgcagtgagccaagatcgcaccactgcactccagactgggtgacagagtgagactctgtctcagaaaaataaaaagaaaatgaggacccaatgagataacagatatcaaacccttagaagctaccttccctggctggcccctgcttcagccttgccccccacccaggagtgtctgggagctcaccggggttgaagaggatggtccctttcaggcaggcatattccttggggctaagctccaggctccagaaggactccagacagcattgaagccactgcaccgcagccagggagggctggggtctgtctggcagttggccactgcctccactgctgctgggctcctccagcagaatcttcttgagtatgctgggcaccggggcctcagccacctcaaaggtcacagcatcttgggccaacccaagcaggaagagggggccccagcaaccctgcagcagccgccgctggtcctggggaggcagctgccagaaggatggcaggttcctgaggaaggccactgtcttggccagaacatccaaggcctcccggcaggtgcgatgaggtgcacatagctggacgggccggtgctgcctacataggcagcggctacggggtcgggggacagccttgaggctggagctcagaagtgcgtagagaatggcggggcggcttgcagctccctggcatgggcaggcccctggttggctggtgctcatggttagggatctgctctcacttccagctctctggctctgtgttctgcgctgtgggtgctatttatattcccagtgagtggaacggggggaatggcccaacaaccttgactccagaagtcatgttcattgaaaaaaacacacagacattgcccctggcaggaatggtggggaagtggtgggggagggggcattgggaaccccacgtggcactgatatcacctcagtcaatgaagtggccggtgcagggcacagggccacctgccgctcactcagctgccccttatcagatgactcaagtggataaacaaggtcattaactcaggctgtaccagggcaccaaggccccaggtgcacaatcagcaggtgtccccattggtgcccgctcttgtgtgcacaaaagactagggcttttgctaagccaggaagccagccccagagctgggtgggccttgaatgcaaggcccaacctggaagtgccttatcactagcttgtttgcctaaccttggggccctgcttctgttgtcagccagaagcaggctacagggaagggagccaggaccctgggggctgggaggactttgcccactgtccaatctaggaggcctcctcctctgattccagttctgggccccctgcaggaataaggtccttcagaatccttatccccagcctgattcctaccactcctgaaaggccaggtctgctgagaagaactcacagaattataataaaagatagttgccagccgggcacggtggctcatgcctgtaatcccagcactttgggaggctgaggaagggggatcatttgaggtcaggagttcaagaccagcctggccaacatggcaaaatcccgtctctactaaaaatacaaaaattagccgggcatggtggcatgtgcctgtagtcccagctactctagaggctaaggcaaaagaatcactcgaaactgggaggcagaggttacagtgagctgagatcatgccactgctctccagcctgggcaacagagcaagatcctgtctcaaaaaaatatatatgtatatgtatatgtatatgtatatgtatatgtatatttatatgtatatgtgtatatatatatacacatacatacatacatatatatatatatatatgtatatatatggttgccattctctaagcacttattatgtgtcaggcacttcccactctaatattggcagcctcttcctaaggctagattcttactttatgagactaaaaaagctaaagtgacttgcccaaggtcatcccaccaggaagacaaagcccagatcttgcctgactccaaagtccttgtttgtttccctggacccactggcccaattgcacagccagagcctgagattctcagagcttgtggctagctgcccccaccttgctgctgcctgctttgcagacgttgcccacttgtgatctgggcagaagtgttgctctgctgccacgtggctcctctgtcccgggcatctttctcagatggtggagcacaggggatgagagaaggtggagaggcccttggttgtgtcatgttcctggaccttggccagtccagtgtggcaagccttctgctgcatgctgttgggcagcctggtgccctggatggggagagagaggctctggcatcactagccctggcatctgctccagaatccatcactttttggttatgtgacttgggttgatccttgaacctcgataagcctccctgggacaataatgcctggctgtagggctgccatggggacaaaatgaggtcctggttgttaaattccaagtggtttctggcatacggtaggaggatttttctgcccctttcctctgtggagctgagcaccagtggacaaacaggcacacctctttcatttgattattagtcttaatccttaaatttataaagttcctttcatgtttttaaatctcactgaattctcacagtgtccccttgaagcagactctggagtcagactggctgggttcaaatcctgcttcacttagctgagtgaccttgggcaaatcactttctctttctgtgcctcagtttcctcatttttaaaacagtgacaagaatttctggaggtggatattggttttatggggcctgaaggttacgatttggaggaccctctttaagaatagaatacacactcggttacggtggctcacgcctgtaatcacagcactttggga

SEQ ID NO: 33260 - DNA, 2771 bp, Homo sapiens
gaatttcaagactataacagaaggccatgaaatcaagcgtggagcctttctaagcctgggtgctgtgcgactgcaatttgtactcccatgaagctggccctagtcaagtacgcagtgaggtcgatgaggaggaggctgtcctgtggtaagtcccttctaggattggaagagatgagtaaggctactttcagcttcactgctctacaagctgggggggtcgctagcaagggagaggggcaaaacttgtccctttttaacttccaaccctgccagatttgagtccagggctttctagaagtctccacggcatcgggtgaccatagcaactcatgccaaactctcgggcccacggctccgcctaccgcttcgtggacgcgcttgttgattggctccgaatgtcgaccaatggtcggcgaagcgggttgcttgccgcacggtcaatggccgcaaaccgggaggaaggcgggaagagaggaggtggaggcgggcctgggcagccgcgcgcgtgcgtgtttccggctccgctgcggaaggcggacgactagagtcgttgggcccggcgcgacccgcaggagcgtagagagcgcgggactagagtgcagagctccgggacgtggatcggagccggcgcgatgggcggagagcaggaggaggagcggttcgacggcatgttgctggccatggctcagcagcacgagggcggcgtgcaggaggtaacggcccgcgcggcgtcggcccacccggcggccttggccacgctccttccgcccttctctgccttcgagggctgagacccaccccagcggctcgcgggcttctgggatgcccctacattctcactgcgcccagcttccggcctggccacccgccagcaggtctcacccggttcgcatcagtcccgggcccccggcgcccctcagtagtagcaaattatcgcatccctgagcttaggatccccctttagtttcacatatgcccccacccccgtttccactttgatggcggcttccaaggagcatcccttagtaagaaccgtcgcaaatatcgtgatttggatccaccaaggcttggggcgagccgtcgaatgtgtgtggtaggggagcgggctgatgttagcacgtggtcttgttaggccttgaatgggggaataggaggcctgtgttcacgattagtttccaccacctaccaacttggaacctttacatctctccaagcctgagtttccttatctgtgagacagctgcgaataccggtttccagagagtagttaagaaccgtaagttctcagtaataaggctttttcattcaacaagtatttgtcgtgtgattgatgtgtgtcccacactcgacaataagggccaactgttacagattctggagttggtttttttggaacaaacacaaagttaacggtagaaaagtctgtcaggatcagaactctcattctcagagccagagaagtggcaaggatttgcctagatcatgcaacatggttctcacctagacaggtcagtgtgcttcccagagtccatggctgattgtgtcttactggaggtaggtttccattgaactttctattcctatgtaacctaggtgtctggtgaccaaggacttctaagccctttgtggtggggagagtgtttctcatttgcaagtgtgaaaagccttcctgtctccattcctctaaactgttcgcacaaaactggatttgggagcgagttcatttttgagcaaattgaaaaactgtctagaagcaagaacggaaaccattgagatatgttctagcatcagatttaatcagatttagacccactcttgggcaaataaagggtttgtgtgtgctgaccttgagtcaccactagattgtttcattcagcaagaattttactgattatgtacctttagccatatctggtgcccagcattgcaggtggcagacagactaagccatggttcatggttcctatttgtaaggtgtttaccctctgccagtgggtctcttgctctgtgccatacattgctaaaggcctcacctccttgacctcatgatcctcaccaggtccctagaaataggtactgcatcttattcctgttgtacagagttaagaaacttctgcaaagtcaaaaggtaatatatgtccatctgatactcaaaccgttggctacacttgtactccagccagaattaatccatcttatcctcctttgaagtggcttcatttgctctcctccttcttgctttgacccggtaacttagccagtgtctttttttttgtttagacaagagtctctcacccaggctggagtgcggtggcacgatcttggctcactgcaacctctgcttcccgggttcaagtgattctctgcctcagcctcccaagtagctgggattacaggtgcccaccacctgtaatctagctaatttttgtgtttttagtagagacggggtttcaccatgttggccaggctggtcttgaactcctgacctcaagtgacccgcccacctgagcctcctgaagtactgggattataggtgtgagccagtgtcttgatgggctttttactttctggagaggaaagctgggcccaggcttttcatgccctggatgcagaggagtgttccatacgcttaggctgcttctagcatcacaaggaaagtgaaaggcgcacacacacacaggatatgagaaatctgcttcatggtggaagtgactaagagaacctgctggggagataatctcctcagttgggaagctcagaggaaaaatagt

SEQ ID NO: 33261 - DNA, 1227 bp, Homo sapiens
tttatagagacagggtcttcctatgttgcccaggctggtttcaaactcctgggctcaagtgatctgtctgcctctgcttcccaaagtgctgggattacagatgggagcccccgtgcccgacctggattagcatttgaataacagctatttcataaaattcttctgccttctgaaaagtatttgagaaggctggcatggtggcacatgcctgtactgtcctgggcctcttctgggggagagtgacaggcttggatttagagcaggcccagccctccccaccctggttggctgtggttcccaaagatgtgtccagtgaccgaagcttgagtcggtgacagcctctgggtaagcttccacaaccctggggttatctgtctgaggctgggcctaggtcaggctgatgggaggatgggtcagaggctgctgtgattggccttgactctgcctggtggtttagctctgcccttgcttaacctccaggagctaggaaggaagtacaaatgggatgtgacatgattcagtggagctgggagaggggagggccctgctcccacctccctttggccactggttggcaaatgcctttagttcaaggtctctctgattagggacttaggaccaaggccttgtggtggaacagcctctgctggtgtaattatgacctattgtttctactgacagcagaatggcctcccctaccagtttaatttgtggtttagggggtacgtttggtgttctttaaccttgtagagtgtggagctactgtggtgtggcatgggacagggggtttgggcatagcaggagaatttggcgtcaaatgggtgagaatccacagggcatttagcagaaccccaggtctgggggcccgtgggtgacttctgtgaccttgagcccctgcagagctttccctgcagttctgccttagagatgcttgaaagagggtttattgaccactgatcacatggcaagtgccctgcaaggcctctaggggtatgtgcgtatgtgtgcacatgcacactgtgtatgggttggcattgagttgagtgtcctaagggtatgttcctggccagaggtgaaactttgacacttgactggtcatggaggatgaattggtttgccaggtgacctgagaatggggatgagacattctaggcaaagaacaacacatgccaagattgcttttatttattttgagacagggtctccctctgttacccaggctggtgg

SEQ ID NO: 33262 - DNA, 997 bp, Homo sapiens
ttgatgctttcctcttcccccttagtcccgcgaacacacacacacactcaagggtctatgtaccgtcccctcctccgagggtccccaggacaggcccggccgcaccagcctctgcccccagcccagtgccaagcctcggacacccggccggggaggaccaccccagtcctgctcgagaaacagccgtcggctcagtgcaccctcggcctcctgccccaaaggtgcagcccgagagtcccatatccgcgggcagctagtcctggggacaaggaagaaccagatcctggcactgtcccccgggctaccacagcccctacaccaactctgccctcggggcgagcactaccctctccagctgcaagggccctaccccgcgggcggacccagcctccctcccgtcccgacgctgttcctcggggtgagcaccagcgtttgtcccatcccgacgctgccccccggtgagtgcggcccccgcacccagccagtgcagccctaagggcgaacgcggcccctcaccccattctgcgcgcccagcccgggcgcccgctcaggccgctccccagcccggcccgcgcaccccggaagtaggagggtggcccccgaggaaccgggcccgggaccctctcctgtccgggctcagcttcggggggctcccgacaccggcgccgccctggcttgcgcccccctgggcccgcgccgggcttacctgtcccgccaggtgagccgcctccggctcagcccctcccccgccccctcgccgctcacctggggcgcaggtgagcgtctcgcgggagcgctgcacgggccgccgctagggacacacttcctgcctccgcgaagcgctaccgcgcacctggaccgaggccccgccccggggctctgcagagctgcgcgtccccgctcgagtgctcggcccgttcagcctagtccgggtaggtgaggtgtggcggggaggggtcgagaggcgctggggctcagtctcctcttctgttcaaca

SEQ ID NO: 33263 - DNA, 1841 bp, Homo sapiens
ggtgtgagccaccgtccctggccatatttttgtatttttagtagagatggggtttcaccacattggccaggctggtcttgaactcctgatctcaggtgatccatctgcctcagcctcccaaagtgctgggattacaggcgtgagccactgtgcacggcctaaatttttcaattcagacaaatgtttattgagtgctttatggggccaggcactctgcttgacttcaggggattctagtgataagcaaaaccagtcaagggggagagactattaataattaaacaataaacaaatacatacatatgactcataggaaataccacagaggatagcaacagggagcattgtcagagaacagggaggtaaggagtgaccacggagtgggtcatatctgtgtttgaattcttgcttggccatttacctgctgtgtgaacttgggcaagcctcttcacttctctggactttggtttctcatcaggaagagacggctatcaatctccctttcttagggatgatatcacgagacagagaacattcattccttcaataaatatatactgtgcatcttctcccactcagataaattacttgcccaaggtcacccagatgggcagtgtgtgttggttttcaacccgggtctgactggttctctggatctggccagtggttgggggtggagataagtcctagtcttcttcccctgaatcagtccttgaggagttgggagcagtgatctgcctcatgaaggcaaaacacctgtccatctccccaccaccatggcaatgaggggcttctgccctgagaaagacctatgattgcatgacacaaaagagactgttcaaagggacaccatcattcagcagggcaagcctccttgctgggggcaacctggtagctcctgagcctccctcatcttcactgagcccctccaactctctgagttcccatgcccctcactgaacctcccttcccccatggcgagcctccgccagcacctttgcacacactcagccccttccccctactgagccccagcacagtcactgaacagctcttcttcccctctgactgagtcatcctcccaagccctccccttcccctcactgagtctccaccacccctggtcactgggcaccctgcttctgacctcctccctcccccaacccctccacccttcctcttcactgagcctggcgcctctcacccacccgccttcctctcccagccgcttctgagctgcctctttggagcccaactgtctcgcccacgagtccccatcactcagtctcactcactctaagacacctgaaagcagttagagaacatgtgttcatggggggaggatgaggctctatcatcatcctgcacatcatgcaagcacgccatctgcctcctcttcaggcttcagcagtcacactggccataccttccgcaggtcctcctgagcccagggtctgctgcagtccttcccaatcgggttcagagctggtttctggacccctggcccttgcccccacccaccacagagacctcccatctctgatgccaccttcaagtagatggaaactgaggcaggcccatggtgtctgagccagtgtttggtatggcagggtcatttctgttgggggaaaagtgggcagggttccattctatcattttgtcagggccagatgagaagtgtcagataaagtcccacataaagaacgtccctccaccaagaggactagacccaggtatctgagcccccagagggcatgaatggctgagctcgtgcatttctgtccagattcaaaaatctggattcagccaccagtcgtcaataagacattgggcaaagcact

SEQ ID NO: 33264 - DNA, 2215 bp, Homo sapiens
tttagtaaagatggggtttcgccatgttgctcaggctggtcttgaactcctggcctcaggtgatccgaccgccttgacctcccaaagtgctgggattacaggcgtgagccaccgcgcccggccagtttccccctctttaaaatgtgtaggaacaccggctgggaggagtaaacacgagccggggcagggaaagaactttgcacaccgtggggtccggggctcctctgtgatgccaccaaggtttgcaggctcagcggcagcgctgaggtatttgttctgcgaataaagcgctctacctatcgtggaatcagtccagctagatccccgtcccaccaggacggcagtcgcccctctgcgttaacccttccactgccctagtgaggtgggaaagggggtccttgagagccctatggcccaggagagaccgggcagaactgattcggccaagggcagcatgaggtgtgggaggagcacggcacaaggagtcaagcctcctgcgttctagcccaggctctcttcgcacagaggccttaggcaagaccctcccccggatggagaccggattccgtgaatttctaaacaccagctaccagagcttatgactctgaggggccaaaccagggaagatgaggctccctttgcacccaaaatttggggagaggcgaaaggggaccggatgccctagcggagcagaatccggcgaagggcaggacctgaagggtttggggaatgccctgaatgtgcagagcgcggggggggggggggggggcggggcggattcagggcgtgcctgtctctgattggctgtgccgcccgtcgctccgccccgtgttctataagatgcgcggacggcgggcgcgcctctggggtgggggctgtggccgtgtctagctgttcgggtgtgctgtggtcatcctccctgcgcacctacagccgcagaccgccggtggggggcgggggatgccgggctgccgcatcagcgcctgcggcccgggggcccaggaggggacggcagagcagaggtcgccgccgccgccctgggatcccatgccgtcctctcagcccccgcccccaactccgaccttgactcctaccccgaccccgggtcagtccccgccgctgccggacgcagctggggcttcagcaggcgcggccgaggaccaggagctgcagcgctggcgccagggcgctagcgggatcgcggggctcgccggccccggagggggctctggcgcggctgcgggggcggggggccgcgcgctggagctggccgaagcacggcggcggctgctggaggtggagggccgccggcgcctggtgtcggagctggagagccgcgtgctgcagctgcaccgcgttttcttggcggccgagctgcgcctggcgcaccgcgcggagagcctgagccgcctgagcggcggcgtggcgcaggccgagctctacctggcggctcacgggtcgcgcctcaagaagggcccgcgccgcggccgccgcggccgaccccccgcgctgctggcctcggcgctgggcctgggcggctgcgtgccctggggtgccgggcgactgcggcgcggccacggccccgagcccgactcgcccttccgccgcagcccgccccgcggccccgcctccccgcagcgctgacctccacgcccggacccctggccaccccgacaagcttcgccgaggtgccgaccgaccgactgatcgcggacgccggctggaaggactacggatccgcaggaagaggcagttgggggccaggggcccagtagaggaggctgaggtgcggtcttagcggctggtgcgttcgagggtcggtcatggcgtgtggggggctggtccagggcccgggaactcccttccctggagcttctggcgtctgctgggtccctagtaaagctgccactttctgttgccgcctctcccgaccatctggagagtgagaggtggtagcatcaagtctccattataagagttggactcttgagggggctcagatcccaggaacgggttggcggcaaacttttaccacttggaacctgccgcacggatgcagcaccccccatcctcacccccacttgcgtggcctttcccgggcccctcggagctgtgagcagtcttgcccttgaggatgctgcttcctggcgccgcccagctccgtgccttcgggaggacagaataatgaggccccaggatggggtggaggctggca

SEQ ID NO: 33265 - DNA, 3996 bp, Homo sapiens
agctactcgggaggctgagaaagaattgcttgaactcgggaggtggaggttgcaccgcactccagcctgggcaacagagcaagactgtgtctcaagaaaaaaaaaaaaaaaaaaaaaagctcacccgtctgcctccattttcttcttaattagcaaatattgataggggctcagaaagcagagccaaatcagaggagggtctctacttttaagggcttatgtctcctggctcttttccaggcaggcttttctggctgtcaccatcccaggggatcccttgggggctgagcagtttgttggaggccagctctagcctcggacagaaggctgacccaccccttttccccacatgactttcagaacactttcttggtggcccccagctctggggacaggactgagtacagggatcttgggggacctgtgcattgaggacactgacggccaccaatgaatttatatctcagcaaagggaaatgaggggggaacaggagcctttcttcaggctggtgcttggggctgggagaccagttcaaggttctaatctgggacctgcccctcaactggataaccatgtgagcgttgccaccagagggcagtgtggggctgctttctcgagacgaaggggtgtggcctggaggaggttcagtcctttattgttcctgcccccaatcatccctttgcccggtagtccccggggcttcctagaccttgagctgcaggggcctgggagaacgagcagggtagtcgcggtcagcgcagccctagagtgggagtgtagttctggggatagcttcctgggtggagtgggactagaggccagagctgtgcccatcaccggctccctaggggcgggaaccctctttgaaaggggagcaaggccgggtgcggtggctcacacctgtactcccaacactttgggagtttgaggcgggcggatcacgaggtcaggagatcgagaccatcgtgactaacatggtgaaaccccgcctctactgaaaaaaaaaggggggagcaaaggaagctcctttggttgggctgagcctggaaccccagggagaagacccattaggaaagacttccagaaaagacaggtagcccttgttggggtcactatcaggataaaagaccagagttattttgtattcacagatttgttacactaattgatcagaacccagggtcccactgccagtggtggccagtgttgcctcttagagattaggctggagccacagaacctggccaaggtggtccaagcctgcagccgctcccctgttggtgggttcttcaagaacaactcgggtgcttaggcttctcagagctgaaggagaggcctgctgtcatgagagcggtgcaggaggaggtatttgggaaagcctggagatccccaacctacttcttcccccattggtccttgactgcaccctggccaggggcgatgggggaagggaactcttggttctggaataatatcttaaccacctcctctatgccaggcccctgagcactttacacccattaatctgttccggttctcccaaccactctgcaaagtaagggttattattcccatttccacaggtgaagaaacagagagggagggcgggtgacttgcccaaagacataggagctataagtgagggatctcttaaacattaggatatatggtgattcatttatcaggctaaagagaggtccgtttagggggatatctgggctcccacattcaaggctgtgtatagtgacccttggtccttgggtattggaagggacatgagatgctggaggggtggcagaaggtgcccctcccagagtttgggcacaccccaacctggctgggccctgggggtgagtcaggctgagtcagcaacctggcttctgaggagggtgggccaaggatgctcagggctcaagcctcccaagggcttgccttggagggctgcctcctctccctgtagatctgggctggctaacagggtgaaatcccatctctactaaacatacaaaaattagccgggcgtggtggcatacccctgtaatcccagctactccgaaggctgagacaggagaatcgcttgaacctgggaggcggaggttgcggtgagccgaaatcgcgccagtgtactccagcctgggcaacaagagcaaaacttcgtctcaaaaagaaaaagaaaacttgagtattaaatgaaaagtcatactaagtacttggcacatagtagagatccgtaaatgatggaaccaatttgcccagccctggagaggccgccaggacagaacccccaggcagcgtgggcctctgcttctctagagcatcaccatatcaggaatccctggaatgggccctggggaactccataaggggagaagtggaggaggggcaggcttttcatcccaggaacattccattctaactgctcaggctaggggatcccagccaaggacaaaggcccaagggaacctctgcttccccaggagtcccattccatactattgcctcctgcatcttctctccacaatgcccccgcccccttcaggcagatttcaagttgaagggcttgggtggggctgggtggctgtgggaaagaggccattaaagctcttggaattattctttccagctccttccaactcctcagaacctccactctatggatctggacctctggattcggctttctccctgggcactgccttcaggaagacgttgagaattgaccttacacaatcccagcgccctcctcacaggagcctttcactttacagtggcaaggggctggttctggagaactggctgatgctctgaatttcttcatataccccacatttgactttggcttacactgtacaattggagatgttgctacaggtccctgagatgcaatcagattaagcgtagcaagcattgccaatgggaaagtcaaaataatttattttttttccctttccccctaccccatccccagccaagaatttcttttcaagatatcgtcatcattcttaaacaacattcttaacccccagctggggtccccattttaatagatgtcattgcttcaagtctaacggcgccgggaggcctgtttgagggaaaacattagtttgaaaaatccccgttcccttcatccactgcccttgttctccacgtgggagtgtgcttgtggcccctcagaaagatagtctgctggctcctaggggttggggtgggggacacacctttttctcaggaagaggtgatggcaatgtaaaacatctaagcaaagttttaaatgaaaaaaaggaaacacatttaaacatcctgataatggagggaaggggggcacatttacacatagcccagaacttgtagaattctgcatagtgaatgtatattgaattagtctcctgccttatacattcaggaggaataaatttccataatgtaaggcaaatgcatggggttctgaggttcactttgcaagtgcccttgctgcctttcctctgtgtctattatggctctttaagttgacggttcctggagcagcttgtatttagtttcgtttggcagtctggccctgttgactttgatttgcagaccaattctcccttgacctgactcacagccgcctgctcttacccccctcctcaggaagtcttcctcattaaaggatgtgatgacggagctcagggatgagaatgcacatgtgagactgtgtgacaccaaggagggttgtgcgaactggtgacaacatggcagcaccatggcctgtgggggttgtgtgactagtgtgactgtgctggcgaccatatggacctgttttgtcagtcggtgtctaagcaggagatggcacactcaaactgggaagtgttttaaacataggctattctggcctggcatggtggatcacacctgtaatcccagcactttgggaggctgaggcaggagggttgcttgagctcaggagttcgagaccagcctgggagatccctgctctataaaaatgaaaaaattag

SEQ ID NO: 33266 - DNA, 841 bp, Homo sapiens
gagctgagatcgcgtcactgcatgccagcctgggtgagtgctctcccccctccacccaaaaaaaaaaatgtaatgggatggttcagcaatctggggccagcaacagtgagaagcctttgcaactcctgagtctgagggtgaggagaggtcactgtgtggagtggggcccctgacaagaaccgtgacctttggttgagagatgtggccaaccatggcaacctggtagagagggaacaaagagaataaatatctactcctcccttaagtctccttaagacgctgggatgtctcattggcaacccaacaggaagccggggaacaagggagccattgatgcagtccacagatgccagcccccagggaacagagcagaagtgtggcgagtgaaagcggaagggcagcatatcatgtaactgtctgaggctatgccttgttcctcaaagtccacagcaacgctccttccccatccggagctcccacaaccctcgggtctgaaggggtgggtggactgttgcttggagagcacagtaaggttggaaggtagaggacagggcttttccctctcagcctttgcattgctggctctgagtcccagttcctgattcctgcctgtcctggtgtcttaggtagctgcaggaactgtccacaggaggaaccatgtcagccactgagtcggtgtttttctcacactcagaaacgctgcaccactcccaaacaaaaccacaggcgtgctgctgccatcatgagccctggacagtcatcacaagccataattactgtcacatgtatatcaagaaaacatacatcttggccaggtgtggtggctcacgcctgtaatccc

SEQ ID NO: 33267 - DNA, 484 bp, Homo sapiens
aaaatgtacatcttgccacactgctacactgtgccatagtcacatataaaatgacaaatgtcacagtaatgtcaaattatgccttgtcacatacgtacaggagacaactgtcacaatcatgtgaaatcacagtgcaggagcaggatggaacagaggttaacagcaatggctctggatccagacaaacctctttgacctctctggtctcagtttctgtctgccaaatggaaatgctttctttccccttgtggagttgttgcaaggatgatttgggagatcatgattgggaagacctcagcatagtgcctgctggagtgaagcccaccaggaatggtggctgctactgtgaataactgtctcacacgcccccactgcctcaggcccatgcgtgtgtgcagtaccagcacctggacgaggcctgccagacaccctcaggtacatgtgccacagtgcatgcacattcacaggcaagctctctgcctgg

SEQ ID NO: 33268 - DNA, 2022 bp, Homo sapiens
agctttgaggatctgcccctcctattgctaggtccctgagctgcctggcctactcaagtctgtcctagacagctctgccaggaaggagcagggagtttccaggcctgggggaagggagggaaggacgtgaggatccatgacagggaaccctccaaagcccccaggacctggagcaggaggaatggaccgtgaggagtgacctgtctagggcacagacctgagaccaggcagctcagggtcagcctctggctttactctctgggaaatggggcactcacacctatgccaagagctccagaaagacctgacttgggccaggcagcaaggggagatgcagagcactggccaggcctggtgcggcctggccccagctgtctgggggataggacagggctccagcggcagacagcctcttagcaggtgcgtactcagccgtgggctaaactcattcctggcctgaggggattcatgggtcctcatggtctaccacatgggcccatggagtcggcacagaggggaaagtcctcctttctggcctggtgctattacccctggaactatagagaaacagagtaacacagtggtaagcacttgggctttggactcagactacggatttgaacctcagctatatcatatatcaggcttatgtaacctctccgttcctcagtttcctcatcgcaaaaaaactggaatataactgtgtcaacctcatggagttactgtatagattaaatgaggcaacataggccagacacagtggctcacgcctgtaatctcagcactttgggaggccaaagagggagcatcgcttgtgcccgggagcttgagaccagcccaggcaacataatgagaccccatatctacaaaataaataaataaataaataaataaattagctgggtgtgatggccagcacctgcagtcccagctacttgggaggctaagaggggatgatcatttgaggagtttgagggtgcagtgagctatgattgtgctactgcactcctgagtgacactgtctgtgtgacaggagactctgtctctaaataaataaataaaaatgaggcaatacacattcagacaggaagcacccaatgaacaccagcaatcactaccaccgctgccactgcctttgggagacatgaccatgggtccacaaatggctgggtctgttacctgcttgatgcaaccatgccccaagctccacagcagtgctcacctgaaccccaacacccagatcccactggagagggctttatctttggcactcactggcttcacagacattagtgagtatgactcactaatgtaagtaatcctgtaagaagcctgggaggatgacaggctgagtactgcaatccctgtgtcacagatggggaaactcaggctcatgtggtaaccctgggcaagagctagtgctagaggaagccaggatggaggcctgcctgctcaggtcaggctattctacccagccccatgaggaggcgtgggaggaacaggaagctgaggctgccagcagctgaacaccacagtctgtctctactctgaggtgctgcttcctgaaggctggggctgcagaggagggagtcatggcctgggaatgcacatgtgcccttgagctttcctgtgtgtgcagctgctctgagcgggacagctcaggagggggtgggagtgttctcacaacacaacgtgagcatgcacatgcacacatctgtttcccaaggaaaccagctgggaggaagggcatgtgcaggtgtatatggtgctaccacgtgcagaccctggaggaaagcactaatcctctgccactttgcagctatcaaaggtgaggctggctgggcgcagtggctcatgcctgtaatcccagcactttgggaggctgaggtgggcggatcacctgaggtcaggagttcgagattagcctggccaacatggcgaaacccagtctctactaaaaacacaaaaattagctgggcatggtgacacacgcctgtaatcccagctacttgggaggctgag

SEQ ID NO: 33269 - DNA, 537 bp, Homo sapiens
gccccatcctagcctgcagcctggttctaccaccaccagccttctccctgggtctcaaggacccatttctgtaacccctataccactccaagctggggcagcacctcttggtaaccagcctgaccttcccaatcatccaagctctgcataaacatttgttgaataaatttcactccagcagattgcccctccccctgcaggaaaggcactggatcaagagtccccatgcagtgaagcagaggatgactcacaggggagagggagggacagggactgggaccggcagtaaagagcccgtgttgtgttgacaagaggcagagctccaacaggcccaacagtgcctggcaagggagaggtgccaggcagtggggtgcttacctggggagggggttacctggggaagcggtggggggcagctcagggggtcggctttacttggggcaggggtaggacctcaagctccaaagactctcatggctggattgggtgtctggtaggtgaccatatgatacacactggtttcttttgattttctca

SEQ ID NO: 33270 - DNA, 2343 bp, Homo sapiens
ctttatgggggtagttcagatccttactcctggacagcctcaaatggtgcgagatgaggcaagaagctcaccagtctggtggcggccgcagcatcggagcaaacgggacttacctatcttcatgaggcaggccagaaggatccagagggagatctcgaagggggtgcgcacgtgtgtgtagtcgatgcccaggactggaaaggccttgcgcggcttcatgccatgatcagtgacggaatgattaacagggcggctctctggggtgacctccggtggagcggtggtgacatccccaatcgagcgttctcgtggtggctctgagcttcgaatggtgctggcagttgggctgagctggaggccatggctcctgagaacaggcagcagccccaccaaagcaaccaccacgagtaaggaagggaagatccgatgtggagagaggccacagatgccagaccgcagaaccatggtgctgcttccagagccagcctcgaccttacccaaatgagagtaaaaccgggcacataggtagcaaagggtcagcaagtgggaagagagactggcgtagtctctaggaaaagttcatgttttagagaggcatttccatggaagcaattttctgggggtggagggaggctgggtttgcaatctggaactccaaagtggggaaagggggcaaggacccaggaacgaccacgaaaggagaccaaaaggtctggaactccgggcctgggaagggggaggacggatgtgggaaactgagccctagggatagaggaaggggcaggatagggatagtgcaaaggaaaggaagaaggaaggctgggacctttggctgaggaaagtgactgaggagctgggactctgggctgtgggctaaaggaaggggtagggagcctgagctaaaggaaggggaccgaagggggtgagagccagtccaggaaaaggagagagggggctgggagcccaggctgagaaggagtgaaaccgggaagcggccgggagcttctccacccagagaggggcaggggtccaggcgcgccgggctgagattccggggaaatggaaagaggcggaaggcaggcggcctggcgggaaggcgcctcggcgcgggctgggggcggctcgcggtgggccagcagcaacacgcccctcctcgcggccctggcgcgacgcggcgctccgccccggcccagctgcagctcctcctggtccagctccagaactaaccctagccccggccccggcggcagcagactgaagcctagctgagcccggcgctgtcacttataggcaccagcgagcagccggtgcggcgggctagagagaccgtcggcacccgcccagcgcagcggcccctgtcgccgagggaaagaagtatcgcgtaggaagaggaaggagagtcagagatgacaaaaaaaaaaaaaaaaaaaagtcctgaatatacagagaacctcactaacgcgagtaaaatgccgactacttacaaaacgatttcacgtccacatctgcagtctcataagggctttcgaataatcctgtgaagaatgtattattagtttatgtatttagttaccgtgtgaccttgagcaagttacttaacctgtttcacaactttctcatctgttaagtagagacagtaatagtgactatgtcagagggatgatgtaatgactgagacaatccgtgtaaactatttggaatgcaccctggcacattattacaattccacttttacagatgaggaaacaggtgaagagagtcccctggctactatgcaagtagttgtattgcttactagggctgccgtaacaaagtatcaccccaaactgggtggctgcaacaacagaaattgattgtctcacagttctggaggctggaggtcggatctaggtgttggcagggttggtttcagctgagagctatgagggagaatctgtcccatgcctttctcctaccttccagtggtttgttaggactatctggtattccatggagttctcctggtgtctctgtctctgcgtccagattccccgcccacactttatttttatttttattttttttgagatagagtctggctcttgttgcccaggctggagtgcggtggcgccatctcagctcaatgcaacctctgcctcctggattcaagcgattctcctgcctcagcctccagagtagctgggattactggcacccaccaccacgtccagctaatttttgtatttttagtagagatggggtttcaccatgttggtcaggctggtctcgaactcctgacctcaggtgatccacccgcctcggcctcccaaagtgctgggattacaggggtaagccacaaccccc

SEQ ID NO: 33271 - DNA, 1801 bp, Homo sapiens
ggctaatttttttgtattttttaatagagacagggtttcaccatgttagccaggatggtctcaatgtcctgacctcgtgatctgcccgcctcggcctcccaaagtgctgggattacaggcgtgagccaccacacctggcctttttttttttttttttaagacagaatcagccgggctgttaatcccagctactcaggaggctgaggcaggagaatcgcttgaactcaggaggtggaggtggcagtgagccgagaccgcagcaccgcactgcagcctgagtgacagagcaagactctgtctcaaaaaaaaaaaaaaaaagagagagacagagtctctctatgtcacccaggctggtctcaaacttctggcctcaagggatcctcccacctcagcctcccagagtgctgagatttgagattacaggggtgagccgctgcacccagctcccttgactatctctgcaacttctctgtaaatctaaaatgattccaaataaaaagtttattaaacacagatattatatattgtgggtatcatattaggaatcctggggggaaaggcaataataaaaaaaagattctgacttggctctggttgaataacaaagaagaaaacaatgaaaaagaaaaaaaaaaagaaaagagaccaagcagagacctctgaggctgcatttcaggaagcatggggaaggggtggagtagagtagtaaaccaaatgaaattgtaggttggatcagggttaagtttttgggactttatcctgtggcatggggagtcattgaaggctattgagcaagggtgtggcctgattacatagtgattcagccaaggtcacacagtccagcttccctcgatccttccctccccctacccactgcccctcccttccacgtgctcttccatctttgcctccagaggcctagctctggcacgactctaagtcactagcatagagatgatcacctccactgcccacacctgccctagccttgttcaggtgtctttaaagactcaacatttttttgtttgtttgtttgttttgagaagcagtctctgtcgcgcaagctgcagtggcgcaatctcggctcactgtaatccccgcctcccagattcaaatgtttctcatgcctcagcctccagagtagctgggattacaggtgcgtaccaccacacccagctagtagagacggggtttcactgtgttggccaggtctcaaactcctggcctccacctgcctcggcctcccaaagtgctgggattacaggtgtgagccaccacgcctgaccctcaacatttattttttattctcgctctgttgcccaggctggagtgcagtggcgcaatcacacctcactgcaacttcaaactcctgtgctccagtgatccttctgccttggtctcttgagtagctgagactaccagtgaggctcaacatttagaatctcaacatgccacacctggtaagggctggcaccattccaccgacccagcacagagacctcttgggcagggagttgcagggtggagccttatgcaaaattccacaagttctaggttgagtcatttcttccaccacacccactctgctcactctctcctcccccagtgagataagtccagtacatcggtggaggaagggggctcagcagcagaagatggggaagacggggcttcaaggctaaaccagaatattgtgccaccaggagaattgtcaattctctcttcaacgagccttcttgaaaccacacatatgcccaggtcagaagctgggaaaaggaagttggatagaaaaaggagttga

SEQ ID NO: 33272 - DNA, 1613 bp, Homo sapiens
gtgggcgagcgtgtgggcgggtgtcccagaagcggtgtgaggagcgttttacccggtggtggggtgggaggtgcgtccgggtaactaatggcaaccgggcggggtgagcccgctctgcaggaactcctcgacggcgaaaaactacgactcccagggtgccccagggcttagcccagctttcccgcccgcccactggctgccggtcccgcaagcggcgaagcccattggccacggcggtgcggggctcccccactagcaggttagtgggcgccgccggcagcagacgttgaccgggcgcgggggggtaagtgggggggcccggctagccattctggaagcggccgggcgcagtcttcgtagcgtacccgccggctgcgaggcgcagggcggaggcggagactgcgtggcgcaggcgcgttgctgggcttctcctgggtccccagacagctggaggagataaacagaggaggaggagggaggggagtgcgtgtgtgagagcgcgcgagggagtgtgagtgtgtgtgagcgcgggtgtgaggcggtgcgcaggggcgggcggaggcgctgtccggccccggccaggcgccgggcggggagcatgggaaggggctagaactgctcgagccccccagccccctccccgggatccgcgccccccttcccgggagaggggccgccccccccggacggacatgggctcctgaagttgcgccgctgccggtcgggggaagagacctgacaggtacgggtcaccgccgccccctgccctccgcgggcgccgaggcggggaccggctcccgcagccccggtgaacgggccgcccgctctgggccggctccagccctgccggcctgggggcctgagcctacccgcctcggggccccgggtgtcccgagaggggccaggcctcgccggggcggagggcagagtggtccgggggcggggtgggggcggagggtttggtcgggacgcggggggaggctgtgggagtccggggaggctctgcggagggagaggtggaagtcattccatcatgggacttttttgcggagtttttgtttgacatctgatctggcgccggagtcaggaagaaggggcaggtgtaagtgctgggagggcaacgccgacctgacctgccctcttagcttctcgctctctctctttctgtttttctctctctctttctgtgtgtgtgtgtgtgtgtgtgtgtgtgtgtgtgtgtgtgtgtccacagcagatgccttcagtggcccatcctggcaccaaacaactctgccaaggtgtttccaccaggcgactgtagcaccccgtatacaaagggcctctgcttgggaacgggctattcagtacccacttcaaagggtaaataggaagtgaggagatagaagagagactgcgaaccagcaggatccacttcttggactgaaagccgcagtgggacgcccctttgccagattggttgactttgcttggtggcttgggctctctctcctctgcgggtgtactcccagggtttctagaggagaggtacaggggcctgtaactaatgtcttaatagccgaatttgactgttttccccagagttcttttcttctgtgactttctttaacctc

SEQ ID NO: 33273 - DNA, 1273 bp, Homo sapiens
attcatgtcaagtgcttggcacctaagaagtgctcaataaatagcgactgtaccacacctcctaggagccctcagcgtactgaattagagttctctataagtctccggcgctagactgcgaactgcctgagagcatcccttctgcagccgcggggcataagcggcaaagactcggggctggcaggcgcatagggagtggggcggggctggccgggcccagaggaacgcggctcggattcccgggggaaggccaagcggggcggaccccatctccgggaagtgacgccatggggacgagcggcaccagagccggggccagtcggagcggggcgcgcgccgcatggcggaagcggaagggagttctctgctcttgttgccgccgccgccacccccgcccaggatggcggaagtggaggcgccgacggcggccgagacggacatgaagcaatatcaaggctccggcggcgtcgccatggatgtggaacggagtcgcttcccctactgcgtggtgtggacgcccatcccggtgctcacgtgagtctcttccggcatccgcctggggacgaggagggcccagggagagccggagtcgggccgggctagcctccggccccaacgcgcagcaagccttttcctcgggtctggcccgcacgcctcgcccagtcaccagaaccccgccatccatgtagtgccagtttgtgcacacggctgggacacgctccctgctctcaatacacctggtgtagccagggagagagttgtaggccagcaggaaagggcaagtggctgggagactcgagctgtgagtgtgtagaagagggagccccttatcggatctgaggagacatttttattaattcactggtttattctctcattgagcaaatgcttactggtcgcttaccatattccagacatactgctgggtctgggagcaagagtgggagtttggttgggaccacacgagatcctgggatgtcaacattggaagggcccccagagatctgagagtccaaccctttgtctcacgtgccatctcagttgcaaactgggtttagatcccaggttgtctgcctcccagaccaaagttctttctgtaacatcagcctttgtcaggggagaagcaggtgctctggtactacttggcgccttttgggaggagctctcatatggggagaggtggtttgccctcctgcttcaaccttgacagctgataaacgtaacccctcctcaccgtgctggatagtttgccaagctcttaaacacccatttt

SEQ ID NO: 33274 - DNA, 1745 bp, Homo sapiens
atgcgatttgtgtctgtcgataattgtatctttgtgtccgagtggtcgggtcagccttcattttaggctacgatttcatggacatccaggaagcacagctactggactctagcataagcaagtaagtatgggggccgagcatccgggctggctggagggaggagtgactcgcgggggaatagcctccttctggccccgcccctgagccatcctttcccgcccacttccccgccccttccccgcccattctttctgggccgctgaggccacttaacctaagctccctcacccagtatccagtcccgtcgggccccttcgcttctctttttgcctctcctagcccgatccttggaaatagtatgctaggactcctgaactccagcctcccggcccctttccctaagtccaagctcctctcccagtaattgtcctcaagagatccgcgtgacattctcctgagggtgaggctgagttctccaaccccacccctgagacaccacagccccgcgccgctccccgccccgccccagagttccaaagcccctccccatccttgccccgctggctgggcaccgctccgactgaagggtgcctaagccccaacctcgagccctagagccgcgcccggatccctgtctcgtcccgagcccggccgcgccccagatcccctaaatcccacttttttcacggccctgtcccaagcccttcagctttagctcactttaagtcccctagacccggtacccctctcggcccctcccttgagccttcgagcccggcttggtcccctcccaggaccctgagtcccgcccggatccggccccgcccccagcgctctcacccgcgttgtagaaggcatccagagccgcggtgtcgcctagctccagcgtcccgaagggcaggctgcgcagctgcgggggcggccgcggccgggggacctgcgcgcaagcctcgcgcaggcagcgcaggggcagcggctccgcctcggttccctcccgaggctcgagcccgggctgcggctcccgggtcagcacgtagaccacgctgagcggccggctccgcgcgcagccccggcccgggggcgccgcgagctgccggccccggctcagcgccacggccagcgggtcctgccagcagctgccggcgcgctccgccccggaccggggacacggccccgccatgcgggggcgctcaggcgcggggcgccgcgcactgggaaccgggggcggggcaggagcctgggccggcagatcaggaatcttgggatctggaatccgttcggaatcggagaatctcccacgggatctagggatccggaatacggcctgacgtcccgttccaggaatctaaagtccagggagaaatcctagctcggacttgcaaggtcctgaggttctgaaatccgggattgggtcccaggaatctggggcatccggtgatcggcagctcagagccacttgggggatcctgggaatcggctcggaggtgcccgccacctggacttctcaagggagcgcccgccaacgctgccctgccttcacttgtaggctaagcccagccctttcccggccgacccagaaagctccaccctcggccctggggcagagccgctccctagcggcttgagactcagcctctcccctcccttctctcccgccagaactttggagactggcggcttccggaacagcctgtgcccctgtgcacgccaaagactgtggactgctcacagcaagtgcacataa

SEQ ID NO: 33275 - DNA, 2650 bp, Homo sapiens
aaaatgtggccctctgatggaggagaagaagcgaatgggctggcaccactctgaaccaaagtctagtctatatacaccaatagctgctgaactttttctacaggcaaccctaccaggattcaaatggagctctctgaggtcctgacacacacttcaaagggacttttacgacttacaaatagttctttccaacttacagactgaataaaggggctggacttataattaaccttccagagatcaagactgtccccatgccagaagtcaaatcacatatctgaggccagacctctgcccccatttgtaacaaggcaaacttccctaacactatcttttgagtgggcagtgacttcccccttgcccagtgattctcagaggaaacaatttagttaagtaacctctgccctttactgtgcgaccttgggcaaattacttaactcctctgaaactcagtttccttatgtgtaaattctcaagagtcactgtaaaaaaataagaacatatgcctaagcaagggttgacacctagtagggctgccataaaagttcttcctcttccttctaaccctcctgaattctggacctaaattccaatcagagccccaaggggctccaaggagtccttcctcttctccggttctatggacaaccatattaaaactttccctctcagaggctctaggattcctggagaaccaagaggaccccagctcaccccatcatggtctgggtagcacccacgtcctccttggaacagcccctttagacaactctcctccttactctgcagactatcctgtacgcgcgcacacacacacacacacacacacacacacacacacacagtgtcctcctcaatttagcaggccggggcctcaacgagcacctcaattacttcatggtacacacacacacacacacacacacacacacacacacacacacagtgtcctcctcaatttagcaggccggggcctcaacgagcacctcaattacttcatggtacgtacacacacacacacacacacacacacacagtgtcctcctcaatttagcaggccggggcctcaacgagcacctcaattacttcatggtccagagatggaaactgaggctcagcctggggaagaacttgtccaagatctcagacaacagctgggacccaactcctgtacatacatctgccgacgaaaccctcgttttacacagggggtaaactaaggcctagagaggaaagtgacttgctcaagatcacacagcgagctgatggcagaaccaggtcaggccgggacactcatagtccctcagacttgtggacccctccaagtttccgaaggggacttcgggtcactccctccctccctgagggggtggggtggactaagacgccaccccgcgctgaccgctcgcccggcctctgccagtccgcagtaggagtcccggcacccagtcccccgagaccctgcacggctcgggaagagcggcccggccggggcccgcgcctcccagcggggtctacccaaggggacttgttgctcacctggcctcccgcagtcgccgtcagcgacaggaagggtcggccggccgcccagtctccgcacagagtgtgctcccgcggaccgcctcgcgggctgccaaacggccggaccccctcagcgcgctacgcccccagccgcgctcgccctgcctgtgtccgccattacgcgattccccgccctgggcggcagccacaccccgccaatggccctgattggctcactgccccacccacccggggcttcggggcattccattggcctgagtaaaacgccagttaaataactacgcaaaagacgtactcacgggtaccctccccagagctccacccgggcgacttccgcaatcggagtaaacagcggggtgcaaaccaagtgaagtggggggcggagattaaggtaaaccgactcctaagttcaaagtagggaaagctcacctaagaaagtgtaaaaactcgtacaaagtgtgttgaaagaagaattcttcttgttagccttgaaagaaccgctagatttagtgaaaggaaggggccaagcccgtaaactttctgtggacacccctcaagttgcgcatagtgttgtcccttcactccggtctcagccagggcagaaagtagggtggggagagtgagtcacaagctctatcccgtcctgcacagtccatccggggcaaggcccgggtcctgggaatgggggatagtactgaaaagccatggtcaagtgagcggaaccctggttcagccacttcactctgcgacctcagacaacttccagaatttatctgggtctcagtttgtccttctgcaaaataggagcagtcgtctgtgcctcacatgcgggagtggttgttgaggactcatgcatgagtggggaatatgctcgtcttgttgattataaaaggctgcagctgtccgggcgcggtggctcatgcctgtaatcccagcactttgggaggttgaggcgggcggatcacctgaggtcaggagttcgagaccagcctgaccaacttggagaaacccccatctctactaaaaatacaaaattagccagccgtggtggcgcatgcctgtaatcccagctactcaggaggctgaggcggacaatcgcttgaacccg

SEQ ID NO: 33276 - DNA, 1125 bp, Homo sapiens
gggaacgcgggagactagaggagggggaattgaggagccactgggggagacaaagacatagcacttggggctgggcctgggagcccccctgcctgtgagggccctgagccccctcccagtccttccccatccccctgccaggcctgttgtctctgagcccagcggcaggcgggcggtgggaagagcagggctggcaaagctgacactcactaatcacggccctcaccccggagccgcactaactgtctggtctccatggagacacggcaacctccggccacttgttaatggcagctcaacaaggctgcagcgacagggacgggcctgaccagcgtgcccagctccacactacctgtcccagcctggccctctgcagaagacctcaggggcaccagacctgggggacaggaccggaggtctggtggctggacgtctccccaacccctccgtggccccgcctcccctggcactgccaagcagcgagagggcagaggcagcctctgcccaggctgactcctctgcagggctgctgggaagctgagctcatgcaggtcacccaggcaaggccaaagggctggagggggatggtgaggagtggagcggggacctgcccacagcccacacactagcagagtggaggagggcgtgctttgcctgccctgacaaccctctgctctgctagcctgaggcaggggcccagttgggaaccatctgtccagaacctcttcccggtgcactgtcactacatctgaaatgccaccgttagcaacgcactccttcgggaggcagcatggcatagcacaaaaaacactggttttgccgtcaagcaggcttgggtgcaaggcctgactctgtttctctacctctaagcattgatttccccatctgtaaaatgggggtaatcattgcacatacaggctaactcttcctcttcctggaaacctgagctcattacctgtgatgcctcccccagaatcttcttcacccccacaaaccagcagggcctcctccacagtccccgggctcatcccacagcatgctgcacctgcctgtgactgtcccacatttgtccttcccacagactgagccctgtggggttgggcagagtgagcctcaggagagggt

SEQ ID NO: 33277 - DNA, 2097 bp, Homo sapiens
gagtgcagtggtgtgatcttggctcactgcaacctccgcctcccgggatcaagcagttctcctgcctcagcttcccgagtagctggcactacaggcacctgccatcatgcccggctaattttcgtatttttagtagagacagggtttcaccacgttagccaggctggtctcgaactcccaacctcaggtgatcctcttccctcggcctcccaaagtgctgggattacaggcgtgagccaccgcgcctggcaaggaggttttaaacaaacacctgtaaaaggctgcaagccctgtgggggcagggcactgtgtgtcttgctcagtgatacctgcagcactggatacaatgcctggccccaagcaggtcactagctcatgtgtgtgaacacagaatttatctacttcccccagccttccagcacaaacgcagtgcactatggcagcaaaggttatgctgacaaagatggcacaactgccaggggaaaaatcatgacatattacagtcacaagaaaatatttttcatatttgcagtgggggagaggactggtgtgcataactgtgatgacagcatttctagctgagccgggtcattttgtccttgggtcctccagggaggactcggcccaattgctaacgcaaagaactaggtgctatcacaaagcctcccccaaggccccaaatccacactagaatacaacctccttcctaggaggagcacaggcgagggagggccggctctatggtcctgcatgaaggtacaagaggcgagggttggaggtgtgtgactcacacaggctggtcagaggccccggagttcagcctctgtcgggtatttacctacccatcaccagccgctgactacgtgctcactgtgtaccagggacctggccaagggcttcacgtgtaatctcatttaattctcacaagagatgcagagaggtgacgtgactcatcaggtgacatgactcaccaggtcacctagctggtaagggatggaactgggttgtgcatagaggcctatctgtgtccacaggcaggctcccagccaccaccctccagttccgtggccctgctctgggacgtgggaagataagaaagaagaagggtgagtcggtatggtcgtggagagattacattttcaggaaatgagggctcagaacaaggcctggcctaaacatggctgcaggagtggcaagagataggatcagagggaggatggcctcagagagtgtggggaagaacttgtgcccagaagagtcagggcaggactggctgggccctgacgtaaggcctcttgctcagagtcacaggcaagatcaagtgacctctcgaggtttcaagacacgaagagacaaagcccagagcagctgcggcctggtccaggcccgggcatgcctgctgaccccggctggatggtggccttggaaactgcttcctgcttcagtcaggccctagccgcgtaaccttggaggacctgtgacatttctcttggcctcaggtcaggcctgagagggagtagggaggggagagggactcgagaatcctgaacaccttggagggcccttcataccctcccacccctgtccccagggtctgatagggtcgatctttagcccacagggcccaacgtggagccagtctgtctggctctactttccatctagaggcccagagaagatgtctgcacagggccaaggccccctccttgcttgacccgttctgttccccgtcccatcagccacagctctcagatcagtcaggctccacattccccattctgtctcctctgagcttttatcttctaatccacattgggatgtgacctgcctttgcccacagttccctctgcccagaatgcccttcccccggtctccatgtgtgcaaaccttgcctattcttgaaggttgagctccagtgcagcttcttccacagaacctcaaaatccatttaagatgtcagacccagcaagagttgtggggactggggcgggtgcggtggctcacacctgtaatcccagcactttgggaggctgaggcaggtgattcacaaggtcaggagttcgagaacagcctgaccaatgtggtgaaaccccatct

SEQ ID NO: 33278 - DNA, 1280 bp, Homo sapiens
agcttttttctcttgtacagtgcttcccacagctggaatcaacacatgcttaatgccactgtttgctgtctttccctctaaatgggaagccccctgaggaccagtacctcatttgtggtgttcactgtggtgcccccaatgcctggcttctagtgggtgctggacagatgtctctagaacaatggaatgcattggtttgaggacagcgcagttaactcacagccctgagtggggagcagggccagaatgtggggctggatggcatcccagttcctcctgcgttcaggcctcactgggtggttccattatgtacttcactgagctgtgacctgcccaaacacccagcccccacacccgtccattttcccacccagagcctgggaggaacggtttttggattatttcacatttctggattatccatgagacatctccccgccagtgagaaggatcaagagtttgacattttaaaccctaagcagtttctccctggcctgcttcagatctgaggctctgctggttgcaatgagacgcatggggaatggaaggccattttaatcttggcctggcttcatcaggaaggaaaagatgctgccaaaaaaaaaaaaaaagtttgcttcattgtctctgccatgcagagctgcgagagcctaagggattatcaaagtaaatttccttgaaaagatggggaaactgaggcccagagaggggcaaaagcttggtcaagggcatgtgggaagttggtggccaatctgggaatggtcctcccggaggcctccggactcctgcatgctgccctttgtcaccttcaggcaccaggggagctggggtctggcagagagggggcaacaagtttccactgacatgacttcaggaccctgagtcaccctggccttgaatggcctcccagagcacggatgggactttccaggagcccagctactcctccaggaagagaaactcccaggaagcttcagtggcagcagaggtgaagggtgagggacgcaggcatgcccccagtctgccccatcaccaaccaccacatctgggccaattttgtgacagatctgttgtccaaaagtggggccagtggcggctgtatttcgggagcaggctgttcttcaagaagatggctccttcaaccttgttccctttgatcattttgggggcattttctgtcttttattttccttttttaaaacaccaaatcttgagaatactaaaactgactccaactaatgaggtcacagtacctgataaaaacagtatcaaaacattta

SEQ ID NO: 33279 - DNA, 987 bp, Homo sapiens
ccttgcttggtggcaggcaggggcccccggtaggcggtggggcatagccggcgctgtgggcgctgctgggtgaggcagggaggctgttgccactgccataggcgaagctgcagtccttgctgttagcgcagtcctggcctgtaaagggcttagttggggcgaatacgctttgtccggccccatagccgccgtactggggcaggtaggtgttggcaggcgggtgggtggtaggtgagcgggccatggctgagggcgggggcaccagcttggggaaggtctcggctgcccggcagtctgaagcggctggagttagcccatagcttgctgctcgtcctggtgggaaggtctggcgcgcggacaggacaggctgaaaggaggggtccgccccagccccgctgctacccactgccactgggctggccttggctccccggctagggaaggtggccaggccccgctgggcaggcagggcactggtgggtggccctgcataggtgcccgatgccttccgggactctgggcgagaggctgagagggcaaagtccaagagatcggaggagtcatccgaatcgagcagcgagcgaaagtagccggtgaagaggttttggcgctcctggctgagctcggtctggcctgagggtgcacccgtgctgtagtagctgccacggcctgaggctccactctccagcccagtggaggcaaaggcccgggcctcggtcccctgaaacccacagtttcggccagcttgtccgcctgggtgcccatggtgaggggcccagccaccacccttatccccggcccactcagcacctgcctccccaaagcctgggccactgggcacctgctctgggaacagagtcccattcttccgggaccgtctcttgcgctttggcttcccagtcacagcgtctacctccccccggccccgtttgcgtgggtgccccaactcagtaaggcccgggcccccgaccccagcggctgccacgg

SEQ ID NO: 33280 - DNA, 2200 bp, Homo sapiens
gctgaccaagacacacacacacgcacgcacgcatgcatgcacacacccacacaaagaacctgtcacatagttgaccaagacacacacacatgcacacacacacagaacctgtcacacagctgaccaagacacacacacacgcacgcatgcatgcacacacccacacaaagaacctgtcacatagttgaccaagacacacacacatgcacacacacacagaacctgtcacacagctgaccaagacacacacacacacacacacacacgtgggacaagtcccatcttccaggtgtgaggaaggcatggacccctccacccaccacacagcatgaggcagggacataacctcgcccctgcctgggaatcctccctgcagactgtgggatgggtacacaacatgtcacctccccggctgccttggacaggtgacagcccacctcacccctcccccatcactgtcaccagcctgggtggtgccgtccctctgcctgcagaggcgtcacagctcacacggcatgaatgtcaccccagcactgccagagccgggcacagccacacattgccccagtgacaaacaccactggccccagaggaggtgaaggcacacagggctctggtgtgaccttggcctctggacaccaggaggggaggtgctgtggcttcccgcccagtggcgggtgctgggggagaggagtgctggggaggaagctgcctggacacactgactacctggaaatgccacctcccccagccctcactccactccatttcttattcactgtagttgtgtatctagggagggggctgaatgagtggtggagggagggctgtcctgaggcgctgttactatgagactgcttagagatcagtggggagtagggcggttaggggttgctatcaccatgtgctcagtgggaagagtatgggataatggcttgagacccccatagcttccaggggagcccttcttccttacaaaggccccctctccaaacttcaggccacagagctggggacaaggaggccaaagtccaggaacatgactcacccagggaacaggcccagcctgctggccatagtggtgagggaggccaagagccaagaggcctgggttccagtctgagctcctccagggccaagctgggtgaccttggagcagcagctcagcctctttggcttcggggaggggggaaggggccgcagtgagagaagtgccagggtcagaaagaagaagctgaagctggagaccagcaggcagaacttcaggccacagagggctccagcccgcctcccctgctcccctgcttcctcacaaggaacctcatcttcctcatctgtacaaaagggacaagagtgccagcctcatgagacaaggtagcataaagtgggccgctcctcaagaaatgggaagcttctgattgaagagagggagaaatagactaagagacttgcccaagccacagagcaaattaggatcagctgaactcagcctccatctcctggctccccacctggagctgtttctttaagactgcttggaggtcaagtgtggagggggacaggggagatgttggggtgttgttggatgcagtgcctccctgccgcccgatgaagaccaatgaatctgataggagtccaccatgccctacctttaccctaaaccccacttggcccaaagcttggacaagaggagtggctctaaggggagggaggcaccccacctcccaccccatcatgaccagcagcagcacctggtgcttggaaggactagaggacctgagatgtcagtgtctagggcccctcgttttacaggagcccagagagggaaaggcctagcctgaggtcacacagcacgacagcacaagagcctagagtcctggccacggacagcctcagagcagagtccccctagcccctgggggtggctggagctggggggccctgggggactgagtaaagcgtggcgacagatggcctgccgaggcagcggcgatctgggcggctggcaggcatgctcgctcccgcgcagggaagcggctaattttagctgaggcctcgatgccagctttgttccccccacccacccgccgagggggcccagcatgccttgcgtgcaacctgcctcccccaggcacccctactcccccgcctggccccttggtgagtagtgcccagaccccaggatcctagaacggtctgc

SEQ ID NO: 33281 - DNA, 1099 bp, Homo sapiens
actgatccctgccacctccgcccccctcccagatgaggccacagagtttctggctcctggaggaggtgacgggcggagagggaaaccaggcggctgggggaggggcgttgcctgcacctggcccttctccgccgcgcaagccgggaggggcgggactggacccccgccagacccgaaaagagaggccgaggaggcgaggggtgctctctccactcccgcagtctggggccgggcggcgaggtctccccccaccaccctcgccgcggaggcgccccctagggtcgggcgccaggcgcccctgcccgagctgcgcgcttagctcgctcccccggccggccgcgctctccagctgcaggaaattccagaagctctccatcatccccgcgcagcgcgcagcccgggctgccaaggctccccgaaggagagccacatgccggccggccgcgcggcccgccctcggcccccacccggtccaacccggccgggtagccacgtctggccgggcgggggccaagccggccgccccttcccgcgccccgggcccggcggaatgcgtggcagccccgaccgggggctattttgagcgggaggggagcggcccggcctcggtgttttcggctttttcctggcccccggcccgccaggccgggccctctgctgcccgctgaatgggagggggggcggggtcacgtggcggggggaggggagggccgtcgcgatccgggtcgggctcgggctctgccccggcccggggactggaggcgcccggcagcggtccggacctgcgctctcggacgcggctgagtggcggggttattaatagcgtgcctggctcgggcagtggctccagggcgcccgctacctgcacgcccctcctgcagagagcactggcggcccggcgctccctccgcagcggcggactgaggcctaactggatagcgccaccgtgaaccggcggccaatcacaggcctcgatttccttacctgtaaattggggttgagctacccggctttatagggtaggtgccatataaaggttttgtttgctgtgtgcctctccttgggcaaaacgctgtcacaattgggggcctccgttttc

SEQ ID NO: 33282 - DNA, 1619 bp, Homo sapiens
cgagagccagtggatcctagggatttgggggttggaggggaggggctcctccctccgcagtctccccttttcccagcgccgatcctaaaatccagccttgttctccgctcccacggtccccccttcattccccccccccccacattctcagcaagctggagagcaaattgcagttttaaatccaaaggcggagggagggggaaggaggagggggcgcgcggcagcgctgggcgcgcacctcgcccccgagccgggggagccgcggggcggccaggaaacccgagaaccccccctccccgccccccctccccgtccacctccccctcccccttcccggcgctgcctgccaggcttcgagccgagcccagccgagccgcgggccccggtggaaacaaagaccgatcgcaccgcgggcaccgcagccaccgggtccagcggaccggaccgggggacgcaggccccccccgtgcgctgcacaaaagagcctggccggccggtccccagcgggggtctggggctggggaggaggcgccactcaccggagtgctgggctgccggctccgtgggtccgagccaggcgaggggttttgggggacgtctgtcttccggcggtggcagcgacgcgggcgcccggctgctgaggagaggagtcgtggaggagccctgagccgcccgccgtcgctgacagcatggctcgcgcctcggctcacattctccgccgctaactccgctggacacggccccccgctcccgcggcgcccccccacctcgatcactccttcgctctctctgcgcccccctcgccctcccgccgcgcacacactctcccagccctggacacccccgcccccaccccccccaatagcaaacctgggagggaacgcgccccgcgtagtcctcctgctcctcctcctccgccctcctccctcccgctctctctggctgtctgtctgtctctcagactgtctctatttctcgctctctctgcctttctctgctctccaagctgggtgggaaaaggaaatgaggacagaaagcagacgctggctttgggtggtggtagctggattccctctctccctccctccccctcctcccctccctcctcctgccttctgctctctccgctgcgagcggggctgagcgcagcctggcgggtggctcgctctgcccgcccgcccgcctgtctgtctgtctggtccgcctcgctcgctccctccctccgtctctcgccctcgccctgcctgcctgcctctctccgtctccgccgccgccgccgctgcctctgcgagctcgccttaccttcgccgctcaccatccggaaccccaggggggagcgcgcgcgcggcacgccgggacttgtagtccccgccccggccgctccgcgcgcggggagggcggggccgcgccggctgctccgacggcgcggccaggagccccggggaccccgcgcctggggctcgtctggctggagcgcgtcctcgtttaccaacgggcgaagatcctccccaagggttaagaatggtccctgtgttccttgtctccaccggggggctctggatcgagcggaggttgcgggtgggagtgaaggggcggggtctgagagtggaatgggagtg

SEQ ID NO: 33283 - DNA, 1033 bp, Homo sapiens
ctgtccagtctggaatgtccttctgttgcttctttctttaccaagcaaactcttactcttgtttctgatgaatcaacacctcctctgagaagcctcccagacttccccctgcccagttgagttaggactctcccctgttctcccacatagctttattgtcattttctgcccgcatctgtcctgttagcacccatcaccattaaactgtgacctctttgagagcaggaactgtgccatatctcctgtcctgtggtgggaagtttctgaagagacctggttctcccatcccgggaggggggaaagtttcttgcagttttggatgtagtactcagagtcaccactagagagagtgtgaacatcactgcaggaccatccaggctcgtgtgtgtgtgtgtgtgtgtgtgtgtgtgtgtgtgtgtgtgtcttcgatactgtacctggggtgtgtgtgtgtgtgtgtgtgtgtgtcttcaatactgtacctggggtatgtgtgtgtgtgtgtgtcttcgatactgtacctggggtgtgtgtgtgtgtgtgtgtgtgtgtgtgtgtgtgtgtgtgtcttcgatactgtacctggtggagtggagagaggatccactcagctcagtcccggagcagtgggatccagagtagactccattccccacaataagtcctgggtcccccagatttcttctttcttttccccacaactcagagcccataccccttggctttccccctcctacttcttgcctctgactctccatccctcgtcttccatgcctcatctgcaccctcagccctcccatgcctaattattggcacttgcctggcctgaatgggccttactctaccatacgtctgggcctttgcacatgctgttccctctgctggagatgacctcaccctctggctgcttcatcaggcagacttttatttcacagactccaagaaatcccccagacttggctcccagactgaccttgcccctaagtgttgtcattgtttactgttttgcctcctagacaggaccagcctacag

SEQ ID NO: 33284 - DNA, 656 bp, Homo sapiens
tacttgcatccttacctgcacccttacctgtccccttacctgcatccttacccgcattctcacctgcctccaccccactgcaagtgaagagcagcaggtagcacaagaaaagcgataccgccttctgccgcatggtggcgccgcgcgcgggctccgtcactagacctgcgaacgggcgagagggagatggtccccggagcatttttggagctcatcagctccgttgttttcccttccagttccaactgaatcagtaaaaagcagcgaggtgtggtgaatggaacccaggatccctctcaggagcctcgggaatccgtttcctctccgcatcagtggcagagatgtccctgccccaaccggtgggtgtgcggattctgtgcggattcgcacggtgtttggcacgtggtaagctccgcagatgtcaatatcatgactgtggttgttcctggccttgtacccaagtgaccttgggcaggatactagggtactttgcttctctgggcttcagtttgtttatttctaaaattggggtattaatagagtctatttcagagggtacttgttaatttaataactgttccacgctgtatccccggcactttgaacagtgcctgacgcatagaatttgctttaaaaaaatttttaagacaaactca

SEQ ID NO: 33285 - DNA, 1058 bp, Homo sapiens
agcccagagcactaaaagggacccaggagtgctgcctcccaggagaaggggcctcctggctctcagaacatgagatttacaggcagacaggcagcctggcagagggtggcagcttgatgcccacacttcatagctcctgagtttaccttggaggagagaagagaagcaatcttcagcccggagcctgctgatagatgggcacagcagcgagtaaacggttctccggctgaaggctggctttttatcatcacttgtggatcctcccacgtctcaccctaggcagccaatccctgtcggagtttctatttctgcactctgcagtttcattttcccctctctcccagctcctgcactctgcagagtttcattttcccctctctcccagctccgcccagcgggaacatttgtgtgctgcctgctggcagaaaaatgcacttcaagctgaggacttttggagccgctaagggtattcaaagcatgtcacactatgatgagagccacggccatactgggcttagtgaagcctgatcaccagctccccctggggcacacaggcctttcaccattcagtccaattagtaaacaacacctatcatttattgagcacttgctgcatgccagggtctgtgcaaagtgctctatttacatgatctttttccaatcccacagtagtcatgtgacataccatatgctgtttataaacccccagaactttggaaattaagtcactttgttccattgttctctcaggctggctgcttctgggtcatgggcatatggtaagaccagtgaagcctgtgttcatgtggccatcatgatagatcttgagtttcaagatgggtcccctggccctaggtaatgaactgagcattctttaaagcctttggatggtgatgcttgaagtgctatgggtcagaaatgcaacctctatttggagaacatagaaattccagtaaggatgaatcattgccttctcccaagtggaaggggtctgaaataattgacctgccaccagatggctggctattctcattgagaaattttgccatattgctacc

SEQ ID NO: 33286 - DNA, 1511 bp, Homo sapiens
ctcttccgcagcataggggtgctctctctggggctctccttttctctcctaaggcccacagccccacagttccctatttaggtgtcttaaattgaggacacacttctaaattgtccctcagagtctcgtctcctcctttgagcgaggctgggcgggctcctcctgctccgattatgaggaacttctttcccaagctccccaccttctttgggcttggacggctgcagagttccagttaactgtgcgccgccttcgttccaattgtacccctcgtgctcccagagggcagctccatggaaaccaaaacatcacaaatccccgaaggtatcgcgagaagcgcagatgcgcctgaggccgtggagaggcggagcgagggcgggaacgctgagcaagtagggcggagcctaagctcttccgaggtcccggccgggagcctgtcccctccaggtggcgcccccgcgtgactgcgctttacataatcgcggcctggagcgtcacagtggcgtactccaggccagaccgaatcagagtgggcgaaagctccgtgttccgccccttcccacttgatcgacgtcaaagcccaccagtgagcgggcgtctagagtcgccgtgcccgccccagcccgcccgggtccgccccgacccgcctgcgcccgcccgcctgccgcagccagcagcctgcagccgccgccgggttgtgcctcagactgtcagataaatcggcgggccgggccggcgggtcggtgagcgcggcccgggccggacatggcggcgctctacgcctgcaccaagtgccaccagcgcttccccttcgaggcgctgtctcaggggcagcagctgtgcaaggtgcgcgggctggggcggcggccgggaactggggacgcaggaggcgcggcccggagctccagattctgtggggacgcccggcggggtccccggagcagggtgtggcaggcccgccaggctgaggagccgcacccaccccgctgggggccggcggggcacgtgcgggagccgggacccggtccaggctcccgcggccggcgtgtccgggtgcttagcaaccgtggggattgttctcggaccccgtgaggtcgggggagggacagcgggtcccctgcttgccctgactggtcgccttcgggatccctttgcgctgcctcccccgccgccgcggtctccctggtggggacctcctgcccctcctgggactgaactccaaagttgggtgctgccttggaggaatgtgtcgaactcgggctcctcacgggcacttttcgaccagtttcagaatcggaggtagcaaggcttgattttttttttttttttaagcatctcacttttcggccagtctcagaatcggaggcagcaaggctttatgttttaaaaaagccccacagtcaggctcacagatccgagggatcacttctcagcatccagttggtggtcttcggtcttccctgactagctgctgatcagtttttgctcctgaaggtccaacttctcttttt

SEQ ID NO: 33287 - DNA, 2310 bp, Homo sapiens
ctactcagaggttaggtggtaggacctcctgagcccaggagaaggaggatgcagtgagcagagatcgcgccactgcactccaacctgcgtgacagagcgggaccctgtctcaaaaaaaataaaataaagaaaaaatcctaaggccatatacaggctcattcactttgggtctcctttcatccaggcaagcagctttctgtctttgcattttccaaagactacaaagcaggctggggtggggtggggtggggtgtagaacacaggaaacgcagccagttccccttcacttctcactatcttgatctcctcccaaaccaaaatcctatgtctttccttttaacataggcttacaaaaatgcagttttctgtgggaacattgaggtcatgcattccaaattacttaagggaacgatttttaaattttaggaatctagttctccaagatatcccggcttgggatatagatgaacgagctatttgggagagatttagacgagaatgaattttagagaagtagcgaggtgaggagagagtcagcttagcgtttgggttttgcagtcaaatttcagcaaggcgaactaacctcgctggtcttaattttctcatcggtaagagggaaaataataatgcttactttgatgaattactttacttcaacatttaaaaaaccgactctccgttatctattctaatgataaaaatatagatagagcatcgtcccctgctgtgaaaaatcttatgaacaagtgaattgcggtgaggattcacatagtatgtgctcaataaacattattttattgtttagattagaagaggggtggagggagaaatgaaagtggtttggaaaccccaaacactaccaaagccctggggatggaagtagagaggaatttcgggttacgatttggttccgggtctgagtttcaacgttgaattctcccatatttgggcctgaattctcagaacagaataggatgtaagggctgagatcatctggtacagttttatgcaaatcgaaaattcttgcctcttgtcactgtgccctggcgagaaacaacacctccacccaagctcatccaatctcagccccaactaggtgacgtcatctccccgccctgcatccccaagcctcggggagtcctgtctctaagctacagtcccagctccagtcccagctccagtcccagcggcgcctgcgcactttggaccggggcggggaggacgcgtgcgcgccgcgtgagggcggggctagtgcgcacgcagccttagctccttccccgcccttgctcttcccagtttctccgtcagcctgcgggtcccggctggcggctgcttccggtaggagagcggtgtagagcgagcaggtctcagctcctcgtcatgtcatacggtcccttagacatgtaccggaacccggggccctcggggccccagctccgggacttcagcagcatcatccagacgtgcagcggcaacatccagcggatcagccaagccagtgagccggggtaccgagctggggggcgggagctgtcccggggacaggcctgggtgaggctgccgggacgcagggcccggctggggctacggccgaggccacacctggggctgtctcgggctgtccaccctgggggcggtgggctgccatcccccaatctgtcaggcccgggttgcccgagggtccccggccccagctgaagcttgagctgcttctctggagttctgcccccacggtgctgggaccaaaacagccgacttgacagcccgagggtgggaaggggagtgtgtgtcacctcgagagctgtgagtgcgttgacttggcgcagtggtcagccgagtttctcctgtcacccaccttcctccccacccacctcgctttcctcttagaccagtttggatggggttgtttactgatttagcctttaggtttacattctgctcagcccctggctcctcggaaatcagcaactttcaattaagggaagtggagagtgcatgtgtttgggtgacttcatacacagttcttcctgtaatgaattcggaaatcagacacaatgactggtatttgaaaggtgggatgacttcattttaataaagagaattcaccaacagcatttcaatttacattattttgtcttttgtaacaaataattggggtgtatttttggatttcaggcagatgaggcttttgttttccttccctacttagctgctcttgaacaaatctggtacacagggaagctaagacacttagccacaaccacatagcaagtaaggcatggtagagttgttggtggaattcagaatgct

SEQ ID NO: 33288 - DNA, 813 bp, Homo sapiens
aaagaaggaagggagggagggaaaaaaggaaggaaggggagggaggaaggaaaggaaagggaagggagagagagagaaggaaggaaagagagggagggaggaaggaaggaaggaaagaaggaaggaaagaaaaggaagaaaaaagaaagggagggagagaaggagggagggagggagaaagacccaaatataggggattttgccaatgttaaattcttccactgctgttaggaaaacaagctgcagttcagcccactgagctgatttgtgtttaccttctttgatcagagcagtaaataggttgtagtccattcactttggaactgctatccacagaccatcagctttttgtcagtcagttgggagttaccatagggcattgtccagtgatgacagaatccagcaactcctcacacagttccagagtcaatcccaggggaaaagaggctccttacttgtagctcctccttgcattcctcagatagcatgatcttgtataaacatttaaattctgtagtccaaagtcccagtggttgtcatcgggaggcactcaacaggcttttgtcacaaggcctagcagtctccacatagggctatcacaccaagaatttgtctatatcagcactccagccttctgctgtactgtttggacttgggcgctcttactggttctcatgtagcatgtcccattaatgttgcttgaagagtgagtttatgtgccttctgttttacaatattgggtaggcagcaatagattattttctgtttatggagaaagcatgctttgtagagccttaaaaacacacgtgttaa

SEQ ID NO: 33289 - DNA, 1899 bp, Homo sapiens
gccctttagcttctccgctttgagggcaaaaggctgacggtcttaacctaaactctggaggaggatgtagtccccagattttttctttctttactttttttttttttttttttgagacggagtctcgctctgttgcccaggctggagtgcaatggcgcgatctcggctcactgcaacctctgcctcccgagtgcaagcgattctcctgccttagcctcccaagtagctgggattacaggcatgtgccactacactcgactaatttttgtatttttagtagagacggggtttcaccatgttggtcaggctggtctcaaactcccgacctcaagtgatccgcccgcctcagcctccgaaagtgctgggattacagacgtgagccatcgcgcacggcttagtcccaagattttagagccaagaagcgtttgcaggaggacgtagggaaagactgactcccctccctacaaagccccttttcctttgacacctcctggccaaggaaaaccctaaccactggagacttccagagacggccaactcgcacaaacgctgaaaaaaaaaaaatcccaaaagctcctctgtccccactagaagcaccgccccccgtacgggcgtgcgtgagcgtgcgtacgcacaggctgctgggatgccgcttttcccttctcggtcttccagtttcccggcgtgcttagggcgcgccaaatgggagggggagacgcaagatggcggcagccgcgaactccggctctagcctcccgctgttcgactgcccaacctggtgagtggcggggcggccagggctagagtggcccggccggagctagcctgggctggaagggcggctctttttttacttttctgctgcgagccgaacggctcagaaaccccggaatggttgaggaaaaactgtttgctgcaccgggccgggcgacgtgttgaagaaccgagagcctggagcccaggcccaggaactgaagaaacccggggttgggggctcaaaggcgctcacttaggcagcccctttgagcgattagccagtcgccggagcgcttcgaggccttggcccgaacttacgcccaactcttgactgagtgcctggtgctctcgtggagcatcgcatctggccccttcctgtacgtcccgagcgcgctcgagccagccccggccccaaccctacctccaagccccgcatccctctgtggttgctgcatccctcgtgcggcacttgtctgtctgccacagagaatacgagggtaggttagcgccatccctgccctcagggagctcccagtctgtggcactagtaggcattagtaatggttggcatgaaccctttttatcccttcgaaagttcttgggaataatgaaataatttaatttggtctttgagtagggtacaagttgaataaatatgaattaccttacaaggaaacgcttctgaattaagagtttttttctgctgtagctcatcgcagtgtattgtttgttgcttgtctctgtctcccgttgtattgccatcctcaagggcaaagactgcatctttgtattcccagctcctaggcctgagtcaggcacatagtaggaattcagaaagtatgttttggatgtaacattcctcctttttcctggacaaaatggccttttgtccggtgcattgtcctttccatagaggaggggttggggcaggattgtgagatgactgtgttgaatcttcagttagctagacaaggatacgttttttcatgtgcaaatctaaaggttctagtgaggtggttcttttttctaacttcaaattagcaaacccaaaaagcaagcaaatgtgtggctattttctggatcgctttgcacttttgtagtagttgcttcagtctacaaattctgtatccattttgatccctc

SEQ ID NO: 33290 - DNA, 1636 bp, Homo sapiens
cgcgccattgcactccagcctgggcaacagagtgaggttccatctcaaaaaaaaaaaaaaaagaatgtaaaagagactattaatataagttcaggccaggagcagtggctcacacctgttaccccagcactttgagaggccgaggtgggaggatcgcttgagctcaggagtcggagaccagcctgggcaacatagtgagaccccatctctattttaaaaaataaaaataaatttaaaaaccaagttgagggcgttcacacaagactgattcattagctacactgatcaatttcaaaataaggccaacgacgggaaaagccagggaaacaggaggtggaaaatttggcaagatttcatttctgaaacttacagcacttaattataagagatgcagataataatagatcattatcgcatcagttcacgttgaaatcttccttcaaagcataaagtttctgtcatagatgactcagggacttcaggacaggataaaacaaaactaaatactcctttcaacctactgatttcttttcggcttgagaaggtgcgggcgatccaaagccccccggggactgcgtgtagccgccggctcccccgtatgaggagctgccatagctttcgaatccacctgttttgaacaacaggattagtgcctgtgccacgtcccacgcctccgagaaacccgcaggctcccggaggcttcgccccttcaaacactgcccgagtctccctaaccttcctcgccgccttcctgcgggtgacccccaaacgccccagctccgctcccgcccttcctctcccgctaccacacgcctctcggaccctaggctcgccctcttgctaaaacctcctgcgattctcttcctcctccaccccgcacccccatcattactgttccacatcttggtcacgattctccgcaaagaggccgagaaggtgcgggtctgggggaatagcggaaaaccacagaacgcggccgccactgcgccgctctggctacttttctctggcaccacaaacgccttcccgcgaatggcggagccagtcagctcccggggtgctcgcttcagccaatcggtgctcacggatgctacgcttgttcctgtctcctctgcccatgctccagaaaacgcgtactgcgctcccagttggctccaaaagcctccgcggccatctttacgaagggcaaaaccctccgcactagcggaagcaaggggctggcagagcggtatcgcaagaaatcaaccaatcagaacaatactaccgcgacgcagcgccgtgtgatcccaccctcgtcaagtgcgcgacttctgccgtcacttcctttgttcggcgtgctcaggttcgcgccaaactatcaccaatcagacgacgccttcatctaaagggctgtagcggagttttggcttcggtgtttcccacccacggtcgtgcgggaattgcgcacctcagggactcgcagcactagcctcacagcaccgcgtggagttgcttgttcttttacataggaggtcacattctcttcgtgtaatgccaccaatggtgccgattctccccagtggggctgtgagaaacctacgccctcttgcctatgacagacttgtgaaagatgtgagggtggtgcccctcgtcccgc

SEQ ID NO: 33291 - DNA, 494 bp, Homo sapiens
gcaccctcatggagcttatgtttgcaaggagctgggcacacagaagcagtgaaaacacaggagtgagtccctcccttctcatagggattttttttttttcttaaatggattcttaatggctgctggcatttactttagagaggtgaggtttttctaggcagttacagtgatgcgttttgacaacctcctactttggcagagttctcagcatttccaggtcttgtcggctgtacagggcaaagggtgtgttagagatatttcccaactggaatgggaggctccagcctccctcatttgttccaggtcactccctgtgatagactaagctcatataagggcccagccctgttctgagtccaagagttatttttgttgattgtcaaatatttattgagcaccgattaggtgccagacactgagcataaaataaaaacagaaatgaggctgttcatgtggaggaaatgagtctaatgggttcccctacacctccaggc

SEQ ID NO: 33292 - DNA, 1271 bp, Homo sapiens
ccatgtttgccaggctggtctcgaactcctgacctcaggtgatccgcccgcctgggcctcccaaagtgttgggattacaggcgtgagtcaccgcgcccggcctctattcccttccgtatggaaatgaggttaactcatttgcaggaacctaacgcccgccctcccccgactcggatcgctggcgtgaacccagcggccccgtgctctccgggtatccctggatcgaggcgcacgcgttgttgcaaagtctcgcacttagggattagaatgtgcctttgcgtttcgttttgttttgcaacaatacaggtgtgagggatcgcagccctggtccaggctctagtctccccgccctctcgctttcttgggcctccgggcgcctcaaaggtaaaactaggccatttgaagcctgcgaagcgaagggcagtcggtcttcaggcctagcgggcttggctgggctgggtcggtggacccctgggctggcggcgggagcagagcatcgagcggcttttagctggggttcgggcggaggacctgggacaaccgcgggcctcgctcctccccggacggggcgggacggggaagtcccgcccaccaggcccaggccccgggccgccccgagggctgcgcccacctccttcctgcctcggcaaccccgggccctgagggcaggccccaaccgcggaggagcaggagagggcggaggccggcgggccatgccctggtcgtcccgcggcgccctccttcgggacctggtcctgggcgtgctgggcaccgccgccttcctgctcgacctgggcaccgacctgtgggccgccgtccagtatgcgctcggcggccgctacctgtgggcggcgctggtgctggcgctgctgggcctggcctccgtggcgctgcagctcttcagctggctctggctgcgcgctgaccctgccggcctgcacgggtcgcagcccccgcgccgctgcctggcgctgctgcatctcctgcagctgggttacctgtacaggtgagtgcttcgccccgggaggggaggagtgtcggagcccagcacctccgtcagctgggtcacctgtacaggtgacacgccatatgccgggaaggggactgggagagggaaccaagtcctgtgggcgcctggcctacaggtgagcgtgcagccctttacggaaagggaatcccggtagactgccttcattctagccctagctttcctggcacaggcgaagaaactgaggcccagggaagaaagggaggcgcatgggctttgaagt

SEQ ID NO: 33293 - DNA, 1637 bp, Homo sapiens
taatacagtaaaaatgaaaaaatgcatatgtgcatactaagtttaaagattactttgaaattactatagtgaactcttcagcagaccacttttcggaaacaacacaataaattcataaatctggggctaatgatctctccacaaattctgtcctctatcatcacaagtgtcctgtaagaagcgtccatgccgaaaacagagctgaacgtcccaaaatattggcgtttttgcctcagctgtgcacatccattctcatgggaacacaaaactgacagaacttcttcatgacttgtcaattaacaagatcgcgccagcccaactgctagcagtaccgtgtgcctgccacctgttagctgctcttgagagagccccaaaactgaggtaaagcgaagaactaggaacgcctttgttgtaccctaactatggaagctaccagagttcagtctaacccggcgccttaaggcaaaacttcccccaggctggggaagtcttcccatttcggggctttggcaaagctctcctctagctaaggacaggcagaagaaccccaggagaagcactgtcacctactggtcccaggaggaaggatcaaagctgaagaaagttgggggacaaggaactaggaccctagggagaggctcagtttctcgtggtgaagagtgagcacaatgagaagctgggccgtctcgctaggtgaaagaacgctgagatcccagatcaggggtaggggaaaagaggttctaaaagaagggaggaggagaaaaaaggagaggcagtggctgagagaagcgctgaggcgtaaggcaagaaaccgaggttggaaaaggactgatgaggctgaggaaaaacagcgaggcgacagaggcacggaagcgcgagaaggctaagctgaggtgaataaggcgaggccagcgtgaaggaaagggctgaggtgagtgaagcactgcagtgacaagggacaggcgaagagactcccacccacaaggaccgaggcagaactctagacccatcccccttcacgctgtgctcgcccggctgcgctcagaccctgttggcagctgagactcacccaaaggctgtaaaagccccacaacaggacatggagatcagtccagacccacagtagaaccaatcgagcggaggaaaccgcggcgttagcgtgacccggatgcgcatcgctaggaaccggaagtaagcggccagagtcacctcacaatccacacctcgttccactagaaacctctgggcgcatgtgttgagtctgaccgggcggggaagcttttaggctccgcccactccgccggcccggcgagccacgcccatggccacgcccctcttagtgcctcggagacaagcagcttctgggtgagcgctaggcagtcctgacggtactacagccttcacttttaaggaggtctttaaaaatgcgcgtaatccctacctggctaaaaggaacgtaagaagtgttgggtgcatttggtagatttagaaaaactgggaaggagaatgagtgggaagttttggaagacatttgggaggctagcccaaggtgatctttttttttttttttttttgagacggagtttcgctcttgttgcccaggctggagtgcaatggcgcgatctcggctcactgca

SEQ ID NO: 33294 - DNA, 517 bp, Homo sapiens
ctgggtgacagagcaagactctgtctcaaaaaaaaaaaaaaaaaaaagtggggggggagggagggcagcacggatattgagaacaaaaagagatctacttagaaaggaggtgacatttcagttgaggcctgaaggaggaacaagagcagaacattccaggcagagaactctgcatgggtccaaaagtgcggcaagagcttggtggtttccaggaacggaaataagcttatcagatggcccttgccctgacctccagctgccactccaccctcacctcgtgccaccttagcatcaggctctagccagaacggacttcccaggcggaccttcaaacctgtccagacatttcctgcctagaagcctccacaatacccatcttgctgttttgaatgctcttccctacccactcctcactctccgctttccttttttgttgttgttgttgagatggggtctcgctctgtcacccaggctggagcgcagtggtgcaatctcggctcactgcaacctccgcctc

SEQ ID NO: 33295 - DNA, 1086 bp, Homo sapiens
gagcttttgggttcctcccgcctgggcctcccaaagtgctgggattacagatgtgagccactgtgcccagccccttgcaataatttaatctgagattctgactccaaacggcatgcttttatttcatttattcattcattcactcaacaaatatttactgagcatccactacatactatgcgctggagatgcgatagtaaaggaggctcagaacaagcccactgctgtcctaacataccaccaagcaagctgtaacctactgtaaggccccaaactatttcacctccctaaagctcaggttcgtcatctgtaaaatgggggtaatataatgcctaactggcatgatacacagtgcctggcgttcgtgaatggcagaaacaaccactaaaacaactcattacaaaggactaagaaacgtctcgggggccaagaaggctaagtcactcccaggaagggcccagcctctgccagcccccgactccgcggacttggggcactctgcccgcgcgcccgcactatgttggacacactcgccacctccctcgatagatcgaacaccattccctctttcgttgccccgggggatctcccagcagctatcagtgggagacgctcacacacccccagacccccgccaccccgaagactggactgaaggaatcgcccaacggtccaggccaggcggccactgcctttgtccactgggaaagcagatccgggagcggtcgccccggtgccactactcctcactctgtgttcacctcactgtagaaggtcataaatgcttcctcggtgctgcctccgccgcctgaagtcccgctctctcctgaagccgccatttccccggcccagccaccacgtgacccttctgcgcaggcgtcgcctcacgtgattcttacaggtccgctcctctagccccgcctcccgtctgagaggttcttaaagggctcgcagcccagccaggcactttaaaagtaggtgggctttttaaaatttaaacgaattacacataacatataattaaccactttaaagtaaataatgtgcttaagttattgttaggtaaaaaataataagaagaataaa

SEQ ID NO: 33296 - DNA, 2096 bp, Homo sapiens
ttgtcaccaggctggagtgcagttgcgcaatctcggctcactgcaacctccgcctcccgggttcaagccaattctcctgtctcagcctcctgagtagctgcgattacagtcgcgtgccaccgcacccggctgatttttgtatttttagtagagacggggtttccccatgttggccaggctggtctcgaactccggacctcaggtgatccacccacttcggcctcccaaagtgttgggattacaggcgtgagccaccgcgcccagccagaacactgacacttctcataacaaatgaacgcgatttatgtatatctaagccagggcacattggacgtcggtatcctggacatcagcatcctggacacagctcccaaaccccgaattcccccattttattgatgctagcaggccagggaagggaaaacttcctttgggctttgaataataacgactttagaattgaaatcgtgggctggaggtggacgccacgcctcattctgatgggtccaagagccgaaatttcggcttctggcactctcctcactcagctctctaaactcctccatcattcctctttccagtcctttggccctaagcccttgctagcggttggctaagaagaaacccgtctcttgctcgggattcgctgtgagctccgggaagcccgcctccgctctcccgtgattcgctactcctgtgttcatccgcccctccgtcgaccagattgggtgcttggccgtccctgccattagcgcgtaacgagagactgcttgctgcggcagagacgccagaggtgcagctccagcagcaatggcagtgacggcgttggcggcgcggacgtggcttggcgtgtggggcgtgaggaccatgcaagcccgaggcttcggctcggatcaggtacgctgcggcagtgtccgctgctccagccccgcgggcggatcccatctttgcttccgtacctttaccagtgtccctgtctctctgcagtccgagaatgtcgaccggggcgcgggctccatccgggaagccggtggggccttcggaaagagagagcaggctgaagaggaacgatatttccggtgaggctcaccgggtcccaagtccagccctggatctcccaatggccttccaatccttaaactgccaatcgccccacccgttcctacctggtgccttgggcgccccatcccccaacagaactcccgggccccaatccagtataccctaacccttgatgtcccgaccgttgccacgtatagggcactcccagttacctgcacaacagtttcaggcccccaaaccgtttccaccggcgggtctccaaaacaacccacggctcaactcctcctttatcattaccatctcccgcgtggagttctcctcaggtcgtgcgaaacacccccagattcttcgcacagtgtctagatccgaccgcccaacgtttgcctcccagcctgactccctcggcccttacccacctgtcaccccctctacgctctccttcctcgccagcacgccttagctttgcaagcctgcatgcattcaggcttctcaggtgtttctagacccccgactccgcaagagtgaggatgatgggagctggtcatgggagctacttatggttggacaccatcttctaaaggcttttgccctactcagcccaacctagacctgtagatttccctctcctgcttaggagtatggagtgggctgggcctccctttgccagccttgagttatctttaactgacttctgtccactctggagagcagtgaggaattaatcttgcttttgcttgtcctttggcctttcacttctgccttctgttgagaattatcaccatgacacctgccataccgtatagagagccaaggtacagccgttagagactatctaattgagcccctacattttgtagttaaggaaaactgaggcctaaatgtgaccaaaccaacattgtaatccagtcccttcttggaacctaaattgaactgccaagtactgcgcatgcaagagaccctttattggccttacagtgggccattcatttctataggcaaagaaagctctagacagattggaataggaaatggat

SEQ ID NO: 33297 - DNA, 1297 bp, Homo sapiens
aatacaacttagcacatagatagatattaaataagtgtattatataaagaatcttaaaacttctcccttctccgtccaccccagagctaaccaatggtaacaggtgcaaactacacatctttccagatctttgtttcctctgtgtaactatgtatacaactatgagactgttctatatgtatcattgcgcaacctcggtttttgcttcgttctgttttaacctaacaggaaatcctgcatacctttccatttcagagcacttggagctaccttctgtttctttgctgtagaagccgttgtgtgaacaaatccgtttatttctctcatcagtctcctttgatagacatttgggtcacgtccggttttacgcttttacaatacatcagtgaacagcagtaatacgagctcaagacagaaggcctgaaaaacattgaaaaacacagagacggaaaaaaaaaaaccacagagggggaaatataatttcgggttatttcagtttcacctttacactttgttatattccacattttttgcaataaatataaatttggaagtaaaagcataaaacgaaaatcaaacgattgattgattgattgattgactgagacggagtatcactctcgtcgtccaggctggagtgtagtggcgcgttctcggctcactgcaacctccgtctcccggattcaagcgattctcctgcctcagcctcccgagtagctgggattacaggcgcccgccaccacgcccggcaaatttccaaacgtatatttaaaagaagaaaaggaaaagaggggaaaaaaagaaagaaagaaagaaagaaagaaattagaagcagatggggcagttcagcctcttctcgcggagcggggctagacggagtcaggggcggaccgccacagcctgcaccaatcaggacccggttgataggcagagcctggcgacttcgaagactcgcccccagtcaaagagccccggggattcgtttccgtacgcagcctggaaaccagcctgggcctatcctgcgcgccgctgcgggctactattggctgccaagaaaccccgcccatcttcctgctcattggccggtgcggtttacgtaagaggagcctgttgctgagcgaaaagtctgttctgcaattttcgctaaggagttgttaacgctgaaaccgcactgggcgtcctggggtcaaaaaaacaatactagccacagtttattaaactgcaactaaatgccaggctatgtgcgccaaacttttaatattaatggttgtaggcacctttcttgaacacccaccac

SEQ ID NO: 33298 - DNA, 2851 bp, Homo sapiens
ctgcactccagcctgggcaacagaacgagacctgtctcagaaaaacaaaaacgtaataaaagaaaaacaaaaacaaaaaaacaggaaacgggttcagagaagtgaagtgttttgctgaggttcacaaagaaagggttggaactggaaccttcaactccgatatcctgattccaagtgtggcctttttagggagggggtcggggtacagaattccgctggggatagggaaaggtaggacaggatggtgggaggccagaggcgttgctccagggacaagcctcagggtggttctctgagaataggatgtatagagcctctaggagtggagggttggggaaggaagggagaccagaggaaagggagaagttgttctttctgaaaatgtgaggcttctctcctggggcagcctattaaggtgtaggtagccctggacctcgagattctagtctccactctgtggccaacttcctagggaaccttgggcaaattcctctctctcgacctgaggcttcctgccttgtaagagaggtagtaagccaaaacaatggaaagtgcattcgggctgtgaagtattttaggactctggtccttgctggcagcagggggaatcttcagcaaccacagacctttacttagctgttgcctggcctcttttcaagaccttcaggcggtgacatggaccctaacaatcctataaactcaaaacggtttgggccagccctttcctactccattctgacttagctatagcaggatctggcctgcagggggcgttgaggaaccactcagccgacaaaactaaactaaatcaaccaagcaatttgcccaaaagcacccagtgcgttagtttttgcatttaagaagggtaaacgtttccaaacctgaagatttctgtcctcagtatgcaatcgagaagacgaattatatacactgccagttctttatggcaccagttctctccataatgactctgcaagtttagagctaatttctatttctttgttttacagatagggaaacagattcaaagagctggaaaaaaaaaattcagtttgggttacttggctaaaagctggcacccgaattgcctgactcctgggaagtgctcttaggagatagttggctttgtttctgggagtctgtggttgtactgcctgctaatgcacaactccaaaggacaattttggttgtgtagcttgacagctcggcacctgtcagctctgtgcaggaaggacctccctccccacctagcacaatgcctgcttcatgagtaattgaattaatgtgtgactaagccttgaaggatgggtcttctttggctttatcaaaccaattggagtggaacttctttcctgaaagttccccctgggcaggaattgtatctgagattagtgggtggggaggggggaaacaataagaagagctcagaaaatgacatctggggtgataaatcacagccccccgaatggtcccattacaaggtcattatagtaaagtgatctcagaatttgagactagaaaactaattcaggaagaatgaatacagaacagatgacaatcatattagggtcataatctgaaatggatctaaggctgaagacatctcaaaaacatttcaaatccagtctaggtaggtgtatctttgggactggaaggtgattgaggaatataaatagctggccaatcagtggcctcaacatagctgatgcaagagttgagagtgtggcaacagaagaaggagatctttacccaaccaaaaatacaaggcagtggggaggggaggaatgtgcccagccagtggcaccctgccatgccctgctaggctgctagcttcaccactggatttcccagagccaggcacagtgcctggtacacacaagatggtaaataaatatttattgaatgaaaaaaggaaggaaggaactggagccctgaccagcagatagttgctgagtagagcagttcaataattcgtcctttcacttgctcagattccagctgccttagccaccttcagatgataaatttgcctttcagtaaaggctctcctacaaagaggaatgccctggcctctcaattacaggtcgcttgacagttatgtttctcacttccaattaatatatctgctttaagcatcagttccttttgccagccggcttcttacatattcatgtgtttgtctcatcaatggagtggtggagtttctgcataggagtcattcctgcctgggttggaatccttactcagcatattactaacctatctgaccttggtccagacgtgttacctcttgagtctcagttttctcatcagtcaaatggagacacaatagcctgtttcacaacgttgtggtgagagttacctgagacagtgatgtatcctgaattcttgctggagctcagtaactcttaatgtctgtgcttcttcctggcttttcttttttggagaccaggtcacaaaagataatatcaaggctgggcgtggtggctcacacctgtaatcccagcactttgggaggccgagatgggcagattgcttgagctcaggagttcaataacagcctgggcaacgtggtgaaccgccccaccccccaccccccacctcgtctctacaaaaaatacaaaaattagccaggtgtggtggtgtgcacctatagtcccagctgcttgggaggctgaggtgggagaatcacctgagcctgggaggttgaggctgcagtaaacagtgattgtgctactgtactccagcctgggagacagactgagaccctgtgttaaaaaaaaaaaaaaaaaaaggccggcgcggtggctcacacctgtaatcccagcactttgggaggctgaggcgagtg

SEQ ID NO: 33299 - DNA, 3815 bp, Homo sapiens
ctaaaaaacaatactaataaaaagaaaaaagggtcagataaaacatgtacatagaaaattacaatacaaggcagaatgtggctggacatggtggctcatgcctataatcctagcactttgggaggctgaggtgagagaatcgcttgagctcaggagtttgagaccagcctgggcaacatattgagaccctgtctctatttactaaaaaacaaaaaacaaaaacaaaaaaacagaaaacaaaaaaacaaaaaacaaaaaaaactaggtagaatgtgatacatgtgaaaagagatccagctcaagtgccttgggagctcaggggagggtgagattaatctctttttcccaagaatctggaggcaggaaaccaagtcggtttcatctttggaattgtaagcttagacttagaagtctcagagggggacttgggggtcttatccaccctcacccctggcaggattccctgtctagaataaacaataactttaaaatggaaacaaaaaaaggagctctgaaggaaaactgtgaaggaagaggctccgtttgaaatgaatagaaaatgaatttagcttggaggtgctgaggtgttggtagaggcaactttctggcaagaggcgagttgaaggccaggaagtgaatgagatcagggagagtgtctggagggaagaggggcaaaaacaaactggggaagcacccacgttttaggaagtgggtggtgaaagaggagtcagagaaggccagagggagaggtgagcaaagatccagcagaacaccttgttacaaagtttcgaggagggtgggaggggtggaagccaggacgggtagcagaaggaagaaaacttccagcaatagggattgaggttccacacgaagttaccaatgacatttcaaggaatgaaggcttttcctgaggctccacaaataaggtgaattccctgtgtctcgcatctttggagcttccccgaggccagggggagcagggttgtgccctctgacctctaaatatctggggttcagttctataattagcagcaccggataggacgcgagccaaacctctcttaaccctagccagtccctccaggaactgaaaagatgaagaattcatttaggagatttcacactcggctgtttggcctagcccagtgaagtcccttttcatcacgcaaccctaatgactcttagggctgtcactgccgtctggtgttgccagggatctgactaaaccgtcttgcaaaagtttgcagcattcacccgaggcggactacaactcccagaattccgggcgctccccggtgctgattggcggagcccgtgactccagggggcggagtttcccccgcctccccggggaaacagacctctgattggctggaccgccgggcttttgtgtccccgccctcccccggggaccgcagcgggctgaactgctggtgtcagagcccggcgagcgctggcagttccgcggcggggatgctgaggagcgctgggtccgggagcagccctggcccctgcggacttccgaggccgtgaaaacccctgcgctgcggcccttcccaggcccccgaggccgttcgccgttcccgaagcccgactgggggaagagtccagcaccaaagcggccgttctcggattccggagcgttctggagccccgagagacgccccggggttctagaagctccccggcggcgcccagtcccggcttcattcgggcgtccctccgaaacccactcgggtgcacgggtcgtcggcgagccgcgaccgggtcctggcgcgcaccatgatcgtggcggactccgagtgccgcgcagagctcaaggactacctgcggttcgccccgggcggcgtcggcgactcgggccccggagaggtaagcggcggccgcgcgacgcccctcttccctggaaccccgaaccgcgtctgagcctcaggctgtccggagctgagtcggtgtgtcctgggctcggggagggaaagccgagcgcgtaacccgggacccgggttgcatcaactggcagccgcggccctcggcacccctcccccactctgtctcccctctccctccttctccccctccctctccccctcctccctccctctccccctctccctcaccgccccaccccagggccgcggatccttcctcggctccctcggactcctggccaatgagggagaagccttctggaggctctccgagctttgggctcctgagcgtcttcaagtccaggcaaatcccggccggagcggccagaccactcctcctccccgcccccttccgcggagtcccttcctcttcgcgggggccggcgggcagaggacccttcctggggtgcctcccggctcctgtcccccagcgcggggcgtaggcacctgggactggccagtgaaagtcgacctcatcctatgtccaccgcactcctgctttggagggagagcgcaggggctctgggggcttggcgggccgcccggtacgcggcggcggcagccaaagctggggggagaggggacaaccctggtcgcggcttccgaagccaagcgcgggttaggctgcgccctgctaagtaagtggtctgaaggcccagaagtttgttttccagaaattcctcccccaccctcccttcgcgccgctcccctccacccccccgcattcgcatcccggcatagcccgcaggggctttgcagggagaccgggaattaggctggacctaaccagactgacagttcgcactcccccaccactaccagcagcagcgataatggacatcttatcatttattatgcacctactagataccaggctctgagtttttttcgcctttaacctaagtcctcaggactaaaccagcaatacaagctacgctatagccccattttacaggaagaacattgaggcccacgatgggctcagaaagaggctttcttcattaaccccactgaatatcttgttctttggccttatgatttcggagattgcacggcactaggagcttctagttgctttagtttacaggcctagagtgtggtggaagttgtattctggacctgggatttggtggagtgctatgaccccaggaaaatccctgcttttctcttagtaacgtggtttctggggatcctacctccgtcggtgtatagtttgtgccctggtttttgttagcttgcttacccttctctgccgtgatttaggagcgccatgtggaggaatggctcttctcctgcagcttctcagctgtgtgacttctttggaaagatggaaataatgttactattgagaacacctgaacactagagagcaagagtgctgggttcatgtcccagccctcctgctaacttgcagtgtgtggcttagccagtaatcacttctctgatctgtggtttcttcccatggggattttacagtatctctaagggattgttgggagaattaactcagaatacaagcaaaagctgaagcactgtgactggaacatagtaactgcgtgatacttgcttgctattatcagaacgtggccatggcacgcacagctttctccagagtgtctcacaagggggtgcctgagcctgttcctgagatcagacactgtacacccctctctgggtcagtgcctggtctagggagaaaaggctttgagggagggatctttacacagaagccatgtttcctcagtggagaaaactgctgctatctgggaggtttctttttcttatctttttttttttttttttttgagatggagtcttgctctgttgcccaggctggagtgcagtggcacgatctcagctcactgcaacctccatctcccaggttca

SEQ ID NO: 33300 - DNA, 1431 bp, Homo sapiens
aatgactgtgaattacgacttctcttgcccttcttctagcagtctgtgcctcctctctgaccagtttggagggcactgaagaaaggcaagggccgtgctgctgctgggcggggcaggagaggagcctggccagtgtgccacattaaatacccgtgcaggcgcggagaagcaaccggcacccccttccggcctgaaagccctccctgcaagaaggtgtgcaggagagaagaggccccggcatggggatctgggttctagagggcatgtgatgactgtaaatgttcactgggtgggtagggagtggtatccagtgttcaagtgcagaaatctttggctttgctaccagttccatatgatgagaaataaacgttcgctgaggttttgtttcatactccctttttatgggctgttctttcaatttcctgaaggtcatggttcaccttgtagcataggcagagagctgtgattgcatcatgggcctgacctgatagcccctgccctgccgagaacttgtgcccagtgattgtaggttgggactgttggcactgaaagtctacttgtcccttggacatccagtcctgtcacccttctgcggctgccctggcactgtggagtaataatgaccatggtgtttttctaagcctggccatgggctgggtacttggagaccattcctctgaatttgcagcaatcctgtaggagaattgagacgggtgaactgacgttgttgaggccacatggctaatcggtgggggagccaggattcccccctgctctgcttgaccctgaggccttgacattttaccttgctgttttgcccactactggacttcccctgtgacaaagaggctgtttgaatctggaaggacccccttgtgtccccaaccccaccacattatgattacctgcttctcatcctaccgcctccagcaccaaggagacaacgccaggaacaaagaggtgcaacccccaagctgtgccagtgccgtttatggctgtgtgaccttggtcaagcttcttaacttctctgggtaccaggaactagttagcttaccaggaaaaccacatcatgtaagagctaagaccactcccgcgggcttcctacttcctataaataccgctgtcagaacactaggtctcttccaggcagcctcccctagtggactttgtgttccccttccccttgaggtatctgttcattttcgcaggattcctatacacttccccttcctctagagtcatttgagagggtgtgggagaaagtgaatcacacttggagtacaaaacctggattctggttctgattgagccactcactatatcgctggggagattgattaatttccctgtgcctcaagtttcctcagccatagaaatggggataaaagttttccatttcttttccagttggcatgcattgggtgtttgttt

SEQ ID NO: 33301 - DNA, 1055 bp, Homo sapiens
tcccgagtagctgggattacaagcacgtgccaccacccccggctaatttttgtatttttagcagagaccaggtttcaccatgttgcccaggctggtctagaactcctgagctcaagcgatccacccacctcagcctcccaaagtgctgggattacaggtgtgagccaccgtgctcagcctattatttccattttaaagtggatcccaaacaccacccagaggatccatcttccttctttaacccttacaaagtgcttctgttttctgaggcatttttttttctaaaattataatcatttgtgtggcttcgtcatctccccattcaattgggggtcccaggaaggcagggatttttgtctggtatgttctctactgcatttatctccagagcctagcacagggcctgacatgtagcaggggttgaagaaataggtgtggaatacatgcttgtatccaccaggatacctgggctagttctgggcccaggtggcagtgcttaagaaacaatagcctcctgctgctgtggacatggcctctgctctggctgtctctccctgcctggttgtctgttaaatggccagctctcagatactcagcaccagtctggtgtcggggaaagagcttggactttggaaccagacaaatgaggctcaaatctgagtgcaaagccatctggaatgaggcagaatttaaataaacaagatcaagtacccgtatggctcttggtaacttcctttaatttcttcatctataaaatgggaacattaccatctacataaaaaaaaattattgctgggcacggtggctcatgcctgtaatcccagcactttggcaggctaaggcaggtggatcacttgaggtcaggagtttgagaccagcctggtcaacatggtgaaacccccgtttctattaaaaatacaaaaattagctggacttggtggcaggcacctgtagtcccagctacttgggagtctgaggtgggagaatagcttgaacttgggaggtggaggttgcagtgagctgagatggcaccattgcactccgccctgggagac

SEQ ID NO: 33302 - DNA, 1971 bp, Homo sapiens
attgtatggatatattacaattcatttattcattcatgagttgatagacatttgagttgtttccaattttggctattatgagtaaacctgctatttatgtggacatacccagctatttttattttttattttttgtagagatgagggtctccctatgttgcccagactggtctagacctcttgggctccagtgatcctcctgccttgacctcccaaaatgctggggctacagagatgagccgctgcacccagctccagttccagttgctctgcatctttgccaacacttggtattgtcagtcttttgacagtcttgttgacattggtctagtgattaaaaccctatgcactggagccagagttcaaattccagctctaccatttgttgtatgactttaggtgagtcacttcacctctgttagtctcagtttactcttctgggaaaagggataatagttcataagatccttatgtctattcagttaaatcagtggttcttacttagggatgattttgtcctcacgggatatttggcaaagtttggagacatttttggctgttacagggggcctctggcatctcagtgggtagaggccagggaagctgctaaacatcctccaatgcatagggtggtccctttgaacacagagttatccagtccaaaaagtcaatggccctgagcttgagaaattctgaattatataatgcacgtaatgtgttcaatacaacacctggcacatatcaactgcttagtaaatggaaaacaaatagactttggggaaaaaacgtgttttcaggaggagcaatctgagtttgatggatccaaatcatcatggtccttttcccaaatatctaccacaaggctgttatgacgtgaggaggctcacaacaaagaacaactggttttatcacataaataccacggaaaccaaaaagtgagcaatatgttcaagacagcagacctgtagccttggaccttggactcctctgtgtgggggaggatgggaaggctcgcacgttccatgcctcctcccccgccaggcagcatctcccctggctggagttccagctgttgtctgggtcagcgcaaacagagacctttgggctgcccaagatccaggatttacagcccacagactcctcccagtttaccggagtgtttggaagacattccaggtcagcaggaattaagtagggcccccgaggggagtgtgtgtcacgtggtctgacgacacagccaggatgaactggagaagggcaaagcatagtccagaggaaagtgcagtcaaagcagaattgattcaagagagtcaagcatttagcaacattcgttgtgcacctactgtgccagcctcttcctctcctacgtgggaggccctttggaatagaggttaggaggacagtctctatgtagaggacatttgaatcccagccctgccagcactaggtgtgtgtcctttgcaagaaacatcatctctctgaaacacatggtatacatgcaataaattatgggtgtacgtatgtctcagtcctcacaaaaagatatttatggtaagagctattaccattcctattttacaaaagaataaaccaaggctcaaagaggtgaaggactttgtccaatgtcataggactaattaagtagcagaggatcactgtgacaggcttttagggagatggaaagatgagtaagatggagtccctgacttcaacaagcttggggtctcatagaggagataaaggcaggtaaaagtctaatttccagcaaagagacaatgagaggtgctaataaagagcattcagcggccaggcgcagtggctcacgcctgtaatcccagcactttgggagcccgaggcgggtgaatcaccaggtcaagagatcaagaccatcctggccaacatggtgaaaccccgtctccactaaaaatacaaaaattagctgggggtggtggcacacacccgtagtcccag

SEQ ID NO: 33303 - DNA, 1412 bp, Homo sapiens
agcgattctcctgtcagcctcccgagtagctgggattacaggcactcgccactacgcctggctaagttttggtatttttttagtagagacagggtttcactatgttgaccaggctggtcttgaactcttgatgtcaggtgatccgcctgcctcagactcccaaaatgctgggattataggcatgagccaccgcacccagccaggaggggcaatttccatttggagtgaaggaaggggcagatttgggcgcaggattctaataattgtttatgaagagtttctatgtttcatgaattttacatcttttatctctaaaagacaattttggctggacacagtggctctcacctgtaatcccagcactttagaaggctgaggtaggaggaccacttgagtccaaaagtttgagaccagcttgggcaacatagggagatcctatctcaattaaaaaatgagccaggcttggtggcacatgcctgtggtcccagctactcagggggtggactgaggtaggatgatcgcttgtgcctgggaggttgaggctgtagtgagccaagatagcgccactgcactccaacctgagcaacagagcaagagcctgtctcaaaaaaataaataaaataaaaataaaaaggtgggcattttatagaataaggaagtttaaatctgaaaggattaagccacttgcccaaagtcttatagccagtgagaagccagagccaggatgtgaactcaggtctgcatgatatggatgccaaaagcccaggtcctggccaccgtgccaagctgcctcttgagaaataggagctccccagcctctaaaacattaccctcttcctgacattggccctggaaggttgttagaccagaacaacaaccaggagatgttgcatgcaacttaggcaccccacttcagtcatctgtgatgcctcaaggaccagagttcacagtctgtgcttggcacccccgtcagagctttgacaagcaatgtgtttgttagacatgttgtcctttccaggctcaaccaaacagctccagcctgcccgcgctgaccagcagagcaggcctccaggctgagtcaccgcccaggggtgtttcacaaccaacctgtctgtgcattgaggcagcagaggcaggaaaggtcactgggtggcccatgtcaccttgagctcctggacagaaaggtggagcctggctcacctgtacccatccagttctcacccgagttttctttctcttcttgtaggctctctctttaacctgaggtattatcctgagccaagggaagtttcaacaagctccagttcctcatctgtaagatgggaactacatacatatttaaattattgtgcatcctacatgccctgtatcatttaatctttatagcaaaccagtgaggtagatgctattat

SEQ ID NO: 33304 - DNA, 2045 bp, Homo sapiens
ttgaattcctgaactcaagccatctgcccgccttggcctcccaaagtgctgggattacaggcctgagccaccgtgtccggcctggtcttttttctctaggctctctcctttcccaaacttttctccatgttgtagccagggttcttttaaagctcacatgtattctttggtatggcactgcagagtactcctggatctggacctactccttttccagactcttttttttttttgagacagagtctctctctgtagcccaggctacaatgcagtggcgcgatctcggttcgctgcaacttccgcctcccgcgttcaagcgattctcccacctcagcctccctagtagctgggattacaggcgcgcgtcaccatgcccggctaatttttgtatttttaatggagacggagttttaccatcttggccaggctggtctcgaactcctgacctcaagtgatccgcctgcctcggcctcccaaagtgctggggttacaggcgtgagccaccgcgcccaacccctcagttcttttttcttttgaaacccactataatctctgtaagtcctatcagttccaagagactttctacacaaatacatctccaggttgtcaaacctaaaaagattttcctagagcatggcctatgacgtcaaggatccaggtagcgcccggaggaaagcgccaaaggaggccgccatctttcatacagcagcccggaattttgcgcatgcgcctctgattgtctgtccgcaatgaagctcttcggccttctcggcacccatacgtttgggaacggcagtttcgaggtttgtgagacgtcggcttccgaccggaagtgagaagaggaggaagttggctggttgcaccgatctgggggcttcccgggctcgggtaaccggagtgctggtatctaatcgtcgctcaaaagctcctaggtgcgcgggtggatataattcccggcttctcgagaagacactacagcctcaaggaggtgtgcttctagtgtttaattggatacgtgttatggatgccggcttagaaggacctatataccatcatcttaaaataacttccccttggctctctctctctttttttttttttttttttttttgagacggagtttcgctcttgttgcccaggctggagtgcaatggcgcgatctcggctcaccgcaacctcgccttccgggttcaagcgattctcctgcctcagcctcctgaggagctgggattacaggcgctcgccaccaggcctggctaattttttgtatttttagtagagtcggggtttcttcatgttggtcaggctggtctcgaactcccaacctccagttgatccgccggcctcggcctcccaaagtactgagattacaggcgtgagccaccgcgcccggccttggctctctttaaaaggcatttttaggctagccgcagtgtggtctcccgcctgtagtagtcccagctactcggcttgagcccaggagttcgaggttatagtgagctaggaactccccactgcactgcagcctgggctacagagcgagatcctgtcaccaaaaaagaaaagcgtacgggggaaggcattttcagagagatagaacgcctagatgttagtttggtccaaactctgctaccaacttgctgtgtgtatccttctgtccctctccaagtctcaatatcctcatctataaaacgaaggtcccttaagtcactttttcagttcttctgaattttgttgcctctttattatctcgtttgagccacatagccttgggagttaaaaatcactggcctttggccgggcacggtggctcacacctgtaatgccagcactttgggaggccggatcacctgagtatcacctgaggccaggagttcgaggccaacctggccaacatgacgaaaccccgtctctactaaaaatacaaaaaaaattagctgggcttggttgcgggcgcctgtaatcccagctactcgggaggctgagacaggagaatcgcttgaacctgggaggcagaggctgcagtgaacagagattgcgccatt

SEQ ID NO: 33305 - DNA, 642 bp, Homo sapiens
ttttgtcctctaaaatagacttatagtgtagtaatatttcaaaaaataataataaagaaaagaaaatagatctagcatccaggcatgatggctcatgcttataatcctagtactttgggaggccggggcaagaggatcacttgaggccaggaattcaagaccagcctgggcaacatagcaagaacttatctctccaaaaaaattttttttgaattagccaggtgtgatggcatgcacctgtggttccagctatgtgggaggctgaggtaggaggatctctggagcttgggcggttgaggttgcagtgagctgtgatgagatcactacattccagcctgggtgacacattgagaccctgtctcaacaacaacacaaatatagactgggttttcataggcctttattctttcatattcattttagagtaagttgtagattctcaacattactactggaattttattggaatttcattgaatatgtattgattaatttggaagagaaccaacatcttttcatggaacatttcctgcccagaattcagtgtggctggctttcttcaccttttaggtctctgctaaaatgtcagagaagcttccctgaccatccagaattaagtagcaaactcattctctgtcattc

SEQ ID NO: 33306 - DNA, 512 bp, Homo sapiens
tgtctgcaaaatgcatatgatcatagactgttcctagagattgttgtagagattaaatgagataatctactcatttagcacagtgcctgggacataataattgatcaataaataaatatttatgccaggcactgtgttaaatgttttatttagcagtgttctaaatactttttatttctatgaaccccataacccctacctagcttagtactactcatataattgacctttcaaatatttgttgagtgaatgagtgagtgaacttgtgaatgctgacttggagaccaaaagaatcttgcctgtgtaagctggtttgtcccaggttaacattcctcttcaatgaggtggtatgtacgccatgaggctcagcatctgtagtaagcaggaggaaattgtggaaagggggtagctttttgaccatggctttctccttttttttttttttttttttgagacagagtctctctctgttgcccaggctggagtgcagtggcgcaatctcagctgattgc

SEQ ID NO: 33307 - DNA, 1552 bp, Homo sapiens
cctgtaaaatgagaaataataatataattaaactatgatatcagccttttggaatgaacatgagagttaaaggagataataatgtaaactgcttaacacagagctcagagtaagcacttttaatttttagctatgatcatgatctttttttttttagatgggagactctctgttgcccaggctggggtatagtggtgcaatctcagctcactgcaacctccgcctcctaggctcaagcaattctcctgcctcagcctcctgagcagctaggactacaggcacatgccaccacgcccagcttttttatttttttttccgtatttttagtggagacaggctttcaccatgttggccaggctggtctcaaaactcctgaccccaggtgatctgcctgcctcagcctcccaaagtgctggaattacaggcttgagccatcatgcccggccgatcatgaccatttaaattttcattaaggtacttcatgcagtgcttggcacatggttgatgctcaaacctatagctattgcaataagttacctacagtttccaactgctagggttatggctttgttatttattttttaaaaattgttagtgattaacacgatctttagcctagtacctaggaacttgtctcatcatcttggtaactgacaaggcctggcaccatgcctggcatcatgcctggcacgtagtaggcactcagtacatagctgttgaatcatattaaattgaaatgaatatccattcagacattagcacaagagctgtgtcactaaatagctgtcattgcaaaatttacagacaacaatgacacagacatgcttgcatagtttgtaagccacgatttcaacttcctgcattgcagacatctcaattaataatcccattccactcacatgatccttagaaagaaagggcaaactaatagaaatatctggtttagcaactaaaagaatgagctctagtctaggtagatagaggcttacatcctggcttcaatatcacctagtgggtcagttacttaatctctgagtttcagttttcttatctgtgagaagggaataataatagaatctatttaatgaagttattgtgagaatagtgccttccaactgctgttctctttgcctgaaacactcgtttcatgaagggtgaaaccccatgtttggattttgtgtgtgtgtgtgtgtgtgtgtgtgtgtgagagagagagagagagacagagagacagggtctcgctctgtcgcccaggctggagtgaagtgacttgatcttggctcaatgcaaccatcgcctcccaggctcaagctattctcctgcctcagcctcccaagtagctaggattataggcatgtgtcaccatgcccagctaatttttgtatttttatttattttttgaaattatctttttttctttttttcttttttttttttgagacagggtctcactctgtcacccagactggagtgcagtggtgtgatctcagctcatggcaacctccgcctcccaggctcaaggggattttcctgcctcagcctcccaagtagc

SEQ ID NO: 33308 - DNA, 1917 bp, Homo sapiens
ctcctgagtagctgggattacaggcatgcgccaccgcgcctggccaatttttttaattttatggatagtgtatttgaaaagtcacatcgatttttctcctggaatgtcctctagatgtgccgtagcttcaagttttacatgtaggtctaatttaggttgtgtgatacaatgggtttgcatttagaagggtcctctggcagcagcaaggaaggttttcggagggtgatagcctagggcctgaaactactgagacttggagagaagtgatggtggctttcactaggtgatagtagtgaaggatatcgaaatgaattaaaatactggggatgtagaatgactggacttaatggcttgagggaagtgtccagaatgattcctgggtttcttacgcacaacactgagggtagataacttgcttgtacgttttttgcacttcaaattggtcctcaataaatagtttttcctttggggaggttatgattgaaatttggccagtcagggatacagttttctcaaacaacactcttgtatcagttccctttttgggtactgcctggagcccagtattgaaccctgtcctcccaagcccaaagacctttgcctcccatagtaccaggaaaggtgcccaagttcttttacacacaaggtgcgcagagcggccagcgcatgcccagagaggtcgtaaggaggacgaccgcccggagagaaaggacgcacgcttcccgccattttgttcagcttgccgggcaaccggcccctgctggggactacaagtcccgtaagcctccgcggcggcacgtcctaccctacactgtccagccggctccctttttccccctccccgggggccaagggctccggctgctgcctggcggccaacgggccaggtaggatttccgggagaggctgctgtggaggctgaggaggcggcggcggagatctgggtaagttcagcgagcaagggaaagtgagcaggacgcgctcagtatcaggctgcggcctcctctcaggctgcggcccctttcttggctctgcgagagggtcccggtccgggcagaaggtaacggcccgggtcgccgtcgcttcgggccagggcggggcggggccgccgcctccctcctcggccctcccacaacggtccaacccgggcttctccgcctgaggcagggcccgcgcaggctcgccctctccgccccccgagacttggctgggcccttttgtctgggctgcgttgctccccctttgtgtccgtgcatggagtctccgccacgggggagcctgttcccccggtccccaacagggactgctccctggggatccggttacagtaaccggatcgggtcaaagtacatttttcaaaaccgtcctgcctcagacctctgcacccctgctgggcagaacgggggcttcggagccaggcggagtttctgtaaaaacctggaggttattatttaactttcaaacatcagcctgggcggcttcagggcacgaaactcccgacgtttttcttggtggagagatgagattaaggaaaagaagcgacccctctctcccaccctctacaccccggctccgggaaaccgggaaggcatcgaatttgctgcgatgtctgtgcagctcacatctgtgatcggtggaccaaagaaccagtggtgaatggtagaatggcagttcacgcacctcccaaatctcggaggagagtgacttacagggcatcactgattgcttgcaaaaaaaaaaaaccctccagtgcttcattcggacactcagctcctcgctccttccaacctcttccttttcttgttctttttaaaacaaacagtggaaggaaaaagtccttcagtggaagaatttgctttatagaggaaccagaaacccagtggcttctagaagtcacttactttttcgccaaattaa

SEQ ID NO: 33309 - DNA, 1195 bp, Homo sapiens
gttgcctaggctggagtgcagtggtgtaatcacagctcacaactcacctcctgggctcaggcaatcctcccacctcacctcccctccctccagtagctgggactactggcacatgccaccatgcctggctaatttttaaattttttatagagacagagtctcattatgttacccacgctgatctcgagctcttgggcttaagtaatccttcagccttggcctcccaaagtgctaggattacaggcatgagtcaccaggcccagccacagacatttatttctaacagttctggatactgggaagtccaaggtcaaggtgccaggagactgggtatctgtgagggccttcttcctggtttccagacagttgtcttcttgcgtagcctcacatgatggaaaaagagaactctctgggtcttttttgataaagtactaatcctattagtgagggctttaaaaccctcaatgacctaattatctcccaaagaacccatttcctatcaccatcacattggtcattagaatttccatatataaattgtaaggggacacaaacattcagtccataacacagtgaaatctgatacttttgaggtaaacctgtgtctaaaacacacctttgaatggactactgctcctattagccttttactcaaaaccatcctggtgtttttgtgtgattaaatttgtaaattctttggtgtactcttgagcaggctccctttcttctgtgactcagagcctggagcgttgcagccaagctcaaaagtcaggaacgggggtgtggacttttgggctatgccagtcagcagccagaatgtggttggcagtctcctccccttcctgcacttcagctctacacagtgtgcattctggaatgacaggcattcctgtgtgaagagtgccagtgtgaagacagttttgtaagaactgcaagtgctcaggctgtatgggaaacagaaacttcagcagatgaactgaccttatgccatttcctgatgtttggcagtgacactgaaagaggaccgcatgtcccctctttatgtggatttatcttttatgaaaagtttgcttttgtccgggacagtttgttgtcgtgagatacatcagacaatataatcatgggacaagctgatgtctccagaccggtaaatccagatgcagttggtgagtaatagaaggcagagaaacagaaa

SEQ ID NO: 33310 - DNA, 6493 bp, Homo sapiens
gcgcctgtaatcccagctactggggaggccgaggcaggagaatcgcttgaacccgggaggccggggttgcagtgagccgagaccgcgccattccactctagcctgggtgacagagcaaaactccatctcgaaaaaaaaagaaagagtatagggcagtgcttttaattacattcattcacactgttgtgcaatggagttttttattttttatttttatttatttttatccgggccaggcctggagtttttaaacttttatctgattcgtctaggggcactttcatcttatttaccttcacatttatcaaattatttctttcacaggtgacagagcagattcaattccttttgatactccgtatttctctatatgtatttttttcattctgcattcttattattccaacgttttacttatttatttggagagagagtttcgctctgtcgaccaggatggagtgcatcggcgcgatctcggctcactgcaaccaccgcctcccaggttcaaacgattctcatgcttcagcctcccgagtagctgggactggaggtgcgcggcaccatgcctggcttatgttctgtattttttgtagagacggggtttcgccatgatgcccaggccggtctcgaactcctggcctcaagcgatccgcccctcacggccttcagagctgctgtaatcacaggcgtgagccaccgcgttcgactcttccaaaaactttttggccagtttatctaagggcatatcctacagactgagtccagtgattgcacagaagtaaacgtcctctgcagctacatacctacaaacctatttctgtaacgtacattccccagcaaggtcccgcgggaaggatccactaccgcgagaggcctcccagccaggaaggggtggggctcaatctgcagtagattcccagaagcctcagtgagtttctgattctctaactgcgcatgcttctgcgcacgcgcaatagacattccaggacttccgggcacttcgtaaggtttaaaaaggatgcttcgcgttttctctctcctttttggagacagattcgcagtggtcgcttcttctccttggtaagtgtgatccttggtaagtgtgatcagatgcttgccaccggagttgtgggtctaatgctatagatcagtagccgagcttccctaggaagatcatatagtattttatttatttactttttttttttttttgagacggagtcggtttgtcactcaggctggactgcagtgctcgttgcaacctccgcctgccgggttcaagcgattctcgtgcctcagcctctccagcagctgggattacaggcacgtgccaccacgcccggccaatttttgtattcttagtggagacggggtttcgctatgttggtcaggctggttttgaactcctgatttccggtgatccaccaccctcggccttccaaagtgctgggattacaggcgtgagccaccgcgcctggccggaaatcatgtaatttaaaactatatatgggtgtcttaggcggcatcggtcccaactctaaagtacgcgttagacgggcctgggccagaagtgggccatggagacctcgggacccgcagggctgccgcccgacccagcgagcctctgaaggtgcaccgccacccccactgtttatcttactgcctcatagtaggcacattgtcgttctcaatataattgcacacagttttattctggatcctcatttgcctttaagaattttctcaatttttctttttatttgatcgcaccactgcaacctccgcctgctgggctcaagcaattctcctgccgcagcctcccgagtagctgggactacaggcgtgtaccaccgcgcctggcttatttttgtatttttagtagagacgggatttcaccatgttggccaggctggtctccaacgcctgaccttgtggtccgccacgccaggccgaagattttcataatttggaagcattgcgtttcgtaattatgctttctcgtatttttgtgatttgggtcatttttatttttatatttttaggattacaggcgtgagccatcgtgcctggccgatttgggggtaattaacaagtccacgtgtttcatttgaatttaggatagctgggcctaattgttgtctttgcttctgcggtaccttccacatagtactaaccgcctattgtaaagtaattagaatagctgaatatgcatgttaccagtctagaaaccgatttttttttaacaccccactgtggacagggtggaaactcgtttgctttcttgtttaagatctgtagtaacatgaatggatgaaattgtttcctattggattctgtaaatttatgcgttacactgattgtccaacgtggatacacccgggaggtcactctccccgggctctgtccaagtggcgtaggggagcatagggctctgccccatgatgtacaagtccctttccacaacgttggaaataaagctgggcctcgtgtctgcgcctgcatattcctacagcttcccagagtcctgtcgacaattactggggagacaaaccatgcaggaaacagccttctagagcactgaatctggattgaagtctttttttttttttttttttttggagatggagtcgctctgttgcccaggctggagtgcagtggcgcactccattgcctctgcctcccgggttcaagtgattatgctaagtgattctcctgccttggcctcctgagtagctgggattacaggcccccgccaccacgccaggctaatttttgtatttttagtaaagacagggtttcaccatgttggtcaggctggtctcaaactcctgaccttgtgatccgccagcctctggcctcccaaaatgttgggattacaggcgtgagccaccacacctggctggattgaagtcttaatacatgtttaagaaaaattggctaaaaagtagccaggcatgatgataggtagctggaggaaggagaatcgctggagcccaggagtgacctatactcaaacctatactccagtgccactgtactccaaccccaggcgatagcatgaggcccctcgttgaaaaagtttagggttttgctgtactaatagattaatatcttgttttgcaggatttgttaaggattccaagtaactcttatttggtgagtaaatctgctaattgttttttgcttatcagctctttgtcaatgatttctgtaatggaaataggattgaagagacttttattctagttggtcaggatttacctctgaggcatttaatcattctcagagcaatagccaaatatcgactttgctgcatttttgtaggcatgttgacataacttcaacatatgctctgttctgtaaaaattgctttttttagtcagctcattaaaagtgcaaagtagtaaaagctgccctagtgaactgtaggaagcctaattggctttatctacatgtgtagcctgagctgagaaagatactagcccttgaaaatactgtgggtgattagcaatattggatttgtcggttactccaattcctcactaatgagcattccaacgtggataccctgggaggtcactctccccaggctctgtccaagtggcataggggagcttagggctctgccccatgatgtacagtccctttccacaacgttgaagatgaagctgggcctcgtgtctgcgcctgcatattcctacagcttcccagagtcctgtggacaatgactggggagacaaaccatgcaggaaacatatctagtatactagattttaagttgaagtaggatcttcaggagtctaatcattatttcttttcttttaggagagaagacgatctgcacttcgcattttggcattgacatttaattttagggtcctttatatagaagggagagtaggtaaactgatttttttttttaacagggagggtttgacaatctttggcagacttggagcaaaagattgaggtgcatttcatgcctccttttgagagtcttgctctgtcgcccaggctgtagtgcagtggcgcaatcttggctgcaacctcagcctcccaagtagctgggattacaaacataagccaccacgcccagccctcatacctcttttaaaagtcgacctgttttgcagaaagtctgctgtttttgtactaaaggctttggaatttggcatttagctaggaatgcacattctttcacctcattcatactttaagaaccacagaagtgactctgcttggccagaaggcacactgtgttggtggttatattaaaagtccttgagtattttgcttttcatgatcttgctcactgcaacttccgcctcccaggttcaggcgattctcctgcctcagcctcccaagtagctgcgactacaggcgtgtagcaccacacctggctaatttttgtatttttagtagagatgaggtttcaccatattggccaggctgttctcaactcctgacctcgtgatccgcccacctcagcctcctaaagtgctgggattacagctgtgagccaccctgcccggccacttttgtatgatttctaatgtatttgtaatttacctaacaaattgcctaatctgctatgttaatgtatttatgaattaaaataaatacgactgcatgtttgtggttcatttttgtggaggtggctgtggtgacatcagccaagaatctgaatggtactgttgaaggaaactagcatgatagcttcagttctaaaggccctgaaacctagtctcaggtgggtcccccttgggttcactttatattggcagtttattgggaaaatggatattaggtcctgaccaataggaccgtaagtctgggttgagtgcaagatgagttagaccgattctttagcttcctgcagtgtagtggaggaaaaatcgatggtagcaacgggaggttgtatccctagctgatgagttgtatgagcctctactacctggcgcacctccgcctgaagattgccagaattgcttgcctcatgacgtgagtcacaatggaaactttgtcaagccccctgcactggctgccaacataaatgttcagtaccctgaaggatgggactgaagggggatcatctagaaggtaaagttacctactggcataggggaggtgggacagccgttaagccatttggaacttgatggagacaggtttgagggaggtgggtgagattggagtttggtggactgtagagcttgcttgccaaggtgttgaggtcagggttggtttgagaatggaagctagttactagctatgattgtgggggaacacagcttgatttttcttacaagctaagaggagtgaggcagtgtttaagagggcatgttaaatgcagccaggcttggtggctcacacccgtaatcccagcacttaggctaaggcaggcggatcacaacatctagagatcctggccaacgcggtgaaaccctgtctgtactaaaaatacaaaataactgggcatggtggtgtgcacctgtgggaggctgaggcagaattgctggaacccgggagatggaggttgtactgagctgagaccttgccactgcgctccagcctggtgacagagttaagtctcaaaaaaaaggcatcttcctaaagcaattgtatttgtgcttacctgtgccaggcactgttctaggtaagcactaagtgggctttaatacagcatattccaatggggaatcccaggaaccaaaagactaattgtccaagtccacaactagaagtggcacctctgcagaaacaagcatcaaattccctgctcaggaagaagccagatgagtcagccccattcgtctgtatgcccagtcccatccgtgtcctgctgtaactacatagatctcacctgagtaaagtgatttttttctgaaccagtggttttagtatgttttcaatccatatactcaggtgggtttgggtaactgcagtgctgggcaggaaatgaatgaatttctattgacttgcaaggtagaggtgaagcaaagctgtcagtaggtgttcaggtcccactctgctaaacttcagcttgcaataccccttttttagactttccaaacaggcacttctggccttgttctttgtgtaggcagacagtattggttgcctatcttaggagtactagactgggtttgaatcctgatcccaccacttgctgttcatgagactttgggtgagttactcagcccctctgcctcaatttcatgttcacaaaataagtgataaactacctcatagagttgtaataaggacaaaggagttggtatttgtgaaaagattcttagggtctctagatggagtgcagcagcatgatcacttattaaataacattcttttgtgacttctcagaaaccaaggatacagtatccaattttttgttttttgtttttttttttttttgagagggagtctcgctctgtcgcccaggctggagtgcagtggcacaatctcagctcactgcaagctcagcctccccagc

SEQ ID NO: 33311 - DNA, 829 bp, Homo sapiens
gcctgcaccgcacccggctaatttttgtgttttttttttcagtagagacagggtttcgccatgttggccaggctggtctcaaaactcctgacctcaggtgatccaccacgcccggcagagccttgatctcttaaccactatcctcacctcccctttccctaaggatccacaatggcctcactggctcttgaaggcaggctggcaccttgatcattcttcctggtcattagtattctgatctggttattttccattttatgtccatctaacctacttggaggatcctcaagagactgcatatgtaaactcagtacttattcttgtactgtgcctgccatatagcaagcactggctgatttaatttttctgtgttcttttttattgatttgtttttatctttattattttctttgcttattttggggttagtttgctcatctattcctagtttcttaagctagtagctgagctcattgattggagacctttctttttttctaatgtaggcatttagtgctataaatttcctccagatactgttaacaacacacaaattctggtatgttttgttttcattttaattcatttcaaaatatttttgagttccttttctattctttgatctatgggctacttgaaagtgtattattgttgttgtattagtgttgttcaaatctatccttgctagtttctttttttttggagactgcgtctccaaaggctggagtgcagtggcacaatcttggctcactgcaagctccgcctcctgggttcacaccattctcctgcctcagcgtccccagcagctgggactacaggtgcctgccac

SEQ ID NO: 33312 - DNA, 1751 bp, Homo sapiens
ctgatcatattaggatgctcttgtagctcataagaagatgactgggtgttcacacgcatatgagatgtgcctccctcaaaccttgttaagacatgggcacatacccatctgatgttaactcacggggaaaaaaatctgatcatgccattcccgtgcccaaattcccatatatccctactgcctcaggatagaggctggaccccttagacacacaagaccctgtatccatgatctgtcactcccacaggcaccctctactcccatctacttggcagtttcccacaacctccctgggttctcgtggttccctgtcattgcaaacgtcgcttctcctaggatgtcctgcccccctagacttaacttggaaagctgttcttaagccccggactgagtcagatgcccctctgggtatccctgtcatagcgttgtgtggttgttgatagtctgatttttcaaccttctccatgccctcttgagggtagggaagatgagtatcttttttctccgtacagaccctaccgcacaagattttcctaaacagaccgaactcaaggagtctttctggttgttagtccacgtgtcccgatttggggtttccaaaatacacgcccactggaaccgggccaggggagccagcctggccaagggctcccccagcccggccaagggctcccccagcccgggagcgcgccacatgcagatcctgggatggccgccaggggccgccgggctctttgttttcctttctcacccgggtcggggccagaggcctgcagagcgcatgctctggggcagttcgcggcccggcggggagcgccggagttccttgtggccgacgtgcaccaaggtaggtctcgcctgggacgcgcggagggtccgggcagagggcggtaagcggagcggccacagccggagcacgggccggtccacgcgggcctaagtcgctgcccgctctcgcccgtgtcgcgcggcgccggccccacgtgaagcccggaggcaggaaggcgcggtgcgggctcgcgattccccggccccgcggggcgctccagcagcggctgggcgctgcctcgctggagctagggccgcgcggcccctccgccgccgcgcctctcacgcccgcaccgcggcgcccgcgcaggcgggagattcaaactgcgcgagcgcggcgggccgggtgcgcgcggccgcccgggcgggggatgggtctctgccgcgaggaggatggttttgtccggcatgcgcttggagaaggcggtttgcagatcggggagggagccctgcccgggagagggtgggtcgtaggagctcgagggtctcccgctgtggacctttgggagccgtgtgtcttgaactccgcagcagctcagtctgtcagcagattatttgctggccatttattgcgtccctctcttgcggggctgggggacagtagtgagaagagcaggcccgtgtcattagcgaactatgcccttgaacccaggcgacggacgctactggcaagtcattcatacgtcacatattgacctaacttcgaccacgtgtgacttgtgtgccctagcagaagttgagtgtgtggggtgttacggggagccctcagggggatcccccaccctgcccaggaggctcagggatggctttccaggtgaagtgactcttgaatggggttttgaaggaacagagtttttcaggcagtctgagggtagtgggattagggtgatacaggcagagggattgcacgtgcaacggcatga

SEQ ID NO: 33313 - DNA, 1660 bp, Homo sapiens
gtatgtgtgtgtgtgtgtgtatgtatatatatggagtcttgctctgtcaccaggctgcggtgcaatggcgctatctcggctcactgcaacttctgccccctgggtttaagcgattctcctgcctcagtctcccgagtagctgcgactaccagcgctcgccaccacgcccgctaattttcgtacttttagtagagagggggtttccccctgttggcgaggatggtctcgatttcttcacctcgtgatccgcccgcctcggcctcctcaagtgctgggattacaggcgtgagccaccgtgcccagccctaacgagcatatattaatgttgtaattatatgtgtctgtgtgtgtgtggttttgttttctatataaagtcagacgagtgtgtgtgtgtagttttgtttgttttctaaatatataaagtcagaaataaacccaagtaacccagccgcctgggccaggtggtatctggcccgccccattccagcctgaactccgcccaccgcgatccggaagcctagcgcccagtgggttgcaggaaaaacccggagctgaacacactgcccgacccgggccgctgcgctcgggagcctgcgcagaagccgtcggaggcgcatgctctgtagcggtctccgcagccaggattggcgcccgcgcgggccttcgagccccgcccgcagagccccgcccgcaaagccccaccccggtgcgcgggtatggcggccagcctgtggatgggcgacgtgagtgagggcagccgtccggggtctgaagacaaggaagcatctcggtttcgcgagagaggaaggatctgagtgggaggggacttgggatcccagaaaggggagacgtgtgacgggggttctttttggtgacacagaagcgggttccagcatctaagtgaagaggctgagtccgtgaggctaggggtcctggggccccacctgggttcgtgggagggaaaggtggtgctttggggacatagaatgggagcaatccaaggactgaggcgcgctgttctgggaccggaggagtggggtttctaggtccaaggggaggctccctaaagcggggcaagcttgaaccaaaagagctggggtttcaggccgctcagtggaggcgaacctcgcccctcgctcccccagcggcgcgtagccagccctgggctgaacgggaggggctctggaacccggagtgggaagcccggccgccggcctgagccgctgtgctcttgtttttacgcagctggaaccctacatggatgagaacttcatctccagagcctttgccaccatgggggagaccgtaatgagcgtcaaaattatccgaaaccgcctcactgggtaagtctcatctcaggtctctcttaatacatctcgttgcagctgtcatgtacgagaatgtaaacatcgtagtcatggcttctcactacccctagtaatagtcactgtaaaattataacagctaacattttgaggtcccaatgagtggaaggatggcatgtagcttaagggtaggacttgccaggcgttgtgactcacacctgtaatcccagcactttgggaggctgaggtgggtggatcacctgaggtcaggagtttgagaccagcctggccaacatggtgaaaccccgtctctactaaaaatacaaaaattagcc

SEQ ID NO: 33314 - DNA, 1424 bp, Homo sapiens
tgtattttcccaaaatgttgcagatcagttacaacaaacagaacggcgaccgtcaaggaaaactgtcactctgggctcctttttgaccacagcagctatgcggaagcagctgcagcttcgataagggccaaggggcaattcagatcccagggcggccgcctaaagcctcacctgtccatcattactacctgcttaagtacgccgggatctctgtagactaagtcagtcatcctgtaggccccactgcccacgctgtgccaatagctggtgtgctttttctcagtcttgatgggaccgttttatccgcctattacaggtaagaggtttagaccgattaagttacttcctgaaggtcgcttagtcacttagcgaggctgaaagcaacaagctgggatgcacgcaagggtctgaatgcctaaaacccgtccttctgaaaaccgtgtctaccagggcgacctccagaggtctcgcgcgtagtcaccagtcccaaaatcacctagctggtaaatgtcacagattcaactggaggccatcctgacaccagcatgcggcctccccctgaattaagacacttcaggcccagggattcatccccgcatcccccaggagaccggttcccaaacccccaccccttccgtaaacccggccgcctgcctgcaacactcacctgtcagcccagagcgcagcgttgcgcagtccgaagcgagagaagggcgcggcccccgcgggctcccgcccctctcactgccgagggggcctttcggagctcgggcccaccgggttggaaggcccggctcctccgtgccacattcaccaccatctcgaggccgtgggaggaaaaacccggcgagtgcgcgccagcagcagcgactagcggggaacggcgcgcaggaaggcaggcagaggcttgcagctagtaagtcgacaccgggaatgcggcggggagaaagggcgctgaagccgcgagcaagagcttatataggccgcccctcgcggccacacccgacagtaggccgcccgcgtggcgcacagctgcctgggagttgtagtttgctcgccccggcgttgtccgcgcgtcacctccccagccctacgcgcgtgtccatcccgagcccgcgaagcgagaaccgccagaggctttcctccgagcggaagaagcgccttcacctttcagtgcccggcgctgggcccacgcaggaagccgacccgccttggcctctggagttgtctctgggatgtctttcagtctggaaatgaaccctgtgtgctgggaaagggctcgggctccgctccgagctcagtgggcgtgcgagcgagcagcgcctgagtgggtttcggggagggggtcatactccccgaaaggcgatttattcaaggcttgtctcttccactaatatgtaattttactgagcgcgtgctatttt

SEQ ID NO: 33315 - DNA, 2050 bp, Homo sapiens
gatttaaagcacttatcaagtacataactgagttccaactgttttcaacttcacatctgattcccaagaatgaagcagaaaatgaagatgtttgcatatgggcttcctagattgagtatctgacacaagaaaagcttgccaagagccaagtaggcagtgcgaaggagaagttgtcttcccctgaatacgtcctttatctctctgggttcagggaatactgtgaaaaaatggatcactaaatcttttccaaaccctttccctttactttgtaggctgatctcatatccatggtcccttagatccaaggcttttaggagcttgggtactcacagccctgttccgagactcaggaactcggagtctcaaagcccggatcccgtccccaaagaagccccagtcttcactgcccgcttctgttcccttccaaactcaagttttctctgtctgcttctgcccctcaggaacctaagtcttcgctgccccgtttctgaatccttaggagcccgggtcttcactgtcccgcttctgcctcttaggagcccaagtcctcaccgctccacttttacctctccggagcctgtgtcttcacgccccgttcctttctgaccctttcctcgtaggagtgcgggtcctcataatcctgctcctctcagaccactttccctcagatgccggagaactcgcatccgtccccgttccctaagtcccgtcttagagcccgggtccccacagccgcgtcttctccgagcctgatcctctcagtcagtcccttcccaagagcctgaatcctcacagccccgtctcgtccacaacctggtccttcgaacactgacccactgtaggtctgggtcctgactccctcctcccgctcttgttcctcaactgccagggcccaagactcacaggcagcagcgtctatctccccatgatatgcagagactgccccagtgaagcgttcgtctcagcagccggtccgactgcgcggccctccccgactacttccggcaccgctccccgcctccaacccggaaacgcgcggctcttccggccggcgggcgcgcgcctcgcttgcgcaggcgcagactgccctccgacacgtggtggcgatattgagctgtgtgtaggtacaccctgcagcttgcgcttttaactgcttgtggttgagtggcagcatgagcgagctctgcgtattccaacccggcgttaagaatccttcactagcttttcttcccgacgctgcttatttatctatcggtagcatgacgggtaattgacgccctcggatggctttgaggtcgccatttttggttggtgcctttgtcttggtgtcaggactgggatatcatctgggacacattaccccacaggtatcctgttggacctcaacgaggaagttggcaacagaggaaccaggagatgagagagatcggttggttgtgcctgtgaactggcaattcagtagtaacaattgagtgcttactgtttgccgggaattgtgctaatccgcttacctccgttacgccatttaatcatttagaggagacctgtgagagattaagcaaagttctagctaataagtgcagagcctcagcttgaactcagaactcactactaagccaaagcctgtcctgtagcattctctaatgctttcagtttttcggctgtcagatgcttggtgagaactgctgttatgtggctcacgcctgtaatcccagcactttgggaggccgaggagggtggatcacgaggtcaagagttcaagaccagtctggccaagatggtgaaaccccgtctctactaaaaatacaaaaaattagccgggcgtggtggcatgcgcctgtaatcgcagctactccggaggctgacgcagagaactgcttaaacctggaggggcggaggttgcagtgagccgagatcgcgccactgcactccagcctgggcgacagagcgagactctgtctcaaaaaaaaaaaaaagagaacagctgttattttttactgtatgctggaatgttaggcatgcaagtaagacccaattccagcatctgtaa

SEQ ID NO: 33316 - DNA, 1794 bp, Homo sapiens
tgaaacccccgtctctactaaaaatacaaaaaattagccgggcatggtggcaggggcctgtagtcctagctacttgggaggctgaggcaggagaatggcgtgaacccaggaggtggagcttgcggtgagccgatatcgcgccactgcactgcagcctgggcgacagagcgagactccgtctcaaaaaaaaaaaaattgtgttgataaagatctacttcagtcatctgaggtacagtatttcatttttcacattaatgctatgctgtaccttattctacaactcttttcactcgatttaaaaaaaaaaaattctaatactccttcgaagtgcagcatatagcatgccacaatatgaacacaccatgacaatcagcttatgcgtgaccttgtgaccttgtgcttccactgcacgcctgcctgggctgctccaaggtggtggctaggggtggcacaagttacacattttcaatttggataggttgtgattcttgtcttccccagtcagatacctacagccgctgagagccggtattccaacgccatgagacgccttctgtcgtgagcagttgacaagaaagacccagcacttactgcaaccggaaggagcggttcctccctcgctcgcgcagccgctcttccccgccactccctcggtgcccgccagcacattcccagcaagccctgagtatatttgcatatcaactcactacatttttttcttctaactaaaaaatcgaaaggacaaattccagattctccttgtgaagtcttcctttcagttcagaagaaatggaattcgctcttcaacttcaggaagttgaaataaagagttgcttggattttgtgttcacctttaccaaaaaatggatttggtaacactgccaccctgctttggtgacagagaaagcaaaaagggcttctgtcgtgagtggcacacgtagggcaactcgattgctctgcgtgcggaatcgacatcaagagatttcggaagcataattttttggtatttgggcagctggtgatcgttggtcccggcgccctttctttactgttatatgttaggcgaaatattacgcgtttggagtaagtggtgctttttgtaactgaaaagagattctgtgtgtgtttttttttttttttagaggctgcatagttatttgtatgaaccgcaggtgacctaattagcaaggtaattcagacctgtatcctagcacttaagaagtggaagtgggataaccctgcgtgttctcgtgtgggaggctagcttaagcaacaaagcaggaaggccccaccaacaaaagaatttaaaaattatacgtgcgtggtggcgcgcgtatgaggaaattatttggcaactgtgttacagtatagcagcaaatggaatagacctagtccctgactttaggagacctgcctcagccccccgaatggctgggactacaggcgtgcgcctccgcgcccagctaatttttgcatttttggtagagacgggttcaccatgttggccaggatggtctccatctcttcatctggtgatccgcccacctcggcctctaggagtgctaggattacaggcgtggccatcgcgcccggcctgcaatgttattttatgaagcagaggaaattgaaattaccttcaccaggccttagcaaactttttctataccttataccatacacaaaagattaattcaaggccgggcgcagtggctcacgcctgtaatcccagcactcctagaggccgaggtgggcggatcacctgaagtcgggatttcaagaccagcctgaccaaca

SEQ ID NO: 33317 - DNA, 2207 bp, Homo sapiens
ctgcagtgagccgagatcgcgccactgcactccagcctggccaaagagcaagactctgtctaaaaaaataaataaataaataaaaaataaaggtcttaatacttgttaattactattactgaccccaggaactctctgaagcacttttcatgcaggtatcaccttctttagcactcacattatgtcttatcggaaacaggtttagagctgtcaagaaattcctccagagtcgtttacacttccagcaggggagtcaagacttcaacccagaaactcacaagcaggaaaaacttggcaaacaggcacgggtcagacaatgcttagggcttgctcaaggactcgtgaccagttactgatctatgcagatcttctgattgcaaactgatagctggattgtaacttgaagggtccgataagatgtaaacttcataaaacaggatttggggaggtaaatggagtagagtcctccagaggagtcgagaaagctagcttggccctcaattgtggttgaggtgattctttcatttagggcctattttcctcatctatgagtgcgggaaggagagttactggggtctctagcgacctttccaacactgattttcaagggcgaaagaattctgcttaggtaaggcccaaatcccttggctaaggttaatcctcggtgggaccggcaatagggacgcgtcccctttaaggcgccagctctccggcggcggcggccggaagtgttgaagcccggcctggcggcggcggtggcggtagctgccgtggcggcctctgcgcatgctccgtcgcctgcccgccctggccgctcgccgcccgcccgcccgacggagacggtgaggagggggaggggtgggcgcgcgggcgcggggtggggtgggggcgggggggcgggcgcgggggccgcgcggcggccggcgagggcgggcgggcgcgcagggggcggggggctgctgcctccgcgggcgcctccccacgccctgtgcgtgccgccgccgccgccggggagcgagcggacgtcgcggcgccgcgggggggtggggggacgctgccgctgggtccgcccgagccgccgggccgcccccagcgcagccggccgcgccgccggggctcgggccccagaccagggcggcgggaaccggcgagtccaccactgggggggccccggcgcccccggaccgaggggcccggaagtactcggctcaggggccaggaggggccggagtgactccggactgagagggccaggcgcccaggaccccatcgaggggtccggggagcctggggtatccccaaaggcggggtccggggagcaccgggcccttggatgaggagctggttggaggcctgggtcctgcccagtgggagggggacgataggtgctggaagcccggatgcccgcctgggaggagaccctctcggagccttggcgggagagcaagagtacagagtgggttcttctgaggagagcagagtccagcttatcccgaggggcgcggtagaggcctcggccactcagaacaagggaaaaaagggcaggttttttccaaaggcagggaaggaagaggagctctaaggggaagtgagcaggcccaggtctccccacagatgagcgcgtggtaggaagactcctagagcctcctgaagtacgaaagagcagcgtccaaacctgaggggatggaaggtgtctaggtgcctcttgatgtctaggtggagaacaaagtaacccgctcggtcaggggatggagaaacctatctttttgagagaagcagagatcgttgaggaaagatgcttaaggtgttcccgctttctgaaatgacaggaattggccaggtgttatctaattgaggggcaggagagatgaaggcaaaatctcaacccgagggtctttggaggatgatccacaagacaagagggtgaagtcttgacctagacagcagagcaggcgcagccctggattctctcaagatgagagaaatctcaaaaccacttcctagtagacacagatggggccttgattggtgtctgtttaggccaatcaagacgggttttaggaaaagagactgtcagacataattctagtcttgagggattatcttcttcctccttgcctcttctaatagttaccaaagtgcatttggggaccctttttatttatttatttatttatttgttttttgagacggagtctcactctatc

SEQ ID NO: 33318 - DNA, 2492 bp, Homo sapiens
tatcaaatattcctgcatgagttggctttgcttctgattgaaaatacttttgcccatcctttgcatctcccctatattctggttccctaatacagagtctcgtaggggtagagagataccattatgttagtgtcagatacacctggctatttaatagttttgtaaacttgggcacattacttaagctttctgtttttccagtcgtaaaaaaccgaaagactgatagcgattttgaagttgtcgaaagactttaatgtgtttgaaaatacctaacaacaaagcctggcccacagctggtatttcaataatgttaatttccttgcttccctcttgaggtccttaagattcataggttctccggactccttgaaagttttgtgtagatgcatgaggtgtatttttcttggaaataaagtccacaatttaacagattatcttggggccagcgatttccccgaaaataaattgtagattctccttcctgcaatgctaaggggtgaatctcttttgcgggagactggattctttcggtgtgtgttttgctctctgggtactctttctgtagtcggctaacagaggatgaccaagcccctcgcgggggcgggggcgggtcactcccggacagggcccccatgaagtttccctggggactgtgtgactccctaggggtcgggttacctcccagatgggggtggggtatcacttgcagctggaaggcaggttcattttaaggtctcgcgggcttcggaggcccctccctcactgagaaaccggcttttgtcgttcttctgaagccagagctagtctttccaggtgttagtcgaaacctcgtggtgcgaccctggtcgtcccaaaccccctaggccttaatcctggggcggtgggggcggggaggccgtgagcacggcttccgctcctccaatccgccagagggcgcagcggccggcctctcccttcccggggttcttcgcgccgggccccttccgcgtgggtgagtgaatgtgagagtcagcgctcgcgccgcgcgcgccgcccgcctccgctgttcggcgctctgctttaggcggtggggggcgggcgcgcgcgtaaaagcatagagacgggcattgagctcttgggctagagcgtcgccgagtcggagccggagcctgagccgcgcgctgtgtctccgctgcgtccgccgaggcccccgagtgtcagggacaaaagcctccgcctgctcccgcagacggggctcatctgccgccgccgccgcgctgaggagagttcgccgccgtcgccgcccgtgaggatctgagagccatgtcggccagcagcctcttggagcaggtacaggcccggcccgcatgcctcggccattgtgtgaggcgagaaggagcccgactaggcccgggcccgccgctcctgggcaggccgagccgagccgaggcgtcgtctcttgcgggccaggtttcgggcctctcaggccggccgcgcccggcgcctctccctcagcctgttcttcccgcttctcctcgggcctcggagcccacgggccgggccgcgccgcgttcccttctctcggcgggcctcgttttccttccttgtttccttccccttccttaaagccctgggttcctcgcgtcgccggtggcgcgtctgccgcgttttctcccctgccccacgggcctggcgctttcccccgcctcccattttcagcctcttcctcactaccattcctgacgcctcccctcgggcctgctcctttattctcccttcgggccctgccttaatttgttcttccttttccatttctcctttggacaacttgctgctcggcgacgtttccttcccctgcagagaccaaaaggtcaaggaaacaaaggtaagtcccgctccgccggtggccctgagccgggagggggacgcggggcggtgggggcggggtctccgggaagcgccccgggcggaggacctttcggaagccgcttagttcgcaggtgccgcacacttaagtattttgaccctttcggtgtgttcttgcagctggcgaacagctttttcgctaacaaggagtaattcattaagggtgggggtggattgggttttgaaacgctccaggtccttagtttcctgtaggtcttagaaggcctttgtttttcatcctcgtggatcactctctggaagtactctcatgtgatgggggaggggaagcgggagggaatggaaatccagaggagccaataaaatgacctttttagatcaacttgctctgggtggagggggacattttcactggcgactgtcgcttcagcattcactgtcatctcttacccttttgaagttcaatcttacgtgctttgttaactagtaaggtttttctctggttagcatatatgaactaatttgaaaggaagattgtaggattgggacactcctaattgaatttttttttctttagtacaaaatggatctgtacatcaaaaggatggattaaacgatgatgattttga

SEQ ID NO: 33319 - DNA, 4448 bp, Homo sapiens
acaaaaaaaaattagctgggcatggtggtctgtgcctgtaatcccagctactagggaggctgaggcaagagaattgcttgaacctgggaggcagaggttgcagtgagctgagatcacgccactgcactccagcctgggcgacagagcaggactccgtctcaaaaaaaaaaaaaaaaaagagtggtatgaccttgggttgccactttagctctctgagcctcagaagctctttagaacatttttggctgttaggattcaataagataaaatgagcaaatgcctgtaaaagaaccaggatcgctaaatgtgagtggcttcttcaagaggtcactgctgacgggggcatctcaggtagcaaagtgctccctgcagtctggggatggaggcgaagattatgatgtcactggcagaggccatggggcagggggcctgcagtccagggagtgacagctttcccgcttcagtgactgacaaagccacacaaggccttcacccacacaagtgcacaagtcacctcaacgagaaacacacacacaggtgcctgggtggaggggctgtgggacagggcagagctctctaggtcccagggcctgaggcccaggggacaacctgtttataggacacagacagacacagattcacaccctctatataaactcacaaacaggggcacaccctcacaggcaccaaaacacacccccctacacatacacatacacaaatgcacagaaacaggagatacaggatcacaagcatattcccaaatgcactccccacgcacaaattcagaaacgcagagccctccctggccaacacacacacacacacacacacacacacacacacacacacacacacacactcttatcaggctggggcaggcactggcactgctgagtcacccacaggcagctcagcccaacagagctagagccacgtggctgccccagcagggagggggcagggcccacagcagctctttagaatcaccccatccacctgactgctggggttttcctctccctagccctttgattgagtcaggggtggggatggggttgggggaggagccactgtttgcagaggccaaatcaaaaatttcacagcctgcactctcctgggtgcaagagtacacgtgagaggaattaaaaaatactactagattaattactatttgcaaatatattttcacatactcccatttaaccatcacaacagctctatataaagttagcactattattaatctcattttaccccagggtggggggcgggtgccttgccccaaagcccaaaacccagactcacctgcctccaaatccctacctcgtaacccctgggcaatactgtctggtgggcaggtgtgatataggcaagtgaaaggtacatcaatgtgcttgggagcctggttgtctatgtgtgtgtgtgcgcacgtgtgtgtgctcgcgcaccaggcttccccaggggattcacagggatagagactgaaagggtctcaagtgtcctgatttctggtcgaaggatccaacacttctctagtcccttgaagcccacctccctccatcagaaaacatctccccagtcaaagggctcagtctgaccctcctctgctagattatgggctccttgaaggcaggaaccagggccctgaagcctcaaacaggacctgattcagagaagtcctcagtgaatttggagggggggagagtcagtcaatgtatgacttttaattcagttatgtatcaatataacaataacatcaataattataataaatgctaatgcttattgcatgcttaccctgggactggcactgttcttagcacttgacatggattctttcattcaattcttgccacaacccttgaggaaaatactttcattaaccccactttgcagaggaggaaactggcttggagagagttagtagctcacccaaagtaactcaattaggaagtggcagcgttggggattggaacacaggaagtctagttaccccatttagtaggaagatcactacattcagaggaaggctttgtcctcagcgagcctcagtttgccatatttgtccaaagaaagggttagttttccacggtgctctggcctggaatattctatgatcctatgattctgtgacgaagagcttttgaagtgtcagggttagttttaaaatgaaagaggccattctgccgggtggtgagcttcctgacatgggcatatgtaagccagctcaggcctgaaatgggagggaggggatgagacttcggccagtgaccatggaagcgttgatggagtggaccatcaggaggggaaaagtcactgagaagagtggcaaggcgggcacgacaggatccagaactcgcttttacggaacgcctactgtgtaccagacctatgcttgacatttaacttacatcgctaattctcaggaaaacattgtaagatttatggttgacgaaattcagatccagagaagtgacttgttcagggtcacgccggacgaagtggtaggacaggcgatccaggtgagtctcctcagggtcacttccctagatcccctctgaccaacccctctacctagtaaccttaggagcagtaccacgtgtcaaattgcttcacacttttgtcatatgacgtcacaccagtcaatccaggaactccctgcccttccctcccctgacctctggggtctatcaaagcagcccccggctcagtgtccccgccggacgaggctacacctgcagcccccgccccttcccaactgcgactctcgcactcctctgcccgggcctccccctccccgccccgctgatcggcagttgcctgcgccaatcagagggcctagcgggcggggcggggcctcacgatggagttgccctgtcagtgcaggtggaggccccggcggggcaaagtggcaggaacctcttaaagggcgagagcggcgcggagccagaacgcggtcggcccggtccccgccgcacccagcccaggtgagcctggaccacctggggggcgaccctcggtccccgggagggacggggttagggacagaagaacctacccccaagggctcggaccgtcccgggagaggcgagaccagggtcgaagggtccagggctgaggggtccagcggtcccgaattccagaatccgaacttggggtccaaaggagtctgggcatcttaaagttcagggtgcagggaggggcgtgggagtctggagagggggtccgggagctcggatccggagctagacacgtccgggtccggccggtcctggctgtctggggcgggggtcctgcattcggtgtccgcgggagagtccctgcaggtcggcgcagcccccggccgccccctagccccgccttgcccggccccgcatgctcctgccgggcccgcagcagcgctggagcgggctggcggctagcagcgggagggggctccggggcctggagccccgcgccccgctccggcccttacgtaactgactttgagtttccggacccaggaaccgacccgccagctggggcgccggctgtgcccgccagggtggcccccccggccgtcgcgccagccccacaccctccctgccaggcttggtctaggggacttccctctgtctgggtctcccgggtctctctgtccggttcaggctcaggttccctctcatctctgggttccctgtatctctcatctgtcgtctctgttttgctgtcttttcctgtctctgtcctctgtctttcctcaagaattgtctcgccctcacctacacttcccggcaggccccacctcttcagggtgggacaggacccctcctctccagctagttggaggcagggacctgtccagaccaacccgagcccgagctcgctccaggagtggggaggagagaggagggttggggaagatgattctaggacccttagctcctgggtccgggaacggacgaccccttctccgcctctggagccctttcctccagaaggaggaggcttggacagaacctggctggggctgggcttagggcaactgggagtccctgtgagagctgcctagtgtctcgtcagggtcaggtcctcagctattgaaggggagcgggaggggctggggaggggccagagccctggcacgcgccccggagcttcagcaagctccctacctccacccagtttcaggcctggaggatggtcttggcaggaggctgggtggggaagggatctgcaggaggaggctcaagggacttctgcatgttggggaggagggtggagatagaatgacagacccgcaagtctaaggagcacctactgggaacactccctgccttgaaggctctccggggtgtcagacagacacttcggaaatcactgtaaataaggcgttaaagcaggtgtgaggtgggaattattatttcttcttttttttcttttgagacggagtctcgctctgtcgc

SEQ ID NO: 33320 - DNA, 686 bp, Homo sapiens
ctcatgccccacgtgggtgctgcgggatcccggaacaccccggctccagaccgggttcgacttgcgcgtgcgcacacgcggccagccccttgccttttcctctctctttttcgttcccctctcctctccttaccggcctaggggaggggggaaacaaggggagctagaagttggcctcagccaatgggcggacgggccgcgggcccggccccctccttccctccggcgcggcccaatagaaatttactacaatgttgtggcgaactgagggggaggggcgcgggccggcgggcgggctgcgggccgggctggcctcgcctcgcagagggaaggcgggagggcgcgcgccagggtcgctcgctcgctccctccctccgctggtgcgtttagtcagtcagccagcagcagccggcgggcccgcgagccgcagagggcccgagcctcggacgccggcgcctcctcctgccattgttcgtcgggctgcagcagtggcgggcgcaggagcccggccccggagccaccggtgaggcgaggcggcggcggcggcgcgggagccggggcggtgggcgtggagctgtccccgtggggacggtcctggcggccgcggcggcgctgcagcctctttgtctgcaacccccgacaggccccgggccggggcgcgggctctcccgcggaggagcctcgtg

SEQ ID NO: 33321 - DNA, 1171 bp, Homo sapiens
agaatcacttgaacttgggagccggaggttgctgagatgagctgagatcgcgcctttgcattccagcctgggcaacaagagtgaaactccgtctcaaaaaaaaaaaaagaaaaaattattttgtaattaagttacagttagcatatctacatctgaagtatcttagtaccttggatatgtaagtaagcattttgtattccttcttgggtatatctagattctgttgatttctttacccttcaccagatgactcgttcacatcttttattatgaggaaagtagtttctggcctttggacttatcaaaatcagtctttcttttgttcatttatttgttcaactcatattttttggtgcaacattctgggcaacagggatgaaacaatgaacaaaacaagcacaatcctttgctccaatggagtttacattctagtgggggtagacaaacaataaaccaaatcaagtaaaaaccatatagtatgtcattaaagagtagttaagtgctacagagaaaaataaagcaggagaatgaagtgcagctgggcctccaattttaggtagggtgaccaaggaaagcctcactggaggtggtatttgagtaaaaacccaaaggaagcaggcctcgtggcatctgggaggtaggtagtcttccaggcagaagaaaccacaaatcctaaggtcctggcaaatagcatgcttaccatgtttaataaacaacgaggagacccaggtggctggaacaggacaggcaattgcaaggactttgccctttattctgaatggcaggaaatgtctttggagggtttctggtcagtggatgatctaactgtacttttagtaggatcatgctacctcctttactgataactaacttcagttttcagttcagaagcaggttataaagatagattcatatgagaacctttttttttttttttttttttttgagacggagtctcactctgtcgcccaggctggagtgcagtggcatgatctctactcactgcaagctctgcctccagggttcaagcgattctcctgcctcagcctcctgagtagctgggactacaggtgcccgccaccacacccggctaagtttttgtatttttagtagagacggggtttcaccatgttaaccaggatggtctcgatttcctgacctcgtgatccac

SEQ ID NO: 33322 - DNA, 3580 bp, Homo sapiens
ccaggttcaagtgattcttctgcctcagcctcccaagtagctgggattacaagcgcctgccaccatgcctggctaatttttgtatttttagtagagactgggtttcaccatgttgaccaggctcatcttgaactcctgacctcaagtgatccacctggcttcggcttctcaaagtgctgggattacaggcatgagccaccgcgcccggttgcatttactctttaaacaaaattttaacacacttggctatctggtttctgaatcaatgtagattagccaataacagattagaagaagagacattggaagatgcttgttggcaggccactttgacatcagcaagaaatgtgagttaactcttcaaatgagcaaataggaaacctaataaaggcagatacaaaaaataaaaaagcacagtattcagatatctttctgaaagagctaatcatcactatagacttcagtagcctatgaggacattagcactgcgtagtaattcaggttcataatgatgactaaatcaataacgactcaattatggtctatagatttaaaaaatgaaacaaggaagcatataatccatttcataaagatttccatctagaatggctaaaataatacactttgacacttttttttcttttgagacagggtctcattctgtcacccagtctggagtgcagcgatcacagctcactacagtctcgacctccgcgctcagctgatcctcccacctcaggctcaccaccccatacccacccctaccctgcccccgtagctgggactacaggtgcacgctaccatgcccagctaattttttgtatcctttgtagagataaggtttcaccatgttgtctagaccagactgatcttgaactcctaggctcaagtgatctgcctgcttaggcttcccaaagtgtgctaggattacaggcttgagccaccaaacccagcccactttgacacttaaaagaaataaaactcaattcggtggagatgaattttttttgtttcacattgtcctcattgatgctcagtaatcattgatccagtagtgtattttctgggagggcctgggcccaggtggtacacttttagactatatccagacatcttttaagtatatgcctgaattctctagagaagtaaagaatgtgttttcatcttcttagaagaagatgagtaagagtttgtttatttaaaaatatctttgaatgagttgattcagcggtattagtcaccatagaaatgacttaaattaaaaaccaagtttttgaaaacagcatgatcatgctcagtgacattcctgattcactcagtatggcaagcagtttttttttttttagacagagtcttgctctgttgcccaggctggagtgcagtagtgtgatcatgattcaccgcagcctccaactcctgggctcaggcagttctcccacctcacgttcctgtggagctgggactacaggctcatgaaactatgcttggctaattttttttttttcctttagtagagacatggtctcactatgctgcccaggctggtttcaaactcctgggctcaagcaatcctcccaccttggactcccaaagggctgagattacaggtgtgagccactgcaaggcttcataaagagtaatttaacattcaaataatttcaagaggatagaggaagaattctgaagaaactcttttgtaaattttaaattaccattttcatccaaagaccacattggtgattatcctattctagaggtgctaattagtgtacttaaattgagttagaaaggaaagatactttcctgtggttttgggggattgatttttatcaggaaagaagctgttttctagcatagttttgaaaccttcatacttgaacatattttctttctgtctgaaagaatgtcactagtttctgtcctctgactagggaagtaaaagggcctattatcctttacttttgcttttacccccttattctcctaatccaaatggtgactcttgagtttataatatagcccttctctggtgtccttggggatattgggggtgggggagaaataatatagcctttaaaaaataatccattgtataactattctaatgtcccttttgtttatttttatttttcagagacagggtcttgctctgtcaaccaggctggagtgcagtggtgcagtcatagctcactggagcctcaaattcctgggctcaagcaattcttctgcctcagcctcccagatagctatgactacaggcatgcaccaccatgcccggctactttttttatttttatttttttagaaacaggatcttgctgtgttgcccaggctggtttggaactcctagtctcaagagatactcctgttttggtctcccagagtgttggaattatagctgtgagccactgtgcccaaccccatttgttttctttcttccttcctatttgtaaaatcttagcattggtaaggacctgagaattcagttaatgtaaggacccacgtactagaagaatcctctctctggcatctacaacagatgggcattcagcttgagtgaatatttttgatgataatctcactcttcccaagcagctcatttaattattagcaatttcttccttttactttatttagatgaaaactatgtctttgtaatttctgtgggctaatgaattctgcccttaggagtcacatgaaattcagcagctcttgaaatttgttagagcagcaatcattttcctgctttgaattctctttttctaggctaaaggtcccaatatcattcagttatttgttttatgacgtggtttcaaattgcatcattatcttctagctctgacagattttttctctctaaaatagattgctcagaaccgaatgtaagatttaagatgcaatataaatactgagaactgaggggctgttactgtccacagtcttctggatagagaatcaaatccaggaggtcagagactaagtttgtctttcttactagagtagccccactacttagcataggaatgctctggtcactataagtctagaaatgcagataaagattgtaagctgttttagaatttcatttctgttggggcatgttctgtcaaggacttaagatcctttttagtgtgtgaactattgtcaaattgggtaacctccaagggtagaggttagtgaggtaggcaaaattcaaatcattctagtatgtaatttaagtgagaagtgaagaagactcatacaaacataaaagcagtagagaagctgaaaaatagactggttctaaatatattttggcggtagagtgtatacgatgaacagatggatttgattaggaagggaaatggagaaggctaagagaaggacagcacttaggattctgctttgagatactggatggtatgattgagccacttatgggaacaggaaaaacagaattaagaatttaattttggacatgttttattgagatacttgcaagatattaatctctcttctctatttcagtttttcagttttgtttttgttttttttttttgagatggagtcttgctctgtcgcccaggctggagtgccgtgg

SEQ ID NO: 33323 - DNA, 1302 bp, Homo sapiens
gtgattgtaatggtggttttctgtgcttcctactcaaaatgtgctcagtgggccagcagcattggcaacatcttattagaattgtagaatctcaggcccctttccagacctattgaatcagaccccttatagtgaagcaggatatttgcctgacctcttcatgggaattgtgacaggcgtaccttgtttactgagcctgccactctcaactccttgtgggaaggagcgtgcgagtgaacgaggtgggaactggagtgcacaagcgctggaacgagctgactgccttggtgcttgcagtactcaaggccacgcgggcctcacagcagtatccagggggcagtatctgcatccctccaagccccagagggcatgttacagtgctcttttagcttcgacatgccatccacgaacagcttaagtgttagcagctcagtgggccctttgcctttttgagtgaggtgctgccctctgccagtgaggtcagagggccagtgtgacagccttttgtatctgcacacatggctcccgtgctcttgtccggtgtccaggaaaaatgaggtcacaggaatgaattgaagaatggtaaatacaggggattttattgctgatgaaagtggctctcagcgggaaggggagctgaaaaggggccgggggtgggtagattatcttcctctgaagtacagccatctccagccgaattcttctctgaagttacaccatcaagctatccctctgaagtcaagctgcttctctccaacatccagctgtttctcctccctcccagctgagtctggggtttttataggcacaggatggggtgaggtggggccatgggtggtttaggaaaaggcaacattccagtgggaaaacagggatataaagtctcactttgggctgcagtctcatgcttttctgtttgagggtagggtttcgtcagagacccgtccttttctgcctagaatttctctgcccctttgtctgtatcaatagtggttttaaacaaaatttattttgaatttttctttcattatactggttaaagttgaaacaagaatgtaaactccatgatgacatagaccttgactgttttgtttactgttgtatttctagcacgtagcatcagtcctgtgctaggtgcctgataagaatttgttgaatgaatcaattagtatcatgcatttgaagtaaatttacttgaataaatttagagaatgcctttgcagtttgtatttatcagatatattcagtgaaatcaattcatttttttaaaaaacttaggtttttttttttttttgagacaag

SEQ ID NO: 33324 - DNA, 697 bp, Homo sapiens
aactggactacaggcatgtatcaccatgcctggctaatttattggtattttgtggtagagatagggtttcatgatgtcggccaggctggtctcaaactcctgacctcaggcaatccacctgcctcggcctcccacagtgctgggatttcaggcatgagccaccgtgcctggccacaaatcttgttgtgggcgtttcatttatcttgagtaaacatctaagagtcaaattgctgggtcataggacaaatgaccagtatgaggaaacattggtaagaggatcaaggaaaacaggccctgtatgggaacagggtaagtaggaaaacataacagtgtctcctgcatctttagcattcttcagagacagaaaagagactagagggagcgggcaggaggtagataaagatagagtcacaggtttatagaggagttcttcaaaaagctttagcccttctggcatgcaaattcatgttataacaatttataagctaattttatttgtataatttctttgtatgctcacaacagtgctacggtgtaggcagaacacatattcccatattgcttttattttttattttatttatttatttatttttttgagatggagtttcactcttgttgcccaggctggagtgcagtggcgcaatctcaactcactgcaacctctcagcctcccgagtagctgggattttttttt

SEQ ID NO: 33325 - DNA, 1116 bp, Homo sapiens
tctggctctgcgcagcctacggctcggggactcctagggccggggctgggaaggagggcgcagtcccagcccgggccgtcggggggccggagcgcctgggcccgcagcaccccctggcggagccgtcgcgtctccaagtctcggttctcatacagcagtgtgttggcgcagatgaacacgaacaggccgacgcccatgatcaccggcccgaggagccgcagccgctcgtgcgggccgtgagcccggcccccgccgcgaccctcgcgtcgcagctcgctcatctggggcgagctggcattggcggcccgggaccctggggccccggcccggtgcggccagtagccggccactgcaatgcccatacccaccagtaccacgagcgcccccagcgccgcgaacgcccccgacggcgagcgcagccgcagccgcgcccgcacccgcagaggctcgggcggggagcgcgggcgccggcggcggcccaggcggcggcccaagcgagagacgcggccctcggggctcctccgcacctccccgcattcttcggggctcccggccgtcatctcgccgtcgtctgggcgctctgcggagagaagatgggaggcaaggactggaccgacgggcctctagcttcagggcgccaggttcggggcgcaaatccgggagggaagctccggccgcccagcccaggccgcttggagatccctggcggccacccccggattttcccgggcggcgaggcggggagccgcccgcgctcgggttttccgcagcggagctccgagccaggcacgcgcggcagaagccggagttggcccggccagcgggcggagaggagggaggggggcgcaggctgttccctggcgcatcccgggctgcaaatctgccgcctgcgtccggtccgcaagcccgcgggtcttgggcctcgggaaacgtgcggcccccagctgccgcgtctccagggtaagtacctcccgggctcgaccccacccccgcacgtggctgcaccgtagcaaatggggcgggggcgctcgggcctcccaggtccgcaggggtcgctcgccgggccccacctcccccctactgtgctttacataccgcagcgcgggaggagggggc

SEQ ID NO: 33326 - DNA, 736 bp, Homo sapiens
tgcccgccccctccttccagacctcctccgcccgcagcgaagctgcagcaggagcgacttgagctagacaccgggaagaccgctcggatcaagaccagccaggcagaggaggagaggcggcgccgacttcgcccaagatttccatcaagtccacgcatgagaggcctctccctcccccagcggtcgtgctggggccacggcagcaggcgggggtgccggtgccgggcgctgggccccgccggacggatgccctcccggctcccccgtcggcccgggcaaggctgttcccaggttgcgacgtttccaattcgggctcctccggatgaatcatccccctttcccgccgcctggcctcctttcccgcctcctccgcccgaggcctccgtggcccgtggcccggtcagagcagcaccgcccctgcgcctcgggatccgggccgcacagcttaagccctcccgattgctggccgcgccctgcctgcggcctgtggcctggatcccgggcccagcaggagtagccgagctgcgtgcggtgtggcccccacgaaagggagggcgagggagaagacgcggcccccgcccaggcgccccaggccgcaggagaggaggctcagggcctagctgtccagggtcgtcctcactgctcgcgtccgcttcctaaagaaccaccgcgctggagcccgcagccgaaacctcggggaggcggccttgctccccgacccacgccccatctgcac

SEQ ID NO: 33327 - DNA, 1883 bp, Homo sapiens
ccagggaggccggggagactgcccgaccccgcactaggcgggggctctgccaggtccgacgccgggctccggggccccagccctagacccctctcaggacagccacgggagtatccaggaggaagcgaggcccatcccctccttgtccctgagtttgcagccctttccccagcccgcaaccggaggagcgatcatcgcttcaagccagaactggcgctctcagccccggctccagcaaggtcacccggagccccgcgcgtcgctgccgcgagggaagcgaaaacaagcagagtggggacatggggacacgctcagagaccccgagccgtggaggtagtgggccgacgctggggacaccagggaggcggaaacttggggacacagcgcacagcccgacagaagatgctggggccgagtccccaggactccagggtcccgccaccgcccgcgtccacactcccgcctgggggaacgggagggccgcgctcccgcccccaggggccctgaccgagggagggagggagggagggagggaccaaacgaaaagttgggaaaagtggagtgcggacccctggaccccagctcggctcacctggcgccgcagcgccgcgcgggtccgggtcccagtccgcgcgcggaggctccagagccgcccgggtctccacggcccggccccagccccgccccggccccgcctccagcccccgggaccgtccgacccgcgccgggcccggccccaccgccgctgaaaggcggcagctcaggtcaaaggatcgcaggtaggcgccctgtgcgcgcctggtgactccgggcacccgtggcccgagttctgccatccccactctcccacccccagcttacatcggtcgcaaaggcccacaaaggcgaccccttcctacatggggaaactgagacccgggacccaggagccccgacacccgcacgtccttccccgcttcccagagcccctcatcccaggcgcccggggagcttccaggaggaggcggcccgagtccctgctctgccccggtcccgcagcccttgctgtcgctgaacctcgcggacttcatctgtgcaatgggcaccaaggcttcagcctcgcaagatgccgagaggcaagagccagacgccaagggccagcccggggcgactccgcaaagccctcagcgaaagcagcgcccggggaggggcgggccttgtagctgaaaggaccggacggggtgcggatgtgccgccgggtactcctaagaacaggcgccccttcgccagtgggggagcgggcttgttcccaataacggggagggtgctgagagctgcgaccccgccggcgagcccgaagggggcggcccggccttcgcgccctcccgcccctggaggcaggaatgcagagcgggggagccagggcggccggcggtcggcccagtttccatgatgcggggggcgggttcgggggaggcggcgaccgatttccaggctcagcggtcaggccgggccccccgggaggaatttccggcctaggattgattaaggcccgcccctccccccggccgtggagacccccggcgcgcagccggggggaggggcgctaatgagacccggctgcgcgccgcggacagggaggggacccgaggaaggggcgggccaggggccggggccaccccccgacgcggggcggagccgggtcccggagccgcacggccaggccaggccttgaacctgagctcccaccctctgggtcggcggaggagagtgggggtgcatcagtgccccccgggaccccctcttccagctcttaaaagccccctcggggggtcggtgaggtaacgggcggaccagagggaccacagtggggaagaccgagcctcggctcccgggcttcatcc

SEQ ID NO: 33328 - DNA, 2174 bp, Homo sapiens
caaagtgctgggattacaggtgtgagacaccgggcctggcaagtttattaaattacataaacatgcctgatgcggctgctcacgcctgtaatcccaacactttgggaggccgaggcaggcagatcaccaggtcaggagttcgcgaccagcctgaccaacatggtgaaaccctgtctctactaaaagtacaaaaattagccgggcgtgccgggcgcggtggctcatgcctgtaatcccagcactttgggaggctgaggcgggcagatcacgaggtcaagagatcgagatctgcctgtccaacaatggtgaaaccccatctctactaaaaatacaaaaattagctgggcgtggtggcacgtgcctgtagtcccagctactcaggaggctgacaggagagtcgcttgatcccaggaggcagaggttgcagtgagctgagatcgtgccactgcactccagcctggtgacagtgccagactccatctcaaaacaaaacaaacaaaaaaaacctgaaagaaacaaaatgccgcaacaaacatccctatccttatagggataaaatcggaataataaattatcgtcatcactggagaccagcatgagatcctctgaggcagtgggaattttactggttaggttcatcaccttgtcatgatgacacgagaatgggcccagaaaaaggtttgggaaactctccagaaactgagtgaggttccttggtttggctgcctcgtctgtttctgaaattacacgttttcaaaactcaactaatttcccctgtcatcttccccattcctcagatgatgcctcatcattctgtgactgcttccgatagctcctttgccaggacatttgccaagtcttgctaatcttgcctcttctgctccctcctatcatggctttgatcaagcaggccccgtatcatctggggttgcatgccctgaactattgggttccctgcatccaatccttcacaatgctgtcaggtctagaagcataaccctactccccgcaccctcctattcaaataccttcaatgttacccagtgcttacaggataaaggtcaaattcctcttcctggtatccatggccctctatgacacaatccattttgttaaactctaactctccagtatcaaactccacgtttcctgggcacagtaccctgtgctttcccaactccatgaaagccatgctcacaggctttcaataggaatgcgtcccaccctacatccccaaaaggttcagcttaagtgctacctctgatcccagatgaagttctgactctgttctctgaatatccactttgccttcatcactagcaactagatcacaaactccaggagggcaagagacactctactttcgtatttccaatgcattcgaagattttggtctataggaagcaacaggacagttgttttaagcctagggacagcccccaacaaattcacaggcagcagtcaagtgaatctcctttcccaagattttgctgcagcatgtaatgaaagccctcaagcatcctccctgctgtgatgcccctcaacagtccctcaagggctgagaccagattggaaccactgtacttctggtacctcctagagagctaggccaaacaagcagtggaagaataattaggacaaaagttatccagtaggccaggcgcggtggctcatgtccgtaatcccaacactttgggaggctgaggtgggcagatcacctcaggtcaggagttcgagaccagcctgaccaatatgatgaaaccccgtctctactaaaaatacaaaaattagccggaagtggtggcatgtacctatgatcccaactacttgggaggctgacaggagaatcacttgaacctggttggtggagactgtagtgagctgagactgcaccactgcactccagcctgggcaacaagagcaaaactgtctcaggaaaaaaaaaaaaaaaaaagtccagtatagttttttccccctggtttttgattagttcagatcttaatgtgatgagatcatgataccgcagattcatggcaatttcgacaaacagcacagaactctatattcatgaacaactcatctggtaatgctccaagtttccaaactgattcattcttcatcagcctggccatacgtttcttaagagaaaggatgataaattcctcggaaacctg

SEQ ID NO: 33329 - DNA, 555 bp, Homo sapiens
aaatctaccctgaaagaaatggcattcagtgaacaggaatcaaacagctttgtttcaaagcactcagtgatgtcctatgcttcagccaacttggtcttatgaggtaaaaagtcaggacacactgataggacagtactaaaaaaacggtaattcttgctgtctgcataaagtgcttggcaaactgtagaaagacacttctgcaaccaactctagtgctcagaagaggccaactcagagaaaagcttgtgaatgagaacagtgtaactgccccgattccaaaggtctgcaacattccagggaaccagcgttcaggccctcacagaagaattaaccaatgtcacatttactgctcaggatcagtgattatggttgcaatttgactttcctggcaacagagggttgtttacaacccacaactaaaagctgctaccacatgaaatgggttcctgagatcctttcctttcttgagacaggaaggaggctgctctgggcattgtggcctctctttagtctcagaggagggagggccatcaaggccacctggaggaggtggat

SEQ ID NO: 33330 - DNA, 2882 bp, Homo sapiens
actttcacatatatggtatgtatacaataacgtctacccgccacttcaatatatccttaagaactgaacgttttactgtagaaaaggagtagtttttaaagccttttactgtaaaagaaatcagtactttactaaagacgtcctcagaaagaaaacgattctaataattaatttgaaatggctttttaaacccaaatcatcatttgagaatacggtagctaccagttttctcatacgtgaaacatacttaggtaactttcaaaatgtttcaggtgtcagttactagtataaccctggggagtaaacggtagctatattacaactgttgcaaagtagagtttcttttttaagccaagagttctctaacacccaaggtttagtgccctaaaatgtcaccccagtccttttaattttatatccatgccttccaagccctacctaacatctggttcccagttttccccgttgagtattttctccaggcctgattcctcaacagttttccctaaaacctgtagctcatgctggcactatttttgccgaagtagattaagaatacaagtaatagatcatactctgggggaggcagtaagttaacaatttcgtctccgtctgcgttaaccagacgcagatactagccagggtggccactattctcctaacaaattctacaacggccaagcaatttttcggtaagttggaaaacggaaaccacagcgtggaaactctgcacggagtcttaaagataagaagttaagactttaatttactcttgcagagggaacggtgaaggctttcagcacggcaagacgatactttcgaaactgtcactagactactcaaactggagtctcccgcccaaaaaagcgtggcacacggctaaaaagggcctccctccaaggctccagtcctcggggaagacggcgctgtgaccgtctgatccatgagaccgggcaagaggtgaaagggagcaggaaatcctgtttatttccagtagtcctcagagcgggaaaggttggtgtctacccagaaacgaatagggccccagttccgggcctaggaagggaaaacccaggtctcccgggcgccctggagctgtgcccccctgcccggagcaccagccccactcgggctttccttctccccgtcccactcagggcctcagcacagctcccattatgcctccaccacccccacccgcgcaggcgcagtgggaaccggggcctacccgcgcccccgaggcgccgccactatggcggagcctggccaggccggtagccgctccgcgcggaccaggcgtccctctcccgtccccgcggcctccccaccacctatggggtctgtccccgcccggccggaccctctttcgccctcctcacccgttcttcagatccacctccaggatcttcccgtagcccttaaagaagcgctccacatcgcgctcccgggcctggtagctcaggcggccgatgtacacccgcggcatcccggcaacggcagtgatggctggccccggccccagccccccttaggcggcggcgggcaaagcgagagcacggcggcagcggcggcggcggcaacgggcgggcggcgggacggacgcagccgaaccccggcgacgtacgcgagcacgcagctcgcgagcgcgcgcttccacttcccccgcccttccccgaggcggaaggtaaccggagagagcgcgcgttcgcttcccgctcggccaggactgggggaggagcttgcccgggggcgcgccgacgtgcggcggggcaaggtgatcgacaggcggcgctgcggcacgtcctcgcgcgagctcgccaaaggggttcctgcaccgccttccgcagccagctggcttcgcccctcccccggaagtgtccgcacctcctagagcccagcgagcgagcgtttgtgcttttgtcctttgaaccgggtgtggtttggatttcggagctggagctttggaatcaaacctagcttccaaacgattgtgtacccgtgaccttgggcttgttacgcgcgatgtctcggaccctcctttatcttttctgtaaaagggggagagtagttcctaccttccagagttgtcttgagaattatatgagaatacgtacataaagcacttagtagttttgtcatatcaagtgcccaataaatgagaccagtattatttttaagaggacactgcttaaatagaagcagtgtgagaagcggagaaggctggagctttggagctagactaggcatgacgccgagtaaattacttgaccacaatccaacctatttttttttttttgagacgagtttcgctcggtcgcccaggctggagtgcagtggcgcgacctcagctcactgcaacctccgcctcccgggttcaagcgattctcctgcctcagcctccagagtagctgggactacaggcgcccgcccccacgcccggctaatttttgtatttttaggagagaggaagtttcaccatattggccaggcaggtctcaaactccagacctcaggtgatccgcccgccttggcctcccaaagtgctgggattacaggcgtgagccactgcgcctggcctatccagtctattttctaacctgtaaaattagaataatgtatacccatctcaaggattacacaggtcactaaatggggtagtgtatgtgaaagtacttggaacagtgtctgaaacatggtaagagctcaataaatattggttcccttctcactaacgccatgtacctagaaccataaagggttttgtttctttgcttgtttttgttttttgaatattttgaaaggataactcaaggttcaaatgatacacagtgaaaagtcttcgctgtccaccagccacttagtttctcttcccagaggcagtt

SEQ ID NO: 33331 - DNA, 1586 bp, Homo sapiens
tgcatatacggtgcagtggagagaaacatgagtttggaatcagaagccatggattccagtctcctgttccaatcacttattagcggtatcactctgggcaagtcccttgccctctggaaacaatgatctatgacctactctttactgacacatgaagatccaaatggatgtaaaagtattctgaaaacttcttccaaataataataataatagtaagaactcacgcaggtcagtcagacataggttggaattctgaccctgtcacttactggctgtgtgaccttggacgagtgattttacctcttctgcctcagttttcatctgcaaaatggggataaatcaataactaccccaaaacattgttgtgacaattaaatgagagcatccatttaaacaagggattgcctgacacaatattcgatcaataaacatcagccattaataccctgataattgcctctcgggtcttcagctaccttcaagtacggtctttctgacctaccaaaaacgccctgggcttcggcttcggtttgctattctctgcccccttcctcggaccctgtccctctcttcccagtccgcagctcgtgttaaagccttccagaaaccccagtccccttccccggcttcggcgccgtctcttactcgacgaccttggctggatccccgtggtgcccatagacaagcgcccggacccgggcaggctcggcggatgcggagtaggaggaggcggcaggtccgtgacagccagaagctgggagcagcccccgccactgccgggcgggggttcgcacccgccacagggtactgcagacccacatgctcgctccaaccaacacagagcctgacgccccggctacgtcatcttccagcgaccgcgcgcctgcgccccgcccctgccccgccgggtgaccactcccccttggtccctttgaagggcgtttccttccttcgctgcccaagtggtggcgcctggctagactgcgtgtgggccccggagggatccgggggtgcggagcttgcgaggccgccaaagctgttgtctcaacaaggagagtctggggctagtccaaagtcgtgtctacagcctgcagtttggtgtttgatttggaggaaatatttactctccctggcctcagtttacccttcacataatatattgagtgctcaccgagccaggctctttaaggtattatctcatttaatcaccactaccatgtaacggcatagggaggcaaagcttacttccctacactgaggagagtacacgaaagctgctgtggaggcaggagtatggggcttggagttagaaaacttaggttcaaatcctagccctgccacttcctagcttggccaccttgggcaggtgaaactctgaatttttctcatcggtacaatggggataatatgcctccttccggattgttgtgaggattggatgaaataatagaggaatgctattgtgggtgggagaacgcattgtaaaaaactctgttcagatgtaagacaggaatcacaaggagaagggtcctctctcaaaatgctcacagtgtagaaagggattaagtggaacactggaaatgcct

SEQ ID NO: 33332 - DNA, 2648 bp, Homo sapiens
gaggtatgtagaacacgcatttgaaggcgccaaggtacaagggattcaggcatcggatgggacagaggccgggtgtccctgggtcaccgtccctgagagcgctgtacgggagctaggcgtgggccatgagcgtgctcgcctggcagtgttggtgcccggtccgtggagacgtccgtgggcgtccagacccagccgcggggcctcatggcggggaggatgcgggagcgggggaggggcgcgccagggctagcgggcggccggacccgctgcagcacccgccgtggccagcagggagcgccgcgagaccgccgaacccgcggccgggcctgacgtcagcgccccgcttgctccggctcgcgctctggactcggcgccagtcccgctccgcgccgcgccgctccgctccggctcgggctccggctcgcctcgggctgggctcgggctccgggggcggcgtcccccgcgccgggccccgggacgggcggcgacgctccaaccatggcccgtgcccaggcgctcgtgctggcactcaccttccagctctgcgcgccggagaccgagactccggcaggtaagcgcgcggcggccggaccgagcctgccccgccgagcctcggggcccgtggcgtagctcggaagaaagtgtgagtgttgagtgaccgggcgttacgagcgtgctccctgtgtgtgtctgagcgtaggatgggcgattgtgtgcccggggtgttgcgtgactgcgaatgttgtgtgtccgtgagttctgtgcgcaagaaaaggtgatgtgtgtcggcgagtatgttgggggtgaatgttgtgtgcatcgaggcattgggtgtgcgctgagtgtcttgtgggtctgccagtgtgtagtgtttgtgtggccaagtgggttgtgtgtgcatctgagtttggttgtgttgcgggagttgtatctgctaatgtgttgcatttgtttgcattttgtatgcctggccgggagtgctgtttgttttgtgtctgcgagtgggttgtgtgtttgtgttatgcctgtggccaagggtgctctctggatcccgcctgagtgtggatccgggaacgcgtgtgtggcgtgtgtgcttttgagatccgtgtacatgtgtgaaggcgtgggaacgggtccggaacgtgtgtgtccgtgcgctgtgtacgtgtggggagtgtctagggtatgtggtgtgtgctgccgggggccgcgtgggtccgagtgaatgccaagtgtgccgggaatgcgtgtgtgggagcgagtctggaacggatgtgagtgtgtgcgaatgtgtccgtgtgtgctggctgcgcgtccaggaatgttgcgagtgtggagcgcgcctgggccgcggctgcgagtgtgccctggtcccggggccgcccgagggggcggtggcaggacgtgtgtgcgcgcgtgtgcgtgtgcgcgtgtgtggcgcgctgggccggaacaagttgtcgcggcggcgccccctgggctgcccgggtcgggcagggcccgaggctcaggggaggaccgggccccgcggccgccgcctcgggcatgtcggactgtttgttgtttcgcaagttccgcgcggcgctggcgggcggctgatccgaggcggcgccggggctgcggggcgcccgggccagcgggccccagcgaggggccggcgggcgggcaggggagggccggaccggcgggcgctcctgcggtggccgggccgcggctgcgccccgggcggccgggcgggggctgtccccgggctgggctgcgacgtccgggcgcgggcagggcctggctcgccgccgggggacggcgccccctcccttggcgcgcaggacgcgcgggggacgcccgggcctcccgggacactcccttggtggagcctgcaactttgtgcggcctcccggccggccgggaccgccaggtgtgtgcttgagtgtgagcgtgagtgtgagcgtgtggctccgcgcttgtctgctgtgtggtcgcgttctccgggtgtgtttcggagtctggtgtctttggtgtgcgtgcgcgtgtgtgtgtgcgcgcagctgaatgtatgtatacggagcctgtgtttgtgtgtccgtgtgctcgtcggagtgtggacggtgtgtcggatgtgtgtgcgtgcgcgtgttccacatcccaccctgaggcctgggatcctagaccgcggccccttcccgcggagtttcggggccctgctccgggtgacctcccccgccctcgccaccggcggggctgctccgcgggctccgggtagccgggagacgcccggggcgggatccgagccgagacacgtgctggagcggagccgcttcctcacggtcgccagccgcagacaactgacctccccggcatcgcgttcgcggccctgctgctggctccggtgtctcgggccggaactcctgtggctccagcgttcgcgccggccactggccagcgcttgggcctcgccctgcagctccggggccatagggcacagctttagctttgacctccccgttcccgaaaggacgcccaaggcgacctcccaccccatcctccccaacttctcccccatgtcctgcggcaactttgcctccctctcccaccgtgaaatcaaacccgcggggttctgtatgcgccccatccccgctcctaccaccatc

SEQ ID NO: 33333 - DNA, 1808 bp, Homo sapiens
tgactcctggtgggtcccgttgcctggagtcctcctcagtgctccccttgccctggccctgtccctcccctgaggtctcctcatctcctgcctcttcctcctctctttccaggctcctacttgatggtcaacacttcccagcatgccccaggccagcgagcccatgtcatcttccagagcctgagcgagaatgatacccactgtgtgcagttcagctacttcctgtacagccgggacgggcacagcccgggcaccctgggcgtctacgtgcgcgttaatgggggccccctgggcagtgctgtgtggaatatgactggatcccacggccgtcagtggcaccaggctgagctggctgtcagcactttctggcccaatgaatatcaggtgggctgggttcagtcagcggtcagcctgtgcctggaggtggggcagatggatgtcaaattgaggttggagtagatgagtggctgaagttagaatgtgtctgcattcagtatcagaggcaacctgtggtcaaggccaggggtcagtctggggccagtctgggttcagcatctgaggtcattgttcctaggaatagcctctggcccaggtcaagggtgagttggaacagtgctgacctggaaactctgtctggctgcttgagggtaactgtccaggatttgggtggaaactggcctccaccttgttcactatgggcgctgggaccccacccccaactagctggcttgggagggagggtcagtgtgagctgggctgacctctgctagttgaggcagaggaggctgaggccgagctgaaagtgggcacctccccaggcaaggctggaggaatatcagtatgataggggccctcccgcctcccccaggtgctgtttgaggccctcatctccccagaccgcaggggctacatgggcctagatgacatcctgcttctcagctacccctgcggtgagtcccagcccactgggggcgcaggggtaaggggtgtgggcggccgcggctcctgcctgcagggggtgcaggcccagctcacgatgcagctctaaccccgcagcaaaggccccacacttctcccgcctgggcgacgtggaggtcaacgcgggccagaacgcgtcgttccagtgcatggccgcgggcagagcggccgaggccgaacgcttcctcttgcaagtgagcgggagcggtgatcttggctgggggcggggtgggagggggttggtggctgcttctggccctgactccccccagattgctgagtccctgcttcatactccagcactgcgcacagcgtcccggccctcccctagctctgctctgcgctttcttgggtcccccattcccccaggttagagcgcggctccaggaacctatgtccgcgcggtgtagtagggacggctaaatggggcccgggtcagagcgagatcgggacccctcgctccgaggcgcccctgaccccctcactctcttccctgcagcggcagagcggggcgctggtgccggcggcgggcgtgcggcacatcagccaccggcgcttcctggccactttcccgctggctgccgtgagccgcgccgagcaggacctgtaccgctgtgtgtcccaggccccgcgcggcgcgggcgtctctaacttcgcggagctcatcgtcaagggtcagctggtggacgccggggagcgccgggacctcaccctcgaggggcggggccggcgacgggggcgggctctgcccgggggcgtggccgtggggggtggggccggcagggtgtcgctggggcgctatctgaagatgggcctgtggaaatggcagt

SEQ ID NO: 33334 - DNA, 2493 bp, Homo sapiens
gagaaaatgatggatggggattagctcctgaaggggatcacagaaaacttggctgagcaggtgatgttgagcaggactgaaggcagtgagagtggggcctcactggcacctggggacaatatgtgcaaaggcttggcaggggaactgatctgcccagagaggatgtccttccaaccacttacatctatgcctcttggtcacatgtgggccccatgctgagggccagggaaggaaagagaagcaaggagggagggtccctgttttctcagcttcatcagggagacagggttagatacacgatgatgttgcacagtggtcagggtgccgacggggctattgcagtaacagagagacatggaggcagtgtaagtggacccagattggcctggttcacttcttgctctgatgcttccttcttcagctcccagagcctctgtaccagactcctggtctggatgatcttggagtcgtctttccaggccaagtaagatggatagttaggtggatggaagggcagaaggacaggcaggcctggatcctggtctcttctcaagcccctcagtccccctggcctcacactgcctgggtttctctgagcgcaagatgttcatagcctattttcaagagtctgtgatgcaaatgttctaagtgtccaacatcgtcccattctaacatccaattgtattcttgttttgtgaaactcactttgattttggctattttagtatctttatatcctgtattttgaatctttgaatattataacattttgttattcaaatttgtttcaacatcctctgagtcccccttggtgaatgcagccttctgtgaccctgtgaagtgcacactctcacccactgctggtgtagacattgagttcccccaacctcagtctccccgaggcttccaggtacttccccaatgctatcctttaaatcatgtccagtaaaccatccatggtccactctggggcccacttcagactttctgaatttgttgccgtcacacaatattcttagtcatgaccatggcaattagaatgactatgctgggtcatcaacttttgctggatttagtactgatggtgagtcagagccttgcccaatgagtaggccgtcggtcaccctggctgtgcctgacaggtgtccacttggtggacagcacttgccacagttatgcagtgactcatcccaggctcctgtaaacacccaaggagtttaccttgcccactgcatagacagagccgattcatcaaggcaggggaattgcaatagagaaagagtaattcaaccagagccagctgtgcaggagaccagagttttgttattactcaaatcagtctcccctgagcatttggagtttttaaggataacttggtgggtggaaggaagccagtgagccaggagtgctgattggtcaggggtgaaatcacagggaggggaagctgtccttctgcactgagtcagttcctgggcgggggccacaagttcagatgagccagtttattgatctgggtggtgccagctgatccatcaagtgcagggtctgcaaaatatctcaagcactgatcttaggagcagtttagggaaggtcagaatcttgtagcttccagctgcatgactcctaaaccataatttctaatcttgtggctaaggttagtcctacacaggcaatctagtccccaggcaagaagggggtctccatgggaaagggctgttattgtctttgttttaaactataaactataaactaagtttctcccaaagttagttctgcctacgcctgggaatgaacaaggacagcttggaggttagaagcaagatggagtcgattaagtgagaactcgttcactgtctcagtcttaattttgcaaaggtggtttcactcccacaggcagaggatgcagcctctctcaagcagtgctggcctgtgccacctgggccctgcagggagcccacccaggctgtttgggttcctggctttccctccatttcctacccagagctttcatgttctctctcttctctgctctcaggacagcatcagaccttttatctttgcaggcctctcctcaagattttagattctgattccaaaccccagtggaggaggcccagtcttcgttaatgatccctgagtcccaggcatagtgtgacctaatggttagatcacaggctttggctaaccctggtctcttccacttccctgctgagacttcaggaaggttacttaacctctctgagctcagtctcctcagtgtgagttgaagataataatagcatctaccttgtggggtggattaagtgtagcaacaccggtaacaagctcagcgaggattctgttattgttgctatcctgatgtgtcacagctggtgatttctctgccccgagagcattcaggtggcccctctaggcttctcgccactggagcagtgggaagaaaatgggccccggagcccacagactcaggttcaggttcagcctccagcactc

SEQ ID NO: 33335 - DNA, 3157 bp, Homo sapiens
tggggtacctaagcccaggtgaacaagtcctgcaaaacaattatggatttatgccaatgtgcctggccctttcaaagccagccttctcctccacatcaaaatgtctataaactgtacactccattcaaccccagcggcccttctctttgccttcccattctactatccataatgcaatcatctgcatactgccaggacagcctcctgttagaaaaacttttcaggctcagcaggaggtcctgactctagttaaataaaggttaaagaacagagggaatttctatgataatatgacataagtcaacgtggcctcccagagaatgccactccagagagagagatttttcctagctggactccagggcttattcagaagtgctcagacaactgcctgttcagagctgatgagagcagcctgtggaaatagtcattgagacacatgaatttattgagcccatatatgtgcactagggtttccagcaaaaggaatcaaatcatcgtagaggaattaaagtggctgctgcctggctgacatcacctgagttgcgcagaccatagagggcttggatctccttggggagatgagatactctaagcacatgtggcatacgctgggaactctaattcaatacctggtccagcaaaaatcattcatcaaatgagaaaactgaggctacatacactgagtcagtggcagtcctgggactctaagcctgaatccagacagcttctgttccacccatggcttctctaaagaacaagcagggtgggaatcatgctgcaaagacaaacaaacaaaacctcggacctattcacaggcaatgttccccatggggaactagaaatgcagagacctgagatctaacactggccaccttgccaagttgcttcccttctcttggtctccttcctcatctgtacaagaagaaggttcgtaatctctaaggtttcttctacctgcaaaaaaaaaaaaagttactctgggcctcagtttcccgtctttcaggtgagcataatattcaacttccccaaatgctgtgaagatcatatgaggtccagaagctccttggcagagatgtgtgaaataaaccctggaacagtattatcatggctcaccatgtacagcaaggtgatgcttggagcacagccagggtcatgtctgaaccgctggaaagagccaagggggaaactgatattagttttcagacaagcagttctagaatcaggggagaggtttcaggcagcgctctagtgattggaatccctggaatgctccttgtagaatgaagggaggcatcttcaaggcaaaatttccttcactgtcatggcaatttagttggaatcacagatctcaggctgcctgtccaagggagagttggaagctctgagctgtgggcagagaactggtgggagttgggggaatgagaaggaaaaataaaggaatataaagcaggaggcgcagaaagagaatagtaccctctccatagtacaaaatgccaaaagtatatttcctagggtcagaaacacctgaaatcaaatacccccatcattcatgagttaaatgattgaggaaaactcacgcaagctttctagacttcaattttcatatctgtaaaatagggagaaaaaatggtacctctctcataggaataatgctgggaaattacttagcattatgtctggcccaagaaatttctagcagtggtagcaacagaagcaggaatggttgcttcaaatctacaaagcgatgtgttttttaaagaggggaggaagaatccatatcactgatagtggggacaggagaagaaagggccatgttttgggggagaggcagatgggttggctcaaatgaataaaacctgaagaggcacagatatccaggccttacaagtgaaagaatgcagctaacagctttttattctgttaatgagagcaaagattattcatgtcagtctaacagcaattatattagtgggagaacagttaagaatccatgttctaatggtggctgtaatgagtattgtaataagaaactcaaggcaaattttatctagtagatcaatcaagaagaaatttaaattgagcattatgagtgagtcattgtcttgtatgcaaaacaatgagtgcaaatgttagagcaacaggagaggggaattcacatgactcagcctgactgtgaatgacttcccaatgaggtaagcattcaatctcaaacaatgcttcgaagatgaatgacatttctaaaattccacagagagtgagtagtggagcctgggcccaaattaggttctgtctgataccaaagccccacacacttttcaaagttgactgactttgagcctttgtctatgactgtccctggcctcccttgcccagcaagactgggtaccagaatggctcagaacaaaggagtgtgggcaaccatgacagggaaggtctccttcaatgatgatgggctatacagaacaaataaccaggagctatagtttgcaaagtgtaccaggattatatttaagatggaggggaaaacccacacacactgtaatatggaagttgtaaaatctttgtattaaagagattgttcctggaaaggcccttagagatcatctggtgcgggctctcatttaaagatgaagaaaatgaggcccagatgatgaagtgacttgtccaaggtcatggcatgagtagttgataggagtcaaggaccagacccggatttttctgatctgtcccttgtgccttccccaccatggccatgatgacagtctctggatgtttgtaaatatgtggctgtctagacaacacgctatgcagaataaattaactggaccaggtgacctgtcataacctgtcatgacctgggttccccacgtgtcttgacacccatagccagaagacaccaggttctttcctgggcttaaacaacgcagacatctcccaacccttcttccctgggggaggcctctgtccatggtactgaaacaggattcttgctgatgcgttcttgtggtaagttctgtattcggttcccaccctttgagagatgaatgaagactagatggaccgagtactactgagggctggggagtacattttttaaatcaatcttattatattgtaatttacaggcaacaaaaaattgacacatttctaatgt

SEQ ID NO: 33336 - DNA, 1108 bp, Homo sapiens
gtggagtcttccattcattgctttccagtgcaaaagtgggaaaacaatcacattgcctcctgaaaacaaaagtgtgtcatggaaacaaacgtttctgtttgttttcttgcggggaggaaagttctctagtcttatcaggttttgctgccataatttgtggacagaacgctccttcctgacacctctgtggggtgtgaaggcaatgaatgccctggctgactctccaccatctcagctctccaacctctcatccactgagccccgtctgcaagcagagccctgcctaggtgggaggagtctgacgttagctagaggttgaaagagccacactcagtagccaggacatttcagcatcacagccacaaacttggctgcgtctcctgagctgatcgtggcctaacttgatcaccgggccccttcctggtcctccagctgagccctcctggcaccaaaagctccatgaaccgaccagcctctctatcctcaagcttgtctcttccagcctgccctctgtttggcccaagagtgctcctcagcagcacaaaggggccctctcagctggaaatccttaccaagacccatggtgctccttgagtcacagttcatgccgaggcacaaacatcagccaggtacacagcaggcaagcacccacccctgcttttgcacctgcccttctctcctcattagactggtgagcccttacatctcagaacccagcccccgtggaactgtccctgtaaactttatgaaattaatcaggaaaaaggggaagaggagagataaaaataaaccaagcttgcagcacattcagcattaatcattaggtcaatgtcctctctgacctacttcctcctagttgtttgctgcctattgcccagaatcccatagaacctagattatagttccccttaactgctctgtacataacaacttgagcattttgaaacgttaagtttaccatttgagatattctttcaggacctgcttgctgatgaaactactgacatcagctggtctaaagaaccccacaaggagctgactgtggagaaaaagttaaatattaaatttgaactcaactgaacatggacacaagcaatggtcaccaagt

SEQ ID NO: 33337 - DNA, 1057 bp, Homo sapiens
gagagagtgtgtgtgtgtatgtgcacacctgccagcctttgccatgtgatccacttgtgtatgagtgtgagagtgtatgtgtgtgtgtatgagtgggaggctgtgtgtgtgtgtgtgtctgtgtgggcaggtgtatgtccttctctgggtgtgcatgaagcctacctcagtgtctcttctctatttctcaatgaatcaatgaatctctccctctcttactcgcttgctccccaatcctatattttgctgctggtaccaacatggaaatctgtgagactcagatggggtccttgagttccaagggaggaggaatctgcttttgtgcaggcaggcagctgtcagctgggcatcagaaaggaaggaacatgttgcaaatccagtggccgggggaggggggcggccctgagtcacctcatctagaggcagcaggaaaaacaccggactttgagccagagaatcagaggaggagcctgcttcttccacttcctgtgtgaccttgggcaagttactgaacctctctgacctcagtgtcctcataattaaaatggggctattgtaaagattaagcgagttcattgttatagaactggaagcccagtgcacagcacagtgggtgcaataaatagatggacgagtctggactcaaaggctgcccccgcgcagatgcaggcccagaggaggatgacagacagaggaactgctagaggtcaaggaaggagatgaggatgcgtcctggagatggatgcagaggacaggctgtggggacactgcacactgtggggttctttctctttggcccagccttgggcctctccctcccctgacgtcatgcactcacagttctccccacagaagggtcgctcccagggctccacggaggtagaaagctcatggctcactgaccccacacaagcaagctgtgaaggatactgctgttacgggatctttggggtgtcacttttccagccagaaacctctgtggccggtggcacatttgcctgagttcttgtcctgcatccaggaagaatgatgtaagcagaaaagtggagggtgagca

SEQ ID NO: 33338 - DNA, 2978 bp, Homo sapiens
aagccctggagtccccttgatcactcctgtcctctgccctctgccctctgcatctgatccatcctgcagctctttgagatactccttccaaaatgcatcccactccggtcatgtcccttcatctctgcccactgcccagtccaggcctctcatctggcctgcccacagctacagcctccctgacatcccctgcccccatccctgcctggttcacaggtggaatcatgttgctcctctgcttaaaagtcagccattgcctccggctaaacttggaataaaacccaagcttctcacccagccctcacggccatgggatctggcctcacctgcctctcaatcatttggccctacagttccctctcccaggagctccctcccctggcttttctcatgctggttccttctcagcctcagctgtcaatttcaacattgtctcctccaaatcatcttccctgagcactgtgctaaggtcacccttccccctgcacaggggtgtcccttcccaccctcgcttcacccttgtcccctctactctgtgcttctgggtggcagcccttatcggctacatcaaggggctcctcatcctctggcttcaaggtgagtttggttaacagggagccccagcaggagatcaaggaaggaggaggagaggaaggttggggtgtttatcccctgacaaggtcctgccctgggaagagctaaggctagctttcctcagactgcagctttcagctcctgttatcatgtggtccctccccacccagccccctggcagggctcctccacccagctttctccatctccgggttccactcattgctcctccccgcaccctcgcaaacccaagggtggtaatggagccctctgttgccggatgccaggaaacagcaccatctccaggatttccttatgccctgcccatgccttcgccttcttggtctcttttttacactctccaaaaattgcctgacttgactgtgccatctcatctgtcccttgccacatccccactgacacactgcccaccctcctcacttccgtctcctcaccctgtccaattcccccacggaacttctcacttcccagcatgattgcttgtgtactatctgcatcccccaccagaacacaagctccatctgagacggggattcattgcatcatatgtcagcggaatagagaaaacacatgctcacacctcctaactctgctcaaactcgcagggaagcccagccaattctgtgaaagttcatggtgaaatcacattgacttttaaatgcctgcacacggcatttcccaaactgggatcaggcaacactcatttaggaggtgttggcaagcagttggcaacctgataccgacagaccatatctgccaggttgtcctcatttcaccgagcgcctctgacaatttcatctcccgctatcatgacctcaagtctgtccactggccccagtccagactgggaaagccctcatgcgccagcccctctgaagcccagggagttccagcatgaggcctttgctccatgggcttcatttcactgctgtctccacacccctcaaaaccacgtgggccaaggcagagccaagactacatcagccatgggtcaggagatcaaatcctggtctctgttctgtcaccaacttactatgtgactttgagcaggttgaattcccaccctgtacctcggtttccccaaattctcctgctgttcctgctgcctggaattaccttcccagtgagcaggttggatcatacattctcctagcacgtccctgcactggtggtgagacattgctcagagagattaaactggcatagttcctgttgatggtcatctttctttagaaggtgagaaaggagaaaaaaatgtcagcttggctatgacacataaccactatgatcagacagcaaaagacccaagctcgtgctggtctctgctggcctgactgccagcatgatttagttcccagggtaagtaaactcctcctttctggatgagatgaagccttgagacaataaaaatgtgcccctcctccaatatgtaggtgatagtaccagctaagccagagaggagggatgaggccccttcttgatgacatagccttttgggagatggaccaacaagaaggtgctgaacctgatgatggggagctgtgggaatgggagagccagcatcagcctcatgttgccactgtcatcatggcgtagcctctgctgtcctgagagctctctgtggagcaactcacctgactctcacaacagcaccatgaggaactcagggtcaacaccatcaccatttccaggtgagaacaaggtttcagggctatatctcttgcccaaagccacaagcttgtaagtggctataaaaagaccatgacagcaccaagccccagccaagagcttgttctgtgtttgctgattgatgcactgacacccggtgtggtccttactgttccctttgcatcaagcaaccaaggacaagggcccagccaccatgagtcagagtctaggtggggccactggcatcacacctgtcacctggctcacatatgtcacctggcacctcctgccacctggcccagatcatgaggaccagtgtttcagagctagggaatggagagtgtttggggaaggaagctagggaatggggagtgaatggggaaggaaagggggtgacattgcctcccccttcatcaagaaggctgctgtgaactccattttcattcccttttttggtgggtctgaggttcacacagccacaatcgttcagccctgtgggtgggtcagggcatatgggataaactatttttccttgtcatgggtctgcctacagcagcagaattggattctagatgatgtatgaaaaagatacagtccaggcgcggtggctcatgcctgtaacctcaacactttgggaggccaaggtgggtggatcacttgaggccaggagttcaaccagtctgggcaacatggtg

SEQ ID NO: 33339 - DNA, 1972 bp, Homo sapiens
attctgaagccgcatagaaagcttaccctggggggaaataaaaaaaggaagttaacccatcatcttacaactgagccccaaattctgctgaagaagaaagaggaggaggagggaaagaaagagtaggaggaaggggaggaggaggataagaaagagggggagagagaggaagagaaggaagggaaggaggaagaggaagaggaggaaagggaggaggaggaggaagagaaacaggaagaggaacagagggaagaagaagaggaggaggaaattctctgatgtgtgccccatgatggtttatgaagtgctttctctttgaaaccccatgtggcccccacaaccctctttgaaccacgtgaggcagaatcctaggaggaaactgaggaccagggaggtccgcacagttagtaggaggcacagctgggactggagcccaggcctccggacccccagttgaaggtttaatctcatgaagccacaaagagtcacaaagctctttcacagccatgtgctagccccaccccagaacagaggcccatctccctgagtggtagaggaggcattcccagggagggggaggagagagggaactcctgggtctgtgtgtctgcgagcccccgcccagcttccacacatagcacaggccctggcaggctagtgagggtgcaggtgaatgaggcttaaatgggagtccatcaggatccttgggcatagcaccaggcagaggcaggagccgagaggggagtgagtggacaggagccactgtggcatcagattcaagtgtgtccatcagtcccaaacagtattagagacctgccagagccagccacgtgtccccgcccagctcgggacatttcaggctccagcagtgacaactgctctgtttctgtcaaggtccagctgttttaatggagactttaaataatccctctgctgccaataaatttatgtcatggtgttccagccacagccaggctcttgtttcatgagtcatccctggtcggctggttcagagggaacccccggctggtgcaatgaaggaaggaccaggtcagccttctgccccttgtcgggtgtcaggaaaggatctcacacacccacactatggctctagggctccatcttccagagtgaccagtgatcagcattaatagtaatcctgcctggggcccctcagctggaatcctgcccgaatccaaagagaggacttttcccttgatcgtgtccctctgaagctgagaaaggagagagactccgtgacatcctggaggacatggtggagcccagggcctggaggccaccatgcatctgcagggcaggggtggggcaggtggtcacaggaaacatgggcagagagggctggaagctggaaagtacaggaatggggaagccaaccaggtgggcaggggtggtcatcagccacagagcccacccagaacagaggccgagcccagcctagggttgggagagggtctctgggatcagactccctgggttcaagtgagtccctgggttcaagaggttcactacctctaccaccgactagctgtgtgaccttgaggaagtcacttaacctctctgtgcctcagccatatgagcgttaaataagataaaatacataaagtgctgaaagcaatacctggccatggtgatcattcatgagggctgctattgggcaggttcctcatgttcaccctccccctgcctgtctgttcttcaaggggtggtcatccctgatgctgcagaaaagcatccaaactgaagggcacagggctggtggagatttagacaaagggagcctgaactgggccatcctatcccaaaggaatgattctccaggatgccctcccagcatctgtagactggtcaggcagctactgtgggtgggcctgggatttgcccagggagctggggggttgcagagatctgccctggatccctgaaacccgaccatgtgggtggcctctccagc

SEQ ID NO: 33340 - DNA, 1355 bp, Homo sapiens
tctctccgtctccgcctccgcccccggctcctccccggccccgccccggcactgacattctatctctctcccgtctccgcctctgccccccccccggccccgcccctgccctgcgccggcgctggctccgtctgcgcctcagcctcggtcccgcctccagccctggccccgccccgccgctctccccttctccgcccctgccctggctccgcccccgcctgcccgcgcaccgcagaaggcctcctggaacttcctggacagcttctcgatgacgctgtagctctccacgtaatcgacgtgttcgtcctgcggctcgctggcgatctgccgcagcgtggccttgtccacgctgcccactccgatggcgaacagctcgacgccgctggcccgggcccgcgcagacacgtcctgcacgctgtcctggggcctcccgtctgtcaccacgatgaccacctgcgacacgcggggcggtgtgacaccgggctcccggaagcccacgggactgtccaggagaggaggctgaggcccggagaggcgggaggactgccgggtcgcacagccaggcggcacccgggggaagaggacccggctggccgaagaggagacccgtttcctctgactgagagacgtggctggggggctttccatctgcttcgcctccctcgggcaggcagctctgagatgcccggagggatgtgatgccccatcgccaaattggggtctctaaggtcagggccatgccttcccctcagactgaggcggctgagggcagggtcctcaggctgatggctgtgggagtcgtgccacgcccctcgtgcccccgggaggcccggccggggctgggtggggggatccggtggttccacatggtgcagttctgcgctttggccaccagatggcagccgaagctaagggatggggctgccgtctcccgtcttgctgtccttgtcccggtaagaccggggaccctggaccagggaaccgacggagggccactcccatgtggatgcccaagggaccaacccaagaaagatgccgcccttatcctcctccactccccggtatgatacatgcccctgccagagagggaaagaatctgcctgctcccctcccactaggctcctctggtctgtaccctggaaagaaagaggtggcggactctgtcactgagatccggcttcgtgaccccctgtctgcacccgccctgaggctagggcgctcccagctctgcccagtctgggttaggcatccagtcccgctttgctgcttctctgcttctgacttgggtctgtttctgattcctgggtcccatccttagccccaggtcctgacaccctgtcctgatgacaggcagt

SEQ ID NO: 33341 - DNA, 1960 bp, Homo sapiens
caccccaggggaagaaggggacatttgtacagcctaactccatgccacatgatcttccccactacccagaaaagggactattcttaatactttccttcccatttcacagacgaagaaagtgcagctcagagaggtccagggccttgcccaaggcctcccagctggtcatatgcagggctagggttcaaatcttggccaattccctccgctgcccggcatcttccagccacccgggctctgcctaaggcctaacccttcccctcagtgcctcagtggaggcagagaggcgcccccatcccctctccctctgcagtcccccctccctcccctcagccccagcaccaggcaccagaggtatttctacttttgtgaaaaccacctgcatttaaaacccaggctcaccctcccccatttcaccttttctcaacaaccctgcggcaggggacgagggaggactttgtccccattgccggatggctcacgagactcatagagggcaggggaccagcccacagtcacagagcgaggcaacctcagagcctgacttagactctgaggggccccgaccttccacgaagatgccaggccctgacccaggagaaagggaggaagctcggctctccaggcacccatgtggctctctaggacataggatggagaggaactcacatttattcagcacctactgtgtgctcagacctgcacgcacaggcttgcactgcaatctcccaaaactttacaagacaggcaacattttcccgttttacagatgaggaaatggaggctgagagagaactcacatgtcctgtgtcacgtggcccggctggggtgtgaaccctgttgcctctctcctggggtcagggctccccacaaggttgaacttgctcccctgaggctccaggatctctctagccatctgcccacccttccctggcaaccaagccccagccccagccactcagagctcaggagacaagagctggggagcaggaggcctcctccactgcctcactgctgtgtggccctggccaggttctggcttctccctggcctcagctttcgattctggtcaatgagaagagaccctcattttcccctggggccattgggatgacagaacgcaggagggtcagtggggtggagctcctacacactgtaggacatctcacccaggctgcccacagtcctccacccccagccaccccagggccagcaccctgcccctcagaaggccctcactgccccacccatgtccctaaccaacagctgttggtagttcctggaaagtacctggccgacctacagagtatgcagacagtcaacatttccaagcctccaagcccttgccttcccctcatgtccccggtttccacctggacacagcgctgccttctccccaagctctgagagcccagctgggctgtgaccttgggacccgagccatcccatgacaggtacaaggcttctctcccccaacaatgcgcaggcagacagcatgccctcacccacttgctccccaattacagcatcttttcacccactgtcccttcattctatgctggtgagatcatgaagataagagctcgggtgctggggtcagatggccccaggccccagccgagctctgcacccttgagccagccactaacctctctgggcctcggctcctcatctgaggaatggggataatcactgacctgcctcacaggattgctgaggtcaaatggaatcgtgtggtgcgcggagccgggcacacagcaggtgcaccataaacaagcacaattgggtggtggtttttgctacctctgggcattcactgactctcagtaaacactctctgagcacctaccgcctccaaactctgtctagaaaagccactgaccctggcgtgccggtgtcacagtctccagggaactcgatacatgaatggtgtgctcagagccatgacagaggacacgca

SEQ ID NO: 33342 - DNA, 1064 bp, Homo sapiens
atgctgactttaaaatatctgatttaccttttccaaagcacatttgcagatgtgatcttattttgacagccccaacaacatgatctctctctaccactcttccctcaacccctgctccagtgaaataaacaacttcaccattcatttcaactcacccaacatttactaagtatgtactttgtgccagccaccaggctacagcttgaggacatagagatgtcaagaccgtgagactcagagaggcagtgacctggccaggggtgagttaaaggcagagcctgggcccggctcatctaatgctctcatcttggaggagctgagggatgaacaggaaaggaaggtggtcctgcaggagctgcaacagtgttcttgcctgctttgggactggcatggcctctgatggctcctggagaaaagactccaagttgggagctggcaggaattagaagaggggcatgaatgcccaggcttagagcaagaacttatgagctcctgctcagacaaaaaccttggcccagctccttctggcctccacgtaccctcaccccttctctacccccaggcaggcagctttcctatctaaaagggcaattactccaagcaaccaggaaggccagaaccaggggacaaatttcccaacatgactctggtctggactttaaccttcaaatgacagtctattcacaatccttgtgtctgttcacaatgttaacatgtaaatgtgaacatagtcaataaccacaatttttgttaccctgttagggcacatctctttttttaaccatatccagaggccttaaaaaacagaagtggtccaggtcactctccacctctgacaggctctgctgagagatcaggggacagtggcccagagaggaatgacttgcccgaggtcacacagcaagccagtgtcagaatccacaaaaacccaggacttctgactcctacccaggtctccttggggttcaaaaagaccccctcaccagagaaacctgctcgtaaatgtcccagttctttctttttcctttatttatttatttatttattttttttttttgggacgg

SEQ ID NO: 33343 - DNA, 1432 bp, Homo sapiens
ttcttcgacaagtgtgtgaacactcactgtgggcctggcactctaccctgggctggggtgcagcattgagcaagacagccaagattctgtcaccggcatgactgcacgaaaaccactttgaccacacttctcccttgctctgatccctgggtggctgcaaactgcccctgagttcaagtgcaaactccctcatgcaggtattcacattcctggaccttccaaccacccctgatccttccagatgggtctgtcattgtgccctgcccaggctgatccaaacaagcttttggccatcctcccaaacaccagctcaaagaccccctcctccacaaagcttccctgcctgagtcaagcaccccacctggcagggtgagttttgccttcttctggaatcccattgaaacccaggatttgtgtgcctgcctcccagactgggctgtgattccaggcgctcaggggactgagccatcgccaagcccagaacctggcactgatgggcatcaatgtgttgtgttgatggatggacagacagaggggtgggtagagcaaagtccaactgcccttttcattcactcggcccagtgcctatgcctttgtagttttctggaagtccctccagctgtctaacctcccctgctggcattatggaagctcatgcccaattgttctctaaatctgtccccttcccttccccaaagcccagaccgtcctgcctttcccttgactgggcaacaagtcaacaagaacaaaggtctggtgaggccaaccagggaaaggccagcccgggcctctcgggatctcaagccctcggcctgtgtgtgtgccagagcttcccacagactcgggaagaaggtgccggaggcttgccgggcggccttgcggtttgaagcagtgagtcaccttctggctgcaagtcaaggaactctcactgcgcccttgtttggacaagacgaggaggcgcactcagagtcagagaccccggggcagagacaggggcaagaagaaggggccaccgagaccccaagagagtcagggagacagacgcaccaaacgaccgacacaaccagggacaggtacggcacgcagagagagaggagaaggacagaggtagccagcccagaactgagagggagagcggggagcgcagggagaggaatcgcgccgccggtgtagacagctgggctccctgcgcatgctctgtcctccccctcgcggctcccaccgcaggcccggacccagaagtggacaaaaatggagccaatgggcttccagaccgggacattacctcaccagcaccggctgccattggccggcgcccccgccggggcgggctgttgctatgacagcccaggccggcgttgcagagggatgttcggaggaagctccgggcgggagagccgcgtccactcctctttccagactatgatggggc

SEQ ID NO: 33344 - DNA, 562 bp, Homo sapiens
gtcttctagatgttcctgttattgttcttaattaaaaaataaataaatataaacacttaaagtaaaaaactattactcctcccaaccaaatgtattattttgtcacttctcactactctttcccacgtcctccactcctgcccctgtggcaaaaaacaacccctcctctaaaattatcttaaaataatgacttggatttctgccaacaaagccattttgtgtgagtaatgcaacttctatgttctcagtggagccagaccttcagaccttgcttctaaccagctggcacatgccacccctcccccaacccaccaaccccccaacaaaaaggagaatccactaaggtcacttattgcttctgatctctttttgaaacattacagggtagaaccgatatactgagaattgccaaaagtttatttcaacatactttaagaatctcactatcagtcgccacttttagatctctggcaggagtccactcagatgtgcgctcacctgcttgtgcagctgaggaactaatgatgactggggcaggagctacaagtcgaacaggagctcc

SEQ ID NO: 33345 - DNA, 2078 bp, Homo sapiens
caccttttactaaaatgcttagtggtttaaaaggtgtttatttttaccacacttaacaaacattctgtggtcataaatttatcttaaaacagttcattttaaacctaaactaaacaaattccaacttcaaaaagctgtggccttgaacaaaatgaattcaattgtcgctaaagcaaaacactaactcaaagttcagaatccggagagcgtttcccaagagcccagataaagaatcaacagccccccagtgttttataaagttaaaattagcaaagggtcaaaatgtttattttgcttacgaaaactgcatcggaagccacatttcttggggttgggcctgtcttagtaagtttttaggtgctttcaagaaacaaaatgctaagcctattgtttcagaagttaactgactttaaaacagaacccaggaaaagcttcataaaatcttattcttaattaatcccagtaataacaggaattgagcaaaatggtatcgagggctgagaacagtgttttcttaattgaacaataaaaggtaacaatctaagttacgggagaataaagccttctctggtaatgctgtgtgtgggtttctggctttgttttttcagcgggggggggggggggggctataggagggaaaagttacaggagtgtattcctcacttgacgtgggaatggtactgacaagtaaaacaaatgatctatgtttaccaagcatgtttgtgaggactaaaactagtattgtgtatctagattttcctactagcaaggggtgaacccctctttgagtgaagagagacaccaacaccgggaggctcaaaaaggaagaacccaccaaaaacacaagctcacacggaaacaaaaggccacagcaacccaggagcctaaaaagcattctgaaacttcctgatcgccacttctccacatttaaggctcgcaaagttcccccacggtgaatctcgcctgtggacaagggccacggctgcttctaaagcgatttattgttcctcctcctccggcgctgccacggaagctcaagaagtcgaagaaatcggggtggcacagaattacacttcatggccacacagaagactcggggcttcgcaaacccatcaaaaaaagcaacccgaatggcaacatcaatcttcggtggttcccaacagggccaggcaaaaatgtagaggcacgtctacgccctgggctcgggcctaaacccccagcattttcctagcttcgaccccgctccccaccccctccctcctttgataacaataggggccttgctgctgactccaaaacatgtacgaggaacagcgagtgagaagcctcagccagggccccggcggcttttccaaagcccttctcacccccacaaccactctcaaacaccaatatgaagggacaatctgctcgttaggggtccggagcagcgtttggggccggtggggtgcggatactcacgggcggagcggtaggatgaagatggatttcagccccccgatcttctctctctggcgctctcgctcccccttacctttcactccgacaacatggcggcccactggggactgggttggcgcggtgcatcctgggataggctccggccccggccccggcggtggcagcggcatgtgcggagaaggctggcggctctggaacaggttgcctggttgccatgccaacccagggcctgtgtgaactcgggaaactcgcaggcaacacaaacgctgcgcgcgagtgcccgcccgctaggcgagcgcgcgccgccagggccgaaggcggggtcccgccggcccgcacctgggagaacacggcctggagctgggcacgcggggttgcgccggtgacgctccaccgagtctcggacgcgctcctcgcgcccgccgcgccctcggaagcttgcccccgagcaccacagctagcagggttcgcggacggccacccgcactgccctggccccagaggtgcagggttcaaaccccttctctgcagctttctagctctgcggccttatttaaatcgacctgcctccatttccacatttgtacaatgaagaagaaaataacccccacttaaca

SEQ ID NO: 33346 - DNA, 507 bp, Homo sapiens
ggcggatcacttgaggtcaggagtttgagaccagcctggccacatggcaaaaccccgtctttactaaaaatacaaaaattagctgagcatggtggtgtgtgcctgtagtcccagttactcaggaggctgagacaaggagaatcacttgaacccaggaggcggaggttgccatgagccaagattgcacaactgcactccagccaagattgcgcaactgcattccagcctgggcggcagagtaagactctgcctcaaacaaaagagaaaagagaaaagaaagaaagctgtgaaaggacttggggttttaagagctgtgtttcaaaaggatgactctggctaggcagacgcactcacctataaaatggaaataatacctacttcccagtgttgctgtggcaatgaaataaatatgagcacaatggctcatagtaaatacacagtagaattgtcatcagaagcagtagtaggaaaagtgacccataaatcagattttgattagacacctaa

SEQ ID NO: 33347 - DNA, 1394 bp, Homo sapiens
accttatgcctgcagatactctacatttgtgttttggcatttaatttaatttcacagcgatcattcgacgtcagaattttggttcccattctacaagtgagaaaattgaggttcagggaggtcaaaggacccgttgaaggccatgaagtaggatgcgccagaagccaggcttgagagctgcatactcggcgagagtttctccaaggcaaagcctgaaacaggaaccacaggctctccaggtggggaggctggcgctgaggaatgttctcctgaacaaagggctcggctcgcgcgcccgcacacccgcctcccccggcgccggccttggtctccagagacagtggggtggggggtggagacgcccaggtatggctctcctccgtggaatcagcgatcccaggaccgaggccggttgactccggaacaaagagagtccttggggcgggggcgggggcggggcccgatccggggaccggagggagcgggggggagggcggggccggagtcgagggaggggcggagcccgggccgggggacgagggcggggagcggccgggccctgggcggggcagggcgaggctggatcttcggaacgagtccgtgaaggatcgggcgcgggcgcgggcgcggggccggaggtggggacgaggggagttgggaaggggctgggggtgtgggggttgggggtgtgggggtctggcgggacttatctgggggaggctaaagtgggtgctggaggcgggacccgagtcccgggagaggcgggcggggagtcgccgctagagcggggcccttttgggggctggagacccggaagcttagagggccccctggccccggagagggggagggcgcagggcaggaatggaggcgaggcctggcctcaggagccgggggcggcgggttcagggcgcgatcctctctgggggaatccgcgggtggcccgggagaggccgggagggggcgcagagggcggcgccggggccacgtggagtctgcgcgccccacccgctttgggccgcgctccacccgctttgggccgcgccccactatccctgagcgccgcactgttggccccgccacacgtctgtcctgagaacccgcaggtcccaggctgtgcggcaccccgccgagccctggagcaagtccttccctgcgtgggtcttgtttccgcttctgtgaaatgacgatggcccttcttgttttgcagggccctgggagagtgggttgagagaatggaagtgaagaggaaggcttcaccatcaccttaactaacatgtgtttcctaccgttaaataaacattataggaggccactgttttggactaagtttctgcaccaggccccagccgaccagactaaaaatcaaaagagtcacccatgctaaagttcca

SEQ ID NO: 33348 - DNA, 567 bp, Homo sapiens
ggccaacatggtgaaaccctgtctctactaacaacacaaaaattagctgggtgtggtggcaggcgcctataatcccagctactcaggaggctgaggcagaagaacctcttgaacctgggaggcggaggttgcagtgagccgagattgcgccactgcattccagcctgggcaacaagagcgaaactccgttttggaaaacaaaacaaaacaaaagtctaggggcagcggagatatagcgccagccagcaggtgtcgctgtgacacccattctctttggtgttctgatggaaagagcagagtgagatatttgagtcggattaagattgtgtagacagggaagagatagcgatggtaaacacgggccatacctctgctggagatagtagggaggttgaacaatatcacttaggaaaaatgcccagccagatgctcaacaaacgggttattttctaggaaatttaccacctgtgtcatttttcttttgtgtgtgtgtgtgtgtgtgtgtgtgtgtgtgtgtgtgtgtgtgtgtcatttttcttttctcactgagacaggatctcacttagt

SEQ ID NO: 33349 - DNA, 839 bp, Homo sapiens
ccccatagctgggattacatgtgtgggccaccacgcttggctaatgtttgtatttttagtagagacggggttttgccacattggccaggctggtcttgaactcctggcctttagtgatccgccgacctcagcctcccaaagtgttggtattacaggcatgagacactgtgcctagctgtatctgtattttagaaaggcatcccaagtatagtgaaggttgagaagctctatcccagaatgtcagcagtaaagcagccaatgagtatcatgcaagcaaagtccagccctctcatttcacagatgacatcaccaagagcagagtgagagtagttccccaaggtcacaggttgttgacagagaaagaactagtgccaacagtagtgtcggatacccaacacaaggctccctggagctccagctggcctgggcctgctcagtctcattccagggctgactgaggggaactgctgagtcactggaactgaggcccaaggcagggtgtggcctccatcgcctggttaggggtggggcagagtgggactgcccccacctcctctgggtgactgaggctgaggccggaagagggacaggcagagagctcagactgcctccccattcgtgggaccccctcccttcacgtgaaaccacctttgcaaagattgtaactgaggaaattatgacagtgaaagggatctgacctaaccgacaccatcttgcttttaacctctaagctgcccttgttcattcttgggtgtaggccaaagtaaccttgggaaggaattcagtttatactttaactttgaaacaaaaattataatagccctttcccgaaataaacc

SEQ ID NO: 33350 - DNA, 533 bp, Homo sapiens
agctactagggaggctgaggcaggagaatcacttgaatcaacctccaccaggaggtgggagttgcagtgagccaagatcacaccactgcactccagcctgggcgacagagtgagattccatctcaaaaataaataaataaataaataaataaataaataaataaataaataaataataaattcagcagatgaatttcagtcctcatcttacctgacctcaattgccctctctcctgccagcagcactcttttctggcttttgccccatggcaccgtcccagaggcaggatgacctagtggtcaggagcaaagcctgagtcagaatcctggtgtgctggttattatacaactcttggcacggcactaaccttcctgtgcctgtttcttggttaacaaaatgggtatgattcacagtatcttcctcatagggttgcaagaagagtcagtattatttaaaattatatttttctgcaaaactccctacctccctccttcctttattttttccacagtgcttatgattggatttttac

SEQ ID NO: 33351 - DNA, 1792 bp, Homo sapiens
agaagtgtgatcactatttctatcttacaaaaaatgtagttaggagcatggtttctcagttcgaaatctgcttctatcacgtacttggtaagtctgtttttccatctgcaaaatgggttaataacgttcctaacaggctgctaccaagatcaatggaaatttcatatacgaaacactttagtacaagagtcaatgaatgttagctgctatttagttgttaataatactagtgcagagaaataaagggaaaagcaacttgcccaaagtcccaaaacgagccaacacaaatcatttcccttttttcttccctccctcattcattcattctacacactcttcggaatttttgttctatgccagatccatgttagagtcaggatgcttaaacccgggtcagggttttgagcccaaggtcctcaactctaattctaatgctatctcagggcagtcgagaggctgaaaacgggcgccaaacgggggaacacgtacgcagcattcgcaggctatggggagcttttacagtgtttatgtgctttaactctgcgtagaaactctcgttctgcccccgcaatgcgggaaagggtcagggatcaccagatacagcgctctgaggggaggaagatgagctgagggccaaaggccgcctgcttcttcacttaccgcttgcagcaaggctcccggcgtcgcctgctgctgcccggctcctgggccagaccccgctcccaacagcaactcatgccgctgccgcttgactggaaccagcggcaactctgggcccttacgcttctgctgttctatcatggcggcaaccggtctcttcagcgccgccactgaccgcgctgccgctctcaggcgccacgcaattggttccaaattagtccttcctccacaacttccagcttggaagaaccaatcggctttcaatatttccatttgcaccgccctcggatagtctcttgttattgggcatatctttctgacgtcatgagagtgcgataccaggattggtggacggagctggcgaccgccctaggcgcgctgggtcttgtgggtggaaacgcgctggctgactggggtcggcgtttagttcagcgcagcgactcggggacctggagctgacgcctagtacgtatgaggaagaacggggtgggtggctgcctgagtctggaggcgacgcctcggttgtgcagtctgaacctgcccttctcagctgagggtgctgacagcaaggggtgggaggcgggccccgagtccccagctgtggtaagtagtagcctgggctccctttcggggcaggagcggagccttggggtctctggcggcaagacccagcccctgcggctcccttcttcaagagcgcccatcgtggccagtcctgtgccgggcattcccagggagaaaggcctgcgtcccagcctcctccggtgccccatttggccgaggaggctgacttgtttctgccactgattttgcagtttttgatcagggcctactgtatgcccccctgagagagacagtgatgaaggaaatgtccgactccttctccagagcacagtcttgttgagaaatttgagactcatgcccatgaacgtggtcattgcctcagtcgtcctgctgatattcatttagcagcgcgttgggggtatgttgtgaaccgggcacggtccctactctcagggcgtttaactctggtggggaaaacgttaaacaatgacctcactaatacatggaaatgcctcctactgctgcctgatgctatgagtgcctgaaataagcaggaaggtttttcaga

SEQ ID NO: 33352 - DNA, 914 bp, Homo sapiens
ttgtgtttaattggggttcttgccccttgagaaagtaggcaagtccaaggaggtatgagcaggtggtggggcagccacctttatccaaggtagactgccatctttgggcaccatccccagctctgctgccagccacctgtgtgatcctgttctttctggggacagctatgaggaagaggaaacagctgatggggctgaatgatagtgtcatgatagaacactgctatagggacaccctatagaggtcaaagcccttaagttctctcgctcccatgcctggcctggaaggctgaggcaagctgccaagacagccactgcagggtgatagaaccctgggaggaggggctaaggcttggtgggaagacactgcaaacacattcatgacaaggtgaatgccctatcacggaacatagctcttcctgcctgtcagctggcaacactggaaatagtttgtcagggtcattggccatgtctgggagttagaagttgaagcggcatctgagtaggtgcttctagttcctggctgccttttttgctgctggaggtcacaatgacctcactcagtggagggccctgacttctgggcatcattcctaaagcacttcaggtcacagccatggccacataactctgccatctatggaaggggaaagaaacctagagctactgcataccttgcacagggtcacccagctggagctggagtagatactgaggtcagaagaacatcctggctctgtgctgcccattccgaggcagacaatagatgaatcccaagaagggagggaagaaaacaagaggacagaactgacatgtatttagcatcagtggcattccagcactacacaggctttatgaatcttgtttcatttaaattccccatgatagtctgcccctcagggtgcaataccagg

SEQ ID NO: 33353 - DNA, 6856 bp, Homo sapiens
ggtgcagtgacttgccgaagtttctttatccagtcattcagcattcaacctcagcatctacgtattgagcagaggccctgcgccaagcactgaggagtcagcggtgaccacctcttggcttctgttcccaagggtgacagtgtcctggggtcacacgggctcaaaccgaggtcgatttccgaacgctcactttggagcaggatgcgagcccgggccacgattgggtcaggttgcgccgctcgcgtggccgcgggaatccccgaccggccccttccctagggtccctcctggcgcacctgccccaggtgagtctggggaggccccgagcgccgccggaaagcgtcgagcggcttcggtaggtggggcggggccggggcggggccggggccggggaggggccaggcccggcacccggatcccgaggtccgcgccccgcgcccggcgccgggcgcccgaagccgggagccgccgccatgggggcctgcctgggagcctgctccctgctcagctgcgtgagtcccgaccccggcgcccgcccgcgcgcgccgcccgttcctgctgcgggccctcactttcttctgttctgctccgagtagtttcttctttttccttcctgcaaacttgtctttctgggccggtgccccgcctgctcgccctcctggaccttcactcggcacccggatcccgctgcccccgtccccctgctcagtcctggccggcaggcgccgggcagctgcggtcccggctcgggtttccgcgggcaggaggggagtgccctcggcgggcgccctcctgggacctggagagactaagcctggagcccggggtcggggcagctctgtgggccctcgtcgccccacttggggcggtcctcggggtggcctctgtccccgtcccggacgccctggttctctgtgtaggtcgcccgggccccgtccctcctggcgagtgccctgccctacccctctggccgcctgccagtccgcctgttcctgtcgctcgggctccgcctgtccgttcgtatttgtctggttcctgtctgtgtccgtcgttcgtccgactgtctttgtccgtctgctgtcttctgtccgtctgcccgtccgcccgtccgtccctcagtctctctgcggtccctttaccgtcctcagtctggctcgcgctgcctctcaggcacttccccagctcgccccggatcatctgggccccagcgcggagactgggatgggagcggagggagccccggactttcttagctgccctcgagtgaggcgggtgcgggtcgtcacggaccaccgggcggaactctgggttgggagagcaggaatcgagggaggttcgggtgtgcgcggggagtgcccggtcgcgggttcgggacctgtggggaggccaacctctgttctgtagctgcagccgcagaggggaggggctccagcaagaccccggctgggaggcccgttctcccttccctttccccagcccccctctcctttcctcttcccctcattaaatctgaggttcattcaggcagccccctccccctctggccccacacaaagaggccctgagagggagaaggggctgcagcggctgctgaatctcgggactcgctttcctttgtccctgacgggttgtgtgtgtgtgtgtgtgtgtgtgtgtgtgtgtgagagagagagagagagagaggagggggtgtaggggagagctgagggtctagagatttactttacagcctttttctgagaatgagatcagcatagacagcacagagaggcaagagagcctctcgcctcattaggcctccatttttcgtgtgtgtgtgtgcgtgtgcatgtgcgtgtgcaggaggaggaatcaagctggtgcctgaaatccctcccagcccaaagaattcaaggtttgggccaggtctctgccaacaagggtttgcttcctggtgagggaggcagagcttccacagtggacctgatttccatcggttgcacctggtgaggcacaggccctgctgggctggcctgggggtggagatgttgaggggcagcctgccagccctgtgtgccttggtcaccccatctggcagttgacagtaacagggcctttctcacaatgctgttgggagatgaggcacagttcctggcatatcgtgagtgctccttgtgggaattattgctaacatcaaggaaaggtgggtggagaattccatttggagacaatgcaaagccaagtgctggtctctgagttacagcattctacaatgctgagagcagataggactgctcaaaccatctgtttacagatgagaagactgccacccgcccggagaagatagctgactttcctaaggttgcacagggaaaggatgaagaactgcatagttaggatcaacatctgattcctggtccaggcttctgcccacaccttccctcccttccccacatcctggctgcctgaggcacagggctggtccagggaagaattgggagataacttagtgagtaatatcagcaagggacccggccctcccttcagtgccatccccttggggttctggcctccgacatttactgaggttctggcctctgacatttactgagccaggtactgttccgagcccctcaccatgccatctcattggctctccccacctcctctaccctatgacatcgttagcccattttacagataactatcccaacactcgcagcgtggagctgtccaggagtggcctaggccccatacagtagtgagcagtatgtgtatgtgtgtgtatatatatatctccttccatttaatcctcacaaagaccccactggggcagttaatattgttcccatttcacagatgaggaaactggctcagagagtgaaggtgacttctccacagccacacaacattaagtggtgtagttgggcactactggacaccagtaccatcctgttgcagtgaagagttgctgcacaggagtgaagttctatgtggggtttctgggcaacttcaggagggatttttttgcatgcatgggtcagtggggaagatttttgtatcctcccaggtgtgactcatctgctgattgtgcttctcagcattggaactgggctgaaggtgaactgggctgaaggtgggtcctgctttggatggggaggtaagatgggtccacaggggatggggccaccaggcaagccgccggcacatgatgacttggctgtctgcaaagatttcaggagggtcttgcacatcctagggagtgtgaaaggcctttgggtcagaccactggactcggatcctagctttgcctcttcgcatctctgtgactgtgggcagtcactttgcccatccccttgtctgtaaagtggagaaaacaatggtgtctgccccttagcctgttgtgaggattaaatgggactgaggttagcacagctgcatatttagcaccaagctggtgtgcagtggccggtccataaacaccccacagtagtacatgactcaagactacatgcaaggaagtgctgaagccagtgagacccagggctgcctaactatagagcctgggctcggagcccctgtactctcctaccccaggagatcattttacagatgaggaaactgagtcccatggaggggaggagagacttgcctgaggtcagattacaagctgtggcagagccagcattaggacctgcattcttggcactgcatgggggaagtaagtgcaccttgggacatttccggctgacctcttctctgctgtgttttgactagccctggggcggctcagccagttacggagttgttcatgaaggcggcaaggtgcatgcttgcctgggccagttttgcattttttaaactgtgacgaaatacatgttaaaaaatttactcttttaaccttttattttagtcttcaaggagtttgtatgttatttcattttattttattttactttatttttttgagatgaagtcttgctctgttgtccagactggagtgcagtggcaccattctggctcactgcaacctctgcctccaggttcaagtgattctcctgcctcagcctcccgagtagctgggattacaggcgtgcgccaccatgcctggctaatttttgtgtttttaatagagacggggtttcaccatgttggccaggctggtctcgaactcctgatctcaagttatccactggcctcggcctcccaaagtgctgggattacaggcatgagccaccacacccagcctgtaatttattttagaagacatgtatattaaaatggagatctaataaatacaaccctaataaaaattaatcccaaacgaatggcattgtcagaaggagtagtgccaactaaggcacacggtaactccagaacatcttcttactgtcagccctcatctggattactgacaacagcccctgactctcctcccttcccccaaagataccacacactaccccatgacctgtctttttgtgatcaaagtgatatttctaaaatgcaaatctgctgtcattcctcttctttcgcaatcattccccattgctttcagggtgaagtccagactccctggcatggcatacagggacattgaccaccacttccgtgacctctgtagcttttctcaccctttcagctgccctgaaaatacagtgtccctgtagctctgcatgtgtcattctctttgctgggaatacccttctcgcctcttcctgctcttctttgaaaactccctgccccctcccttttaaaaaaattgaggtaaaagatgcataacataaaatgtaccattttaacaatttttaagtgtagcattaagtacattgacactgttatgcaaccatcaccaccatccttctccagaactttttcatcttcccagactgaaactcccactaaacagtaactccccagcccctcgtaaccaccaattcactgcttttctctatgagtttggctactctctccatctaagtggagtcatacaatatttgttctttggtgtctggcttatttcacttagcataatgccctgagggttcatccatgttatagcatgtgtcaaaatttcattcttttttttttttttttttttttgagacagagtcctgctctgttgcccaggctggagtgcaatggcacaatctcggctcattgcaacttccacctcccgggttcaagcaattctcttgcctcagcctcccgcgtagctgggactataggcacacaccaccatgcccagctaatttttttgtatttttagtagagatagggtttcaccatgttggccaggctggtctcgaacccctgacctcaggtgatccgcccgccttggcctcccaaagtgcaggggttacaggcatgagcctccgcacctggcctcattcctttttaagaacaaataatattctattgtatggatatggatataccacattttgtttatccattcatctcgtccaccaatggacatttagcttgttttcaccttatgactactgtgaataattctgctatgaacatgggtgtgtaaatatgtgagtccctgcttcatttcttttggatatatatccagaagtggagggccactttattttattttattttattaaattttgagacgaactcatgctctgtcacccaggctggagtgtattggcgcgattcagctcactgcaacttctgcctcccgggttcaagcgagtctgctgcctcaacctcctgagtagctggaattacaaatgcctgccaccatgcctggctaatttttgtattttttgtagagacggggtttcaccatgttggcaggatggtctcaaactcctgatctcaggtaatctgcctgtgttggcttctcaaagtgctgggattacaggcatgaaccaccacgcccagacagccagtttgttttaaatagaaaaattcatccagccctcagctgcctcccttacccacccaacaccctatgagtggttctaagaacttctgtccctggctctgaggacaaccaggagacaatgtgaatgactcagtgacagcctgttcacataatgccaaacgactcatggctccagagctgtctgccttgccttgggaggtagtgagctccttgtcattggcagtgtgcaagcagcagaggatggccagatgctttctgggtggttcttcattggaaagagaatggattggttgaatgccaaggaaccttgcagctgtaaggctctgaggcctggggcttcttaaattctgagttctccattctgagaacctgggctggtactaagattcagccactgtaagtgttctggggcttttctgttgctgcccttgagtgcatctgcaggaagaggggagtggttgtaatcgtagtgtgggaacagctttccagtctgccttcctttcacactgcatcatgagcattattccatgtggctctgtagccagggaattcatctttctggctctgtagcattccatggagtgaaagggccacggctgtccccaggtgttagacatttaggttttttgtagtttcttgagactccaataggctcacaaaacctaaagcttatttaagttttttctttatataaaaatctttatttttatatttgtaaatttaacttaattgaagtattatttgtatacaatgaaatgtacccaagttaagtgttacctacatatttgccccattcagcagagaaatccgttttatggaataccatgatgtattgatgggcgttttgttattttcaattttcccctaatggccaggcatggtggctcatgcctataatcccagcactttgggaggccaaggtgggaggatcccttgagcccaggagttcaagaccagcctggccaacatgag

SEQ ID NO: 33354 - DNA, 2129 bp, Homo sapiens
aaaaccatatctgccccctgccagcacccctgctgccatctgtggaaaaagtgtcttccctgaaattggctcctggtaccagaaaggtttgggaccactgctttatggcctctaaaacatttttcaggcttttcttatcctctcacccaccaaggacagccatggataggaggcaggtcttggggtggcagctgcaagatgtaaccagaagttgctggacaggtggactgtttcaatttagaccatgaggaatagtttcgtttccaaagcattttgtttagcatctgtgtgaacgagagataggcgaggagcatttctagtttgggggagagtaagaggggaggcagatgcccgccagcagggtgtgctgtgtgccttgtgaccagtccagaaagaaaagcagaggtctctgaggagcaaggggcccctgccagcctgctcttttcaaagctcatctttcaattcctgacccttggctccagcccctcgagtgggtgcccaccgctcttaggatgaaaaccagtgtcctgttcctgactgctggtgcctatgtggtctggccttgccagcctgtctgacctcatactcaccgctgactgtctgctcaccaagctttggccacgagggccttcttaaattcctcaaatgcccagcccctacccaccccagagccacctgtctagaactttctttcctccctttggtctggcagtgtctcctcatccctctgctctcagcttattattttattttaaaatatttctttttaaaaggccaggtgcagtggctcacgcctgtaatcccagcactttgggaggctgaggtgggcagattgcttgagcccaggagtttgagaccagtctgggcaacgtggtgaaactccgtctctacaaaaaatacaaaaattaaccaggcatggtggcgtgtgcttgtagtcccagctactcaggaggctgaggtgggaggatggcttgagcccaggaggcagaggttgtagtgagctgagattgcgccactgcactccagcctgggtgacagggcaagaccctgtctcaaaaaaaaaaaaacaaaaaaagaagaaaagaagaaaacccttctttttaaaagatacggtctcgctatgctgcccaggctattctctaactcctgtgctcaagcgatcctcctgccttggcctcccaaaatgctggtattacaggtgtgagccactgcacctggcctgctctcagcttaaaagtcacttcttcaaggagggcttccctgacatgccaccctcaatcaaacctaggctgcattagcacttttctggcagtgggtacgtgtccttcttagcgcttgtcacgatgtgagtcatgatttgtttagtgtttttcctgcttgtgtaagctccaggaaggcaaggcctatgtctgttgctctccaggctcttaaatccctgggtgaggagtaggggctgtttgggggaagataaagtttaccagaggtatctggatgtggggcctgtttctttaaaggctgggctgtggactgggctcccaggagggtgagtctccttttcaggtgtggcatagtgtgtcatcaccagcccctgaatgatttcagccaggccaggggaagggctgaccgcaactggggcagaggaccctggagagggaaagggttagaccgccacctgctgtctagtgctggtatagcctcagagccgaaaatcattccgtttatccaactggtgtttattctgcacttgctgttttctgaggtcttaacatgtgactggtactatgccaaacacttcatattccttcaacagatagcctgtaagctcctgctgtgtgacagacactgttcgaatttctaggaataccacaatgaacaaaacgcaaaaattcctgccccgctggaaagcggaggccgacaaaacataaagcctcgctgatggcagaagtcccgcggggaaaaattaagtggggaaggggaaagggagcccaagggggctacaatgtggaatttctgtttcactctcacaactgctttgtgaggagtacataccactatgttacagaagaggacactgaggcacagagaggttgagtgagttgtataaggtcacgaaggtaatcggtgacagc

SEQ ID NO: 33355 - DNA, 2414 bp, Homo sapiens
gggaagtatcagatgcagagttcccactgtcctctctccctgaagccaggatgcgttacttcccagcatccatgtatgatgatgtgcatggagtattgtcaaccatggaggctctcctgagctctggagttcagagtttttattgggcctccattatgcaggcatcattgactgattgcccatgtggttgatttcagtctccaggtcaactgagatagtgtgacccagagctcctaccctaaatcatgtggttggtcttcccactctacatcaaaatgttgctatctggatagcccaagatccccagacaaacagagattacttaccaaggacaaaggccagaactctttttggcaagcttaaagtctttcctgtacacaaggtcagcctggaagagggacctgacttgtgccccttggaagatcctggagtagccacctggcctctaccctctcttacagtctgaaaagtctggggctggcgggttgagggcataaggtaaacagttcatacttactgagcacttgttatgtgccagacagtggctcaaccacttccatgtgttatctcaactaactctcccacccactccctgaagtagacatattcatggttctatttcatgtatgagaaaactaaggcaaggagaagtgtcacccaaggcacacagccaataaggttctgagcctaggatttggacacaagtctaggtgacacctaagtccacactctgtgctctgctaccttctatattctaaaagcatgggtttggactcaaatatgttgggtttgttgactgaaattaaggctgttgaggcagaagtaatttggtaaaagtttgtcagaaaccaaatgtgaagattgacctggaagacacaccaacacaattaggcatctttccaagtctgtaacgagtgggattgcttttataagaaagtttaggaaaaggggcagggggttcctcatttcagatttgccctttctctttggagggcacgatacagaggttacaatgattgacaacaggttatatcacatggaagaaaatgctctacatgtaagccagtaaacttcatgattcagacacaaatcagtgtccttttccatgtcagtaggttacatattaatcagcacgtcaacagttggaggaagtcacgtaagatttgagggacttgtgataagattctttattcagggacaggatattgctgtgaatcacaagaccttcccctggttggaagcctgccaaatgtgacctgtaggttatcaggttcaaattctaggctcagctgcatctgggttgggtggcctcagccaggtcagggatattctgagactcagtttcctctttgatagcagtcgagatgccctctcagggacctttgcctccttgttggcctcttgactctggtgagattgtttacctaatgcccccacaagcctagggattgcacaagtttggggaggaatcataactgatgcattctgtcaccttccactccctggggactggcagagagcagacatctgtaaatgtttgctgttgttgaagtacattggaacatgcccccgaaccaccaggatccaggatctgctgagcagccagagggcggtggatggaggcctggcactgttgggtgtcctcagggctgggtgcccaaagtgggaggacccgcccccccgccccacgccgggtgaaacctaggaccctagtcacacctcaagtggaaaacatggaccttaatcctggagagctggctggggtttaagtcagtgccactgacttgcagtgtggccctgggcaaggggtagaactcttctggcctggcttttctcattagtaaaataaggggtagttttaggcaatttgacagctaacgtctgtttcctgtcttggcccaatggcccttaggagctctggtccaggtcctcacagaagaagagtctgtggtggtctctttgagaatgcctctttccctctggtctcaatggcctactactggcccaagtgccctcccaccacacacacacacacacacacacacagattcacacacacatgcatgcatgcacatatgcacacacgtgcacatagcatgtgtacacacatggacatgagcatacttgcacacagcaatgcattcgatggactgacattcgatatccattcaccccacttttctgtgcctttgccccatgctgcagggggttctgagttagagccagggttcccctcacataacaaaatttaccattttgaagatacaattcagtagtattgagtacattcacaatgttaagcaaccatcgcctctatccagttccaaaacattctcctcaccccagaagaaaacctcatatcaatgaagcaatcactccccattcccgctcccctcagcctttgcaaccgctaa

SEQ ID NO: 33356 - DNA, 1402 bp, Homo sapiens
ctttgagttgaagtttcaggaataactcccgggactaggtcatcaagaaaactgctgtaatcagaaagccaccggctccagaatgcatcacagctaccaccagggagccgccattatcaggaggctgctactaatgtgccacaccatcacaccacgcctgccacagtccttggcagcagaataaatgcgtgttcatgtcttattcttgatgtccactaagctaggaaaaccacatctttaccaactgtacgacagaaaaaccagatgtcttcacaactgtgttgttagcagaaatggcaaaaacaacaggaagatggccttcaccttccttccattttctacatcttgtgtgactgaatctgattggctgagtcttaattgtcagagtcctggctgccagggaccctggcatagcatgctagaaggaggtgctgacccaatgtatccatcacatcacatcaaaccacacaaagtatggtgatattatgttcttttctgtctttcttactggatggagtgggttccaggagggcagagttctattaaccttcttttttttttttttaagacagagtctcgctgtgtcaccaggctggagtgcagtggcatgatcttggcatcttggctcactgcaacctcaacttcccaggttggagcaattctcctgcctcagcctcctgagtagctgggactacaggtgtgcaccacggcacctggctaatttttgtattttcatgttggccaggctggtctctaactcttgacctcaagtgatctacccaccttggcctcccaaagtgctgggattacaggcacgagctactgcatctggcctctattaacctttgagtctgtctaatgacttggtatagtgtaggtgctgattaaatgtttgttgtatggattgattaaacatgtgttttggctcatgaccttgtgtatcacttaggacgctttgaagtatagccaacagaaagcccaattcaaagtgctttaaaaagtaaagaaaatttattgattcgtgtgactaagaaggtcagaggtaggtctggcatcagatgagacttgattaagctgtttgacagtgtcaccaagagcctgatttcttgtcatctccctgttctgacatctctgatgttggctttatttttcctcttcttaatttcaaatgcaagactttatgactaaacctatagacttataacaaacaccacataccacatatgattcttcataataatcactaccactagttgagtgacttctaagtttcagacactgtgataagctctttatgtgacatgtctcattaaatcctcacataattctgttaagtacgtactatacaattttctcttttataggcaagggaactgaggctttaaagaatattcattattac

SEQ ID NO: 33357 - DNA, 2442 bp, Homo sapiens
tctttcccttgctgtatatcaaatgtttgggtaagattctgggttcggggtactgattctttaatcccctttattatcaattccttaaggtcttgcatattttcttggttggctgcattgttattgtcccaccaggggtcttgggtgggaaatttttgatccgctgtaggaacgttttggccggaagccgggggcggggtgttcatggttcctaggctcccattgcagccctatggatcatgcctctttcttcccctgagaagaggggaaagggaagttctgaatatcctttttacattgctctatctcgtgtgaagtccttttagggaagggtactcaggctggtcgtgagtgggctcttgggaacattcccaagaggcagaattataaggagagggacaacagggataggagaagggtctgggacagcagctgctttttcttgtttttggtcctttcattacccttctaatattttatcattaggctgagcggattattagggggaatattatcattgctagtgtatcctttttatcccttaccttacttggggtatttcccatttttagtgtgaggctcaattccccttgctagaaatgtcttgcctatttttaaccctcaagataccccaaccagggaatacttcaccgccccacctcctccgtgtcttttcttaccttgatatgtcctgatcaaggaataccaccaccccctgtggcttctcttaccttggtctgtcccaaccaccaaggaaatactttgctggctcccaggcgtttccttcctcggtctgtgcacagagttgcctggtcactgtggtgtgtgaggatcctttcccctgggtcgccggctggtttctttcgacattgctgagtccaggtttatttgtcacaccaggtgagtctcgattcctgactcttgaggccaccgcaacaaggcagtggggcgtgagagaggaatagaggccacccctagaggagaatagctccccatatgggccacgagattgttagaaacaaatgcctgttccttggtgctgcagagaaatagcacttgaacataaatttaattttctcagccaggtaatttttacttctatagaagggtgcgactcgtggttggagtaatggcgaaagcacacctgaacaaggggagggaagcggttcgtattcctggtgcaggtagtccctgctgttgtgtcattcccctattggctaggattggaccgcacagtgtaagctaattccgattggctattttaaagagagcaggggtacaagctggagtgacagggtgagaagtttggcgggaggggtggttacagaacagttgactcaggatgattcaggtcagagcaggtgacaggggtgactcaagatggagcaggtgaccaggggtgactcaggacaaagcaggtgaccaggggaacagatgtgaactactgattagaactggcaggaaacttgtttactgaaactagaggcaagcggggcaatagaaccaggaagttagactttaaaatggagaataaagagagctgaacatactgacatagtgattctttgaaaagaaacttggagttcacgatctttaacaagaatatctagttcttcctgatttaagccaggagggttgtatctttccaggaatttatgcatctctgctaggttttctagtttatgtgtgtaaaggtgttcatagtagccttgaatgagtttttgtatttctgtggtgttggttgtaatacctcctattttgtttctaattgagcttatttggatttttctcttcttttcttggttaatcttgctaatggtctatcaattttatttatattttcaaagaaccagtttttgttttatcttttgtattttgttgttgttatttaaatttcatttagttctgctctgatcttggttatttcctttcttctgctggatttggatttggtttgttcttgtttctctagttccttgaggtgtgaccctagattgtctgtttgtgctctttcaggctttttgatgtaggcatttagggctatgaacttttctcttagcactgctgtattagtttgttttcatgctgctgataaagacacacctgaaactgggaataaagagaggtttaattggacttacacagttccacatggctggggaggcctcagaatcatgggtggtggcaaaaagcacttcttacatggcgacggcaagagaaaaaatgaggaagaagcaaaaagggaaacccctgacaaacccatcagatctcgtgagacttattcactttcatgagaacagcacaggaaagaccggcccctgtgatttgattacctcccccagggtccctcccaaaacatgtgagaattctgggagatgcaattcaagtttagatttgggtagagtcacagccaaaccatatcattctgcttctggcccctcc

SEQ ID NO: 33358 - DNA, 600 bp, Homo sapiens
tgtctttggttttacttccttgtcgttttttcttaaaacgggtactgagtataaaacaatatgagagggtctctctcttccctcagcttcactgtcaagtaagaatttctctccccaggggaagcagatggaattaaaacatggtgattattcttaaacacctcacgcaacggctgctacacaccatctgtgaagtcagttgcagatctatgatgaggaagtagaatcatgtggtccccaggccctttgctgaaatgtctttctgctgggtaattaattacgtggtgttgaaatgctctgcgtcaactccctttggtttagtcatcatgcttgcttaatgttctgttaatgtccatgctgctttctaggaacttgcacatcagcatcgctgtccaggttaaaggaatttgcaatgtccccgtaggccctgaatttctaccctgaatgaaacaatgaaaagggggtgaccatactctcatcttccccagcttcctggttgctgcagtgtagggggttggctgtgggtggtgggtaatgaatccctgttggctcctattgccaaacagactgattacacatcagctctgataactgacggat

SEQ ID NO: 33359 - DNA, 1387 bp, Homo sapiens
ctgtgatctgctggaacgggacttcctcagtggctttcccctttggacagacattgactttccagtttgttgtaagacttacctggcccatttcactcatttgtgttacctgcttgacctctaggtaattgagttttcaactgctgccttatagcaattattgaagacaacagccccacttacagaggaggaatctgagcccttacttgtaggcacatcagacctggccaggctgggcaggggccatggagggatgggtcccagccagtatacacccgtgtgcccctgggagtgtccttccgggtctttcagtgccttccagataagggggtgggataggccagcctgctgtcttttctgaccccctttcctatgtcacacaggagttctgctcagagccgcccctcttcccctgcaccctctatgtcccatgtgcgatgcctttgacaggctcttcttggaggatgtgcggctgcccgagctggatgtaggcgattggctggtcttcccctccatgggtgcctacatgtcctccatgagctccagcttcaatggcttcctgcctgccaccatctgctacaccatgggcccccagctcaggtgcctaggggttggggttgaagaggaagcaggaaacctcacactcatttgagcttggggtgggaactggccccagggaatctcccttcccctgttgactcactgaagtcaaagtgtccatctgacctttggactctcatctgcctctggcccccctcccagggaggtggagaattgcaaagagatccccaggccctctagccactggctggccctactcctgcttcagacgcccactgtcccagctctgcctccaggccccagctctgctgctgtgtgtgcagcctcagggctgtaggcaaaggccttgacacccaccctgtaccccatgtcctttccccatgagccttctggaggcagagccttaacccagagccagctaggctggagggctttaagacactctggtaggtaggcccctgggaactgttgggagttgggatggcagggaggaggcagaggtttgggtaactatgaaatcctatgcagaccttccaaaaatatcttgctgtcattttgggtcagttctttccttttctcttttcatttcttttcttttcttttttcttttctttctttcattttcctttcctttccattcctttccttttttctttctcttctttctttcctccctcccttcctccattccctttctctttctttcctctctttttgagacagagtcttactctgtcgcccaggctggagtgctgtggcatgatctcgggtcactgcagcctcgacccctcagggctcaggtgatcctcccacctcagcctcctga

SEQ ID NO: 33360 - DNA, 1590 bp, Homo sapiens
gggtggcttcttggagggagaatggtgggacctggaggcagagcagaatcagtaggtaaaagtgggtaggaagcgtggctcaggtgtgggaacaacttggctcaggcatgggaatgagcctctgctcagagaacagtgagtggccaggattggagatgagaaacagagattgcagagcctggggacacaaggtgaccagtttgcctggatttgtctggaacattcctggtgctagcactgtaaatcctgagtcctaggaagctcctgagtctcaggcaaaccagatggttggggagggagaggagggaggggaggagctcgtcacaccccaaggccacattcctgcagctatagcaggtacagccattgatttctcagcttccagctcagccaaggaaggtgtctcccctcccttcagcagggcctctcccaccctctctgctaccactcaactcagccaggtcctcggggatcccagagtccctggagctgaagaggaacttcccctgacatgtgggaagcaaagagcagattggggtaacagaggccactcagagaagctagaggagctcaacagcccatccagtcaggtgcatctcatgagggcatcccagaacatcaaatttcccgcctgcaaaatggtcttgcttatgcccaaacactcagaatataagaagcacggattatgggtacgatacttaggggtgtgagcaggctttgggaaatgtgaactctttccagatggaagacattccagtgagttttctttgcccctggggggtgggagagggtgagtgggtctgagtatgtaagtcacaggtctccaggtctaaccaaccagtggcggggtgagtagtttggtgggaaggacagttaggaacaggtaactaaaggtgagttaggtcagagcaggtgaccaggggtgattcaggtcaaagcaggtgactgggatgagtcaggatgcagagcaggtaaccaggggaacagatgtgaactgctgattaaaactggggggaaatgttgtttactgaaactacggggaagttaaactttaaaatggaggacaaagaactgaacatattgacatattgattctttgaagagaaattttgaactcattgtatccaacaggaggatcacgtgagcccagcagtttaaggccagcctaggcaacatagaaagactctgtcttatttttaaaaataaaataaaataaaaatgacagaaatgtattctctcatagttttggaggttagaagtctgaagccaagggttggcaaggtcactctccctctgaaggctccagggaagaatatttctttgcctcttgcatcttccagtagccccaggccttttctggcttccggcagcataactctagtctctgcctcacaacgtttttctctttgtctctgcgacctcttgtcttcttataaggacaccagtcatccagtggacacaaattttgtgggggcatgatttaacttcaacctccaaccccctgccgcaggtcaccctttggcccttatggcctccaagtcttgcggctggagctcacttctcagcctggggtcatctgtgtctactttc

SEQ ID NO: 33361 - DNA, 2897 bp, Homo sapiens
atagaggaggaaaagtcagcaagacccgagatgtgtatggagagttagagtgtgggaagtgtgacatgtaactgaatcggatgatggcaactttcactgggcagtgaaaggtcaggttggtggtaaaagtcatgagttgactttggggcatcttgatatagtcacttccaatatcatgtgtttcaacaagcccgtgttccttcctggtcagttcccccagctagagtgtgttttacatcccgcagcattgtatgagaactgctagaatatcactcaccacttcccatagagattctgtttgttcatctgcttgtcccactgtgtgccttacacatagtaggtgctcttggaatgtgtgtgagatggattaacatgagaagtgcttctctgcatgatttcaccattgaagtgttgaaagcaactagcactcctccttcctgacctccaggcttccacccagctgtggggactgctgtggtggaagggcctagtctgaatctggacaggggaggtgcctgcaaatattttcgtgcctgcaaatatttttgtgcctcgggacagatggatgtccagtttactgtctgcttcctcagtggttctagaggtaattgcatcctgctgtgtacagttaggtcgtggaggagacaggcaccttctctcgtctttctggaaggtaaccagaggtctttcccctttcctatcatggcagctgctcagtcgcaggctccagatgtctgcttcagaattcaagaacaccttcctgagctgggaaacagatccaaggaaatatcagccagaggcttcattttatcatctgtggaaatgcaagatgttagagcacctaggagggtcttaacgtgcaaaacactgtcttgaggctgcctgcagaacagagggtcatctgctttcattagattctcaagggagcctcaacaggctacacctgaaccccaggtttggggcatctctccagccctcccagctctgacatcatcatcaccattaacagctgaaatgtgtgaggtggttgggatgtaccaacaaccctcccaagagtcccatatctacctgacctcatttgaccttcacagcaacccagtgactcagctgctatttggcccacgttttacaaacctgagtcagtgtgctttacctcagtgacccaagaacccaggtgctagagtcaggcctgcatccaaatcaggggtgggatcagtggtgtgccctgaacaaatcattatcctcttttttgttttattttttggagacagagtctcactctgtcacccaggctggagtgcagtggtacagtctcagctcacagcaaccactctctcctgggttcaagtgattctcctgtctcagcctcccaagtagctggggactacaggtgcgtgccaccacgctcagctaatttttgtgttttagtagagacagggtttcaccatgttgcctaggctggtctcgaactcctgagctcaggtgatccacctgccccggcctcccaaagcactaggattacaggcgtgagcaccccacccagctcattaccctcttttaacttcaattttctcatccacaaaatgagggcaataatctcctttcttccccactagccatgttcatgaaagtacttatttgcccattttaaaatatgtagcaatgtgccccagaaaggctggggcatgagtcctgcttggggtggagcagggaaggcctgctctgccccactggggtgtcctcagatgaaagtgggtgtgggctgactttctctgagctccctgtggagtcacacggggaactgggttgagtcacagcacaagggcactcacatgccccaccccgaggaggtccctgttctgacagaagccctgagccgtgactgtggactgacacccactgcctctgtgaccttgggtgggttacataacctcccacatgagaaggaggcggaggcacccgggcttgtggcctgagctaacctgggtagtgggagccctatctgtgaattgccaagggactgccatggggactggtgagaacacagctctgcaaggcccttttgatttgttttaacctttaacttttcaaaaatttcaaatttaaaggatgcatgacacagttgaagtttatcacaaatggactcacgagtgtgtctcctcagctcccaactcccggactcctgacctccaaggccaatacttcgaattctgttaggcatttcttctagcatttatctcaatagttccaaataacaagctcgtgatgcgatttcacaacccttgcttcaaatgtcatgtattgactttccatatgagggatggtccttgtttctgttatatctccctgcttcctcttttcagttctctgaatatatgttttaaaaatttaggctggacgcggtggctcacgcctgtaatcctagccctttgggaggccggggcaggcagatcacctgagatcaggagtttgagagcagcctggccaacatggtggaaccccttccctacaaaaatacaaaaattagccgggcatggtggcatacgcctgtagtcacagctactcttcaggctgaggcaggagaattgcttgaaccgggaggtggaggtttcagtgagccaatattgcgccattgcactctagcctgggtgatagagccagactctgtctcaacaaaacccaagggcggaggttgcagtgagccaaaatcatgccactgcactccagcctgggcgacagtgtgagaccctgtcttaaaacagagcaaacaaacaaacaaaaaaaaaaaaaagagagaaagaaaatgggagaagggggctgttccatgaaagggccttatatccaaaatgacccccaaatgccaaaggagctggaaaccagaaaaggagggaaacaaa

SEQ ID NO: 33362 - DNA, 2173 bp, Homo sapiens
ttgtgccactgcactctagcctgggcaacaaattgagactccatctcaaaaaaaaaaaaatgcagaagagaaaggtgagacttgccagggcaaaacccagggtggtgaaagggcttggcaccctgtgcatgagggaggatgtgccctcagtgtgtacctctgtggtacctgggtggtgctggttggtggaagatttggcatcctgagaatgcggcattttcgtctgattctcttttctcagtgagataagaaccaaggtcacagccaatagccagggggcaggagggggtcttggtgaggactcgaggagaagagggatgggggtgggagagttaatgggccggtgaagcctggttgggttgccggaagcacaggggcccattccaggtttgtggggtcaccttggagtgaggccagtcatctgatgtaccttgtcctcagccacatgcagctgcgtgggtgcagcagcagaatgggtggagggctttggggaagagccaacgtgggcggggggcgtggcttggagtatgaggtggccgtgggctccctgcaggcccaggctccatttacggccagctgcctgctgtcctcgccctgctccggcatgctgtctttccacatccgttacccactgcgcgctcataatgctcccactttacagaggccatttactctggccacctagtagttggtggcagagttgggatttgaatccaaatggaggttcattgttctccattcagggtagcaggggcacgcgtgctgtgtttaagagagacttgcatgcctcgtggtggaaataaactttggtggattaaactttaggtattttgcgccctggttgggccaggctttgtcccagttcgaccacagtgacttactgccacctactggccattctcagtgttgcacccacgtaggatttgctcacggtctgggtctaaccatgcctggttcaaaggggaggaccggagctcttatctctttgacaaatcagacaaaccaggaaacagaggtccagagaggtgactttaagctttcatctgcacttgcctaccccatctattcagttgttcattcgttcaataaatatttcttggaaacctactatgtgctaggtgctggggctctgcagggaatgagacagcagagagcgctgctccgtatagctgacatgccctgtaggggagcgggagggagggacacaccatcaacaagtaaatcagtgagaggatgaaagatggcgatgggtgccgggaaggaacaaggagacagcgactggagagggtggtcaggagttgccagtggagggaagacctgaagggtgagagggacggggaaagacaccctaggaagagggagcagcgtcacaaaggccctgagaggctgaaaggtttgggcgggttccaggaacacaggcggccagggaggtggagcccacacctcaacacacaactacccgtgaagaacgtggagcgatccgtgtagatccttgtagaaggttctctcagagggccatgtcactgacctgtcagtcagcccacagcctcctcccagtccccagatagctgaccactccctccttgaaattctctcctctctcagcttgtgcaacaccaacctccggtggcaggaaaaactattattattctcttgtgaaaattaaaacttaaccatcaacatagagctgttactggtttgaaggaagccattgacgctgtgtcaaaggctagagcagaaaacagtggcatgcagtgtcaaaggtcaaagtcaacacttctcggactggcacagggaaggtaggtcaggacagagtcagtcttgcttgcagctgtcaccatgttataagcgtgttgatggccctgtctgctgctagtggtgagtcattcttgcaaataaagtgactatttataagtttatagatatgagtatgctttgttcaaatcctacgagtagtgttcaagaaataaggtgtgggagtaaaataagtctgtgatccagtaagtccattggcaattcccatatgttactcaaatgctatccaattagctggtattttccagtgtgtgaatatttgctataggctatggttctttgtaatgcaaaatattttcatccttaaaaaggagaaagttaagcctggacaacatagtgagaccccatttgtacaaaa

SEQ ID NO: 33363 - DNA, 760 bp, Homo sapiens
attagctgggcctggttgtgggtgcctgtagtcccagctactcaggaggctgaggcaggagaatggcttgaacccaggaggcagagcttgcagtgagctgagatcacgccactgcactccagcctgggcgacagagcgagactccatcaaaaaaaataataataagtcaatgagtcactaggagtcactaggaggcaaagggtcaaagggtcatggaaaaggaaagtgggggtgtccagcacccccggccctgcccttttcctcctcggccaaggaacccagtgagtcacaaaattccactggggcgggctctgtgccaagctgagtgatggtgggaggctctggctctgctcccatcccctgctctgagtccctgcctcttatgcacagacaggcaggcagacaaggacaggcagatggccacaactcccacacagatacacagacacctcttagacagggaggcacaggcaggacacacacacagacatacaagccaacaagtgcacaaatgcaggcaaacaacacacgctggcagacagacagatccataatggacacagagacaacatccagacagatacacacacacagatgcacaggtatgtagcagatggacaggtaaatggatagacaagcagacaatcagtcagacaaggacaggcagatagccaaaatatccagactcacagatacacaggcacatagcagatagacaggtaaacacacttcggaaggccaaggcaggcggattgcttga

SEQ ID NO: 33364 - DNA, 1140 bp, Homo sapiens
agcagatgggcagctcctgggtgtgttagtgccagtgctggggcccccggatattatccctccacccccaccaccagggcaggacccccttggtgactcaccacccagtggtccatggcaggggtaacccagccacaggtgccggtgatcctcggctctctcccttcccccagggtctggccagctgaggatgccccttggtttgggggaggtttgcagggaggtcagtgggagggcaaagggagtccctgatgccttccccggggccacatgtgaggctcaggcctgggcctgggagggtttgtccaggtgtagtctcttttatcctctttgctggtagagacctctggcctgggcccaacctgttgaagagagggcgttgcacaatagggaggtaaaaggtgacggcagacctggcgggacagaagccccattgtttgggtcccaggccagcctgggcaaagaaaggtttatgcctgcggcaggaaggagggcctctgcagggggtgccagctggtagggcccttgcctttggacccttggagggggacaggtgccaagcaggatgcccttgggtttgctagagagggcagtgctcgtctaggggcccaagcaggcaagggaaggcagactcaacaagggatcaaagggtgcagaggccacccccacaccctgcccacctcccagggatgagccgcccagggcacctaaggatcatactcctggaattccaatcattcctaggagctggggtggctaggggggcggcacccaagcctagggggcacagtggagaggggtgtgcatggctatttttattaccgaggggtcaggagaggcttacagaattttgcctcacatgccctccccatcatttcccaaacttgtgtccataacccagagctcggctgcccatatccccccttctccaccagagcccctcagctccacagggatgcccactgtgaagtccttcccagtgtgaaaccgcaatccttcctgcttggggttcccctaagggaacggcttccgccacaggagacccagccaggacaatcgtgtgcttgtcgtttctccaccctgcaagcccatgagttgtggggtagttactccaggtacaagccaggcgcccctcccttc

SEQ ID NO: 33365 - DNA, 634 bp, Homo sapiens
tttttcttttcactgttttaaaataaaaccaaagtattgataactacagtgtcttggaacctctgggagtggaaagccaagccaaagttgggctggcagtggttagacagcagaaaggactgcctgaggtgttgctggttggcaggggtggggggactggaaatcctaacttccattcagccctaattgtcaatgccctgggcactgacccacttgggggaggggcatggatggcatggcctttggccctagagagaaacctgaaccgtgggaaccacctttcagacgctgagtcagctgccgcctgaagggggagccctgcactcctatcagctgaaccggtgccagtgcccagcaggcaaggggggcacagccctcagaagctggagcctctgtctctgtagatcagtctctccaagccatccaggcaaggggggcctctcctcggcctgctcttgggccaagctgagcctgcttcccaccccacctcctcagattcccagtgccagcacaataagccaggcctcagcctggctccaaggccatcagaacccacccgcccaacctcgtcaccagctccttgctgcctctcaaatgcccggtacacatgcagactgccagacattcgctcacg

SEQ ID NO: 33366 - DNA, 2236 bp, Homo sapiens
aagactgcactccctggaaggactgttacatcttttggcctgtgactaaactcagttgagcactgtgtaatataccaattgatcttgttttcccacatttcgtttatggatttcatctcctaaataactgtgtgatcgcagccctctgtgggcttcatttcctcctctgtaaaatgagggctctattttgaggaccctccgggcactggccttttagaagtctactaaaaatcaaaatgctaaagggcaacacatgttacacctcactatgtaccaaacgcttcgtaagcatcacctcctgactctccacaacagctttatgaggcagatcctattattcggccctattttacaggcggaaacttggactcagaaaggcaaaacagcttgctcaagggctcacaactatttaggtggtagagctaagatatgaacctacctctgacaccaaagtgcacttcaacaccctactatcacccaacaaagaattctggccacagaatcaccttgctgcggtattcctgactgaatcaagatacgctggggaagaggcatctgaagatagcccgggttctgacctcggccctgctgcctaactgcctggtgacttcaggtaagttctgtgtcttctcggggttcacttttctacacgcgaaatggcggtgttgaactaagtcagtggtcaaaccagctcacttgtggcgcctgctacaaccagagtttcctgatgactctgatgcagtgtggggtgggtccggaagcctggatttttatccgacgccccaaatgagatcggcggaaccagaactctaaacctccggtcatggctgatgcccccgcccaaggcccccatgagggccttgggaggctgtggagcccaggccagcgccagcctggacctgtggggtccaaggtccccaaatcctcgagtgagcgacgtcaagggggcgcgacacgacctcgcgaatgtgcggtccttcatgacgtgagcagggcgcgaccgacggtcccttttcggttctctacagcgcaaggcctcgctgaagcgaacccatcgtgggaagggcgcggagaaagcggggagaaagagcagggggacgtcgggcctgcgcctggcaccgccgctacctggattcgcgggcccctcacacactcacctgccggtaaggatagctggccatggtgattctgacgtcacactcaggcaaggggtggggctttccgctctcaaacccgcccctcgtctcggctttggggctgggcccgcatctgattggacgtccgcgcctgtcaatcttgggtgctgtcggccgacggaagtgacgatgggggcggtgggcggatgcctacccgagagaccaggggagctaagtgattgatggagcttccggaagtcttggcggctgtaccagcgctaatgttcctccttttcctgaggtggagtgggccgaagaggtggtcaggttgggaaatttagtgagaagcctgggtggggtgttgctgcggtagccatgttataacctggcaaatgggacgcatgatagtgacgtaattgctggagtagctcctgagtttccgcagatgagccgcgggaaaggagacgaggggcggtggccaggcggttgccctgacaacggggaaccgaccgactcttcccggtagggagaggcgatggcggaattactcctctaatgtcaaggtactgggtaccagttagtacccttgtagtgggatacagatctgtggtctttggagaaaaaaaccccagatcattagagttggaggaaaattgaattatctagtgcctctttcttcataaatggggaaactgaggtgcagagaggcagttgccttgccctagctcacagtgggtcgcctagaaccggggtcaatggatgtccagttctcagcagggaggtctaggtcggtccccatcgtaggtcaaatcctggtgaccgagtgatctcagcaccatgtacttgccactcagtggttccgtttctacacttatttgtgtgcttatttgatttctttgtcaagttctttcatgtgggctagggttttgtctgtttttgcttgtcattataactccagtacctagtatagcgactgacacgattattaaaataaatgaataaatgaatgttacgaactgttatccagtctagtccatctatctaaccaagtgcactttccaaaatcacagtgctgatcatgccacttgcccactacacag

SEQ ID NO: 33367 - DNA, 1330 bp, Homo sapiens
agctcttcaggggtaaggaaatgtcagaatcatgcacattgtgtgttatgtacaattatatgtacgtgtctgtacatgtgggagttgtaggtgcccatgccacgagggatgacatgtgcagctggcacacgtgttctcagcaataggaacgtcctacatccaaatcagacaagcaggccagacacaagtaggagccaacagaatgaatatttacctgaataaccaccttgtgaaacagcgagaagagactgagggtctgaggggaccacaagctcaagggtaccaccagggccttggagctccaggaagggcatattaatgggttagggctcccagagaaggagatagcttaactcaggtttccaaagccctgaaagaacaggtgggcagccatgggcctccctcgccctggggctgactgagcagaagtgttgggggaggtgctacaacaggaaagacagaggccagaatcaaaaaggccttctcatcaatgcagagggataggtgggagaagacggtgaagacagctcctagaagctggccttgcactctctggctagactggctggaagaaggaatcctggggccctggggcccggtgccaatgaccccactgcactctccctcccccaggtctggtcagaaagaccatcactgtcttcagcatcacagcagcaatgggtgactcaccccttggcaatgggcccagattccttacagatgttgaaattatctgccccatcccccccaggggacccagtgagggagaggagagcaaagctcacgcacacacaagcagaaacacatatgtgcacatacaaggggcaggcggccacactcaccctgggtccacaatccctttcacctcagcttcttggtttttctgcttttcctagctgggtttgggtcctaggagttctgttcctgcttggcgaagcagctgagctactgagcccagagggcacccagcaaggccaggcaagttgcccggtcaacttcccctggctttgggccctggaaagctgcaccctctgtctcatccagagtctgggcctcggggtgggccttttattagagattcagggccagccgtggaggaggagaagcacgtgagctagagggatggagtctccaccatgaaaaggatcagcaggacttggggttctctggggaggcggcgtccttctgcagggagagctcactgcctgttcctccccaccccactggtcctaccagcaatgtgtccacaggattggcttacgtattggggtgggaggttgttctcttacacacagagacacaggaatacatacgaatgcacaaagccagt

SEQ ID NO: 33368 - DNA, 1155 bp, Homo sapiens
ccccagaaggctgcggggtgggggggcggggaggggacaggggtggagggagcagggtagagaccctcctcccaagtgcgtggcacccatgatgtggctgccgcccaagcctcggtggtcagctttttccaattcctctgcctaacattcccagtcagtctgtccctaggtctgtctgtactgggaggaggagggtgggaaccccctccctcctccgtgctaaattaaccccctctgctctggcctgactcccagagaagtgagactgagggagtccccttattcctccttactccatgaggttggaagggctcaaatccctggcccctgctctggctttgcggttccaaatgtgctgtgtaaccatactccgttttctcatctggaagatgggatcgtgagagtatatgcctcatagacctttgctgtaagcaggaaatgggccaaaggctgtaagcgcttagcacacggtctggcacatgagaggagctcagtaaatatttgctgctattatcgttattactgtgatccctggcaggggacgggactggatttcaagcctttacaccagcactggggagggacctgctttatattcacggtccaaggacgcaagaggaattgagctgggctgaaagattggagctctgaggaggaaggagccggtaatgttccgagttctgcccagaggcagggccgttgaccaaggtggaatccccaccaagggtctcctcccgctgtagaccgaaagcaaatttattggcaccaaggctgaggatccacaaagtaggttcaagaggccatgagatgctgggctgaagagggagaaactgagcgtccccagttgaggggggctctgggggctctgtggaagcaacgcgcctagccctgtggcctcggctaacccggggtagggggaggttgtaggggcaggcctgggatttcccgcctccagacccagaggcgctgagtcagcggaaaccccaaccacgccacagaggcgccccactgtggtcccagtgaggagctggccccagatgtggctgtggcagtggtggggcctgggaagtgctgagctcagcaggcgggaagcggagggggtggggccttctgagcactctggcctgcggggtgggtgggcacaggccccgcctg

SEQ ID NO: 33369 - DNA, 588 bp, Homo sapiens
aacaaaggaaatgatgtttttataaagcccattacagggcaccaattttgggctacctaaaactaggatagctactagttataaaactgccaactcacgttacaacattatcttcaaccttcaggataaggactaaaacttctaaccttatgaacaaacagtaccacactacaaaaaaggaaatagcaaacaaaagggcagagcagaactaacagcttgagtaatcaccaccttgaggcaatggcagcctacactaatgttttgagtcaaagtgtgcatcctaaattggcatttaatctgctgctgatgacagcgttgcaacaccattctaagcaatgctcaggggaaaaggttttaagatcaaagtcaattcttgtccatacatcttctttcaagagtttaaagttcagatatctgctatctattaacttcccattcatctcagtccaaaattaaccatgtatagattcatcaaactctaaaattattttaattttgttgccaatttcagtgacctgaacttttgattacttgaaatagggagaaaaataaaacacccacaatccaggctggcatcagaatcagaca

SEQ ID NO: 33370 - DNA, 3953 bp, Homo sapiens
aagaatccctacttttacaacacaagaatgggaaaagtccatgataataattagtccattcattatgaaacttaaaaatgccaagatcagaataccagcaaacaacttctcaccatcttcaccaatacaatggtgtgctggcaagtgattctgaagccctgataatgtgtcattctgtatccttaatctccttttgcacactcagcaaggcataacttcactcacttccctctgaaactactctctcttacagagcatgacagcaagtaccatattccaactcagcagtgtaatgtagtttggcgactccggacagacaaacatttgctgaatgcctacagtgacactagaattgctagtcactgctaatttcttgacaaattccaggaaataataaaccagactacagttcaatttacctaacaataaaatactcttcacctgaaaaactagcagtactttacaaaagtttatgctcctgaacactctacaggccagagtgtaggattttgggcaacagacaaacttcttttcgttagctctcaggggccccagactaggataggatggcatcattgacaaatttgaaaatttactttgaagtcatgaaacgtgggagaaaaaaatgtatagaacaacaacaaaaaaacacatcacatcctttctgggggaaaaaaattaaaatcccagagccagaagatcatagtgccgctggaggagacttataccccctttcctcatacttgaacctgaagacccacggacaagatgctcccggaaagaactccccaacccaacacaccagggttcactatcgccacacacaaagaccaaggggaagggcctctaggatgcctgctcacacactggacacacgccggcacaccctaccacactcctgcctctgccacgcaccttctcaccgacacacaccatgttctccccccacactcacccgctctttaccacactctcaactctctcctcccccatttactcactcattctaccaccacccctcatgcccacacgctccccacacacccataccctcccctgccctcacccacattcccccaacatcgacactgcctcccgacgcgctcccactccccccacctcctcgcacggacactcagccctgtcccccactcacacgccctcccttcaccaactcactctcccccacgctcgcacagctctctcccttccacacacacgagcccgcccctcgctcacccaccctcgctcccccgccccggcccggcccggccctccttccggggacgtgtctccggcctgcactaatggctgcggcgcctcccgccctccccttccccgaggcccccggcgccggcgcgggggccgcccgggaggggcgcactcacgctggcgagctggggactgggcattgaagtccggcggtggcgggagcgaggaggcgcctctctcctcagtcacctcggcggcggcggcggcggcggtagcggtggcggcggcggcgacgactcccccccagcctcggcgcgcgacacccggcccggcccggcggcggcggcggcggcgcgtctccacgagtccgtcttgctgctgctgctgcggccgccgctgcgtctcctgctgccgccgctgcctccgctgccgccgctgccctgtggcgtcacctcgcgccgtgcccggccgccgctgccgctccagccgctcccggacagacgacggttacagcccggccgatcgcgccgccaccaccaccgctgcgcgcgcagccggaaccagctcccgccgccgcccctcagggggcgctgcggggcgcggcgcgcagggccaccggcccgccctccgcgttcgctgactggctggctggccggctcgcgggcagttgggcccgcccacctgccccgcggggcgctgacccactgccctgggcgcctcccccgctcctcctcctcgtggttcgttccgctccgcactcccggctacggaaggcgagtccatgtgatcggggagggaaggcagaacgtggcctggggagtcgctcgcccacgctgcgccccgcccatccgcacctgggctgggtcgagggcctgcagccgaggtgtgacctgcaaggtcgaagggttctttctcgctacttggccctaaggcctcgggtcagatcctgatgggacggggtggccgccacgtcctgggcttggggatttccaactcagaagtgggaacctggccagctcagttctcggctgcccttcctgaggccccaaatgaatggcgtgtgcatcttcgtcgaagatattaatacgccacccccagctctgcccacaagacacacacccaccctaagaactgtccctgacaagccaaaattcagactttcaggatgtaggatcttgggcaagtgattccaagtattatcaactattaaatggaaataataatcagctacctcatgggctctttcacgtatcgataacaacgtatgaaaacgcttgagaagggccaggcgcggtggctcatacctgtaatcccagtactttgggaggccgaggagggcagatcacaaggtcaggagttcgagaccagcctggccaacatagtgaaaccctgtgtctgctaaaaatacaaaaattagctgggcatggtggcgcccgcccggaaggagggccgtaatcccagctactcgggaggttgaggcaggagactcacttgaacccgggaggcggagtttgcagtgagccgagatcgtgccactgcactccaacctgggcgacagagtgagactccgtctcaaaaaaaaaaaagaaagaaaaagaaaacgcttgagttgagaaagtgagaaagaagagaccctgaatttcaagctttccgacttaatgtcacctttaacgacgcagattatcgtagagattctcaggtggaaaggtttttgcctcttgcatttggaagctagccagaaattctttgccagatcatgcgtcctgagttttggtttggaaaatgtggtcactagcgagctaggaggctggtttgggccacgaccagatggcaaagtgcggcattggaggctggcttgggagggagatgtctccccctgggaattgcgggttggggagggtctgttctttctgtccacccctgggaagtcttgcctgcccagaactggcgcctatataggaagaaatgaagatgctcccgtgggtgcttctcccccacctcgccaccacatccatgctcatccagccctgcggggagaagcagtgatctgtcgtcattagaccttccccacaaggtagacttggggcattgcttctgaccagaaggcttccattagcgcttagcagtaaaaagaaaggtcttatgactcagccgcatcaagccacagcacagagtccaggatgttcaccaccaggtggcccaggagggggtattctagggcaaggctggctagcagggctgtgtgggagttgagagaggccttgaggagcaggaggggctgcagatcagtagcaaggcccttaggtgaggagcacagactgggctcacttgcattctgtctgcctccagcaagcagtattttctacttcctggaaacatagactgatttgaaagaaagagctaccacctctgcaaaacttttgctgcgtctgtgagttattgattcttccgataaagttgcaaaacaccttgtgcaatactctaccatagtacttaacatggaattgtaattgcctgttttcagattctcccctgcttaaatggatctatttggggcagtctagcagattgtttgcttgtttgttttcatctagtagattgtctgaccaagtgaatgacccttccctccacctagctctccttctggccctgaaataaaataatgtaataacaacattaacaacataaggataagaatagtggctccaatagtagttacctttaccgcccccccccttttt

SEQ ID NO: 33371 - DNA, 2875 bp, Homo sapiens
cgaactcctgacctcaggtgatccacccgcctaagcctcccaaagtgctgggattacaggtgtgagccactgcgcccggtcttttgcaagctccgccttccgggttcaagcaattctcatgcttcagcctcccgagtagctgggactacaggcatgtgccaccacacccagctaattttttgtatttttagtagagacgggatttcaccatgttggccaggctgatctcgaactcctgacctcaggtgatccactcacctcaacctcctaaagtgctgggattacaggcatgagccaccacgcctggcccctatggtagttgcttttaagtatagaaatggaattcctgatcgagagcctcatagtcagatattattattgttattattatttttaaaaatttctctctttttttctttccaggctggtgtcaaactcctggcctcaagccatcctcccacctctgcctccctaagtgctggaattacagatgttagccactgtacccgacctattgttaatagtgttacatgtatagagaacctggcacttagttgacacaccaaaaactttacttcccagccttttcagaccctttcctcaggccaccccacctttgccttctcttcagctttcaaatgtgttggctacttcccttccaggccaaggaggtgctgctggaggtctgtgttccttccatagcatcccccttttcccctcagccaaatgaagcggagagggcttgggcctgacccagtggcctgcccacgtggctcccctggagaccgaggtaggggaaaaggcagagagtgcgtcagtcctgatgcaatcacaggcttagtgcttggctcacttcctcctctttgggtgtttacgggagcctggattccacaggaacccttggaagtgtgcactgacaacagagtagggggcagacagcatacaaaattatccctgcttcagggacagttcaggaagaaagtgatactgtgcctgcctgggcctcacatgccctgagctcagggacacgggaaagagataccaggtgtcaaatcagaggcaggggaggcaggcagggaggaaggagccaggacaggggacaaaccactagctgctgccagggccagcttccagacacagctcagggaggctgtgaataggccctttatctaagctgaagtgggggaaaggaatcacagaagggggtctcaggtgataaggagcctcagaacaagctcaggggatcttgtcccttccttctcagcagaaatcctagcaggggagaagcttctttttaaggattttgttttccagccatttgcccaggatcttcatttgggaggcccctcctcaatcccacaggccttactgggtcacctagagaggtcctaagaggtgcggtgttgcacagtggttaaggacatgggcttttggcagtcaagtcttagctcttccagtgactggctggataccccaggcaagtcatttcacctaactctcaactccctacgtcaaacaaggataataacaagtagtcaaccccagagataaagccgggaggcccatagaacattgcctggcaatggtaaaagcactcaataactgttagatattgttatttttattaagaataaaggagccgggcatggtggctcatgcctgtaatcccagcactttgggaggccgaggtgggcagatcgcctgaggtcaagagttcgagaccagcctgaccaacatggagaaaccctgtctctactaaaaatacaaaattagccaggtatggtggcacatgcctgtaatcccagctatttaggaggctgaggcaggagaatcgcttgaacccaggaggcagcgattgccgtgagccgagattgcgccattgtactccagcctgggcaacaagagcgaaactccatctcataaataaataaataaataaataaataaataaaggcttggagagccatttttttctctctctctctgaagctggggcccaattgtccttcttccttcaatatctaatgactgtttcccagctatcagaaaggaatccaacttcccctcccccagagctgtgaaactgagtagcaaagcttgctcaagctcctgagtcattcagcaaaaccagcccaagataatcagtggatcaaggaaactagatgcagagtggggaaaacccagccgcaaagctggggccttctcgcagggcagttccctctgctggcccctctggtgagctttcacttcaggttcacaaacaagacagcatcttcccaggccctcctgaacccagaataaggccttagctactcctgggtctctcaacagcagccaggcctttctctggaatcttgtttgacacaaactttttgcctttggacaaactctctccttccctccgtatcccaggcctcaggagagtcgaaaccctgactcccattctcactgtccactcatttctcagtccctgtcatttgacttctgcccagccactgaactgtctgtcatcacactcagtgatgatcttttcatcaccaaatccaaagactttttccaggcctttcctacttgcctcttctaaacagtcagcgctgtcgaccactttctttctttctttttttttttttctgagacggagtttcactcttgttgtccaggctggagtgtactggcgtgatctcggctcactgcaacatccgcctcccaggttcaagtgattctcctgcctcagcctcctgagtagctgggattacaggcgcatgtgccaccacacccggctaatttttgtatttttagtagagacagggtttcaccatgctggacaggctggtctcgaactcctgacctcaggtgatccacccacctcagcctc

SEQ ID NO: 33372 - DNA, 1992 bp, Homo sapiens
tggaaacaacttcttgtgttccctgatgtctgggacccttttctttgctagacttcagatctctgatctgaaccatccctcttagttcaagtactccaatcgccttcagtgtttccaccaagccgtccttcctcaatttctccctccaggtttcccttccccaactttccccctgcatcagactctccctcagccttcctttctccctgtgcagtctgtctcactcctgtcttcctccccaggcggtctcaattctctctccctcccctttccgtgaccctctcggcagtcttttacttccttacttcggtgaccgccccccaccccactccccacagcctccctccactgctcagccgttggagagggcgtggccccgcgagtaacaggtctcccgccccacactccgcgggcccgcgcgcagacaaagacattccacagctcccgccccctccacgccagaaaggggaggagacacgtgttccgctagcgccgagtcacgtggaaaacgaaacgaacggagcccactgcctcccgcgcatgcgcatcaagctctggcctggcgggagcggagggaaagccagagtcgggaggcgacttctcggacgccgcggcggtgcgcaggcgccgtggccggactggggactttgttctccgcggagaaacccaagggcggtgccggtggctggctgcgcacgcgcgccgcctcatttccggtgctctctctcgctgggtcgctcgggtcggcttcggtcgctaccgctcccgctctgccacccccgccaaccgccgctcgggcctccgtcgctgccgcgtcgctttctcgctccttggatcgcacatcctcccagatgcagcgccgggacgaccccgccgcgcgcatgagccggtcttcgggccgtagcggctccatggacccctccggtgcccacccctcggtgcgtcagacgccgtctcggcagccgccgctgcctcaccggtcccggggaggcggagggggatcccgcgggggcgcccgggcctcgcccgccacgcagccgccaccgctgctgccgccctcggccacgggtcccgacgcgacagtgggcgggccagcgccgaccccgctgctgcccccctcggccacagcctcggtcaagatggagccagagaacaagtacctgcccgaactcatggccgagaaggactcgctcgacccgtccttcactcacgccatgcagctgctgacggcaggtaagggggcctcccgtgtccctctgggtcgcccggccatcccgggcatgagtggccctggctttgttcctctcgcttcccgccccctcgggaccgaggcagtcgggagttccggtctcatcctcatttttgggagcctggattccacattcccacctcagcccggagtgcgtgggagaatttctaggctgcagtggaggcccgaaggcgactttgcgatcccctagcgctaatgtcttgatggatagtgctgagctccccgcccctttcccgactcttccctcctccctcctcttgcggctgccgggcgcgcagattcttccagaaatgaaccttcatttccccctttccctgaagggaaaccctttttgatcgcgggtggcgatgagcgcctcgaccgaggtgtaggaggtgaagacagccagagcggggagggaccgtgggaggaagggccgaggtgaggtggggtgaggctggaatgccctgtccagtgccttgctgtcgctggggccgagccggacttagcggtaaccgcagcttaagttgctgggaggaaggagcgatttatgtggatcggagcttgaggtttccgaatcagatttccgactaaggctgataaaataagaattgctactgagccattttacaccgtgtgttcactgtcgttgaaggagtgaagtaaccctagagacagtgaaatgggacgatagggactcccgcgtagttcacatgacgtttcccaacgagatggacagaaat

SEQ ID NO: 33373 - DNA, 1810 bp, Homo sapiens
caacagagactccatcccctcaaaaaacaaaataataaaataaatacaccctcctgcctgagggaccttgcactaactattccctctgcctgaaatgccccctttctccagaaatctgcaccactgactcactcatttccttcatgtgtttactcaagtcaactctgaagcctgctctgcctgccctatttaaaactgcaaccccatccccctttcctgtttttccttcacaccattcccatctaacatactacagaatttaccaattttgttcatgtctatctcctcccacttgactgtaagctctatgactattaatgaaatatctactaattcattcaattaattgaatactgctattaagtgccaagcactgtgctaagcaatggagctacaagatgactaaaactgcttgtaggtcttgtgagggaagaatcctaatgacaataaatgtagctcatttagtcaatgcttctccaaacatcgtgatggctaatactaaaacagactcagttctgcatgctctatttcatttaaccctcaccgaaacctacacggtgaccatcagcagcctcatcgtaaagcataaaaaaacaagattgcaaggctgggaaatggcagtcaggatctgaaccacggtgttgacaatgagaacggtgagtaacgtcaaatgtgagaaatatttaggacttaggctcacaaagactaaggcaaagatcggatgtgggggccgagggagggaggaaatgactcctggattttgactggggtggactaaagcgcagtgaggcctaagagaaggatgaagcgcaacgtggggctgggctggaggtgcctgcggaccggtcagggatatggtccacccctaggggagcggagaggcggctccgcaccctcctccggtcgccgccgccccggtccaggagatgctgagagaagacacgcacgggaagagcaggaggtgggttccgttcccctccctcttgagtctcttcaccagcagctgcaggaagggcgtgggggaccgagagacaaagagcgcgcaggcaccgcctccgtccgggcggcccctttaagaagcgcgcgccagcttccagcccgccttgtatgcaaatgtagcggcgcggcgggagcgcgcggctgatacccgggactgggctgcggcggttagtcctctcccggccgccgtcgcctccgacatattgcccgcaggagctgcggcggcgaagcggagagcaccggggggaggagatgggtgagcagagcggctcaggctcggcctggcaacgagcgggcgcacgggttaggatggccaggctgctaattgctgctccacgcggacaggagcccggtgacgggagggggaggggatgcgagcgcagacgggatcccgccccctcctgtcgttttgcggggtggggcctctgttgtgggggcgggacattggacggtgggcggggcttctaagacgaagccctgtgggggcttgggctttcgtgaggaccagctcgtcggggctagaaaggggggcgggacttaccagtgggcgtggcttcagcgctaagggtggagattctgggcagggggcgctagtgcagtcggcgtttctgggttggaggggttacactgggggcggtggagcggggagacttccgactgagggagcccattctggagtggggcttctgggctgagagggcttttattggcttgtgggcggggtttctgggctgacagttgtgtgtaggcggagcttctgggctgaggggctttatgtgggtgcagagcttctaaagagaggagagtgggt

SEQ ID NO: 33374 - DNA, 1998 bp, Homo sapiens
tggagtgcagtgttgtgatcttggctcactgcaacctctgcctcccaggttcaagctattcttctgcctcagcctcctgagtagctgggactacaggcacacgccaccacgcccggctaatttttgtatttttagtagagacagggtttcactatattggccaggctggtctcaaactcctgatctcgtgatctgcccacctcggcctcccaaagtgccgggattacaggtgtgagccactgcgctgggcctagtagttgctctatcctcatttgacagatgaggaaactaaagcacagagaaggtaagtgactagcccaatgtcacataaataagcaaaagagcccagatttgaattcaggtctcttggaccccagagcctgttctctggctcagagtggtgggcagtgggagcaaatttccttgtagaaaaccaactagtgggcacagggcctaagccttgtttgttgggtgtttgattcttggtttcaggctattctgaggtctccccaggactgtcctaacctctcagtcaggtagaatcagggaaggaaagggaatgaggccattatggggatcccaggcctcacccaccttctgctacccccagaacacacattactatgacaagcgctggtcctgtgaactcttcctgctggtgtccatcagcacctccgtgatcctcatgcagcacctgctgcctgccagctactgtgacctgctgcacaaggccgccgcccatctgggctgttggcagaaggtggacccagcgctgtgctccaacgtgctgcagcacccgtgagtcaccctaccctgctcaacccaatcccagcccttctggtcagcatctggagtcacttgtccactcgctgattaacttatttagttagcaaatagttattgagcgtgtcttgtatattattaggccaggtgtccagggtggggtatggtggggcctgacacacatgttccctatccttgggtaacttgcagtgtactgaagatgggaggggactgatggtaattcatggacttgttgactttctctttgctgactgtttattcactcattgccttacttgctcatgcttcactcttctcttacctgctcactcatccactgggtcattacgtcacctactctttcagcagacatttacttccacccaatccataccaggcctgtggatgtgccaggcaaaagagcttggactttgacttaggcccagcggagatagaggatttttagcagtggagggacccatgccaaggtgtgctttagagtcatcagcctggtgccaggatgtggtgctgtgctagttgatgctgaaccctggccagggaaggatgagatgggcaaaagagacctagctgcaagaaggcactgcacccagagcagacacagaagtcacactgctcaggggcccttttccaaagtacttttcaccccattatactaattttcctgcctgtatttccccattagactggaagctcctcaaggccaggatcacctcggaagcacatctgagtcttgggtccaggacaaggcttggcagagaggaggcccctaggacaggtttgcagaggtaggcccaccaaggagcagagatgcaagcaaggccatagaagctaagcctcctggtgttggccatgcatgtcagtcagggtccctttcaggctctgtcctggaggtccagaagagtgactgggcattgctgattgggccaaaaggaggcttggcttagccttgggctctgaggggtgggaggaatagaaagatagaacatagctgaacatgaggatatacctgtccatggctcaccgtggtccttcgcgtggcttcccagatgatgagctgggtcctgccagatgtttctgcctcatcttttaccatgccccaacccatcctctgctcttcagcaaagcaaagcaaatctcctcaggtcctcatatgctttatgcacttgtgccttcaggattttgcatgtgatgtgt

SEQ ID NO: 33375 - DNA, 425 bp, Homo sapiens
ttagagaagcaggcaaatgtaatagtgcacatgcagtagcacatagatttggaacatcctggtgtgtttcggggaaggtaaacagaatgtggatcttagagcaggaatgatttaaaaaaaaagtggaatgggaaaagtcaacagaggctggatcagggaggaccaatagtcctaggctagcaaaggtgtatgagcagggtcatgtgctagagtagaaacagctgcttgtaggtcactgcctcctatgggcataggatggagggttcaggctgaaaggagaggaaacatggacactcagccattctcatctattcagcccacgttccctgagcccttcttcgccataaggtatgcagacgagctcacaatgctatatgggagacacacacctcaacaaatatttttggtgcctctactgaggcaga

SEQ ID NO: 33376 - DNA, 1903 bp, Homo sapiens
aatacaaaaattagccaggcgtggtggcaggcgcctgtaatcccagctactcggggggccgaggcaggagaatcgcttgaactcgggaggcagagtgtgcagtgagccgagatcgcgccatcgcactccagcctggggggacaagagcgagactgcgtctcaaaaaaaaaaaaaaaaaaaaaaaaaaaaaaaggagggataagcttctgggagaaaaagttccgggtaaagaaatctcactataaaaaagaaatagtagcagaaacagctgggaactcctagacacacttaactttcttaggtatcccttccagtctcctcccaaccactcctttcctatttcatttccactccccacctttagtagctgcggtctctttaagtgcgcactttcggtgtaatgataggcgattgggccaataaagcgtttcgtcctggagttaactggtttgtccctttcgggctgccgtcctacagatccgccatattgtctactgaaagctgccgctgaagctgccgccgttgcctccgccgccaagagtgagcgagcggacccgcgatgggtgagtgaggaaaccacgcagtagggttcttgggctcagggagtgtcggggcctgggatttggcgagagcctgtctccggtctgcggaagatgtctgcatcccctctagctaggtctgaggggaaaagtcaggccgggagtgcccctcttgccagttttgggccgagctagggcccgtgctggaagcagtcctttggtgctggtttcggggacaccttggcacgcctggagccccccacatggtggcctcgggcaggagcccacgtgttcctgggaggtagaaaggggcctactctctgtcctgcgcccagactggggctgggggacgggctcccggcggcaggcctgggcggcgctaaggtagctttctcctgggttgtgtttggccaacgcgtgtcttgactagattcagtggctcccctgaactcagggaagtcctacctacgtagcgaggtggagtcctctagtgaggggacgtcaggcgagccagcactaggccggtaagcatgggcagccaggccgagggcagcttgcgccgctgaaggccgggagaacggaatcaaggcggaaatagtgtggttcggttgggctcagagtggcatcgcttgtgatggtagaacaccaaaggccaagtcctcttggccatctttaggttgaggactttaggtttctgggctggccctggtaaggagaaaaggagcgacctgttgatctttctgaggggactccggctggcaaggcctctgttcagagagaataccatggcgaagtctttggatttagagacagaaccaacagtggtaattcctctaaagcagtaaaaattgtgaaatttgctaagctctttctacgtacgggcattgttctgattgctttacatgtcttgttttacttaatttgtacaacctaaggaaatagatgctaccattgccattttacagatgtggaagctgagctttagagaggtaaagtaacttacccaaggtcatgcagtggctaagccagggtgaacactcccaagcctagtttgtaactgctgtttgttgttgttgttgatagagtcttgctctgtcgcccaggctggagtgcagtgacgcgatctcggctcactgcaacctcctgcctcccgggttcaagcgattctcctgcctcagcctcccgagtagctgggattacaggcacccaccaccacgcccggctgatttttgtgtgtttttggtagagacagggtttcgtcatgttggccaggctggtctcgaacccctgacctcaagtgattcgcctgcctcggcctcccaaagtgctgggattacaggtgtgagccactgcgtccagcctgt

SEQ ID NO: 33377 - DNA, 459 bp, Homo sapiens
tcacttgagccaaggaattcaaaaccagcctaggcaacatcacaagacctagtctctacaaaaaaaaaaaaaaaaaaaaaaaaattacttggacatgatggcatgggcctgtggtcccagctgtgtgggaggctgaggtaggaagattgcctcacaaggtctaggctgcagggagttgattgcactactgcattccagcctgtatgacagagcaaaaacctgtctcaaaaacaaaacaaaacaaaaaagcaaagtgctgaaagaaaaaccgtcaagcaagaattctatatctggccaggcagcatgggcgtggtggctcacccctgtaatcccagcactttggaggccgaggcaggcggatcacttgaggtcaggagttcgagaccagcctggcaaacgtggtgaaaccccgtctctactaaaaatacaaaaattagccaggtgcagcagccggcatct

SEQ ID NO: 33378 - DNA, 383 bp, Homo sapiens
ctctctaaagacgggaggggaaaggcttgtattttatgtgtgtgtgttttaaattcgtgggcaagaggcttgcttgtgttttgtgaggttttgttttggttttttaaattcatgggcaggaggcttactgttctgagccagctgataggcatggctgctcagtctgaaatgacctttcaatcattgcttaatctcactttcagtttgaagctgcctgggctctaacgaatattgcctctggaacctctcagcagaccaaaattgtcattgaagcaggggctgtccccatttttatagagctgcttaattcagactttgaggatgttcaggaacaggtaatgcttagatttggtgtgattctttatagtacctgtggtataata

SEQ ID NO: 33379 - DNA, 2987 bp, Homo sapiens
atgttctttatctcacctagaacacccttgttatatggaaatctatcaaggcctgatttatatggtgccttctcaagagatttccagaatgcttttctagaaataatcagggccttggtttcaggacatctagattccaacctttctgagcctcagttccatcattatactaaaaattgaatatctcttatccaacatgcttgggaccagaagtgtttccaatttgggattttctcaaattttaccggttgagcttccccaatctgaaaatctgaaatccaacatgcacggctctgaagtctttcactgagcctttgggggaaatatttaacatcctaacagccctaaaccaacgctcaattagcacaacagtttacaatcttctctacccacagcctgatgcgaggctctgggactagactatttagccaacagttcttgcaaaattaactgacttataagtaaatagtaatttcaacacctcactgctaatgctgtaacaactctgcagacctagggagcaagtacggtttgcagagcactgggaaggctctgaagtgacctttgaactgggcctcaaaaaattttgggtttggcaaaagtcaaatctcttaggcttcaaattccaggcacaaggattgttgggtttgatttcattatccagaagcaatggggatacagaattgtgatctcatgtgtagggaactgtgggggttttttctactttaaccccagtgagactttgtagagtgtggggtagagaaaaggctcatgaatatgcctgaagcctaactcagcacctttctgaggaactgactgccaaaatggtaatggagaggggaaaatatgacctactttcacaagttaccttgactgcctcagggaaacctgctgtggtagtgtttcttctgggtgaaagaccaggtaattacctgggtgctggtctcagacttaccagttttgaatccctgttttaaccactcactatcgatatgaccttggataagttacctaacctttctcttactgtccttttccgtaaaatggggataacagatagtagttatttctatgagtggttatgagaaccaagctattagatagcgggaaagcacacagtaagcgttcaaggaactgctattgttattaaaagcctcctttggaagaaggacattgaggcccagagagagaacagaacgtccagccacacagcaaatccgtgatgaagttgggactggagtatgggtctcctgagtctcagcccaggactctatccctcttcccgagtcctcggagttcccggatggagtcacatttgttcacggccagggaggaaggtttgatggaggcctgcaggaaacaacagccaggcgcaaggctttgggagttgaagcatagcttctgcgagatagaaacaaggttgacatgggcactcgtgcagaatgacgggctccttttggactcccaggactacagtcccttatgcaccttgggatctgcggctagcccctgcgtaaagagggacgcgtagtcttttccctgccccgccctgccggggcgcccgcctccgaggccgccctcgcttcgtccttcccagcaagctccgcgccggcgccggctattgattggctgaggcgggagcaggcggctggccggcagcagttactcggggtttccggtgcgaggccagaggtggggaagccatcggacgtcggcggtgaggtacgtgcagcggcggccggtgggcgagactatttgagagtgtgcgggccgggatgttctcggcctgtggggaaatcacgccaactccccgcgtgggccgggggctgtctggggatatgcgcatgcgcgggcgtgcctcgcggcttgagggcgcgcggggcgtgggtggctgcgcgcgcggggggcgcacgtggggcctgaggggcgggggcggtgccgggagtcccgccacgtcagtctccggccctgagccaatcccgcgcccggcctgccgcgagggggccggttgtgccgggaagtggctccagggagaagaggcctcttccctcacccgctgtgggagctgcgccccgaaagcctgccccggcacgtcgggctctcctgacccgccaagaccagagagccgttggcgccctccgcccgggcctgccggtccgtttattttaagaagctttgtgcgcctgctgtggggatttctgatccaggctgcgaagaatttcgaagtctggaaaatagcaactgtgtttgtttctaaaggatcttctcctgacccagcatcgctcatcacaatgaagaaccaagacaaaaagaacggggctgccaaacaatccaatccaaaaagcagcccaggacaaccggaagcaggacccgagggagcccaggagcggcccagccaggcggctcctgcagtagaagcagaaggtcccggcagcagccaggctcctcggaagccggagggtgtgtgccagctctgcgttgccagcgggcagggggaggagctgtggggtcggcctcgcttctggacttacaggccgaggccaggttgtccgggaggaggagatgtagaatgagaggacagtgctgggggccgcggtcccccctgcgctctggcgagttggcggagctgccccctctaagcacaggaacagagttctggagagaagctccgacgggattaagtcaggtggcagccaaacgaggcacccagtcaggaaatccaggtcccgttagaaacacctcagccaccagcagctaactgcccttcctgtttgaggcatttctagaatgatctgaatggcaagaaatggttttgtgggggggaaggagatggactagaagttgctccgtgccatccctgtgtgctgatgctttacatacttttatgatctaacaaatatgttcgggtggtagtgagaaatagttgtgtcattttacaagtaaacagacttaaagaagttaggcaacgattactataatttcttgat

SEQ ID NO: 33380 - DNA, 2081 bp, Homo sapiens
cccctccaggaagccttccccaagtcctccagctccagccttcctcctctgaactcctcccctgcagggccaatttgagccccaagccctccctctggaaaggctcacaaatgttgccttatgtaactgaaggaatcacaataaaatgtgaataatggcagccatagattgagcacttactatgttctaggcctaatgctaagtgctctacgtatctcacctaattcctgcaactgacctatcagatggttattattataatcgccatttacagatgatgaaactgaggctcaaggacaactgacttttccgagaatttctagtgagtaagtggtggggctgacccagacctgtttgactccaaagaccaaattcttggcggcaactccaccgagagaggggcctttcacagagacgcacctcagtattcaagaagagggtcttcatctcctgtagcaactgctgggcccaggtcggctcatgaacccgctgcaggccggcggaggcccgcttcagcagcggctgcgtgccaccccacagagcggccaccagcaccagagccaacacctgccctgaatgcagacgagtgagtcaccctgacccccaccccaaacggccgcccaccccgccctctcctggccttctagccccagctagccgcccccacttccctccttcgctctcttcgcctcggctgcgactggcggctaaggcaggcccagggaagctagggagatgaatccaggagtccggcctctggggttgtagcaggggtcggggttagagggtggatgtggagcaggaaatgaattcgaggcgagggtcgggaaatccatggaagggcggggccggctacctacccagagacgccgccatggcaacgccgctgtcttctacttccgggaacgaaggggcggagacccataatccggaagtgacctcgaaaccttttccggtcttactcacgttgcggccttcctcgcgtcacagccgggatggtgagtttcagagttaggggtattgcagtgggggtcctgggctgaggctggggcccaattccgagcactgacgttactgtcttgtccccacagaagccgatcctactgcagggccatgagcggtccattacgcagattaagtataaccgcgaaggagacctcctctttactgtggccaaggaccctgtgagtgttggctggagggggtccgggaggggcgggatccttctgccaggacgatgggtggacacgccagttttgccgttagcggggaaccaaagagcagcccattgtgagaagtagggagaggccatgccgggggtaggttggcgaaagtattctaccgggaaaggtggggaagaactctattggccgagtgcggtggctcacgcctgtaatcccagcactttgagaggccgaggtgggagggtcgcttgagcccaggagttggagaccagcctgagcaacgtagtaagacccatctctacacacaaaaaaattagcctgacatggtggcctcgcgcctgtggtctcagctacttcggagtctgaaacgagaggatcgcttgagcgcggtgagctgagatcgtgccactgcactccaagaaaagcaagagaccactgtggaaaggggataaagatgagggtcagcttgcccagagaacgggatgcgacctttagggataatctaatctttctaccaggataggtgcaggctgtgttattcagacacagggaacttaatgagggtgtctctagtctcattttaagtcaatcccatcctgctactcaatgccaaacaatccctcatgatactgccttttgaggcacctggccattttattttattttttcttgagacggagtctcgctctgtcgcctaggctggagtgcagtggcgcgatctcgactcactgcaacctctgcctcccaggttcaagcgattctcctgcctcaacctccctagtagctgggactacaggctcgtgccaccatgcccagctaattttttgtatctttagtagagatggggtttcaccatgttggacaggcttgtcttgaactcctgacctcaggtgatcc

SEQ ID NO: 33381 - DNA, 1528 bp, Homo sapiens
aagggactaagcttcgcggggcccggaaccgtcaggggcggggccagagaaaggtgatacccttcccagcgaaaaggcgggagaggggcgggaccagaatggggcaggagttggggcagcggctacgccgcgaattgaccgggccaaaaagaaaaggcccagaaaggacgcagccacccaggggcggagcgtggggagggcgcgctccctctgccgctgggagccgggtggtagctgagcaccgggaagcgacctccctgacggaagcgggcgctgcgcgccagggcatcatcgtccaccaagtatggcacgatcaccgcacgggggtatctggggcacaagctgaagtcctcgttcacctcgctcagccgccacgcgttggtctgcagcgcagggaggagagaggccaggtctagggcacccagggagtgccctgtccccgcgcctcttccaggcccggcgcttccaccttcccgggcccctacgaccgcgcccacttcgcgagctactctcttgcagtagagttcgggcgggaggaagtgccaggagtcgcccaatctcaggcccttgggacggtagaataaagggaaggaggtgatgactgattccagggaggacagcgtccggagaaggaagtcaggggctctggggagggtcggaattgtctcgcccgcgccctttccagcccctcagtcctgtagcttcagcttcggcctctccaagtaccccggaccaccctgcatccccctgccatttagctgcggctgcggagcctctttgaacagaagcacctttttattcccctctacgcgagacagggagagcttaaagggctcgggagctccctcggcacacctcgatggagcgggcgatgcccagcgtcgcttccgcgccctctatttccagctgcagcactcgcaggtctttacagcacagggtgatggtgcccgagtcactcgcaaccctggggagggacgttcctttcccaggagaggggcaacgagtttcccggattgggcttacgcaggagggcgccagctctgactgcgctggccgtgccccctactccgccaagccgcgcgctccccaaccccggggaccctcccccaccccgccacgtctcactgcttctcgaaggagtcgacgctacgcaacagcagcagccacaggtccggagaggacgcgggccctggcgacaggagcaggtggtggacggtgactcacaccgtgccgcgaagcgggggcgcctccgggccccgtagaaactctgcttgggctcagcccgtatggatcagctccgagaactccattctgccagtgagagacccggggcccagcagaaggccagactctgagagcgtcaggaggggcaggctggagctccgaaagggataggaactgcctgggcagctggcgacgccgtctggacagctgttaaggaggcccctcagaggaaaggatcacagtttcacaggaatttcccctcatattgccaatatttcttagcgaggtccctggccagagactg

SEQ ID NO: 33382 - DNA, 1942 bp, Homo sapiens
ctccagcctgggcaactagagcgaaactcttgtctcaaaaaaaaaaaaaaaaaaaaaaacagggaaagaaaagaaaggaaacctgccctcctatcataggataatcccatttcctcctgtctaaagagacgcctacttagtcatcctgggtgactgcatcagggaggtagattttggagtctgaaaggctgggttctgtcactttgttacagtgcctctggtgcaaagaaagcattttaaaaaccctgtacaattaaaaaattgaatttaattactttgtgtaactttgaataattcacagaagtctgaacttctttatcctgtcctgtaaaatggaggtaaaaagcccttggccgagagctgttttgaggaaaaactgaaataacattggtaaagtgtcgcacagtacttggcacacagcagcccctcgacaaacattagctttctttccctttcttgtcggtttcttcctctccaaacccgcgtgttgcttttctttttaattatttttctgtagccctcctttgcggccacaaactcgctttctaacccaggttcagcccttttattggctgagtgaccttgtgcaagtcacttttcccctgtaggcctcggtttattctccgtaaaatcagaaagttggcctccgatctccaagcacgcttttcacgacgaagtgggactgttaagtttacagagctgctttcctcccccgggactgatggtacggtccccgggcggctccccacccatctgtcgcagaccttggtacaggcccagggggccctcggcggcctctccgggctgcccttgccccctgccgagttccgggcccgtgtctgcgcaagctgattggctggagcggtgcccgggctgcgcggctataggtgagcccaggaggggacgggcggggcgggccggaggcccgccccctcccccctgggtcggacgctgagcggagccgcgggcgggagggcggacggaccgactgacggtagggacgggaggcgagcaagatggcgcagacgcagggcacccggaggaaagtctgttactactacgacggtgagcaccgtcctcgcggcgggggcggggccaggccgggccggaccgggaacctggaggctgaggctggagcgccgatgggaggctgcgggaggctgaggcgctggggagaggctcggagaggaggctgcgagggggaagtcgaggctgagggaggaggctgcgaggaagggagatcgaggctgagaccaagaggggatcgcgtgggggaagcgtgaggtaatcttgatgggaagattctgaggaagtctgatgtggagagtttgagtgggactcctagaggggagggtgcgtcggagcggggaggctgaatctgatggagacggctgcaaggatacattttcttgccgagaacccaaagctcttccctgccccgtcccttcctcatcttttctgggggaagagtcctgcacgactggttgcccgcctcccctcccccagcctctgagcggggcctgcggttgctactgcgacgtggggcgccaggggttgcaaggagaaggatgcaacctgttaaaacagacttctcacttaatctctcaagcaggttactgtgttcgaggaagtgttgaggggctggggccgtggggttgatcgggtcacccttcccagtgaccgaagttctctccgtgtcagagctcagagtgttaggggagcacagagaagaggcaccgaactccacctgaggagtcagcgaaggaggggacatcttagttaggacctgaagaacaggagttcttagccaggcacagggaaggcaaagataacagcaagtttcagaggcaagagagaggacaggacctttgaaaaacaggcatttggccgggcgtggtggctcacgcctgtaatcccagcactttgggaggccgaggctggt

SEQ ID NO: 33383 - DNA, 2128 bp, Homo sapiens
ggtgtggtggtgggtgcctgtagtcccagctacttgggaggctgaggcaggagaatggtgtgaacccaggaggcggagcttgcagtgagctgacattgcgccactgcactccaggctgggcaacagagcaagactctgtctcaaaaaaaaaaaaataataataataatataatgaacatccatgtgtgcccaatacccagcctgagaaagaaaacattatcaatacagttgatgcccccttgggcatctttccttgatcacataccctttctctcccactcccccagccccccaccccattaccagcactgccaaggtataagcactatcctgaggttagtgtttaatcttcccatctctttgcaatgagcatttgactgccttctctgcctacgtctgcttccacctctcacccagtattgcttccctttagtctaaagctagtgtgagaatgagaaaagcgtttatagcagaaagagagaaaacccatggaaaagtcttccctaccctcacagattagctcacatgagtatctgctcttccatttgccccctttccatctctaatcacatagcttattgactaggaataaaagggctggtcatttgagctacatgttggtttggtgcctgaagaaaaatatttttttttttctcacgtccaaaacacccattccttcccatggaggctccatatcccaaataagagtataaacaaagctttggaaacgcaggcaggccaaactctgtgcaggaggaagtggccagagagggaaatcagttgccaatggataaacagccggggcccagggaccaaagttcttatttacacagcctcccagtgtttacccaggaagtgaggaagagacccacccgctgcacactccctcatgcagccatgcttcttcctcagagcaccggatcttggcaccctccaagtttagtgcagaaccagagctggtaactcttgtggttattgtagatcttgagcttcaactgtgtcttgagattttaccagcacaatccaaactgagctcttctgctctcaccccagggctgctccttcctctacttttggaaatcttgataacagtgggtacagtagaaggctgggcaagagaataagtatgcagccccacacctcctgcctctgacttcctgtagctcattgatgtctcagcagttactttttttttttttttctcctgagatggagtctcgccctgtcacccaggctggaatgcaggggtgcaatcttggctcactgcaacctccacgttttgggttcaagtgattctcctgcctcagcctcctgagtagctgggattacaggcacatgcctggctaatttttgtatttttagtagagacggggtttctccatgttggccaggctagtcttgaactcgtgacctcaagtgatccacctgccttggcctcccaaagtgctgggattacaggtgtgagccaccgcgcccggccagtagttaccttttctgtaagaggagatttggagctataaagttcctctaggtctgtgagtctacagcctccaggtgtgctttccttcctgttttcatttcatttgccttattgtttgcatatgtttccacattatgtactacttggtacttttaccccattaggcccgaaataactttactccacttgtcactgtgaatgtagcagtaagacactgggctacgggagtcaagacaccgggaccctgattctggttctgctactgcctggttttataaccttgggcaaatcacttaacttctcggtatctgtttgttcctccgcacagtggggttgatatctggcttgtccagctcatagagttgttgtgaggatcaaatgaggttgtatatgtgaaaggacttggaaaagggccgggatatattttcacaggcttttaagacagacaggctggctgggcacggtggcttatgcctgtaatcccagcactttgggaggccgaggcgggcggatcacagggtcaggagtttgagaccagcctggccaacatggtgaaaccccgtctctactaagaatgcggaaatcagccaggtgtggtggcaggtacctgtaatcccagctactcgggaggctgaggcaggagaatgg

SEQ ID NO: 33384 - DNA, 1794 bp, Homo sapiens
gtccccgactccctgcactgggcacagagctggtattatgtttgaggagtcctatttggggctcctctacttttttggggatgtctcctgacaaacagaaatttcaacatagtcaaatttgtcaatctttttaaaagtatgtttgtgtcagcccaagaagagcggggaaaaataaccctgcaaagaccacgccctgcactcggggcccctctgactgcggctcatctgcacagggtcctggagcctcgcaggccgcgactgcagcaggccaacctcgtgctcgggcctcgcccctcccccacgcctctagctaggccccgcccaagacctgcccctccgcgagcccccgcccacctacagcgccccctgtggccacgcccctcaccggctctcacgggcgcaagggaactagatgtcgcttccttttgcccagaaaatagtagttaatattctgccaccggtgcttccacctggagggaagggaaatcgggaagacgggattggggcaagtgtcccttccctccgggtctgcgcccactccgcctagccccgccccttccttccgctcccggtcgccctcagaccccgcccttcccacccagttccgccccctcccctcgcccccaggcccggatcctcggctctggatccgccccttccttagacctcgccccttcgcataggccccggtcaccccgtctactccccgggccctcgccccgcccctcccggcgcactcacgtgagtctcgggcgcgcgccgtagcagctgggccagcgcgccgagggtacgtcggccaggccggtggccgggggcagcagtaacaggttgcgtgcgggccagtgccaggcggcacccggagggtggcggcgctgcgggctcagccagtagtcgcccaggctgcggcgggcggcgggcgccggcaagaccgggccccggctgccccagaaacacaactcctggtccaggcggtgcggggccgtggcctggggccgcctgcgggggagatgggacagcggtcaccccaggagaacacgacaggcggggaggaggaagttgcctccgatcggacgaggcagggcacgggccggggtcactcctggtcgatttagagggacgtggaaagggactggaggcccccactggcgccttcccaaggacctgagtgcctcctcccccagctgccagaccagggcgctttatccagctggcgccctccctcgggccccctcactgggacagaagaaaattcaccacgaagtgagcagtctcggtgaatagcatggtgtccagccggtctggcccgacttcggcctctctttaatacctgcctgggcgaggagggggaggcctgaaaacccatattccccccgggcccggctgtttttagcagaaggccaggaggcgtcagctggcagaggggttgggggcagagctggtctctctcgtgaggtctagtctagtctgcccccactagccgcttcagtgggagggggctggtcaccagatctccaggttccccagagacactcctccccagggtcaaggacagaagtgcaaggacaaacagaggcagcaggagggggccagggacaggaaggtcagctgcccattggagaaacccttcctcatcccacccagggcttccagcccctgctcacacactttttttttgagacaggatctcactttgtcatccaggctggagtgcagtggggcgatcatagctcactgcagcctcgacctcctaggctctaacgatcctcctgcctcagccccccaagtaactgggac

SEQ ID NO: 33385 - DNA, 1122 bp, Homo sapiens
agggcagcgacgaagcggcctggggaaattgacgcgcgacaggggccgctgaggcaggggcttggcccatcctgtggggcgcacccagggagtgcacctggggtccccgggggtccggacgtggatgcggggtcctgactgctgggggcgccaagtgggacggagggcggggccgcgggacgggcggaggcgggggtggggcgcgggccttacctgaccgggttgtgctccgtcgctaccgcctccgggctgtcctgggactcgggggcggcggcaaggccacgggagtctccggcctcaatggggaatctccgaccctgcgggggctcctgggcgctcatgtccaagccccggggcgctctgcgcggggagtggcggtcaggcctctcccgggtcgccgggcgccgccgcctcgcgcccgccccctgggccgtcgctcacctcccggcggttgagaccggtcccaggctagaagcagctgccggagccctggccgcgggagaacgctccggtccaggcggagccgggcaggtctctgtggcgtgcccgggcccgggcgtcgaggagggcagcattgtgacccgggccgcggcgcgctgacctcacagagcacgttcctcccactggagaacccccaacggtgccccctgccgcccctggcactcagcgcgggccagaatcggggactggaggcctctggccatggcgcctggagacggggtcgcgcagaccccggacacccgaggggggcgcagcaggccagggcaacccgccgcgaggcggcgtccacgccgaggagccgcgcattcccggtccacacagacgcggcggagcgccctcccaggcgggactacaactcaatgcctggcacgggggcgggctcggcggtgacttaatccgggctgagtttggtggtggtagtgagggcaggtaggggcactgcccattttggccaagggtcacacagcatctacatcacaattgcaccggagtttaaaaatgtctggccctgtccctccccaccacccgccgctgtgtccagacagagaatgttctaacgctgggggcggctgcggatgaagtccttggggagaaaaggagcaggccaagggcgatggtgga

SEQ ID NO: 33386 - DNA, 2611 bp, Homo sapiens
gaggacttatttaggtgaggtcagaagcttcctggagttggccctgaagcaggactcatcccaattgcttgaggtaaatagtaatcaacttttcccacaattcagttgggctgattttgacaaataagcatgaaatgaaacaggaatacacattggcaaattacccactggcacagccaaatatcactcatcccacagagattgttcagcaagaaggccttccactctctggtgattaatctctctctctctactgcccgttgcatagcccctacttagaactcatcaggcaccagtgtgtatggctcatgctcatctctggcttgggttcttgcttttcatcctgtctaggcagggttgcccttgatgaggttccttctccacaggggccttccctggtgagttactgactaaccagaacagacaaggtgcccctgtactttcctttcacagaacttaccacaacggtaactaaacaactatttgtttggctactcggttaatggctgtctctccactagactgtgagctttgtaaggcccaggattacatctgtttggctgaagtctgtatcctcaagacctatcagagtgctggttgtcgcatatactctaatatttgaatgactatacgagtaagtttttttactgctagaatcttttccttcaagacctgtatcaaatgctctctctttcacgaagaaactgaatttcctgagctggaataaattgctccttcctatggattcctacaaaacgttcgttaactccagcctttaaaaccatctttatttcactgtggctagtatcacactggtttgcgtcgaggtctgtcttcccgtggaccggtagaggctaaaagaaaggcccaggtcagcctcatccttgagacttagcgcccgcaaaagttgggcggggctggttggaccaggttgcattgaggcggcgcagggccctgctgagggaagaagggcacgggcccggcttaccttctctttgactgcttggtagctctgctgcagccagctccgccaccatcccacgtcctccctgtggaagacagacacatctggcagcaccgcggtgcgattcctgcccgcccaaggatccggtttgttccccgctcagatgtaccctgcgggccgaggcttcgcagaccgcttgcccaccccctcacaatgcgactccactctgccctttcagatcagtccacgcccccgctgatctcacgttccccaccgggactctcgcccagcaccccaaccctgggagaattcaggccccaacgcctaggagcaaaacgacaagctcacccttccgccatcttgcctgcatgacatcaccactatttactgacctttgacttccgacacggcaccgccccctcaaggaccgcccccgaggcgctcggcccaatcctcgcgccggcaccgccctcagcccaatcccctccctgcgccatcattaggtcccgcctccctgaactctatccagtctctgtcccgagttcgccctcaaactccgcccctgaactctcagttcaatcgtcattcagtcctgtcctcaggctccaccaagcttgactctttgtcactgtccgcaaacgtcgggtacggtggcctctatggacgatgatcagccgacaagctggactgcggagagctgggagcagaggggaggaggagagatagctcgaacgtcaggatcccagagcgcagggttaggaccgcccccctttgtgaaaccagctgcgtagaggctgctttgtgtctctttgggctaattcaataagcccatattgcggggctgtggcccagagtttggaggaatgtgaataattcagaggcgacttagatgcagcctttggagggcttacgggttaatgggagacacacacattcagtaatctcaactttcggtggcccagctcagaacaacgccaggtggaggtggtctggagaaatccggagaccgcctggattgagttctactgcgattggaagggagattccacagcccacatactttggactttaattaaggtcagcccctccacgtgtgcggtagatcccatcgcctcttgtttgcttaaggacatagatctagtaatccccccttcatctcttttccctctgatgactgcatttatccttgtcatcatccgtactgctgtttctcccatctcaaaggcaaacaaaaaccagccctctctatatccctcaccgtttccctactcccctttacagcaaaagcgttgcctactcacagtctgcaactcccctctcctcccattctctcttgaactcactgcagttaggtttttgcctctcagacaatcctttgaaataactttcttttatttatttaattttatttaattttatttattttatatttatttgtagctctgctgcagccagctccgccaccatcccacgtcctccctgtggaagacggacacatctattttatttatttatttatttttggtcctccctgtggaagacggaaacatctattttatttatttatttattttgagtcagagtcttgctctgttgcccgggctggagtgtagtggtgcaatctcagctcgctgcaacctctgcctc

SEQ ID NO: 33387 - DNA, 2583 bp, Homo sapiens
ttttttttttttttggcctgtctgttcagtggcaggagatactcaaaaaggttgagtggcaatttcaacttccaatttgttgaaaatttgtgtcacgtgatggaggcatttctctcttagacactaaaagcttttaacatacctcccctccctacagtcatagagtcaagaagcaaataacttatgagtgagtcaaaaagtttcactgtgggctgggctcagtggctcacacctgtaatcgcagcactttgggaggctgaggcagatggatcgcttgaggccaggagtttgagactagcctgggcaacatggcaaaaccttgtctctaaaaaataccaaaaaaaagttagccaggcatagtggctcacacctgtggtgctagctgaggcaggagaatcagttgagcccgggaagtgaaggttgcagtgagccaagattgcaccactgcactctaccctgggtgacagagggagaccctgtctccaaaaaaaaaaaaaagtctaagtgtgaaagaaaccactcctacacacagctcttggtttctgaactatgtatctggctaaggaagaaatggtacactggttcagagcatatactgcatccttttaacagtgctgtatctcacagggtgctatctaacagctggtagattacctggaccttcagtaggttttgccaccactctagaaggctggctgatggagctcaggttagtgaatcctctggtgtctgctcactctcacttcttttcttgtgaagtgaatttcatggtcagaaacaatattgtgtgggacactaagactgtgtattaagtccatagatggaggttctgagagaagaatgagaagcagggaaaggaaattcaaacccagagtaagcactgtcaccggtgagacaaattgttccttcttcacaagggacatggtcctatgtaattgatctgccaccagatagttggtttgttccctcaaggtatgacatcacatcaagagtccaggactgtttgctcctgtaggcaaacagggcatcagtaggtcagtagtggtggttgccaggacggccttggacagggatgtccctgttcttgggcctatgcataatttccactcctgtcactatcgtcctttgtccatgaacccattgaacaagaactggactggctggtggaaaaggccatctagttaatatccacagaacagatctgctgattagtgaaagcttcctgcacagcgggggcccatggtgagcaatcatttggcacacctgctgtctcatgatctgtgaccattccaggaaatccacctttcccaaacctctttgtcattaacttgcaatcttttaagatgctgagctactcacactatttgtcattggctcgtgaactggtatagatcctgacctcaggccatttttcctaccaggcaaagtggacaatgaaatgcactgcttacagttctgcctattgaggaatttccttctccagcatcctttggggccatataaccattttcataaaactgtttcttgctctttcagaatctgccatctgaaaaccaggctctcatataattttttctttacagtggagccttgtcacaatcatttacatagtcatgaatattctaatggctgggtctatttcagcgggtctatccttgtttctctctcccaaactttttttgttgttgttgagacaggatctcactctgttgcccaggctggagtgcagaggtgtcatctctgctcactgcaacctccacctcccaggttcaagtgatttttgtgctcccacatcctgagtagctggaattacaggcgtgaccaccaagcctggctaatttttgtgttttttggtagacacaaaggtttcgccatgttggccaggctggtctagaattcctgacctcaagtgatctgcctgcctcggcctcccaaaatgctgggattacaggcatgagccaccgtgcccatcctctcctaaactttttattctctcatcttgcttccttcagtaaccatggcctgtgattcaatgttgattctgatttcaagacatctctgcctcgagacagtggaaaaccacatgccttgctccaactgccaccaagaagagttcctttctctgctatccttcagagtgaccttgctcaggccatgacagtccatttctggctcataccagcacattgtacagagccatgcataacagttcacactcgtttcctcccatgtcgcctgggttggagtctctggagcagtgtgcaggaatgggtactgggagtaagaacagcctgctcattgcaccttcagggctgtttaggccacattctctatgggccactttcacttgagaattactgagtattggcgatcagaaaacacccaattcatgatgggcagctcaggttgcaacgtcacctagtgctctatggtcaagcattcagcctactagaactattaggaaaatcctagtagctactactagggcaaggatgtcatcgaagagtacttcaaatgcgataatgaacaaataaaactttggttcatgttctttaaaaaaaaaaaagtagctactagctacga

SEQ ID NO: 33388 - DNA, 1194 bp, Homo sapiens
ccgtcaaaaaaaaaaaaaaaaaaaaaaaaggaaggaaggaacggaagggaggaagggagagaaaaagatcctgaataggcaaatccgtggagacaaaaagtccagtggcggttggtggaggctgagggaaggagggaatggggaatgacttgagtgctcatggtgccggtgcctttggggcgatgagaaagttttggaactagatagtactgatggttgcacgccatgaatatctttaatgtccctaagttgcatttttaaatgatattgttatgtattttacaattttaaaataatctaattattgttcttgggacgcccgtaggtccccttggcaggaggggtggagggggaatgattgccgctgcgcgcagcgcgggcagagggcgagagggcgagagggcgggagggcgtcggggctgccccggacctgcaaccagcctggtagcgggcggcggcggcggcggcgttgggatgcgggccacgggcgtgcggccctcagccgtctcccggccgagagcgaggccggaggcgccaagccgagcgggcgccatttgcagcctggggcgcagcagctgcagcgctgtctccgaggggttgggaacggccaaggaggaggcgcgggcggcggcggtgggcgttggcgggcaccggctcccggccgtccctccccgcgcccggccggccggcctctcctgcgcgcccggaaggggctgcggaacaatggccgcgccgctgtcgccgcccggcccggcccggggaaagccgggaaggcgcgcggagcctcctggcggcggcggcggcggcggcgggaaggcggcggggacggcgtcgggcgtgtctggagccgtccggcgcggcggactccggggaggcttggtctgcgccgcgcagagacagcagccgccgggggcggggcgcgagccagcgaatttgcagaacttccctcaattgggctttgtctgtctcatctcgactggattcaggttctttatcctagacaggactgtcacagaagggctgctgcggtcttctcaacgcagcacgtctagtggcacacaatttcagcttgtcaatttgtctcatcactgatgatgctcacttttatctttaagatgctgtctgtaggcttctccgctgtaaggtcacactcacttggcagttataataacagtattttgtagggtggtactt

SEQ ID NO: 33389 - DNA, 986 bp, Homo sapiens
accaaatccccagatcctagaaatccagcccttctgccctccggaggcgcctttcccaacgtaaagtacaattttaaatttcagctcctgactaaaatcatgatccgcagtcaactgctagagaatctgggcaccccggtgtctctggagcgtgcagcgagtgtgggcaagggcagggggagtgggcgaagctgctggttggtgcctgaaatctgtgcgttgcccctttaattgtgtccccagccctcgggcgtttctgtccaacgcccacgtcagcaaataccttttgtttctctcacgttggggctacttgttttagggcgcaaaggaacggcctcgaaagggggtccttccccagccgagaaccaggaatcttccctcggcccgcgcgcgcgaccggccggtgcgccgcggcccgcggtaagtggctgcacgcggcgccggcggagggcgggcgggcgtcggggctgcccgggacccgccgcgagcctggccgcgggctctgacggcccgggcggcggcagtgctgggatgcgggccccgggcgcgcctcccccagacgtccccgggccgggagcgcggcgggaggcgcccgggaggggctgcgggacaatggccgcgccgtcgccgcccgcgcccgcctcgccgcccggcccggcccggggaaaggcgggaaggcgcgcggagcctcctggaggcggcggcgggaaggcggcggggacggcgccgggcgtgtctggagccgtcgggcgccgcggactctggaggggctcgggctgcgcggagcaaagacgggcggccgccgcgggggcgcgcggggagggcagggcagggccggggccggagtctctgcgggcgcggccaggggcgctgccggggaacctggctcccagggcagtagcccgagtttctcggtgcagcctccatccttggttttatgtcaagatgcgacatctgggcttagaaccgagggcgaactcaccgcg

SEQ ID NO: 33390 - DNA, 2617 bp, Homo sapiens
gcaatggggcgatctcggctcaccgcaacctccgcctcccgggttcaagcgattctcctgcctcagtctcccgagtagctgggattacagacatgctccaccacgcccagctaattttgtatttttagtagagacggggtttttccatgttggtcaggctgatctcgaacttccgacctcaggtgatccgcccgcctcggcctcccaaagtgctgggatcacaggcctcagccaccgagcccggcctaaaataatcatttttaaaaatcacaatcataaatggcaaaaccaggttttttgctaatatgatcgaggtgaaacatcaagttagaaatcccctaattagctttccgagtcctctaacctcgcacactctaatctcaccgttgggaaatacatgggggtaacaaccctgcaaacgcctgaaaatatggttatctttagaatttacgaagataaatgtgattaggcacatgtggaagaagttcaagagactgtaaatgagggaggccaggtttcgcgactattaaaccaggtggctttttccttcagcatccccaggagaagtacgaacgcgactacaacagccggcacaaatgggatcatgcctgaagtacccatggggcacagtagaaagagcagcaggaagccgcgggtaaggagaggggatgcctgtgtgcttacatgtaaagagagaagtaagccacctactcacactcgtacttcctattgactggcggatacttggccttgatcgccttctgttcttcagtcaaattgtaatctctaacatcttcctcttcctgcgccatgactgcaggattagacactctacttccgcccttcatccaccggacttcggcccggagttactacttccgctctagactccgccccttggcgcacacccttaaaggaccacactcctttctcggagttggctgttgacctactttagtccctaccctgccgcttggatcgcatatttaaaaagccaaaaccccatcttctgcgattccttcattactagttctttccaaagactaaggaaaaacgttgaagggcaccttgaatgaaacccgtctgggtctgactggcgaggttctttcccccgcttcacccccaaaattgataactagacccgaaggcattctagatttttcatctcagtactctgaaagggtcgtaagcttaatagccttcaagaaaatggctgccctcttgccgcgggagtgtgcggaccaaacctctctcacgtgaccctgaccgggcgcagtcccgtcaacgccggcgcgcgcaatcgctggaagtcggctcggggaggcgtggggggaggggcggagcgcgcgcctcggtccccgcggaaagctactccgcgcgtctggattggtcgcgaacgcggcttccccgcccatcccgccattaggagcgctcccattggctgatgttggcgcgaaggtgcgcgagtcagccctcgcgctgggggcgcaggaaacaatagaggccgcgcgcacagagcgagctcttgcagcctccccgcccctcccgcaacgctcgaccccaggattcccccggctcgcctgcccgccatggccgacaaggaaggtgagggtgccggggccgacccaggagggcagtgggtgcctgggctgagccgcggcctcgacatggcctaacagtgagggcaggcccgagtttgccgagtgcagtccccggtactgaaggcgtgaagagggaactccccgcggggcgtgctaacggctcgccagttccctgggaccgatttcggtcgcagctggcgaagccagcggtggggcccccggccagtgtttgtttctcttcctgcctccgatatcggtttctcggcctctgtcccgagcgtggggacaccgcttcctacccacaaggctcggagctcgggcctcctcgtcgggcttgtgagtttcggcgcgcacgagcgtgctccgaaggcctggctggccccttggcctggaacgggtaacggagtgtttggcggggatggcccgaggagtttcggcgccgcgaaagtggagagtgtggatgcctctgccgtggggatttagacaaatcacctccatttcatggttaggctgtaggagtcatgcaggtggctttgcagaggattactcggtttccgtttgtttgctaacttaaatttgtttttaaaaattttagcagccttcgacgacgcagtggaagaacgagtgatcaacgaggaatacaaaatatggaaaaagaacaccccttttctttatgatttggtgatgacccatgctctggagtggcccagcctaactgcccagtggcttccagatgtaaccaggtgacatgactctcccgaacgttattttgatgtattttcagtgtagatttctcatattgattttcttttttccgctcttcagtcacccggagaaggcatgtgatcaaaacctcttggtgacattttttctaggccacaaagtaaggcaaaataacaaaatgattttgtaacttacctgacaagagaaaacatattggcgtttttttctcaatactgaattaaatagctgtagctgatgataatacctgtaataatagtggctgtaccaaataa

SEQ ID NO: 33391 - DNA, 588 bp, Homo sapiens
gtgggcgttaaatgagaaaatgtgcaggaaatgcccagccttttgcccagtatacaagagacacttgataagtgttcttctctttatttccttctttctccctgccctctgggaccgctgtctgggagccattggggcctacccggtgctgaccaccagccaccgcttcagaggaagctgcgttcagggtcgttcctccccaggtcgggcaatgccgagcactgcctccagggggcgccgccacgccgaccccgcgccccgggggttgtcttttccgccgcagccgcgcggggccgcccgggccctgagttttcaggaccgatggcgcgccgacagtggggaggtcggcgtcccagctgaatcaaggacgtcctttagcaccgcagtgataatgaacacacaacaataatagccgcagatccacccatagcgagctgctggagtttaaagggcgcatgcgcttgctgggaggctgtgggactcagggaaggtgccaggccttagactctgagctgggttcgaatccagagcagagcagtctctcacgtttccccgctctgtacccttaggcttctctgagcttctgct

SEQ ID NO: 33392 - DNA, 618 bp, Homo sapiens
gcctgtcagggagctgaggagcagtggggaggcgtaggttgccaagcagctaaccagggcaggcaagaggtgggtctggaacccaggcttccccattcccagcaggagcatcccctgcctactccccacccagctcttggcactggagtcctgggttcaagtcccattctccatttgaccccatctgaaaaacatgggcacagaccctgtgaggtcaacacctgggattcctgctcctttaagcctttcccagtggagggcgtggccctggctgcaggtgagcgctgttgccacatcagccgggtaagccctgccctgtcccctcccccagctctggagagaggccctagaggccccagaggacggtgggaagtgggcggggagaaaaggcggagcctgcttggctggagagaaggggacagccctgggctgggtgaaggcacctgagtgttgagaacacctgactgtgctagcctctgtgtgtctgtgagggtgtctctgaatgttccagagtgcacaggagtgtgtacaaaataaacgtgcactttgactgtgaggatacaaggttgtatgcaagactgcctgaatgtctcaaatacctcttttgtgtgcctttgt

SEQ ID NO: 33393 - DNA, 1460 bp, Homo sapiens
ttctggtgcctcagcctcctgagtagctgggatatttgttgaaagaacgaagggaaacacaacccgttgcatactagagactgggtggtggcaataactacctctctgctctctactttttctcctctttcctccccctgcaccctcacctctttcccctcctctcttttcttaggagctggcaccaacttaaagatgggaacgcataagactccatttgatctggccacacaccactaacaccctatgcgagccatttctcctctcaactcagcgggaggaaaaatgggtggaattaggcttggggcttgattctaagagatgcctagaggatcaaagaagacctcagcagggaggttgtttgaaatgttaagacggctgccacagatgccaagagccagggattaggggacataagaatgctggctgggacctacatctcccccctcccaactttcaactatgcaggattgctctgccctctggtacaattccggcccctgcaattggtctaagaactgagggaagccacaggtgctcccatcccaaggctgtctgtcccttcctggtcttccctgtaaaatgtaagaggctcagccacacctttggcctggctgccctgtctggagtgaggagtctttgtggaaggaggccaggcccagcagaggacaaagctggctcctgtggaaggcaggtctcccaagtggaaagggggattggtgtgtgtgagggcaacatcagggtggtcctgggctttccccaaacagaggggcaaagttggagggcccttaggatgctgccccaagcctggtttttgctggttcctccctggggacaggctggaagtttccttcctggtcaggtgacagcctggctccaggttgaactttgggccctatccacagggactgctgggaagtcagctccctccgctgcctgcaaggccagcaaagacatgtagctgagctgagcaatcattattccagggagccggatccagctacagctgagacacaggctagctcttcctaggctagccctccctgggtggctcagaagcatgtctgtcctttaggccagggggcaagagggagagctgggcctgctggtctgaaggtggtccgggctggggatgagaagtgagagtctctgggtgctggagtcaggagcagtgaagggaatataaccctgaactctcctcatttcccttcttcctctccctacctgcaaatcagaggatccaatctgtgggttgattcctggaaattctagtttgaggggaatttccctgaggaattatatgagacactggcagggctatcttcagaggcatgcaaactgtgtagttatgcatagcccatgctcagaaaggctctgtgcttggttgaatgttttgctgttgcctctttttttttgagacagaatcttgctctgtcgcccaggctggagtgcagtggcac

SEQ ID NO: 33394 - DNA, 2682 bp, Homo sapiens
acctctgtccccttctggcctccatttccgttgtcgtgggatcagatgatataaaagggcttggtcagctgtaatagacccagaggcctgtaggcaatgagtacagcaatttcaggattcttaatgtttcctttcctaccagcctcccagtcacacctctcacctgcccagagttcaaccctaattagtgttgagcatctcagtgggaactcctggtccaggcaggagtgccctggggcctcaaatcctagtccaagggtaaacggaggaagggctatcctcatcttgccaccaaagggtgaggcaggaacacagtggacctgggcccccgctgcacaccgaagatggttggagcctggaaggtgtggtaaagagcgaggaggcgaccccagtcagcagatgggagggaaatgcccactgcgggtcacaggtcttggacgtgtctgaagcctctattcctggcgcaagcgccccaacactgtcggggcttggaaggaattctccaaattcccttattccaggaaaaaatattccagaatcccctgtctattcccagcccaaacttgggataccaagtctcctggggtccaaccccagcctctcgctcctcctttcctgcgcccttcccctttccgtccccaccccataccaccctcttccgaacagatctcccgcggtgccccctgcgggacggaacctcagtgccgccccctcccgggcggccccacgacccgccctctcgggccccagcggggggcacgaccccgggctcccgggaccccctcctctcgggactggacctcgccctccgccgggaccgggggaggcggggaggggccgcaggcagcggcgctcccgccctgcggccgctcccgccccgctccttccctccccgccggcctgcgccccgcccgccgctcggccggcccctcccgcgccgctcccgccgtccgctctccgcgcccgctcggcctccgccgcccaaacttttctccgggcgcgcgtccccggcggccgcccccggcatgggcaccgcgccgcagggggcctgacccgccgcccgctccgcccccgcctgccatggcggcccgcgcgccccccgccgcacctgcggccgaggagccggggaacccgggcggccccccgcgcaggaagaagtcccgctccggcgcgtccggcctccgccgcgccttcagctggctgcggggcaagcggcgcaagaagaaggcggcgggggccgagggcgccgaaccggccgccccccgggccaagaaggcggaggacaaggccaagagggccaagggcaaaggccgaggtaaggcggtcggcacctgggctgagcgcgggggggcgtcgagggtgcggccgagggggctctgccgggggtccgcgcgcggcgtgttggaggggggtgacccccaggagctggtgctggaaagcgaagaggccagggctgagtccgaacacttccaccctgcgctgccttccgcagtttccagacccagtcctgccccgctgtgaggggaggggacccccggctggggcagggatcccctggcagagcaggaagtgctggtagcccgactccagggcggtgaggcgattccccctcccccaggctcaccgaggttctgccctctgctgagtcagggggtcagagacttaacgctggcctgtggccaatgggagagacaggtggccttgggtctctggtggggaccctctgggtctggaaggtcaaccgcactcacaaagagtttcagctccagctggatctggatttccagccccacaaaggacctcacatggagcacagtgtgccctgccttagcttcttaacagtgctggcttttcccacctggcctccctcaacgctcacctgggccaggccacaaacatcacctcctggggtagtgagctcaccaaggtgaaccaacccgcccctccctatcactccttcttccagccctggagaaacatgccagtgtcggaagtgtgcttacagatgggggaaactgaggcccaagctcagtggagaggctgtacctgggctggggtgggtacttaaaattcaacagctaattctcagtctttctgaatttgagtccctgggctcctcctctggcctggacgggcagcctgaaaggcggggaagccgacctggcccatccctgctggggtcattttcagttcctttcttgggccttccctcattttccagtttctgtcttccttttgatggggagggcttgagtctttgcaagagggtggagctcccttggggcttgctgtcctgggaagtccacctttcctagactgctgctgcagtgctggaggtgaggaaatggctgggtgtgcgggcccatcccattctgcctgtgtttaccctcccagtgtcctttaaccacctcttctgggagagttagaaggaacactttaggggtcaggaagagggtggaaagcctcatgtgtgattgtatccggcttgatcttccttttggataagggccctgcttccctgcggcacagccacacatagaagtgagggtgctggggctggggtgactgggccaaaccctgagggaggactggatttgggtgaggggtgtttccaaagcctctgcagtcctaacaggacatggagtctgtcccagggctgccccactgggattcagtctgaag

SEQ ID NO: 33395 - DNA, 4358 bp, Homo sapiens
tggatttattgttcccattgtgcacatggggagactgagggaagggactgctggagtcagaccatctggaattcttttcatccttccccctgcctgtagacctggaggtttaacttcttggagtctggggtctttggtaggttccacagctggacaaggctccctcctccattccccccatgtctcgtcccctttcttgtggggagacttgtgatcaactgcttgggtgacttgcttgtgggagccccgggcttccagataagaggctggtccagctctctctgatcccagggatctgagataagcggaatctccttgctgccccaggccccgactcaaggaagggaagcactgaccccccttccttctaggggcaaagtcatccatggtgagggctctttgaagatcatctctccaacccctgccacatctcagatgaagaaactgaggcccagaaaagcacagtacctggctcaggatcatgttgcaattaaggggaaatgaaagctccaacctaggaatcctcactccagggcagtgagatctggtctgggcctggaattcccttccttcccaaactgaggggttagggctgccacatggaggggtgtcactaaggagagatagggagctgatgtcaagtgttccttatcagaccttatcttaatggtccttaaccttacttgagatttgaagagagctggagtggtggggagaggaggctgctggtggcataggaagaacatgattttgcagccagtcagagttgggctcacatcctgcctctgccatttctagcagtgtgaccttgggcaagtctctgacccttggggtcagggtttacactagattgtgtggctttctttaaggttcccaggcactctgtgatgtgggtgttagtcccaccttacagatgaggggactgaggcccagagaggccaattccttcatccaaggcctggaatccagacctcctgattcccagctctttcttctccttactctgtggtgtctgcctctggcatccataagatggggataatcatgccttgaaggaactaaggaaagggctgtggaaagttagaattgcgccttggctgaaagggattattatgtcattgctgggagcaaatactggcccagaaactcattaggacatttattaatattatcgtagctaattcctccgtgcactactgcctgttcccccagggcaccctgtgggatgggctcctcccctccctgctctgggcactccctgccccccattatttaccttagaaccggcctgtcagctctgtccctgctggggtggggctggacaccaagggaaggaaggagagggattccggcacaggtggggtgcagagcccctactttctttgggcagagattgaggtcgtgcccctcccccaactgcccttacccattaactttctcagacttaggatcactaaggttgttggagtgagacccaggttcaaccactccctggttgggtgaccttgagcaagttagtcactttcccttgagcctcctggtgctcatttgtaaaaaggaaaccactcctgccttttaactttcttgttaggtgttctgcgagacagtagaagagaaagtgttttgagaaccgtaaagtgcctccacctgaaagtttgttatgctcattttcctttgtcttgcctctttgggaataaaatctacattctggtttctgcttctgcttctagaatgtgtaatggttggggagcgggggccttcgtttgtccacctgtgcagtgaggggttgaggctaagggcctctgaacacccagcattctggctcatgggctggccagggacagttcagacaggagtagggagttgggggctgggttggcttcagagggttcggcctcctgagcaaggccacctggacagctgtgccctcccccttcattcctctcccctgagtcaggcctgcctggctgtgggcgcgccaccacccccgccccttgctctggaatggggcaggttgaggcctcaccccatggaggatgttgccaagacagtgcgtgcgcatgcgcgtggccttgggaggcagtggctccctccccgattcttccctttccccaggcttaggaaagcccctgagtaggggctacacacacctgtttttctgtacacacagccccttggcaggccctgtgtgggtctgtgcggtcgctcatgggtgaggaaggcagggactagggtggcttaggtgtgctttatgggtgtgtgtgtgtgttttttttttttttttgtttgagaccgagtgtcactctgtcacccaggctggagtgcaatggcgtggtcttggctcactgcaaccttcgcctcctgggttcaagcgattctcctgcctcagcctcctgagtagccgggattacaggagctcgacaccatgcccagctaatttttgtatttttagtagagacgggctttcacggcgttggccaggctggtcttgaactcctgacctcgcgatccacccgccttggcctcccaaagtgctgggattaccggtgtgagccaccgcacccggccatgtgggtgtggttttgagagtgcccacctgcggaggtggccccagtgggacgctgcctgctgcctgagtctctgccctggtaaactgtctctgagttgaggagcccgcaggtgtgcttcccggtgtgccctccgtgctgggggcgtggccaccaggagcaaggtgtcttctcagatccaggaagcctcctcccccaggcatgttggggatgggggtgtggtatgggatgcttccctcatggcctcagccctaggctgcacctctggactgccaggggcagaaatccctggaacaaggactctaagcgtggctgtgggcaaggtctttccactctctggacctcagtttctttgtgaagtacccctcccagtcacctgagactcaggttgctgagcccctccccaagcgagccacaggtgtatagatctggggtgactcggagaggctgcgagctctgacttgggtggggagggggaggggtgtcgctggggcaaccagatgttatcaagtgtaagcccttggatctctgggaatttgcagctgtggccctgactgccagctgtgggcctgggaccttgatgagctgatgttcctccacccccatcttggcaggagctcagcccttagtttccctggttagagggtagctgaagatgactgtcctgtgtggtgaaaggctccagttttagagccagccagagttcaggaagtcacttagctctctgagcctcgcaggcccatgatcaattactaggaaagtaccttccagtacctgcctcgaagaacttttgtaagagccatgaggacagagactacgttttgcctttcaccacgacctggcatggtgcctggcatgaattaatcaccctgcaaatgtcggtctactggtcttttctgtttgtgtgagactgataagaagagtgggtgggtgggtggatctggcctaagaggggaagagtggggaaggtaggtggtcgagaaacctccaatttgtagggatgatggggtcccatgaccctttttcagaggggagatcaggtttgtagctggcacagtgcacagaacgtggcttttggattcaagttgttctgagtgagaatactgctttgccatttacaccatggaggccagagagggcagctttataatgcttgctccctctggtttccatttcctcatctataaaatgggaataaaagtgcctacttcttaggattattgtttagatctcattgatttgttgatgtgactattcagctccacaaatgtttgttctctggagagcaagatctcagcttgtacttgagtagtctccaagaggccagtgttagggtggcagcaactggggaaggaactgcaggggggtcgtgttgcttgggagcctctgtgaatttttagttccctagggactcagagagaaagatgctatgacagagaggtgtccttaggcacggctggtgggatactgcacagatacatatatatagttcacagactctctttcacagtctctgctatgttttttagagttatcaggggaatcttttttttttttaagctttatttttatatatttacttttttttttttagagacagggacttactgtgttgcccaggctgtagtgcagtggtacaattatagctcactgtaacctcgaactcctgggctcaagcccagcctcccaggaaatcttttatttatttttttttttgagacggaatttttttgctctcttgcccaggctggaatgcaatggctgcgatctcggctcactgcaatctctgcc

SEQ ID NO: 33396 - DNA, 1278 bp, Homo sapiens
actcacctcaacctccgcctcctgggttcaagcggttcctcctgcctcagcctcccaagtagctgggattacaggcatgcaccaccaagcccagctaattttgtatttttagtagagacggggtttctccatgttggtcaggctggtgtcgaactcccgaccttaggtgattcacccgccttggcctcccaaagtgctgggattacaggcgtgagccaccgcacctggcatgcctggctaattatttgttaaaatggggtctcactgtgttgcccaggacaatctcaaactcctggcctctagcaatcctcctgcctcagcttcccaaagtgttgggattgataggatcttgcttgctctgttgccctggctggagtgtggtggcacaatcatggcccactgcgacctttgcctcccaggctcaagtagtcctcctacctcagcctcccatgtagctggaactattggtgcatgccaccatgcctagctaatttttaaaattttttatagagatgggattttatcatgttgccaaggctggtcttgaactcctggactcaacctatctgcccaccttggcttcccaaagtgctaggattacaggtgtgaaccacaatgtgtggcctacttatagtttttatgccatattatattcccaattattagtggaaacataatttagcaaactccaaactgttagattctatcctaatttttacaaattatatataatgctacattggacatctttgcagtcttttcccttctctagaatcatttccttaagatgccgaaaattgctaggttcaaaattgttttttgaaaggtatcctaatcaacattgctgtcgacaatgtgtgaggatacttgttcacagcaatcagccacactaagtattatatattatctacagccatttttcctttttaggtaataggctttgtttcttatttggaaagagtgagttcatggtcatttgagttcagtggttaccaaattctagctcacatgtgacagtatatgaatcaccttttactgggttccacccaaacctaatgaatcaaaatctcttgggattgggccaggcattttttttttttttttttaagacggagtctcactctgtggcccaggctggagtgcagtgatgcaatcttgactcagtgcaacctctttctcctgggttcaagcaattctcctgtctcagcctcccgagtagctgggattacaggtgcatgccaccacacccagctgaatttttatatatttagtagagaa

SEQ ID NO: 33397 - DNA, 737 bp, Homo sapiens
actactatgagccagtaactcccaaatctcctgcttacgcccatacacagaaccgtgttcttgttatcaacccaatcattcaaactcaacgtgttcaaaataaaactcatgctcttgacttcttacttcactccccaaccatctttttcactgatagtttcactcctactacagtaaatggtaccatcatttagagttgttcaaggactccaaaactgctcttcaaccctcctatttctctctgcctctacatcaccacccaaatccaggccctatcagatcacaccaggattaccgtaacattctcctaacaggtctcccaaatctactcttactccctccaatccaagttcttttttatttttttgagacggagtcttgctctgtcacccaagctggagtgcagtgatgcaatcctgagtcactgcaacctctgctcccgggttcaaacgattctcctgcttcagtctcccaaatagctggaattacaggtgcccgccaccaggccagagaaatttttgtatttttagtagagatggggtttcactatgttggccaggctggtcttgaactcccaacctcaagtgatctgcccgtgtgggcctcccaaagtgttgggattaccggcatgagccactgcgcttggcccctccaatccatgttctaaaaggtagccagagacagtcttttaaaactcaaaaacttctttaaaactcattttcctttttacaaacctt

SEQ ID NO: 33398 - DNA, 2716 bp, Homo sapiens
tgtagtcccagctactcgggaggctgaggcaggagaatggcgtgaacctgggaggcggaggttgcaatgagccgagattgggccactgcactccagcctgggcgacagagcgagactccgcctcaaaaaaaaaaaaaaaaaaaaagatagtgtgatggttgcacaaccttgtgaacatactaaaacccactgaattgtgcactttaaaagggtgaattttatagtatgtgaagtacatctctaaaaagaaaaaacagaacaggctgtgtggcccaactgatttatcactactcttagaaggaagcccaatttaaaattgaacagaataaggcctgcaaggctcccgtgacttggtccctgcctacctctcttaaacaaataaataaaatgtatactatgtagaaacaataacaaaaaaaaggcagagcaaggtatggggcagttctggtgccagagggtttgttatttaaataaagtggtcggaaatcatgcgtcgctgataaggtgacaacagtcagaagcctgaaaaagttaaggggtaagcaatataaatatttaagtgcttcctcataactttgctcactccactccagctaaatttgccacaatttctgtttcctccatctgaaatgctctccctccttattcttccattcttcctctggttcacttctactcctgtagttcttggtaacaaacggaacatttgtggagtgagggggggggatccatttccttcaaggcgcagtttggaggtcacttcctcagggaagccttcccttctctctttccctttaaagctcccagtatagcatcttccagtacttacttgaaccgtaatgggtcatttttaacgtctgatccccttcagacaagctctggcaggcccttgacgtatccccagcgactaagcaccacgtctggcacttaataggggggtggaatgggagtcctggattcaaagtttggctccaacacaagacaactggacgcaagaggtgagcccactgtgatttctggggaacccagggaagggctgcttgattgactgaccgaccagcagtgagatctacaggctctctcagagctgcgccagcgccgagtccccggccccacatacttagaaccccgtaatggggctcaaaatcactgaacctcgggctcctaatccccaacggcgcatttccaacccccaggcctgacctgcaggttccgggtgataaggtgcagtttctcttcagggctgggagcgtcccccatggctccgctacccctgcttcccccgctcagcccggcaccagagccccttcctgggtcaccgtcgccgccgcgtgccgggaactgtcacgcgagtccagccaggttgcatcagctgggctcggcgctccgcttactcggcctggacccctccggcagcggccggaaaaagtgaggagcagcagagagtcgagcaggtcgatgagacgggaaaaggtggagccagtgggcacggtgggcggtgcggagggcggggctgaggcgcctgagcggggcacaaccctcctagaggcgggacggtttcctgccaatcactgctggtttgccctccccctggtgttggcccggctgactcggggtaggggaggtcggggagggggcgataaaatggcgcagggggcggagtgaggcgcagtcgttcgcccaggctttggcccggcttccggaggtgaagagcgggagggacgagggggtcggcgttacccggcttggagggggatgggggcgcctgttgcttctccagggggttgcgcacgccgtccgccccttggagggattgggaggcccacgccctgctgcgagaagggcgcgttctagctcctgaggtgatggcgagggaatgtccctgcccctccacctccaagtcggcgggcgacagatgcccctcaccccgctgaggaaaagggaagctccctggtcgtcttgagagtcggggagcgccgtctgcagtcccctgcccagtgggggtgggggccgcctctgtcccggccggctcggcgggaggctgttgctggcgggaagatagccgcgggcttttctgccgcgtctcgcgggtgggggcaggaagaggacgacccattccctggggagatctgaggacggtggtccccgggagaggagcgcacagcacaggcctgctgaggggcgggtttgcccctactgggggaggggcggggagaaaactctcgcttctcccgctttccgccgggaggcgggaattcgcggtgtccccgggggagggagacgcaaaggcccttcctggaaggcgacaccgtcccgggccgttgcatttgtgagagagagccaaggcagtatcctccaaaggttgggcctgggccaccctttctccggctcctcaagggctggaggcggcgtcaccagttacttccagggcaagagggaaagcagttattacctcagtgggccctggaaaggtcctagaagtggttgaattgcccacggcctgccctaacctgatctccggtgttttgtgtatttattagggactccaagctctaccagacctgcctgaagtgttttaaagcacattttctttttgaaaagaaacctgttgctgcagcttagcgcatctgttctctgtgtccatgtgggaggagaatcctggcaccctcatctagtgaaatgttacctaaagcaaagatttgcagccctgggttgt

SEQ ID NO: 33399 - DNA, 818 bp, Homo sapiens
agggcaagcactgaaaaggttttcatatctgttttacagaagaggaaatgaaggtacagcggtaaagcacctgcccaaggtcacaaggcacagcaggagcaggaatgggccagacaccccactcctattgtcccgcgccaaccaagaattctgccctccccactcactgcttttttttttttttcttcaaatcaccactggcccctggcaccctgcaaaaggagaggatccaaaatcaacttgcagtgtccctgtgtcacacaggcagcagccaagtctggctctgcccagctgtcgccatgccagtccccgagctgaccccctctgcagtccagggattaccagagcatgaggcacagggtggcccacccaggcccaggtcttgccctcaccttgctgcggagaagccccccgccctggtgctctggtgtgctggtttctgatgcactcttggttttttccttgttgttattgggttcattgtccttgatgatgtcatactggcggcagaagagggcaatgacacctgaggggggacaagtgagcagtcagaggccagagcctgggttcctgcctcccctgcttctttcccactagtgcttgccaatggtctctccagattgtacctcacctgtactactgcagcaccctccctctgccctctggctcctgttttcacctgtgccctcaccaaccaccccttcactgctgctaggctgatcttcctacaatatgcgtctgatcatacctcctcctctcctttcctttaaacctctgacagtggccaggcacggtggctcacgcctgttaattccagc

SEQ ID NO: 33400 - DNA, 1436 bp, Homo sapiens
accgtgcccaggcagtggaaggagggggcacattagtcccgctcccccgctgctgatcctttttgcccacggctttccttcctggcctcgggagagtggagagtatgtaagtgggagccccttgtaagggtggggaagctgaggcctggccccggggtcccttctgggtaagatggggctgctctctccagcgtctcctctgccgcccacccgggggtccccgagggcagtcgtgcgcctccgcaggaaaggcaagagagggcgagggtaagagacgctacagccacatcgagaagacacccgcagcgctcctcccctccatttcactgctggggaaactgaggcccagagaggaaagtgacccgaccccggcctcgtagtaagttagaggcagagcaggtggcctggccccctgggggctcgggttccgggctcagtgctccgctcctgtgggagggttggggtggttcggggcctcccgcgcgcccccagtcgctcaccgaggcgcagacacatgtcggctccgcgctggtcccgcccccggcttcagcgcggctcccgaggctgcgggccgccgggggaccctgctcccatcccgctggcccgtcgcccgcgcgccccgcaccgtcgcgctcgcccacttcccgcccggagcccggggctgggcggcgccggaccggcctcccttcccgtcaccccccgggccgcccggccccgcagcgcccccgcggctcgtgcccctcccggccggtcggaccggctgagcagcccatggcccgcccgctgagtcaggcgccgccccgcccggcccgcccggcgccgagccgccctccctcagcccaccggcggcggcgggcccgctctagaaagggaaactgaggctctgaggagccgccccgcgcgggcccgcggcaagttgggggttgccggcgtagctgtggttaccgtgacttgggtgtggctcttgggcggaaagcccccgggcccaaggctgggacggagaggggcagcaggggcagtgaaagagctgctggggattggggtctgcccctgcctgctgtgtgacctcaggcaaatcgcctcccctctctgcgcttgcctttagcgcccgcgagtcttgtcttccacgctgaaaaaggcgctttaagtctccttcttagtcgggagggccttcagttccgtccttggaaaatcagggataattcctgtccccgaaggtcgtggtgagacaaaataggatacaaaaattaggtaagaaagcgctttcggccgggcgcggcggctcatgcctgtaatctcagcactttggaaggcctaggcaagcagatcacctgaggtcaggagttcgagacctgcctggccatcatggtgaaacacccccgcacccccccccccgccccgtctctactaaaaatacaaaaattagccggatgtgg

SEQ ID NO: 33401 - DNA, 1159 bp, Homo sapiens
cccttcatccagcagcctcctaactggtacctctacctccacctctacaattcattttccatgtagcagccagagtgatttttcaaaaacatcaatcaagtcatatcaatgcctgcttttactgggctctgtaagtcttcaccaaggcccacaatttccagcatgctctggctcccacccacctctctcatatcgtagccctccagtcccctctttaattaccacacttcggccacactgctgtctctctttttctttcaacacacccaagtggtttccatcttaggatctttgcctttgcatccctctgccttcagtactctgccctcaatcctcactgagctttctgtctcacacagactcaatcagtgctgttcaatagaactttctgtaatgagggaagtgtcctttatctgcactgtacaatatggtagccactagccacatatggttattgagcacttgaaatgtgcctagtgtgactcagaaactgaattatttgatttaatttaaatttaaacaggcacaagggagagtggatatcatattgaaccactgaagataaatttcccataagccattctctattaaattatcctgttttattttcttcaaggcacatttctgtagatgaaataatcttattcatttatttattcattttctgcttctatctacaagaattttggttctctgagagcagaggccttacggatcttgtgtacagtgcaccacccaatactcagagcctggaactgtcaggaatgcggtagacacttgataaatattaactgatgaataaagcattacatcagcagttctccacatgtgatctgcaaagaataaagcattacatcagcagttctccacatgtgatctgcaaattcccgaaggttccaggaccttgagagggtctgtgaagtcagttattttcataataatactaagaccttattttgtattttttttttttttaagagatggagtctcgctctgtcgcccaggctggagtgcagtggtgcgatcttggctcactgcaagctccgcctcccaggttcacgccattctcctgcctcagcctcccgagtagctgggactacaggcgcccgccaccaagcctggctaatttttttgtatttttagtagagacggggtttca

SEQ ID NO: 33402 - DNA, 1711 bp, Homo sapiens
agggtacacccgcctcccagcctgggattgggaaatcctcaccattctataacccacctcaactcagccaactccaagtgtgaggggccagcactaggagtatcccacttcctgtattagtcaacttctttagttacagatgacagaatcctaactgaaatgggctttggataaggggaaagacatttgttggattatgttactgaaacgttcaggggctttaggcatggttagatcctggcattaaaatgatgtcatctagtgtaatcaaatggtgtttctttctctttctttttcaatttctcagctccacattcctctgtgagttgcaatattaggtagtctctgttctctggaagattcatgcttacatcttctcagcttaggaaccccaggagaaagcagtctctactcatttggaattccaggcaattcaggtttgctttggttgtgttctttagccttgtaacatctcagagtgatgtcacatgtggcctcagaggactgaaaccgcacagcaaggaaggggaggagaagactgatatttatcagccatctgttttggaacaggcattttatatcttctcattctgaagaccatcccttttgagaaggaaactcgttcttttttgtttgtttgtttgagacagagtctcactctgttgcccaggttggagtactgtgcctcaatctcagttcactgcaacctccgggttcaagcgattctcctacctcagcctcccgagtagccgggattacaggcgtgcaccaccaaacccagctaatttttgtatttttagtagaggcggggtttcaccatgttggccaggctggtcttgaactcctgatctccaaggcccgcctcagcctcccaaaatgctgggtaatcccaggcatgagccactgtgccggctacttctttttttgatctagctatgtgattcccagaaaaatcaagggccacgtttgggtatgttctcgagctcctttaggtatgcaaggaagagccaggctcagaggactttcagtgatggtggctacaataaggacacagaggaagtgaggttattggggaagccctctcagcagcgtccagcaagtccccggagaacaggaactgggatagacttgtgctctggccccatgccctctgggcatgttcccagcatcgatgtctcccataccagacagtctcacacaggcattggcctccatcacatccagcttgtccaaggcagcaaatggctcgggcccaaatcctgtgtccagtcagctacagtgaggttggcagggctggcctcattggacttacgtgacctagatcacagtgatttcatgaagccaggtcagctcaggtccactggcctcaggaggcgactgagggagctgtaggcactcggcctcgtggtttttatgtcttcctccttgtgccttcgtttccttctttgtcgaatgaaggcgttggactggtcgatctcaaaggtgctttcaattctggctttctaggagtatattattattatagtttggccgcacatcagctctaacaaaatgacatgccatagcctctctttgaggacactgtatcccatggtgctatttatcatcggggatcagtcacaggaaacagaagtcactctaatcgagcagaaagggatttaatacagggaaccagacgcttaaaaaaatggggccaggtgcagtggctcat

SEQ ID NO: 33403 - DNA, 1206 bp, Homo sapiens
gactacaggcgcccaccactacgcccggctaattttgtgtatttttagtagagacggggtttcacccgtgttagccaggatggtctcgatctcccgaccttgtgagccgcccgcctcagcctcccaaagtgctgggattacaggcatgagccaccacgcccggccaagctattgtaacttttctaatgcattatttgtgttcgcctctaggtggtgatgatgggccttttcatctactaaagtgtcgctaaggattagaataaatttaaatttttcatagcctctggcctagaggtctaggcttcctttcttatatgatatctaaaatctcctttaactcatttcttcttcttcctgcaggaggaaaaaacatgggcctttaccaaaaacattttcagtataccatctcagtcttcacaaccccttaactaggatcatcatctccattttggctaagtgaaaacagactcagagtaaactgcccaaatctcacagctgtagtaagtggaacccagataagaaatataggtttagccataaactactgcccctccaacagacttctttgattttatcaaagaagtgaattgttctctcgaggcttcaagagaattccaagttttgagttgataatttgcgtttcagagatctccaggctgtctgcctctttttccaacaagttctctttttcacacaagtacacgcccccttcagggaacattcttccagaaatccaaagtccactaacagcatttcctgtcctaggtgcagggaaatgtgtgaagtctggctgcagtgcccaagagataagaatcttctaagctggctgttgtccagacttgccatcctcattgtagtaaaacactggccaggaagacaaaagtgcatctgtgaaaggaaacagaaagtcatctggtcttcagggaaaggaggatttcaatttttcctctgggcccaggactaaggtgagagaggtctgacactggaagctctttaaatgcaatctgagggccgggcgaggtggctcatgcctgtaatcccagcactttaggaggctgaggtggggggaatcacttgagtcaggagttctagaccagcctggccaaaatggcaaaaccccatctctactaaaaatacaaaaattagccgggtgtggtggcatgcacctgtaatcccagctacttgggagtctgagacttgagaatc

SEQ ID NO: 33404 - DNA, 1872 bp, Homo sapiens
ggagtggtatacctgagaacacagcaaacacctatgtcattgctttgtgattatgcgcatcagtgtatttcttcctccaataacagaatattctgttctccaacttgtaaccatgcaacattcactgagaactcttttttttttgagacagggtctctgccacccagtctggagttgcagtgatgtcggctccctgcaacctctgcctccccaggctcaagcgcttctcctgccacagccccctgagtagctgggattacaggcgtgcgcaactaccgcctggctaatttttgtacttttaatagaggcgtggtttcaccatgttggccaggtgggtctcaaacagctggcctcaaatgatccacctgcctcggcctcccaaagtgctgggattacaggcgtgagccaccatgcctgaccactgagaattctcttaagagctacctgggactgccactccttctctcctctgaagcatatgactactagtgactataatgcagaaaagggcaaagttttaagagtaaattgcacagttgcttctagagggcaaacaaagttagttttaatctactgcttccctattcagctgactcagctaataattcttcagcctgactacaaagtccaaaacaagcctagctttgcttcctgtcatgctaggagtcataggtttatagatgactactgcggttggatttgaatacaatccttcttcccttggattagaaaaattcaggtctagagactgtcaaagatggtgctttgtttcaaacacttggctctgtgggactatccaagccaaggaaaatgaggtaagttgaattatgacagaaatctttattaaaatgtgtctttcagtaatatgtttagcattcaatatacacacatacatatgtacactctttgacacacctcatggattgctgccatcagtttaaccaataaattaaaactaaaaagagggaggggaggggaggggaactaacggcaaacttttcatgttttatctggtaagaaattgtgaatttctcagaatttccctgggcaaaaacctgtgaccagagaatctgtgaaataaaatacataaatctctaccccttggaaaaaaaaaaaaaaaaattccaaaagatgcagttacaagtgtgcttctcagaacaggagcattcattccacttcatactctggcttctccaccttctggcttcaagacagtttgtccctcggctagggcagagaggttcatatgggcacttgggctcggtgcaccttgggctctgggggtcgaggggcaggctgcagtatgggagcggggggagccacactcatctgaggtgatgtctggcacatcgtctgactgtgcatcagaactctctaggtcactgcggatgctttcaggctgggccaggctgatgtcccaaggtttgctggccaggcagtctttctgttcacagctttggtgtctgcaggggggatcctcttcactgcctccgccaccactaccttcttcttcattctctgccatctgagcatgaacatggagcgagtcctccgtgctgcttccactcaccagctgatagtggcttggtttggcttcaatgtccacttggatttccatattgttgcattctctgtggagacaaaatccactttgctgagtcatgcatggatcatgctaaacctgttggtaaaagcagttcatgggttcaggattaggaatttcaaaaagataggtgaacagttaactagagctcacttttaacaaaaataacattttaatctaacactcaaatgagatggaggctggacgtggtggctcatgcctataaccccagcgctttgggaggtcgaggtgtgaggactgcctgagtc

SEQ ID NO: 33405 - DNA, 1108 bp, Homo sapiens
ttcatacaaagccaacagaattcacagccacacactgcacaggtcatgtgattacagcttccatcattcatcttgataatgtatgcactgcatcgtgggcatggcttgatgtcatctgctatgagtgggggaagaatgggtagaaaaaatacccctagttaaatccagtttgatttaattgttcctaggagtatatataagaaatgaggcagcagtcaagaactcttcactgaacactccaaattgtacaacccactttactggaaggttggctatgtctagacctcaggaattttcataaaatgaatcctgtctcttattgagctgcctatcccaacaactggcatcttacacagcacttgaaccacattctagcaaggagatttccttagggagaaagatgtttccaagaaaaatgaaatttctaccagtcgataggctggtagatttaaaagaagaatcctacagaaagaatagcctgcagcctggaattagctttacatttttaaaaactttagtttgggaaatttatttttcaggttcaacatgtatcattgtgatttgctgttaacatagcccacaatcccttcccatgatactttcaaattcaaaacctaaaaacaactgggtatgctatctaccatatacttggtaattttcagagcaagttatgaactatcctaataaaatgacaatttaggaaattatgctgtgccaggaaaaagtgaatggcaaaatctttcctactagcctctcccaaatgacatcagcaaaataaaagtacaaagcaataaatccactgacattttaaaataggtttcctctgactcgccaaggttggagctgaatgtgtgacattcctccttttaaggttaatcattaatctatactaatactgtttccttttcttcaatctgtactctacttccaaaggcagtgaggcacttaagtcagcttgaaggcaaacagcacaggtttaatactaattaaatgtctttctgttcacaatgaaagttttgaaaaagcccctagcaaaacaaaatgaactaattgctctccaatctgagacatattactaagaaagtaggaactacataattcaattttg

SEQ ID NO: 33406 - DNA, 1832 bp, Homo sapiens
aatcccagctactcgggaggctgaggcaggagaatcgcttgaacctgagaggcggaggttgcagtgagccgagatcgcgccattgcactccagcctgggcggcagggcgagactccgtctccaaaaaaaaaaagaaaaaaaaaaaaagatactgtcctcacctccggacagagggcattcccccaacaaaaaaaccgcctctccctgtctcctaacttggacagctcccttcccctcaccgaatgcttagcagccacctcgagccctggggcagggggcggggtgtcgggtgcgttcacaccactagtctgggcttgcctgatggttaccaccccgccgaagctgccgccttgcgggtttccctgcttgggacacccacgcggggtccctgctgcccccagccacgcccctcggctgcagcccgccgccacccgcgccacgcccccgcgctcacccgcagtccggggccgggcaccagcggcagtcggggtccgaggctaggtagcggcgcagcatgaactcctcgtacttgtgcataagcggcgggtcggcgagcagcaagcggatgtcgtgcgggttgagtcgctcgctgcactcggggcagctgatgggcaccctgctctcgcttatctccaggcgcaggtagtggcggaggcagtcccggcacgagcggtgcggacagctgaggaggcgcggggcccgctcaggcggcagccgcaccaggcacagcggacactccacctcctccgcgcccgggccaccgccctccgccgcctcctcatcgtcgaacccaggctccgccgccgccgccgcggcctccgcctcggcctcggcggccggctcggcgggcagcgcctcgggcggcgggccctgggccgcggcaggggccggggcgggcggcggctgcgcagccgggggcggcggctcggcctgcggcttggcccgggcgcggcggccgcgggccgaggcagagaagacgctgtgcaaggtgaggcgccggcgccggccgccgctgcggcacttagggtcgggtgcggccgcatgtagcgatgtggagcgcggcgactcggagtccttctcggagcccatggccggcagaggccgaggagccaggggcgcccagcgccgccacagctcccgcctcagcgcccctcagccagcgcccggccgccgccgacgccgccaccaccgcctcaaccgccctcccggcgatagaagccgagcggcaacgacgaagtgattataaagcctccgccccgcgcgccgctgccctgcgcaggcgcttcgctcaaacacctcacaacccttgcgccccggtctaggagtgcgctgggcagggccgagcggggtggggccgagcgagctggggcggagctccgcctcctgccggtcaggtggttccagggccgccatgttgcggagactctcagagatcctagcccgctgctctccctggtctccgcctccaattccatcaccatgacacccaaggtggactttttggtttgccgttcctcacaggttgattgccacttccagtaaatgatggttcagttacattatttataaaaagcaggcaggggttgatcagatggtgactcccaactggttcaccttccaacatttctgtttattaagcagacggcataaattaataaagaatatattcattcactgagcttctacaaagtgcgaggcattagaaaataaaacagacaaggtcccctattgcaagggacttccagaataaagtccaaatttcttagtctagcattcagtgttctctatgtatttaataaaccctatgtatataatagtctatttctaggctc

SEQ ID NO: 33407 - DNA, 1232 bp, Homo sapiens
caccatttctgaaggattcctctgagcccagttccttgttccttcatagccattgatatgcatatctcatttaatcctcaaaatcagtttaggagaaaaattatttcacagctgaggaaaccaaagatcctgagacttagagaggttacattacttgcccagggacacacagctagaaagtgatggaggcaggatttgaatccagatctaagtgacttcatagtttgtaaatttttaacctctgaactttgcccttccagttgcaagatgctgatgcattcctgtatttccagctcttcacacacaggcactcatcgatattagcactgcctagagaagccagtgaggtaaagatcattgtcccattttccaggtgagaaaattaaggccagagaggggacttgctcagtgtggtcagctgagaagtagtggcattccttctagaatccaggtctcctttcttgcctctggcagccttcctccttcctatactttctgccaactgctgaggcttccgtctcgaaacaaatgactcaaggtaaatcactggttggacttcccctttctcaaaatacaggaagtctgtgttgtttgcagtccctgtgggtgaacagtttcagctcagttacgaagtaggctgggccacatagaggactgggtcctgctggggcagggttccaggctactggggctggcaccgctgcatttttccttcctaagagtcatgtcagtgtgtctgtcaagtcaggcttgacgtcttaccccaaaaagcctgctgtactattatgaaatttagaaaaatgagcccaagagggaggggccctgtcaataattaataataacaactattatttcatgtttatggcacattaaccttcctaccaggcactgtgctaagtggctgacacgtgaacccatttgagccccgtaacagccctagtaataaggttctatagctttggagccaaataacactagatacaaatcacagaaatgccactttccagctgtgtgacatcagggacattatttacattcattcagtaaatacttttgagcacttactatgtgccatatttcagtgaacagaacaaagatccctgctctcttgtgatgtttacattctacaaggtaaagcaaagtgtaaacataataaatataataaattataaatacacataaataaactgtgttagaaagtggtaaggggaagatacagtagagcagggagg

SEQ ID NO: 33408 - DNA, 943 bp, Homo sapiens
aaggtggcagtgacaaataaataagatcatgcatatcaaagtgtggtctccagaccagctgcattaacatcacctgtgaagtagccccacttctgacatactgaatcagaaaccctgggcatggggcccagcaatctgtgttacaacacaccctccaggaattctggtgtagttcaagtttgaaaaccactgatatatatgtaataagcctagtacccaattggcttactattgacagttctagtatactccctctgagatgttgagttaggtaggtatcttttccccctcatgtcctacaaacactgtatgtcttaatatctgggttgtctgctaatgcaatctatcacccacacagctgccctttaatataaggtactcttcccatctttccttgcatacttgcagtaataggtagctcactatttggctgggtagggtaaaccgcctggtcaagcctgttcatacaggcatgccaactgcatatgcactgtaaagaccttcccctaaaggcctcttctccaaggtccctcagctgtgcttaggtctctctttagcttcagggtagctctcctgtatgtctgagcctcagataagcttgatcagccctgaggagcaggggaggtttccttctcaaatctgggaccatgtttctacttgcttgcctggtgttttggcagccacttcaccctgctgactcactctggtctgaggtcacgcaaaacctccaagcctttttctcaggaactacaggaacttgcgtcggctgggtcactccagtccttgatgtgtgcaattcatttcttaaaaataacattactttcaaattatgaaagacgtgcttgatatagtaagttaggaaaacacaaagggaaaaaaacctcactggtaatggtcatcctaaaattgacatctgattttcaaaaaaaggatcctatattct

SEQ ID NO: 33409 - DNA, 1831 bp, Homo sapiens
actatgctgcccaggctggtcttgatctcttgggctcaagcaatcctcccgccttggcctctcaaagtgctgagattacaagcgtgagccaccgtgcccagcctgcaattttcaattctcaatcttccatctcttgaatcgtttttagctccataaaaggtagctctgagggtcaaagtggaatgtataagataatccaagtgtgggtgctctgggaatgaaagggactgaagaaactatagacatggcaaatacatgcccctaaatgtattcaaacacttcaactgctcccagcttgctgacaagtgatctgttattgttagaaccccctcccccaggtactctaaaaactcatcaccagaacccaagtcttttccttaagggcctagaggccctcccagtaccacgaaagctcttgaatgggatcaaggccttcttagggcccaaagataacccctcccacttcagggcttgagggcacagtgttcaagagcttggagcttcctatagcttacaagtctctgatggtggcactcacatcccttagagagattacaggggcctgcactgcttgcccagcatggggctcatgctccatttcatccaaaagcagttctgtttgcaatctcaagggcagaaataccataatttgctctgaatgtctgctctgagctctggggaccctcaggctcagaacagggttgctcccaagtcaaacatatctctcaggtcactatggtattcctccaggaagttgtttcccaggaaagtccctgggaaacaactgggaacgtgtgtctgtcattcaggggtagcctggctcagggcaaagctgggaaagacagcaacaattttcctccatgatctcaccaggttatcctggagcccagagatgtgtgttctcatcctagttctgaccttgttgtgatcacggatgaatcacttagacttcccaggtctgtatgcctctgaatagggagagtgggccctatctcacagaggatccagcaatattaaagatatgaaaattctttgctgttgacatttgaataatgggagaaaaataccagtgggagggaactgcaaattagtgggccttgagtcagacagatcagagttttggctccagacctcccttactggccagatgacctgaaacaagtcatctcgtacttggtaacactcttcctgtgctgcttcaggaagctggttctctagaacctcatgttcaaactgcaactcagggatgccttccctgtctgtgcagggaggtcagctgattggtatgatcacatctttagcatctgtcttcccagccagactgagggctcccagcaagaattttgtctggcctgttctccagaggccaacatggggcctggcccataggtgctccctgtttctgtatcacctacaagttctttcagtcttggctgcctcactaggctgctggagaaacccagaaggtagacgatgagacccacaagtatgaggcatttggaatgcatgggctaccctgtgaagaactttaccggaggttgaaagggggcagagtgccctgaacaggaaggcacagggtggcctttggcctccagggaagggaaggaagtatgagacacaggaagaaatgcaagcagcaggaggaagagcgttaccaagctgggactccagaggctcgaggccctctccagtgcctgtgaagcctgtatgcgggctctgctccttgtagccttggagacttgagctgtggctcaggaacttggcactcagtccagtccctgctgcctcccacctgccctgtagccccatctccttgcactcacattccttc

SEQ ID NO: 33410 - DNA, 627 bp, Homo sapiens
gcaaaaacagaatcctaaccatactgagaagggtatatgcattccctatgaatcttccagttcttatgggcagcccaaatattacttgtacatgttgtatgcacacgtgaatctatgtggacggatgacaaatatttgggcaaggatcatgcacataaaattagcaaacattcaagaacctcaactttgaggccaagtgcttacaattgtccctagttaaaggggagctgattctaagattcatgatgccactgtcacccagagaaggatcccagaccaggcacacatagctgacagtttttgtttcactcctcttccttgcccattcccagaagtcatgtgcttcccagaaacacacaaagccagactgagtttccattaagagtgggtggagttggtttagagccaggaaaacaaggcaggacagaggcagcagacactcacttggaccaggcaaagagggaagcaaggtggccaggtactcatgcccagttgccatgtggacagcagataagacctctggtagtctcacagatggcaggagagctcaggtcaggaggctgggcactttagagtccactgaatcgagtcagcagcagattatgctgaggctggcgatattattta

SEQ ID NO: 33411 - DNA, 1664 bp, Homo sapiens
ctaccatttcatcactcacctggaagttaggaacaaaatagccttgggtttaaatccattacctaggtgactgacattagcccaactccacagccaaaagtttgtgtatataaccttattactaaacagcaagttttcttggacccaaagaagcaaaaataaaagcaaacgtgaaatggctccatttggaagatccagtttcataattttatctctgtggttgccaaatacacactctcgtctcttgaaattctcctgtatcccaaaaatctgggtgagggaagacagattccattacttgttacttcaccaggagagctttgtatcttaggtcctgaaggtccctcctgccactagagtccagagtccaaactgtcagataacagcttatcagcaatcagtgatcctcaaggcacaggaaatgtgaggacaaatggctgacagaccacctgagagagtgccaggagagaatggggttgaccaaaacacaggcatcagctttccctgttccacagctgtcattaggctaacagtaacgtgactgatgtgtgtacttggttacacatctgggccatcctggacatgaggaaacagagaagttcactgaattggcaagattgggtcagaaccaaggaactgaagagccaagccaacactcttccctcacttttttttttttttttttttttttgagacagtctcattctgttgcccaggctggagtacagtggcacaatctcccctcactgcaacctccaccttccaggttcaggtgattcaagtgcctcagcctcccaaacagctgggactacaggcgcacacgaccatgcccagctaattttttgtatttttaatagagacggggtttcaccatgttggccaggctggtctcgaactggtgacctcaagtgatctgcctgtctcagcctcccaaagtgttagtattacaggagtgagccaccatgtccagccctaagccaatatacttctgagtctctctaaaaccccaataaggacttctcccagttttcagaaactggtttttctcttgggctgttatagaaagaaaagtctccagcctgtagtgaagcctgcccatcttggcagctaatgcttttatttcttggtgctaactgtgaacttggggacaaagtacacactctgcaactaagtgaaggttggagataagcaatctcattgccacatctcaattttttcttagtacagagtcttctgtcaaaactcaaagtccaaaatatctagctttctggtttgactcagagattcaattacatgaagggaaaactagatagaaatgggcaggcagaggtatcatttgatacagctacagaatctcaaagcctaacagaaggtaacttgaggattaaagcaaagtccagctccttccccaaccaacattctaagataaaaaaagaccagaagaccaagcacaaaatgacttctgaaggtgattctcagaggccaagttccagaataactcagttataattaatctagcaatctttgattagtgccagaaaataatagattgtatttgtccaatcaggtcaactggcctaaagaaggagaaaatgtggctgggcatggcagctcacacctgtaatcccagcacttagagaggctggggcaggaggactgctcct

SEQ ID NO: 33412 - DNA, 404 bp, Homo sapiens
acccaaaaaaccaaaattctgtactttgcaaaatcagtgaatgtcaggagccctgacaatgaaaaaccaggctggcactgtggccgtacatctagagagtgctttctgccaatctttctcattgctgttgaaattaacctgggtaaacaatttggaggtcaggcttgctcaagtggaaaggctgaccaaaacaccacagagaagagctgttagcacagaacctgttctatttttatcactcccaaactgcaggactcttatgcactgttccaggtgattggattctacagctagatgaaagaacacacaccaatagggaagaaaactaattcctggctgggtatggtggctcacgcctgtaatcccagaactttgggaggctaaggcgggtggatcacgaggtc

SEQ ID NO: 33413 - DNA, 1455 bp, Homo sapiens
attcaagttccttttcatctaaaatcatttgcgtcatcccaagctgcttagccttcagtagcctcaggtcctaactccaagccaggtcccatgagcactcccaacccttattgtggacactactcaaaggttgcgactcatgggtctccaggctataaaccagttctacacattcacccccaactttcaaacagggagagccttaggtttcctcccatctcaattcaactggctcacacagcacatgtcacctctcactctgccccacgtgttggagatgcttctcctcccctccccctaagtcataaatcattatcaaaatctcccgacctccagtgcctggaatgtaaccctgattctggacaattcacctccaactcgcaggtaacctgggccataaagctaattgcctccattcagcctgtaatctagatgcctcggcccagggctcactctacccctcaaacctttccagtctctagacccttagtggaattaatcagccctcacattccctaacccaacacttcaacactgaatccctcgggcactccaatcctaactcagactgccccgacctccaatttggaccctctccgaaatgccccaccagaaccgagaccccggccagcgttccccgcaggccttagtccccggcccgctccgggcaggtccagggcttctagatctccggccgccttgaccttggagttcagcaggctccgccgccaagcccagtcctgccgctcacctgggtccctttaccggccccgggaggccccagcagcacggcccggatgcctttaggatactcgggttctgccgctggcacgctgggagccatgtccgccgaagtctctcactgccaccagttcgcacgcctcacaggtccagtgcttcccaggtcaacgcacgcacgccacgcacgtcccactcgccgctcacactggcccatagccgcgtccgtcagcccgttccgcccgcccctgagcacgacggactcttcaccttaccaactgcacggcgatactgaggaactttgcttttgattggacagaattggtgcgggataaggaaggggcgggccagcatgtactaagggtggcgggtgtgcggagtgggcgggaaaacgcgaaggaggacaggaggtcaggccggaaggtatacttcggcatttgacagttgacgacaccagcaacaacattgaaatcctattaaattgcgcgtgggagtttaaatgggtaaaatcactcttagaagacaaattagtaatatgtttcaaataccctttggtccagcaattccacttccacgaattcaatggataaaatcaaggatatgagtaaagattcgtgtaacaaagttgttaattgcaacacttagcccaaaagcccgagaaaaaccataaaataaaggcaatactccaaatgtccaacaataagagattggttaaat

SEQ ID NO: 33414 - DNA, 746 bp, Homo sapiens
acttgtcaaagcaagtctcatggacaagctgcagtcaatggggccaggaatgtacttcttccactgagaggcactcagtaggtgaggcagggaatattcatgaacaatagcacaatcttccttcctggcggagtcaaaggtgaggactgagaaaaatcccttggaattggcctcaaggagtttgccctttaacatgagagcagtttcagctgaaggaagtgacttttattttactcttgcctgtggtgatcagagttctccaccgattaatttttaaaagttaccatttattgagcaaggattggtaccaagccctgtgatcagatctctacatacaatctcactgagtcatcacaatacacttgctatgtcaaaactattttttcttttttttttgagatggagtcttgctctgtatccaggctggaatgcagtggcatgatcttggctcactgcaatctctgcctctcaggttcaagtgattcccctgcctcagcctcctgagtaggtgggactacaggtgcacaccaccacacctggctaatttgccagaactattatatccctacttgatgcatggggaaactgaggcttaactcggcatggttaattggcttgcttgaaatcacacagccggtgaagtctcccaccacacagcattttcttttgtggcagactgtactgttttccacaaatatttgatgtctcttgctgtgaaaggattatttgtttctgttctgttgaac

SEQ ID NO: 33415 - DNA, 1210 bp, Homo sapiens
gcacctggcctaacagttatttttaaaaataatttctaccaactgtaatctgtcatcccctttcctgacggacatttggcccccttgatgacatctccagctggttccaaaacttttcagtcgtttttagttattaatgcagtctcttgtttcagccattaacttggtctttccattttcgaaggtcagtctcctttgggactcacagtccagcaggcaggcctatggcatggaggggagatgggtctgctctctcttgtctgccctctggtggggagaaacaagaaggaaaaaaaggacttgtttccttagatgtcccctgctggcccttggctgacctcttcttcgcttctcgcgaggtgtctgtgttcctgtcctctcagacatcacagctgctcagctccttatctgtagacacggggtgatggagtagcacgctgcaaaagggcttggtgcctagttgctctcctctgctggtggcctctggctcacccttcacagtgcacctctttgccccccgcaggcctgctgccccatcacatctaccctctgcagccccagcctggggcctgtggacacaggcctgtctcagaaaaaatctcagaatccatctttctgccactccttgccacctgatcacatccttggccttccctctccatgccctttcccctatttcgtagcaccaggacaggttggcaagtgtagttgctcagcaaacatcatcagggaaggagaagtcagatgccctctggtggcaccgcacacctgatgaatgattcttttggctctgttccagttagctactgtcctagttagctctgttccagttagcttgtgtaactaacggatcagcctcaacttcgaggtataacacaatcaccatttcatcatggtcatggaatctgtgggtcaggagtttcacaaggcacagtggggatgactggtctctgcttacggtaggtggcctccaagatggctctcaaagtcccctcccccctggtattcacccccttgtgtagtcccctgccacaccatatcagttggtctgtgtgaccaatagaacatagcagaagtgatagtatgtcgcttttgaagctaggttgtggaagatagtgtgaggctgggcgcggtatcttacacttataatcccagcacttggggaggccaaggtagaaggatcgcttctacttgattgagaaaagccagg

SEQ ID NO: 33416 - DNA, 920 bp, Homo sapiens
agccaccgccaggcctccgggggagaagactacagtaagggcgagcagagctgaatgctttatgtcggaatcgaccaatgggatggcggcacccggttgccagggctacggccaagcggaggtagggcctcggcactatgggcggggcctgggcggggttatataagccagcggcgggcggaaggcggggcgtgggggtctgtggctgctgggctggcggggcgcaggccgcgggacccgagcccggggaagcgagagagcggaggcgccgaggatccgattcactccctggggagacctatgggccgaagccgtgtaaatgcgttttaaggcgagtgcggaaagtggcctggggagcctcggggagcggacgccctccgccctggtgctgacctgcctccctgccccttctgcctcctgtcagcagaggcctcggctccgcaactgccactcctcctcggggtgttgcacaagtttcgaggtcaccggcgaccccccctagcagcgcgcctggctctggcccccgcgaaggaggacggagtttggtaaggggccctgggggttggggggacctcagccctgcactctgtaggagtcactcggacagaaaaaacctcggccttccgttctctcccaggagcttgcggcccccacccaccgcgtggcgtccccaggcacgcctagaattctagcacctcaggatcagtccagcccccatttacaattggggaaactgcggctccgaaagggtcagagggtacccgaggtcaagcagtagagagcggactcgaacttaagctcttgctcttaggctgagacgccttgatgtggccaccggctaccctctaggtgggcgtggtcaagactgggggcgccctggaaacttccccacccaagtttctcagattttctgttccatc

SEQ ID NO: 33417 - DNA, 2203 bp, Homo sapiens
tcagcttgggtgtctctctcctttctcttactttctattccttcattaggggttccatctccgggctttcatgcatcctgtatttgtccctattaaagaactactgatcacaatgtactgtagttttcctctctaaatacttgtcttcctgcgtatctaatcctattgattccataaagacagggagtgtttctcctactttctagtgtgatctggaacctaagactgtgcttaccacagagtagacacttagtgtcttttgaataaactagtttgggtggtggtggtgcggtacccctgaatgggagtgggggatgtggctccttgtcagctcctgaataggtctagatcctgcactaggaagaccattgactggcatgagctgggggcctttaaaataacctcagaatagcacctgggaacaagccagctccatacactagtgagccccaggcagggaggcacgtaggacccccccaatagcgctttctgtttttccactcagttaggtgaccttggggtaggatcgccaaataaaatacaggacatccagataaatttgaattcagaaaaacaatgagtaattttttagcatacgtgtctcattgcaatatttgggatagtcttatactaaagcattactcgtcgtttacctgaaattcaacttcaactgggcatcctgcattttatttgctaaatatggtaaccctactctggcaagtccctgtacgctgcatgtccctctctgggtttcgctttctccatctgtggaatgggcacagttctgtgagacttgcctcagggattcctcaggctgagcaaataccctcatggatcgtccctttgtcctggtgagtcgtatgggaagcgcgcttgtctgaggagtttttcgctgtgtaaatatgagaagctccttcctccaaaagcctccgttttctcatctgagcatatgagactctcagaagtggaaacgattgcctggcggaaccatgactgctcagcttccagccaccggaacccccagctcacggcccccatcccttgaagccacggtcttccggtagcgtaaagtcacttccgtattcgagagccttctaggcttcgagccacgcgatgtcgcgccctctggcggctgggaggagggaccgactttaccaaacggtgagaaggaacagggaagtccattggttgaaagacggagaggcgcagctcagtcttccaacctcaaccaatgttaaaccgaaccttcgccgagggcggggctctcacgggaaaggggtcaacccgggactgaggcggcgtgggaagcgggcgaccttatctctgctcagctggaaaaaggcccagggtaacaccggaagtgggcttatttgcgcatcagctactttcgcttctacttaaaaacggaggatctgggtaaaagaaccgaaaggctgtacgaacctaagacttgtctccgatgtccttctcaaccatcaatttcatatgcgagggaaaacacctgctgggttcacgcagaatataaaggtctttgaaataattcttgatctctaggccaaggagttttacattttaaaataatcaagcgtgcctactgcttgccaggccctgctctcgccttcactcgcattattcaattaatcgacacaggcctgtgcagtgcgtcttaatgacaaggactcctaccctccactgcctgtgttggaatcctggttctgccagttattagctgtgtatcctggcctaagttactctctgccacagtttctgactctgtaaaataggataatagtatctaccttataccattattctaaagataaataaatttaacatatttaggttgggcacggtagctcacacctgtaatcccagcactttgggaggccgaaggtggaaggattgtttgagcccaggagttcaagaccagcccgggtaaaatagtgaaactccccacctctccaaaaaaaaaaaaaaaaaaaaatcagccaggcgtggtggcaagcacctgcggtcccagctactctggaggctgaggtgggaggaggattgcttgagcctgggaggtcgaggcttcagtgagccgtgagtggggcactgcactccagtttgggcaacagagtgagacctcgtctccaaaagaacaaaaaatttaacgtatttaaagcactcagaacagcacctgacacatggtaaccacagt

SEQ ID NO: 33418 - DNA, 2802 bp, Homo sapiens
cgccgccgccgcctcggcgcttgcagaacccagaagtgaacagcaggcgacccggaaggtttgcgcgcggctccgcagcgagccagagccggagcccgagcccggagcctgtgccggagccccagcccggccctgctcgggccgccgggcgcggggctgcggccgcgtcccggaggcgccgccagcacagccaggtccgtgcgggcccggggcgcgcggggagcgggcccagcggcggcgggcgcctgcccgcgggaaagttgcgccgagttgcgggcgggggccgggccggggcgcgggcgctgtcagcgcgggccggggcgctccgagggcccggggccgcctgcgcctcgggcccggcccagagcggcggcggcggcggcggcagcggggcgcgcggggtaggaagtgtctcccgcggcgtgtctggggctggtctccgagtgtgtgtgcgtgtgtgtgtgtgcgcgcgcgtgtgtgtgtgttttcttaagccgggctattcaaaccctgctgcaattctccggtaaacaatgattcatggggcataatgcaaataaacggattgcaaacggcgcggttcgcgcactttgcagccggcccggtggagcagccagtgccggatttctccctttttttgcagatctgcagaatatggcgtccctgtcctgttttaaaaataagccaggctgccatttttgtttttcttttgtctgaaaattttaataaaactgtctgagaatgtgggagaggcggctggaagcagagggggcacccgaagggttggcttttttccttttctttggcgagagccgcgagcctttcggggaggtgagacacaatgcaattgcactttaaagaaaaaaaaaaagggaagctgccgggcgatttgaggggggagggctgggaatttaaagttaactccgaaagtttgctttgctttgcttctctttctttctttctttctttttttttttttttggaaggcggtgaaatgccgcgaaaggatctcgaggcccatttctcccccagccagctgcctttgcaggatttttgggaaaagttaactgccggtttcctcagagctgcgcgggatgggggtgggggggcggatgtggagggttgaggatgggagttttgggggaactgggaaacatttatttggaaggggctctataaacatggcattgtaaggagctagatcctcagatctgggggagagggccggcaagaggggctcagaatgggtccaggatttccagcaaagacccctggcatgaggaaataatcctgctgtcccaccaccctgccctcgagcagtgtggaaccttcgggagctgtgtgtgtggcagtgggcctgtctccttcatgggtggccaggaccccccgtgtaggctggaatctcgcccaagccctggggtgacccttggaccctgaggcaagtgagcttggccctttgcagttggagagccccctccccaacctggtggtcctcctgcccccagaggtggcagctggtggtaatgtcttccccgaccccaccctatgatgaacttttggttgggtgcaggcctgcggcccagtgggtcccgtctgagggaaggggcaggaaaggtagtctggtttgctagacctcctcggtgtgagcctcacccctgtagtatgctcttattcctttctgccactcctgccctacgcccgggaggtagaagcactttggacttcggttaagttcctgaagtatcttgctggacaggtcagggcctgctggctccgcaggctgccgagggggatctgaaggccaggcccacaaggtctggggtgactggtgctgtccaaggcactggggcagtgttgggcctagcctctcatgtgtcccctaccccagcatttcttggaggggagacccttctagtctcactcctggtttgtgtcctggctccactagacagagtgagctcccagaagccagagtcgggggttgaaagctggggttaggggttcagggctgtggaacatggcatgtcttggccagagggtaccaagccaggtggtttttagatggaggaactgaggtccagagagaggaagtgacttgcctgaagtcacgctaccaggtagaaggagactgagaccgggacctgggtgttcaggcttccactgctgggctccctccactgttctccatgacgggcctggacccctggaagatccgttttgaacagaactggactagaatgggacagcacgatcccttcaccccctcctacccccgccatcataatctttcctgagagaattgaacttcacagttttcacagtatggtgtggtgattatcacatcaggttctcccagaaactcagttagggttaaattgtcctaatggggattatgaacctcattataaggaaaccaagactcagagaggttgaacagtggcagaggaggcttaaattcaggcctgcaggctcctcgcctggccttttcccaggtggactttggtgctgtgggaaggactcttctaggttttggactctctaattcttctgctgaacccagtgactgtgtaaacatccagaggcccaccccacccaaagaatgtcagactgaaaaggctcagatgtcaggaggtcacctgggctcagagaggggaagctactggctggaagtcagtgatttgggtctcagaaccagaccctgatctcctgcctcccttcctctgtgacactcagagggacaatgagcccctctacccattgccaggctgcacgggccccaggatggcaggaattgctagtgga

SEQ ID NO: 33419 - DNA, 1899 bp, Homo sapiens
ggcctagagaagggaagtgacaccctgagatcacagggaaggggagaaccagagcttttgcttcccacttctggtttcagctacccctgaccaagcccctagcctcctgctcacctttagcctgagtctccgaggccctggagtactcacagcagtggcaggaggcttttcacctgctccgcagagctacagagagaagcgccttcctgtcacccaggaagctgcaacccccattgtggccacaaggtggcgcagtgacatggcccatagccaccctcatctcaggaaaggcctgagcagcccggaaagctcagagcattcagctcccgtccctgggtgggaatttccccaaacgagggccttttggcacccagaaataccattcacccccaggcgaatcgcttgagtgtgtgcttctgtttgatctaatattctagttaacagaccccgtatccccgacatagaggtcactgagcctcagtttcctcatctgtcaaatggatgaactcacagggctgttggctggcagagtggtgccaaatcaacctgagctagtaccattatttattcactcagtctttactaaacacttctgcctggtgctcgggcattgggatgagccagacagatctattttttgtccccagggaaattaagaactgttggagacaagtattaaacaagtacacacgtaactgtttgacgggaaattgtgtagctgctgtaaagcagagactctcggccctagtccagatggacatttgggccggacctttccactgtgggcgctggcctgcacgtggcagggctctgagcagcattccaggcctccatccgctagatgccagtagcaaccgctccccaagtggtgacagccaaaaaatgtcttcagggatgacacagaggggctgagctgcagggccatgccgtcctgcattctggagtcctgcatcctgggggacagcatggccctgaagctctgtccctctgtgtcctccctgggagctccttttgtccctgccactcctgggttctcatcctggctctttgtccctggggggcaaaatcacctcaattgagaaccactgtgataaaagtgtgttttgaaagacagcagggaggacacaatggagctgggaagggggatgagtccagattgaccacctggaggagcaacacttaggtgaagccttgaaggataattggatgaggaggagaaagaggggaaagaagcttccatgcaggcgaacactgagtgcgaaccccctgaggggtaacaaacttggcacgttacaagaactcaaaggaaattaggtcagttggggccttggggctctgttagaaaagtttggatattttttcaggtggaatgggaagctacagggaggggactgtcaggaagggttttttttttttttttttggtatattttagagacggggtcttgctatgttgcccaggctggaatcaaaatcctgggctcaagggatcctcctgcttcaacctccagagtagctggggctacaggtgtgcaccactgtgcctggcagggaaggtatttttgcaaggtcactctggctggaggctgttcatggatcataggtggggttgttggcagtacttgtcaggtgccgggcagggctgccacttgctaagtgctgagtctgtaacatttattcttccctggagttcaaagggcagaggagggtcaggaggcgaagaggacagaatctgcagggaaaagggctccaaaggggtgagcaggagccctcgcttggctagctgatctccagtcagtccctgcctctctccaaggctcaagttttccataacctcctacaccatcaaccaatcctgcctcatccatactcctattttttgaagtacaatccagacatc

SEQ ID NO: 33420 - DNA, 5493 bp, Homo sapiens
taattcccttgtttcagtttaatgaattcttccatggaattaatccattctcctcttaattctgggatcactcccacctcctgcctctttcgctgatagtcatcagaaaacagcccccctctgaccttgtcttttgtgggatccctctatccttgcttgacttccctgcctccatcccccactcctgtctcagatctatgcctattaatgttcactgcaagacagaagatcactcttgaggtcagagtctgtcttcatgccagatacattcgtgagcagatatggtcaccagctcaaaggctacagagccaatgcttaactctgggaagcaaaactttttggaatttgaggttgttttttaaaaaagatcttgttaagagagagaacacactaaaaaactcttgcaccacattagaaactaccactccccattgtaacccagggcagatcaaaggagagacagaatccaagggacagatgggagagtgttttatgaatatacaaaggttcacagctacttcgctttgcagtcatcttgtagaccaatagctcctcatctgctttagtaacaaaggagtttgggctattcctggaatgaccgaacacaatctcgccccctgccaagctcagcacactgagattaatttaatctgcttcccgctctcccagactgctttgcggcctttggggaaaagcagcttaacagtgaaacttgcagaaacctgccctgctggccctgaggccagataaaagagacaaagaaatactctgaatttggttccttactcaattcccttgaccagttcagaggctataagtgctgccgggcattcccacaggtctcaaatgcctgtatacagtcaggcacctgaaaccgaaaggtggaggcaggataaggccgatgggagaggctgggggaggggagtaaagctaggcttcggtgggggaagggggaggtaaaatcttggcctttagttgacgctgaccacaaagggccaagtattccggtcagaatgaacagagcagcatgttccacggagtcttgcctaacatatgtctcaacttctaggctgtttctcatttctggtctcattcacaggctctggtacaaacagcccttacaggggtgggagaaaacaggaaggactactcagctcctgtttgtgaaattatctgctttgggactggtcacgtctcctaagcagagcagacttctctaggcagggggctaccactcactcagtcacctcgagatcttcaggggctaaccccatgtccaaaatatgacaggtgcttaatgaccactaaactggaatgtgtggcatccatgatctcagtcttcactgtctacatatagaatacagggctgcctagtgccaagataagcaatttggcactagctgagatttacaagttgctttctgaagctatgatgttttgagagcagctaggctggtggtacctgcctaccggagcggcatttctagatacctgattatgaagaataagagctattttttggcccatgtcttcctgttacagtggggatttcctcaacagaaaagaggtacaggtggacctctgaattccctgtcccctttgaaacatttttgccagacccaggcacttggcaaggcaggatgacctctagaggcagaggcagggaggctcctaggaccagtgggttgatgtccagagctgacgggctctccagcctgctgaggacagacgtcaggctggtgccagttatgcacaattgggccacttcagagccagtgctgatgttttgttttgttatactggaatacagcttagtacaggttaagtatcccttatccaaaatgcctgggaccagaagtgtttttaattttggattttttcaggttttagaatatttgcattatacttactggttgagcatcccaaatccaaaaatctgaaacgctccaatgagcatttcctttgagtatcacgtaggtgctcaaaaagtttgggattttggagcattttggatctgggatgctcaatctgtactaacatctgcaacaggtatttcagatggcctagcactcattctatctgaccctaagatagcctgaagacatggcttcaaaggcaatggagaccaaacggagcttttccttctaccccctcaccttggtcaatggctgatttccaccttatcatgagaagggagtatgtattttaacttaaaagacttctatttactgtttggttgcagtaggagtatgacagagctaatgaaatgaataaagaatttaaagaagcagagtagatgataacatggctcattttcttacaacaaattctgctcaacaaatggcaaacaaggtcacctataaaacccaaagcacactctccaagcccccagcactgaagtcacgctcactgtgctgcagttcagcaggcccagccatgtggccagggtggtctctgcagggttcccaaggaaccatttgctctagaaaccgcctcagtggagcactgcagagtgatgcccagttaaaccatatccaggagacagcagcaaacacagcacatacctggtccaagcaacaggccgtactgcagtgcggtaagctgaggacagagtgcccagtcctcatggaaagatctggggccacgctttacaatttctttggttatatttgggcccccaaagaaattaatgccactgaaagtgaggaaggcaagagatttcacaaacacctgtttgttgacaccttcccccagggcggggtaagtgaagggtaggaaagtgactgagagggagttgcggggaggagggaggggaacaggcaggctgagctctatctgggaccctgacagagtccatcaattagagattcatttggttaacaatttctttaaaatgcaagtatacatcttacagtcattcacactttactgtgaattactcgactcagataaacagattgctttcctcccaatttagggatggggtgggggagggggtgggtagtgattgttttggatcacggggcactagatcccagaggattaaagttagaaaggccctgagtttaacatcttaaatgtcctagatgaagcaacttggcctcagaggtgaggtgatttgcccaaggtcacaaaaggtcacaaaaaaagactctaggcttaaatcccatcctgtaatgctgggcaagttactctaggcctgtttcctcatctatgaaatggggtacttatatctgtcttacatatagctgtggtgaggattaaataatgtaatgcaggcacaacacactggactaggctgagcttggacacaggcagtggcagaacccacactagaacccagtgctttagacttttccgggtgggccacacaggtggagggagggctgcgctgattagccgtggatagcacgagggcacttgggaaaagaggacaagacatgtaaactgtattctgggaccttctgaggcagaggccagatatcacatgtgggctggagcatttgggttgggaagcacaggatgatctagatgagtgattcccaaattgggattcctggatgactaagcaggatccctgaatctagttaatcaggacgcacaagctggattcaatatctgaagaagccgaaaaggaaacagcacataatatataccttcaggagggcaaaacatgctattatttaatatcatgttaccatgtttcccaaattctaaaatgcagtcagttgttaagatgacccatttcccccacaacgaatttacacattgattacgtgtgcgtctcaagtacagattgtaaaagtgtgcattttagaataaaacaaacgaatgccatttatttggaagacagtatcttgtaaaacatgcacaaaatgaactcttagtggtgggaaaattatagacccttcccacctggggtcctctgaataccagaaggcagggggaacatccaatgtctgcagccttttcaaatctgctaagggcagagctgtcaaagggacaaggactccttgccttgacacagcaggctgtggctccctgaggaacctctctgaagcacctcctctgaaggacctctcccagagaagggaaggcacagcagtgacagaaggaccctgtggggctctttgctgagaaaactggtgagcttttcaggcacaggagggtcactggctgcggatgactgagatccacacctgagttccttgcagggggctggccagcaggatgaaggagaggccaagccaggggaccctccagccttgccctcagcgtcactgcaaaatgctcttgctgggtctgggttgaaaggtttggagagcttactggattttaagcatctgtgttgaccagctcccgttaaggcatctggcagggagggggctcctcccatgctggcagccattaccatacagctgactttcatgctgtctctcaggacacaggcaaagagaacggcccttctgactcacccacaatccccagctaaagtgtacataagctgaattgtaaacagctgaatgtgctccaagctgccacccccagctatgcaggaaggaatcaatggagcgaacagccaccctccccccaccccatgcagttcaggacaacgggagcagtgggggatttccaaacagctgcttgaacgcttcccagcccacaggctgaggactgcaagaggggcctgagctcaaactcagcagcagcacctgcaggaccagagtgacttccaccaggtcaacacaccagggaataatagctggccctggctgcagggagtcagggaggagttttcaaagagttctacttaaccctggtgatggaggccagtccactggtatccaatgccagggtcaagggctcccagatagtctcacatcatagtgctccggcccatgctatgatttcaaaacgcaaaatgtctagaaccaatgggagaggttctacagtagacactaagatcaggggagataaaaggaagaatggcagagtagaaagagcatgggctctgggggccagacctggactcatattctgttccacctttaatcaaaggtgtgtggcttcaagcactcactgcctgttctgagtcttggtttctccatctgtaacaacgaggctcatactacctacctgtctgggaggtttcagtaaatattatatatgtaaaatgcctggcactgaatacacgcagaagctgtgctacatggcagttaagactgtgggattagaaagactctaggcggccaggtacagtggctcatgcctgtaatcctagcactttgggaggctgaggtgggtggatcacgacgtcaagagattgagaccatcctggtcaacatggtgaaaccctgtctctagtaaaaatacaaaaaaaaaaataaataactgggtgtggtggcgagcgcctgtagtccccgctactcgggaggctgaggcaggagaattgcttgaaccctggaggcagaggttgcagtgagccgagattgc

SEQ ID NO: 33421 - DNA, 6010 bp, Homo sapiens
ctttgattgttcaaaaatgtcttaatatagctgtgtggctttaggtcacatatggatggtttcaaatatgctaaagataccagtaactagggataattatatagtatttgagacataacagccatgcaactagagttttaaaaataactcaagcagtcacgaactttcattttcttgccaacagttccaatattcagtatcaggcctggtcctcctaatctactggagaagagttggttatggcatggcatctaatagtcatctcttcttaatacaaatgataataaatttcactgctaagacgacaatcatctgaaaaaaacagacatttgcttatgttttaaagtcataatagcaaactggggctctcttcaacatctggattcatctcagagcactggcaatctgtgtttaacagcagtcatgtctttaccagatgtagaaagaatgttctcttcttttggacttacctaaatatcatttggaaattggaagaacaggaaagcatatcctttttcactaactataaaaataatttggaaggagaaggaaacaaaaaaaaccttgaagttttctatgctggtctacatggtcttacaatgaatctcagagcaacggtttatgacttaaattatatgctgtgttccttagcatactttttcttcaaaaactagtaattctaaattgtataattcttgactatgataaaagagcccatttcttgaccatgtcatttatactggacttttgttactgatggggaaaaatccagaatttgtaataattatgtcttggatatgcaaatggttgattattttcctaacaattcccaaaatatccacatcataaagcagaattaaagatggtttgcctctcaatacctttagaaatatcaaatcagtgttctgatgtggctagtaattcaaatgaaaaatgttaaataagtcattgcttcaagtgaagcctacctctgtttgagttgtgaataagtagttatcttaaataggcaactttttttaaaaacagaaaacatattcaaaaagggttttaactggtgactcatagtttaaaccatgccctaaaaacatttaaagcataaatctatgtgttcagactcccatcttgaggggtagttcagttttgggttccatgaaacaaggtgttaagtccccaaagagagagccatttctgtcattggcacaaagtccccatcagagtagactgcataacgcagtcagttctcaccctgctttcccatagggctggggactggggggaggtggggagggtgggcaggctcagaggggcacctcactccaggacagtctcctgaggggtacacaaaagcctctctctacaaccacttttgtgagattcctcctgaccacagaaagtcatcatcatgatcatctttcagtagcaaaatggcacaaaacaaagggaataaaagagaaactatcaattatgaagactcctcattctcatttccctactctcgtctccagtaggtgtcctttcagaagagaatctttctatggctggaactaaatctgtctggagattaaatattgaacagctgggagaagtttaatataaatttagactgactcaagaagagggaaaaactcttggtaaacaccgtactaatgatgagcagcattacaggaactggagtcaccaacctattccctaggttttttaaactttaactttattttggcttgctgatccatgctggatgaaagtgaggaggtgggggaactttacttggcaaatggttactgaacgcctggcctgaggtccacagcctaaaggaggacagagacttaagggaagagtttaaggcagtgaggtcatcccctttacacattcacaatagagaaaagtagacaaaaagacacctacgagcacaccagtaggggttcctaattctgagacaataatcatgttctgtgtttttccttaaataagaaaatgtagagaggggacagcctatgtaagagcatacaaggccagaggtaagaagagttcaattgtgtaagatcatccatctacttactcctcttaacatgccctctccccctgaaagatcagaaccaagggatccaaagtatctgagacaggaaatgagtaacacaggaaaaaggatgtggtctgaaaaagagtggattctggggctgagccagagcaaggaacaggcacagggtcatagctgagggaagggcttggtggcaggaagagaaatctcagggtcagtccgcttagactagaaagtcaatgacagagcaggtatgtcaggggaagcagcacagtgccttcctaagaggctctccttccctgaaggaggcagagaatgcagaaacaatggctgatgagatgatgagacccacagccaggagaatgatgactgtgacagaaggaaaaggggctggaggtccttctttacttagagggaagagtaaataatatatatggagtgagcttgacaaaggtaaattaaaaattaacccaggacctgggagagagtggaaagggccaggaggtggggacatgatgaaacaccaacattcattaagcacctttgtgccacatgtcagtaaagaacagtttgggggaaaaaagaagggggtgaaaacaggagagaaaacatagttggacaactgagaaaccgactcaagtacaacagaaaggactaagaaactaccccctttctcaagattcaggctggaggaaaaagatgtctattcttccctgtgtgcatggacgagcctggaaacagatcttgggtgggctgagaagcagagctcatgtgatgaagagtgcctggaaagggcaggtgccaaaagagcaccactccccatctgcccgaccttctgcgaaacaagcccgcccttgtgagtgagccaagccagaggccccagttcccgccttgcaggggctggaacttaggtacagagaaatcaccagtggaaaacacagtttatcagctggttagaaagggtgaatactcccaaatgtagatccagatgttgggagctatttgttaaaatcacttttatattccccagtgcctagggcagtactttacctaaaatgggagccaaataaaagtatgttaaatctaactgaatgaaaccagaactgctttgctgtgctggttatcttaaggttcaagacagcctcttgcccgataaccaacacagtcaggtactttatttctgttctaaagtcaaaacgatgggaagccctacatcccttgtgacctaaacctaaatcctaatcaatagggtctgccacaggtctgttgccctgtaccagaataaaagatgggcgggtgggggaggtgggaagaaatacaagagcaagaaggaatttccttgcctcattagcctgtaatgttcatgctgacctagaaatcctggcagttccaacatttgggttgactcaggcggggaagaaaaatcccaggtgaatgataattggattacccagttatgctccagagccaaatggctggaaaaggccaggtcagtaggctgtggtacaaagtgacattattttttaaaccaaaaatggagatactcaggctgatggacaatgggatggaatagtttaaattggggctgtcctagaaaaatcagggacatatgatggatttaggtaggtagcttattttgcaagggatcctctgggcccaatatgctaatggagaggggattaaagatcaaacacgggagatatccgaggggaaggctgtcattgatttgtaagggaagaaaaagatgaaaagagtgtgttccgtacacagcacatgaaggtacatatcgtaggtatggagtaggaaggaaaggaaagttgttcagaaccgaaagtatgtgggtgagatcagttcaggttatggaagacgggtgggtgggcagtagcagggcactgactggtatccgacacggggcccagggcttagttcagatggtagcgtcgccactggtttgcaacctgaccttgggccaattatttccctgtctgtggacttcagtttaaatacagaatctcacaaatcccgattttaatgtaaagaagcaacaaatatagtctaccttcatttggcataggaaggagagaaaacgctcttctaaaaatggaagaaaagacacagaacagcttgtccctttccatccaattaaaaacctcgtgagactgaactagattaaaaacaaaactctccagcgaagccgcaggcgcctccaagatagggagtccaccaccaataaagtacggcagatgccagcagtctcgtccccgaacgcaccgtccgtcccagggaagtcgcagcggcggggaggccggtcctaggttggggctggggtggggtgtgcggggcctggggacgcggaagctgcggcgcgccgaggtgacacggcttccaggggcgacgggcgcgcagggtccccaggcgagcgaggctggggagcagggcacctcccaggcgccgcgcggacgagagccgcgactggcacggcctggcagccgcgtaggcccgggccgttaggggcaccgagggcggtgcccgacttccagtgcggcgagcgcggcccccggcctccctactggcgagaacccctcccccgccccggcactgacctgtccagggcccggctgggcctggccgggcggggcctacgcagcccctcggccgggcgccgactcgcgcggggtcccgggcccgggcgggccgcctcctctccgccgggagcctccgagccggggcccggggctgccgcggcgcatccgaccgcaccggcctggccggcgtcaacaaagggcggccggggcgcgaggccgggacgggggcgcgaggccggggcgggagcgcgggcggcggccggggttgcgcgcgcgcgcgcggcgggcgctcgagggctgcagccgccgcggagacaatgcggcgagtctgggacggctcccgcggccgcctccgccgggggcggggcgagggagcggggcggggaggggcggggccgcgggaggggcggggcggacacgggccgcgcgcttcctttgtgcggcgagccccgcctcgcgccctccggaaggcgggttagggacgcccggggctcagcttagggaggcgggcgccacgccacgaggaggctgccctgatagccggtgcaagtgctccttggcggggcggcccgcgactcccgccttggaccgttcactccctgaggggcctgggggtcagtcagaagactaacgaccaccagtcaccgagagctcagttcgtgccaaaccctgctcgcgctgtccccgacttattgttcacaacgaccctacaagtcattctccttcccactgggaaccgaggatcagagggaagtcatggcccgagtgccccggtcacacctccgtgagcggcctcgggctcgcggttgaggctgattgaggaagtgggttcaggcggcccgccgtgcctggcacacggtcagagtcccgtaagtgttggttatcttccccaagcgcaccgggtgaacctgcgctgtcgtggcgaagcatactcattcagcacgcgcgcgaggggctgcgggggtacagagacgtgcagcgtgacacagtccccaccctcaggagcgcgaggcgcaggaaggtgctggacacacgccaggcacttctctccattcttgacttccctctgttcccaacatggtcccattttcttgccttccttagtattcatattcgttgcctgcctttcttctccccccacccctttccactctcaggcctcatcccatcttctttgtttacatttattttacattccccgaatatttacttagctccctttctcctctatttttcaaattttcaaccccccttttcattaatattcatatttccttctcctctgcctctgcatttcttacacttatattttgttttataaactagggtaacacaggattgtatcctcaactcctgttccctaacatgcccacactttcctgcctcc

SEQ ID NO: 33422 - DNA, 1103 bp, Homo sapiens
tggggaggggggaagatgaatttaaacctcgccttataagaaatttgttagacactcacgtagaacagccgcttcctccgtgtatgacagacccgatccaggtgtccagcagcgaccttttcccatgggtgtcaggtcatcactcagcacagaaaacaagggaccagcgcctttctagggcatccctccttctccaaccttggggcccgcttttcctttagacgactgttctctcctcccagttccagcaacccccggttccctctgctggtgccccccacgccacgcttgactctgggccgaaagtgccagcggctgcgctgtcacgccgcggctggggagcgggcgccccggtcaggcccgacgcccgggtctcaccgcactctgcgggacaagcggagcaggcgcaggccgcgcaagaccacgggctgccgcggcgcgggcctctccgcaggaggggggtcggtccccggagaaagcgagtcactgacgggaccttggcccgttcccgttccggttcccgttcccggcaagcctcggccccaggctctccgcagccctcctcgctgcgcgttcccggcccgggggcgccgcgctctgccggtcgccggccgggactgcgggctcccagcgcgggccccacgccgcggaccaggggtcaggccgcctgccgcccgcctgtccgtgcccatggcaatgccccgccccgcgcggcccgtcccggccgagcgctccggcccgaccgtgacagctgggtgcccaaagggttaagccggcagcgcggcggccggtgtcccccgcgcgctgcccgtcagccgcgagctggccccagcgcgcacgcgcccgcccgttacctgcggtcgcctccgcgctcctcctccacctggccgctctctcccgggggccgcccctcagcccgccccctcggctcggcgccgcgcaccctgctggctgctcggacgctgcccgcggaggaggggcgagggcgctattaccatatattagcataccagcgcgcgtcacgtggccgctccagccaatggtcaccctagaagggcggggattgggcggaacacgccttagtgctgctcccagcctgaacc

SEQ ID NO: 33423 - DNA, 453 bp, Homo sapiens
atcttgacaaacagtggagtcataagtcaggctccttgaaacacttttatgagcgccttaatgagggagatgagctgtcatcaggaactcatcccatccttcctgaccacaggaaatgagctttttgtgctcaaaaggtttccaaagctgaggcgcaaagagttttcaggaagtgggccagggatgagaagttgttgactcagagaatcccagggctaaacagcccccatcctgccattcaccctagagggtcaaatgactcatggtcttattgcagcaatagcaccaaagggtggtgtgtgtatgtgtgtgtgtgtgtttgtgtgtgtggtgttaatcctccccacttccccatatgtgcacactccaacagccaacctattaccccctgacaaaaagatactgcagaatagaacactggttaagagcattgtctctggaatcaaagatcca

SEQ ID NO: 33424 - DNA, 935 bp, Homo sapiens
gtgtcgcgcccgttccgatttgttccagtgccagggtccgttagaagatgacatatctattggctgaagacgtctgaaaggcagcaaacggagggggccgcccccggcgctcgcgcggttccttctgggaattgtggtctcagacgttccattcccagggtggcgccgctcggactccgcgtcccagcattccccgcacgagcccgggagcacttccgccctgttgtgaagtgggtgtctcggtgggtgagtccgggtggcggggcgggggcagctgagacgcaggctctgggctggagacttaggaggtggtggtgacacagggggctggggaaggtgagaggggagaaagaagcttatatgtgggggtggagggtgagggacggtcaaaggatgtagaggccggagatgggaagggtcatacaggggtcggggatgaggaggcgatagagggccctgggaatgaggagggccttagaagggtctgaaggtgagggggttgagggaggttttggaggtgggagagtcatagaaaggtctggagaccacagaggaaaggatagagggtctggggccctggcaagaagtgaagagggcctgagcttgaagcccgaccttaaaaatagtgtttcaatctctaccttcccatctagaacaagcatatctaatttgttacctccctaatgattgttacctctggaacccagtggatgggactggctattgtgttctgccccaaacctgcacttctttccttatgtcttatggaagtcagtggcacgatcatcccatttacctacctacctacctacttacccactgattcctcttgcattcttccacgtccaaggatcttccgatctttaatttctttaatatcttttcagtcggcctctttcttgtagggttttcgcagaagccttttcagtttccca

SEQ ID NO: 33425 - DNA, 2057 bp, Homo sapiens
ctgaaaagcccattttctacttcactctttgatgtccttcataatctctttcccaaaagcctctcatgctctatcacatcatgtttctcctctttggtgcacacgaatccacagtgagctgtaaaaatcaccgatgcctgggtccctccctgggcatgctgacttatttggtctggggaatcaccttgtcaccctgctggttctaatcaggatccgagttgcatggactgcactaaaccctttatccctgcacctttttttctggcccggagattaatgtccacaaacccctcagctttcgctaagtatccccctcagccatatctccagtgaccagaagaggtatctagagaagaaagataaagccacatgcaggactggctctggaggctggaggctacagataaggcttaagaggggtccctggcggtccccaagttcactcctgagagtgggaagcctgttcatcaccctctgattgcctttcctcctgtctctctgggttttgtaggccagagacatagagcactatatggactcctggtgggacaggttgctggcaaattgatttcaccccaaccccagggtgggcaagcagacagtacccatcaaatctctcacctccttcctgccagacacagggcactgcagctcagaggaagtgagtgaatagctgaaactgacgtggctgcagaaattgacatcaagtgccagacaggcatttgcttagcaaattggctaattttaacctctgcctcacagaccaaaactctctggaaggaaagaaacaaaaagaaagtgatatttaacacatttctatttctgtgctacacagtctctctctgaggttgcaagtttgagcctaattgatttcttagtcaaaagaaaaaaaagccaaaaaggaaaaaacaaacaactgagagagatctcacattgcaatcaaacctctccagttctgttgtcgactgctgagcttttttttttttttaaagactggccaagtgacttgcataatttaagatcctttctagcactgatcagcccgctctggccaagcagtttgctgattaattattaatcagactgagtttaggatgagtaatcagcaagagtcagtgctaatttgcaaatgtcccccaggaaggttattacttaaaatacttggtggagaggctccatgttaacctttgcaattagccacaggacattgtaactggcaaggcagaagcagatctctcctccaaacaaaccaaccttggatacctactaagtgccaagatgcacattaggggcttgtcacggttctgctggcaatggcaggggaggggaagggcacagaagaaaaagaaatacgtaagtaagcaagaaaatatcaggtattgatgaatgtttaaaataaaacaagatcctctgatagacagcaagggttactttaggctgcatggacgggaaagtcttttctaaagataggaaatttacattgaactctatatttcaaaaaaacagtggtttttgttttttgtttttttaacttggaaggaagatttgaagactgtgaaggaggaggatcctaagccctgggaacagctagtgcagaagcccgagcagggaacctgcttagcccaccctagggacaggatgaagagcacagagaatgggtgtgagtgagggataggagggaagtcagacaggtaggcagtggctggacaatgtagggtcttgtaggattttattctaaatgtgatagtaagccattgggaggctttaaacaggggagacatgatttgattaataaacccaagtcactctaggtgccatctgcagaatggattacagaggggtagaagcagggagacaaggcccccgagcagcccaaaggtgctggcggaaccaaatgggcagaagcagcttcctcttaggaaaacagatgtgggaggtcgtggagaaggctaagagaacagattatgagtggggaggggatgagaagtccaaactggatggaaacaacccaaatgtccatcaacagatcaatggataaacaaaatgtggtttagaca

SEQ ID NO: 33426 - DNA, 1898 bp, Homo sapiens
tggtgtgtctaagcatgtctgtgtacacatttgtgcatatgtctgtcatgtatgtacttgtgtatgtgtaactaagtcaaaggaacaacagataggagtgtgtctatgtctgtgtgcccagacctgggacgagggagcttcgtagatgtttaaggcatctgtaaatatgagtgggaagctgcaggtgtgtgtgtctctggggaaagggctattatcagtgggtactgttatttcagctcacaggctaggggctgaattcggcaaccggaggaactcctggaaaagactctagggatgttttgctaaaaatgttgtttccttctaaattggctcaggctagagcagctctttcctttgctggaatagtgctaggaagacagccttagccccgaagctcagcccccaagccgctgggctagggggccaaaagctggtgggatctggtctattattatcaacaggtaacactgaggcacaggtcctttctggctgcatccagacagatcccggtgcctgctattgggcagcacagtgcacagccatctggtgggtggccaggtttcccaccactgctgtggaggatcctgtgatggtccccaaagtatgtctgcattgggagaataaatgctcagtctctttagtgagaaacctgtgtctgccaccaatcttgtccctgctccacactctagccatatccagtgactcacaatgtctccttgatgcttccaggcctttgcccacagttatccctgcctgccatgccttcctccccaatacccctggatgtaaggcctcgctgcaaccctacttccttctggaaggaaccttctcagacagaagcagcctcagccaccctgttctccatttcttccctctgccacctcatggtgttcatctaccttatcctggggctatttctgggcatgtctctctttttttcttgttatgagctcctgcagggcacagtctagctctgactcacaactgtgtccccagcactcaggtcaaggcctggcactgacaagtgagctgaatcacctgtgagtaataaaacaaaagtagaatccagaatgagagaccaaagtgtgtggctcagaccacatgttctgtaagaatgtgtgactccttcactaagccatgtgctcactgaaggcaggaactgtgtccacaacatccttgttttcgcagcctggcactatggatggttggagagaaggaatagtggaaggaatgaggaaaagtaaggaaggagaggaaagaaaagaaaggtaattcgaataaaggaatgatggaaggaaggatgaaggggtggatggatggaaggaaggcaggaagataaagatggatagtcagacaaatggatggacagatggatggatggataagtagacggatagaaggaagaaaggcaaagatgatggacagatgggtggatgaatgaacagatggatggattgatggatgcatgagatcggggggcaggggccagggagggtttcagggagagattgggattgtatttggctgaaagagagtcccccaaagtggtccaagcctcaggtgtgtgctgcagaggattcatcatttagtccacaaaaaggtgcttccagcatccagcacttggccttccagaggcattgactcagtttctttcctgctacagaatggagccctggcaccaaggagccaaaaaagggtcaagggagcctctttctcagccagtggccccagagccagaaggacgcctgtggtgaggagggttgctgtgacgcagtgggcaccgcatcactgaccctgccgcccaagaaacctacatgtccagccgagaagaacttgctctatgagttccttggggccaccaagaacccaagcgggcagccgagacttcgaaacaaagt

SEQ ID NO: 33427 - DNA, 1438 bp, Homo sapiens
tcccggataggtgagtcccctctgacggtgggagggtcacggctgagagcaagccagggatgggaatctgtcaaggtgcccaagaggcacatcctacaggccagggcccactgagagtgtctgagctgaaaggtcccttgtggatcctggagtctatggaatttcatgttctttttcactgatacaacttccccatcccatactcccccaccccaccaccactcagactttggcaactcccagaaccacacctccaccctaacatgcctctgagtcccaccaaatgcccactagacaattccctgggaggcccccaggcatctcatacccgccactcccaagctgacctcatcagctcacccagacctgcccccttgaagatgccccaccccatctcatgcaggacacagctattcacccagctgcccaagccaggggacgagacaagcctgacatccttgtccctcacaccccacacccccactggcaccaaatcccactgattccagtccctaaatgccacctgaatctgctcttcctctccttacaacaacctaactacctcctggacctcccccatctgccctccgctacagggatggagtgatttatctgtctatgcaactgaccatgtcattccacctgctttaaaatttcttccaccatcaccagccccatgccctcagcatggcccccgctgacctccccacctcatcccagcttcctccccttttctacctgcaagtaataccaaagggctcctggttccccaggcagacacgtcatgtggtgtcattcctcgtgcctttgtcatgctatttcctctggctagaatgcccttcccaccccctctgtgatcctccctcgaacctctaggacagctttacccatctctctaagtgccagcctcgcttgtccctctgccactctccccaaatcggaattgtcacttcccctgagtgtctccctatcagtctgtgagcccttaatgggcaggtcactgagtcatccaggtccctgctgccttcaataaatgcttgttagatgagtaaatagtctgcttgggggaaggaactgagtcttgttcatcggaatcttccaccacacctagcctgcggacttcagcaaagcatttgtttgcttgctttgttttgtttttgttgtttcaactagagccagcatcaaggtctcacctttaggtaagcaaacttgagtctagaaaggggaggaggcccttcaagaccacacagatctgctgagtctgtcaggggctctgtcctctgtggtccacaggtagactccacacccacccctgattatggcataagatcgaagtcacctgtctttagggcaggctccctggaagcagagccagaggcaggggtttctgtgcatgtgaaggaagaagcaaggggagttggggagggaggggctgagc

SEQ ID NO: 33428 - DNA, 1016 bp, Homo sapiens
taaaatgagagagcaaggcagctctatatcgactgatgggagaaatgtcgtattttgctaagtgaaaaaaagcaacgtgcagaagagtgtagatagcatacttccacaggttaagactatatagttgaatatgaacagacgattcaggaaggaaaacaagaaactagggaccctggtgttcaggtaggcagctccggttgcagtctgcccctctgagtcactccaggcggtgacctcccccaacccgccctcattcctgaacttctttcctggcacaggactcactgtgccccttcccgctgtgggtacaaggtctgccccccaccccagctctccaaagcccaccggcctccctggaggccgaggtcgacggcccgtcgcaccgggagggggggctcccaggggtgccccacgcacggtcaaggtcccgcgccaagcggggaccgggctgggccggaagcgggcacggtactcgcggcaaactagcgtgggcgagtcctgattgcagtcggacctgccgccgcggcacttaacagtttgcagagtgcttcccgcccctgatctcattggagccttcggacagcccagcccatggccaccgatgcccccatttcacgcctgaggaagcggaggctcagacgggccaccagcccctccggaggctggcccgggagcgcctggcagcgtcgggtctaggagccggctccctcctgctccctcctccgcgccgcccggggtgtgcccgccgtctgtgtgcaccactgctgagcccagctccggcgccctcgcctctgctgtgggccccggggacgcggggtcaggccaccgcgttggccaggccgctgcaggtaagtgctggacggggcggggcgaggctgggcgggaccctcaggggcgccaagcgctcctggcgaccccctgcggcagggctggggcttgagcctgccagtgcgctgggatggggcgcgaagcgggggtgcggggagcccgccaccccgtacctctcaatcctccct

SEQ ID NO: 33429 - DNA, 847 bp, Homo sapiens
tggccccttcccccagctctgctgcctccaaaagctgtggaaccccagcaacagcccagagacgcttcctgagaccgctgttttccttggccctgaggtgagagacagtgtgcccaacaaggtggaaaacaagacagtgggtgggggaagtaagaggagagcaaatctccccacccaatcaacctgtctctgtcactggtggaagcagggatcagagggggctgcctttccacccacccaccagcccgtccaagccattgttcccttgttgtgacagggggttcaactggagcccacggactgggggcttcctccccagctcgccgtgcttggacagctggaggaaacaggcggctggcgggccagctctccactccaacaacaacaggctgcccgcccactggcggccttgctgggggcccagcctggagccagagaggccaccccactccaccccatcactggcaaaacatgttttcttgttttctgaaggggaggaggaggactgtacccatgctgagcaaacacaggcactgataagcatggacaggcctggctgccaggtggggctgcagaggcagggccaggaccaggctggccccggaggtcattctgaccagcctgccaggttcagagtcaggttgggggacagaaagcgcctgccactccagggataaagcacccagccacaagcctttcagagaaagagaagagactgccaggccacagacctcagaagcacagcaggctagccttcaagagctggaacgctctatcaggtgcctgctcctcagccagtctctatgccagtccctttgccagctattaatatccttttcagtgcttg

SEQ ID NO: 33430 - DNA, 557 bp, Homo sapiens
gtttcactcagcggcagtcccaccagcctggagccctggggagctgaccagagtcaaaaggctccctggcaggcttgttctggcagctgcccagccgacttgtgctaacacagcaacaggcacaggaaagagtctagaaagagtggaaaagcaccagacactgaaccgctgcagggagagaagtgattcctgccgtgctcggagaggaccctatactaaagccaccaccatcattgggctgggaagagacgggggtaagcggggagcaaaaagccccaagcacatccactcactcatgtgtttcagtgaactgtgactggaaggccagtcaaaaagagggtcacatgcctccaaggtgaatcagcaagcatggaagaaaaccggtctgcaccttggttcatcccagcaaccctgacctgtctatacccacgtccacataaaccttgctatctaatgtcacccgagcagaggcaagagcacatatactatcttacagccaccgcaacggctgatttcagccagcctgtgggaaagaaagatctagctgagaacactaa

SEQ ID NO: 33431 - DNA, 2054 bp, Homo sapiens
ttaaagcaagtcctctgtataagtaaatgcttccctaaatagcaactgtccgttcagatttccaaacctgtcttaaaacatatcgcgcatgagttcacaactatctctcacatgcagcataaagtctctcgctaccgtcctgctcacattctaatcattcccaaataagtcaattcattcctttattcgacacttataaccacttactctgtgtcaggcacgatgctggcttaccctgtctgcgtttctcaagacactttaagctccaaaaggctaagaaccgtgtctgtctggcccaattatgccctatccatccaggcacctctcctaccctgcctggcagagtgcccaaaaaaggtctgctgaacgaatgaatgacagcccaaactccctagtgtaaaatcacaacatcctccacccactctcccccaaaaggtggcaggagcataacagatgcctttgctgattacaaaaacctaaagactccatcatagtcgtccccaggcagggtatcacaatgaaagaggcaaaagtgtctgaaaaacactgtgacgcatatttccagcccggcatggaggacgtctgccaaaagcatccggtaaaggtcaactgggctgctgggaaacctgccccagtgcgagggcccggaggcccaacgaggccagaagccgtagtcccaaattcaagaactactaacaaggacacaggaggcctgagaaggcggaagaattagccctgacagtcactagagcgcagtccaggaatgggagcgcaagtaaggcgaaggtccatccaaatggctacccttctcccttctgtgagtctcccggtcccctgtccctagcccacctcattcatggcctcatcaacgtccgtcctcattgaggtgccgagaagccctgtctgcggagggctacctgggctcccagacttggcaccagaacacccgccagagaggggagctggcagatctggccgggaccggggtggaccctagcgatcactcctcccgtaactcagaggttactggcctgggctgacccgacctgctcgccgggaccgcgcgctcacctgcggcccagcccacactccccagtgcggcccccgctctccgcccgctcgccgggagcacggaagtcgccgcacccagcggcccgcgggaccttgccctgtgaccctgcccactggccgccggctctctcggagcgcagggattggctgaacttcagccaaaggacggaaggaagctaggcgtccgcaactgggccccactgcgctgaaatggacgtcgcgccctctgttggccgggaggtttctcagtgatgtcgccacgtgttttctgcgtggaaaaagtgaaagatcatccagtcatttttttcaactgatgtttattaggcgtcttctaagacctaggtctgggcacgcaaaaacaaaagacatgatccctgacctcaagaagctcttcttagaagagtatattttagtgctttaagacctcttgggatccgggctagctttctagtgaccttgggaacattattaacctgtctgagcctcccttccccttctgtgtagaggtaataacacccatttcgcaaggatggtgtgagggttggaagagataatatttgtaaagtactgtggcaggcacacagccagcagggaaataaatgtggctattgttagtgtaaaaataattcaaatatagtaaaacctaagtcttacatgacctcttgggtacaagtattcacttcctcctctgtgtccccactgtaccctatacagacatcaattttatcatatacagaaaagtcccaaagctcaagcttgttaatgctcccacaaggcccttcccaccctcatcccactaatctcagcctgcatatttattttgctcgcacatactaaacccggcagaccacactgtttcacacctcagtgccttattgatgctttttcatctaccttcccaccttttttgttgttgttgttcaatttcactcttgttgcctgggctggagtgcaatggcgtgatctcggctcaccgcaacctc

SEQ ID NO: 33432 - DNA, 1938 bp, Homo sapiens
gtgggcatcagggggccgaatctcctttccaccagctggcccatccctggaaggagctcaggcaacccctgctatctccaaaccaagagagtgggctcccggtcccttctcccttcacccccgtcctcccacacacgggacggaggtggcctcttctggagagagcagctggctcgagtgcagttctgccgttttatttttcctgggatattcaaggggatgtgggaacagccacaggtgtggtgaggggaagcccccatctcccctccccagccgctgggaaaggggagaggcccaggcgccctggtcctgggttggtccagccactgtggtccctgggcccagtgggcagagggctgaggatggagcccctgggagggtggggcgggctcctaggcagggttcgggattcttcataaaaagccacgaagcttgatccccacgaagcccagccccgcggggtgggggagggggggacgcagagcccagatgagggacccggcccggcctggcccgtgggggaaagaatggcagagatggtgcccatggggaggaggtggggacaaagcgtcggaccaggtgggcaggggatccaggtgaggggcgcagggcggagaggcacggccccctgcccagcccgggcgccttcgcgtgggatcaggaaggtaaaaaacccacgagagtgtgacgggcccgggggccggggcgtccggtgccggtggggcgggcgcacggggcggcccgcgttcacagtgacctcgacgctgggtgtacagtacgggtggagaaccgcgggcccgggccgggctgggcgggccggaccggtcacagcctggtctgggcctcggggatgtagatctcgatgctgtcggcgctctcggtggccgagctgtggcggaaggaagcggcgcgcttggccgccaggagccgcttgcgcgcttcctgccgctgccggtccacggagtccagggagcgctccttcaccggcacgccccggccccgcaggggcttctttggtatcggcggagggaccttcttctcctcctgcggggcagagggcgtcgctgagctggggcgccgaaccatcccaacacccaggtgtccgcccccgcacccccgcgcccagagtgctgacgaccgcgtggctccgaacgcgatggcgctcagaatccgccacggatcccgtgacctgaagccccaggtgctcctgttccgacaaggtcaaatccccacattttccaccaaagcgcggcgcgttcgagcgccccctggtggcgccgttctcaacagctcgcagcagagccggtttttcactccgggtcccgacccgaaggagggagttcccgacccaggctccgcaatgagggtgcacataccaggcctctggccctcatcgcagacaaggtccagggacctggcggctgaggggaccctcaaggctctgccgtcgatgcctaggcccgaactgaggacagtctgtccttccgtaaggtctacttttgctctctccagctgcagccgccgccacccccccaaccccgctcccccgcgctgaggaagccttggggttctggcagctcaagcagtgatgagcactggggccaagcagacggcagtggccacgagcgtggtcactctggaaggggatggtcacctatcacctgtccaaggctgcccttgctgcccatggatcccttcccctgcccccttgttcgtcccaccctccacctctctggggaggggaatttcccagagtctggcctctttgcctgaaggcaccccagccccaccttaggctccaggagtttccagctgttggccttgagttgctgtagctccaggaacttgagggtcacatcctcgatggagagctgtaggaggtcccagaaacccgccaggtcctggaaggtgggcacagggaacgcagtgggatcctgc

SEQ ID NO: 33433 - DNA, 2032 bp, Homo sapiens
tgttcaacaaggatgagctccccagatgctccatggcatatctatgcctgtgccctcaacttcccagagaaaagaactactactctaggtcaggtccagggctgaggtcagcctgaagaggagagggctgccctgtggcgctgagctttggaatcaggaaacaggctccatgctccaagtggtacagagattgatcttctcactagacctctcaagagattacaacccagccccaaatcccaggaggagggggctgggcttggctccctagtgccaaggcctggggaattccacagtttccttctttgtgtctggcctggtttctcttaaggctgctgtacagggaatatttggaggtgaggcagagttaggtgggctcaaagtgactcttcttgtcaaggcaggccctcccctgagccaaatgacaacttcatccttactttcggggatactttttcctgttcccactcctcagctctacctcccctcctcagctctgctgggaagcagctctaagctgtctgtctctggggatttatccaggccttggagagagatgccagcagaggtctacaagtctggctcttttgagggactggggagattggtgaacaggatatgaaagctttcccatgagtctggaactagacagaaggctgaaagacgacttcagggcatccctctcaggcttccgagagaggcttccctctctgggttccgagttaggagtgtctagcttgtgtcctgcttcctgactagatgtgcaatctttagcagatatacttgcccttcagggcgggcttccttccctgcaaagccaggattactacaccccaaccccacgaacctcccaaaaactgaagcaaacggcgaaaagagggaagagagcgggaagtgagctcattttcccaccgcatcatcctcccccagggtccgggggggtgggagggacctcctaaggctctagatttgcctggggccaccaatattctgcaggaaggggaggttctgtccccttccgtctagggaagatccagagaactcgaggaactccccaggcaggacctgcgcctcagtcgaaagccaggcgctttcccccagctccagctgagcctcggaagcccgaaggcggcctgccgggccgggggcgaggagcggcagggcggagcacacgccgccgcgggcccgatcccctgccgcccgcccgcgccgctcaccatccgctccgaaactggagccgagatctcctccgagagcttggccaaccccacgagcgcgaagaagccgcccagcagtacacgcagcaccgaaagcaggagcgccatggccgcgctccccccaccgtgggttggccccgccgaaaacccgcccctgccgccggctcatttcctccctccccggggcagccggaagactctcgcctgagctaccgtcccccaccctccagggggtcgcgaggctgcagtactggggcagggcgcccccatcttacaggtggggacacttgaggaccactggctggtaactgactaaacaggcacctttggattcagggagtgtttcccagccaatacggagtgctggcagacacgggtgggtgtctgggtgcggttcagctaccatcaaaagaccccgggcttcgttcctgcctgtgccacactagctgtgggatctgagctgtcacccaccccaaagggcctcagtatctgcatctgtatatggggataactcagttctccagagtttgtaacaggcctagcacagtgcctgcacatgtaagagctcagaaagttatttgtaaattagtaaattaatttataaaattgtaataaatcaataaccattaattattaaataagtctctttgcctgagatatcttttccctctaatttatctcggctgacaatgaaatgtgaaaggtgtttgaaaattcagatacttgcatggatagagaggctttcactgaaccaagccctacagtccactcctggcccatttgctcttacctggaaatctgtctaaagctgggat

SEQ ID NO: 33434 - DNA, 1598 bp, Homo sapiens
tttaatagagacggggtttcaccatgttggtcaggatggtcttgaattcctgaactcaagcagtccacccgcctcggcctcccaaagtgctggaattataggtgtgacccaccacacccagcctggggtcattttaattttaacgtactaatgaaagaagtctgaactccctccctacctctgaggataatttccttttactaggaatttactctgcaactggcactttgctaacattgcctgtcatattttttttttttgagtccagcttctgcagaagcctgcctaatgtttacaaacctacgatgcagccactacaattatccccatttcaaggtcgaagaaatggagatttatagaagttgtcaaatcgcttactagcacacagctaataagtagtaaagccatctctcaaatccaggaaatctaactgccctgcctgagctctgagtcaagggtcctactttggctgccagccagcgacgacttcaagggtaagatcctatgcgggccgtaaggactcttcccctccccctctcccacttcttctatcccaaagtcgctcttcccaattcagggagctgggaccaccctgagccagcggccctgcgcatgctcaaccgcagagcacgacgggagaggggcggggtcggcggggccgtttcgcttcgaagattgtttcagaagcgttgggcggggcgtccctgagagaaattagtaagcctcctcatgcggctctggtttcggtctttactcctgcgccttactcgaaaggggcagggtttctgctgtcggtcggagggaggatgacgcgccgggtcggggttttagagacggagctttgagtgcggattccgccagatgggggtcgggaactccgggccaggccctgacgtggattgtgtttgccgcctcctttaaccttgccctcatagactgggggggttagtgctccccgcttccagcgattctcgccgcctcctgctcctgtgtagtaactgggccttcagactttagtctcgctccgcagcctccgtttcagaagccccatcacacctgtatctctccttcattgagcagtgatttttcaaaagtttgactcctggccgggcgtggtgcctcaagcctgtaatcccgacactttgggaggcccaggcgggcggatctcttgaggtcagaagttcgagaccagcctggccaacatggcaaaaccccgtctctactaaaagtacaaaaattagctgggcttggtggcaggcgcctgtaatctcagctactcaggaggctgaggcaggagaatcgcttgaaccgggaggcagaggttgcatttagtcgagatcgtgccactgcactccagagcgagaccccgtctcaaaaaaaaaaatgaaatgtttgctgaaccccaaaagcacagtttgaacgctgctgatttacaagattaattttaaggtatttggtatcagggaccttcctgacatgacccatgtctacttttcaaactttccagttccttctactagcactcttgcacttgtactttatctgcaacaacagtcccactccttctagttcccatatatttgtgcttcttttttttt

SEQ ID NO: 33435 - DNA, 911 bp, Homo sapiens
ggagtgtattttctcacagttcttgagtgtagaagatcaagatggcagtgttggcaggtttaatttcttctgaggtctttctccttggcttgcagagggcagtctacttgctgtgtcctttcctggtcctcatgtggtccactcatccatggtgattcttccttttctcataaagatattagccgtaatggagtaaggcctcacccgtatgccttcattttaccttaattatttcttgaaaggccctatctacaaatatagtcacattctgagatacactaggggttaagacttcaattggatttttgggggacacaattcagtccataacacattgcaaaataggctatacaggattgtgattcttgaaaaaagggtagtaaatgaggcaagcacctctgcactccagcctgggtgaaagtgaaactcatgattgtcacatgctgtctgcctggaagctttatctgatccatggtgtagagaagaggacccaaacaagagcgtggagttcttgctgcattgaggagacagagttcagagtttttttttttttttttttttagacagagtctccagttgcccaggctggactgcagtagcagcacaatctcagctcactgcaacctacaccttccaggttcaagtgattctcctgcctcagcctcctgtgtaactaggattacaggcacgcgccagcacacttggctaatttttgtatatttagtagagacggagtttcaccatgttggtcagactggtttcaaattcctgacctcaggtggtccacccacctcggcctcccaaagtgctgggattacaggcatgagccactgagcccagccagagattggagtttgataaggctgaagcagctggaacttgtggaacaaaatactaaaaagaagggagct

SEQ ID NO: 33436 - DNA, 1737 bp, Homo sapiens
ccccttcccacagtacacaacgctgtagttgttgtcctgcaatcctttgtatttacctcattctttcccatctaagtcctcactgagttttaaagttagggctggaaaagctatgccttactgggacagcaaggaaccaatttttttctgagggagaagacattcaccttcactatatgcctggcagggccacagtgcacaaaacaaagatcagccttcattcaagttccaggtttttcttcctccctgaatgattactgcaaagggtatatgaagtaagagttccctgttgcacatgtaccatccataagggatactatatcgttttgcattcttccccccattctccacattgtcctatcttaagtccaagcccttttcactctcaaaaaaaaaaaaaaaaatatttttttcagcactggtgttcaaaagcaacgtttttatggttaatggtttaccagcaactgttgagatttccagttgagtcttaaaaattgccaatcattatctagcagcaatgacagatgattaggagcagtcaaatcctctgaattctttccctaataggcagccatttgagaactgcactagctgacatcactaaaacattatcagctaaagccaaaaccaaataaaggcccagaccaacatcctggctctctaaaacctgtccaaaatcattaagtgaaaggcagtaaatgcaggactgtggatcatgtcactgcagctgacaatgattaacaataggagacatgcaacccccattaaggttaaaagtccaaaactagtcacacgcatctctttattggggaaaagtgagactattatgcattcttggtaggtttgcaaccttgcatgaagagcacccattgcatttctttcatctttcagaaagcaccggtatctgttccaagggcctaacagtacgaaaatacattctggcatcacacctctgaacccaagactgttctcattaaaaataattttggtttgtaacaaaattatgaaatacaatgcaagcacctcggtatagcattattactgaaaccacttaattcccagctttttgagttttttaaaaaaacccactgcactaagattcacaattcattgctacatacaaattaaagctagtaagaacacactaacgtcacaagtttctcattctaaagtgcaaaagcctaatcatctgaaagtgaacagggtaaggcaaaattaaccccccaccccaataaagttcctgaagtccatatattatataccaagtacattctctaaaaattgttactgactggtaagaaatagacctgagtttttatttctaacacccaatcactaaaccacggcagcaagcactggccaccgatttaatggattacgacacaggaaaccccatcagggttctatgtaatttagtgatactcatgtcactaatattgagcattatacttgatctgcattatattgttgatatgcagaggctaaactagtcatcatttgctctttcatctatcagtagagtccaaagttgtttgcttgaatggactacatgttaaagtacaagtctgtccccaccttgtgaattgcttgccaacgagcaagctttttcttgatacacagaagaaaagtctcatagtcatgaagttttcatcagcatttatgcaaagtaaaccactttccagttacagagcagaaacattatacatgaaaactgtctctcatgcatgctagctaaaa

SEQ ID NO: 33437 - DNA, 1884 bp, Homo sapiens
ctatgtgagatttctaacatgagcactatcttaacattgaaaaaggagccccatcatccagaatgttcgagaatagacacacttccccaaagagtagacgtccatcagcaactgtcacccacatatgttgagtgtccctaaaaaaatctaaatagtatgaaaattaaaataggaaaataacacaaatccaaatgccactgtaacctacacgatctgcgcctgcgcttttatggaacttcccggttctctccaaacctacgccgcatgctctgcattacgccagtcccagggacaggataccttctgcagggccgaccaccgcggccccgcgcttccttccgaaaggaaacctcccctagccttccgcccgccgggagagcaaggcccggcggcggccaatcccccgccgaccgacggccccgcaggccgccccgcccccgcagcggcgcgcgcaagcgccccttccggcagccgacaaaatggaagcccagcgcgggggcgggggcgaggagggggccgccgccatcttaggggagccgacgcgtcgctcccatagacactcacctccgagtccgagatcttctcctcgctgcggccgccgggcccgccgggcgggggcccctggtgatgctgctggtggtagggcgggtggtgctggcggcccccgcggggctccccgccgcctcgatgcggcggcttggggtggccgccaggcgtacttaggcccgggccgccacctggcttcggcccgccaggcattttgccgcctttgggaccacccggacctgggccctgcttaggccctggacccgggcccgggactgccgcgggcggaggcggcgggcctccggcctgaggaggtgtggtagggaccccgctgcttggcggggtgggtggcggcgccccgggaggggccgaggtgactgcaggcggcggggtcggagtcgggcctggcccggaccctggcggggcccccgaggttggtggagtggcgggcggggccgagctggaggctggtggtgcgctgcctactccgggagcggggccgggtccctgagcaacgacgggcttggaagagtcctgcggcggtggcggcggctgctgctgctgatgcggctgtggatgcggcggcggctgatgcggtggcggctgctgcggcggtggctgctgcggtggtggctgttgctgctgttggtgtggaggcggtggcgggatcggaggcttagggccgctctggcccgggccaggacccatggggccgcgattctgattgaggcccatgccgggcggcggagaacggaagtcgtggaggccgccgcggccgccgcctcctccacgcctgtggaagccaccaccgccaccgccacgactccggaaccgatcccgagacatgtctgtggtcaaggggcggtcgaggcaaaagcgaagaagacgctcaggaaacgtggaggccaccttgcttctcacaaaatggcggatgacacaggcggcgcgccgcctttgtcctcgtcttatataggccagctggcacggccccgcctactccacgatcgacagctccaatagccaattgcaattactatgcttgatgacactaagttgcgaacctctgatcattcctattggcccctgggtgagaggcgggaggcatggggggactgaagtttccagttggccagtgagcgaagaaggcgttggctgtaggccactatgatttgctaggagaaatttgaatgggtatgccagggcaattttcacttgcgagcaaataaccagggctctatccgctcctgcagagaagcgttggaggtctcttttctttcttgattgtccctaggagcaatctactgatatccttgcccagaaaaacagatgttttccgat

SEQ ID NO: 33438 - DNA, 1638 bp, Homo sapiens
aaggataaattactattgaagaaattatttccagttgttggttcaatcttcaaaatcaccaaaagctttgattttaaggtgaggttataggagttggctcttgatattctatgccttgtgcttcagaacaggcagtcgaaagggaggaaagttggttttccttgagatgactgtcttgttccctcattggtttgggattcttcatgttcagaggtccactgagaacttcagcttaccatgactttccctcttcaatggtaccactgtagtcaggtgtaagatggtgatgtggaacccttcactgacattgcacccaattctccagattgtctttccagtaatttctttcatttctccttcatccctgcgtcatggtccctttaagggagcggccatagttgagtggtgggagcagctgctggcagcaaagagacttgcaggatttggcctacccatggccacttaccgcgcacgctcaggaccgggggcttggtgggaaaggaaggagggacttagggtgcgcctgcgcatcaggggcgcgcgcaaggggctgatttggtgatccctttaagaaaccgcaggcggaggaatttctctgagagaaaataatcctactcacggggccccttggaggccattaaccccccgagtcccggcccccaccccgtccccgggcaggccctcccgcccacgcgcggacccgtgggatctcagaagctgcggcccggcgcgcggcatccgccccctccccactctcggcgcaaggcccggccgggtccggggaagctgccgcgaggcggccgtgcctgcagtgtgggcgggggccggggggccgagaggtaccgccgccaccgcgcggggagccgcagcggttccgagcggggcccaacatggcggagagagaggtggagtccggcccccgaaagagggtaggtgaggtgaggcagaactcgggcggcggggggcggggcgcggcccggggccgggaatgggccatactcaggttcgtggaggggtcgccgaggcccagttaggacaaggttgcgggcaggtctgaggcagccttgggtccggagcgcgctggcgagcggtccctcggcaggtgggacaaagatttggtgctgggtgggggggaggggagggggccgttgtttgccttcctccccccgacgttccccagcactggggtgggatatctaggcccagggaggggaggtgtcagattcttaagtgcatctttagtgcatctttagtacatcagagtctggaagttaactggggagaggtcaggtgggggtggtggtggcgggaataagtcgtggaggggtctcaggagaaataaccggagggttcttcagtaacaccatcgcgaattcattttcctgcctcctttcccctccccccatagccgttatctagaccaaagtcggggtggtggtcttacctgtgaagaagtgggatcgttggcatgtcctgatttaggagaaagattttggctactatgaatgtcatgttctagcctagcctcttactcgcaattagggacttggaagaatacgacaagttttctcataacagggatgtacccaatcaacctgcagaggtgaagccaattctacataggagttgtttgaatac

SEQ ID NO: 33439 - DNA, 1181 bp, Homo sapiens
tattgccatcaagttaataatattttaaactgtatggacctccagttgtttataatattttcttagtttatttttaatttctatgaaatctgtagtcccttatttcattcctgatattggtaatgtgtatcctccaccactccccgtattacttttttttttttaaagacaggtttttactcctgttgcccaggctctagagggcagtggtgcgatctcgactcactgccatctccgtctcccgggctcaagcaattctccggcctcagcttcctgaggattactggtgcatgccacttcaccggctaatttttgtatgttttgtagagatggggtttcaccatgctgcccaggctggccttgaattcctgggctcaatcagtccgcctgccttggcctcccaaagtgctgggattacaaccgtgagccactgtacccagcctcccacattacttcttaaaaaacatctttaaaaactttaattgtagtaaaatatacgtaaaatgaaatttaccgtcttcaccatttttaagtgtacagttcagtagcattaactgtttacattgttgtgcaatcagtctgtagaatgcttttcattttgcgaaactgaaactgtacacccaatttcccaactcgaaatttctctcttctttcagcctgtggcaatcacccttctactttgtctttatgaattcagttattctgtatgttatgtaagtggaatcatgcagtgtttatctttatttggactgattttacttagcataatgtctgcaaagttcatccattttgtagtatgtgtcagaattcctttctttttaaggctgaatactattccattgtatgtatataccacattttatctgtttatctatagttggacacttgggtttcttctaccttttagctattgtggatgaggctgctatgcaggagggttattttggaaccagtactgcaccatggtggctggaagtggaatgttttatgatcaatattttaactagtgcctaacttacaatttctgtatgattttgaacttaactcagaaatagttctatagaggtgagacgttgtggctcacacctgtaatcccagcactttgggaggctgaggcaggtagatcacctgaggtcaggagttcgagaccagcttggccaatgtggtgaaaccctgcctgt

SEQ ID NO: 33440 - DNA, 501 bp, Homo sapiens
gcaccactgcattcgagcctgggcgacagagtgaaactttgtctttaaaaaaaaaaaaaaaaaaaaaaaaaaaaagttgaattgttgggtcaagagttctgtgtattcaaagtatcaaaaacattgcctaattgctctttattagttttgtaccagtttgcattcctaccagcagtatttgactgcaggggttggcaaatgtttttctgttaagggccagatggtaaatattttggactttgcagcctacatatggtctctttcaaaaacttttctttgtatatattttagtcttgggccatagtttcctaattttggcctataatatagctgcaagactttattttttatttttatttattttttatttttgagacagagtctaactgtcgcccaggctggagtgcagtggcgcaatctcggctcactgcaagcttcgccttccaggttcacgccattctcctgcgtcagcctcccgagtagctgggactacaggtgccc

SEQ ID NO: 33441 - DNA, 1213 bp, Homo sapiens
atagcttggactacaggcgaaccacactgcacctggctaatttttaaatcttctgtagaggtggggtcttgttatgttgcccaggttgaagttttctttattctagaaaaatctttggattactcctaccccaactctcctagaagaattcattgtccttgccacagtgttccacaatgccgcttgttgtaccaaacccacaccgtactaatgttccatatttacttatctcctctactagactgtggttgtcaaaatagttgacctcctacaccctggagccctgctgaagtgtctagtacagcgcatgtcacctgcactagaagacagaagtctattgaagaaaaggcaacatgagtgtttctggtcagaaagcccacctttctctatctaaccacactatttctcagctcattcaagaagcccgggggcccctggtctttcctttgctccccccattcattgcccagctacctctgctccgtgtacggctgaatcttttgcacaatgatgtcggaatccagcacccccaggaggaccccaatctggcggatgaacatccccttcagcctctcagttagctgactgacgttgatatccaagatgatctccaccaggttgtttttcctgggatctggaaagcatgtggatcagtcatggctttagaagtaggagagtaaacacagacctgccactgtgcatttgctttggcacaggagagaaaggagtgagaacattcagatatccttcaaatggaaagggacaatagtgaattcctgatcgggcaatctggggctggcttagaaagcttctaaagcactcctgctctctataccaacctgagaattcccacacatgtgctggggataaggctgaagcagtgatgcaatgaggggtggggagtaatgacgggagtggggaagagagaaacacttaaacatttgttttaaaagcctctgtgcaactggcagtgctgagcaatccaggccaagtgggggttattaagcaatctctcctgactcacatctgattttcagtgcctcgctgtattttgtgcacaacaatgggaggaaaagtgtccatctcaacaacctcctcaataatgggaatgcatccgtccctccaggtttaaatacagttaacaaaagaaaatccagtcagccaagacacaaggatttccttagagccacatcacagctgcactatctttgta

SEQ ID NO: 33442 - DNA, 1578 bp, Homo sapiens
aggccacagaactgtcagatactgtgggagatgtggttaccgtcagggagcacacaataaagaatataaggctgaaacatatcaagcaattctgacagaaacatagaacataatgaagttataatgccatactaaacttgaactctaatgctaagggagttcaaatgaaaggatttgagtgacaagacagggctgtcctgaggaagtcagttttaagcaggcccttcaaggacgtggtattgggttggtgcaaaagtaattgctattgaaaggaatggcaaaaaccgcaattactttttaggatttgggatggcataaactctatttcctaggtctctttgaaggtaccaacaacaagccaagggaagggcacaagctgaggctgggaagtatccttcatctctagctatgaagaaagcacaaggggaaggaacaatagaagtcaccagaggctctatggatcggtgccttctgcttctaccctcatacagctcagaacccaacactcttttcccccaaggttaaatggacccaccaatagaagagcctgaaccacaaggctggagcttaccaggttgcacaataacagtcacttgagcagtggcctgctgtcctattgtgtcagtcactgtgagctggtaagtgtagtctccttcttgcatcgcagagagctgtaaggttggtgttctaacaccctacaaatacaaatacagaagtggaaaagtggactccaggaatcacatcacacaataattccgactctggtaaaaacgatttagttttctaaaccaaagacctaagatggtactgggctattacgtaccagttcagcatgtgagtgaatatggagtcagatatcatgaggcaccttgctaagggtttcccccttcaaggaaacaaccctctctgacacagcagcagtttcaaataaagccagaactctcataagagagggcagtattgggaaatgtgcagagattaccaaggccagtctctatgactcaaaccagaaagaataccgtgaacaaacaataaatgacccagttttaaaaacactgtttaaaaagatcctcttcctactgaagctacacagtgctcctaacaaagctgtctcagtgaaacatggcagcagctcaagatgctgtataacaccatactgtctccttcaggtctgtacaggttctgcaacaacctaacataacatttaaacaaaagtcaggtaaaatggaggctttaagggaggccttaaaactgagaaatatagaatcttgagggacattataaataattttgggcaaacttccaatgcaggaacttcctgtagagcagtaggcaaaaactagtagcccatgggctgaatccagcttgcaaatattttttttggcctgtggtgtctctcatattggaaattttcacataaaggtctcaatttctttcttctcttgaaaagctgggttatcaagcaatgttaggaccatccttccatgtggcaacaaccagctggacctgaagagtagatgactcctttagtcagggcttaagttcagcacagccaccatccagttttctttctttatg

SEQ ID NO: 33443 - DNA, 3454 bp, Homo sapiens
gtacgtaaatattggcaacattatgagggttgactgagttctgaagaagcaattcaaaaacttctgtccaactatgtacctgtcatctacatccagcaaacgacacaggctgccaacccctaactcctatccacggccagcatacagggagatcagcattgcctgggctggataccaatactgactaataccaagaaacagccacagacatacacacagctgcaaaactaaggtgcagcccacccaagaaaaggcttttgcagaaccacatgcatctgaaggacttcatcgttctcattcacttccatccattcctatttctagttgttttgtagttgtatttcagggagcagggggcagaaaggaggtgtgtgggccagagacatgttcaagagattatgaaatggagcctaagttagaaagtacatccagcaatttctctagcctcccaagagggaacgagtgagtatgcatgtgtgcatgtatgggtgtgtatgaatcttacccaacacatttctgcctaccacaaaaggatttaaaactcaaggtgactcaacagctgtcatcaatagcctgacaggtgggtgggagaagcagaaaagaaatgaatagcttttgaaaaatggagtaataaacaccactggactaacaagctgattagaagtgccatgtctaataaatcttgcgtctaagagaaaggcagagttaatttcatttgaactcctaaccagtcattcctctgaaacctataattgcctaagggcacaaatcactgctagggtccagttaaaggcttgctgaccaaacgcaagaacaacaacacatcaccaagatccgaatagtttgttactgaatcaaagggtaacaacccagggagagaacacacacccccacaatacttgacaaatgaaaatctagagaagctcacaatagttctggcatttagggcgttacaagtacacccaaaataaaagcactctctgttgcagcagctgttcagacagagcagggggtaatgtttacttaatacttcaggttgatgggggatgtatcacagttcagtctgtcaactacatacgtggaactccatttatgtacacagcgataagatatgtttgaacaacgatggagcacgtctgaaacaatctattcagttggtatgagtaatcgagaataaagctcttttttaaaaagtctcagatatttgggaaagttacagaacagactgccatgaatagctttgcttatatttgcagacactgttttccaaatagctggaaaaatgaacagattgttctgggaggtcgtctttccaatttgttcctagttttcagtctgttaatcacaggagagagcacaaggagagtcagctaatgctcttcactaactgcaactactgtcagttggacacaaccactatgagaccagaagccaaagagttcctggaatcccgccagaggttatcaattttgacttccttcatttcacctttgtgctcactgcagccactacaggaccctctgtggggcataattttcaaaatcgtggatgaggcaggtttcacattataatggacacatcgtgctcaaccccatcccctcttcattctgcaccaactttctatctcggtggagagaccaaacatcagagacagcaactaaagactaggctgcagaggtcgaaggtggaagaaggacggcagcgccccgaaccccggctgtctgcctggctctcaggggatggagggagctgcatgactaggcccaggcccgagagaagcggggttcagcctgggacccaagctgcgcacctgcaaggacagaagcagctggctgccctggccgagccaggggcgccacctccggacccaacatccggccagcgcagccgctgacatcgcccgtcccgcttgcccctcccctgagcccatggtcctcggcctggcagccagccgcccccggccacctaccggggctcagggccacatagcggggccccggctctcggcggcctccgcctcctcctggtccatgggctcggggacccccaaccttcgctcccctcacccggaggaggaggaggaagaggaagaaggtagtgcgggctccccacccggacagctacctctcgcctcagcctccctggacagcgacggcggccggaaacaccgcctcctcccacctccccgggaccgacccggaaacacactctccatgctaaccaagccctcccgcccctcccccgggaagggcaatgccggccgcgagaccaagggggaggaggggcagtgctgggcgggtaaaactacgcacaagcgaaggaatctgggcccccagcctctcgccgcccgctctccagaggcagtctgcaccttgcctccttcgctcgagccccagcccccagactcgggcaatacccacaagcaagatggcggcaacggcggcaccccctactgcttagcaccctgacttgccattggccagagcccggagtgaagcagccgcggattcgtcaagagcggtgcgggggtgggggtggagctgcagcagcctggagccaggagtgggcaacgcggcgtgagcagcggcccgaggctcccggagcatcgcgctgggagaagacttcgccgctcggggccgcagcctggtgagctcagcccccttcgggccctcccctgcatcccagccggggcctctccgagccggcgctgatcgatgccgacacaccccggggaccctatcgcgactccatcgcgccatatcgcgacaccatcgtgccctgtcgagactccattttgtcacagcccttttcaatatatatcttttttttttttaatttgccctgtcatctttgggggctgtctcccatgtcgtgattttgacgtgatctctccgtgacatcaccgcgccatcgtgaagtgtgatctcatcgccgccctgtcgtgacttcatcaatgtcgtgttgtgacctggctgcggcgggacaggtggtgaccgccaggaaccctcctccccttctcatctccccatctcagcagccctgcttcgattatccggcttttggattctccgttgtcctgggaactatccgggaccccctcttgcttctccagcccctgccggcatccacaggctggtagcgggacggggagggcgagaagagggagcgcaaggggttaattctgctgctgccgccgccgctgctgctgctgctgcagcctctacccgagggagggaaaggagaggaggcaaggagcctgcgggggcgactgagagccctggctggaggggtggggtccccaaaggggcctccaagccttccctgttgagcgtcttgtattctcacttctgaagcgtatctctgcctctgaagaagggaggggaaaggaagcctggggtgtccttttctcccatgtcagcctgagtccggataatcgaacttcacccatgtatgt

SEQ ID NO: 33444 - DNA, 1558 bp, Homo sapiens
tacaatttaaagcatttaaaggcatttgaaatgcaaggaacagaacgacagaagaaactgaaggaatccagccaatggcgattatctttaggctcatgataacaaagccctaaaatgtttccacaactacaaatgttagttattatatttatacacatacaaaagcatatatgaaaaggactggtgctataattaaaattaaggaaccatttcaagaaagaatagaaaatcaactgagaatattaatcactttaaaaagtaaacaaattccacttccaaagaaaaagagaaaattaaaatgattgccaaagcaaaaattctagtgaatattttgacagtaagctatttaaaatacctcacaaaaatcctaatactctaatcttatctagctgaaccagagtcattcagattagacagataaataaatattcaggttacagttattgcctaaggaagaaaactccacattcagtctgcagcttcagaaaaggcctaaatcttcctatctcactttcactttcacttttcatttttcaaatagtgctgaataatcctccctgggagacacgtttcctgtttgaaagcttctgaaatgccaaaatcctttaataggatttaaagaacaaaatgctactgtcaaatactttacaagtgtttcagagttgtagataccagtaatatggcttcttagacttggagggaaaaaacacacaaaatgcacctgtagataatatcaaattgcctcaaaactcctaaacaaacacacttttatttgttatgcaggctagatttaaagattgttagtttgcaaacttgttaataaacgaaaaacattcacttatattatctatgcaaagaaaaaggagcagaagggtatattctaagtgcttgccagtggtaagagtatgggcagttttcgtttccttcttttgcttgttggtttttcctaaaacttctatacttaacatgcctcacttttataagaaagcattattcaataagttcgcattatttttataataagaaaaaagatatttttatttgaagggggagcttgtttacaaagaacttatgtcacacttagaagaaaggctaaaatcctaggcagtaacctgttcaactttaaaattagcttaatacaaggccaaaaatgttttttaaacactgaatatgtccaatgagtagcagagggcaacatatttaataaaaacacaagagatagatacttagagacccctgagttgtacaggaaactgcctgtgtagctctggggaatttctgattcttgacgaggaacttacgagatccacatacatgaaacaaatggccaacaaaatgaacaacattagcatgtcatactgtggaaaaccaactgaactagaatccaagagaccttggttatgatgtggacttggcactctgaacttcggcaaattacttgtcctctctaagccccagtttccagatgtgtgaaatgttatttccaaatgtgtgaaatgttaataatatgacttacccctgtctaactcacaagtgagaaaaactaatgaattctata

SEQ ID NO: 33445 - DNA, 2618 bp, Homo sapiens
aaagtattaagctttggttcagatgacttaatggtcatttgacaaatatgtttgggcacctacgtacacttagtattattaagtacctgcctagtgctaaggatttgcacataactcatttactaaatcctcccgacaagtttgtgagtttggtattgctaatcttaaagatgaggaaatctgggcactgcaaaataacttatacaaactcataaggcaaataaatgacagggctccaatctcttaactccattaactacttaaatataaggaaaacctggcagccattgctctggaaaactggaaaagaagaatcgggagccacgggaagaaggaaaatgccaagcttctggtcccacagtctcactctccccaggatcccaccttatgccgccaacaaactaacctcattactagcgacaccaggaaacttatcagagattcggggatctagagagccagtcccacagtctcactctcctcaggatcccaccttatgccgccaacaaactaacctcattactagcgacaccaggaaacttatcagagattcggggatctagagagccaggctctgggcaggcgcttaaacatttataaactgattccctttaggcaactctcaccaagcaagaagcatttagcgaaggccagagcagagcactgacccaggagccctggaggagcaaatgccaaggtcccagacctgtctgcctgtttcgcctgtaatcccagcactttggaaggccgagacgggcggatctcctgaggtcgggagttcgagaccagcctgaccaatatggagaaatccacatctctactaataatacaaaaattagccaggcgtggtggcgcatatctgttcccagctactcgggaggctgaggcacgagaatcgcttgaacccgggagacaaagactgtgctaagccgagatcgcgccattgcactccggcctggacaacaagagcgaaacccctctcgaaaaaataaataaataaataaaataagtacgggcagggcaggccggcttccatctctcagatcctccctggtacttattcaacccccgacaaactccttctggccgctcctacaccccaggcctggccgggcctcccctgcttcctctcaccgtccttcatctggacaatattgctggcggccacccggtcggaggcgacaagaacatagtcggggccttggataccgatgaggtactccatggtggcggaaggccaggggctgcaggtccgacacagcacgagactcgcccgcttccaggtctcaccggtgagacagcacctcagagcgaagattggcgcgacgcctgcagcacgacttccacggcgctctcggatgacgtacaactgtcgcgagaggttgcaaagcgggcgcggcgccgggtgccttatgttcagtgcttgtctctgggatcgtacgggtctcctccggagcaggctgtgcaggtcacttgccttatgtgacgcccagtttctctgtttacacactaagattttaaaagtggctttaggataaaatcacgcagtgtatgtaaggtgccgagcacgtgtgggtgtcaaaaaggggtaggtagccaggcagccgtttccctacgttgctcggtaaaatctccccagaaacccctttcctgcaagccagattggagaaaaattaacttgaggggagccttacttccatccttcacaaaaatagtatatggttggattaaagatataagcatggccgggcgcagtggctcacgcctgtaatcccagcactttgggaggccaaggcaggcggatcacctgagcttgggagttcgagaccagcctgaccaatatggagaaaccccgtctctactaaaaatacaaaattagctgggcgtggtggcgcatgcctgtaatcccagctactctggaggctgagacagagaatcgcttgatccctggaggcggaggttgcggtgagcactccagcctgggcaacaaaagcgaaactccgtctcaaaaaaaaaaaaaaaaaaaaaaaaaaaaaaaaaaaaaaaaaaaagagagggagagagatacaaacatggaagaaaaagtagaaaaatatttctgtaatttttggaagagatgtgtttctaagcttgacagggaacccagaagcaatatgagaaaagacttgacagatttgactacctaaaattacacgtctctatgtggtgaaagtcattatcatgctcaacagtaaatgtaaattgggaatgtttcaattgtagaaatagttactattttggaccttatagacagaagaaaggaaaaagttaatatctataacttaaaagatattcctacaaaccaatgggaggggagccgggtgagacaataccatttttaaaagacccggcagggcacgggggcggatcaagaggtcgggagttcgagaacagcctggccaatatggtgaaaccccgtccctactaaaaatacaaaaaattagttgggcgtggtggcaggcgcctgtactactccggaggctgaagcaggagaattgcttgaacctaggaggcggagattgcagtgagccgagatagcgcccctccactccagcctgtgcaacagagagactccatct

SEQ ID NO: 33446 - DNA, 1718 bp, Homo sapiens
ccctcccaatgcctctggaacacagccactatcttgcggtccccgtccctagcttgctccattctgaggccctggagggagggcataccacaccactcttctctcctccataacctgcttctaaccaaaattaggatttgaactgacaaagggattctactgaccaaacagcactgggattagaacaattgaagagcatgaagaggaagggtattgtaagtggagccggcactggaaggcgctccataggtggcatggaccctccccacccccagcaatgggcagagaagtcctggggagaagggtgtaggaacagttcgtttctaatcgccctctaagcaaggcttgtgggaaggtgcctagagatctcccctcgccccaattttttatttttcctatacttggatggggccgtgaaggaagctgggatggggtgggggtggcgctagggatcacagggttctcagagatagtaaaatgagaaccccgacacgccaggactaggtctccgcccaaacaggaggcagcctccttttctggccttgcgggagtgggagaccaccccaggagacagagaccatccttccctagtctcctcgaaggaggccactgtgactccccgcttcccgcggctgagccccaagccccaccccgcctcgggccccagactcggactcacggcgtagaggcgcccgctccggcgcgtctggctctggctccgcccggccctggtggtgtctagtccctgggctgggggttcctcggcctgggcgtctccgcggtccaggcgtgggtgcggggctcccgggcagcgcgcccagccccagtcccggactgcggagtcaggcggcgtctgcgcagcagggcggagcgaccggtcccacgtgggccggttcggttttccgcggagccccgcgccaggcccctgcgccggaaccgcttcgcccccgcgcggggccgcgttgacccaggccttccaggtccggtgctctctcctattggcattcgctgggcccttcccatcagttagcctcgctgcagacaccgtgccattttcaagtgaaatctgattagtcaccaccttccggcgttaaactcctcaatggcttccccaccgccgggacaacccctaaggcggtagccgcggggctctgtgcgtcctgcccttcgtctgcctctccggcttcgtcctctaccctccctctccgcagttaccctcccacacgcccctttccgccacgcggctttggcacgcactgttccctcggtctagcattctcttccccctctcgacttactcctatttcagatctcttctcggagagatctctgactccctagatcacgttcgttcccccctttatgtcagagcacattccttttcttcatagcatttatcacaatttggaattatatattcctttttgtgcttacttgactaaagtcactgaggccgggtgcggtggctcacgcctgtaaccccagcactttgggaggccgaggcgggcagataacctgaggtcaggagtttgagaccagcctggccaacatggtgaaaccccatctctactaaaaatacaaaaattagccgggcttggtggcgggcgcctgtaatcccagctacttgggaggctgaggcaggagaatcgcttgaacctgggaggtggaggttgcagtgagccaagactgcaccactgcactccagtctgggcaacaga

SEQ ID NO: 33447 - DNA, 467 bp, Homo sapiens
ttaaaaatattgcattaaaatatgagtttgattgagggttttggcgcccctttaaattttgctcctaaggcgggagtgccttgcccgaatccggcccagaaaggacacagctctggaaacatctgttttctatgcccaatttcgccagggagctgccagccaccagccaggagccccagcggtgacttccccactcggggcccggtcggaaaacgcaaagggcctgcgcgcgatgacctccagggcccctcccaggcccagtgtggaactccctaacaccctcgctcgccctctctctgcggagaatccccccgcaccgctgcggccgggttcggctagagcctcccggctttcagagcaccctgaggggaggagcttccgcgacaggaaacgcgccaaaggggagggctggcggcaggaaccggctgaagaggggctgggctgccggcagtgcgcgccgcagagac

SEQ ID NO: 33448 - DNA, 2201 bp, Homo sapiens
ccagggagggaatgcatcattcatcagggtccattcccgtggtgccttccggctatacggagagggacgcgcagttgggtgtgtggtgctgaatgaagggatgaaggaggactgctagcgtctaaggtgaccctaaaagacgagatgacagaagcgatctggggtgggaggagggaggagggaggcgaggtggctcctgtgaatctcagtacactttccactcacagaagtggaaaactgaatctgtgggtcagcggaactggaatccagatcttttgcaggacgccctggggggatggcacgtagcccccagagccgttggccaccggacggcctcctcgggtggacggggcagagcgggccagcgggcgcgtgcccgacacgtccaccgggctctgcaccctccgggcgcgcgctcgttccccgacccgcctcgccgcctgccgggctctgtggaccccgcgcccggggccgcgcacgccccctccgcccgccgggaccctgggtccgcgcaccccgcgcccccttccctcccggcgggcgcgcgcgctggctcccgctcccgctcccgttggcggcggcggcggcggcggcggcggggattgtttttgttgtcgctgaggccggaagagccggagccgggtccctgtccccgggccgggcgccgccgccgccccctgcccagcgcccgcgtctccgcggcgccaccccagcgccaatattccggagatcaagcgttacgcggcggcggcggcggcggcggcggggcccggagcgggaggcgccggggaccggggcgaggcggcccccgccgccgccatggaggcgctgggacccggtgaggagcgagctcgggtcggggcgggacccgggacccgggacccggggcgggcggccgggactttcgctgccccgtcgcctcgccgggttcgggccgccaggcctcggggaaggggacccgagccccgcagcacgaagcggagggagctgacccgggcctggggggcggtgaccgcgccccagccggccgttgggtggatcccgaggtccaggggggaggttcgggaaggtgaccggcgctgccgggcggaggccactcttggccccacctcggggagacgatatgtgcccggggtcgcgacgagggtagtttgggcctcagaagggggcgatccgctacccagtgcgcgcggaggcctggcccagaccgggaaaagggccccgctgcctactaccagccggtagtcctggtttggggccgcgcccctatttttctttgcactggcagatggtccagagccttcagatgaggaagaagaacttcatccaaacacctctcatgatctctgaaggtcaagggacaaaatgcccaccctttctgaaaggccctgatgtcccaaagaacatggtcctgtgcctctgtcactcagtctgtgtgttagtctcagagtggtctgagccagcctttgagtgacacaggagttgccagtcagtctgctccaccacaggcttcaatgccctgagttctcttctaattgggttatgagtggttgtgaggatcaaatgaaggagaaagtgctttggaaactaatttgttgtggatatggatggcctctggttatttctctctatccaaaccagaagaaccattccaggctgtaacaagtgtcctgagtattggggcctggtgcttccacctcaaagcccaacaggtttctaatgccttggctaagtagctcagtgtttaggggctgtggtggaattcactttaatattcaaactttacctacataatgaacttagtcgtagagtgtttcatctttttagtgcgtagaaaattcgagttgccatttgagtttggaaacttggcacgtttgtttacttagcacttgtttgcatagctgagtgattaagccccaccctaatttgcttcttaaagtattgtttaaaggccctcataatcaaatttcatatgccttttaaaaataaattggcttgccgcattaatattgtttgataaacttcagtgtattatgccaggttaacttcagatatgtcccctggctaaagacatgctcaggtctttaggaatgtaacagattcaatctagtaatgtaatagttgtatgaccctgggaaaattactcaattcctttgaactttcattttctcgtctataaattgagggtaataataagtatg

SEQ ID NO: 33449 - DNA, 1055 bp, Homo sapiens
ctgaaggctgctgtggcgggatgtcccttcgccctgccccacttataccactgcgcggttccaaggcacctctactggcgccctcccgccgggctgcatggcgacgggtgaccgccaggggccgctgccttgggtccccggtgcccccgcccctctccattggcctttgttgccgtcggagcgccccgcttgactcgttccggtccgccccctgggcccggcggtcgcgcctgcgcactggcagctggccgggcgctcgcagtgggagctgctgcaggctccgcggcggcggcaacggaggctgcgggggcggcggcgcgagcggccgggcttggtaggggagccgagcccggcccgggatcccgagcagcgagagtgtggggtacctaggcccctcacgctggacttcacagtctccgggccgcctgacctccgcacgggtatatgggatggaagcgggaccctcgggagcaggtaagggtccccaggagggggaacggtgcatgctccaaggactgggggatcccgcatgaaaagcgtggtttccaagtgatggaagcgctcctgagtgaggagaagggctctcccacgatgggggcccagtttgaaggaggctgtgtgcagttccgggggagaaccatgtgaagagagccctgagatgggggctgtttgtccaaggaggctgtatacagtcctgcgggttggaagtaatctgggagaagggcctgcacgcacggaaggactcccagacatccgtggaggcctacggagaggcccggcaggtggcaggggacgggctccaggtgtccaggagaggagggggcgacacagatgggcctggagctaccgcatgccgggggcgggggctccgctgggctggaataggctaatgtctcttgggagaaggcgccagagctggactgtgagctccgccccactgggcctgacgcgagggcgagggtcagggggcggtgggtggggacccagtcccgggattaccccccgtgggtctggggagtcggagcggaggctccagagcatgcgcggaggtggca

SEQ ID NO: 33450 - DNA, 2451 bp, Homo sapiens
tcagatgtggttttgagtcccatacatttattgtttaatattatatggtaagtactttaaaatggtaaatagtaaatacttgtgttattcactaacatttggggaggattttctctgtgctttatgtatattacctaaccttacaaactgtgtaaggtacatgctgttctctcaatttttcagataagaaaattgaagcccagagagatcaagtgactgatccaaagtcccacagtgaggggaactgaagataggatattctttctccttttcctctttaaaaaattattttgattaaaaaaaaccgtattactgaagcatagggacatggggagaaattatgaatgattcctcagcctgaataaaatagtatgtttcattaaggcaacaaatatttattaaggacctaatatttgcctgacattcaagtgaggtggggggcacacaagtagtaaataaataacagactgggcaaagggctaccaaggcaatactgtagtagactaacaggtgccccaccatagatgggtggtccggaaaaggcgtctcagatgtctttcgttgagacgcaaaaaaaagctgtggggtagggcgtaaggggagggtggagaagagagagagggttcctggccaagggaaccaaaagcagagaagctccaagtcagaaaaaagcagcggttggcccgttgggagaattggaagccaaccagtatagctgtagcacaggcggggcccatttacgccgtgcgttttcaccctggaaaggagtttgggttttcaagtgtgacgaggcgctattaaagagttttaaacatggaaattactcgatctgatgtttgtgtagtgtcctgtttgttagtcatcttttccaaactataatacattttttttttcctaaaaatggtcgttaaagcagcctaggacttaggtcaattgcggtggtcacttgaccgcctgtgaggaggcggcgcgtggggtggatcggactgggcgtggcgggggctcaggaaggagggtggccctaccccagcgggctcggctcggggcctccgcggcagttcggggtccttcacccgccggctccaggtaggctactcctcaggtaagccccgccgccagccgcgacgtcgtcgcagacaggcaccgcccccactcgtgcggcgcgagtagtcctgcccctccgcgttgtctccggccggcacggcccggcggggtacggccgagcccgccgcatgtggcccggctcccggacacctccccggcgtcctccgcgccggccgctcctgccccgacgtcgctccggcacggctcggggcccagaggcgaggcgaggacgccgggcaagccaggcagcggaactgacgccggcgagcttccggggcggccccgggcaggtcggcggcggcggcccgcagtcgtggaggagcggtgggagcgtcggcggccgcgggcgatgcaacttccggacgggactcccctctgtccgcgcctcacatctccccttcctctcgcctagtcctgtgccgttttccgtccgcgactcttccggcccagagctttcggagtgcggttgctcaggggaagccgtcgccgcccccgcctcggggccgagtgagagtgcccgtcgcgtcgcgccgcgtcgccccccgggccgcctccttgccgccagtggcgggctccgttctccctcgaagcactccccccagctccatgaatggaaatcggctccgcaggtgagtcagagtagctgggccaggtaggggatgtcacccagctactgtcctctgagcatccctgctcctcccgcccggcccaggtgcgcgaggtgagcgtcgggcgggcatcgctcggtctcccgcccctcgccctgctcctccgcgacctccccgcagcccagccccagttccccgggggcccctgagtcggcgaaactgcgaggcggggaaacgcttggaggatttaagtttggggttatctaggcggcattactctttgctggagtacccttcttctagactttagaatggtttgccattgtctagttggagtgcgtgtcctttagccaggttgtgtgttccgtagaggctgggcagccagccagctcccttacctacctcttaggatagttgtgaagataggctgagataacggataacttcagattaagttcgaaggaggtgttggtgcaacgttaaattcaacatggcattgctcctaccctcgagttcttttctgttgtttgtggcagcatggtagatagtttctgaggagcttggaaatgtcatagcagcctggatccctgcttatacgaggaggtggttcttaaaattgctgacagtatattttttttcattctctattccttagagaagtagttgtcatattcctggaaatttggaatttaagaaaactgctttatctctgggggcaagagcagcagttttgcagtct

SEQ ID NO: 33451 - DNA, 1442 bp, Homo sapiens
gtcactaaatacttaagctagtcttcaaagcagtatactttcaattttaacagcatcgccttagtactgtattggcataatttttggtatcctgtaatacaatgatggattttaagggggaaacatagtagctttattttcagtatgtaaaattattttcaggtctttttttctgactagaggttttgcatctattccatagcggaagtgaaacgtgtaggagacacacttttgggtatggctacacaatgtgttcaagtcaagaatgtaataaaaacatctcctcaaactctgtcaaacttgtgcctaaagataaatgttaaactcggagggatcaataatattcttgtacctcatcaaaggtaagatatgctaatcgcttatgaaaatattatttttatatcttcatttgtctatatatgaccatatctaactactataagggctgtgtaagagacccccttaataattcctactatgggagattcgtagacattttggtaaaaaaataatttggattggcaaggttcagagattctcttgtgaaaatgccccccacaattttattttatcttattttttaaggaaagaatgaagcaaagcaacaaaagcagagatttactgaaaatgaaagtacactccagagggtgggagcaggctcaagccccaaaaattttcatttagtatgcaaagtacctcttacctagccagaaagtatccagtgctttatttctcactggagagcccagcttgaagaattttcactttatttggtaatcatcttcaacctggtttcatgagactactcacctacctggaatgtgaaggagagaaggaactgggagcccagattagtcaattaagtaagccatatcagccttcctgctatagtcagtgagaaaacacattactgttagatcacccttcttagagctggagctcttaggaagtaagagacaacatgacctagaaacaggaggtagcttattgtgcaagtcactgaggaagaggtcatttttcagagaattgaacaagttcccttttaatagttgaagcaattaggcctcaaaaaagttaactgtacaccacaaataaacattagaataagaattggcccatgtttgtttgacacaaaagtcctttttttcctgtttttccatgccatctctactttctacccctgttaaatatgagatgagatccgtaaatgagataaataaagaattttatcaacaagcccaacatggtgaaactttatctctacaaaaaaatagaaagattagccatgtgtggtggcatgtgcctgtcgttccagctactccagaggctgaggtgggaggattacctgagcccagggaagtcaaggctgcagtgaactgtgattacgccactgcactccagcctgggcaacacagtgagaccctgtctcaaaaaaacaataa

SEQ ID NO: 33452 - DNA, 2292 bp, Homo sapiens
gacacacggcgcaagctgaccgtgcctgctgagaggttcgtgcctgaggtggacaccttcacacgtaccacaaatagcaccctgagtccactcaaaagctgccagctggagctggcctagccttggaggactgcaggaggagggcagggttgggtgggcaatggaaggagggaggagagaaatgaatggaataaatgcagaggatctcaggccggctgttctctgccccactgtatgtagccagcagggagagggttcttgaacaccctcctgtctatggaggagcaaagatggggaacactattcctccgaactccatgtaccaaatccagttctttccctcccctcagggcacccctctctgggctgggtcagcactcctgggctgcagcagcgcggcctctacctggctgtgtcccagttggcccctggtccgccctcctgatgcttaagggaggcccacagggggcaagggcccggtgggagggcttgggggtggtcccggcctcggtggggagggccggctgggggtgcggagttagggttgctcgcctgcggaaggcagtgtgggctgcagtgatccaatggtctggctcagtgcccatcccccggagaccccatagtggccttcccacccagttagcccagtggtgaggagcggaaaaccgagactcaaagcacaggctggcgggaagtgcgcggcgccgcgactccgggccgctgggcggcgctgtgggcctggcggcggagtggaaactctaggccccagggagcgctgcggacggaagtagggaaactgtgagggcggcaccggaagtggcgagcagtctgcgcgcggatggccgcagcggcgatggcggcagcggcaggtggaggggctggcgcggcccgctccctctcgcgcttccgaggctgcctggctggcgcgctgctcggggactgcgtgggctccttctacgaggcccacgacaccgtcgacctgacgtcagtcctgcgtcatgtccagagtctggagccggaccccggcacgcccgggagtgagcggacaggtgggcggggccgggcgcaagtcagaggccgtgcgggagggaggccgaaggggcgcggagcctccgggggcgacgggtcgggggtgcgcggggatgaggctgccgagggcaccggggccagagccggatgacccgcagacagcttgagctcagcgagtgccagtgcgatctccggccttatagacgtctcgccccgaacatcccgtgctcggggcgtggcagcaccggggcctcaaccgtgcagggtgtggataaacccatcgtaagttgaaaatacctgaagtggaaagtgcgctttcagcttagacgaccgttttatctggacgcagccccatcggacgtcgaggagcctatgaatgcgtatcagcgttatcagaaagccgaaaaaaacttaagttgaaccatcctaagtcggggactgtctgtccacccttgccgacttgacctctttttcccggttctctagagtcagtataccaccagcccgttctccaccccgcaaggcgtgctttggaagcctgactctaatcgcgtcctcccctgcctaaaaccctgctgtgatttcccattacccttagtacagagccacattccttaacgtgtccgacgtggtccggccctcccacacgtctgcagtttcgttttccgccagccttggccttgctttctgctcttcggttcctcacaccatgattcctctaggccaggcgtttgcatgcgctgtctcgcctgtaaaactaacttcccttcccttgtgggctcagatcccggctcaggtagcaggtgtgaggtcaagcagaggaggtgaatcttcttggagagcaggtagcatagtaagaagaaagggccatggtcagaaccctggagaacaccggtaattaagagggagggagggagggaaggggattagggaaggaaacagtttgataggaggagaagcaggagtggctatcaacgaaacctaggaaaagaatttcaaaatgaagacactgatcactggtggtgtgctccagagaagtgaagtaggaggagatctggatccagaaactatcattttcaatctgggtatggtggcgcacacctataatcccagctactccagagactgaggtggaaggatcatcgcttaagtccaggagttcgagactagcctgggcaacatggcaagatcctgtctataaaaaagaaaaacaaaacaaaaacaaaaagactggagctgcaaggatggcagccacaaggggat

SEQ ID NO: 33453 - DNA, 3482 bp, Homo sapiens
gtaatcccagctactcgggaggctgaggcagaagaactgcttgaacctgggaggcagaggttgcagtgagccaagttagtgccactgcactccaccccgggtgacagagatttcgtctgggggcggggggagggagggaagaacgaaagaaaaatgacctaagtctgcagccccagcccctagtccaactttataggaccatatggtgtccaaactattccctgggaaagaagggagccacccactccattagaggggcaccactcactgcttactctggcccatctcttattccattgaataaaacgttcctttctggcacgaccagtatctgaacatctctcacaatacccacgccacagtacgagacactgtagcctaagagtaaagcctaacagtcagctcctagcattagctttggagttaaacacgggtccaaatcctaacttcccaggtgtaaatatgggcaaattacgtaagctctccaagctgtaaaacggcaatgttatccatctgataggggctactctgcagattaactgagatgctgtaacgtgcgtggcccggtgcccaacacatagtaagagagaagttaagtggcagttattggtatttattaccgtcgttgttgttggcttagcacagagctgcactcaggccttgggggcggggtctcctccggggaacttctccgacggtcccctcacctgcctggaacgcccccggagtgacccagcaagaggcttccccttgccagagctcacaggaaggcccttttccaaacgcacctcgcgctcggcgccgggccccttccctgtacgcctcaatttcgccccgcccgccgaggtcacgcgctccaagttaccattttcttgctctcggtgccacggttcgcctgcctcgacatggtgccggccgccccgccccactcgcctagccacgggttagctcggcgacccctgcagacgccggagcctaagccgctgcccctcagcccacaagaccgaccggcactgactcactgcgcctgcgcggcctcccgcggggcaccacgggactagtggtccggccgacgtgggcaactcccgcccaacaaacgtcagactacaacacccaacagcccctttggcagcaccgcctcttaacacagtcaactacaactcccggagtgctccgcgcgcgcctgcctggtagagcccagcttgcgctgggcagcatcctggccgctgggtggcgtccgcagccttcggtaatcctgggtcacacacacgcttcctccttgtccccctccccccgcgcccggctcagagatgatgctccacaaattcctctctcgccggggttggtcttggaaagtccctctttcgagctagcgtcttccgctgttgcgattcagctccagaagctcccaagatgtcccagaaaactagcaatgactcacacagaattggcttcttcattagaaaaatatttaatgacctactatgtgccaagcatttcgctagtgtctttctcttcagactgccaaaccccaaatgatgccagcacctgccttctaccacctgtggcctcgtgatggaatatccagtcttttaggtaaagttcaagtcactttctccccctccctccccctagaacagctacactgcctggttcccagaaaacaaagatcactaactgtcgtggccgtcagttctgagttctaatcccagctttgccattttaggcaagttgctaaatctctctcagttgttgtaaagactggtgagccacgcatgcccagcacttgggcgcataaaaggcataaaagaaacgtgtattcccttccagccaccctccaaaaacaagccaacaaacaggcaccagaaacacgaagggaatgtgctggctgaactctcacccatcaccaaggggaagtctatagtccctgaccacagctctttggtttcagctcccgcggtctctcagctggtcaactctgaggaagctgggctggggggtccctgagcactctctgttcacttaggcctggtagcctgactgtagcagctgcattctggcccctagccctcaccatgacaaccagcctgtccagacacgagccagccaggctagggagggctggggggccgctgaggctgcaagctggtgcccagggttcccccagtccctccctcagggtgcaggaccaatcattattatacccttttccccagacattctgtttcctccctagaggcagtgacccctcactctccatcctgtgtaatgccacaggggagggagccaagggccgagggctctgggaaggaacttgagggttggttggggttgggggaggaaagcaggagtcaactagcccccaagggccagctcagctagacaagagccctctgcattcccaggacagaggacagctgaggtgaaagctgcagttggccagccggtctgtcggtctgggctcctccctgccggctgcccttggctgcccacagaaacctgagtcacactcacagccagccacccaaccccaccctgcctgctgtcaagcagggcggttctagagagagtggaggtggagcctttccctgcctgtccaacagcctccgagattttgcctctctctgcctgggattcctcctcttggcgtctctttctctttgggacttgcagtgtcattagtcctgaatgaacagtgggggtgggggccatctcaggttgatctatatgatcccctcctcactcagataggttcttaaaggcttcttaggccgagcacagtggctcatgccagtaaccccagcacattgggaggcaaaggcaggaggaacactttagcccaggagtttgagaccagcctgggcaacatagtgagacccccatctccataaaaaataatttttaaaaaggctgttctgttatgaaatagccactcttttgtttatttacttttttaacaaaaataaataaaaattaaaaaaaacaacaaccagctgagcattgtggtgtgcacctctggcccccagctactaggaaggttaaggtgggaagattgcttgagcccaggaggtggagggtgcagtgagccatgtttgcactactgcactccagcctgggtgacagaactgaaaccttgtctcaaaacaacaacaacaacaacaaaactccttagacagctgttccaaggattctcagtatggtttccatcattcccaaatcccaaccctccttaccacttctaggtgccaggacatttaggaacaccagatgtcccctcaccaccctcttctccttctccctagaaaacaacacaagggatagctttctgttcctatcaggggctctagacaaagactctctcctgggaacccaaagggttgaatctatttagtcctgtatctgagttccccgcctccccaagagctggacagggaggggcagctggcatcaccagccacagggagtgggccctgggagctgag

SEQ ID NO: 33454 - DNA, 2623 bp, Homo sapiens
gacaggctgctcccaggttgcctgagcccctgacccttttgtttcccactctatccctccaaatggccgctttctggagctgcttaaaggaaggagaaactggagggaaggggggcaagggggacagtatctcactgggcctaatctctggacaatgaagaactagagaactgaccttctagaagtcaggacaaagggcagggccagggtgggcagggcacagctgcccctcctcctcccccgcaacccaagtccctgcagcagcaccaccatcatccatccaccttcccagcaagctccccactctgccccgggctgggcctggcttggcttgaagccctcacctcagctggcaccaacaagggggctgggagtccattctggagggctgggaagcagggctactttggggagtggattctggagggggtcaccaccccctcatcgacagaccactgggagaaaatccttctggggtgattggcggggtcgtctggtgggggtgggggaggtccagggctaggaccacccagtttggagccgggagggacccagcagattagagacctgggtaaggcagctgcgcagggctgtaattacccccagaggagcagggaagacacaagcgcagaatgccggagcaagggcggcagcaaggctcccagacctgtccccagcccagccatcagcaggggagagaaagcgaaaccctttcaggggtctccttgtgactctccttcatgcctcccgacgtcccccgggccgctttggtttaggtgggtttgagcgagaatttggactcgaagctgccctctcagccccagtgccagagcccccaaactccagggtgggaaaggggagtcccagccctgctccccctctcccccagtccccgcggcgggtgagtcacccgagcgctccctacttagtcctcaggcgctgcggcgcgtaccaagacgcggacgcagggggaggcagctagcgcggcgaactcctggagccgtggagcccgctcggccgtggccgtgggagaggcgccgggaggctgcgggcgcggggctccggggcgggggcggcgcgaacggcgcggacggcgcgggcgcggggggctgggtcccggggcgctgctggggtggacccccccgcctcgaacttggtacgcgccagcgagaggccaggcccagcccgggcggtacaatagggttgggccgaggccgggactgggccggcgccgggcggggaacgggttcgcgaccgcagccgagagaccccgggcgaccggcacctccgagactcgcgggccacctgcctcgaccttccccggagcgcccccgcctccgagtcgctacttgccgggccgggccgggccgggcgtgatgcgccgcgggacccctgtcctggccactggccgccgccgccgccgccgctgagaccccgagacccccagtgacgccgcagccatggagagcggcccgcgtgcggagctgggggcgggcgcacccccaggtatgccgggagccacgcggaggcgagatgggggtagatggaggggctgcagggcggccgaggatgaggccggccggctgggcggggacccctccgctgccgcgccctctgaccacttggaagtttaaaaataaaggctgcggcggcggcggctccaggctcgcgatgcatcctctgacagctgccccctcccccaccccgggtgccggacgcatcgggcgtcgggagccgcagggaccccgcgcgggagttgttggggtgacccttctgccccagcttagtgccatctcagcttccccgcccccacgtcccttcccgattcaccccgggccttgaagatcctcttctactgagctagggcttccgtccccttccccatcccccgtggcacatgtgaccccagcctgagtgtgtcgggggtccatattctcaggcctgggccctgcataccgacgcctcggccttagtgcccgtaccctcaggccctggcccagacctcgcccccaccccatccgtccagctgccgcgcaaagggcctgttgctgctgcgggccggcggggaggggaaaggagggaggggaggagagagggaggtctctagccgctgctgccaagtaacccgccggataaaggcgagggggagggggaggcggcattgtttggggtgagggcgggagctggggagtgggccgcctcccctgcagccaggcctactctggagcccacccagcctgattcggggaggagggggacagaagtaaatctgcttctcctgcctgccctccttcccagcctctctgggccccaatctcccactagagaatgaggtaaaggctccaagccggcactccctggacctgccacatcattccccagcctgaggctttgatacctccccccttactctctttttttctctctttctgcccacaccttagaccaccaaagctcccctcccctccctcaccccaccaaccaccagtgctcaggacttctgcaaatcccattcggatctgggagcagctgatgagggggtggggacaggtttctggttgggcttggttttggagggaggcgatttctctttcttcctggaaggggagggaagaacatgatt

SEQ ID NO: 33455 - DNA, 1703 bp, Homo sapiens
gtctgcccgcctcagcctcccaaaaggaatggaatcttaaaaaaaaaaaaaacagtgatgggaacaggatctcactatgttgcccaggctggtcttgaactcctcctgactgaacctcccaaactgctgggattacaggtatgagccaccatgcctggccaaaagtccctcaactttctgttttaaaaattgccaccagacttttctgcaatgtcacctgaagggttcctggtctcacacaatgcccacccctaaaacacagcagcctaggccaccacgttctgccaggcgaggtgtgtggtaggaagagggcaggcagctctggcctcaggcacaaagggctgagtcctgggtcctggggacaggcactggcaattgaatctggacactgagcactgggtcctaacacaagaaatcatttcctggctcagggcagtgatctctgggtcctaaaaactaggaccagagcagagaccataggtcccttatctctgggcggagggtgctgggctaagtggcagtcacccaaggcagggccaggggtaaggagatgcccagcccccagttgttttgtaacagctgctggactgggctggaggggaaatttaaggaaccagggggtgaggtaaggaggaagaggtcagtgggcagggcaaggccactcgggcatgctggattggtcccaggccctggagggcgagagaaagacagtggctggatctctagggctctcattggcagacactggggccccaggaactagggcaagaagagtggtgaggatagcagggagtgtgtgctaccccctacccccaacccccctctttgtaccctcccccctttgtcaacctcctggctccgctcccaggccgaggcagctggagtgattagtgtgggtgaaggagtacaaatgccaaaggcttgtctcacgtctcagaacacagggatccagccagagtggatggcacaactgagtgagaaatggagaccgagagataaacagaaataaacagggacaacaccaaagagatagaggagagaagcagggcgggagacaaaagaagagaccaaaggcccacacagagcaagggggttgtggggagggagggttcagtagctacagggcaggctgaccttttcctgtctcttctctgaccccgtcctgtctgagttcccctccgctgtgtccctatcccaggctttctcaacctcagcactgttgacatttggggcaggataatcttggatggtgggggtgggtgggtgggtggggggtgttctgtgccctgtaggatgtttagcagcctccttggcccttatccaccacatgccattggcactcccccaactcctctgctcttgtgacaatccaaactgcctccagatattgccggatgtttcctgggaagggattgctcctgactgagaactgtccccaggtaggttcatgttcttgagaagaggctaccccagggtgtctggctggttctcccttcggcccgtgtgcacagggccccctggctctagcatggcttaagttgccctaagtcagaagccggggaaactaggagagccactgagactgaagagcagtctaggtacagcagtaacgaagtccctgccctcatggagcttctgttcttattccacccaaaaggcatcccaggtgtgttttgggatgtgctaggggtgtttcatgagtg

SEQ ID NO: 33456 - DNA, 2332 bp, Homo sapiens
gcaaggaatgctgccgaagccactaagggcaagggctgatgtggcgtggtctgctacttgagttgagccttgcagcttttctcttaggaagagcattagatttctttattaattgatgtgtactgtgtctacttttctctggaggtgcagaaatccatcaaaactgatctcggctctcaaagagctcacagtcttgtcggggaaggccccgatacttacagagtaagatgcaaacttactgtgggaacacaggcatagggaggagctagtcaactttgaaagcatcacagatgacctatgagatgggtcttaaatgttcagagacactagagcagaaattccggaggaaaccagcctgtgcaaaactgataaacgcagagattctcaaatttgtaggtgggtaagaatcacccgagagatcggtttaaaatgtagactgcagggagacactccccggtaaacttttggttcaataccccagtagcacccattttaacaaacttcccaggacgacagtcagaaaatcatagttacagaaggcaggctggggagaggcggtttctgggtctccgaatgaggtcacacaattaaaattaaaaaaacgaaaccaaaccaacccctccatttgcgttgcgctttcagggtgcttgaggctttcctgtgccttactttgtcggagcctggcaacatcgctgtggggtagaaattacaagtctcatttcacaggggaggaaacaagtttagagaggagggatgaatttgctcaaggtcacaaagcggaagggagcgcagcagagaccaaaaacagggagactcgacttccaactcggaagcttttcaacaaggcaagctggcccggagtgggtggggctcagactctccctccaggctggttccaaaatggtgggggcagtggcgtcagcaacgcccccgccccttccgtccaccgccctcctccatctccaggccacccaggcggggggaggggacggccccgagcaacccacgtgaccgccgacaaccgagcgcgtgacgcaaagcggcgggcccaacgctcgccttgtcttttgggaaacgtagttctgatggcagccaagtcggccaggagaggagggcgtaggactacatttcccaggaggcagcgggtctacgccgtcgccgtcgtcggagagcggagacgctgggcgcgctgtggggcgggggcgaggttcgggctggttgttccgttgcgagctgcagctgcgatctctgtggtaggcccaggtgagtgagcgcctctgatggaagttagggcagcttaaccggctctagtggtttcgtctcttatcttttttccccagctgctggtcaggggctcggggaaggcctggcgtggagtcgctccccccagcttacaccctggcctcttctgagcgggctccgttccctccggctcctccccttccccgccctttaggtcttcccctggccccggcctagctcccaaggctcttggtcgccttctctgcagagcagctcctacgccgctttatcttgcagtcggcctgggggcggccactccctactcctcccgttttggtcgtatgaaccccgttatttggatttcttttcccggaactcccgagtgcccttccccccacccagtccccattggcctggttcggtcttctcctagggcgcatgtggctgccactcagtaaatgttagtaccgcttccgttctttccagcctggtggccaaaaacgggatagtccaaatttgtctcctacgggaatattagagttctcacttttttcttgggctggagctgaggccggcttgcattccagtggcaatcggcgtgagttctgcttatatgaggtgaattattttgcttctcttagcacctaagcaacttttatcaactgttgtctttgactttacaaatcttaggggtggagcatggcagcagaagctggggagcagcaatggtgcacagaagttggaagccatcagtggcagtacagtgtttatggggaatttgttacttggggtgaagggaaagcctctgagagtatagaaggacctggcaagagagaggcagtgaagcttctgttgggagcataacagaagtatcctgaaccagttggcttgggtttaaatcttggccctgctatcttttgatcttaggtcaagagtcttcatctccagctgcctcagttttcttatcactaaaacagcagtaagtaacagtgacccctttacagggttattgtggagactaaatgagataaaataaaaatcacttagccactgttaaaaagtaatatcatcatttataggtttttttttt

SEQ ID NO: 33457 - DNA, 738 bp, Homo sapiens
acatatccctatgtgtttgttttttagttgacttcacgtaaaggcatggtttgttacacaaagaatataaatatttaccatgtctgttacatgtaacacataagaacagcttgtaacagaaattcatcaacccccctacattaaggttctccagagggacagaaccaaagggtatatgtataaataaaagtgagtttattaggaagaattggctctcacagttacagggtgaagttccatgataggctgtctgcaagctggggaaagagagaagctggtcacgtggctcagtccaagtctaaaagcctcaaaaccagggaagccaacagtgcagcccttagtttgaggtgaaagggcccgagagcccctgggaggcctctagtgcaagtcctagagtccaaaggctgaagaacctggagtctgatgtctaagggcaggaggagaggaagccaggcatctgtcacagcatgagagagagagcagactcagcaagcaatctacttatccccattgtttagctgtgcttaaagctgattgaatggtgtcccacccacattgagagtccagctggacatgtgggctggttcctctcacagtccactcactcacatgtcagtcttctctggcaacaccctcacagacgtacccaggaacattgcctcagccatatagctattcctctgtccagtcaagttgacacctaatattaaccatcacagcccttaacattttttttgg

SEQ ID NO: 33458 - DNA, 1135 bp, Homo sapiens
gggcagaggcgcccctcacctcccggacgggcggctggccaggcggggggctgacccccacacctccctcccggacggggcggctggccgggtggggggctgacccccccacctccctcccagacggggcggctggccgggcggggggctgacccccccacctccctcccggatggggcggctggcgggcggggggctgaaccccccacctccctcccggacggggcggctggccgggcggggggctgacccccccacctccctcccggacggggcggctggccgggcagaggggctccttgtgagcttgtgaggaactttctacttaagaatgaccaagtggccttgtgggaaggaagagggttgccatttgttaatggtgtttataaattgctattggattagtataagctgcaaagcagctactaatttattttctttaactaggagaatcataatatggacattttggataggcatctttttaattttctaaagatttccaaaattggtaatgttatttctaattaggaagtttggttgaaaataagtttctgaactctgtgtcaaatctagtagctacttccaatttgtaattaaaaaaagaaaaagtcttcaaaggttgaatgtgccttcatggattctccagcatgagcaaactgaagtatccaaaactgaattaaaaatttcatctaaattataccttcttcttagctttactatacttagtgtcaaactgatttcttagatttcgtagtcacttagttttgaaaccttgattcctttcctcttcgtcacttctacgtctagtcagttatttgttgaatgccatgtatgtgtaaagcagtttcagatttcactcctgtgagttctatttccattgctattggatgcctagtgaggaaagctccttttctcatatctacctgtacaattttacttgtgggttttttttttttttgagacagagtctcgctctgttgccaggctggagtgcagtggcgcaatctcagctcactgcaacctccgactccctggttcaagcaattttcctgcctcagcctcctgagtagctgggattacaggcacacgccaccacgcccagctaattttgttttgtatttttagtagagac

SEQ ID NO: 33459 - DNA, 778 bp, Homo sapiens
ctgggattttagatgtgagccaccacgcctgggtcctttccccaatcttacaggtaaacaaactccttaaagaccttaaatatgataggtgcatgtcttgctgactgaatgattctgttccagggtctgttcacctcaaatgtgatagcttcctaactttgtcttgcccatcctgatccatccccttatcccaacagtttgcctgcttagaaacatgcagtggcttcccatttgcagagataaagtttacttttctttttacttggcatttgaggctagctatgttttggttcttcccctgggtaaatgtgtctctcattccttgtctcttgatcattgcattttaatagcccttgaacagttatatttgcttttccagctaggactttttatttttcgctacttcctccccacacccaccaaaatcacgtatttttcagtcagtagcaattttgaataaatttaagattatagtacatctgataataagaggtaacctgagtgcatatctgtgcttacagtcgttctaagtacattccatgtattaaccatttaattattccctacaatcctagggggaggtatgattataatctgcattttacagatgtaagtgaggcaaggaaagatgaaacagatccaggattgcacagctagtaaaggggatagagctggattcaatcccagagtctggttgtagagcatgtaaatctttgtccattttttcatggaactccaaggcacctggggctggcagactggtgcatgagaggataaa

SEQ ID NO: 33460 - DNA, 1638 bp, Homo sapiens
ctcccaaagtgttgggattacaggtgtgagccaccacacccagccttaaaaattaacttttaattgtcaagtatgatatacaagaaatatgtgtacattgtggaatggttaaatctagctaatcaacatatgtattgcctcattttttttgtgtggtgagaacacttaaaatctctcttggcgatctttgaatatacagtacattattatttactgcacttaccatgttgcccaacttattcctcttaactgaaattttgtatcttttgaccacatctcccatcttcatcttttttttttttttttttttgggagatggagtcttgctctgtcaccccgcccaggctggagtgcagtggcacgatcttggctcactgcaacctccacctcccaggttcaagcgattttcctgcctcagccccccgagtagctgggattacaggcacacgccaccatgcatggctaattgttgtatttttagtagagacagggtttcaccatgttggccaagctggtcttgaactccagacctcaggtgatccgcccactttggcctaccaaagtgctgggattacaggcatgagccacggtgcccagcctccttcatcttttaatatttaaaaaaattattcttttctttcaggccttcatttttgttcatctcctcagttgttaactggtctgaccctgccatatctttatttgttggtggctttgactgagttttgaatacttttattgtagagatgggggtcttggtttgttgtccaggctagtctcgaactcctagcctcaagtgatccttctaccttggccttcctaagtgttggattgcaggccagacccattgcacccagcctcagcctcttttttttttttttttttgtgagacagttttgctttgtcacctagtctggagtacagtggtgcaatcatgactcactgcagccttgacctcctgggcccaagcgattctcagcctcccgagtagctaggactacaggcatgctttatttttttgtagagacagtctcattttatggcccaggctggtcttgaactcctggcttccagcattttatatttctttgtatcctctgtagttgtgctagtttcagtaaattcttatgtatgtgagggctcacttgatttatacttgtgtcttcactgttgccatgcttgctcagatgtttattatcttggggctcaaacttacctattgagcaaacatgatgaaatctaccatgtaccaggcattgcgttaggtgttggaggagatacaagataaatataaggcacagtccctattctttttctttctttcttttttttttttggagacagtgtcttgctctgtttcccaggctggagtgcagtggcgtgatcctcagctcactgcagcctctttctcctgggttcaaatgattctcctgagtagctgggactgtaggcatgcaccaccacatctggctagtttttgtatttttagtagagatggggtttcaccatgttagccaggctggtctcaaactccagaccacaggctgtccacctgggcctcccaaagtgctgggatacaggtgcaagccaccgcacccagccagcacagtcccttttttttttttttttttgagatgg

SEQ ID NO: 33461 - DNA, 1222 bp, Homo sapiens
ctggagaaaacaatacacagaattgggtattttgtcttggcagttaccttgacaagagctaaggaccaagtattgtttttcctgagggcatggactttactggcatcccttaaccctccaatttctgaacacacaggagtgtttttgctgatttttgttggtggtgatggtgaaatttgccaggctggttccactggttctgcagatgccaaacaaacagttgaagcgagctcacttttttttacagtggatttcggacaccatagagttagaagctgcagccttttggggttgctaatgaaaaaaagtagcttactatgtattttctcccctctcgtgatacttttctcagtggttatgaagtattctcatgtctaaaaacaagttgatggaagagcctccactgggaatgacattttggactacttcatgtcctgtaattgggggagagtttaaggttgtactttggagtttactttagatgtgtttgagtttgagttagaatgttatttgctgtaactgattctctttttagatgtatttgcagagcacacacgtggaaaagcacataacccaggctgttgtgcagtggagcaatcattgctcactgcagcctggacctgggcccaagccatcctcttacctcagcctcccaagtagctgggactgcaggagctcaccatcatgcccagctaatttttttttttttaaatcttctgtagagacagggtctcactatgttgcccaggctgattcgacatcctgggctcaagcagtcctacccctcaacctcccaaagtgctgggattacaggtgtgagccactgtttacagctgcatgtctctttttttaaataaagtcttttttaaggaggaaaatacacaaaaggagctgcagaaactggctttatctatccacacttgttcggattttgaccaagaatacagtctgcctgcagagtattgataatgtttgaagctggatgatggaaacacttgggttccctatactgttctttctacttttgtgtatgtttgaatcaatacttctataataaaataaacaggctgggcacattggctcatgcctgtaatcccagcactttggaaggctgaggagggaggactccttgaacccaggagtttgaaaccagcttgggcaacatggcgagaccttgtctctacaaaaaatacgaaaagttagccagctgtagtggcacatg

SEQ ID NO: 33462 - DNA, 744 bp, Homo sapiens
taatatgtgcagaattgttaagtttggctctgtttgtatttacatggcagcttttcttcatcttaatgaaaattagcttcttagttttctagtttctgagtgttgaaatgagtgtttccttttccactaacttgttgcccttttttattcttttaaagtctgataatatccacctgttgtgtaagtcatctggatggatttttatttctgacccaagttaaaatagaatgttagacagtctgttactaggcagacatagatagatatccctgaacttgtgacagaaataaaggtctccatttggcaagagtgaacccagagaaccccaaaataatgcttaagaacaaccaaaaaaacaaaatgtatttttatttttaatattctcattgtaaattgtttgtttatacctccacctcccactcctgaataacttactcctttattctgacttcatatagtgacactactgccaaaaatagctccaaattgaaatatctttgaccttgctagagcttgcaacagtgtgatctttttggcaggattaaaaccgtgggttcttggcatcctcatctagcagtcttttactcatcaccttttgtctctgacttcttattagtttctcagttctcctctaaattatgtctctaagattttgcttgtttcccctgtgagatggagctatagcagcttcctaggcgttttttgtcttttggaaagttcttgaaattcaagtattttatttga

SEQ ID NO: 33463 - DNA, 510 bp, Homo sapiens
ccaccgtgcctggccacaattttagggttaaggaaggcaatacatctaccccttgtcccctgaactttaggaaagagttgggaggccaaggctgactggttttttacttggtgtaaactactcaggcagctggaagtctatgtgaacagcattccagccacaccccactcccgcttcatgacatcacctccctgaatggccttggctggtcatgctagctgatctttttattgattgattgattgaaatggagtcttgaactcctgggctcaagtgatgctcctgtctctgcctcccaaagtgttgagattacaagtgtgagccactgcacccagctgtagtttatcttttaaaatactttctcatttgttgggtgtgttaaaaccagcagtgactaaggtttaacacttcactccacttgaagattccagtaagaaagagaagagagagattttgtatatacttttccatagttacagtgcactgagggttactttcaacttcggtagg

SEQ ID NO: 33464 - DNA, 1930 bp, Homo sapiens
atgtttagtggggtcagagttgaagttacatgaatcctatcacagtaacttagatttcccctttgtatgaataagtgtgtgtgggtgaggagcagggagcatgatgcctttcataatggaagactgagggagggaaggacaatgataggttactgacatttggctggctctgctactcctccactcctgggatcctggccttgctgccccctagaggtattcagtaacctccactatcacatggcagggctggtactgactttagtacatagataatgactcatcgtattaagctaatttgccctagtctgtaatttcccctagatgaaggaaagggaagggaaataactctgggagagttgcgccagatcctaggcttagtcacacaacctgtttgagctcagtgggaggtaatatgtggagtcgtggtataattagtcagagctaggttagaatccagactctgctcgcttctctcacctgagcctcctacctgtaaaatgagggaaataatactgagttgtattgtcctttactgcatgccagctatgttggtgtaaagtgtttaaacacagtgtttatttagagaaccctgtaagacaggtagcattcctgtaagaaataaaagtaatagaacgcactaacagatgataatatacaaagctatttatctggcccagtaccagatactttggagctctcaatatagtgttaatttccttctcccttattaattcatgcctgtatcttagactgagctcctggaggccatggactgtgttttgttcctgcttctatgtatgtcatatgtttatcacagactcagacatagatgtgtcactgaacatgactgacagaattgagaggaagtatcttgggtgggtaggttgggggtgagctggctttataaggttactcatcatcagtttcttccatcacaggcatacttttgattgccctgtgcttatccatgaggccccagccaagcagtgtcccttagaaagatgattgatcaccctggctcttctcttttcacaggaagcatcggagagcaagagacaggtccagatcctcctcctcttcctcccagtcatctcactcctacaaagcagaagagtacactgaagagacagaggaaagagaggagagcaccacgggctttgacaaatcaagactggggaccaaagactttgtgggtccaagtgaaagaggaggtggcagagctcgaggaacctttgtaagaccttcccctctccccctttctctgagacccttgctcctaccagctttgatcacgtttcatcagaataccagttttgttgcctttgacataagtaatccaatccaaagaccctggaatctttggttctccttcccacatttcctggcctttccattttttgttacttttctgttcataatcacttagctagaaagcctcttatggcttctggtctcagaacttcccccacttaaccttgactactgctgtttatagggaggcccttggggcaggtttgtcctctgtgtaggctgcagacttgagatgagcagaaagggaatggctggaaaccagctgaccagcatatgactggaagacagctgtctattccacaccagaaaaatgtttgaacaaaaagcaggggggtttgttccccattcctggcatgatcctttgttctttttccctcatttattgcaatagcagtttcgagccagaggaagaggctggggcagaggcaactactctgggaacaataacaacaacagcaacaacgattttcaaaaaagaaaccgggaagaggagtgggacccagagtacacacccaaaagcaagaagtattacttggtatgtgtctggggataaccaggaagggttagagggcctttgacacacagagtagctgataccaagccttaattagtttgt

SEQ ID NO: 33465 - DNA, 1024 bp, Homo sapiens
cccagcacctggcccgacctatcggctggcggctacgcctcctttaccctactgtcttgcctcaggtcgcaccctgcgcgggcccagtactcggccgtcagagggagctgccaggctctggagggcgccccggaaaccatgggtaagtgcggaggctttgaggtggcctctctctgcaaccgtggacatagcaagagcccacaccaccccccgacccccgctgccctctacggtgcttggggacacgcccgccctagccaggctgcccggctgggcctttctgagccgcacgccggccccgtcttccgcccgcagaagtcctcgtcctggccggataccgcgcgcagaaggaggacgagctgagtctggcgcccggggacgtggtccggcaggtgcgctgggtgcccgcgcggggctggcttcgcggagagtttgggggccgctatggcctcttccccgagcgcctggtgcaggtgaggccgagccaggggcgggctgtggggtctcagcgcgcgccccccgggagctgagagcgccttccccgtgccctgattcccaggagatcccagagaccctgcggggctccggagaggcgcggaggccgcgctgtgcgcgccgccgaggtgagcgcaagggcggggacgggcgccggtgggcgggtgcacggagccagtgcgaccccggcgtctccggctcttagtgacgggcgcggctctgggcgggacctcggggccgccctgcggtctgtgattggttctcgagtgcaatgctccgccctggggcggggctggagggaccaaaggctacgtgcgcgccttgcgcttcccccagctcctctgactggggcgtccgactggagctcagccgcgcttgtccggtgctaggtcatcctgccaaacacccgaggccccaaagatggtgcaaagtgaacttcagctacagcccagagcaggcggacgagctgaagctgcaagctggggagatcgtggaaatgataaaggaggtgaggggtgaggtgatggga

SEQ ID NO: 33466 - DNA, 1339 bp, Homo sapiens
cagcgggcaagagggcggggagcggggcggaggggacggacaaggcgctggggagggaaggggatggtggtcagggaagggttcaggcccccagtcttccggcgcccgccctcaccgcggatgtgcgcgtaggcagccaggctgttgctgagcaactccatgtcccttcgcggggcatccatgctgctctggggggcagctcccctaccagcctgcgaggtcagcaaagtcagatccttctcccagcctggagcccaccccgaccccttccgcgggcagctcctctcccgggagccgcgggcccaggttccaccctggagagagcgcttccctaacttcgtggcggcccggggccctgtcggggggaacccctctcccgggcgcggacgcccctccagtcctgggagcagcgccggggaccgcgggaggccccgccccctggtgaggtccccagctgaggcccggttccgccgtcccggggcgggatggaggatagggacgctgagcctccacgccccaggcgggctccgggaagggaagctgcctctctcctcgcccggccgccccgcggggacccaccggcccggggccaggcccactcaccgtcagcgccccgcttcccggctgcccggccccagcgcgtcccgcggccgcatacactgggtccggccgcccccgcccgctcgggtcccgccgcccctccggccccgctgggctcccaggccgcggcagcacgggcgggacacggaccgagggaccagccggcggaaagtttcctccgaggaaagaggagggacggggcggggcggggcgggcggggaggcggggaggaaaagggctgggagaggaaggggagaggagcgggcagccgggaggagggagagcccggcccgcgggccgtccgtcccccacaggaaaccgccggggaggccgcggcagggacccgcccccaggccactaacagcaacaacagagaggctggagctctgcctgcgtgcgggccaagggctaaaccttggacaggttctttcacttactccgcctgacaaccctgcgacgtgataccattatccccacttcgcagatcaaataaacggagtcttggagagattgaattgactttaccaaaaccgtcaggatttgaatctgctgctctctgatcctaaagcctgagctagaaaccaccgctccccctcctaggaggccccttccaggcaaagctgcttctcttccccagacccatgctggactggaagggaggggactgtccacccctccttccagggcccaggcttgaatgtgtcccctggccgagctctggtctagtcacgcagggtta

SEQ ID NO: 33467 - DNA, 1439 bp, Homo sapiens
tgtatagctccaatttgtcaagaatacataatatcacatcatttaatgcataatatcacatctccaaatgctgcactttattgccttgggggttataagtgaactggctgcttctaaccagagctctctttgtataggatgaccccaccccctgaggcctgctctgctcccagcctgtgggagagtacctgctgcagccagagaggaagtgactcagcccagtgggaagtgggaggggcggtcagcaagagggccctgcgcccagcctgctcccccagcacatcctctgccaccgctgcctttcctcagcaggactccaatgtgctgagcacagcaggcctgggggccaggcagggcctgaaagtccagggtctgcagcttggtgacctagctctagtctcctccaggaagcaaggttcatgagttagccccacataaggagactgcgtaatcagtgacatccctcctcaccccactgccccgaggaagtccccactgggcttttctgtgacctcctttggaggctgcaaagaaagcctagaagctaaaggcccctggccaagggggtgcatcccagagaaattctggaagaaaagtctcagggctgtgcacacagaggtagagagaagctttctctgcaggctctcctggggaaaaaatacatggagttagagaccggtccccatagccctgaaccagaccggctgctcctgggagcaaagggcttcaccagcagtcacactgagagccaccagagcagaatccagggcagcattgccagccctgccaccagctctcccctcccaagggcctccggaagcagctgatgtgacaacaaataatctgtcactgtgtgtgggtgtcagaggaggaagggacagacttacaagctctttctctgggccgtactggcttggcctctccatccagagaggtagcctgggaaagcagccaagcaccctggcttagggatgtttgcggtggccccttggctcttcagggtgccttctgccatgcgcagtgacggcagactgagtcactggcaggtcttccctgtcatactggcctgctctggctcatttggactagaagaggagattgcaacaagggaggtcctggcatgggcatgtgactaagagtcccttcagctccaaccatcagttgttgctttgtgcagtgactcagtcctggaataaggcctgccatggggtcccatgtggagttcaagttcttaccacccatgatagcccaaatcaggcaaggagaaagcagcaagcaaccgcagaacaactggttgattctaaaagccaccattctgtccactgtgtgacctggacacatgcttctctgctctgcagtcttctcatctggaggacagggacagcgctactcccaaaaagggttcccttcaggattgccagggcccagtacataggagg

SEQ ID NO: 33468 - DNA, 4138 bp, Homo sapiens
atgctccttgaaataaaaatagataacatttattgaattcttattacgtggcaaacatggttgtatgttttacatgttaactttttactcttcataatatctctctctgttatcatccttgttttatagacgaagacactgaggcacagggagactaagcaatgtgcccaggtacacacagctggaaagttgctgagccagaatttgaactcaggaagtctggctccaaagcctactcttaaccactatgctgtctagcacttgcctctaggcaaggactcttgttgtggtcatgtgagaaatgaatgaatgaatgaatgaggactgtctagattaacccaaccaacaacttgcacagcacggccattaggaagcactaaaggagctcacaggcactgtttacaaacaagattattttggccctacaattacacattctgctcttccttatctcacgcaaaactactcaaagagggaaaggcgcccagcccagtatgcctaccctcttccccactggttctcaaaaccaaagcaaagccaaccggtttcctccagtgacttaaaacagagcaaagtctatcctgccacacagagggcggctgtcatctcttccttccgctaacaaaagggcttcaaacctggggattggggtgggcagaaaactcggcatcaggaatccgaatgtccctacctaactggctggaaggcggggccaagtggcgtgggaatgggcgggcctgaccggctcggcaggtgaaacactgaccacagcaagctctccttggaaaaggccggccaaacgtggccttggcaagcaggtagctgtgactcgtacctgaacgccgcccgggatatgaaaattccccagcagcggtagcgcccgtgccagagtgagggctcttggaggaagccctggctggccctccctggggactcgttctaactatcaagtcaccctcgggattaggagggaaacacggagaggcagaaggtgtctttttggaaagatctggctggattcacacgccggttgcttcactcactggctgggtgactctaggcaaagctggcagtgcccacttcccagagctgcggcggggactgaagctcccgcggcctcccggtacccggcgcgaggcagccctcgcccctgccgccggggaagggcagagccccagcggaggagggggcattcgccggggccatttctgctgcactcagatggcttcaggctgtcactccgattccaccgccgcggccgccggggcccgccccgcctacccgcaacccccacccggctccccgctcctggacccctgccctcaccttcgccgggtggtcagagctattcgcccatagtccgtagcccagagccggggctgctcggctctccctcccggggggccggggccgggctggaggcgtgcgagcctctcaccgccgcctcccagcgcagccacccgagccgccgccgccgccgccgccgcctccctccatggctgcggcgccgccacctgacaacggaagtgacgcaccgcccccctcctccccagccttagccgcggccccgcccccccgggccccgccctccgcctgcgtctccagccccacggctttcggattggggcgccatcttgacgatgggcggaagacttcaggcaagaggccagagtccgattgaggattggttcagggtggggtctgggcgaaacctgttacacgattggaggccgaggctctaatggggcggtacttactgctgatctatatctgcggcgaggctgggacggaggcaccgccccgcccgaccccacagaacctcgcgggccctacactccccctgccgaggttgaagtccccagcggttggaagatcggccaattgtagtgtatttatcagaaaagtgactcatccttgatcctcatttcccggtttgtggaactctgtgaggaaagccctgcagttaggctcaataaaagacagaaattcctgtcgcagcgctcataattcatttccctctaggtctgtcgcctttgtagaaaccccgaggatggcaaccttcaacctggagatccctgaagccttgaccagggaggtttacagtgaagcgttcctattagcgactacagctatctaacctcagttcctcctgctgcagtttcggtccctttctcctcctcctccagcaaccacgccctccatgaatcagcttcttgcaccagcagatgagccctttaaagggattgcatcaggcaagtgactcactggggccctctaagagcctggcttccctcccttggcatgcagaagcagctagaagggctcagtggcagcagcaccagcggccgtagccccactcccttgtcccagaggtgtgagtcagggtgtttgctgcttatgatgtctaactcttggctgtctttccagctgtcccctgggtcactctatatccatgtgtgggcacacgtgtctaagcttgtgtgcactgctgggttttcctagggtgtgtggccacttgtgtgtatgtgcatttgtcatctccacataggcagtgccaggacacaagagctgatatgagtgaagtctggctgcctctacctgtgtcctttgtctctgaatgcctggtgcccactgagctgctgatagggctgactaacaagagtaatcaggacagctcccaccgttgtgccacactctgcatggagcacttgagacagtattaggtaggaggctgtttacagctgaggaagccagtgctcagagaaggaaattaatgtgcccaaacacacacagctaataatggcagggctaggattcaaatcaagtctgatggattccaaaaaacttggctttgaatccctgctgcatcacttacaagctgggtgactatgtgcaaattgcccaatcttccccttctgtccaaacagggataacgcttgggggatcactgtgaggactcggagttatagaaacagctttttgcaagacccagcgagcactcatactcatctcagttgaagggcttcaatgaggtgggtgaccaaaagacaggcataaagaaggccccagcccagcaagctccactctctgacaaaacaaaaagcctagggattccggaagccctgactctgacaaaaatgagttctgggttttccagagctctaattatcagctagatgaatcactctgcgctgacaccaccattcctacccccaggagactctcagctgattgaaaatccaggattttaacaaaggagaggaggaggaacagaaagctaggaggagaagaagtaatgaatagaaaccaaaggtgccagccagaggaaatgagaaactgtcatcaggacactaccatgaggagaacgctgggacacacacacacacacacacacacactcacactcacgctgacatactcttgctggctctccaactctaggcttacggcagacggtgctgccataacaaagtgacgcctgtcacaacagcatgagatggtggcttgacaaggtataggcagatctgcctatcacagaaggagggaaagagaccttcaacccccaggggcttcctcaggcttctgaaccctcgtctccattactggttggctctggcttctctttgtcaccaaatcgcaaggcctaaatctggcaaattttgagtgtcagacctacaccctgtggctaggtaccaccactgtggtgaacaaaggcacctcttatactctgtcatcagtatgatgccaagagtgctgggaaacagaatagcacagcagttaagatcattgagttggagtcacacagacctgagttcaaatccccattctgttgttcaccttgagcaggccacataacttccttgagccggtttgctcaaatgtaaaatggtgctattaatatatggggtttttataatgatataataagattactttcagggctgggcgcagtggctcactcctgtaatcccagcactttgggaggccgaggtgggtggattgtctgaggtcaggagttcgagaccagcctggctaacatggcaaaaccccgtctctactgaaaatacaaaaattagctggacgtggtggctggtgcctgtaatcccagctacttgagaggctgagcagggggaatcac

SEQ ID NO: 33469 - DNA, 1148 bp, Homo sapiens
cctaattatgaaaacctagaaaagttaatgtctctgaacctgtttccacatttattaaactacaggagaaacaaagctaccagaatcacactccactaaaggtactctcctttgatttcaacatgccctgataatgtattagtgcactatgtcttacctatcccttattttcagacctgagttaaagggggtggaacgctctctctttacgacctcactcagcatcccgtccagggctgtgcattgtggcactgagcgtggcaagccagactaggccagtgacgagggggcctgggagctaggtccctgggcatggcctaacgaccagccacccggctgcagcctgatgaatctgcgatcaagcaaaggtatggggctgctgctgcgactgcaaagagcagtcaccggacctcgagtcaggcccgggttctagaacaggctttgccacctcctaggagggcgatcacttagcaaaccacttagcttctccaagctagctaagctaccggtaaaacgggatgagcaccgcttactcagagcagcgggagcgggtctggggaaaggagctatactcggtaaatggggaagaaaacgcttcctgggctccggcacctccttccggaggtcctggcatcccccgcattccgccccggggctccctgcaccgccgacccggacccaccacgcgacattccttccgctttccccgtctgggtcgccgccgaagctagcgggcgcctggactggctgcctcccgccggctgcagcaggacggagaaaccatgccggcgaccgggccgctctgtcctccgggcgcagagtgcgtcagtgctctgcaagtcaccgcgtcacggagaaactacaatccccagaatgcttcgcggcgcggggctcgtgctccgcaaatcccggcctgcgtcattggagtctctttcactagagtcgttcattcattccgcacgcattcattgaaccggcgacctgggccaggctccttcccaggctccggcatggagcagtgaccaagatcaagtggctccctgagctgatggcgctgcaggggagagagtcttaagaaaacaaagaagaaaaatagggaaaaatttcttcagaagattaaaggtgtgatgtgatggtgacaaggtggt

SEQ ID NO: 33470 - DNA, 1240 bp, Homo sapiens
gcgggtctggctgtgggtgttagggcgatgatgagagggccgggctgctggctgcgggtctggctgagcgggccgggggcctctcacctttgcgggccttgtctcccgggatgttctgggcccgcagccgttggtcgaggatgtaaagcatctccccgcccaagttcaagaagagcagcggtagcgtccgcaccgacatggtgctggaaacgagctggactggtgaagagccccggggttcggtagccagtggcctgaaggccaggccgcagcgtcccaatagtccggttgctggggcaacgccgtgacgggaagagcgagccaatcagaaggcggtttggtgggaggtgccctgaagacgggagctaattggtctgggtggtggaccgtcccggggggattggtccgagccagaggccggcgcggcgttgggcgcggctggggagctgtgcttctgagagtaggtttccctcgaaagggcgagggccgggccagggctgggggtggtctcgacacagccagcccggcgcttgggaccccggccgctggcgcggggcctcaggttcctataacagaggaaagcccaggcagaacggcattagagcaggctcgggtcagacggacctgggttggaatcacggctcgtgatttcttgctgtgtgacttcgggcagggtttgagccttggcttcctcttacgtaacatggagctggcactcacatcacagggcggctgagaggaatcagtcagatcatggaaaggccccgaaagcactcaataaaaatggtaactgacttttcttttagacgagggaaggatcagaagtcctgagtcgtttgcatcgcctcccaaaagtttacttgaagtgaagcccctcctggtttcatactccatgaagcaaaccagtcccgtccgtccccgtgtgtccagttcccagaggatgcgcctgggggctctgggaagttccctcctcgacgctgttccgaaggcctcccaaccatttcttttttcttttttttttttttttgagacggattttgcccttgtcgctcaggctggagtgcagtggcgccatctcggctcattgcaacttccgccttcagggttcaagcgattctcctgcctcagcctcccgagtagctgggattacaggcgcccgccaccatgcccggctaatttttgtatttttagtagagacggggtttcaccatgttggccaggctggtctggaactcctgac

SEQ ID NO: 33471 - DNA, 2002 bp, Homo sapiens
agataataaattctaatatatactatcaatatatttaattgagcacagcgttaagggtgcttttcgtgtattatcgctgaatcctaacaatccttgcaaatggatactttcacactcattttagaaataagaatcagagagaggaagtaccttgccccatatcatttacctaataagaaggatcttaactactatgcatactgagttgcaatgggaaattacatcctgcatctcagaagcgcagacacaaagtgccatactctaggtaggcctgggtggtgccagccatgcactccctctgggaagctcattttcactcattcacctggaaagctcctgctcccgcccttcacacccctctgtccccatacaggctgcaggcctagggctttgtgtaaggtggacgtggggtcttttgctcaggacctctggctcacctcatctagtggctctaattcgccacatcggtccccttacccaccccagccttccaggaggtctctcttccgccccaagtcccaccttaggaactcctacctggtttccggacgacatatccgcgcgcggcctggaggaggagacctacgcagaaaagagagggctgaggaccatctccttaaatagcccacccctcagttcctttctgtgcccctcgcattgcccgtccgccacggtctatgcgcttctgaacctaaccgctgccccatttcttccctaccccttgtctctcacatcttgtttcacctcttgcgcaaccaccgccctttcccccttatcctgaccgctgtatatctcccctactcctgtgcttccttattccctatcttcgccgaaccctgtttccctacgcccgccgtcccatttctcagctcctcacttcgaggctgcaggccccactggttgaaaggaaacttggcgctcccaccgcccggcagcccgggtactaggacctgggtaactgcccgggtccgaatcaaactcagcgtcctccacgcgaccctcagcatggtgacctctaacccccgcggggcccgcgccgcggccgccgttcgctttgcggcacggaccgggttacatgggcgccgccatgctggcccaggatcgaccaatcgaggcagttgcaataccggagcagacgaagaccgagagaatggattaggtggcgtgactctgatgacgcaacgcacggggcggagctcagagaccgggttcccgctgcgcgtgatcgggccgtggtggttgtgtgcccacgtttagcagcgtgctggggtgctgtataaattctaaaatgccactttttggagggcatgcgttccgtccttaatctcattcctggccctcgggccagggttattttgggaggtccatggcgcctgcggtagccttctacccccaacccaatcccctctccaccccacctcacccctcccttagacaaggatgggaccgtgtaagaactactactgggtttcagccatgtctctggcagcctcgtagcctggagactaaagtcgctgagtttggaatcgcacagtcctggtctggaatcctaactcagccatttactcaacatgtgatcttgtgggcaagtcacttaacctatgtgggccctgtagggatagtaataacaatatctctcttttaggttgttgagaggattaactgagttgtatgcagaccacctggtatatagtgagcatttagtaaatctttacggtgacgttatttgtgaaatgagtggtgtaagggtggatacaaattagaagaaaaagaaaatttaattttccctggcgcaaaaagggaaaagactccttcccctcacttttctgagagcatttactttagaaaacttgtaattgtgaatactttctctactgctttgcgatgaatgtaaatcttcttaaaaggtaaataaacctcttgccagttttacaaccccggaatgtttttctcaaggacctgggggccaaccctttgaaatgtaataattaaggaagatagt

SEQ ID NO: 33472 - DNA, 1139 bp, Homo sapiens
atatttaggagggagattctactattctcctttgtgctccattctctgttgaggacctgcaccaggaaatggagctgcagcagccagaataaaagttagatttaaggaaatgaaagttagatttaaggaagagctttctttagagtgtactgaggttaagatgatgagctgaggagtcaggctgcttcaatttgccacttgctgcctgtgtgactccaaacaaatgtttaatctctttaagcctcggttttgtcatctgtaaaatggggctaacagtattggcttcataggattcttgagagaaatcagtgaccgtaaggcttgtggaacacagccaggaacacagtaaatgcttaataagtgtttactatggtgcactgaagagcacaagacagacgaggagtcatcccctctacccgcacccagtgtcggctttgtggatacttcctcttccagctgtcctgcctcccgcccctcctccatcagacaaggcctctgtgtgttggaaaccctgggtaagggagtgctggtgagggaaccctattcttggcagcctagctactgagccccgagttgtttctgtttctgttactgcctgtgatgtgtggggcttctgggtaggtcaaggagcagcttgtttcagaggggccggggcggggtccaggtgggcaagctggggtgagtgcccggaagttgaggctgtggtgctcagctgccagggccggggttggctggaatacagcaggcagctaagattgtgcaaacaggtcattgtgcaaacgcgcccctgtgtgtgacctcgattgtgcaaacaggtgtttactggaggctgctccgcttggacagcccacttacaaaaagcccttgagctgttgacttagaaagaaactggacactccttcttccctgaacccaccctgaactttccgcctcctggcctttgctcaggctgttctctctgcctcgagtgccctccctcacctccacctcaacttgctgaaattctactcattcttcaaggctcagagaaaatgccactaagtctttttttctttttcttttcttttttttttttttgagacagagtttcattcttcttgcccaggctggagtgcagtggcgcgatgttggctcactgc

SEQ ID NO: 33473 - DNA, 951 bp, Homo sapiens
agaaatataccaggagtctcaaacatgggagggatctggtcctttcttcacttctaggaggccttgttgaatttaaacatcacctcagcagccactcccttaaggcttgagggcagcctgcccagcctttctacagaggtagcccagttcccgggtcctccccaggctgagctgcccagtgaagcaactgaaagccaaggtcattcctgggacctttccctctccaacctcatctcccaaccccccaccaccctcaggcagtgaccagtccacaagctttgcagaccccacctacgctggctgggcacaggcagatagatggtgggaggccaggcaggctccaagaaggaaattagccagcccagctgccaagacaggcatacgagaggcagaggggtttgtgtgggctcggcttcagagaactcctggggattagggccaaagtttgcaaaatccagctgtaaacggagcaggggttccccaaagaagccgtgggttctgtagaggagagtcggcttcttgggaagtagcatgagccggaagacagcgagactgtggctctctctgggagggcagggagcagcatgactcatcgcctagtcctgctggctcctactggcacagggctgggcagcagagggtctgggagcaggagcagagtctggtcttgttgcagctccagaggaggtctcaggctggcaaagacaatctaacacgttgggacataggcagggtgttgtggggacacttaggagggtacaaccagcatcaaaggagtcttggctggcctcacagaggaggtgacatcatccaaaagatgaatggaactggctaggaagcagctgggtgggagagagggaagggcactccaagccaaggaagaagcagagcagaggcccgaaagtgtctgcaaggcgctagctggtgcctgccacccagtgagcactctat

SEQ ID NO: 33474 - DNA, 6750 bp, Homo sapiens
ccatctgaaaagtgcctgtctggatgtacctgtctataaccatggacctgcctccaaggtgcgtggaccaacctccgcgtacctgattcactcgatgcgcacctggccgtacgtagcttcatcaggcagggtgtacctgtcaagttcttaggtccgagtgttcgcggctttacctgtcctggtaccgccgtccgcacctcggtcagtgcgtccccggcaggtgcgtgtacctgattcagtccgtgcttatcttgcgcatacgggccgttcagtgtcccgctcggagctcgtcgccgccgcagccttgaggctccgacccccgcttgggccccgtccggcgcgcagcggccgcgggggcggggccgcgacgcgaggagcggagcaggaaggggcgaggcagccccgcccccggggcggtctcccgggacggccccgccccttgcccgcttccgcgtcagtgcctcaccaccacctgcccgcgcgccgccccatataaaggcgccgccgtccttacccccaggactcggccccatggagacgccgccggccgccgctggcgcatggcggggtgaggcgcggcggggagggtgcgggcctcggcggggaagcggcagggagcgctccggcggggtccgagccgagccgaggggaggggacgggaggggacgggaggggtggagaggggaggggacggaagggtcggggtcctgttccccggcccgccgggcctcaggacccctccaactttgcccaagttgggagagccggggaagagcaccaggttcctgatcgggatcgcgggccgagcaagcgcgggtctcgggccgggacagcctcggcgtcaccagctcccggcagccaaccaaagttttccagcaacttttctccccacgggtcaccccagaaacttgccctccccggctccgggagtccggccatgggccttgcgctgcctgggcctgagctctgagtgccggacgggtgggcgaaagtggtggcctcagtggggaagccttgggccccgcaacgcacttccagccccaggattccatctgagagccccgtccctgccttctgggtcccctgggttggcgtgggggttcgaggctttacagctggggtagttccagtcttagttcagactaagttccgatcttcgagccaccagctaacagctggatgaccttgagcacgtttttaatgtctgtgcctcagtttctccctttatagaatgggaatgggaatgcctagctgggagagcttttgagaggacaacctgaactaataacacgatgcagtgtgtagtgccaccaatccctcatcctgctggatgtggttttgggagggaggttaggagagagcgctattcaccgtccctaaccctgttggttgttcagtaggagctgtggcgcggggccttccaggagtctgagctatgagtggcccctgtggagagaagcctgtcctggaagccagccccaccatgagtctgtgggaatttgaggacagccacagccgtcagggcaccccaaggccgggtcaagagctggccgctgaggaggcctcggccctggaactgcagatgaaggtggacttcttccggaagctgggctattcatccacggagatccacagcgtcctgcagaagctgggcgtccaggcagacaccaacacggtgctgggtgagctggtgaaacacgggacagccaccgagcgggagcgccagacctcaccggacccctgccctcagctccctctagtcccgcggggtggtggcacccctaaggctcccaacctggagcctccactcccagaagaggaaaaggagggcagcgacctgagaccagtggtcatcgatgggagcaacgtggccatgaggtaagtgtcacttctgtggccaggacacatgaggttcgcatctctcctgtggccaggacacatggaaggatgactgtctctgcagctctggtgggctggaagaagtgacttccttcttagggactggtctagagggagggaaagccttttatgaggctagggtcgcgctactggtaagtgacagaggcagggttccagcccaggtccctctgtccgcagagcttaccttatgctgtgggtccctccctgaggccagcactgtgtctccactcctctcctgtaatgtgaggcagggctgtaaaggggaccagcccgtgggcagctgctcactcacccctcggaacctgatctcaggtgggtgttgtgaggagggagtgtgcggatcccggagaggagcaagcgttcaggaaccatagtagtggtagtaggcagtggtagtagcagttgttgttgttatttcaggggctgggcttctgaggccttcttgtctcagacctgggctcccacgaaaacaggtccagtgactgtgtccaagagtgacctcaaggctgggtccagctttacatgggttgtgggcaggtggcctgatgctctggcctcaggcgagctgcaacttggatccctactgactcagctgaagcagcctgggctggaccagtctctggaggttccccggggccagagccaggactcagcccccagtgactcccacccccatcccccagcacaggaatggggtggggaggtaggggcagagagggaagccagggctgctgctgaccttgggaaacccagacttctcccgtcaatccaggctccaccctctggccccacttttttcccagttccctccaaggcaggctgatgagtcagtgctgggtggatggctcacagggaaaagttcctgttggcatggacggggagaccccagacacagggttgagaagggatgattttctggctgccctgagggagctcctaggtgggctgcccaaggctggcatgacatcagcctctgccctccctaatttgtggcccctgtgggacaagttcactgtccagctggccctggcccagctcagcaggcatgcagctgagtgctcttccctccttctgtcaccttcaggccagtcttcctctctctgacttgggctgagcctggatgggaggctgagaaaatccagtttccatgccaagaggcagcaggtcacagcccatgcttcgagattagaaggggtccctctcagtgtccagcctcatgtagctgggctaggagctaggttggatctgtgtgactccttcctctggaggtatgggccaggagcggctgagccctgggagcagccatatgcagtatgtgtttgtatccagaaggaggagggacatgggaggaggggctgtgatgaggggtgctcagaggagcctgctcctgagaagcagagccacgcacccacctcgggggtttctgagctggggtagtggcaggaggggaattccagcctcaaacttcctgtctcagctgctactcggttcctgcccggccaccccccctccccaggggcaggcgggctagcccccccatcatatgcaaatcatggggaaattcacctctgtttccttctaagggaatttttttccactcgccaggcccagcccaggcatatcttttcacctggggaggctggcccagccctgccttctgtcctggggcaggagcagcctagctggagtcttctacacacacatcctatcagtgtctgcttagcccggctgggggaccctgaccttacaggcaaagagaactggaatgggggcagggatgtctggttttcctgtgccagcagcgcttcctccagtgcagtgaaagagactaaagctagctgtaggggggcactccaggcctcatgtgctctaccaggaggagggctctgatagcgcccactgatcagtttttccatctgctgagggaatattcaggtgctagggctgctgagaaccgacttgtcccagccaagattttcagtgcccacaggcagtgcactgccctgagagccctggcatcccattagttcccagtgctccaagatactagcctaggatcatgtgcccggagggaggcaggtgggcggatacatgcgcacactgcatacctgagacaaggagccaggcctgggatgacccagctgccatggttttgagaggcaggccagaaggcccaaggaaggggggtgatgtgatgggggaagcactgggcattgtgaagacacagaccagggacctgacctattgtggcaggtcagggaaggcttctcagaggcagtgacatctcacaagggttctgaaggaagagcaggagtttgccagcagcattgtttctcccgttcgccacctgtctctcataacacactttgttcaaactcaattttgggagctttgttctcccaaataaattctggatcttctgttagagacaggaaggcaaccgagtggcccagacctgggttcgagttctgactgtctcttaccactagccaggtgaccttcctttccttcacggtagcaagccctataagaatgaagccatatatctggccaccagcgggagctcagtgcctgcgaatccctgctcattccctgcgatcagggtctgtgcctgccttcgtacctgcctgagcattgacgtacagggtagtgataagcataggccctgggcttgcgtctctcttccaccgttaactgctgtgtgaccctggtgactaagctgccttctctggaccacagttttcatctgaaaaacagggaaggagttgatgatggtatagtgccctcctcacaagcttgctgatgattcagtgttagacacttataacagggcctggttcacagctctcagcaaatgggaacttttattataagcaggctggcagatgtggcagagggaccgggaaggatgagtgctgccctgggctggactttgtctcccctacaatttagagaccttcagaccctggtgccccagtcttgcccccaaatagcctccatggcccccagctgccccacctccctccctagcttctcttagggctccagctatcaccccttacctcccccactcccattaaagacacccacaggatgtggttggccctggacttgcctcttttgcgtaacatttattctgttttatttgccaaatacgagagtctaagctgttcactgagggggcagtgagacgtggggctgctggtcctaggagctcttccatgacacctagtgttacctgggagccccaagccccagtcccccatccctcaggaaatccagttggaacccctactttgcagggccatctttggcctgaagccaccaggaaagctgtcccactgactgacccctcttaaggaagctgcagactgctgggcccattttcagatagaggaacggagagctgcggcagcccaggagccctgccaggcttccttctgggtgcagccacctgtgggtggggcgcggcctcgtctgagaccaaggcagggcccatgccttactcagctgtccttgctaagagtcccctagcatcttcctgatggtctttctgccttggggtgaagaggcatttgggggaattgccatcttgggaggaaaagcagtatcctttcactttcagactgaaaggctcctggggaacttgcttcactccggcgctttctgtcccatgctgaaggctggagtcgccagccccttcccctttgcctttctcaggccccagtccctgaggtgtgtgtgaggactgaactttaatccggaacaatctggtttctcctcggtcagcccagccggtgcttcccccgcccccacccacgctgcaagaggcgagggaggggtggtgactcagtgtgcatgtgtacatctgtccctgtggtcccggcagctcgccgggtggggcaggaaccagaagtctcgcggcacctttcccccacccccaggtgtgttgcaagtggcctggccctcccccaccgtggggagcagtgctgccagcttcctgggcgcttcctcactttcaggagatggagcctcagggaaagtcccagcggggcctggccatcctggagctgtgggaactggcactgggaatggaggccttggccttgggccccacctgcagagggccagggcctgagccctggggaaaggggaaggggctggtgactccaaaggggaagggactgctcactaccaccaccaaagccagggcaggggtggggtgtgaccacctccctcctcctgctcaggcctagggggtggcaggctggccatcagtgtgggctaaccctgtcctctccctcccagccatgggaacaaggaggtcttctcctgccggggcatcctgctggcagtgaactggtttctggagcggggccacacagacatcacagtgtttgtgccatcctggaggaaggagcagcctcggcccgacgtgcccatcacaggtgagtggtgcctctggaggtgggatggtcttactgccccagcagccctggttctccccaagagagaccctctgggagtgacctacaacttctagaactcaagcagggaccagcatttcttttctcagttttttctgtccttagcaacctgctctgaatggtggtcattggaggtcaccttgtccagtcttctgcctcagatctggagcccctccctcatcctactggtgggcaggtcgctctttcaacatccccagtggcagaagcgcagtatcacatagtggttaagcctgtgggctctgagtcgagacagccagagttggaatcctggctctgtcccctcttggcgccctggcctggacagggacccctcttagccctg

SEQ ID NO: 33475 - DNA, 1550 bp, Homo sapiens
tcaagcccccatcactagcgatgcagccctgggcaacccacttccctctcagagcctcagcttcctgcctcttcagaggcagcttccctctgagagggggacagggatggaatgtgactcctgcatgctggaaaagatcaaattctggggagctgccccagttgctctttcctcctcttgttttcctggttccaggagccagaagctgatgaggaaaccagtaagtatgcaaattctggcactattgggaaatgatcctggggagctcacagaggacagcctcccacctgccctcccccacccccccacaggccccccaaccttgcccttgggctctcaccagcaggggccgaaccctgagttttattgcgagttctgtctcgcacacatgggttaacccctcttggagtgaagccagggtgactatggccaatctgtcctcagaaaacctccagcctccctagcagagagcaaacgagcccacaatgggatgaaagatccctgctctggatgtctcagcccagtccccatcccacttctctagagtgggggaaactcaggagtccccaaagacctgggacctaagctaggagcagaactttagaggtccgggggagcagctctccaatccccccatccccgccagtgctgctcacacccccctcgttgtagtctcctgcagggggggacaggtggtgtctgggaaggggccagtactcctcaccgcagctgccacttccctcatcttcccccagcaaagctctcagccctcccttccccatgcctcctggaaaagccagcatttgtcttctgtacacagaagggaaagaccctagccctgagggaggtgctgggcaggcctctaccaagacaagagtgagtgagcagcagagaaagtgggacttggggggcacatatctctaggagctgcagggaaggaagtggtgcaatcagcctcagccctgggcccagctggtccctagaggacgcttccccaaaagaaggcagcccaaggaccctagcacttttgtcccagggcttctcaaacttctggctttttttttttcttggaccatagcagagtgggtggagtagagggtggcaagggcctgttctggggacctcccagttcatgggaagggtgtgggagatttgcctgaaagaggcaggaagtagggccctacaactaaggaaacccaagccatcccaggccatggcatgtaaatccttccagctagttcctgaaggggaagaggccctaggctgtcatcctgaggtgtggccttgttaagctcctctcaaggcagctgctcgtgatcttcaactgctcatccatttaagagatgtcagcaaaacgaggtgggaggaaaggatcaggcgccccaccccacactaagttgggcacattgctgggaggtcaagtcactgggaatggtgcaaaggctctaattctggctgctcgtgggctgcttgtggggccgtgcctgccacctgccggtgcttcctggtactgctacccatggagcaggggcctgcccaccagctctggc

SEQ ID NO: 33476 - DNA, 564 bp, Homo sapiens
tctctacaaaacaatacagaaactagctaggcatggtggcacatgcctgtactcccagctacttaggaggatgaggtgggaggattgcctgagcccaggaggtcaaagctgcaatgacccatgatctcaccactgcactccagcctgggcaatccagcaagaccttgtttcaagaaaaaaaaaaatttcatattcctgaagagggcaaattcaagttatttccttttgcttaagtgccatatttatttccacctttgctcaccactaaacagtgtctggcacacagtaagtactcaaacatttgctgaaataatttattattgactcatctcactatatggggtatggcacactggaggataaacatgtactatactgggtacaaacttaacaatgtacatagacaccatgctctgtccccaccccaatctgccagccctactgagatatcagtcagcagtagtaagggacttggagcagacacaattcctgactaaagatggcaggagtccaagagccttaactgaccgctcgtgtgccattcaggcacactgaattttgctt

SEQ ID NO: 33477 - DNA, 2009 bp, Homo sapiens
caggctaacgcagaacttgggcgatgtccactcccacgcacaaaaggtatcgctaccaggagagggaaaggtgagcagcctttcagcgtcaactcgctcccctccccgcaggctcaagagaggccgccgacaccgggctgccagttgctatggaaacctagaagggcagcttcaggtgagaggggcctcccgggtgcccaagccgagacgcgggggcaggaagagcttagccaccagagtgcattgggccttgggtgcctgtcacaattctgaattctccggaatgtgttcttctccctcgcctgtcaccttctagatgttcccaaacacatcacaaccctgtctatcaaaaacctccattcaacggatctactcccagtaccaaaaagaacacgctccccaccagcctccaaagtccagacggggtgactgggtccccctcccacactagcctccttccccaccccctccccgcaaagatcacggactagcccgcctcgcccacccccgcggctcactgacgctcgcccttcctagcgccctctccccgggccccggcaccgtcctccctccacgccccctcctgcggctgccgcttcccctccccctcccgcgctcccggctctctcccggctccggattcgcacagccgggaagctgaaccgccggcgggccgcagaatgcgcacccggcctcaggccgccgagcacccggcccgccgcgccgcgcccccggagtaacaaacggcctagcgcggccgggcttggggcctggaggcggggcgggcgcggagccccatgccgtgcaacccctgtcctagcccctcaccgccagctcctgcttccgcttcacgagctccgccagctcccgccgggtgtccgggatctgcggcggcgccgccttgttgtgcatcgccatgttgggctgaggcgggcggcggcggcgcgaggttgggggcggtccctgcgccgccagggggcgcccccccgctctgcgcctgcgcgcgcggcttccggagacgcgtgcagcgccgtgccgagcttcgctaaggccggggctctcgaaggtccttctcggagagctctagagatgcggcttctgctttctgccgtttcctgcccctcggctggccgccggctttacagacgccacaaatccaccgcgtccaaagcctagctcgtcctcaggcctccgagtctcctgtgcgccccgcttcagtccacttcagtgaatgactttcactatccaccgaattgcctgcgtcagaaacgcggttttcctcactctgcacctggagtaaaacgcgatcccaggtcaagctctatggactcgactccggaagagctcgcgaatccatttgcttgtgcctgcgccttctgccacctcactagttcattcaggccctccctgtttggggctacattattccagcggcttatttccacctttagccccacttaatccactatccacagtggtgccaggatcttccagaaacaaatgttatcactccccggtttaaagtctttcagtggcttcccattttcccagtgccctttggagaaacaagtatgtgtagtggttaagggcacaaaactggagcgagaactaccttgttcaaaatcctatcgctacatcgataaagtgtgctcctttgggcaaataaccaaatctcaactccctcatctgtaaaatacaagcagtaatagaatctacctaatacatttgctgtgaggagtaaatcacctaatatgtgtaaggggtttggcaggcgccaatgactgtgcaagtacgagttcgcttttatcgttaagtccaaggtgtaaacgttgttttcacttggcccctgtggatttctccgtcctcagctctccatctttcactgttctgcagtttcgctatcataagtctaagtgggatattttttcttccttttgttttgtttcttgcttggaagtctttggatttctataatatgtgggttggtatcttccaccagttttgggaaa

SEQ ID NO: 33478 - DNA, 5572 bp, Homo sapiens
tgcagtgaactataatagtgccactgtactctagcatgggcaacacagtgagacccaatctctaaaaaaaattgtttaaggtttggcacagtggttcatgcctataatcccagcactttgggaggctgaggcaggaggatcacttgagcttagaagttcaagaccagcctgggcaacatagtgagagaccttgtctctacagaaaaaaaaaaaaaaaaaaagccaggctgacagttgcagctgaggtgggaggattgtttgagcccaagaggtcaaggctgcaatgagctgagatcacaccactgcactccagcctgggtgacagagcaagaccatgtctaaaaacaaaaaaaaaaaaaggaggggtgtgtgacccacttgtaatcccagcactttgggaggctgaggcaggagatcacttaagcctaggagttcaagaccagccctgtcaacacagggagaccccgtctctacaaaaacttacaaaattagccaggcgtagtggtgtgtgcctgttgtcccagctacttgggaggctgaggtgcacagatgacaagctcaggagatcgaggctgcagtgagtggtgctgtgccactgcactccagcctgggtgacaaagagagaccctgtctcaaaaacataataaattggctgggtgtggtggctcacacttgtaatcccagcactttgggaggccgaggcaggcggatcacgaggtcaggagttcgagaccagcctagccaacatggtgaaaccctgtctgtactaaaaatacaaaaaattagctgggcgtggtggtgtgcacctgtaatcccagccactcaggaggctgaggcacgagaatcacttgaacccaggaggcagaggttgcagtgagtggggattgcaccactgcactccagcctgggtgacaaagcaaaaaaaaaaaaaaaaagaatgtggcatctagaatcagagtgactgggtctaaattccagtcctacctaccactgtgaccataatgtccctgtgcctcagttttctcatctgcaaaatggaacaaccgttgaagcctgtcttgttgggttgtgaggattcaatgagttcatgaatgaagtaggacaagtaaaatgcttaggactgtgcctggtacatagaaagtgctcaatattggccagttttattattgaagtctcagtttacatgttctttggcatcccgttactgaatatttttctatttttatgaaccaagatgatgatttccaagtagctctagctgtgacttggtgaggtgaggatttccctaagccaccctctactgcagaaagtcccacctcctgtgatttccttgaaccccctagttatgaattgggcagcctaatgaatcagttgtcttttccttccttaactctctgctaagctctgcaggcaggaacaatccagcaggaagatcactgagccaggactgaggtgatttctcatcccaggtttaccactgacgtgtcatgggtcttgaggtaaacaacttaatttatagggtcttatccacagtccactgcagtcctgctagtccctggactgctcagtctggcatgatgtcctcctttactactgactccaaatcaaactattttctaaggtatacctcaactgtcatctcttccacaaggtgcggcccatctccaaattatttgtttttctttttttttaaaagatgaggtgtcactatatcacccaggctggtcttgaactcctgggctcaagtgatcctcctgcctcagcctcccaagtagctgggactacaggcacataccaccacacctggctattgctccctttctaacttagctgtaaaccaactgcataaacttatgcaactattgctgactggattaattcactttagagtaaatgtgaacaactgtttttagaattgtttcccatttgataaatacactggaaattttacccaagagaccaaatgaagctttacattccaaaactttaatgtcaattaagcagccttttcacttgatataaactcacatacccaggaacactgtgggctcagaacattatttcacaagcaggtattgctggcacgttgtttgtgtcacgtttagattccgattaaatgacatcattttgttcctcagatcctgacatacacaatgaaagtatttgaaagttacataaccagttgcacttaatgagtcatcctttgtcaatattagaatgagggaaccaggatatgactaggaagagactcaaggggtaaaatctgaagattctgtcccatacctctgcagaatcatggacccccacagaggacttaggggaggggctcagaagcaaagggctgttttgaaaatagtttgattttgacacaatgatttgcagacaagcccagccaccgtggagaaaagatagagaatgaagaagttccaaatggctaagatgaacatgaacttctaaacagaatgaaagctctaggattatgtccactttaagaagtctgctggtgatatctggctttagaggcaggtaatgtcttttgacaccctttcttcaaagaaaggggtaagggaaaacaagaccaaaaaaaaaaaaaaacaccttctcaggccaggcctggtggctaacacctgtaatcccagcactttgggaggctgagaggggcggatcacaaggtcaggagttcgagaccagcctggccaatatggtgaaaccccatctctactaaaaaaaaataaaaaataaaaattatatatataaattagccaggcttggtgacaggtgcctgtagtcccagctacttgggaggctgaggcaggagaatcgcttgaaactgggaggcggaggttgcagtgagccaagatggtgccactgcactccagcctgggcgacagagtgagacgccatctcaaaacaaacaaaccaacaaaaaaacccaccttctcagatatgtggcataaagaatttcttaatccaggacgttattcctctactaaaataaaaactgactaaacaattaggacttcttactgaaaaatgtaggcaaagtggtcatctatcacagtgcccaccaggatgaagtttgtagcaaaactcaaggctaccacaaagtagtgctactgcagcacagactgaacaaggagatcctagagtaagataccagattagtgcttaaaccctcaagagaaaaccgtcagtctggatcaagagaaaagttcatccaaacaaacctacttttcagacaagcacatatatatgatctatggcacataccaaaatgaagaaaatagcagttacagtggccaatgtagaacacattcttcaacttaccttttttttttttttctgagacagagtctcgctgtcacccaggctggagtgcagtggcacaatctcagctcgctgcaacctccacctcccgggttcaagcgattctcctgcctcagcctcccgagtagctgggattaaaacaggcatgtgccaccacgcccagctaatttttgtatttttagtagagatggggtttcaccatgttggccaggttggtcttgaactcctgacctcagatgatctgcccacctcagcctccgaaagtgttgggattacaggcatgagccactgtgcccatgcccggcccaacttacgtttcatctaatgaccttattaagtgttcacttttcaaaggatcttttaacttcttctgaatgaacattagtcagctgcccctcccactagccaatctttagccctgagcacacatgggtataaaaacaatggaaaacaatcaaatttaatagtatcctaagtctcaacccaagaggaacaattagtagtaacactgattgagctgcttcaccacctttccccacaacccacctccatgtcaccatctgctattccactgacttggaggccaacgatataacctgccccacaacactctaaaacagctacctacttttatctcaaaagtactgacagaaggctccattagcagcaaacagacctatgaacacaaggtcctctacgctaggaaagcattactctttgaaatggggctatatttacaaattttatttttttatcccaaaaatacatataaatgaaaacctgctcttcaaatgcagggaggcctttgcctaacattgtcatatgaaaatcagtatcagctctttaacacacaatttacatatatacatacatacacactatatgtaagcagcaaatactttgctacttacacatattcctctggtggaaaactaggacactgggaaattcccctgctttccaaccttgggaaggtaaatacaacctctctcaacaactttttaaaggatgaaatgtgtagaaacatgtaaacaacacaacctgctttagatctatacatgttattagaataaagaaagaacgctgtcacatcagtgacagtttatttctcaaagaaaaaaagagataacatttgaataaaaatgcaaaactgaagtacagttaatatgatcaaaattgttgtgtacatgctccatggagaaatcaggaattctttcacaaagaacagatccacagccaatttcagtcacttgtgatgctgaatcagcacccactggtagcaaccaggatccttctgtacagtcacgggcttgagcaggtgccataaagcatctgtttaagttaaacagtcaataatgtttactgactgcagtacattcccaccccccaaaaaaataagtgcaaaatcaacttctaagctcaagagctcaaacaagtcaaagctttggtatatactggaggttgttttggtgataaccaaagcctagtaagattctctgctcaggggttcgccccaaaagaaaaacacctggtccacaaagcttaacacctatataaataaagtaactgtacaaagagaacaagccatgatttccccttaaccaagggtttatagtttcctaggcagcagttctgaaagcaccaactaaaaccacaacacttctactaaaacacggtgtgttgtaattggtgagactgttctgaaaacaaatgcctgcaggcatgtggccaaggtgccacagaaaaagtttaacaaacattagtcagtgtattcaaatggtaacacaatctggtcagcaacagaggaaagacttaaggcagtaagaggcattacagagagcaccatagtgctggacccaccaccatagtgctctctgagtcaatcaaagacttccaagaaggaaaccgtgtatcaatagtttgggttcttagtttgctagctgtcagacacttcttcctcctcctcctcatcctcgtcatctttcctgtctatttcagaagtgtccgacgactcatggagcaagacgtattctctgctactgaatccaaatttgagtacatccttttcttttagttcatagtatctctgtggctcaatacgtttgttgtttaagaaggttccattgcctgagccaaggtcaatgatgtagggcttcactcttcggccaactgtgccatcagcacgggtatattccacaagcctagcagaaaaaaaggagaaacctgtgagcaaacttctgcctca

SEQ ID NO: 33479 - DNA, 1144 bp, Homo sapiens
gagcatagccaatttggcatcggtgaagatcatctaactgaatcacccttgcagccccaatacctagggcagtctttaacacttaataggcactcagtaaaactatggtgaatgaatgcataaataaatgagtctagcaagaagtaactttttttttttccccagtttctgttaggtagctcgcttagacctcgatgtgaaaacctttctggcaggtaaccggaaagacaacgcccacactccatttgtgggagggatggggaaaatctcaatccaatttaacagattatcagtgctatctgttgggccacactcttcgaagtgctaggaacacaagaatgaaggagtgggatcctgccggttagtcattaggcgttgaacaccgagctataatgcaagtgacagagcaagcataacacaagcacgactggatcactctcaacagcccctcaggattaagtccgggctgctgcgcccaccattcaaaacctgtttcggacgctagccctgcccgcctttctgaatgagcccaacccaatgtccatcctggactgctcccccacttaccggctaactcctcgggctcggttcccgcggtggcccgagcgggccggctcgctggtcggcggagacgggctaccaccggagtggtccggacggcggtgggcgggaggtgcgacttctgggctgagacgctcctgcttcaccaccacccccgccggcagcaccacgtccccgtcccggtgtcttcgccggctccctcgctcccgttcgctcttcaccgccttcattctgtgattttggctgggcgaaagaaaacagatcagttgagctcctctagctggaggaaatgacgagtttaactcctggacttccgcttccggggtgcccaggctcccagaaatcctcgcggcaaaggttaaacacgtgactactccctagtgggtgtggccgcagcgacaggcttgggtggcgggagtttcaagtttcaaaaacaaacttctggctgggagtggtggctcacgcctgtaatcccagaactttgggaggccgaggctgacggatcactgaggtcaggagttagagaacagcctggccaacatggcaaaaccccgtctctactaaaaatacaaaaattagccgg

SEQ ID NO: 33480 - DNA, 1138 bp, Homo sapiens
ggccttttggggtctaacattctgagattccagtttgtgcaaagtgaataatttattatcaatccggaataaacattcaacttgcattaaaattgtcaaaaattctaaaccatattttaaaacaaagttttattaattaaacctgaatggaaggaactctcccataggatgtcttgttaatcgtacaggtggaacctcgccaaaacttacacacatctcctaaacagccttactgcaatgatcatactgacttctttgtagggttctctaagcactttaccagatagaataattccaagggccaaaactataagccctttctcattttaaaggtcaaagctaaggtggcaggcaagtatgatcacgtgtaaaaggcccgaagggtcaacctacaccatttttaatctgactttctctgcatctctcaactggagaggacccaaggctgtcagcctgagtgttcactttccttgacttcagaccagttgactacactttggcctgccaggcgtgcactgagccctcctcagttcccccctgagaagaaaccaccacaaatattgctttcctttttcccttttcatccccaacagccaccccgctcgtagtcattctaagcaatgccactcgagtaaccctccttcccctccagtgctcctcggagcccttccctatacttcctccaagctccaccctcgatcagccctgccgcctgtacctgggtttgtgctggccttggacgggttgatggtgctccgtcctttgtacttgggcttcaccatcttggcgacgagaccgggaccggagtgcgaggtccggcttacgtggtgaaacaaacttttatgttcccaagcccggccgaagacacccgcctgaaccacgccggaccacgtgtgcacgacgtacgtcacttccgctcgcgtccctctcggcctcagagcgacttcctgtgaacgcgcggcgcgcgccgtcaccctcctggctccgcccccgctccagccgcctaggcgtcgccctgcgtggagccccagcccgctccagccctagcaaccgccaagctgcccgttcatagcaaccgcctagttaacctgaacgcgcggccagagctcccagttgggtccacctccgaataaagaag

SEQ ID NO: 33481 - DNA, 1287 bp, Homo sapiens
cgctttcaaggagaaaaacaccttctggactgacactagctacatataaaacacctcgttttaaaatccttccaccaagaaacagcactagggagctgcttacagcctttcccctagcttgtccaggacgatgtcaccagccaccagctgcttacgcctcagccgctcttttaaatctgggaaggcccgaagcgccggcacatcctcaaaccgcaggttctgtgcggcctgcagctgttccgccaggttgctgagggaggacaggaggggctggcagtcccgcagggcactctgccacaggccctgctgctcctccaccacggggaagcacttcttcagcgcctcctgcacggcaagcagaggccggtcttgagtcatcttctgctgaaaaagataaaaacagaaaataaccacgttggggtgccaagtcagtcggggaggcactgggtcgagggtgggcgtcatctctgttatcgtgttcagacaggagttgtctcacctccagaagcagggttttttttttgtttttttttcgagacggagtctcactgtcgcccaggctggagtgcagtggcgctatctcggctcactgcaacctccgcatcccgggttcaagcaattctcctgcctcagcctcccgagtagctgggaatacaggtgcccgccaacacgcctggctaatttttgtatttttagtagacggggttcctgacctcaggtgatccgcccgcctcggtcttccaaagtgctgggattacaggcgtgagccaccgcgcccggcctgcctcagctttctgaaggagaccctggtttcccctcgggaagggtaacctggatagggcagtctcctgcttcagaggattcctggcgtccaagcgccgtctcttctctgacatacagtcctgtctcccctgcccgaggctgccggtcgccttcctgaaaaagcggaaaaacttaaaagtccagacagccaaagcgtgagaaccctccagggactgcaccacgcgcccacagtctctctgcgcatgctcacacgcgacctccccacaaagctactccgcgggcctgcctggctactgagtcgcgaaaatatatcgtagtgccgcaatgacttctgggtactgtagtccaacatgtggactggccactcggcttgaagcttccttgggattggatgttgggaccgtccaaacacggcgacttctcatttgtcagcctgcggcagtttaaattgggtggcggtggtggcatgtcctgttagctgtggagtcttttcctcttatcttg

SEQ ID NO: 33482 - DNA, 1096 bp, Homo sapiens
ccaagatgcacagttagcacctccgacaggaccgcggctcggcggggctcgccgtctacacgcccattcccaggcccacggccacgacacccagagctgcctcctgccctgggctccctggagcctggtggccgcggctcatgctgcagtcaccgtgtggccagctgccaagcgccactacttgcacctgaagtcgcagccccgcgctgcgcacccagtcgaggcgccaacacgcgaactgggcgggagtggccggcccgcgggggagcgaggaacgacagggttccccccactcgctgcccagactggccgcgggatagcgcgccccccccaaagcctgcacccctgccctgctcctctatcattccgtcccccttgctctgtcaaaccctgccggggctgctctgtctctgccgacccgccacttgcccgaagttcggcctgaggagcttggggccctgaggagcgccgacgtaggcagccagccagtcaatcagtcagagggtcacggcggcccctcggctactcagtggcagccaggccagaaagaagcagccgccaaccctggagcagaatcctacagccgacctgacctagtaggcccccagccctccagagcttggggtattgcagagccgccacaaggcctgccgggagtagtagtttgtatagttcgcagccggccagggcggagccgggtgggttggtggggagggcggggaaacaagcctggaccacaactcccaggagtacccgcgacggcggcggcctcgctgtcgcactcaggctatagggggcgcattgggcggaagaccctgggccggcaggaacttgcttgtgattggatgttgtgggacggcggcttctcattcgtcagcctgtgactgtggagtttgaattgggtggcggttgactgtagagccgctctctctcactggcacagcgaggttttgctcagcccttgtctcgggaccgcaggtacgtgcctggcgacttcttcgggtggtccccgtccgccctcctcgtccctacccagtttcttgcttccctgccccatctccgccgctccccgcagcctccgccgagcgccatggct

SEQ ID NO: 33483 - DNA, 842 bp, Homo sapiens
agaagggtggcactgagacccgtagggagggggccagtgaagtgagtaaaggtggatcgacgaagaaggaaatccttggggagagaaccaccgacgcgcgcttctttcccccccccgccccgcctccgcccccgcccccgccgcgccgcctctctcccgcgctccggaaggcctgcgtccccgctccccagccaggcgccaccacctgccgcccaggcagccaggcgactcttctttcgcgggtcacgcggcctgactcaggcccctgctcctgtggccccgaaactcgccgttcgctgggccttgcgttgcactcggcgtgcagttccccctcggctcgcggccacttggtccgcgccgcctgcgtcctgtgtgccgagcccgcccgcactgcggggacaggccgggcgccgcccacgccgcgctctgccgggcgcacagtctgcctgggaagcgcgcggccgggcgggcggccatggcgcggcacgctgggaggtagcgcggcggctgcaggagcgcacagtcggccatggcccggcggcggcgccgcgcctgcatcgctctgttcctggtgctgctcttcgccttcggcaccctcatgggtctgcgcacgctcaaggctccggacggactcccggcgctgggcccgggcctggagctggcgccctttgagcgacgcccagagggggcccccgcgcccgctgccagggccccggcagcccctgccgcgccgcccccgccgccgccgccgccccgcaccgcggaccctggcggctcccctgggccggcacccgcggaggccgagcccgcccccgtgcagagcctgcgcgtctactcggacc

SEQ ID NO: 33484 - DNA, 2415 bp, Homo sapiens
aggggaaagggatcatgagaaaggttggaagggataagagggtaagtcttatctggatcctagtgaaagccaagtggcctggagtctggggacacaagagaaaacttgactcacaggcgtaaaagggtttaggtccttgttgagctcctccgagcgttccatcaccagggtcactggtcctggcagtaggtctttcaggagcccctcaggtactctcacacggcagtatctgggaaacacagaagaataaatccattcaaaattgaagggccactggtggtcctttcctagactctaggcagacgtagaaaaggaatccttcgagtttacaatgggagccgcctgtctccctgcttcacctccctaagagcttgagcagaaagcagggctccagaggcgcacccctggcttgacgcccatgtgcctctggtctcagggactacaacagctgcaccgctgtgatatcatgatagtgggatcaagctccacgttttattttcttcaaggcattcgctattaaattaagctactgtgtttgtttgcttttttcccgggggcctccccaattagcacaaatacgccaagggaacagggtccctgcctttctcgtgtgttgctgcttcccagcagcatgtagttcagggcccggggcacgttaagtcctcggtacatatttccagttccggattccttggtgagcctggacaagcccctcccgctctctgcgcctcagtctcccaagcctgtcaccggaaacccctcccgcggtgccgcccctagcggggccgggtcggggcggccttacctgtagacgtcggccacgcggccgaggcatacggccagaggcttggcctcgctgcgacccttgaggcggtacacagcgcgcagagccgccgagcagctcgccgcgcaggccaggccgtacagcgtatcggtggggacggccaccacggcgccggcgcgcagctcggccacggcggcccgcagcgcctcggtccagccggcgcgctccgggctcgcggcctgcacggccccgctccccgggagccgcaacagccgggcgccgggggccgccggagcgggactcggcgggcggaagaggcgaccgctccgggagccagcaggcccctcgctcaaccccacgctggcagccaccgcggccctcatccccctgcaccgacgcgccggagacatccgcccaggcccgcttccgggaggaagtgacgctcccagccagcttccggtccaggagactcggccccgcctctgcgccgggcagcttaaagggaccacgacccccaggaggattgaaggagaccggtggggacggggcggggcgcagccttgcgaagccctaacgcagcgctggggaggggggcggccgaaaggggggcggtggtcgggccgcgcaagcggagatggaatggggcccgggctcagactggtcacgggggtgagagggggcccgtcggggcgggaggaaggggcttggccccgcgcaagcgccggccctgaccgtctgtctctcgctctctcccgggcagggaggctgccggcgtggaccgcgggaaggcggggctggggctcggcgggaggccacccccacagccgccccgggaggagcgcgcccagcagctgctggacgcggtggagcagcggcagcggcagctcctggacaccatcgcagcctgcgaggagatgttacggcagctgggccgccggcgcccggagccggctggtggcggggttagtgcccaccctgggctgggctggggtggggtggggtctgcccactggctaggctggccaagccctagcttaccctggaggggggaagtatgtctccgccgctttatccctaacctcctttgatctggtgagaggtttcgaaaaagttaatactatccaaatgccaaatggccacatccttgtggggcctaatccaaggccttgcctcccagcctcacttttttcctttctgttccaactagaacgtctcagccaaacctggagcgcccccccagccggctgtctccgccagaggcggctttccaaaggatgctggcgatggagctgcggagccctgaccatccccgagcagaataccctgacttctctccctccccagggccggtggctggactctgaacaactcccttcagtaaaggggccagtcttcactggcagtggctggtacttggctctcagcctggagtggcagctctgctagcagctgggttcactcccacttcatcctggctgaaagcagtgctgtgctttgaaatgcagccaatgaatacccagtctgattacccagatttgggcagaccagcagtgctcgccagagtggtctggcctgctatgggggatccaggtggtgttacatgtccatttcatgttttgggggcttttagc

SEQ ID NO: 33485 - DNA, 2183 bp, Homo sapiens
aatatggtgtcaacaagaagttatggttctgtggtgggctctcgtccctgaatcaattgagtcttattatttttgtttctacagctcctagcatagtacactgatactatgataagagttcaggaaatgtcagctaaatgactgaaagacatggctacctactctctcgtgaagatatactatcttgggaagatacattctcttgagaaaaataccacatttgaagctttcatgttctggaatagtgattcttccttcatctgcaaacacaggctctacaaatgtgggtttggcaggcagaatagagaattttaaaataatcagcacatcccttttagttttcagtctggctttgcgctttatctttctcttctgctctgggttagaaagtgagcctttacttagtgggatggctagacagttaccagagacaggccaaaggattggatccgggaggtaccggcccgacccctagctctggcttacgcaaccccacagatgtacatttcgctgcatctgagcagagagagaagagcaccgagggccccagtgggctgccccggcaccctcggcggcaacgcggagaccaactgtccgaaacaaacaagaccaggaggtttgagggtagccaacgaggagtgcgaacagagcccccttgagaggaggctgggaaaaggaacctgtctgggatagcccccagcacagggctacacagaaaaatccgaagacaagctgggggtctccaagcaaggaggagaggggcagggtccgggtctccatggaaacagggaaggggggctggatacccatccccatggaaacggagaaggggtggggtccctatggtgaccaaactgaggtctctattgggaaatgcttcaggagggagcctaagtcccgcgcctcccggtaagtcccaagcccaggccgagtctagtttcgccttttacctccgcggctcccggcaacggcggcagcagcagcttctcccctccccagcggcaccatgattgcccccaccttcccctaacgtcacttccgcttcctctttccggaggaaggtggggacagaggatccgcccctccctggcgcctctggttggctcaggttgtcagggggctgagctgcagcctccaattggcgagcggggcaccgaggggaaggcgcccaggaggtgggttcatccgcgtggggaagcgcccggggtggccacgcggggcccggagggtgtcgccctcgcggcaccggagtcaaggagaagggaacgaatccccaaggaagaatccgaaatgtcctcagccaggtttgcgctgaccgccctcgccctggcagccacagccgcagcgggaaggaccacagttggcagtcagaaccctggctccaacccgccaggggagcctggacggccgcgacgttcccgggtttctcctgccgggaccccggccttcccttcagcacccatcaaagttaacacaggcaggaggcccagaaaggaagacaagaccccaaaggcagaactaagagtattctaagcccagctggagaggacgccgccgcctcttccccttctcacgcgcttgcctaggacccccagctcccttctcacgcgcttgcccaggctggcggtcccaactttcttcccctgcaagaggacgcggctacggcgggactcatgcccgggccagttagcgccacctaccggccactcccttcctttcaccgttcacattgtcctgctggcccgcgtcttaaacccatttcacagtgcccagaagtagtgggcattcgtacccaggaagcgattctgccttcgttatgcccctgtcctttccaaatgcctggaggatctagctgttagatcctcccagctgccactgcctgttttaaccataagctgcttctctcgaatattcagagtgggacaactccaaagaccagaccaggggtcaaggggttcaggtcagtgccataaccatttcttgctggaagtatgtgaatagtgactggtacccaccagactgccaggaatatgtctctttggccccaaggcttgagccacaaaatccagctgcagcgaactgccatctcttaagacataaaaacatacacaaccgccactgttaaaaatacatttatcattaaaatatattacacatggagacaggatgcatcatatacagtt

SEQ ID NO: 33486 - DNA, 1353 bp, Homo sapiens
ctcaaaataaaaaaaaataaaaaataaaaaaatctgtgttaaataactaaagttgaaaattgaatgtcagttttattatggtggattttctcccgtgtcttcacgactcacagcgctgagtgtgctaaccaatggtgggcttaattggggtactaggctcaggaaatagctgccattcttgctaccaagtggcctcacataattatcttaaggcatctcttgagctgaaacaggtggggctggtaattggcagcctcaagtaaaataggaggagagagaggctcagagtgggttgcagaggaactggtgaataaattcttgagccttcttcttctctgtcatatcaagcttttggtgaccagctgggtttcgaagcaataagctgccaaatatgctagctgcaagaaaaaacacagaaaagaaatgattcagcaaaagaaggtactaaagacacacatcacttaacgacagggatatgttctgagaaatgtgtcattaggtgatttcatcattgtgcaaacatcatagcgtgtacttaaactttcacaaacctgtacttacacaattctagatggtatagtctattgctcctaagctcctgtacagcatgttactatactgaatactacaggcaattgtaacacagtgctaagtatttgtgcatccaaatatatctaaacataggaaaggcacatcaaaaatacggtattatgagctgggtgtggtggctcacacctataatcccagcactttgggaagccaaagcgggcagatcactagaggccaggagttcaagaccagctaggccaacatggtaaaaccccatctctactaaaaataacaaaaattagcctgtccctgccagtgggctttccaaggggaatggtgctgtgtcagaggtggctgaggttggggggttgtgggggaggcagccctgcttggtgtcctgcctctctggttcctgcctcctcccccaaccaccccgtgtccccagtgggggctcgtccccaggatgcgatgaggttccatgagcgtggtagggatggttgaggcacgggcgttggagggtgtggcccggtggcccctgtccaagggttggctgtgagggcctgggtgaccatctggctcccactggctcccagccctctcccatcctgcagtggggagggtcactgccctttaaaaaaaaaaaaaaaaaaaaggcagggtgcggtggctcaggcctgtaatcccagcactttgggaggccgaggcgggtggaatcacgaggtcaagagattgagaccatcctggccaacatggtaaaaccctgtctctaataaaaatacaaaaattagctgggcatggtggtgc

SEQ ID NO: 33487 - DNA, 1063 bp, Homo sapiens
ttcccttatcccctagtttgaatccaagggcagtccccttcctggcacagcaagcaaaataaagtgaagcccctggaggctcaggctccacagcaagaccacagagaagaccagccctctcccattgccacaaagacaagagatagcttgaaagaagacagctaaaagtggtgggtaaacatttaagccccagcacctgttggcttgaatttgcatgttctatgactaatcctctgctctgtacacaaactctcctttacctgccgggctaatgtcccattctaaacaaattttgtcctaaaggccactaacgtttcactgctagcccaaagctagaccattttctcagcggcagtgagtgacagcagggttcaagggcaggagagccaatatgacagatggttctagctgtgagttctagctgtgggtggcagagagagggaagttgggccgcttgaagctgcttagtctgccaacttgtaagagattctgcatcacagtcacaacctatcctgtgcaaccctgcccagagccaggagagcaaaggggccctgctgtagttaacactcaactccagaaactgtaaacacaaaagcaaacaccatggttggctggcagcctgggggcactatggctttacaccagcagcttcgaaaggacacagaaaccatggggtaagagtccaaagggtggagagtcaactggggtgggtaggtgaatacccagcaacccacccacccccagggagcctggggtcttacctacctggacaggccctggcaacttcgtggaggaacatcctggtttgtgaaccaaagggcagttggaatacgaggctaagctctgctgtgtccagctggacggtcacatctgagcctgcacaaaggaggcaggaaatgaacccttggctgccaggagctaagtgcttgatgcagcctaagcctgagaatggagaatcagcaacccagactcccaaagccccttcagcccttaagcaacttacttgggacagctgctgggacaacaaggaaaccctctgtaccctgagttccaaattaacatc

SEQ ID NO: 33488 - DNA, 2497 bp, Homo sapiens
cttggacctgggacgcagaggttgcagtgagccaagatcaccccactgcactccagcctgggcaaagaccaagactccttctcaaaacaaacaaacaatagatcatgtggcttgttagtaacaaagcctgggtttgaacccaggcatttggaccacgaggctcaagatctggactagtatgttaaactgtctcttctcaagaaacttcctccttagatcttgaggattatgagttagtacgtgtgcagggtttaaaatatagtgttcaaaaaatattaactatcattgtgataattattctaggagactcagaccctgccctggagggacagttgaagttcagctggagggtgcagtgatgaacaaccccatggcccagacaggtggggaccaagcccctcactcacgcgtgttcctggccgccgtgctccaggcggtagcgcacgagtcccaggaggcggctctgccggctgtccccctcacacagcacaccttgcaccgcctgcggctcagagtcaagggaagacaacccagaggcgaggcctctccccacccaggctgtcccaccttccctctgttcccctgcccccccagattcactgtgtggccttgggtgagcactcaaaccatgtgctgaactaacagacaaacaggctctctaagccttccttatctatgaaatgaggataataatccccaacttcatagggagttaggaggataactgcgtatttaaagcatttggctgagagtccaggactcagtaagtacttagtaaatactgatttccttctcccctgatggttcagaggggcaggagaggggatagacacctcgacaccttccattcctcttcccaaggccagggcaggctcagggccgcagttagcacaggaaggatatgatgacgcagtattccccctcagccagcgtctcctggattgccacagactggtccatgctggcccctgctgagcgcacacaccctgtgggaggggagataggagccccgctttggtcaacaagttacgcatggggtggtggagctgcctcagaggggttgggggcaggagggaggggcctttgcagagggagatggtaccggggaggcctgatcctcctcctcctcctctttgtcctccctagaataggcctttcagtttttagggataggggtccagtccctttgccccgctgggatctacagtttgctatactgcctttgtctgggagggcatccagttgctcttgagtgtggtctatccttgttggaagtggggtacgtggattggagaaggggacctagtccctttgctcctaggacatggctcttcctctcttttggggacagtttttgttctgctagcgcctctctgggaggtgtcagtggtgtgtccatgtggggttcagggaacatccccttactgtcattcaggagggtcccattcctctttccttggagacaggaagtgtcccattgctgcttgcccttcacccccgccccagcaggcccattgcatcagctgcaggccgggggttggggggtgtcccagccctcagcttgcccactccctcctgcccagccctgccctggctttcctgctctgctcccacccacagctccctgacattgtcacctacctcctgagctgtcaccacagggcgcacgggactccgctgccccaggttccgggacagtgactacatttcccaacagcccctgcgccacatggtggtcagtcagcctgcaagtcccagcatgcccgagtcaatcgtggggtggggagtctctccatccgtgttaaccccttaggccctggggtacactgggcttcctataccagaaaggttttctaatgattgccctcactcccatccccagccctctaggtcatggggccagagcttcccacccagaaggaagatggtcacattttatcttaggggaagaatataatgcatttttattttctccttagttccatcctcagctcttctcactccagggtagacaacccggacctctactgaaactcttcccctaaaataactaccttctcctggtttaatggagggagaaccagactatgaagaaccattatgtccattttccaggtggagaaactgagccttggataggttaagcagtttgacattaagtcctgcagctagcaggtggcaacactgggactccactgaaagtctgactgcaactcctgggccatttataccgctacacactgccctatttcctcccttagccccacccagccctcctgccacacagggctgtttgaggctactgggtgtgaacgcactttataaagggtatgacactgttcctgtccggcaacgtccttcccctgatccgcctggctttgtgaccttggccaagacctttcttcccttgggactcaatttccccatctaagataaggaggttacccaagatggacaaaaagagccagcacagggactgggcacagtggctcatgtc

SEQ ID NO: 33489 - DNA, 1686 bp, Homo sapiens
gtaagccggccgcggtggctcaagcctgtaatctcagcactttgggaggccgaggtaggtggatcacgaggtcaggagttcgagaccagcctgaccaacatgtttagtagaaactccgtctctactaaaaatacaaaaattagctgagcgtggtggcgagcgcctgtagtcccaactactccggaggctgaggcaggagaatcgcttgaacccaggaggcggaggttgcagtgagccgagaccgcgccactgcactccagcctaggcaacagagcgagactccgtccaaaagaagaagaagaagaaaaaaaaaaagggcacctttctgattaatgaagaatgcccaagagttccccattcagagaactgaggaagcaccctcacgttcggcagcctgtggacatctgtccaggcagagagcccgcgactggccaatccggttacctttggccagggactcatgctgagacaccgcacttcacttcccctctcttttcccgccctcgccaacccaaagagaggcagacagctgggcactcacatcttgcatggcccgagtgcggtgatcagaattgatctggtcccggagctgaaaaaacaaacggtgacacaaacgccgttagtttgcgttctggagtagaaaaggccgcccgagggcggagcttacccgctcagcttttaccagctgaggcagaaaggcctctggggctccggaccccgggaggaggttaccaagaccggagctcggagagggagcccggaggaaggcagggaggttctgagggccaaagcaagctctcagaggtcaaacacgggatagaggctcgtgctcctgccgcagcctctgctcaggccccactcaccgtggacttcttggtgagcatctctttagccatgacgtccatgagccgttccttctcctcatgatagcgccgctgctgctccagtattgtctccatcttcccttagtcgcggcttctcaattcagaccaccaacacggccggaagcaactcctgccgcccagcgcgcctgagtccccacgttgcgcatcaggctgcaccaaagttccgcgagtgccggaagtgccccgggacttaagaaaacaggagcaccacaaggaaggccagtccatgttatggagatggcaacagtgccacctgctggtgggaggtgtggtggagcgatgccgagaggttcgcagatgcctccagggggcataggaaaacccaagaacctgaggttcagcggacggcttcctgcggcttgctggggccggcttggcgggcaggtatcctgtgtggactgcgcgagcagttggagtgcggatgggagttgggaaaccggaacttgaggacgcagctttcagcataaattatgagaacgttttctctttctctggacctcagcgtctttctcaggaaaatgggaatagtggggttttgctggtggtgtttttaaaaaaattcacatgtgaggccgggcgcggtagctcacgcctgtaatcccaacactttgggaggccgaggcgggcggatcacttgaggtcagaggttcgagacgaccaggctggctaacatggtgaaaccccgtctctactaaaaacaaacaaacaaaaattagccgggcgtgatggcaggcgcctgtagtcccagctactccggaggctgaggcaggagaatcgcttg

SEQ ID NO: 33490 - DNA, 2013 bp, Homo sapiens
gtcatgcccgataagctgctggcactcagcacaggtgttggcaaaggtattgtcatagcagggcacacagtaggggccgctgtctgtctggatgtacttgcgtccatacagggactcgttgcattttgcacagtcaaatgactcgctcatggtggcaaggggagagaaccctgttaggagcacaaggtggaactggggtcacacagagaggctgtggcttggctcctggcaaagaggcctctgcattcaaaacacagccaagagacccggcataggaaatgccagttcagagtaggtggggatggggaaggggtgcttctgggaaaccaggaatcccacatgtttctttctgtatttaactcggggtaggaagaggtcaggaaaaaaaccaggaagcagaagttgttttcttatctaggccctagcagatctagggggagggggcttttcctgggtcagtgactcatttcctgtcccagccagcgtctagcctccactgtcccgactgtccccagcgtgggagaagcaggggcagggagccaccccactctactccttatgagcagtactcccaccctctcctgactcccaggaagggactttaggaatatggataaaggaacccttaaccagagctctggagtacagaacttagagacgggaatgggctgtgcctgcccctcctgatccagaaaacagtggaatgctagagaggtgctggactaatgaatggtagaagaggccagtgtgagaggttgggccttccctcccggggaatcagccaagcaatgggaacttcagaggctcagcttaggttcaagcaggaaggaaatcctgcaagctggacacagccagtcttccctagctagaccctctgccctcatccccccacccccgctgtgtcacaccagcttggacagccttggcctgtaacatctgcagcagctgtggcggcacagatggccagatgtcaggttttgccagcaatggggagaaaaaaggaaaatgaagtgtcgggggaggcagaggggaactggagacagactgggagtgcagtgtaccccctgccacctcctgctaacatctggcaaaaccccaggatctttccatcccctggggtcatgatttccctcctactgcctctgggagagaaggtctctcccaccttttccgatttctcagggtttgggactagggagctgaaaggagagagagcaagagccactgaagacattttctccccaatcaggccccatcttgggtggggagtaggacaagggggagccctgagagctgctgctggagacacccagcccccgaccaaacctcagacactttccattttctcaggaacaaagcatgtttgtgggatgaggtcatccacacagctgcctctggaacaggagcctagggagtggagcggtagggaagtggggttcccagacctttctgctgccccggattccagtctctagccccaaagtcagagctcccacccctgctctcctccatcatgaaggctgctctctaagggctgggatcctggggtagtggagaggaaccaccaggacccataggaaggagatgttctcacagctgtggatgagcccggggaagttacagggacacacaaaggaatccaccaacccactctcccacaaggctccagtgctggcagtcgccagggcctgccctggctcaagctgaaggagaagtcctccttttctcatccacccccagtgcgaaattcttgacaacaagcgctgctctggcttgaagttcagactccaggcaccagcagatgcccccagcttggaggcctgactctccatacatcaagcctctgcgcaatgggagaacagccagcttgcgctccaggccagggcatgaggccaccaggggccagggtctttagagctggaactcctgggctgggggctatggtgtagagaagatactcctctttctcagcccccttcctgccactcaggcccaggtttcctctggcccaac

SEQ ID NO: 33491 - DNA, 969 bp, Homo sapiens
aatgtgttcgctggggtcccacgtatgctttttctgaaaatgctccacaaagcctaggacggcccccatgcctcgggtctgtccaccagtaactctgtacgcccggtgtgtccttgtttcagtggtctcggtagcctcctgtgcctcgagtccctgcctgtctcggtctctcgctccaccgggctttccgagaacctcagtttctccagcgcttctggtcggtcggtctgtctgtctctctccggcttttctatttcaaacttagccccctcccccgcccaactctcgctgccgcccccgcccccgccccgcccgatagcccggaggggtccagtcccggcgggcgctgtcccgggctcggcgtgccccgggcacccgtggccagagcccggcgggtacaggggaccggggccgcggctggcctcagccctccgcgggtcccttcgctccccggcctgggcgcgggggcggaccgccagggctgggagccggggtcggcggggcgctcacctcgaagcgggcggcgggagcggggagcgcgcggcgcaggcggggccgggaaccgggcgccgcgtccctcggcggctcctacctgcgggccgggccaagcgggggccgagcgagctgccggcgaggctgccgactgcagacggaccgtgtgggcgagtgggagcgcggccccaacccctccccgaggaagtgagcgcgggcccgccccgcccggaccccgcccccggccccccagcccgccgcgggggccagaccccgcccccacctccctttcggccgccagtcggcccggccccctcctcccgcccggcctaacctggctctcccaaccttcaagcggccgggaccccgcccctgtcccctccccgcagcctctgttctcctcccctcccaccccccatccccagctgccagagggagactgctgtattccatctcaggccggcgacacgagacccc

SEQ ID NO: 33492 - DNA, 1457 bp, Homo sapiens
tggagtgcaatggcgccatctcgactcactgcaacctctgcctcccaggttcaagtgattctcctgcctcagcctcccgagtagctgggattacaggcgcgcaccaccaagcacagctaatttttgtattttttttaagtagagacggggtttcaccatgttgggcaggctcctgacctcgtgatccgcctgccttggcctcccaaagtgctgggattacaggcgtgagccaccgcgcccagccagccccaaaactgttaaatccgtactgctctagctttaaacataccttctagatacagcaacccgtgccgagctgtaagtgactgcacatgcgcacacgctaagcccagctcagacggaggccagtgccagccacgtgttcccaggtgcccacgcgggccaagcgcgaaggcgagatctgggtagcgtggacaggcgctagcgaataagaactggctcttatagagtcacgagactatatctgggaaactacacttcccagaagcagcctgcggtgactgcctctgttaaatgacgtacttcctgaaagccggctccggataggttgcttagaggaagtaggcggttctaaaccgccggcggctaggcctatttccggtaggaatcagtggacttggcggcagaggcagtgcggatccggcgttctccactgatcttttccaaggctgtacagacatggcggcggcttttcggaaggcggctaagtcccggcagcgggaacacagagagcgaagccaggtaggaccatacaggccccacaagtgctggcctttgtcgccatgtgttacccttgccccaaccctgtcgccaccgtgggatccgggtccaaactgtatagtatataaatgcacgtaaatgtatgttaatgacgctggcgtggctggggcggagcttcgtgggaacgagtggaggggatttgtcgtttccgttctaggaaaagcaggggtgcccccctttccttggggatataaaacctgctctggaagatttcagtgtggtgattgagtaagatgtctgtcaagtgcctggtctcttctgaggagttgaggtcagagctcatgtaggcaacaactgctgggctgaaattggatcccacgtctaatgggcagctccgcctgctgcatatgggggccctgaccgaagagactgtggttactaatgtggtatcatcatcacgctgggcttgtggttcatgaagatctgccatatgtgctttttgtttaagccttaccccttaatgttggccttttccattcccattatacagatgaggaaactgaggtccagagtggtgacttgtccagttacaaacaccagattcaggcagagtaaacagttctaggatttctatggtgggtgtgtctgtgtagggaggttgagtagaaataagcttatatgcagaatcagttgatacactgtcaggaatcccgtgc

SEQ ID NO: 33493 - DNA, 1050 bp, Homo sapiens
gcaagggaaacttaggcaaaatctctttgtcatctgagaggggatgtccatttaattggcatgtcagtagggcaggcatattgtccatttcacaggtgaggagcttgaggcctggagagggtggatgacctgaagaagaagctggcagcatcaccaggcagggctgcatggcaactggggctgcttctctctctgccactacaggatcctggctccctcacaccacccccatgctgatgccccacacgggctgcaacaagccctgctggcctggctccatttctgggtgtgaaatttggctgagtcggcacctggtagaatggagcaattgctatcctggagcctggggcctgggacagggccaatgcgcagaccaagggttgatgggcggatctgaccaagggttggtgggtgggcctggcgggcttggccagggaactcgccaaagctgggcagctggcaggagtggggcaggagagggcctggcttgaggacagccactcagggaagctgagacccagggcctaagctcaaaacagagcccagcagcatgagtgtctgcctggttgctggcgtgcctgagcatgtcggccggtgtctccgagcttgtctttgtgtgtgtgcacgtgtctaagggtatgctgggtgcgtgtgttcttataaatgagtgtgcatgtctatcagtgcaagagctggtgcacccatgtagttgtgcacatctgtgtaccaaggtgtgtctgtgtcagtgtgagcctacacatctgtgtataagcaaacttcttgcatgcatacatctgtcagtatccgtgtgtgtctgtgcatttctgcctgtatctgcaaatgtctgcttgtgcactgtccatgcaggtaggtccacactggtgtgtgtctgatgacctctgtcagtatctgcggacatgagtctgtgctttctgttagcatctgtgcaagtgtcatctacgtctatgagcatgtttgttctttccagtgcctctatgtgtcttgtacctgtatgtaaatctgtccatgcctgtcgtgagtgtctctgca

SEQ ID NO: 33494 - DNA, 1023 bp, Homo sapiens
cacacgaactcacccatgcacacaggatgctttgtccacatgctgcttgcatacacacacgcatgtatgtgcttgcacaatttagcagttttagaaaaaagccctttatgggatttgcctgtctttggagggccaagagcaggcagcagtacttgctgtggtgagatgggggtactgaagcaggccagctcagagaacgcattccaaagccatgaactgcaaggctgggcacctggccatccatgagctcatgtgtggggagctttggaattcccgccaacacaggagcttagctccggcctgagtggcagaggcagccacccagccagcactgggaatgccgggccactctcagagcttcctctgactgtctcttggtgtcatctgagggccaaacccctcattctttggaggagagccagctagcttcaccattctggtttgtgccttgctgccacacctgattgtccacagccctgctgcccacagctttgccttcagggcaggaccccagaggaggagcataagttgtggccctagaacagaaagcaggaagccttgggcactgaggcccaagagaggcagagagagagctggcaggggaggggagggtaagaagtcttccgagggaaagctggggaggagccttccccatctttccctgactttctgtctctgacaatgttattgccactgcctggacccctgggagcaggtaggggaagggaggggctgcatggctagtgccagagaactgtactctccttagagaattccaggctcattggcctggggtgcagaggaaggaatggccgctagagtcaagaggtctgggttctagcactgactagctgcacactgcagccttttgcgatgctgggcagacaccctcccctctcagggccgctataccccagtgaaccgtaaggagggatgcgctctcaggttcctcctagtttgggaactgcaggtggattaggcacacttcagggttccagggcaggtgtgtctccttagcttccc

SEQ ID NO: 33495 - DNA, 1086 bp, Homo sapiens
aaatcaatttcaatgttgatcaaaaggctttttcagagatgcaggtgacagagcccacgaattcagttctcaaggaaacacagggccctggagcttgtccccccacctaaaagtggggtgaagaggctgccagctgtccagtgggtggatttctccccaacaccacctgcgccatccatccccccaggctggcagcctctcgggggcctcatccagccccaaatggtagtgcctccagcccccttgacagccagtggtggcgaaatggctgcttcaagagttcagctttctacaaagacagaaataatcaggttgaccaaaggggaaaaaagggaaaattgagcattatgagggtgataattcagaaagtgtcagcctcagaataattgaatccgatgacattttgtgctacaggaaacaatagcagctagccggctgcccgtctgattcatgtctggttcatgtttaacaaaacaagggcaagggtcacgcagccacgagccccataaataacccgttaatgggatttccaaacaagctgtcctcaaagtggctttccgtctcactgagagaatattaaaatgcaaatggattcgggctgtgtcttcataaacaaccgtgttcatttaacctccgacctccccgcttaactgcccattctagcaatttgtacgggctcctcggccacaggctcctgcggtaattcagggaaagtgcattaaaggaaagggttacaatttgcaatgctcagttaatcatgctattgagatgtttatggacagaatcgtgctcctcctcacacttgtctcagcccttgtgtcctacccccgcccccaccaacccaaacgtggctgattggttccttttgttgaatctggtgcggtgaggtgggtaggctgtcttcccagctgacaggggtcccctctggcctccggtcaccagcctgcttttccttggctgctattctgcttggggtctggccagagaccctcagttaaatgcggatggtctcaaggcttgttctcctttgtgaaatggcccaggcttgccctgggaagccgcccgtcacttggtttcttcccagga

SEQ ID NO: 33496 - DNA, 1120 bp, Homo sapiens
gcagagggtgaagggcagggctgcccccctgccatagacttgggcaagagatgcccctgccctgagctctgggctttaaaaggagcttctctagccctcctcagccccactcctcttctggataagcaactcttgcatctaggggttgctctcacctggaaccctacttttcattctagatgaagatcatattccaggtacctggaataccagggtttcctgtcccagtgcccctgaacccacttccagggcctctgtgggcctcttccctgggtccatcctcctagagcaggccacagtgcgaggcgtgggcaaaaggcagctgcttgcaggtgttggggtattttgtgaacagagaagggctctggccagtgtggagctttgcagaatccaaggatctaaatgcaagtctggacttgcaagtccttgtgaatttatatttgtcaaagtctttcattcaacatatttagaatttttaattgtttagacttgtggtacatggtcctccatttgtgtcctgcaagtgttcagggtggtctagccctagcacagggtctgcttgcctgggttcagattctgggttctgctcctttgtagctatgtgaccttgagtaagttactaaattcctctgtgattcctattttttcatctgtaaaataacagctcataggattgttgcaagaattaggaaaaattatacatgcaaagtgcttagaaatactgcctggaatgtagtaaacgctggcttggatttagctcttattcccatttcagaagggctgcatttagagagattcagtttaacttcctgtgaccctgggtggcagagcaaaggtcaggagggacactaagcattgcagttgagctctgggcctttaccactctctcgctgtataacttatgcaaatttcttatcctctctgcgtctttttccctgtgtctaaaatggggataatctgaaccacctcaaactggagagtagttaagaattaaataaaaaatatctggcaatgcgtggcacagtatccagcacatggtagtttacaattgctcagttttactctcataacatccccatttcttctcattatctttcctaccttctgttttcactcctca

SEQ ID NO: 33497 - DNA, 2078 bp, Homo sapiens
taggtctgcaaaatattctcaaagtctcagatttttaaaaacacacccctacagggggaacagcaccagtaattacattcaccaggccacaactactgaaatgggtgcaatctcactacccaattcccagtaatgctacagcgaagtctccttcacatcagtagcgagaattacaacgcccagtgtcttagtcacaactcttcctgacgctgctccctggggctctgctgggaatcccgaaacactcaggtcacctgaagtgagaacaaatcaaaacgggccaggggagggagtccacgaagttctccaagtgagaactggagagtacgtctcagtttcgtaaatgacacaggagctgggtcccagggggcggaggtcttgggcggtgccaccgggcacctgcctcccggcaaccagtttcgccttcagcgctccacttggcttcagctgacttgggcgtggacacagaggtcggggtccccgcgcgggccgcgcctgtgcgctcgcaagagtggaagagaaagtgcggagggacggagcgcaggcgggccccggccgccgccctcccgggcgtccccgctaccggccacctgagaaccggggagggggcgggggactgggcgcagccctgctcaccttctggatggaggacttgccgctgcgccggagtcccatgagcagaatcctcggcttggagctgtcagcgccccccggaccacagccaccgcctgcccctgccccaacccctccgcccgccgccgccgcctcctcttcctcctcctccacgccgtagccgaagtcctttggaaacgaatcggccgcgccgtaactgccggcgaggggcgtctcctccgccccgtactgcagggacatggtgctggagccgccgccgcccgcgccctgacaggccaggccaggccgagccaggccgccgcctccccagtccgcctccgccgccgccgccaccaccgccaccgcccccggcagccgccacagtccggcccgccccccggagcccggctctcataggccccgagccgaagcccagccgcttattggccgcccgagctgctactcgagagcagcagggtaggtggtgccccgtcacgtgccggaatcacctgactcagagccgcggaggggggaggaggagtcacgaggagggcggcccggccgcgcctctagccccggctcgggccctcagccctccgccccggcccgcatacaacgctgtctgcaccgctcccctgccttcttccgggctcccagagcaccgctatggagatgctctcccggcatttgaggaagaattgattgtcctcatcctgcaactgtacttgcccaaccgatatttattgatgcctgcagtgtcctgggtgcctaccaaggggcacagaactggatccgacgcagaccctgcctgccttcaggttgcttgaagatgaacagagagatcggacctctgcgtaagtaacctcgctacgaaatattatgtgggaaggtcacggataaataatgctcgggagttgaatgagaaagcgtctgagcagatctaggtggatggatagattgggatgtgcaaaggtatgggggagccagccacactgagggcaaacctcaaccaaggcagagtcatgggtcaccgtgatagtttgttctagcaggtagctggaccctgatgggaaagcagatgcagccaagctagaacatcttatcttctttcttcagtaagtcgccgatagtggatactgctgccacttcaaacccaacgggactcaatttgccctccttcccgccttgtcaaagtctactctaggaattccatcccccatagaacactgcctcttctatgacctcgttcagattagagaccaaagtattgaataatgaaagcaaacaaaagcaaatgcttgtcaccaaatatgtccgagaaatctagaggaatttttatttttgataatcaggctctagaactggaagtttgagaagaggatcctcttaaagcacagccctatacactttttaaagtacaggagtgggggtgctcccagccctccaaggagactgacttcttgatt

SEQ ID NO: 33498 - DNA, 1243 bp, Homo sapiens
ataaaaaccgtaaggtgggaggaattgggatctgaaggtccttggcaaacatgtccactgcggctgctggaggcaaagcaacggaagttgaagagactttgcaacagctgcaagagtttcactcccggtgcggagaagggtagcggagctaggctaccccacccgggcggcgtccagcagccaggtccctgctgaaccccgaggcccacctcgctggaccccggacgggccccatctgtttcccctccttccccacgctacggcccgctggggaacggggcagcgccggggagcacgacgagggcacgaggtaccctctcctagcccaggctcacccttggtcagcgtgtccagcacccccgacttctccaagtacctccggaactgctcacgcttcgagtcggcggcctgaagagacaccgggggtcagtggccagagcccgggagccgagcaggaagaaggcgctgggagtccggcaaccccgcctccgcctcactacctcggggccctcccgcccaaacctgcgcgcgcgaccccactcccacccagagccgaccagcggcttgctaccgcccgcatgcccccagccacgccgcgcccccctcactttgtaatgggccatagtgacagcggcagcggcgtagctggcgccggagaccgcgactggcgggttgggagcagcactgctcatgcgcggaagggggcgcgcgcctgcgcacttgcaaaccaccggccgggatcgccgaggtgtggcctgttttcatggcgaccaggacgctctgcatccccagtagcaggctgagccgagggaggctgcgtatgcccgcccctctggctgtcggagccgcacctcttcctcttccggcccccgtagcaattaggtttctttgcaggaggtgagattttggtacctctgtcctggcgtccggaggcagggcccgggagcattgagactattgcgagagaaaggaccgccgcacggtggtagcgagcgcatctttttcatctgggacctcggaaactgtggtgacccataggtgctgggcttcttggctctcgtcctgagaaagtgctcacagtgctttgcagtagccgaggagggtgtttagaatcatatattttggcttcagcttttatctttggagtctccttgagtcgtggctgacttgatgtgggcctctggaggatgagcagtaacgagcttgcagtagcttttgagccaggcactgtagaaaacacggg

SEQ ID NO: 33499 - DNA, 623 bp, Homo sapiens
ttctttattaaattcttatatggatataatcctcagtgtcagcaggaagcaggttatcgcccttagttgcatccagcaaagaggtcaaaagagtagaagttcagaatagcaaacatactatacaattccttttcctcagcagaaactgcctacagaggtagcagtggaagaagtggggggaagtgggcaaaggtggggtatggagcatgaggaagcaagggggctcaaagggaaagttgctgagtcctcagcggtagctcacggactggggtcatgaaaagacttgaggttttgagttcaattttcttattgtcccagactctcttgcccttccacattccaccatgaatgactcagcaagaaggccttcaacacacaccagcaccttgatattggacttatctgcctccagaactgtgaaaaatacatttcttttctttgaaactacccagtcagtggtgttctgttatagcaacacaaaatggactaagagtatgttgctagtaaatatatcattttagccatgggttttaagatctggagctgattggaaatattggacatcccctagagattctgtactcagagctggatgcagtaactagaggtaattttcgatgtga

SEQ ID NO: 33500 - DNA, 558 bp, Homo sapiens
agcgcctgtagtcccagctactcaggaggctgaggcaggggaatcgcttgaacccaggaggtggaggttgcagtgagccaagattgcgccactgcactccagcctggtgacagagcaagactctgtctcaaaaaaaaaaaaaaaaaaaaagctttggacaataaggtttggtggaatttcctggctggtaaacagatcaatgtgtcaccaggctgatatgccctgattccacagggagaaggcaattctcaaagttctgctcttgagactctcccagaccttaccctgtctcctcatttggctggtcctgacttgtattctttataataaaactgtgattgtaagtatatcactttcctgagttctgtgagtcattctagtgaattatcaaacctgagtggatatgggaacccccagatttgtagccagttggtcagaaatgtgggtggcctagggatgcctaatgtgtggctggcatccgaaatgagggcagtcttactggggaccatgacctgtaatttgtgggttctatgctaacttcaagtggttactgctaga

SEQ ID NO: 33501 - DNA, 1777 bp, Homo sapiens
atataaatgaacatagacatatatattgtattatagctgtgttcctctgtaatcatatgtgttttatttttgcacttaaaaacattcagagaaggggtgtatggcacacaaggaaaggctaagaactcctacctttaacaatcccacctgcccttacaacttcagtaaccatttttccaccgatgactcacctgaatttttttctccaattcagatctctcttgaattccagacccgcgtatttacatacaaatacctccacttgagacgcccaagtgaggctttaaaggaacctctaacacaacatgtccaaaacaaaactcattttcctcttcagtctgatcactttccaatgaaaactttctcagaatatggttctgggaaagctagtagcctagtccatctccctcacctccatatctaatcctcaccaaggtctgttgatttaatctcctaaactttgttcatttctgtctactttcctcataatgtggaggcgaccttacttgttttagtggaatgggaagggcacaggtcagatagacgtgggttaatgagtagtgagtaggaggtacaaaaaaggagagcataaatacagacaattcctttggaaactttggacaaagaatcctgaaagattttggaagatggtatctttcattccttcaatccaaacaacactgttccctggccagtaaataggcagagcctcagatctcttgctgagcttttacaaggtaaaccagcataaaaacacccccctctcctcagtgaggatatgaaagaatttgtgtgtgcttggaggtgggaggttcctgtaatattacaaaactaatactacaaggagtgcatctggacggatacagtaacctctttattgatttccttcatccatccctgctctcctccaaactgttttccatggggcagccaggaacttcaaatgtaatttctgatcatatttaaattccttcctttgccttcctcactagttttttctccctgactctccagattcatactctggaccacagccactggagacgtatttggattcctcacactatgtcctcttctatcacaggccttcatatgtgctgtcccctctgctctctccgccctttcgttgcttaattaactccgactgattcatcagctcttagctgaaatgtcatttcttcagggaagttttcattgccctccaggacaggctaggactcctgactttaatcacatcctgtccttttcctttatagtacttgtcatagtttgcagttacatatttgttgtgattatttgattaacacctgtcatttctaacagttgggacccctatgaagggaggaaggggcctcttttcataccatggtatcctcaaccatgatactaagatagcataatgcctagcacactgaagatactcaataatgtgtgtgtatgtgtatactggccaagggcctggatatgcaaagcaaagtaaacatggactgtggtgatctcataaggagacactaaactgagtggctatttcagagctccctgaagaacatctctatggttagtcctctgtcatcggcagcatataataggatataccatctacttgtttggtttctgaatcatctgaatccacccacactcagcaatgtggactctcagctttcagagagagaccaactttgagataattgccatttcttttttttttttttttttgagacagagccttgctctgtcactcaagctggagtgcagcggcatgattttggctcactac

SEQ ID NO: 33502 - DNA, 2665 bp, Homo sapiens
gctaatagaagtgaatatctgtaattcggactgtcctgaaaaatcctggagatatgttgaagacagatcccaggagtcatggtcattattcagtatatatgagaaggtacagaaaggctttatcctttctttggatcagattcctttgatgatctgttgaaaacaccggaactgctccccagaaaaatacagacgcgcagagtttcagaaagcagaacccccctgttatctatttatttttccacaatatcaaaagcactttacagctggtattgctgtaaagagttcagaaagatgaggaagaacctgagctgccaagtcagatgggaagaatggcaaatcagctaccagctgaagttcttaacactctgaagccattcttagacggtttaagccagtgggtgctttttgtaggttctcaacgttttaaagtaacatatccctttgatgagctgcttaaggtatgggtcagctatctcaaaaatactcccacaaacacccccaccctcgctcccaccccacaaatctgcaaataatttcatggggttcatggacttgctaaagcccatcctccaatactcgcttctgtttaagtgcagacttcccagggctcagcggaatgcccttgatgacctttaacaatcacccttttatcatggggacaagagcggcctagaaggaggtttttggagtcaccagacccccatggcccctcaccaggccccttcaagctctcccctcccccacgcccgcgcagcgcaggtgcgaaaaccttaggggccacccgggcgcgacagccccaaagcgggggggatgggaccctgggaggggcgggggtgggggtgggggccttcccggtgttgcttggtgaccacgctctccgcccagaccgttccatttcttcagcagggggcgccccgggccgggccggcactgaccagcctcgcagagccaccctcttccggcctgcccccctctgccgggcgatggtgtgcgcccgtgacgtcacagaaggcggggccagcgccgctgccgggtgctggaggcgccattggagccggcttggctggcgagcccggctgaggagcctcttgggccgcacttaccgccgcgtccgctcccggtccctggcccctcagcggcatggcgtgcggggcgacgctgaagcggcccatggagttcgaggcggcgctgctgagccccggctccccgaagcggcggcgctgcgcccctctgcccggccccactccgggcctcaggcccccggacgccgagccgccgccgccgtttcagacgcagaccccaccgcagagtctgcagcagcccgccccgcccggcagcgagcggcgccttccaactccgggtaacctgccctgctctgggtttggcaggaagccaggcccaggcattttttggggggggtggtgggggagggttgggaataccaggccagtttacccagggaccccttctttgccttgagaaaagggaactgggatgccgctgggcctggttgcttccggtgatgggaggcatccgggaggggtaatggggccacagggtcggttttaggttttcctgggggaggagagcctggaggggtggacaccaagaggaagatgggaatacctctggccgctccgggccctccctgtcgctgaagcccctccttcctccgctggccgggtctgcaccgagcaaccctgcagatccagtgggccatggaaaattggattctactcacgaacctggcctggagggcgggggtgggatgggggcgggttaccgggaaggggcgcgagtgcgtgctgtttagccctgtagggagacatgatttccagaagtctttaggaacccagaggccgccgcaagagtcacggaatccgatttcaacctgataatttctaagggactggccacgttcttttattatatggctattgcctcgtaccatatatggcttgaaatcggtagatcattagctagaatttgagaatcctacgacatacggaggttctacagaactaagaatgtaactgtccttaacagggactctccttcagtaaggcgttccactttgtccaaggaaaaggactggcgttacagtagacacctcatagcgcaggagtagaggggagggtgcttcagcattaatattctgcgattttaaaggacttccggaaatgaggggggcgtctcaataatggatttgggcaagtcgtttctttgtgtgtttttctattcctcaagcttaagcaaaaccttaggctcaccgtaaaatcatcctttccaccccttttcagtagcagtgccttcaggtttcatttcctccttcctctgcatatcgatccacaatgcaaattgcaggccctcatcctcacaccaagattcctacacccagctaaagctgtcccagacttcatatccttaactcgagttcacctttttaatcctagaattcaaaggacttatgaactgtgaccatatcttacctagtcagtctcttacacatttttttcaaactgtgcctctgctttttcccccagacccaccgctctgtgcccttatcatgtttttcccttctatttgctaatcccaaaagagtaatttcaagtctcttatccattagctgactaacctgcccataaaaaacgctgttctactt

SEQ ID NO: 33503 - DNA, 1570 bp, Homo sapiens
ccgcccacctcggcctcccatagtgctgggattacaggcctgagccactgcgcccggctgggggcctacatttgaccccacgtggtggtttgggctcatagtccatgtgcttaaccactagtgggtaggcagggagccagtgttctttctctcctgtgactttggtgaagtctctcaccactcagtgttgtcgtgagcatgctaggcagagtgcaagaaaggagcaagaactcactaatggctaggccttccctgtgtctctgtaattgatgggtttgggttttttttcctttctctctctctacctcctctctctcttcttcatcctctctctctcactctccccctgagataaggtcttgctctgttgccagggctggaatgcaatggaatggtgtgatcatggctcactacagcctcaatctcctgggctcaagggatcctcccacctcaacctcctgagtagctggaaccacaggcatgcaccacctcgcccggctaattttttattttttgtagagaggggagtttcgccatgttgcccaggctgttttcgaactcctgggctgaagtgatcttcctccctcagccttccaaggtgctgggattgcagacgtcagccaccgtaccaggccaacgggctcggtttctatggttttgtggggagacggctgagggaaggtcggcttccggcgtcgcgctgcaaacgtctcgctgaggtcatcctttacggcaggcgtccgcgtcgctagctagtcgttctgaagcggcggccagagaagagtcaagggcacgagcatcgggtaggtaggggctgcttatgtccgcgcggcagcttagcttaaggaccttccttccgaggtctctttaacagatttcctcttggcttgctgtgtgtccccttctcccagacctgaactcagggcgtgttccctgccctcccaggccgcttcacctccacagctaatggcaccgaagcctggagattgccgctctctccactttccacatttgtttaggtttttgccggactaatgttttggctttctgtttcttaacctaaagtctacgatccttatcccagctttccaggctctgcgtgatttcggccccgccggcctcctgagctcatttcattcttttcaccgtcatgcacgctgcgctccattgtcccccaaacatagccagcacttccggctgtaactccgggctgttgcccaactggaacactctgcccactgatcttcacttggcgaactcgcaagccatgttaaaggcattttcaagtctccgggcagagttcgtgcttcctccttcgagctcttacccactcgtgttccttgcagtgtattcgcaattccgagtgtgtgtctctggtgcttacgttggagctgctttcccccgcatctgagtgcctggaacgtaactactcagtaaatgatgactgagggatgggaaggaacttaagaagttaaattcacctttttgttgagatggagtttcgctcttgttgcccaggctggagtgcagagtggcgcgatctcggctcactgcagcctctgcctcccgg

SEQ ID NO: 33504 - DNA, 3204 bp, Homo sapiens
tcatggctccagcgcactccatgaatattgggattgaatgatacacaaccgaatgttggatcaaatgatgttgggagctctgtcctcaaaatggcccctaataaatccctacccatattttccagtttcctttctttactctttcctttcccctgatgacaaagaataattggcttccccttttcttccctgaccagctatgctccagagtcctttctttgttccctaacagtcctggttccgtctcaggttcccacatttctcccttttgatctctgtctctctgttcagatggctgtcacagtttaataattctggagggtctatcccctacagatttatgtctccctgtctctcctcttattcaccccatggtgcattcagaatcccgttttcgtgcctccctgggttgtcatttctcaggctctggctccttggcctggtttacttcatggtgctggatctgccccgtcacttcttgttcagcttcttctgtttctggaaaaccctttgttcccgggcttctttgtgggctcagtgtcctccggccctacactgcagccctgtctggatcttgcccttgtcctcgttctgaccgcgtctagccctgggatctgaggcatcgtggtcttttgccctctgctttcccttcagtttctccaggtccttctccagcagccgcacaggccccgctgggtttctctccagccagggagaaaccctcctttgtcccgctcccggcggcgtaggtcagcgctgactggggctcccgctcgccctgtggagccggcccgggtctccctgccgttcggccggcccagcctttcatcctgacgcgcggggcctcccacccagcgggactcccgcgtgggccggcctctcgcgcccctcggctcgggccccagtccgggccgggcgggggtcggcagcccctgggggacccgtgtgggcagcccgggcccagccggccgcagcctggggccgaggactcgccgggacccggaggcggcggggagagggggcggggaacgggccgggcctggcgctcctgacaggaggagccgccgccgccgcccgccgctgcagccgcgccggggcgggctgagggaggagcggagccgaggggtgaggacgcggaaacgcgagccgggaccggcggagcgcgagcgggccgggtgcgagcggactgaggagcggagcgcgactgccgggccgggcgaggcgggcggacggcggagagcgagggcgccgtcgccgtctctgagacgcacaaagggtcgaggctggggccgccgccgcctcagcgcgcgggcctggaaccggcagcccccggggctcggcgagaaggcggtgcgggcggccatggccggctacgtgccgggtcagcagccggccaaccgcagccaggagaaggagttcgtgcaggcgtacgaggatgtgctggagcggtacaaaggtagggccggggactggccggcgctgaggcccgcgggccggcgcagcgtggccttcggagccggtcggctcggcggctgcaggtggggcggccgggcggggtcgcacccaccgcgcggggcttggccctgagctgctgcttctcggggccagtttatttacagagttgagataagccttcggaaaccgcccccggggcagtcggcgcgctcagagcgccagttacatgatttgccctattatccggccccagctggaagaaggcgagacaaggcgctggcctggagaccggccgccgtggggagttgctggggaggaggaggaggaggagttgggcgcgggagaaaccacccgctctgctctgggtgcgagcttcctcccagaggggctcggacctctgtgtgcccgcggagagtccctccctcgcccccttttgtctctttgagtctcggatgagtcgcgtggaagccgaggttggaaagcaccttggtgtcttcggggtggggtgggcagcggtgtgggtgagtgtgcagtttttggtggcgagaccttaccccctccatctccccgggggtctgggcctgctggaggtaggggtctgtttttttcctcccacataaagatttgccttggagctcggatttcagccctgaaggctctcttgcgagacacttctgcaagttaatgcctaatctgcgccttgggtgtatggggagaaagttttgacagacaagagggcctgtggactgcatttccctaactgctgtaggtgcccctgaatggaagccagggatgcgtggccttgggaggcccttgccttgatctttaacatccggttctgggagtttgctttggctggcagttatgctttccacagacggggagattttcccagaaacgacacaggcagcacttttccccattttattcagctcgggcccttgtgactaggcccttagtttctttttatctgaaggagaggaaacttcagcccctatgactgagtccagcgtacttgtttacagcacctatccagtgaagggaaactaatgaagaagctgtaaaacgccccccctctcccccctcccccccactttttttttcttgtggcattggaactctgcttgggaatgcagcaggaaaaaagtagagatgaaatgcgaaaaaagacctactagggtttttgcttgttccctctgcatcagctcctgtaaactgtccagcttttcctgcctgcagcaagttttctgtcaaccccctgtggtctttctttttaagaaatgtggttcatttcagagcacaaagaggttagattgtgctgctgaacttcattgaaaaaatgctgctcagtgaatggttgcattaagtttcctttgcaggcttttgagtaacactgctctcttcagagagaggagatacattaggaccgtcccgggctgtgacagcttcaaaccagcagaattaagacccaaaataggtgaagaaatctcagcacctcactggatggtagtactggtgacctccagcggaaaggaagttggactcctagcaaatgaggctgggaaagaagggggcagtagggcttgttccaggagagacctcttttgttcagttttttttttttagctgtctcactcagtttggctttcctctgaagggccttgatcaggtgtataggaacttaatccttcccagacacaggtctctttcttgaggggaggaatgagttaaaaatggttgcccaaagta

SEQ ID NO: 33505 - DNA, 562 bp, Homo sapiens
atgttgcccaggctggtctcaaccccctggcctcaagtgatcatcctgccttggcctcacaaactgctgagattacaggcttgagccaccgtgcctggcctacactcagtttttaagttcctttttagatcaaagtcctagagttggagtggatagtttttagccagaacaaaagagtaagtgctacttctggacatgaacactgttaattcagaaagtgagtcaagtcagtctgctgggaaatcacaagttttggccacattcatgctgttgaaataataaaatgtgtccatgtgctaacagtgcttatgggagctactgccttgtcttgggcttgttggcaaatgacgtaatacaaaccagggaaatgcaccagcgtaagcctattatactggtatttttcagtgccaattccaggtttaagagatcatggtggaaagaatacttcagagtgcatatctgagaacagaaacatcccaagatcaaaagtcacaaatgaacaattatagattgtaaggagtctgttgtgttttctcagtgttcttgaaaacacccagtcttt

SEQ ID NO: 33506 - DNA, 1004 bp, Homo sapiens
ttttggacaggacatcttgactcttgacatagagagaggctttcctcacttgtggtctttaatccccatctcattatctgacatggatagtggaggattcactcactctccatgagtgaactccaggcctagcttcttcattagtcttaacaggttagctttactactctccccagggcagttgagctttgctttccatgaaggttatgtagttaatttgtactaggcttgtgaagacctgggtgtttacaagactggacagagaggctgttgtggaaaatgcagcctccttcttgtttattttggcaggcaggcaatgaaggagatagatttgttctcatgactcagagccctacctgctttaccttaacaggttcaatataaccaccacctttcagatgtgatagtgtccttcagagtttatctgacctttatatctaaaaagagtattagttaccctttgccctctacttgcttggttttttttcacttttattccagtgtagaggatatttcctaatgtgttagggccagctcagaattgatgtagttctttcccattggcacattccgcatctttgtttgtttattgccatgttcgccacagtgtgccttgttttgcgctccttgttttgtgaagctggactcttatcagataaacttgccatgagtcacactggggagtggaagtatgtctccactaatttggagaatctttgatcttgtttcactccctggtttggcttgtccagtgcaatttgtctctcaacctgcaagaggtgtgtgtgtgtgtgtgtgtgtgtgtgtgtgtgtacttgggtgtcccttgcctgtggcttcacctgttgccatgaatggttgacttcagggcatgcccctttgtgtatacagacttcctctactattgttatcaccatcagcaaaaatgtctctgttaagagcctctttgaatgtagaatatagtatataacactgagagttcataaaccctctgtcctctaggg

SEQ ID NO: 33507 - DNA, 1752 bp, Homo sapiens
ttccctcaaatggagggatatccctcagtaaaggaaggagctcagaattagattgggggtagagaaaggaagcattgagtccctcctagccctgcactgtggaaatgtaaagctattattatgataattgctgttggcaaacaagaaaattctcagcctctggtttgtacctacacccagtcacaacctcaggttgggtggatgcagactttaaatattggggtcacctgtagctgttggaaaaggtccctgtggtttctctgggtgttgtgcaagcattacttttttggctcttttccctgtatccatcagtaaaaagtaggaagtttgaggagctgtgctttcggttggcattaggcattggagtgcctttatttcctacatttaactggtaaatatccaacactccataacaggatggccctgcttggaaattcttacctagggagtgactgaagcctaagaggaactgcacagccccctgtattgaaaacggagtagtcatttcctagagcatggcttggatcctgatcagctgatttcctgtctctacagggatgtgatgtgattcctcccccttccttctggaagaaatggatattttttttcatttcctgtttgatagcatattttctgagtaccaggagacacttgatgactataaaacatttgatgtgtggggggtgggaaggaaggaggcttttgttttcagcagaatggctttcatttgaggaattcaaagcacatacatgaacccaagctgttttgttcccatgggagagacacaggctctaagaagattgtttcgaatccctttcctgggctgtgtctacttgacctgcactggtagagccccttctcccccataggttagaaaagctcggtccctcatggagctctgcatgctgtggattctgctcttgccacatccgctactcagccctttttgtgcctaaatccgctggagagcaactattagtccctgggggaagtgacaccacccttggaatggaacctggctggatgccccttgatccctgactgagtgacacagactgggacaggaatctggctgtccagatttcctgtcctctgtcctcactagccgacttggctgcttccaccctggggctgggggtatggggtgtggtgggagctggttgctaacaagcagcgccgcctgtggacctgcacagccacttgttttcctagccaagagctacccgtccagtctggcctgttcctgatccatctggagtgagagcagagacctggaagagagatcagtggggaggcagtcattgtgatcccttttgtttgtagtgaagctttgcttagtgtttgagggcctggggtttaattttgtaacagactcttactatagttgtgtgtgtttaactataagattttcttttcttctcttttctccttcctcgtcctcctcctcatcctttctcctcctcctcctcctccttcttcctgtctgtttttatttttcccaactttataaaggtataattgatatataaaaattgtatatctttatggtgtacaatgtgatgttttgatatatgtaaacattgtggaatgattaaatcaagctagttaacatctgtcacttcacatagttttgtgtgatgagaatatttaagatttactacttccagaattttcaagtacgatacattgtttgctgtacaatacatctccagaacttattcattttttctagagttgctttttcttaaataa

SEQ ID NO: 33508 - DNA, 395 bp, Homo sapiens
agtggaacaagtatttgccaggctgacatgagcctcagccctgcatcctgcatcttctgctttcccaacctgctgagtcaccacctaggaatggcagtagccaggttaccacctggagcacctggagcactcttggcataatgcactgttgactggttttggtctcctagacacagcttgggcctctccaagcctgttggagtgataggctgggtcttagctctccttccagcttgttccacaaggcgctgacctacttttcagggacaattaagtgtttgtgagcaaaggaaggcggtgacccgagtgaaggtgaaccagagctgcattaaacaaacatttggagtcactttttctatcttacacaggagggcccatctcagtccaaatggaat

SEQ ID NO: 33509 - DNA, 2935 bp, Homo sapiens
actaggtttttcagaataaccaaatgtagttctcctaagcaggcactgatctttagctgacttagtggtgcagctgtatcctctgggttttgatggagttgatgagagaaactgttcttgcgggtggtaggaagctgttgacctgacctctgttacacctgactgtttcaatatgcctttgtggaaatcaatttcctacccttccatctctctgctagagatctataaccttgttccagtggaaggtgactcttacctctgatcttttcctaggtcctcagaatgcctggcagtgaggcttttaggttattttgggattttataaactgagaggggaaccttagtctcaggtggggctagaatctgaggtcctataggtacagatttatcctaaaagcaagtgtttttgccttctctctcagttgctcagtgcttcttacctcatttgatctcttagtattacataagcaccttagggaggaaaggactcaaaggagccaaccatttctccttggacccacagccaaaaagaaaaggctcaacgagagtgagcttattcgagggtctgtagcctaaagcatgggctcttttaaagcctcttgttgggccgtgaagcataggtctaatccacgtgaagtaattacccaggcctggggtggccacagggtgagcagagctcttcgtaccctttttgccagacctacacttaatttcctttaaagcctcacttggtcttgccatttcagccctttccttcgaagtatgaagcctgactttttttgtcttcctttcttcagccctgcagaggcagctgtggccctggggacagccctttcttcaaatggcaaactcattttctgtccagcagaccagaaggacaaggtgtaattcaacgcttctctccaccagacactgctgccagggggagacaatgaagaaagtgatctttgttgctccctgaataggtccctgaacctggcacctgcttttgttactggctccttaagtcactggagacatttttgctgtttcctgggttagcagctgctttgggataatagtagcaactggttgtcaggatgtcagttctgcctcaaagaaaatcagtgtatttatatgaggagagttaccttttctgttcttaaatttcttcagggtttgtctgaagagtgagcagttggaagtcagctgtgcccttagtttgatgaccccatgaccctcatctttgaatctgaggagacactgccatttctactatccaagtactaaccaggcctggccctgctcagcttccaaaatcagacgagatcaggcgtgttcagggtggtatggccgtggacgagacactgccatatttttttcgtcctgctctccctctggtgagactctgagttctgggttctagcatgtaggtcagtgcctcctacctggtaagcattcaacagatatatgtgggatgaatgattgaatgaattccttgatcttgctgtccaggttcagtttctctgacactgatacgtgggtgctctatgggagggggacctttgtttttaggagaaagattgcttcaaaggaattatggaaggtgttgatttctagggggctttgggggaactatgggaactctaagatatgattcgttctcgcctcattggtctagatctttctcctcgatagtaactgtctgctgacagacttgccctgtttcaggagcagtatcctgaacctgactcatctgggctctgtccttgagcagggtaagggattttttttttttaacagccatcctgtcactgtagattcagaagccctcaggaccacatctcaggcactgtagtcttggacttcctgatctggctgcattcagtcaagttccactcagctcttaggtgtctgtgcctttgtaagggctgttggagacagaagggctttttttccgctttgtcagcagctggccagagaatgcctattagtctgccagatcctaagtctttcacgtttccctgtctgtgtctggaacttagggcagaatctcttaccacctgaggttacatctcactatttgcctttgtgggacccattggaggataaaagatgaatagccatgaaaggcatgcagagttattgaactatggttctttgaaatgctgtgactctgaggaaagatccctggtctccaagaatacaactggagccagaccattgcaccaccaccctcctttcccaagagcctctttggaaccatcactcattccatagttccaaacatccttgtttttgtttaatttttatctgataaatgttatgaaacaattttaatggtgaaacacacagaggaaatgacaaactagcatgtgttgtcttttaaatgcacttagttcaagtggttaagtcagttgttcctgttgttagattgctgttgtgtagtcgactttccttctttaggtgggaagagtctctgaatagactttaaaaaagcaaaaggaaccagctcttctttagctgattgatcattcctttacatctgactcttttcagcacttaaattcagattgtactatgctgattgctttcagatcatgacacagaagaggtcttaaggtcatttcaggagttctttagctgaggtccatgtgatacttctccacttgtaaacaaaagtttgtatgtaggtaaatatgtatatttttatagggaaaagtatccttagttttcatcagattctcactggagtttatgacctaaaaatagttaagacttagtattttatttatttatttaagatggagttttgctcttgttgcccaggctggagtgcaatggcacgatcttggctcactgcaacttccgcctccgggtttcaagcaattctcctgcctcagcctcccaaatagctgggattacaggggtccaccaccgtgctcggctaattgtt

SEQ ID NO: 33510 - DNA, 3315 bp, Homo sapiens
gtgagccaccacacccagcccctttccattatcttagcagctgtcacaattatttagcctgatctttttaggtgggcatactcccttttctctctgtttttacaatgctacttacacagtttctccacctgcatccaatctgtaattgggagttttgcagagcagtgtatttggtatgctgtgaactcttccctaggtcacccaatggcatcttgtgagccaggttgtctgaaaaacttcaaatcttggtggcagtgtggtgggtgtatctcccatatgagggattgttccagggatctgactcaattgacagctcctgaatttctaatatgccaaggcttttgtggtaagatgagcaagaatttttcaagctcagatttggggaacatagcttcttgccatgctatctcattggcatgatgtgtgacttttgggcagattacttaacctctgtctatttactttttctttttttgagacagggcctcactttgtcaccaaggctagagtgcagtggtgtgatcttggctcactgcagcctcaacttcccaggttcaagcgatccttcatcctcagctccccaagtagctgggactgcaggaacgtaccaccacacccagctaattttttggagtttttgtagagacggggttttgccatgttgctcaggctggacttctgtctgttttctcatctgataatgaaaagttgcaattattttcacaagatactttcaaagatgagtctaataatgcagatgagccattttgagttccttacaacaaagatgctgtggaaatttcaggattttccccctttagttataatatgggtagcttatcctaagaacctgtgactattgggatggtcatctttttgaggccagcagtagaaagaaatttgcagtagtgactgacacattaaagcaaccccgaaacaaatcagagtgaaatagtgtcctggagttggggatatgtgggtgatatctgggctgcattttctctctaggtatccatggagagggtcctgtctccctgaatggttgtgctttcaacagttagggaatgagcttgacagtttctgcttcttccctccccttgccttgaactgccttgatatgcagtgcctcctctgttgtgtggctgtattccagtccgtaaacatgactgctgtaaggagagtacagagtattgtttattttgtaaaacttgtctcattgccatgtaatatttgctcaagagctcctgttgtggtgatattcttgtggtgagcatggccctttaaagattttgttctcaaatgttaaatgagcccctgactggtgtcctgaaaagcatttaagcttctctccctagagtttaagcaagaggagcagtaatcccagtggagcctgggctggggtctagagagaaggtggcagatgaggtggcagatgacaggcaggggcggttgtggtcccgtagctcatttgcacaaaggaggggctggcctctcctggggaggtatttccgctcactggaacaaatgagggcgctcaaaaggctgtaatgtaatgaggcttctctggtgacgtcacttgtaaatgtggtcaaagtccagttcttgggggctagtagaagcgggagtagagatcattcggtttgcatgctttcacttctcagctgtcactgtgccatggtgcctactttcagccagtgaaccaactcaactgggccgggcatgaacgcttacaagtatcagaagttcctggagggactcaacaaccttagaggtattacaaggcttcaggctccctaccctttgtccttgctgatcgtgtgagcacttattatggtgtgtattgtatagggtctgtaaaaccctcctgctctgagctggccctattttttatgcgtttaggcaattaaacagaagggatagagtttgtaaatgcaatcctaagtgagtaggagagaatctccttaggtacttcagcaacagcctgttgtcttgcttgaacggacaagtaagaaatgtcccctgtattcttgagctcagagggctcagggcactccctgttttctttgaggtggccagacagtgtgggtggagggctcttgccatagggccctgcagcctcacctaggtgtagttatgtttcttgggccaggttttccagttgcttgtgtctacagtgagtcagagtcccatttggagagaactggagttgggagtggggaggagggtggagggaggaatgcaggttgatgggctatttgtaagcccattgtaaagtaagcctttgtaaagagtaaaacaatgactttgaaagaggaagctttttattaaagttttaaaggaaatagtgttttctttgcatcatgggcaaattcttcactgaccagacatgagaagaatgtactcagatgtgatgtaggactctttttggatattaaagagaaaaatgaatgaaatctttttactttcccttctctaattaataagtggttttatttccatttgcagaggagggtgcttaaaccatttttctttcatcagtagttaggattctggacccagagcaaccatggggtgtggagagagtgggagggggtagagggaggaaaggagtaaactgggttttttcagggatgaggaaagtggcagacagggtgtgggcaggagatctgtactcccttcttgccagggtatgtagatgttttactttctttcactatctgttgaagaactctggttctaagaaatatatatggagagctttgtatgctataaagggatatacaggtcgggcatggtggctcgcactcgtaatcccaacactttgggaggctgagatgggaggatcgcttgaacccaggagttctagaccagcctgggcaacataatgagacccccatctctacagaaatgttaaaaaattagctgggcatggtgatatgcacctgtacccttaactacttgggaagctgaggtggaaggatcactctgagttcatcttagaggtacagaacccaaataacacagcaaagagccccagagtctggagtgagaagagtgctgctctctggtgctagagaccatgtgaagaagggaagaatacccacatctgactaagcatatgtgtaaatgcaccttcctctctgagacaaagagctgtagtatggggctttagagtgaaggtaatagatcttttctctccacactactactcaccttgaatggagttctgttttctaatctttcattcactattgtttgcttcattcacttatatacactgtataatagtctttatagcataaaacatacaatata

SEQ ID NO: 33511 - DNA, 648 bp, Homo sapiens
gtggtgacaggcacctataatctcagctattcaggaggctgaggtaagagaatcgcttgagccaaggctttggaggttgcagtgagctgagattgcgttactgcactccagcctgggcaacagggcgagactccgtctcaaaaaaaaaaaaaagagagagagagaatttggtttttaaaaatattttatgttgaatgttagctggaactggagatccactttacccccacagctcaagttcagcttgacccttatgttgtgcaatgctttgtgtttgggttggtatttcctgggactggtcaggtgatgcacttcagcatgaggcctgtgtagtagctgaagagtagtgacccaaggtgtctatcagtgataagaggagagaagaagcccgtttagctctggacagggcctctgtttcctctgagatctcttgtctactctccctggtccagggctccatctttgcataactttttacagatagatttgaagtgccaacttcattctgttttggagtactggcattggacacaattgattacatccctgcctgtttaaaatattctcttcttttaccttcaatgagagtatttcatggttttccttaacctatctgattgctgtttgtctgctttgttgggtcttttt

SEQ ID NO: 33512 - DNA, 4664 bp, Homo sapiens
tttcgttattcaaaattatttaaaggagaattgagagtaggaagggaagacttctaatagtcctcttcgtttaaattctgtaatcatagcttccactctcctccttttaggtcctctaacttttgattcttataccttgcatatgaggctctttccttctttttccccccattttagtcatttttctgtagaaaatttctgcttatgcttggggagctagatatgaattcttgttatacttactaagcatcactggttctatctctagatgtttaatagtcaggtttttagatcaataggtttttagatcaatcccaaattcatagtgtcatgaaaagatagatgaggaactgagcccacctggagaagtcaaaggatacttgggccaagtgatataactagttattgacaagcttaaaccatgacccagggttctgatgtacagttgaatgcctttcctccaaatcacattgcttgctgttgaagccttggctaggagtaatctttagtaagatccttgaattgtgactttttttcttttgtttaattttattacagttccttcctttaacaaaaatgctaagtaatataagctttaagagggttaaaattagtccggtttcaaagatatatttgagaattatgtagtatctcttgagatagtctagagatcttagagctacgttggggcctaaggactgagaatcgctgtcatcagactagaggtttgagaaaaggagatttttatttatttatttttgagacctagtttcgctcttgttgcccaggctggagtgcaatggcgcaatcttggttcgccacaacccccgcctcccaggttcaagcgattctcctgcctcagcctcctgagtagcatgtgccaccacgcccagctaattttgtatttttagtagagacggagtttctccgtgttggtcaggccggtttcaaactcctgacctcatgtgatccacccgcctcggcctcccaaagtgctggcattacaggcgtgagccacctttcccggcctaactactgtttctatagaaggagttttccagattgatgcctaatgtacaaataactgcatcatcagtccctggctgtcatcattttgctgtgcaaaaagggaacatcagagaggggtccaggagccactccacatatcattcgtaaatgttattgctaatggagagagggatgatggtgggggcaggcgtatttgtgttcatagaggaaggtaggactgtaatctccatgcctagtttctgattggcattgataatataaccatctttcagagagtcagctccaagaggtaactgggaaacatctcagttttgctccgggcactatttcctttgccatctataccagaagctgtggtgaatgggaaagccattgctttctgaagtgcccttaggcctttctcagtgactcttaagttttaagaatcatttgggtgagcataatgctgaaatcctgtagctatgaaagctgcactgccatggcaataaaactccccattgaataagtaaaatggcaatttccaggaatctgggtggtagttatttcaatcaagttgagaaatgggatcaccgagagggggatttccgcagaatctgggctgtcagggaaatctttaggctgtcagggaaatctttattccccattgtcttctccttacaaattccaggagaggagtatgaggttatatttgtgtcctcagtaagcccataaaggtcagccagtgtgctaccttacattgtaattttccttttcaacattcttttttttttttttttggttaaattttactttaagttctgggatacatgtgcagaatgtgcaggtttgttacataggtatacatgtgccatggtggttttcattcgtttatgtactgaacataatcttagtacctcacagacagtgcacatgtactaacacctttcctgaaaccttaaaatataagaaatatagaaatacaggtagtttgtaagtctttgctcttggggaagccaattttggatttcctttgtctttttgtcctatcatactccttgaaaggggtagtaaaagcatttttctctttttccctctctgtagttcaccccagtggggcacatagttgctggattcagcaacgttctttcccaaatgattcttaaggcatgcgggtcactgaggtttatttttaaatccataacccagggttcagcagttgtccttactgaattcccgtgtggaggctttcagctgcccagacacccccacgtctttactgggcacattccagcagtcctaaagtcctgaccctcaggagtgaaattctggtctggtgtctcactcctggaattccttcatgaggcatggctatggcatgaatcaggtgtcagattggaaagccaagagatcaggtggcttgtgatcataatataaaaaatttctaactggtaaaatggttttggagacttaatgcgtattgaaagtttctttctgctttattgtcagccttagccgcctcttgatggtctctttagttcctttcctggattgtctaggagcatgctggaggcagtcagaacataaggagttaaattgcagtgaacttatggagaatgattaaacagtgattaagtgatattttaacttctgtttacaggggagaaatggatgtcatcaggaaaagggtttgtttgcagttttgactgaagtcatcttatcttagccagggctgcctgcccttattcaatttcatttttagctgcaaggtgaactcccccacacacttattttctgatgtccatctttgtctttgctcatattccaccccttcctttctttccccagaccccgtgttgctctaggaaaacttgctccactcagaacagagttggggtgggacttagctgcccttctgcatcttctgtttctggaagtctttgggatgaaccatacatgggagagtcaggatactggaatgccattgaactagtggaaaaagcactagataggcaattgaagaggcctgggtttgaattccagctctgctacttattagctatgtgatcttggacaaattacttaatctctgtaagtcttagtttcctgttctgtaaaatggaggtgataatttctacctgaaagaataggaattagagaggattagagttatatatgtaaagagcattgcctgacacacacacagtaggcattcaattatgtgtgatcaaagaggtcagagttgatggtagaatttagactgtctcggttagccttttgcctgtttttcccagtgctaattgtatagtttatatattatagtttaaagttatgctgccaggcgcggtggctcatgtctgtaatcccagccctttgggaggccgaggcaggtggatcacttgaggtcaggagttcgagaccagcctggccaacatggtgaaaccccgtctctactaaaaatacaaaaattagccaggtgtggtggcacacacttgtaatcccagctactcacgaggctgaggcaggagaatcacttgaacctgggaggtggaggttacagtgagctgagatcacaccactgcacttctgcttgggtgacagagcaagactctgtttcaaaaatgaaattttaaaaaaatgaagttatgctctcctttgcttttattacagtctagtaaggagcttggagggcttttagacccccataatctccatcaccctcctcaaagctgctctaaataaacaaatttaagtaaaaagtatttgttatataaatgcaggatgaagacttattatgatggcttttcctctttcaaccagattgcaagatacaagcctatttttaataaaatttctggttccctactctggtactaatgcaaagatttatttttcttagggatgagttgtggccaattgatataaaaggagatataggccaggcatggtggctcgtatctgtaatcccagcactttgggaggctgaggcaggtggatcacttggggtcaggagttcaaggccagcctggccaacatggtgaaaccccatctctactaaaaatacaaaaattagcagggcgtggtggctcatgcctgtaattccagctaccggggaggctgagacaggagaatcgcttgaatctgggaggcagaggtttcagtgagccgagattgcgccactagactccagcctgggcaacagagcgatactccacctcacacgcacacacacaaagaagatgtactttcttcttttgatacttttttacatatttgacgcatttgtgatagagaaatggattatgattattctatccttcttccttttactaaggtagaatgagccaaggtcagtggggcctgacggatctcagggcctttgctgttcctctcatccctggctatggttggctaagtctctttttcttaggtctcagggtgttcagctgttttgggaacttgttgaaaattgttgctttgcagtacaaaagacactctgttactttttaatcaatatctttttttttgagacagggtctggctctgttgcccaggctcgactacagtagcccatctctgttcactgcagcctctgcctcccgggttcaagtgattcttgtgccacagcctcctgagcagctgggactacaggcgcgtgc

SEQ ID NO: 33513 - DNA, 5187 bp, Homo sapiens
agaatggctttaataaaaaagagagtgaggatgtggagaaattggaacacccccaacattgctggtgggaatataaaatggtgcacctgctttagaaaacagtttggtggttcttcaaaaagtagagttgccacatgacccagcaattccaaagtatatatccaaaagaaatattatattcatagaatatagaaaacatatattcatagaaaactcgtacataaatgttcatagcagcattattcatagtagccccaaagcagaaacagctgaaacatctatcaactgatgaatggataaacacactgtggcatatccatacaacagaatattatttgtcagtgaaaaggaatgaagtactgattgatgctaacatggatcaaccttgagaacattagactaagtgaaagaagccagacacaaaaggcttgtatgattccatttataccatttatacataataggcaaatccatagagaccataagtagattagtggttgctaggggttgaggaggggcgaatgggaagtgactgctaattgatatagggtttcttcagggggtgatggaatgttctaaagttagataatggtgatggttgaacaactctgtgaacatactgatacttaaatatccattgaattgtttacctaaaaagggtgaatttatgttaaccaaatctcagtgaagctgttataaaaatattaggctgatttgtaggtatgaatagtatttgtctgtttgtattgggccccttattgctgccactgagaatcttgaagttgtcttgaatattttgcttcagaactgtcactgtcttgagcaggcaagttactgttgccccaaatcttcaaggtgagaaacaggtttgcaatcatttttttgcaggagaatacatgatggcactttatatcaggaagcgaacttttaaggtgagcactctgaagttgaagcatttccaagttttaagtgggactgtgccctaccttagttcttacttcatcctttaaactgtgtgtcacactggagtaggcagtttcccagccccatacccagctccaccaagatcctcacttctttcatcatttgcccatttttccccaggctatgtttgatcttgctctgaggccttctttcttgggaggtatagcgagagtagctgcagaaacctctgggtggcaccctgcccccacaggattaccaaagaatgacatgtgtggaagaggctcaggcctgtgttggcaggaagaagtgactcatttttcatcaaaggaatttcaaagaacatataatgacaggatgatgtcacaggagcaggtggagacaggaaccttgattgagctgctggaagatattaaatggtgtggctgcctgggcagtcagaatgattgaccagcataaatcacaggaaacatcacctgttttttagttcctatttcatgagccctggtgtgggcagtgctgttcatgtgccctcagagcatatggttgagtctatgcatgtcttgggtatactgtgtttgtatctgggtgagatggctcacaacatcctgtgctagtcatggacttctttttcatgcagggcggcgtgtgtgggttcctgcactgtgtgcctcagttctatagctagcagggtctgtgtcttggaaatgagcctcacatggtcatactggctggtttgaaggcatgacatttcctctgacatatttagagaggggaacttgccttgacatcagaaggtcagatctcagaattttttaccttattgccaaaagtaccctagttccatctagtattttggcaagagctagatctttgctcaaagcccagttaagtcttgtggtggtggtgtttttcttctttgagtagagggccctccaatggtgttgtatggttgaagctgataaggtgaggcggagtgtggtggcgggatggagagtttcagtcaggataagtcttagtatcttttcatatcgcaaagcagtaaagttggttaggttattcaggctgttatttatattaagattgtgaaagagtgctcctggtcatcatcatgcacctaccagagtctgtgtgattatgaggttggaggctaaattagccatttacacaaagataaaagagaggctagcattgataatattctgcctcaggtttcaggcctctcaaggaaggtcttaggagagatggcttagcaatatcaattgctgcctttgtgcttataactcgttcatctgaagatggcctggaaaaagggacttttaggctgcataggacaccaccaaaaaagtagaagatactacctctctttaagatgtatcagggctggtgctgggcgtggtggcacacgcctgtaatcccagcactttgggaggccgaggcaggtggatcacgaggtcaggagatcgagaccatcctggctaacacggtgaaaccccatctctactaaaaatacaaaaaaattagctgggcgtggtggcgggtgcctgtagtcccagctacacgggaggctgaggcaggagaatggcatgtacctgggaggtggagcttgcagtgagccgacatggcaccactgcactccagcctgggcgacagagcgagactccgtctcaaaaaaaaaaaaaacaaaaaaggaaaaagaaaagaaaaagatatatcagaagagctgggcatggtagctcacacctgtagttctagctactcgggaggctaaggcaggaggattgcttgagcccaggagttcaaggctatagaatagtgccatgattgtgcctgtgtagtcactgtactccagcctggacagcatagaggcccagtttctttaaaaaaaaaaattttttttttaaataaacccaagatatatcagaagcaagaaggaaaagttaaaaaacaacaactataatttgaaagggaggaaggaaagctttatttatttcttgacacagtctttaattgttacgttcttctggctgatcatgagttttgtttttagacaatattactaggtacactgtaggatgtaaacagatctttggagtaggataagaaggaaatgagtcagataacttacttcttagagaagggtgctggactttccgggggcttagttagcaatattcctcctccctgctagcagccatctccctgtatctcttcatgaaataacaaatcattagaagagatttttaacctgaagtgctgaaggacccagggaagaaagttccctagggtgtatttgatttgggagccccctgagggtaatctgtggtgatgctgtttcagaagtcaccacctgactcgttgtcagatgagtctgagcccaagactcgtacctgccacataatatatacaggtcctctctccctttggttatgagctaaaggcctttaatcatgaggtagaggagtggataagggagaaatatctgaaacccaattaaccagattccagaatgttaagggaatccatgtgggggctgggattctgaacatctctctctctctctctctctctctctctctctctctctctctctgtgtgtgtgtgtgtgtgtgtgtgtgtgtgtgttttggtggggggtgaaatgacttttttttttttttaatttgagacagagtctcactctgtcaccaggctggagtgccgtggcatgctcggctcactgcaaccaccaactccctggttcaaatgattctcctgcctcagcctcccgagtagctgggattacaggcacgcgccaccacgcccggcctagaaatgacttttttaggggctcacctataggataaaatccaaactcatcttgtcatttaagatctttcataatccagtccaactttctataacattaaatcaaaattatacatgttcttactttaaaaggttaaaatattactataaggcatatgacaaaaataatctgtattttccactatttttttttaagagacagggtctcactcttccacccaggctggagtgcagtggtgtgatcatggctcactgcacccttgaactcctgggctcaagggatcttcccacctcagcttcctgagtagcttagactataggtgtgtaccactgcgcctggctaatttttttttctttttgtagagttgggggtcttgttttgttctccaggctagtctcaaactcctggcctcaaatgatgctcctaccttggcctcccagagtgctgggattgcaggtgtgggcccccacacctgggccacatttctgtttcttttttttctgcacacacaaacagccagaatatatttctttctcttttactagtgattcttgatttttttttttttttggttttgaacattatctgttgatattctactacagaaaattagggtttagtttttttattcttacccccttaacgtacacactttctcttcccccttcttcccaaagtcacacgttattgccgttatattcagtgttcagattattgtgattatataaatattgcttaaaggtgagctatgtaatatactatgattacatttcctttttggaccaacttttaatttttcctggaattaataattgccatattttgtcacttgtttactgatctatgtacataccttcagactctctcatgggactctaagacttctctctcagtatgttgaaacatatcaaataatcttttagttcaatagtctatttggagacatcccccaggagctttctcttattcactctggatgggttgctcttaaagcctttagtaaagctgtcatcctggcacttcccttcactatcatacggggaaattccctcacctgtcttccctgttggatttcatgtttcccagagctgatgtcgtatttcatgatgtactccattttttcattgtggtatatcctagcttcctgagaaaggatacaagggaggtaaatgtttttgagactttgcttatctgaaaatgtcttattctacttttcatttgattaagagtttgagtatagagttctaggttgcaaatcactttctagcagattttttaaaaaattatttaaaatttttttgtagaaatgagatctcgctatgttgcccaagctggcctcaaactcctggcttcaagcaattgtctggctaatactgccttttaagtctctctaaggatattaattagaggctgtctttctctctctctctctctgt

SEQ ID NO: 33514 - DNA, 3083 bp, Homo sapiens
ctgatttttaagaaaattttaaaaattcactggatatgatgtatttggggtgattctttctttctttttttttttttttttttaacctagcagtaaagtacaggcccagttgggtcctacttaaagttttcctgtttgacaatttatcaggaattattattgcttaagatagctttgaagtaaattgtctgtgtcaaagaccttcctccacttctctcacttacctagctcttggcagctgtttccaaaatgtttgcactaactccatagattcatgtctgaaggattagatactccaggaacatctattgggagaaagtttaactacaactgttgtccatttttcaattaatgtgccagtcactaatcaaaaaaacagatgctgtcgttttcctcatccactacttgggacacctaaggatggatggacagatacttaagaggctgcctccttcttctgagattgggcttttcatcagggctgtgccacagggtgtgatgctgtgtgatagcagatggctctgcttcatgcccattactttttgttttatccaaagtagaagctgtggtccccagattttagagagtaagggcttaatcatactcattggcttttctgcctttgcctgtttctgcattgccacctggctgccattagagggaattcattacaactctgagtccctgcagggagctgagaggagctatccttgtgtttaggatgggacatgtgttcttaaaactgggccaggcacggtggctcccagcactttgggaggccgaagcaggtggatcacttgaggccaggagttcgagaccagcctggccaacatggtgaaactccgtttctattaaacatacaaaaattagctgggtgtggtggtgtatgcctgtaatcccagctactcaggagactgaggcacaagaattgcttgaacctgggaagtggagattgcagtgagccgatatctcaccactgcactccagcctgggcgacacagcaagactctgtctcaaaaaaagaaaaaaacaaaaaacttaaaaatggttacccagatttccttttatgacttgttcagtcagaggcagctgggaggatgcacgctggggaaagcattactcaccaggcacacatagtggccctgactgctggcaagtagtctgggctgtgttaagagtgagtcacctcggggaatggaaaaattgcaaggtactgaggggtaggagttgtgtgccagtgactgctccttttctgtctgctattttctctataaggactcatcacaaaaccataaatactgacgatcctgttgaggcagccgtgaagccaaccaactttatggtgataatgtttcccataaaaggaatgagctgactggacatagcattgttgccttctatgttacaggtgtatatagattttgacacaagcttgaacttgtataatgaaagttccatgtgtgagaatttcatcagaataaaagcaacacagttttctttgttgtttaaaaacttagtcttctgtgtctatctatctttgtccagtaggggtcactgagggttaggctctcaataagagaaacactaatctagtgataaatgagctggattccttgtctattgtgacatctttgtatattcagtactatgttttttaaaatattagagcagaaacaaaaggcgtgaacttgtattaagaactttatgggcgaagcgcagtggctcatgcctgtaacccgaggcgggtggatatcacctgaggtcaggagttcgagaccagcctggccaacatggtgaaaccccgtctctaccaaaaatacaaaaaaattagacgggcatggtggcgcatgcctgtaatcccagctacttgggaggctgaggcaggagaattgcttaaacccgggaggcagaggttgcagtgaaccgagattgtgccattgcactacagtctgggcaacaagagtgaaattccatctcaaaaattaaaaaaaaaaagaatatttctggacaaaaataacaatcctgggcaagattctggaacagtccccatagacagggcttcttttcttcgtatcatttttttctccatttctttaagatgttggctaccagagtttcctggaaaaagcttactagatagatattatttcattggggaaaagggtcaaaatgccagagagagagattacttaaaatggtaatatggctgttgaggttgactagatattcttgtcctttccctttttgaagcaatgctgtcgaagcctaatttgacttagtcattgagctgttcaataccacacattactttcacttaccttcttgcatttgccactgaggatgacttgatgccctgctaggaggtctcttgtgtggtaatcataataacaagagttggcattaatgagtcaatgtttaatgctttttaaatagttaatgcttactgtgtgccaaatatattatgcattttctcacttaatcctcactgtaacactgtgaagaggtaattttattatccctttttgacatgagataactatggattaaagagattaagtaattggttcatagatacacaactagagattgtgaaatcagaatttgaatataggtttggctcacaaattatatttacagccctggtaagagagagagggagagagagagagagagaggcaggcacttgggtttaagagtgagttttcttttttctttttttctttttttgagacagtttcgctgttgttgcccaggctggggtgcagtggcatgatctcagctcactgcaacctccacttcctgggttcaggcaattctcttgcctcagcctcccaagtagctgggattacaggcactcctgggtaattttgtatttttaatagagatggggtttcaccatattggtcaggctggtctcgaactcctgacctcaggtgatccaaccacctcgtcctcccaaagtgctgggattacaggcatgcgccaccacacctggccaagagtgagttttctaagtgctgtaccagagcatctctcactttattttctgcccctcctctttagtgttactttcccttttcttt

SEQ ID NO: 33515 - DNA, 851 bp, Homo sapiens
gcccctggctggcctttaatgaagtttaaagcatggatcttgacttgaaagagctcaattcagatacagaaatggacttagatacagagctttctaatgataggttttatatgcttagtgctaagtaaattgaagaaactttaaagtgccataggcatccaaaggtggctgacatgtccggaaaggtgtaacagaagcaagacttcagctggactttgaaaggaggttctaagttagacaagccccaagagaagagggtagatattccagttgggggaaaggttgctcctagtagagtaggacagatgcgaaaggtatgtttggaaacagtaagaagatcggaatggttgcagttgagtcatgcaggggagagtgaaaggtagatagattgtaaatttcttcaggtcagagaccagttctttatcttcttgaaccaccgaaaacgtagtgaataaaaactgcaattgaattttatagggttgtagagagctttgaattctaaaactaaagtgatcaaatccgtaaaggattttgaatagagagagaggtgatgtgggctaagtggtgattaggaagatttgtcgaaataggctgtttgctctctatttgccacagctatcaatttttaactccaattccttatcttcagttctgactgctcttctgaactctagaccaaagattccaactgtctgtgagaagatcctcctaacacctcactctttgtcttctcctttacccaatgtaccctcaccaaatcggtaacctctttctgttttcattatcttgaagttctactctcctcccagttgctgtggctagaagcatgagaattgtcttgaactctgcca

SEQ ID NO: 33516 - DNA, 1343 bp, Homo sapiens
agtactacttcagctagtaaaggaaaagctagaatcagatggttggaaggtaccttcaaggatgggaccaaccttcctcccattccctgcaaaatcccttctgtactgtctttgatccgtaattatccagcctctgcttacacctctaacctatgtcttccttttgttgaaataagccaaatatgcctctgactaactgtcatgcacttatccttattttctcagtaaagcatacttcatcctgagcagatgaaagaaaagcgtttgattgctttcacagagtgagtgccaggagcatttgctgttgggaattccctaggacagagctttcccaacatttttgtttcacagtgcccatggtgttttaagaaatttgtcatggcacctcaaggccaaaaaaaacagaaacaaaaaaaaactcctaatacttctacttgctaagaagttaggtccaaacaacttagtagttgttcatatggtgttcaacagatgtcactgtattttcctcaaaaatgtaaaatattctgtgagtaaagccatagtttggggactgtggctctttggaatcaagagtgattaatggccaggcgcagtggctcaacgcctgtaataccagcactttaggaggccgaggcgggtggatcacaaggtcgggagttcaagatcagcctggccaagatggtgaaaccccatctctacgaaaaatacaaaaattagctggacgtggtggcaggtgcctgtaatcccagctactcaagagggtgaggcagagaattgcttgaacttgggaggtggaggttgcagtgagctgagatggtgccactgcactccagcctgggtgatagagagtgagactctgtctcaaaaaaaaaaaaaaaaaaaaagagtgattaattaaagaactgacaagcagtgaccaagggtcagtttgaaattaggcaatatgagtagagctctgtgcctttctctgcagcttaaagtcaaaagcaaactaagtagattgtcagggatattcagtatggaggagggcaatgaaggctagaatggtgtcctttctctgaaaggagtaaaatcctacaactatggcaggagacatcttggagacttaacgtgatgtggtatttttgtcttagagcaaatgccattgtttcctgacggatttctgtggtagttggatctttgatttcaaacccaatataaagtttccttaataaatgcaaagtatagcctatgattctatgtatttttctgtatctcaatatctagctccttatttatcctctagttaccatttctttttttatctttatatgcatgttgttccctcttgtccatctggcaaa

SEQ ID NO: 33517 - DNA, 471 bp, Homo sapiens
aaaaggactctacaaaaccagttggttgagctcaaaaaccattgggaagagcttagtaaaaaaactgcagacagacaatccaggctcaaggattgtatgcagaaagctcagaaatatcagtggcatgtggaagaccttgtgccatggatagaagattgtaaagctaagatgtctgagttgcgagtcactctggatccagtgcagctagagtccagtctcctaagatcaaaggctatgctgaatgaggtggagaagcgccgctccctgctggaaatattgaatagtgctgctgacattctgatcaattcttcagaagcagatgaggatggaatccgggatgagaaggctgggatcaaccagaacatggatgctgttacagaagagctgcaggccaaaacagggtcactcgaagaaatgactcagaggctcagggagttccaggaaagctttaagaatattgaaaagaaggtt

SEQ ID NO: 33518 - DNA, 1820 bp, Homo sapiens
gtctgtgtagtctattcctcccttctaatcttcactgagctagaaaatgagataaacaggcctgttaaaattgcattagatatgagctaaaatgtacaaaagagtccacatgcaggcataaatagtgtttggatttgaggacaagtcatcttttccttttcatttaatccttggtttctagagacattctgacttttgatgttgctggaagatttcaaaaaattactgggcattactttatcttatttctatcctagtatgttgcctaatagtgctcagagttcaatagcacttagttgcttgtcatagccaaattcgtttcactgatttctaaaaataagccttccacctcagatactctggatgtgaaggctgggactggacactgatcggctgggctcttgcagagtgtgttcatcaacagtggactggtgttgacaaggcaagcctggaagaagagtgggagaagggagaagggtggtggagtgtcctgtgtgtagtccattgtcaagtcagtaggtagttaccataaaatgatcagtatccaccctcaagttggggatgcaaatcaaaagccctgttccacctgtccaccttgtagggaagtcaaaagctttggaaagagtttttgccttctcccagcaaaaatctttggtcaggaggggaggagcatattcttggctgaactcatgctgagctcatcggaagtgaaaacaatgagaggagaaaaattctgtgtgtcagttccatagtccccaggaggccgcataaagggaaggtctttttggacccattctgaggactgagtcattttcatgatttgagtgtggagttcctgggttaatgtattatagtccagccatagattaatctttccttactccagcagcagaccagatttataaagtatgactctgttttcagattcaaattatttttaataaggtaaaaacaaagatgaagataaatatttttaaaaacagcattagctgtaagttttcagctctttttttaatggaatcatacttttagcacagaatctgcacaagagaagaggatatgaatctgggagacggaaactctgctttaacccagctaactccatgggagctagaatagacagatgagttaggcctgtgaagaaccccccagtcttacttgggactgtacagtcttgctgatagatccatggatctgcagtctgtggggaaaattatttcttccttaaatgaatgtggaatactaaaatacattattcctaggaaaggctttccctcagttgcttctgaatgattagtaggtcctcactggcagaccagattctatcacatgggagtggaagagagttcctttccactcaaaccaggcagagatctcaggcttcctgagttaggatctttaccaggttcagctctctgttggaagtagaaaggaagaagccattctagaaatcactaatgagaggattgagcttgttttcagaaagctggaaagaaaagactttggcaaatctcttcaggaaattccgttttcctgaacaagggagtctggttattgaggaaaaggaattgtatgtgtctaacaggaggctaacaagaaaggaaggacgtttttatcactgaaacttgagccaaagaattcccctagagtgaccttcctgggaagggtaaaaaaaaaaaaaaaatatatatatatatatatatatatatatgttaagtctctgatgataacaagagattttcctcattttgaaattccctacgtaggttttacttgaactgagatcattctgaatcttaaaccaacccctcctttgcccc

SEQ ID NO: 33519 - DNA, 1537 bp, Homo sapiens
ttcgagacgagcctggccaagatggtgaaaccctgtatctactaaaaatacaaaaattagctgggcatggtggcacatgcctgtagtctcagctgtttggggaggctgaggcaggagaatggcttggacctgggaggcagaagttgcagtgagccgagatcgcaccactgcactccagcctgggtgtcagaaagagactccgtctccaaaaaaagaaaaagaaaagccctggaagacagggcccagcatggagttgaaagactgccagtttactccttcctttcaaatgattacaaggacagtatcagctcatgtacgtttttggcagttagtacacctgcctgagagtgagtcactggaggatagagcaaatgaggttagcgttatctacctgcccttggagagacaggaaatcacacttggtatgacctgtctgtcacctggaggtttaggtttccccagctttaccaagatgagtgggtatcctctatccctgccaacccccaccttgtgctgacccttccttggcctgtcttggttttttcctttcttccttaaacaaagctactccaaataggaactagggtccaaggaaataaagacagtatcctaaaatggatttctcaatttcggcactattgacattttttgggggtgggtggggaggaaaggggcagccactcacgccaccacctctgcctgccactatcaacattttggactggataattctttgttgtgagaagctgtcctgtgcattgtaggctgtttagcagcatttctgacctagtaacttcccagttgtacaactaaaaatgtctccctggaaggcagaattaccctctgttgagaactatagccctggaagaaattgccacctatacatgggaaacttagaattcaggtggaataggttactagttaaatatttatgtaacaagcagccttctgataatctgattatgactgtgtgtagtggcaacaaccacttctaagtcagctttcctttaagccaggctctggattctttatttttgctggccttaatctgtgtctggcttaacacctcctggtcactttccctggctggaatttacgtacagttgtcagttgttgatgcaggtgtttggttgatgatgcattgccaaagagaagaggaacttcctttgtggacatacttcagggagcttccttgttctgtgcctttaaggggagactacagtctctcagttgttctccacagccaaccaagagtttggctgctgatatttataacccttatgtgaccacccccacctccccaccccacaaagaattccaatgctctgtaataatcctctccacccccaccatagcaactggatgtggagaaggtgaaggagcctttaaggcctttaagtttgcttcatgttgaaccttttccagctcccttttaaaatattgccagttgtattttaaatatcagtgtcacaagcaaaatcccaggcttgcagccactgcatcatcttaaaggagcctcatgccccagtgaaggtag

SEQ ID NO: 33520 - DNA, 2597 bp, Homo sapiens
atctctgccaagtgattgcttgaatttctgctcaaacacctccagggtcaggaaagtcaccagtttaggggacactctattctttgaatagctgtgagaagctctttgttggttttaaatctcacatcttagtgtgccagcttaaggagatacccagaacaagtttccttcctcccacgtctcagcccttcagatacttcatgctaattacatctcctagaactttctctaggtcagacattattgggtcttgcactgtttgttcttcataggacagggtttctagtgtcttggcagtatacgaccaagaggacacaggattctggggcagtgcctttaaaagttttagaactaaaaaatattaaaactagaaagggtgtcaagacacaacctagtcggcctccccacccctttcagtttacagatgggcagagtcttttggatttgagtgggtagaattgatcagcagccgttgttgaagtgagaaatgaagtgtaaagcattttaccagagaaaggtcttttagttgcctaattccgattacaggcttcagcgcacttctcatttttgccaaggaccagtctgattccctaagtaagcctaaggctcagctcaaggtttcagtgccagatcttcatacaccaggtgttggtttcacttactgtttgtgtaaaggatagaaataacttttccataagttttgcggtatatattgaccacatggtccgacagagattccgaattttaatagatgtttttttccttcataaaatcagagaatggccatcacaaatagaacagagtattggacccgttcagagatgcagctgcctctggtggacagtttcctgggttgccctttgtactttctttgtttaacagtcaccaggtgaccaagtggcttttctaaaagccaaaggccgtggacgacgggattgtgagcgacttttctctagtgttttctatttgagatttgaaatacccatgcttttcatctggtccaaggaggctcaggtttccttggctgtgcgcaactataaaggacccaggtgtttggtcgtagggctcagctgttggcatccccacctcccccaacaccccattttcttccgtcattgataccactcaggtctgtgagcagagaaatcctggtgggagaattgaccaggacttgatatacttgagaagggggagagggaaggtagaatgtgcctagagttatccaataactttggtctctgagcgtgaccgaattcctttgggacaccgggaaagtgccgggtttaaggctggagtgttcttcggtccggcaaggggcgcgctaaaggtgacactggaaggagcagggacagcctttggcggcagagatggagccgagagcgatgcaggcggcctaccccagccggcgcgacctgccggcacacgggaactcgagtggccgtcgccagagccggctagctgggggagcgcgggcgccctttctggattcgttcgcctttgggctgggctcggagccgggccggttggagcgagacaggggcgggaggggccgggccagcgggaggagggcggggctttcctttgtcaggggatttgcgccgcgcagcccagactcgcgcgggttccgttcctctccttgcgccctctccgggggcggggcgttcccctctggccccggggcgcggtgggcgtgggctgcgggagccgaacggctggcgtcccgggtctctcgctccgaatcccgcagaagcccctccttcggcgcctcagcctccaatcctctccaccgctccctccactctcggagtcgctcctctccccggccccgcccccgccgggccccgcccccgccctcgtcctccttcctgtgctctccgcgtcgcgcgctccctggcttccagggggctgcccgggcggggcggcgcagcgcggcggcgcggggaagggggaggagagccgcccgccagccgagcacttccagcgagctagcgagctagcgggtcgcgctgcgcgggggaggaggactcgccccccgcccgaccctagcggagccttttgttcccagccagaagtttgcatgccgggaccgtgacagctgcgggcggggaggacggcggggccgcggggccagcggcgtggtggagaatagaggcggctgcttgtcatgcagcccacggcgtggcggctgcgggccggggactggcggcggcgggcgaggcggcgcccacagcactcgggactcagctgccggagggacaaactaacttcctgagcgcgggacctgaggctggcgcggccgggagccacctgcagcctgcggtgaggcgaccctggccctcggggcgcgcggcatggcgcggggaagcgggccgtgctgagcgagcccctccgacagacccgcggccgctgctgctgcccgcccgcccgcctgcctttccgaaggcctggcgcggggctccgctcgccttgttttgcagctacagcgcagggttggcctgggagccacaacaatgccatgatgttttggagacaggaagccccaagctggccccgaatgaaggacttcctgtgtttaaagttgcaggaatatccgccga

SEQ ID NO: 33521 - DNA, 1633 bp, Homo sapiens
agctctgcctcccgggttcgcgccattctcctgcctcagcttcccgagtagctggaactacaggcacccaccaccatgcccggctaattttttgtatttttagtagagacagggtttcaccgtgttagccaggatggtctcgatctcctgacctcgtgatctgcccacctcggcctcccaaagtgctgggattacaggtgtgagccaccgcgcccggcctttactgtatttctaactgttctaacatagaagtcactctctatatagggttcaagcaatattccctttcagcgaggcagaattgtgggccatttgtaaaaggaatccctaaaaatggtagcgtttgtgtgcatttctcaggcagcacaagttggaggaagccctgctcttttcgggtcagttcatggatgctttgcaggcattggttgactggttatacaaggtggagccacagctggctgaggaccagcccgtgcacggggaccttgacctcgtcatgaacctcatggatgcacacaaggtaggggtgaggtctgggctacattggagtgcagtgggtcttctgtatatgactgcctagggtcttctacatatgactgcctctgcccttctttctaggggagaaagagagcctgacagttgctttgtgtgtttaaacaaactgttgctgagattctgcattagtcacaacgaatttaccaaaattggtttgattcagatttggcaatgtgtaaacttcacttcaaggttgcgcctcttcctgtttgtttctctcagttgagtcacaaaatggatctaaattccaacggaaacccataagatagccatttccactgactcctaaaatggaaatgagtgattttttttttaaaccacttctgaacctaacaatcctaacaccaggcacgccaatatttaacataatctctatctgtcatgttgaattatgtaatatcctcctgtttcagcacaagcatttaactttaccttgaaattacaacagattcttattatgtgcacagcagatgtttttatttcccataattctggaaacgttagtataatggttaccattttacagatgaagaaactgggccttaagcaacttttcaaaattatgtatctcctaaatgcctgagctagcatttacagccacattttctggttgtttttttctttcttttttctttttttccccttgagattgggtctcgccatgttgcccagactggtcttgaactcctgggctcaagcagtcctctcatctcggcttcccaaaatgctgggattacaggcatgagccactgcgcccggcctggttgttttttcttatgcattgctctgcctccctctatgcataaaagacacatgattagaacctaccaagaaaattattatttcccagtggtttcttggactcaaaacattccttgaacaaacaaattctcctattttcttttctaggttttccagaaggaactgggaaagcgaacaggaaccgttcaggtcctgaagcggtcaggccgagagctgattgagaatagtcgagatgacaccacttgggtaaaaggacagctccaggaactgagcactcgctgggacactgtctgtaaactctctgtttccaaacaaa

SEQ ID NO: 33522 - DNA, 1121 bp, Homo sapiens
actggttcaggcagtcttttcccacattaagttcatcattcacaaatggcattcttcctaatagacaaggttattcactgtcttctctggtgtgactgtcattgttttatgtcttagttaatggcccagagagcctcctgaagtggaggatagggaagtaaagaagtgcatcactccataactctctaccaatgagatgggccagtaaggtatgtgaataaaaatgccacaccatcataatgaaaatggggacaattcaaggtatggctcttctgctctcttaacaaatgccaacttgactactaggcagataagcaaggatagaagatcactccttacactgatgagggccagtcaaggggggggtcatagcaaaaacgaaagggtaagaactgggcaaacccacagttggcctctggccaactccctactacaactgataacattgctttccacattcccaggttgggagcaaagtccactaagagccagggcagggccactaagcccttaccagcccacgtggcttcccttctcatcaactaaaggattttgtggcatctggtacacctgtttagcaagaccggcgtctgcatccggccataactcaaaatgttcagatggcaccagtttccatcctgctcccaaagtgccaaggacaagcagtacaccatccccatgtagtcagcattctcttgttcaaggactaaaattccttatctttaaaatgaggttcctacttaccctgctaacttagttgatatgattatcaaagaaaatcaagcaaatgatgcacactacgaaacatagaaaaaccttccactcccctttcctctctttttaagaccagggtagaagttcccaagcccacctccaaaatcttcaaaataccttcattctcaaggagaaaatgtggcagagctgtagagacaggccccaagacaaatggaaaacaacctgtctggatttcctctgctcattctgtagcaccatctgtccccacaccggcacgaggcagcaaggaatgggaaagattcaggtgctctgagttggcaaggaggggctgggtcaaattcctctccagactccagtgcttgggaaacagtgtaatgttaacctaa

SEQ ID NO: 33523 - DNA, 1877 bp, Homo sapiens
gtagtcaaggttagtaaaggtggcggagcgggcaggagctttacaatgtaaaactttcgcggggaattgtgtttcaaacgtcccgcctttttggccagcctgtgaggggcacaagcaaggatctctaacagcccagccccactgacaaggaccacacgcagtggaatgccagtggcttcactctaatcctgttttacagtctccttggtttccaaccccactaccagcaacactaataagtagcccaaggtcacccagttagcaagtggtagaaacaagattgaaactcgagtcatctgatgccaggtccgcgttctcaatctccgcaccctgctcccagcttcggtggcaacatgctgtcgtgatgccgccctcctcggcaggagggccctgccagaagacgactcccggggtcctccgggctcccacgcacgtgtgggcacagcttctactcaccgtcggccggctgctggaagttgacgtaggcatagcccagggagcggcgggtgatcatatcgcggcagacccggatggacagcacaggccccgcggggctgaacttttcgtacagcatggcctcggtgacgtccgaatgcaggtcgcccacgtacagggaggccatggggtagctgctggccgcagcgttcatctccccgccccccaccaccccgagccccgccaggaggacttcttatcgggcccgccgcaggacaaaggggcgccttcggagcccgggcccgcgccgcggctcacaggtggcaccggcgcggcgaggacgagctggagtcggcgggcttggagacgggacggaaacgggaggcgggggccggctcccacggccgcagcaccgcagacaaaaggctctccgcacaatacggccctccccgcgactttgcacttctccgcggtcctggtgcgaagctccaaatttcaaaaaatcaaagtaggaaaaaaattaaacggggaatccccttccgaagggtaaaaatcctttaagaggcgaccggacgctgcccacggcggcctcggggacacgcgtttctctataaatataggcctcgggctccggcggtttaagattacaaccgccggggcagagggaaaccaaatctttgtgggcgccgactcggcgagccccgggcgggcggcgaagggcagcacggacacgtggtgcgccggggcaggcgcggggcgcggggctcggggcccgagcggggggagggcacggcgggccgggcgggcggctcacccccggaccgacggacggagaccgacggacgccaagcgctgcggcggcgggcgcggggcaggccggaagcgtacgaaagtgacttccccgcgggttctccgaggattcgttttttcttttcctttttttttttcaggattttgaagcgttttcagattttttttatctttttctctttttttcctcaggctgcgaagcccgaaagcggcggaggcggcagcgacccggggcggagagaggcggccgagggagccaccgctccatttatacccgcccgccccgggcgctgctggtcgaagggcgcctcgcgacctgggcgcagtcgtgcccgcccactcggcccgggggcccgaggcggggcggccacgcgagagcgacccggcgcggccgcgcggcgctacagcgacccctggcgccgggaggaccgcccagctcgcggctgcgggagaccccagggcccctttctataacaaataaatcttaacaccctcccacccatcacccgggaatggaacctaggagccatttaacctgcacacacgcatgaggtttaaaattaaatggtatggggctgggtgcagtggctcacgcctgtaatcccagcactttgggaggccgaggcggatgg

SEQ ID NO: 33524 - DNA, 1326 bp, Homo sapiens
gaactcctgacctcaggtgatccgcccgcctcagcctcccaaagtgctggggctacaggcatgagccaccacgcccggccaagaaaatatagtttttttattttttccaactatttcaaaaggtaaaattcattcttagctcccaggttgtccaaaaacagacgcgcaggatggccaagcaccagagtttatcgtttgcccataataatcgggttgattcggccaaggtttccctcccccaacacggtgcgcactgggaagcgcgaggaccacgtcccttggtttaccactgcgcacctcacaaggcgcccagtgcatccgggtagcgggatgccggttggaccaacgcgagggtgggcggggtctaagagctaagcgttgggggcggggcgggacagtggggaagaggacgggtcgagtgctggcttccggcggaaaagcgcgcgagcaagatggccaccaccaagcgcgtcttgtacgtgggtgagcaggaggggttgctaggcggagtctgagtgaacgcgacccccaagggtcggggcgtggggtgggacgcatctctgaaccaggaggacggcgagctgctgtcaaggccgggtctctggcggtagtgctggcgatagctctggctgtgcttaaactccttccaaggtttcccactgtcctcaggaaaaagtgcagacttcttagcagtacgcacttctccagcttctttgctttgcttcccgattcgctgggtctcccgaaaaatgacccacttgcccccaaggttcaggttatttcacacctttgggcctctgcttttgcgactcccttgcagtgaacagccttgccacacacctcaggtgcgtgaacccgagacggaatgattattctgacttcctagcccgctgagctccagcgggccccgaggagcggtaaaggagtattatggcccttcggatcctctcgttcatttgttttacaaacattcagtgcagcgacggctcagccccagcccctgccataaaggaaggagttcccagactagccagaaaaaaagtggaattacctcagtagcacacttttgataagcgctgtagtgaggatggatcatgataatatgggcctggctgcgggacaaatgacccatccatctggagaagcgagggcaaattctggatgcggcgatgccagagctgatgagcaggagttagctacgtaaccgaagcagaggcaaggccgttcactgcaagggagtcgcaaaggtgtgaaatagcctgacacttgggggcaagtgggtcattattcgggagacccaggaaattaggaagcaaagcaaaaaag

SEQ ID NO: 33525 - DNA, 2119 bp, Homo sapiens
aaaagagcacctgctttgcagtcacacagacaggggttcacatcaaagctccacgtgggccgtgtgacctggaacctctctgggcctctgactccttgtgtgttggatgggatcataattgtacctgcctagagagctggggtaacagcattacacagggcccatgctcacgcaatgagtgagtaaaaccatcttccaaaggaagagggcctccagaggcagatgtgggcatgggcaccgcagcctggagtcgcagctcctccactcctggcttggacctctgagcctcacttcctctcctgtaaaacacgcatgagacacacctgcctcgtgtgggcctgggccgcttgctattactaataaaacagcagcaaccacaggacagcttcacttccggaaactccctctgtcacgtgctttgcatgaatcctcacaccgtctcactaggggcgctctccccgtttcaccagtgacttggtgacaaccagccttgctcacgaagcgtcagccgtatcctttctgtgtgcagtggggtgtgggttgtgtggagccgcggtgtctgtggaattcacaggctggggccggaatccatggcccccgtcgccgctgccaccccccaggtgctggggtgacctgatccagggttggggtctaagctgctggggggttggagtcttgggctctggcccacgtccgcctctgattggttctaccacctgagccggtcactgaccctccatgggcctcagcttaccctatggtaaagtgagaactagggggtcagactccttgatcaccaagatctctgaccacagccaaggctaagggaagcgcaggaaaacgtggggctcgtccaaattcccagcctctctctgccccctggtggacgccggcagcctagcacccggggggagatgaccccgacactgtgtgacctctgccaaggcacccatccctctgagccccagttcccaccggttacataggaatgattataatacccacctctttgggcaattgtgaggaggcaaggagataatacatgcaaagtgcttggatgggatgggtactagccactcaacagaaggcagatcctagaatggggatggcaagtcctgtcatcagtgaagaatgtaatgactgcaagcttagatgacatgtctgttactggaaaccagagttgtttacttaagctgtaaatgaactcatagtccctgggataattatctcacctctggataaataaactcaacagccttatgtattttattaatttttcttaaaaaaaagcttaaaatatttttcctttgatttgttctctttctttggtttctgactttattatgtcctttctttctgcttaggcatttgttttattgctcttttttcaccaactcaaactgaatggtcaccttaacagttttattgaggtataatttacacaccataaaattcacctgctttaaggatactattcaatgatttttagtacagttacaaagttatgcaaccatcatcaaaacccaattttagaatatttcaatcacccaaaaaagaaatatcacacccatttacagtttatcccctttcctgcccccagccttaggcaaccactaatctactttatatatagatttgcctttcctggacatttcacaaaaattgatttacgcaatgaatgagtaaaaccgtcttccaaaggaagagggcctcccaaggcaggtgtgggcatgggcttgccacaatatgtggcattttgtgcacttaatgttattgaggattaatctatgttgtaacatgtggcggtattttgctccttttcattggcattctcttgggggcttgtttatttttacatgtattgttttccactaaatgtacttaaatatataaatttgtctgtaagtgctgctaaaacccagctaagctgtgccccaccaactttaatgtagtttttccactattcagaagtaaatatttctcacatttctttatgacgtccttctccaccgaaagttacctactgtaaactaaaaataaaatcctaagtcccccaccaactgaatggatgccccccttggccaaggggacaccagaaaaaacttaggaatggagttcc

SEQ ID NO: 33526 - DNA, 910 bp, Homo sapiens
tggcttgggtgatggggctggcagtgagactattacaatcaggactgtggatagtgaggagggggtggttggggaatggtgggatggtaacgtgtcctgtcttggacatggtgagtctgaagtgtgcatgggacatccagaaggaaggtctggaacctagggcagaacttgagagtgatcagtacacacaggctccaatctgaaaactgctgggagaacatgtggccaaggacatgggtttccttttttggctcatactctgtgatgtgagaccaaaagtctctcctaaatgcagctgttgggcacttaaaccaccctcctagcacccttccttactcacttccctctttgacagtgaatagaagccacatagactcttccgaggagtacccatgtgtcacttctgggacaggcagcctcactcctgccagggccgtgcagggcagtccacaggccaaaggtccaagtagattcagcgctgctgagttgcttctgggtaagctctgctggctcctgaagagccacccctgtcccacgggtgcatgcgaagacgctttttagtgtgtgagccagtttaactcaagctatacctgtggacagcaccaaggtatttctgatagtaacagaaatatctgaggggaatttcccatgggtcaaactgaacatgcaagcactgaagacaaagggcacgggataatagtcacatatcattaaaaaacaaacaaaaaagcctgctcatcctgcagaacaggtgggagccaaagcctgagagtagatgagatcattcagggagggcttgcggcccaagagcagaggagggcccaggaaaccgatttctctaaggtgggcaaagtgagggacggggaccatgacatgttcatcttcatatactcagggctgatacacagta

SEQ ID NO: 33527 - DNA, 913 bp, Homo sapiens
acttcacaacccctatgaatatgagatgttactttaatatttaatctgtataaccatcaatagaacaggtccttcattagatgttctactatgctggaagtggtatcactcctaatactgcagaaaaataaacctaacatgaggctgcaattccaaaacaacctaaaaaaacatgaccttgtgagttcattcactacctctcttccctaccagatagtttccatgtgcaaaggtgagctgatctgtgagacagttaataaaatccacctcccactgggaaagctgctggggcagaacacggcattgcataatcagttatgaaacccaaatcacaatgtaaacaaactgcatgccagaaaaaatgtatatgaaaactgttatacaagcaaagatcaaatagaaaatgaagcaacattatataggccctaggggaaaacgatattgtactatgcatttaaaatgtaacaaagtaggctgcaattatttattgagggagttgaactgaagcaataactcagggcctcccaacctgctgagctagaacaacacatcaatctccactaactgctattaccaaatctctctcatcatctgggcaaactgaagaactgactgctctctagttgtaaaggaatttggggtcagcgcgccaggctttcttacctggccactttgcgtttgtcatgtggatgcagcttggcagccatttctgggtccacctggcttaggcgtttgtgaagtacaagaccatcctccttttcaagctccacttttcggtcaatcactttctcagtgcccatctcctggggctattaaatgatggtttagaagtatatttaattcaaccaacactgagacagtgtatgtgccaggcactttgctaactgtcaggaatacagaataatcagaagat

SEQ ID NO: 33528 - DNA, 1133 bp, Homo sapiens
tcatgatcccatttattaagcactataaccttgtgcggtaggtgacattttcctcacttcacagatatataaaataacgtccaaataaacgacattgttgatccgaagtcacatggccaatggcagattcaggactagaatccaggtctcctgactgtcaaccctattccactcccccagcagacaccataggtggtatccaatttatcctgatctcgctgggttagggttagagttacaacaaaagctctggaataatttttattcaaaagatatttactggatacctatctgtcgaccttgtaggttcaaataccatgtcttccacttattcgctatgtgacatggaaaaaatcgtttcacctccctaagccccaattcctttctccataaaaggagataatagtatctaccaaatagtaacgtcgtgagaagttgatgagacgatgataagggaaacatctggcactgtgtctggcatgcggcgggtgcttagtaagtatgggctccctttacctaccccctccgcccctacaagcctcggggttcaccctttaagacctttgccacagggtgtccacgcggcctccggggtccccaggcgcccgggccagccgcactgccatacctgcatggagtcagcgctgacgatctcaccgccgagccgctggcctagctgcaacgccagcgtggatttgccggtgcccgtggccccgagaatcactacaagaggtagggtccgttgcaggcccctgagcccactgcccacgggaactgctcgtgcagccgccacggacgccatcttatggcagtctgcgcttgcgccggagcagctgtccccatggcaaccgtctatgcgcctgcgcggatctcaggctttgtagcgaggttgcttagggaggagggagcggcaggacccaggcgacgtgactgcagtcaactaactggtgtcagaacctcaactacccgccgtctttttttttttttcttcttatttggagacggggtctccctctgtcgcccgggctggagtgcagtggcgcgatcttggctcactgcaacctccgccttctgggttcaagagattctcctgcctcagcctcccgagtagctgggactacaggcgcccacca

SEQ ID NO: 33529 - DNA, 458 bp, Homo sapiens
ttgagcccctttgtcaggaaggcttccattgtgtggacaatcgcattatttctccattaataaacctgaccattcagccctcctggccccaaagcccatgattggctgattacgctgtgtttggacttctgtcttacccagcccctagcccctattgggtgagctctgctgccaatcactttccccaccccccgcctcattgtttgcaatctgttgcattttgttccaggccatgtggcctgtgagtgaactagaagctcacaaacaggttcaggttaaagggtaggttagaaaatgattcagcaggcttccctacatcccaaacctttaattttcagtgttaagcctcgtggctcaggaagattctatctaagaaagaaataatttaagacaccattctccctttcagagagtagtgtcttactctatccagacaaggaaatgtcatcagcaggaca

SEQ ID NO: 33530 - DNA, 2128 bp, Homo sapiens
gtttcctagggaaagaggcagcagcaaaaaaacttcaggtttggagtgtctcttaaggtacccccttcaatcccttacagtccaaccccagtattgtcctctctaagcgccaaccctcacctcaaatcccttgtcccctggggctccaataatcatcaaagggaggctggctcccacgccacttttccaaactgtttaccaacacacccacgtgccagacagacacggttggggactacacgggcagcttcagccaaagagaggcggagatggcccaagagcttgagaagagccaatgcctgacctcaggcaggggcagagctttggccacccatggggtggccccctcttggatggctcggggaggtccttacccgagtcgcttgggctctcggacccggagcaggcctgggtcttgggttcgcccagcggacagggggcggcgggcgccgggttgccggcttcgaggctgggagtgcagtccggggcggcggacgccttgggcgggttcccccggggcgcgccaggagcgagccggtcgctcacagctctctccagccgttcccgggccgagaagccgctccacatgcagtcacggcgtatgatggaggcgtagttcctgccccagcctttcgagtggccccgggattccgcttcgtctccggtgcaccctccgggccacggctccgggggaccaatcccgggggccgggtcccctgcgccgggacccaagccccagggcggcgacgtggggggcgatggcaccagctcgaatttcttccagatgtcctcgctgggcgccgtggagcggtagaaatcctccccgcagtcatagtcgtagaaatagtgctggtacgagtcgtagtccatgtccgctccctgcgggagggaaggggggacgtgctgaccgggtgccggccgggcgaaggaggtgtccccgggtccctcggcacagtcggctgccgggctctcgttcctccccaaccccaccagcttgcagcctgcgcccagtcctcgcgtcccgggaagccgggccccgggtcagagtggtaggggaagccaatcgcagcgcgcggacccgactgtgggcagcgagttcaaagcaaactttgccagcgccgcccggagcgcagctcccagggcccggcggggccgggcgggggcgcgccgtgcccagaaggcagcctgcagccagcccgcaccgcgggacccgcgcccgtgccctggccacccgcagcctcacctcgctccagccgcccgccacctggagcggaccggctccccgccggctcggggcagcccggcagccagcacacacgcacatgcgcgccgccgagagcgcggcccgcactcacaagcgcgccccccccgcgcgcgcgccctccctcgctcgcgcacggcggcccggacgctctcgggatcggcgcgggagcgcgagctgcaggcgcattgtttcctgactgccttatatctcgtcgcgcgcccgggacccagggactggggggcgggccctatgggacaaaccccgccctctccctgcctactacgggcagtcgacaggtggggccggccccacctcctggcagcgctcgcccgctccgttcaatccccggtagccccccaaataaattgcacgctggggagcgcaaacaggaggagggctgatgcggcccggcggccgcttggcggtgccagccggctgagctaaaccgtgctccttgcccactccgagctggggaattagggctactccccgccccaccctgcgcgcctactttccccggcgcaccccgctgggttcaggtgcgcccgagccgccgcgaggggtagggggagggaaacgcgccacctggcggccctcagccctgaacttgggctggtcccggcgtccgtctggtcacccgtcggcccgtttcttgagctcagtggcccaagcctggatggcatcgaagcgaagattccgggatttagagcccgaaacgtaaccttcctgagcttcagtttcatctgtaaaatgaagggatggtaatgcttacctcacagggttgttgtgaggcttcagggaaataagagcatctagggaaggggtctggtctaggtggagaggcagacggcgctggcttagccc

SEQ ID NO: 33531 - DNA, 2205 bp, Homo sapiens
ggagttcaggctctgtgtctctggttttccctggggtggccccacttctgcaacggcctcttgcctccctgacacctggatgtctttctagccttcaccctctctcacactcatcctccaaatcatcaccaagtcctgtcagccctccccttctacagatcttgcgtctgtccccttccctctacccctggctcactcgcccagcttgtgcttcatggtctcctgccctggctatgacgtcagcttcctccttggtctccctgcctgccagttctcccacctccaccctgccccatctctcctccacatcagcagccagagggcccttctaaaacacaagtctgaccttcttagtgcctgctaatgatatcccattgttctctggctaaagttcaacttcccgcacaggtcaccaggttctgtgggctcttgtcactgacctcagcagcctcatgctgactgctctgctggcctgctgtgcactctcaccaaacagaatgctgactctccctcctgggaacaggccctgggctgggccttcttgcctctgggccttcgttcccatcaccgaccctgcccaccacagtctctctcacccatctctgatgactgaagttctggccacccttcaaagcccagcttcatggagtgccttttggccagagctcggtgtgccttggattaaagttctttgcgttcctctctctctcccctactgagcagtttgagctcctgtgtgtcccttcttctgtgcccggcgtggtacctgatatgctgaggagttctgagagtgtgtggagggggcacctgagcctctgtctcccgtccccttcatctctggctccttgccctaatctggatctgttccagcagcagcagcagttccaggtttggctcctggctcagcatcaacttcgattctagctctgacctgcctcaagctgtagttccagcccctagcctggcaccagctttggctcaatatccaggactaatgtgggcttagcctatggcattgggaccaaacttataacccatctgtttgcctctctcctgagcccagtgcctgggctcaagtttcctgcctcagtgctccccacttagggggaggcaaggaggcagaggcccagaacagagccccatccagccagggatccttacccctgccctggggtcgcctggctgcagcatcccagcccaactctagggtgctggccagtgctgtaggaacaggtagtccctggtccaaagtaagaccttaccatttacagtctgtgaggctttgagcacttccttggactccagttctcttgtttataaaatgggataatatttggtatgagaatgacaggagacaatgctgtggagctctgggtacagtgcttggcacagagtagatgtcaataaccgtgagggcctttcctctttactgttttcccggcccgttgggtcagctcctgtgggttccctgtacattccccagtgcctgttgcataagggcttttcctgccactgtgacattggtaggcctggcccagccttgattccaggctgctggctgtgactgttgtccctagggcatcttgggcagggctgaggcatcacactggatctcctgcccagaactccatgtcctcaatgtcaggggcaaagataggtccatgaggtagtgggggaaaggttggtctcccttctttgctgtgggctgaggatatgtatttgagttggggaggtaggagtgcttccttctcccctctaactgcacagctgagtctctgccccatcaaagctctgaagacaagggttcctatgaatatgagaacttggagatccttgccccccaaacataggaaccaatattgatgggggtctgggtgtaatgttaggtgagtgtttgggtatggatgtatgtgtgggatgtgtacatatggtatggtgtgtcatgagtggaagcatgttagactatcatgtgtgtagtgtgtagatgtctgtatgtaatgtgggtgtcagggtgggtgtctctatgtgtgatgtgggtagtgatgtgggtacatgtatctacatgtagcatatgtgtagtgtgtgtgacttttgtgtgtgaataactgtataactgtatatctggagatagatgaggacctgggtatgtggtataagccgggggtcctcaacccctggcctgcagactggtaccggtctgtggtc

SEQ ID NO: 33532 - DNA, 1312 bp, Homo sapiens
attgtgaactgcacttgcaagggatctaggctgcacggtccttatgagaatcgaactaatgcttgatgatctgaggtggaacagtttcatcctgaaaccatcctcccgcaccccagtctgtggaaaaattgttttccatgacaccagtccctggtgccaataaggttggggaccacttgtgtcaacaatatgtttggtgtgtctgcatgtgatgtgcatctttgggagaggggacaggagccactgggagctggagggctttgccagttggtggacaggtgctagaacatttgagattccctgctgaactctctgaggtgacgtgggccagggtcattgtccacttgctgcaggagcagagaagggcagtggaagcagagccacgggggttgagttcattcctccagaatgccaggcaccctgtgcccagccagctgccttgccctgatgtctgcaaacacatcagggaaataaacacaacctttggaagtcctggtgatgtgtctggggaggagctccagctggcagtccatacgggctctattcccttccccactgccctgccattgaccagtggctgaggctggtggggccaatggccttaatgccactagccagtcctagactcttatctcagcactttagctaagctccagagcttccaggacctccttgctaaggggagttgtcctaattgcaaatcagcgtttcttggacctttaggcctgtgagggaggagagtttagggacttctagggccaagccatacccaagctgcctcctctaccgaagaatctaattttagcccaggctggccccccagtgctccacctctaggtgtgcctctttcctcagaatgggccatgcttcccctctcagaatgactgcttaaatgaggtgatcttgttggtgtgtcgtactacactccaatatgtacttcatgctggagacacccagaatcacttgcatttccaaaaacgcactctgtagcctactgccaaaaacattctactctgcctggctaactttgattcatctctcaaaattcaggttcagcgtcagctcgtccgaatgctttctgaagctaaaactactagtttccccctaatatccatatcatcttgcttgtccttagtcataaaaggctgatttttagctacacacatggttggcctgcagtaaaaaccgtgttttctggaattcctggagctaggtgtaactaagtgctagccaacagattgtatgcaaagtgttttgtgcaacttccaggaactgtttttaattaattaatttatcttttcttttcttattc

SEQ ID NO: 33533 - DNA, 1882 bp, Homo sapiens
aaatacaaaaattagctgggcgtggtggcacgtgcctgtagtcccagctacttgggatgctgaggcaggagaatcgtttgaacccgggaggcggaggttgcagtgagctgagatcatgccactgcactccagcctgggggacggagcaagactccgtctcaaaaacaaaaaacaaaaaacacccaatttcaccaaatagtgtttttctggctctgcaggaccctgcctccctcaaattccttctggagagctctgggaatcccagaggcttttcatatatgcagagagaattagctcatgaggccccctccccattttccccttttcctgctccaggtctcagtggagttgacccttgtcaatgccaatacccacagagagccctgctgctggagaagcttaaagggggcctgatgtgacttctggtctcttcctcggtctgcactgaagccacgactgcccaaagtcaaggacactagtattgagggaagtagtggtcaagggcccagtgttctagaatcaggagatccaggtttccaacctggctctgcagttcactagttctgtgaccttaagcaagttgattaatttctctgagcctctgcttccttatctgcagagaggagggtaataaagaacctacctcacggggttgttgtgaagttagaatgaacaaatgcatgtacaccacttagcacggtgcctggcatagacagagtggttaacaaatgttggtgattatgatttttattattatagtcattaattcatttaacaagcaagctctaggcattctcccacatgtacccagtacgtcagccaaaatgtatttcctgatatttcccaacatttaacatgtttcctcatcccgctgtggctttgcacatgtggtttgttctgcctggattgcccttcactccccatctgcctggcaaacttgccctttgagcctcagctaacgcctggtctccttgaggcgcttgcctggacctcccacactggatgagactcctcctctggtcttgcgcatgaccagggctcattgcacaaccccagaggagacgagtcatacggacccccagagttgtgcaatgtggcaactttgcccatatttttcctctgttttcttctatcataatttttatcacactcttactgcaatgatttatttacctgttggtttctccctcagactctgaactcctcgaggactctgacacagagtcagggctcagtaagtgcctgcctgaatgaagggatcctggcccagttcctgaacccagaagctgcagcctggtcagggagacagaatgaatcaacgtgagacatgtcaagaactgagcatgactagaggttcacacccctgaggctttcctaggagagaccaacagagctgtaagggaggatgtggtggtcagagtgggagactggagtggagatggaaagaatgaggaggtacttagaaaatccaatagcggtcgggcgtgatggctcacgcctgtaatcccagcactttgggaggccgaggcgagcagatcacctgaggtcaggagttcgagaccagcctggctaacatggtgaaacctcatctctactaaaaatacaaaaaattagacgagcatgatggtgtgcacttgtaatcccagctactcgggaggctgaggcaggagaatcacttgaacccaggaggtggaggttgcagtgagccgagattgcgccattgcattccagcttgggcaaaaagaatgaaactctgtctcaaaaaaaaaaaaaaaaagagaaaaaccaatagctaacacttctggattgttctgcttaggggtggaagaatttcagccccctcccccatgattttcatctggtctaaggtaaagaaagtaca

SEQ ID NO: 33534 - DNA, 2577 bp, Homo sapiens
agagcagggctgttgagagcaactgctttggtatcggacaaaacctttcaggcctggctctgctacataacagttgcttcacttctccaagtttccccttcctgtgctgtaaaatggggataataatagtaccaccctcacttggtggtttttgagggccgaaagagatcatattaagcatggaggaagctatccataaaaaggccactgttgtcatagtgtactagcgggcgtagccccggcttctctccacgacttgggagctcccttctggcaggggcagccactggattgcctcatctttctccccattgcccggatgccaagggcaggacgggggaatggtgtgtcttcggggatgagagagaggcatcaggagggaaagtgtcagcgtacgtcctctaggcttgaagaaggagagaggccctgactccagattttaaagtgggcttcagagcccctacctttcctaggcctggggctcagaagtcatgggtggtaggcccgactcggggagagtcggaccttggggacctcggggacctcgggcagatcggggaccccgggcagatcactttcagcctggggcctcggtttcctcgcgcgtgtctgggaggtctcgcggcctgcttctcggattgctaggagccagcgcaggcagatgccggttccggggcttggagaacgtggctcggtggcacagagccgccgggcgaggcgggggcagggaggcgggcgacgggattggctggaggcggggcagcggggctcggggattggccgcaaccgagagggctgggcagaactataagaggcgcggagggggcgtgcagcagagtgcgttcctcgtctgccagccggcttggctagcgcgcggcggccgtggctaaggctgctacgaagcgagcttgggaggagcagcggcctgcggggcagaggagcatcccgtctaccaggtcccaagcggcgtggcccgcgggtcatggccaaaggagaaggcgccgagagcggctccgcggcggggctgctacccaccagcatcctccaaagcactgaacgcccggcccaggtgaaggtgagggcccggcaccccgcgtggagggcgaggggagggaggaggcggaaatgggggatcaggggcgtcccggggtcggcctggtcaggggaccattgggatagccagggacaggaagcctacgagccagagaggacctgggggtgccctgggacagggggtgacggagaaaagctgtgggcgccctcgcccccctttgctcacccgcactccacgctctgcggagaggctctgccggcagccccatgtgattccccgctctgcctagccggtttccattcttccgtgttgagcggctggggcttgccgccccaaaccccagagatgaccccagaaatctgggaaactccccttggttccccatctctcatcccctacctcccactccacccacctactcttgcgcctcaactctgctgttagggccgctcaagttcattcataagaacaagagctctgctcttaaaggagccgcgtccctcaggcatttgtctgaatgtggatgttcgcgcgggaacggtgctttgcgcatcgagaccatcgaccacatccccagccctggggacttattgaaggaccaaataaaatgaggcggccccctaggaaaggatctcaggcaatagataccttcgtgggaggtgactgccttttccttttaattttattaactgatctttggaaggagctgggtgagcaattatgctgttactatgtatgagtaatatctactttccctgggcaacccaacctccctagtgccccacccggagagggatcaggcctgaacctggaggcctttcctcccgtctccaaggtcctctaggagctcaggggtggagggcgatgggtcgggaagctggagagtaggacagttcctgggtccgcctgaagctctggctgcctatagtggtcagggatgctctgggataggtggaacagctgcgcctgcagccagctgggccgggcccccgtagctctctagagctctcaccaggagtaggcaggtggatcctgtctctgaggcagggtgggagcctgggctgggctcaggcagctcttggcagcaagcggattttcaggttgtggcagctggtgccgggtggggacaggtcggctgctggagcatgctccccctgaaacctggaaaggagcagtgcctgaggccttgggaggagttctttagggatggtgggctgataagtttccttagaatctccaggagggaggtggcttaggggctactttcacacaagtatggattccccttttccatgttcctaagaatggagaacacctttcttttgtataaagtgggatctcggagatcgagaccatgctggctaacatggtgaaaccccgtctctacttaaaatacaaaaaattagctgggtgtggtagtgggtgcctgtagtcccagctacttgggaggctgaggcaggagaatggcgtgaacccaggaggcggagcttgcagtgagccgagatggcaccactgcactccag

SEQ ID NO: 33535 - DNA, 1279 bp, Homo sapiens
agctgagtcacttcacatctctgagtctcaagtttcttcatctaaaatggggataatagttatacctatctcacactcacagagttgtggtggattaatttttttttttgacgttcttagaacagtgcctgacttaattctacttcataaggttgatgtaattttgagacttaaataagttgatactaaaataccaagcagtgtctgggacactaagtgctatgatgaccacttcagggaagctcagcaggagagctggcatgtggtccctagtacaggccacaccaggggaactgcagaatcctgggctgggaattagacttcaggcccagcctgctgcatctctacctccatgtgggaccctccaacagcacagtgataaataatttggcaccccttcagggtggctcctggcagagcaggggatggggtaatacccggaatggggtagcaaacccataacctttggcaccttggatgacgtaaattaccttctcccttggtacaaagcctgtgctactcagcttcaggggcaaagtaggcggaggtggtgccacggatcggatcagacggcaggggagacgcacaggataggctgtcaggcgggggctctggttccctccaggacatcctgcttcagggtgtgggggggcatacccctttcatctccagcccatccaggcttaagtgggcgccttcctgccccaggggcgcccatacctggcctccggccttcaaagctcttcccgcaaccccttcccccactacagcttcctttcccacgaggccccccacccaccccaatcctgccagcccctggctaaggcccaggttggagcctttgatccagtcttcagggccgggggcaggacagcctgccttacctgtgcaggctgctcagggctcccccggcgccagcccgtgagacttggccctgtgcccgcctccctggcagccagtagaaggggaggctctgctgccacgtcgcctcatgaggcccagccaatgggaggcagccgctcccagggatggtggctgcaggccgggttactcccagttacactgggttcctcagcagcagctgctcagctgcttatgagcagaggatggagtgtttgacaaaggctgatgaggagctcttgttccctgaggagacagagtcaagagaggtggaggtgggcaggccttccctgtggcatgtaggaactgagcaacttcctgggcaggcgtggcagccagtttggggaagttgctgggggcccttcaggctggtttctga

SEQ ID NO: 33536 - DNA, 3111 bp, Homo sapiens
atacattactgcttccgtttctcattacagccccattaatattccccacctgatgaggaaactttcttcattctccttcctgcttcctcttctctctcctcttcctctagaatgcgtgtatggtctatgttccttctgtctctaatccagaaagagatttagaataactaaatgcagagtcaaagattatgtccaaataaagttagagtttgtgtgtgtgtgagacagtgtttttagttaaatgtcaatatttaaaatatactatgacttttataccatattttttcatgttgtcatgttcttttaaacatgctgggagccataaagttaggaagaggcccagtaacccgtccaaagtaacctgaccaaagtctgacccctagtagagggcctatgccagcactggaacccagtgtctccagatccagaggcattcaccacctcaaatctgcctcaaatgtctgcagtatggtctatcacaggggctaattaagctcatgggatttagagtcagacagatgtgtttccttcaaagtttcaacagttactttctgaccttggcaagttattcagcttcctcatttgaaaactagagggcataatggtacctaccaccgagagttgctattaggagtaaatgaaaatacgcttgaagaactcagcatgggcctggcaagtagtcagcgtgcagtaaatggtagctgttattttaagaactttatttgttgaatgattgactctggcacataacgcctgcattcaacttgaaacacggagctgtcacagtcgttcagctgaaggggcgggaactgtggcacttgccaattttttctagaaataaatctttgtgggaggataatgaccggttggagagtgtgagtcttgagggaacaaagatcggatctcccggcccaaggagtacggaagcgaagcctcccctgcgcgcggcagccaccgtgcgtaacctcccctgaaccgagtagcagccgcctgagcccacccagccctgggcgaggctgcctcagaagccggatttcagcagagtgggtgcaggatctgctttaattctgctcatcttattctcggggaccacaccctgcgcgccgggaggaagggctccaaaaccacagggcggaggcttccgcgcggccccagacttgaccatctatggtcacagaacacaccgaccaaacaggaagtggggtgagagcggagggttccctaccttcccagccccgcgactgccagccgggctggggctgacccaccgcgccctcactgacccccacgccctgcgcccagtctccgcaagtcctcccacaacaatgtccagactaattgccttcccacgtcacaaacggggaaaccgaggtatgcacgcccagagacaggcggagcgtggcctcgatcaccaccgagagctgacggccgcccggattcccgccctcagagaatcctggcccccagtcgttccaagaccctttacggactgcagcttaaaggaaccggcctctgccattgagaccaaactgacagaggaactggtcactcttctgttctttccagagaggagcttagccagggacttctgcccttcctgggcccgggcctcgggggcgattccgggtaggtaaagcggaacgagggcgtggcctctcttgtgagcccgccctccccgtgtcgctcccgccttgagggcggggctctttcccaagtgccctctgtgagagccgggccgctctctccggggcgtggcgaagaggggcggagtcacgagcggggcggtgagacttcctgcccagtcgcgggccagcctagcgcttcagccggcggctcatttccggtgggggcgccgcgcccagtgagggcccggaagtgggtcgcgcggagattgctgggcggttcttgccggaagcggagagcggctgatcgcagtccggaggtgaggcggaactctgaggtgagggtgtgcagcttggtagggattggggtcccttccggggcccatcggcccctggtggtgttaatggcccttctggcctacgcgcgtgtcatgaaccctgccgagagggccggggctgaggccctcaggccgacccggactcttgggcgcggtctcttgaggtggggccggggtgagcagctgagtccgggtgccccggggaggcccctctgcccgatttcgcagcgctgcccatcagcttcagcggaggcctgattcctgaggtgctctgactggaaggaacctccgagatcggagagtcttccctgtctcctgttgatgctcccattgcactgataggtaaattgatccctagagaagaggctagtctgagatatatagcgagtgaggaaaagaatcggaatcatgatcctggtgccttagataaccagccccagttcttcccgtgttgctcggaacctctctaacttgggatggtcttccggtcggtgttgccccgcaggctgctgcaggttaaaggccagcgctgcgtggaacttttttttttctctcctcccaaattgagccgtttgaaatgcctagggagtttttaaaagaaaggcgggcacatccttgtatttacaggcagatatcctccctttcctcctcggctgctgctcttactttgacaagccaggctaacattgaaggtatgtacttctggacctgaaatcagacggctcaggtttggtctggcctcagtgctgagtgtctgtggccataggtgccttaaacttctttcagcctccttttgttcatcttttaagtggagatctctgctgaccccacaagattaaattcagcgtaacaaattgtgtttattctgtgccagcattttcccagatgcggggaatgcagctttaaaacaaaacaatgtagaccctgcccgcgtggagctagcagtgtttgcagggatgtttaagaagtaattataaatgttgatgagtgttaggaaagaacagggtgctctgaaagtatgtaacagggggttcaggaaaagcccttctgaagaagcagagtttttaagatgaattttgaaggataaataggaatgcgttcgaagagtggaatgagaacatttgagacaggttagcatcagaactgtgtca

SEQ ID NO: 33537 - DNA, 813 bp, Homo sapiens
accccccagatctcttgtatatatgcaaatattaaaaaaaaaaaaatccgaaatgcttcccagtcccaagcatttcagataagggttactcaatttgtaaatgaactgtaggtgcctaacaaatctctgttcaatgtgtgaaggaataaataaaagggtagatgcgccagtcatatagccagccgcagctcacctagcctgaccaagtgagagatgctgcatcctgacgccactactgtaaggattaatcaaggacagcatgtaaaacttcaacgccgtgcgcggctctctctttccttccccttctctctttccagtgaaggggacggctccttccccttctctctttccaatgcagatccttcaaatcctaaaatgtcgaggcagccgcgtgctgtgggaccacgtcctcgccctctacacccgcattttgcagatgcgaacccaggctaggaagagagagaatcgccaaacccttttaaatttctcactcactcacccatcccatgccagatcaccaacggcagcggcgccggcgggtccagatgctgcagcgcccgagaagcgcaggtccatggcaggagagccacagccaagagccacaggcagccgggcgacgccatcttcgctgtgtcacatgaccgcgggcgcgagactccgggaaccgcgctccgcccgcctgggcgtggcgccgccggttgcagatcgcaacctgcgcatcccgaacggatgcccagcctgatgggcgtcggccctaccctggagctttcagcgcgacaggtcccccgccagaccccgctggccgagtggggc

SEQ ID NO: 33538 - DNA, 2194 bp, Homo sapiens
gtttgcaggtctttaatccatctcggccttatttttggaaatggtttgaggtagaaatctaatcatttatttcccttttggaaaaaatgtctcatcgccatttattgaagagtctgtcctttcgcccactgacttgtaatgccgtctgtatcataaaccaagttcccttgatgttactcttcatttcggcctcacaatctttgcttattttccttctaccagggatgcttttcgctatgttcctttcagggctaccttcctcttgtcccttcagatcgcagttcaaatgtcatccccctcaaatctagattgctctacaggcatttctggctccgtgatcccatgacctcaaaggggtctaggtgggcatagcctctagccagttgttgctaggctgttgtcaggactggcgatgcgtaggccactgagagcacccggagtccgagtgacggaatcaggcgggcgcccgcgtcgctaaggagtgcgtcacagtgcgcgggcggccgggggcagggccagggctgagtcacgtggcttggttgcctacgcgctggtgggccgtgggaagatggcggacggaaagggagacgccgccgctgtcgccggggctggggctgaggctccggcggtagcgggagccggagatggagtcgagactgagtccatggttcggggtcatcgccccgtatctccagcgccgggagcctcgggactgcggccgtgtctgtggcagctggagacagagctgagggagcaagaggtgtcggaggtctcatctttgaactactgccggagcttctgccaggtgaggggctgactggctggctgagggcggcggggcggggaagtcagggaaggaggccctggatcctctgtaagcagccgggtccaaactgaaaggcgccacctccgtgactcgccgcgcccccgggccgggaaggcccagctcggaagctcgaccgctggcccccctgcgccactgcccgactttggccaccgctgggtcgttttgctctgagccttactgagatcccggagggccctggcgggtccctggaagggctgtgccctgtcgccgttgcctgtgtcctggccgggtggttggagcgccactgccccctgagggattgattgcttgtccctgccgggagatccttttttgagtggagtgcagatctccgaactggtaaacccgggtttttctgaataatccagagaggtgtgttggggccagagacttatttttggagttaacatcttctgggctcctaaaaggtatgacagttggcttcgaaaggcgtctagagctttctgattagggattgcggagccggttggttgtttggtttttgctttttttttttttacgtttaagccgttctttcgtcttttctgtatttctttgagaggattgtgctaccgagaataaggctgactctttgagtagaagaggatgggaagagggatgtagagtgtggcctcttttggcagtcgtatgatcatttctgtgccttggtgggtcctaacctatgattacatatttatgggtgtgtttagtttagtctccatgaccactccgagatttttctgtatgttttcaagtcttttacaaatacaaatattggccattattatttctgcttccaatgtttgttctgtcaggtttcagaggcacccatcagctccttatctgttgtaccttagaaaatgcaaaataatcgtggcatgttggtacttggagtctaataagtagtccagtatgctgaataaattgcggcgttctaaaataataattttggggggcaatttgctctgttggtccggagtagaataaaagttagcttgcttgattgcttttcttccctctctctgccgaggcagaagcacctcatctctctgaatggaattttgtccttactaatcttttccgtggattgtaccactccaatttttgtgtgtacaacctgcaacattgccctgtactattaaatgttaacgtgttgttgttctctgcttccttagtagtagtcatccctgtttagtaagctcatttattttacagatttttactgacttcataggatagtgccagggactttaccaagtgctggggaaacatgagtaagacagcacttagccttgatgaacttacagttggtgggaggtggtaggaatgacagtatttccagtgcgg

SEQ ID NO: 33539 - DNA, 2304 bp, Homo sapiens
gatggggctgacccaccaattaattcatttatctggatgaatagttcctactggtagattaacagggttcattttcaattctgttgttttcacagatacaagtgctgagaaatggttttacataaataggtgagaatgctagtagttttgttgtaagcatgtcaatcaatcgtttggtttctttccgagttgcatgccaaaaaccaaatagtgttccttcatcagctgacaattcatgggccaccattaattttgttgaaagcaaagaactggaaaccatctgacttgaaaagaatttgttatcctgttattagagtcattcactttctctagtgacttttaattatactaattactctcagaggcatttaggcagggttgagaaattcaagatattaatttcaacacatctttagcatcacaatatcacagtaatttaaatatattttagttgtagctatttagctcactttattgtaaataataattatgctaattagcaacgatagtatgtttaaccaattaatcatcagattaactttcggtcagaataatggacttcaatttttaagtcaaagcaatgtacaggcgtcccagtcaccatatttcacttctgaattccaagagagaaatggcgttgcgccttactgacgcaaatatgtacctagataaagtaagacgctttcatttcaggtatgtctaacccacgctatccttgctttgttccagggcactctcgcagggaaaacgccgcctctgactacacttggggtggttaagacgagatcttcaaatgaaaattctcaacgctaccgtccactctctcatacgcttgaattccgaacaccccaatactggccaaaagactccatttctcatgcttggtcttgcttttgaggtagctctaactcagaggcacgatttttagagcctgggaagtcggctgctgttcagtccttcctagcctcctcaggcgggagccgcggcccactcagtcagttgcggcccactcagtcagttccggccccagccccgactacctgtcgccttgttgggggaaggaaggcagataccgcagcccagtcagggtaagccgctgacccagaggatggaactgcggctctggagattagaaagaggaggacttcgccgcgttcactagcccaggaggaaagccagaaccctaggccggaacccagcgtcaagacgtgggggaagaatgttgatgcaacacagctcagccgggcccggaactcggcgtttgggtccccgccctctttgggccggaagtgaggaaggtggggctggggcttttcctgtagaaactaggagggactagggagagtctgcaaggggaagagtgtgtctgtgacactgccagcagcgcgcagagggagggatgggggcgggtatcggcgtaggggccctcggaaagaacggatattgctgtgacaccgcggggacgctctgaagggacgagtgtcggtgtggcaccggtgcacgctgaaggagccggcggaaccgggtggccatggggatgtgggcatcgctggacgctttgtgggagatgccggccgagaagcgtatcttcggggccgtgctgctcttttcctggacagtgtatctttgggagaccttcctagcacagcggcaggtgagcctagacagggtccaacctgacccccatacccggccagccctggagtagccttggcttcgaccctgagactcttgattgcttcggtccccgcgccagtctcgtctttgtggtccctgctgagtctcgtaacttggcccgatggcggactgtggctttgaggagggtcttggtgcgtcaaggaagttttctgtaacgttatcatgggacccaatccctttagggcctggaggaaggcttgggctcttgtgccctccctgcagcttccttgggatccttgggcccagacttggcctcctttatctttggaataagcctttaaaaggatttagacacccaacttcctcatgacatttatgtaatcatgcctaaccataggattttgcagtccttccaagaacttgcactcttgtttctccttaaagtgcatatattgtttctgcttgaaaaaacaaacaaacaaacaaaaaacttatcgggcccggcgtggtgtctcatgcctgtaatcccagcactttgggaggccgaggcgggcggatcacctggggtcaggagttcgagaccagcctgaccaacgtggcgaaaacccgtctctactaaaaatagaaaaattagccgggtgtggtggcgcgcacctgtagtcccag

SEQ ID NO: 33540 - DNA, 776 bp, Homo sapiens
tctttataccatgctttctcatatgatagtttctagtactgttcaactgtgatcaaagtatgctttgttttatagcttattcttctctttggaggaataccttatctctggagactttctggacggttctgtggttatgctggctttggaccagaatatgaggtatgtgattcattagcatgtatttgtcatggtatttcttttagcttggcaggctttccactaaagttaattttttggcttctgccaatgttaagatttgcctctctgtttgcatagtccttggttacccatgctgtattggcataacattagttacaataacaaatcccagaatatcacaggcttatttgcaatggtttatttctcaatcacgtaatagtccagtgtgagtatttttagttatcaggtgactttcttccatgtggtaagccaagaatccaggctctttatcttagggatttgtctgtatgatttaaggtacctttcatatagtgcctgtgtaataaaaaaggaattgttttgtttctcatttacttctctcaaaagtaaacttttttgaaggcagggatgatatttcagaccttatgttatccatagaatcaagcatattgcttgggatgtagtaagtaagtgctcagcaaatacttgttgatttgtttgccagtagttcataaaaactggatttttgttttttcttttgtttagatcactcagtccctggtgtttctgctgttggctacacttttcagtgcattgactggtttgccatggag

SEQ ID NO: 33541 - DNA, 1459 bp, Homo sapiens
ctttctaccaggctccattcattctcttccaaggacacgcagggggcgtgcccaccccttccctccgcccccacccaaggcccgccccccgcttctccacggattggttcccgagaggcggagctgaaggaagagcccagtgcggcgcggtgggggcggggcgcatgcgcgagctgggcagggtggaggtggggaggaagagctgccggaagtaggcggtggaggtggtagcggagctgacggcagctgccagggaaaccgaggcgcgggacgcaaggccagcagacaggccggccagagggtcatctgcgtccggcacccaggaggctcgtggtccgcctttgcctgggctgagggtctctggccccgcagcctctcttggaggcgggcctgtccctaagcccgccaaggggcgccgcgccgaggggctgcggagtgggggacggacgcccccgacccgggaaggggcgtccggcggggccggaggagagggctctccccgctcaggaggtgcccctgggcgggggaccgggagtcctcaaccccggactgaggcaggggtctctgggggcgaggagggcgcgtcgccctctgcccccgccggcaccctggccatgacaggcaagtcggtgaaggacgtggatcggtaccaggctgtcctggccaacctgctgctggaggaggataacaagttttgtgcagattgccagtctaaaggtagcgcatcccacctggcgggccaggggtccagccgcgccggggtggtgggggtgggctgcgtgaagaggcggtttctgaagcttaggccgcccaactcggcttataagtggtaacgcgtgctgcgcttgcagtgagcctactgggctttctgcagctgggggattggtatgggtagagcttgcgagggcgagtctgtgtgtgtcggggagggtggaggtgatggtgcgggtggaagttgcctggcgtgttcaggtgagaatgtctgtatttgagggctctgaatgagttctgggccggctgtccagagagagctcccagcatgtcacttgcaaagctggggatgaactgcattgcgtgcgtgcgtgcgtgcgtgtgtgtgtgtgtgtgtgtgtgtgtgtgagagagagagagagagaatgacgaggaggaggaggagggaagtgagatggcggaaaggaaaactgcttaaatgatttttaaaggtggtgatttttgcttcctgctatttggttagcaactcctgtcattttgcagccttgctaagatctgacaagagtgcttaggtgactttattcttctggatgtgtgcagtgggaaactgccttatgcagtgacacagtgcggatttctaggcagtgtagccctggcttgtagagtgcgttggaggcctatgtatgagtggtggcagaaactagccgattatgcctgtagtgcaggatccgtttaatcagtggagaga

SEQ ID NO: 33542 - DNA, 555 bp, Homo sapiens
tgatctgcccaccttggcctcccaaaatgctgggattacaggcatgagccaccatgcccagcagacactgctctctttgaaggcatcttagaaagtgtcctaggcccatagacacatataagcctactgttaagatggcagagaggcagagtaatggaagagtctgtagacttggtattggaacagccagttaaattcctttactttgcttattgcagcttggtgacctgattccacataccacctaactttctcagtttagttttcctagtttgaaaaatgaaagtgccttgtaaactaatgtgttacacaaatgtctgcattatttacttttaccattgctaatcataaattttttaatcttgattttattagttttacttttgactttattcccttttaagatagtctggttactgggagccacagttagaatgactcacccagtaattccctagtctttaagccaaaaccatttcctatatatggagttctggcatttttgcaaatgtgctttatggtacccttgaggatggtctctggatgtttcccgat

SEQ ID NO: 33543 - DNA, 1545 bp, Homo sapiens
attgactagcatcttatgttgttcatacagtcctcattcacttaaacttagtcctctaaggaggtggattagaggtcctacattagtagaaaggaggtaacagctactgcattattattttttttttgaagaagggccctcagactggagatgaggacagggactgtgttttcatgtctatctgcatacttaatgcacggtgtctggcacatagtgtctatgtccctattatgagcagcattattctgttaatgtgtgttcaggtcatatgctttgttttgttttttgatagtcttcctcatactgttagcccagatagctgaagatctgtgacaccaggaagctgagcaggtgaatctcatggttgctttgtggtaattgcttctttgtgccatttcatttctgtgcttctgccacctgtgctgctttggaagctggagctagacatgaagcgaatcctctgccctctcagtaggaggttttggtgtgacacatcatcctggggaaaaatgtagcatgaagtgtgaaacaggaggctgaaatagcagtcctttagcccttttgtgggatgggagtaaatatttagacgtggttctcaggtgctgtagaatttaataaccttgcagcagttttagaaactccttgtgcccactggaacaggttcgtttaaagaatcttacttgggctcttttgaaattgtgatgcccccacctccacccactcccctcccccgcccacccccagacctgccctgagttcatctgcctaatgttccctttgcaggatctttgtactcacatggctggtatctttgccccacccccttatgccatatattttgacctcattgtgttctattctgaaacgcctgggttttgaaacatcgtggtgaatgttttctttttcaaagggcaaatctccatcttttgctctcctcccttaagccagggctgttttgatgactgatattctgcacaccactggactaaccaaccatctgtactttgatcccagaattcattttgattctgctgtttgtttagaactgaaagctttctagcttgtttggatgtggttgtgattcagtgaaactggcactgattttccatctgtttgccattggttgggacttctccaatgtgttaggaaagctgctgtgctgagttgcgaagagaaattcacatgtccatggtcttgcacaagggctcatttgctcacttagaaggttttatgtagagcctctgcctgggtgaaagacatgagcttccctggaaacaattgaaaaacatcttctgcctggccactcagtcttgagctctagtaggttacactgtttttcccttctgggcttctttttgaggaaggggagtgtggatgggaagaaatcttcacaatcagtctcagattcccagcagcagagagtgaattgtatgttgtaataataaaaaaaagaatacctaaagaacaagatatcaatttagtgaccattattgagcatttactatgtataacacacatttgggtgtgtaaaggtgattctaattt

SEQ ID NO: 33544 - DNA, 795 bp, Homo sapiens
ccctgacactgacagtaatagctgtgctgaagatgaggcgggagcactggggagggggctttcctttcagcttttaggattggccaggcaagttaacaataggccccttctatttaggatgagggactggaaaggaaaaagagaggaactcatgctgattttctgtcgactagatccagatgccaggatgccttctttccctccctgagctttagtctccgtcagcattgcactcccaaaaggtcattcacgtacgtggccttgaaatgatctgactgctaaggtccagggtttactgtccataacagagtttccctttgtctcattctccccatcctggcagagaaagggactctcaccctgccttttgcactaattggcggaatgcccacagcctggtctgaaagtctcctctctccctttcagatgacccagcagatggctgggatgaacttctatggagccaatggcatgatgaactatggacagtcaatgagtggcggaaatggacaggcagcaaatcagactctcagtcctcagatgtggaaataaaaacaaaacacctgtatggctgccattctcttcagccctcgctctcccctttccacagcctccacccctgacccccatcctcttttcctacctctctgtttggtttagaaattgctcaataagtcatttggggtttggcatcctgcccagccacttcccaaacatgaagacctctctgttgctttatgttgtacatgccccatagccatcccaacgtcctccccagtcctctcctggcaccag

SEQ ID NO: 33545 - DNA, 1067 bp, Homo sapiens
accggaatccattcaactgtctgctgagaataaataactggcatgtacataatatttagggaaagtgctatggattattttacaccagtgtcgtttcaccaaaaaacgtgatgccgatggctcccttttgtcacgggtttcaaaggctcaccctaacgttcacgtgcattttcccagcggaggaaagatggttgttcttcatcagagtctggggcccaagaacgcaggctccatctcctcccgcaggagccaggctgatgatgctcgcagggatcggatactgggagcccctgaacgcagccaacccggcgcgcaccggtgggggcgtctgcgctggcggagcggctccccgggaggacgctgggaaccatgctctagccagccgctgcgcaggcgcactgggccccgactgcccgccgcagcgctacgtgggagcttggccgcgcagtgccggaacccggctgcagcggtgggaaggcgggggcgtgccggcccagcggggagagggtgagcgggtggctgtcccgggcttggggagctgggcgagccgggaagcgcgagttccgcccgcggccaccctgtcgcgcgcggtgctctccgcagccccggagtcgtgctcagacaaaggctgggaggctagggccgggggcgttttgctttgtggggaggacttagcctctcatttggggaggaggaggcggggtctagcggtttcgcggtttgctacagccgactagtgaaagagctgggattccaaatccccggctactttacacataattactgccccaaacaaagaattgggttgtattcgtctctttgtgcttcctgacatgtgcgcggtgctttgaattttgtgggctgtgtctgcccaccgtctccgtgtatcttttggaaacattttacagtgatccatatatgttctagcgttctgccctatgactgagcctccttagtcctttgctgattctaatgtcttctgctcagcatctgcaggggctgctgagagtaaatacttggcgcctccagctgctggccaaggagacagatggagctcaagttgggag

SEQ ID NO: 33546 - DNA, 1329 bp, Homo sapiens
cgaaactccgtctcaaaaacaaatttatatattatatatatatgtatatatatatacacatacacacacacacacacacacacgtattccagaattttatttttaaattttattgttgttttctacagtgggttgatacaaatatcctagcccatcatctccccaccctgctttccttttcttcatggtcctcacaatcgcctggggtattatctatttatttttctatttgttattgtcaattaatttcaatgtaattaagttccaagaaagcaggaactgcgttttgttaactgctgtatacgcagggccaataagaatgtgggggtagatcttacacactcagaatagataactgaatgaatgaatgaatgaatgagtgaatgaatgaatgacagggaaggcgcttcaccggaaaggctgaaggaggtctcccaaggaccgctgtgaggaaacggggggcggcgtgggtgggtggccgctacccacggttccggacggccctcgggggcgcgctcgggcggcttccagcttccgggttcgagggcgcgcgctgcttcccgggagagggcgggctccgtggcagccccctgtgggcggagccggcggccggggctcacaacccgccggaagacgcgcgggttgtggcagctgcagcgggaccgcgtggggtgggccccgggaccgccagggctgcagcgagagcggccggcggtgcaagcggccgggagggcgcggccggaggcagaggccaggcgagacacccggctgcggcctaagaggccaggctgggtgggcttggctgcagccgccagccccgtgttaaagcggcagccagggaggtgtatcctccccggggtctgcaagacgccggctcagggcatccctcccattccggccctcaaagcctcgctcctgggggcgctgctgggaaagcccacccgcctgggcgggcccttgatgggaatgtggagcagaccctcgtccactccggaggccgagggtcctccgggcttccgaaggaagccgacctcaacgctggacgcttcttggagaatgattgcgttgagtggagatgtggtctgtctataaaaggccgggagggaacaatatctgttaccactcagtccgtctctaaagagacactctttaccgctgaaaacctcaagagtgagcactcccacgcccccgtctctggtcctacctgggtccaaggccgatgtggtgagtaggagtctgtgtgcagtctttgagtccgagggtggcatgtctgggagcactgtgagggtggggcatcttcgatatgaagcttctcagccattaactgtt

SEQ ID NO: 33547 - DNA, 1185 bp, Homo sapiens
tgtgttatatttatcaataaaaggttagttaaaagtaagcaaacagaaaaaaaaaaagaaatattgatgaggggagcgccagcatctctcaaaagtgagttcgtggttttgctctcaatggaaaagccggcgggaggtgctaaggtggggatgctgaatccacggatggccaagcggagacgcggcacttcaccgggggcagcgaggggcccagaccttgctcggattgtcccggtggtaactgggagacctcgccagtgagggaagttacagatcagctgcgcccggaattaaacgacccacagacaacggcgcaaacagagggactgacctgctttagtgagctcccaaaacctgctctcgcataagcacaccctcctccgctcacagagacggatttctgccccagccgcagcctcgcgaggtaggcggcgccgcgagggcctctgggaaggcggtccgtgggcagccgcggggcactctgggactgggctctgggcggcttttttgcgagtggcgggccgactgtgtagtccgctccggcagcgcgctctgcccggcttcctcagtctcctcgccgggagcgtccgggagcagctccgaggccgcggcgaaaccaggtggagtccgaggttcggaggagtatcagaggttaggggaaggccggagaatgggctgggaggctgcgtttcggagcttagggttctgtccctgcgatcgccgcgtctccctcccttggtgggcgcggctcccgggaagcggctcgtctcgtctcccctcacaggccgggttcccgttctggaccttcgccctcggaacacagtgctgttggccgggactccttcccgaggtggacggctccctgttcttattcctggctctgccagaactgtaggaagtgctcagtacactttagggcatgcatggcactccctgggagacagtgctttagggccagaggaaagatcttccctgaaggcaaacgcccgcggagcccacaagtccgggccgcactgaacaagtcaggatgttgccatcggcaattctgcagaaggcagtaacccatctgagagaaagagccgctgtcataaggtctcttgcttgagctgctgggttgagaatggagctggaagagggaactgatctcggagctccttggggatcttggttatgtctgaccctttt

SEQ ID NO: 33548 - DNA, 1488 bp, Homo sapiens
ggcagtttcagactcctgggctcaaccaatcctcccactttggcctcctgaaatgttaggattacaggcataagccaccacactcagccccatctttgaattaaaaaaaaaaaaaaaattagaacgtggaaaaacgcaacaacaaaagattaacaaaatccctatcccatgatagccttatttttctgctcaccttaaaaacaaaacttcttaaaagtattgcgtatatttgctttctccatttcctctcctcccatccttccctccaactcctatcaaattttcatcagactttatcaaacttccaccactgccaaaatggcgtttcaacatcactggtgaccattgctacagtggcccattcttaattctcattttacttgacctatgagcaacatttgagacaatgggtcactcccttcttgaaacacttccttcccttggttttgcagatctaaactctcctacttttccatctacttcatggattattccttctcagtcttctttgttggatcctcttcacctctccgacttaacctggtgcattgctagaagaaaccctgctgagtaagagcaaattgtttttagcataccgccgattttactttccagtatttaaaaatgctgtgtatccttttaaatgaaaacgacttaaaaagcgtggctctcaggctagcaatagagataccaacccgggaatctccgcaccaccccccaagaggaagcagcgtctgacgtcttccggaaacgagctccactggccttatgggaaatgtggtctccgacggatggcctacacccgggaggagtccaggaactctaggtggacagttacttccgcacacgcgtagtaggacggtagccggtattcaatcttcaaatcagcgccgcgggaagtgcgggcgggtgttgctcccctgtctctggacgacgctgtgactgatcccaggcttggagccggagctgcgagcgaggcagtgaaagggtggcaggtatggctttgctggactcggaggacgtaagagaaaggcggggactggcttctaggtttaccctaccgaagataaaactttagtctccaagcgcagtgacttcaggtttggatatgtgggtcctgttcaactcgagtagctgagagaaagcaagagttgggctccgactggcactgggtagatgtccagggctctggtgggactgggagaggctcaatttgcattcctgctcttgtaggtcaaggtcactatgtaggagtctgttcatctaactgtacctttcctggttccaagagcatagttggcccgactggagcctgcgacaattttaagccgtgtcaagggatccagtggaaactgtaagctatttcaagggatccaggaagaaagcattcttgagaaactgctatggattagaagggtattctcagcaatcatttgaagtaaatgctattaccattttgcatatgagttaactgaagctgaaaggtga

SEQ ID NO: 33549 - DNA, 694 bp, Homo sapiens
cacctggcctccaaaaaatatttttttaattgcctgggtgtggtggcatgtgcctgtaggcccagctacttgagaggctgaggtaggaagatcgcttgagtccaggagttgggtgctacaatgacccctgattgcaccactccactccattccagcctgggtgacacagcaagaccctatatcaaataaaagaaaagaaaaaagaaaaaacgtcgttgctgcaccattttgcaatcccagtgtacaggagttgagtaacgtacaagagtttcggtttctccacatccttgccaacacaggtcattgtctgcgtttgattttaactgtcctcatagaagtgaaatgctgtctcattatggtttcgatttgcatttcactaatgactaataattaatgattttgagaatcttttttctttttatttttttttctttcttgcttcagtttcagaccctaatgttgagcatcttttcatgggcttatttactatacacataccaacacagatacatagatacatacatatatctatgtctatatctatatatagatatatagatatatctttggagaaatgtctctaaatcctttgcccatttttaaattgtgttgtctgtttattgttgatttttttctcccctccccctattgttgaattttaagagttacttatatattctagatacaagcctct

SEQ ID NO: 33550 - DNA, 489 bp, Homo sapiens
aaggtggtggagactgtggcagagtggttaggagcaggcaggacacagagcacaccgtgtcacatgttggtgattccaaacgattgctaaataaactatacccttcccacgcaagtcccttcaccaattccctgcttctgagcagactgtccctttctcagcccaggtcatggcaccgcagggaaggaaaccgtcctatgatcccagtgagtcacagagacctcactctgaagttcttcctgctgactcccagctattgccacagcagcacagaaactttgatctatcctccagggagacagctactgcccccactcctgccaaaactccatgccaaaagagacctgcccagctccccaggaataagctttgtgttttctttttagcccttggatgtttggcctctaccctggggtctcagtaccctaaaagggccctccaaactctctcctgaatcctgacaacagcaggtctcagggccctaccagg

SEQ ID NO: 33551 - DNA, 2003 bp, Homo sapiens
acggcatgcttaatctggaacgccatgtcgaccttcatcccccagttctttctccccaaattaaaaacacaaatacacacacacgcccctacttagttcctaaaactcaagggcacgcgcacacacctacttatttcctaaaattcaagctcgcaccaaggagatccacaaggataggcagggtggtggaggtcactgggcagcgcctccggatcccccgaaagggggcggggtcaaaactcagatctcgagctcccgaaagggggcggggttaaaactctcagatctcattccgcctccctctgtcgtcgccccttcccaattctcgcgagacctcaaggagcacagcttctgcgcaccgcacgatactgggagtccaggcgccaagggagggggaagggaaaaggggaaacggtgcaaacggcgtggccgccatcttgcttgtgcccccgcttcgcgcgcgctccgttctccgtgacgcacacttccccctcccctccgccgcgcctgggcctctgcattgcccgactccgtaggagcgcgggggcggctcctgctcttcctggactcctgagcagaggtgtgtgagtgtgcgggagtttctgtgcgagggtgatagggaagcggcggcggggggaggggcagcgcttcccgccttcgccagagacctcacttcctcgcgcggccgctgctgtagctcggtccgtcctgcccgccgccatgttgtgctcttgcctggcccgctgctgtcgccgccgccgcgctcgtggggtccgtgtgcctcgtcggcccggcccgcgggctttctcccattggcggaaggcgacggcgggggggctcgctcgtgattggtcggtggcggggaggccgcggacctggcaccttattggacgcgccagctccggtctagggggtgatgaaggaatctgaggctgcggggatgcgcgcgtcttgggctagggcggctggggcaatgaccccctgcggcgcaggcgtggggttgcggcgagagggcgagcctagaggctttaagggggaagagagggtgatggcctggcaggtactttgggggtagcttaggccatggcctgggaatgggggacactcactttcagaggtgcttttcctggtacatgcatggcccaagattggggtgtgcaggccctcagggttccaggcttggaaacaccgaaacccaagtgacaggctgagagtcttcgagatccagggttgctaatgtgacccagtttggaagtggccctgaagtccacggtgtgagtgtatggtgtaggaagaaaggcatcagggctaggggcatagctgaacggtagaatcggatcagggattttgctggagagtgcaagcattcaaacactgaggttttggtggagccctggagtccagagtcaacggacctgggatgtgatgtgaggagcaagtaaaccgagagaggaatgctattgagaagtgtgctctgtccgagcctaggaagcacagcattaagtagtatcagatttaaagtgacaaaatctgatataggaagcattttaggggacattttcggacttgggaagtgtattaatagaacagttatacattattgagtctcaggaccatacaagtagttttgagatgttgtatatgaaatttgctgctctaggaaggatacaggtcatggctgagtttccaaagccacattagcaaatattaggtagttggtagttatttgttgagtaaatattgttaggttcccctttaagggaaagggagctagccagaaattttcggtcttggtttatttccttgtatatgtgcctaaaaagtatacccattcccatgtgtactttgaattttttgtttgttttttcaaataagcagctccaaaccaaaaaaaagcccatgcatagcttcttaaggaacaggacttgtcaacactttctggttcatattcaaaaagtttttattccaatccagagtcgttccagtcaacttgttgggaatat

SEQ ID NO: 33552 - DNA, 3907 bp, Homo sapiens
cgtgggtgggaacactaacaaccctttggcttgtttttaagaacaattctaaattttcaatattctgttttagaagcacatgatgccctagtgcagctgctatgtgcatttgccagacatttccacgccttagagttccccatagtttgaagtctgaatctgacccctgttctgcttctcaaggtaactttaaaacaggaagtgtacaaaagaggtaactgatgacgtgaacagccaatcgtggctttgtgttcttagccgataaagcagttcagccaatgggaccactgtggaggcaaggtttggtgtcaaatagcatgctagattgaatgcctttgactgttaaagtggaaggaggctgcagggcttcattggagcctcggagtttttcactgaggcaggggtcagctgaaagacaaagaaaaatggcgaatagtttgttggggggtgggaggacagctgttcgggttttcagtggagtggacattccagactcatgtttctgcatctcctgctgccttttgtttcctccgtcctttggggggtagggataggagtgacttaaattctcccagtcggtggaggtataaataactacatgtaaaattaatgcagttcccggtaagtttaattctttgttttgtgttgaaatgatagaaactgtttagcttcagagagtgtagacaagttgcactgttcagaaaatggccactttacattccatgcataccttttggtgcacctagaataccttgctgtgtttagattttgcatgtccttcaactaggatttctttcctagttgggtatcgacaagatcaggtacatggagaaaggctaatcatttttcaggggcacacagaagcaaaacacttttctctttgcattgggtaaacttaactgttttccaaataattttcctttgttcaagtgccctgaagctttcctacggaataagctgggttgttgtgagagtttttctatttccatgcactttgttgacatctgtgttttcagatatggaagcaacactgttgctgttagaaatttgtgtgaaaatacgatttgcactgctgcaggttctaatggtgaaggcccacatgccagtgtgaaattttcccataactttcttgatttaccagtctacctctagattctaataagtagtagttaatgtagtaacaatctttgtttttaatgcacattttagcttagaatgctggttagaaatatcttcacttatattgacagtgatgagcaaatatttttccacagatttcacacattttgtcaggtgttgatttagttctttaaaatgatgtgagcaaagtgctttccatttttccgtattaaatatttaaaatcctgcagtttgtgaataggaaagttaagagtataggcaccctatcttttgcccttgatatgtatatatttttctctttatggatataaagctaatgtaggttgctaatcagtaaccagccagttctcatgaacagtgaaatcttcaatcccacatactaagatctataatacacctgattttaaaatgcaattctttgttttctttttatttgcaaatatggaatgaaggtcattggaacatttctgcagcagactcagtgtggagccgtcagccagcagcacttagtctctgggtacggaaaaggagcaggccctattagaggagaagtttcgagggtgtcgatttgccttccctagcttcccctctaataaaggatttaccttagaggactgataggatttagattcggggctcttggagttgtaatgatatagcaagtcaaagttcctggatgcaggcctctgtcgttgcttgcaaaagtgaccttgaaaaactgctggggagttgaaagattgaaggacaaagtttgtttatacagatttggactgaaaagctctatttaagatgaaaagagactgtacttctgatattcaagtcgagtggttagtaggaatatgttatagattcagattaggaattttcagggaataagacaatagggctgcattcattctctctcccactctttttacttccctccccccagcaaaaaattctaaattcttttggtatgatagctgagtgaactgcctaacagattcagaattccttgcatgctaccttgtcttctttgtaatctagagggttcttagtgaaggggatagatagtattttaggagttcagagtagttgtatttgtgaaagttttggggaattagaatgcttataataagaaaatgttcattctgggaatttaagtcctaagatgaagaagtatgtgttaaggattacattttaagaggtagttattttgatttaaatttatttgtttgtcattgattatttatatgttatcagttgttccagattatatatatgattttaaaaacagttgtaggtgctgacttgaccctgttggccctaggagaaggcctgcagcaggggaggcaaaagtgaaggtgtggtacagtatgaagtaaactataaacttgagaactttgtggatttggcttcttggaaagatgcccagtcactgcctctagccgaggttcttcaccattctctttgagaatgacccactacctggaaaaatgcacatgggcatgcctgtacaaaacctttgatgactaagttattttttagtgtatgtcaaatggtatttaacacttcagccagataaatgtttactagacaaatgaagaaaactttgcttccagaaagagcaaagaccttctagagagctaactctaatttaggccatgggtggctgtgtgtgtaagtgggggaggcttagatggggtctagagatatggacatttatttactctgatcacagtatttgaggcagcatggtacagaccatttaaagtcaagagatctgtgttcaagccccactcacctttatcaccagctttgtaggtttgggcaagtcagctatttagtgttagcttcctcacatgtaaaaatggaacctaaaaatagtgtctgatttagtggcgagtcttgaatgagatcatgtgtgtcaaagtactttgcaaattgtgaagagctacataatattagttgttactaatccagactatttgggggatgaaacgtttatgaagataggtgtggcatcaaagaaaaaaatgccagtattttaatatttgtaaaaaggagttagtttaaacctgacacatttctttttaaactgccttcacctgcatattcctatttatgctgacatgaccctatttatttaatgcatatgttgagaccaccagtcctttactcatcaagatccttgtgaaagaattttaacccctttgtcaaaatttaaggacctctcagaataggatgaaatgggtatgctgatttttaaaaaactcttgttagatttaggaacctctcagaataaaatctggaagcctgttccatttgcattatgagatttgcattacaatgcaggtaagttgtaatggttgcagatgtttaccaagcagaggttacatatttagtttgtataccaaatatttataaagtaaactggaaccatttttttttttgtttgctttgtgattatcctgtcaattttcaagcatgggaggtaattatagcctgctgtatagtaagcaagtaaatgttgggattaatgccttttttttttttttttttttttttgcagacgaggtctcgctctgttgccaaggctggtgtgccaggctggagtgccgtggcatgatcatgactcactgcagcctccacctcctgggctcaagcaatcctcctacttcagcctcctgagtagctgggactacaggcatgtgccaccgtgcccaactaatttttttttatttatttatttttatttttatttttaaatacagacggggtcttgatt

SEQ ID NO: 33553 - DNA, 537 bp, Homo sapiens
tggctagttttctttttaatgtgttctgctacctccatatgggggcccacctctttataacgtggtcagattctatttgtattatcactcttatcttcttgtctctcccttagggatcccaaagctagaccccgctgttcaataattgaccaaaagtttttctctacttatagtattttttctaaattagattacagtctagcacctgcagtgaaaatgggcaatcgaaggataaggaatgaaggtaaattccagtataaaggaagaactaaagaaaaaaaaacatagtaaatgtttaactttaaagtggcataacattgtgaccttgtgttccttagttcaaagaaagaagactaaaataactacagcaaatagcagtgctaattcacttggttatcctttcttcttggaagtactaccgttttggtctgtttccatagtttcaattacatagaaaactaaagggaagacctgctcaattgaaaatatccagataaaatgaaattttcttctgtctacctaagctatatagttctt

SEQ ID NO: 33554 - DNA, 943 bp, Homo sapiens
ataaaaggttagattcttttaaagctttttgataattattattatttccagaaagatatttttgtttgccccatttaaaaaaggttaaattgagtcactgtcttcattttcatgagtaccttgtagaaaactattaataatgataaataactaaacttctctagattaccttaatttttttgttgttgttctcagtacatctaagagagtagcatataggccatgtgtatgtggtgataaatgaaaatgcaggggtcttacttggttatttaggacttaagattttatctagtcattttcaactgtgattgaacacttccctttaactcccttcagaaactccaagatcatattgtatcccaggtactagaatttctgttcagctgtttataggcctccaccacaagaaattggctccaaacctattcccattacatcatcacccactaatgtcattacaccagaatgaaatctgctttgaggcttgtattgttgttttccttccatttctttcccctcatcatttcctttagaaggaaaagggaaggaaaaaaaaagaaaaaaatcagagacctgtaaacatttaagagtgaattggacatccccacaggctaaacctagagttgtcagctttcattccattctgctgtgatagagtgttctgcccagtatgtatccacatggagcctggaaagtaacaagtctggtcatgtgacaactggctttggtgctttgctttcagcccctcagaattagttcctaatggctcacatagctccctgccagcatcccgtcactggcacgttaaaccttttcaaataattcctcagaatagagattcttaggagagcactaaatttctccattctttgtgtttaattaaactgttcttgcattttaatatttgccagataagcgcttaagacattacaatacaggttga

SEQ ID NO: 33555 - DNA, 1843 bp, Homo sapiens
tttatatctcagtgttcttccataggcgtgtggtgtgcagtggatactttgacttggaggtagtttaatgtgaggcatatcctttaggacttacagaaaaacagagatctcatcttccttcagtagctgtagctcaattttttaggcctgatttagtggccctacgacatttctagaacttggtaaaaactattgggcaatttattcaacaacaaatctattgtgagtcaggaactctttctaggtgttaaaaagatatactttgatcgcagtttctcaacagctgcattattgacattttgggccagataattctttgttgtgaggggccgtcttatgcataacagcatgtttagcagcacccctagcctctactcactagatgccagtagcacccctccccgagttgtgacaaccagaaaatgtctccagacattggcaaatgtccccatgggcaaaaatcatcccttgttgagaactactgactcagaataattaaatataacctcggcctgtgaggagcttacaatctagtaattacaaccagaataatttagtcagtaggtatttactaagtacttactgaatcaggcacagtgatgagtcctgaagcagtaaaagtcaaggagcacagaggacatagtgcttgattctttctggttgagtttaagtaaagggaacatttttgttgagtcttaaaatatgagtaagcattcaccagatgtgaaggatgggagggcaaagacaagggcatgcataaaggcatggaggcccagagaggaccttgtagttaggggaacatcaagacattcagagtgcctggaggttactgtgtgtttagtggaggttgagggaaggagtaagtatgtggtatgagagtggtagtggaaggtgagacaggttagagttggaatattttcataatacagttgtcatgtccttaatgaagaatgttcattaaggtgtcattttagcacatactaaaggagctccccatgttggctgtgtcattcctgccctggaaatactagcatcctggcagagcagacactggattccttcctgatgtagaattaatgttgcaattgcttaaggttagtgacctttaacttctgacgttacaatgtcagtttattcattcactcaacaaatacttattatgtaccaactaaggctatgctagatactgtggatacagtaatgaaccagacagacaggatcattgcgctcatggaacatatattctgatgagacaggctaataaacaagtaattaatgaaatgaaataacttattatgataaatgcccactgacttcagggataaaaagtaattcatgttttggatatacctctgggtcatgtttgtttatatgaagagttttcagcagttgaacttggcttagcctttctcagactggcctgggttcagagtggatttccactgaaaagtcattgttcctcttctgcagtctaaggtagtagttatctaaactgtctcagatatgaaagagaagggaggaataaatgaaatgataaagtcaaaaggatggggtgttttgttcatattttagggggttaatctcatgattaagcttatcagcttttggtgctggggtcagcttggtgtaaaatgaatgctgtcctggggtgtggtgggactaggccaatcgagcaagtctgtgccgcagcttgagccgagaggcataaatccaggatcaggcaagtggccagataaactctggaggtttaagctcagcacttaacttttctgttttgttggactttgatttttttttttttttagttgtagtaaaaaaacacataaaatttcgccccttatcc

SEQ ID NO: 33556 - DNA, 1470 bp, Homo sapiens
tagctcctttcttcctcacagtagccctgtgagatttgatataataagaattatcagttccattttacagacaatggaaatagacacaaagaggttaagtgactcacccagagtgataggaccaagatcccatttcccatctgctgcttctttaactccagagctctttctgtggctgtatcctgcacagactacctcaccaaaggtttagaaccttgtttgaccaagagcttcaactttgaaatcagacacatcaagaaagtttatatggcttgagcatttcctatatgccaagccctgggctgggtacatatattatctcatttgattgccacaataaaactgaaaggttatcctctttttcagtacatgaaaaagcccaaaaggatgggaagcctgcaattttatccaaatccattggctttcaagctcattctccttcctcatattgtttctccttggattagaacctaaaccctgccacttactggctctatggctgtgggcaagtcacttcatctctcttgacccctagtttctttgaaaggctattataagagtaagaaaacaccttgcacaaggtttggcgcatggtatgtgctagataagtattctttctccctgttacctgctttgttcccactcatggatttattttaccttggaatctcttgagtataccacctcattttttgacccttgccccatagtcccatgccaggcaatgaggcaagagacagactggtttgcatgacttgctggtgattgacagggagggcctgtgtctgttacagatgatcagtgcagaagcgcctgtactctttgccaaggcagcccagatttttatcacagagttgactcttcgagcctggattcacacagaagataacaagcgccggactctacaggtattattgcagacttagattaggaaaactggggtaagcagcagcctttgcctgttttcctgcgtggtgttggagaaagattgttctcctttaggaccaaagattgttctcctttaggaccaaagattgttctcctttaggcctctatcaagctgacgtgtcattggcatcaccactgttgggaggcagacataccttctagccatggtgattgtgtttctccaccaaaaatcttaatcaattctctcctggttttcacagcttagtgactgaactcttttcccttggtgagccctcactataaacagaggctcaagtgataagagtatttacctgtttccaaacgtaatcaacttctggttgggagccttgagagattccaggaagtatcatcagtctcactagcttcattaggctttttgttccttgtcagccttcctgggagtccttttctttttcttcttcttttttttttaattttaatttttaacctagcgaattcacattcatactgtatgcagagcccttggtcattgactctagaaaccctcaccctatagcc

SEQ ID NO: 33557 - DNA, 773 bp, Homo sapiens
tgggtctctcggggtgtcatacagctccttattccatcttagccagactcaaaatgctatgatccatctgattttaaagtgtgtctagctgaaacagcttcttgttgcttggatttagttctttgtaggtgttcgaggcattgattggcatcgtattcgggacagctgctgcctggcctttgaaaggttgagattgctgaaagctggcctgaaattctaagatagcatttttaatcctctgtagacatgaagttttcccaggcttcaaattggctggcacctcctaaagtcctttaaaacgcctactctccaaaacccaccctttctgaaggaggcagcagttcactcttgctactaaagcgaatgtacttttttccagtcagggctggttgcacaacactgtagagatggccctaggatgtgatgctgctcttctctggcactgttcgtcagtctcagcttctggaaagattccaagagcaagccctgtagttggggaggccactgctaaagttgagcaagtgccccattctggattgatccagtcattaaagcattgttctgccacttggggcaacctcccactgctgggaaaaggaactagtcagaaatactgaattgtgagtccaaggccctgacttctcaaagatacttgagagtttcgcttgttcttcagagaagcaagtaaagattatttgaaggtaggaggtagttgaggcctgacttctgccccactaaagctattgagttgaaagttcctgcccattgaaatg

SEQ ID NO: 33558 - DNA, 673 bp, Homo sapiens
tctctctggaccctgtttttctcaaaggtcaaatgaggaaagtgtactagacagtatgttctccaggatccctattagctcagaaattttagaagggaaaaaaaaatgtctgaaatgccttatgaagagtagaggtgctaaagtgaactccatgcctgctgtctgtgtgtctgtgtgagaagtggaatttgtgcccttaaagggagagattaggtatcattgccaagttgcatactccttctccccgtcatttctctgtcccatatttgtgttaagtgaccttctctttttacgatagtaatcagaggactctttctctccccagtagtagtgttaagagcagtagcattcatgtttgttgggggtcatgtgaggctgcagagaactctgtactatgagctctgaatccaaattctctgtcaatcattatttattcatcaaacactgagcatcctctgagggtaaagttctgtgctatgtattggggatacaagcatgaataaaacagtccttattttcaaggaattcacaatttagttggggatacaaatacttaaaggttgtaccaccacgtgggaatgtgtacagggtgttaaaggaacacattaaaagaagtaccttggctcagcgcagtggctcatgcctgtaatcccaacactttgggaggccaatg

SEQ ID NO: 33559 - DNA, 579 bp, Homo sapiens
tcccctgccgcccgcggccacaactccacattccactttccacaagcacacacgaggcgtcccaccccgggctggccttcggggccacactgccccacgcagcggtggacaccacttgcacgcgtccggcttcccggccccgcgcgctgcccccgccacgcggttcggcccaggcaccaactcggccgcccgtgcgccctgccccgccgcctgctccgcgcgttccctccctccgcctcgcctcgcttgctcgctcgctccctcccgatttgggaaggcggccgcggggcgggcgggggaggggcggggcgggggagggtgacatgtgagcggcgcgcgccggtggcaggtggaaaggcgagcggcatggagcgcgtaataagagagttggagtcggaaagagcagccccagtcgccggggaagcgggaggtcagtgcgggctccggcggcccccaggctccgagcgcccgcccgcggccccggcccggcccctagcccccgccgcccgcgcccgccccgggtcgcccctctggccccgggtccgagccatgcgtctctgagcgccccgagcgcgcccc

SEQ ID NO: 33560 - DNA, 4117 bp, Homo sapiens
cccttaactctggaaagaggcaggtgttggggttttcgttgtaatcccttccatatggagagcacttcagagtttgccaactgcttatcaacccatctctgaatttgttccttactaattgtgagggttattgctttgtaatgtagcagggcagggatattagccccattttactggtgtggaaactgaggggagagagaagagaatcagggaagtgttcagctcagggtcaaaccctcctgtactaattcagccctgtggtttctgtctctggcctggggttctgggcaaagcagcggggcggtggggtgggcaaatgccagcccctctgagcccagagctcaggccagtcccttcccagaaggctctcttcctttctctcttcatcctgtcccagaaatcccatgatcttagggagacctttattcatttgccaaacacctcctgtcaccagccacattccatcctggtagcttcagagcacagtaggtcctgggagaactcacaggttggtggagggtcacatccacaaaaaagcctggcttgagagtcaagcccagctgctggggacagaaggtctcagcctggtgttcccctccagtgtccctggaatccatgctctcctagagaatgccccaccaccgcagcgtctctgacccggcctcctccctgacttcaatctctttcccagcttttctcccacatctcagaagcacctagggatttttccagagtgaactgcagagggtggccaggaactcacgctggtgctcaggactctgaggccaaatcctgccaggcctgggcacactccacaaccctcatgtgtagaatgaggactgtgcttgcctcacgaagttgtcgtaaagccattcgacctttcttgtaccttctagacaccccacaccttccccaaacattcatcgtacttgtgtgccttcctgccttgaaacaggctcctctcctaaaaacatattcatcactcaaggctctgttcatcacgtcaaatgtcaccgcttccctgaagcctgaactgaccccaacctcaactattaatagctgaaactgctcccttctctgggtgtgcccgcttggccggtctattgtcctggctgtacaatcccccccagaactattttcttttttcttgaggagtctcgctctgttgccaggctggagtgcagtggcatgatctcggctcactgcaacttctgcctcctgggttcaagcgattctcctgcctcagcctcccgagtagctgggactataggcgcgcaccaccatgcccagctaatttttatatttttagtagagacggggtttcaccatattagccaggatggtctcgatctgttgacctcgtgatctgcccgtctcggcctcccaaagtgctgcttagcactgttttctagaactcatcacagtcttccttgcagcaagattagtttgttttcaggcctatcacccacctcctcccacctgggctgtgattccatgagaacatgcaccaggttgacacagggcctggaataaaatcagcaccaatttgtagaataataattgccgtcacttactgagaactgcccaggtatttggcactgtgctaaaggcagcgtaactacctgaggagacggggaccatctccctctgggaaaccgcctcaaaaatcagaacggatggtgtcttgggcaaaggagagagtcagggtccaaagctaggctgtctgaactcggtgccacccagctcctctctggcagagcaccaagctccccccaccctaccctaggagctgggaagcccagtgggttaccccaccacccagtggcagcctctgccctccaggttgtgacataacaattgcacaacccacgagatatttttgaaagaaactgtcggtttcctctcctgggcactgctggggactgtggcccccatgccatccagtgtcttcagcaaccttgggactttggaagctaaatatagtcagggctcggggtgataaggaaatgaaaacggcaagactgtaaagtgacccagttttattttggttttggaggccagacagggcattgctccacgggttcgggctgtacaaccttcccctccttgaggtgggaggcccagcaaccacagggcccaggcagcggggtgggaggctcaggagatggtggctctggggacccgatcccgaggagagagggggcagcaggcagaggcctgcaatggctcagattgggggaagagggcggcgagggggagaggacacgatccaagaaccagagtccgaaagctgaagctggtccggtctctttcactttacggccgaggctggggtcagagaagtgaagccaaactgtcctcccgcaggaggcaaggcctggagggacgccagggtcccagtccggtgccgggccctgcgcacacagccgccgcctccaccctcgcggagggcgcgcgcggggcccagtcgctgggtgcagggtccggcgggcagtcgggccctttctcctctccggcacgccgggcgggcgccggccgccctcagcagctcacggagccggcgggcggcgcggaccccaagtccgagaagcagtcgaactcgctctggcccaggaagagctcgggcagctcgcgcacgcggtgcagcccgagctccagctccagcgacgtcagcgcctcctcgtcgatgagttcggcgtccatgccgcccagggcgtgcgcgggcggcggcggggctgcggcgcttggcgccggctgcgggcccggggggcctcccggagcgttggggggcgcggccgcgcggccggggtacggcgtcgccacaggctgcaggtgcgcgatgcccgcggccggcggaggcacggccggaaagggctggaaggaggacggcggcccgaaggccccgtacgccagggccccgggttggcggggcggcggcggccccagcggagccccccgcggcctcagcccactgtccaggcccgggcccgcgtacggcggcagagtccggagcgcatgagggccatgggcggccgcggcggacggcggcctctgcaccaggcggtagccctcggcgagcatcaggtggtcggccatggcggcaggccggctgcctgcggggacagcgcgcggtggtcagcgccggctcccccggcccgggccagcggctgctctgcggcgggagacccgggcaccgtgcggtccctgcagctcggccgggcggagcaaaaccaaacccgactggtgccccggcccagcccactactgcgcaccttgcggccgcagcctggggtcacaaaggcccgcaacctgtagtgctccgaaacctccgcgtcgcgtagctgggctcggcgtattcttatacccagaggcggggcttccccgccctcggacgctcattggctgggcgagacgcttctgggcgggccgcgcacgcctgcatctaggtcttggccccgcccctcccactggaaccccgccccttgggactccggccacgccccaggctctgagcaccgccctggggcggggtatttggcactttcggagggattcggtctggccctcagggcttcggaatcggacttggctggggtagagcttgaactgaccagaaggtggggtgggagggccagagttttaggccccccaagagctgcaggatgtcaggcctacgcaaccttttaactttccaggtagagaccgaggctcagtggcggaagaggcttcctggaaatacacagcaaagccttgatcaaagtgagactgcacagctacacagggcgcatgcaccttagcggtgcagggtccccgcaggaggtcagctgtccattcccataacccccaggagagcctgttgctccccctctagttcccactgcaccttgtctgttgaagcatgtacttagttgttattaatttatgggcacgtctcctgaaggacttgttcatcttcttcttctcagcacttggcccagagcctggcccagagcaggcttttagtaaaagctgagtgaatgaactaatgatggaatgaattgcaactctcagctgagcctcagtttcttcatctgtaaaaggtaaagaacagcagcactgaccctttgtgaggggtaag

SEQ ID NO: 33561 - DNA, 643 bp, Homo sapiens
gtgcctgtcctatactgtatttttataccatatttttactataccttttctgtgtttaggtacatgaatacttaccattgtgttagggttgcctacaatgttcagcccagtagcatgcagtacaggtttgtagcctaggagcaataggttataccacatagcctaggtgcatagtagactgtgccgtctgggtttgtgtaagtacactccatgatgtttgcacaatgataagatcacctgacaacatgtttctcagaacatatccacattgttaagtgactcatgactgtatttcagagaatgattccccaccactaggtcagctcccagagagcacaggcattgaatatcttgctctacacagtctttccaaggcatcagaacagtgcttgacacatagtagggacttaataagcattgactgtatgaataaattaggcacagaaaaacttactatccttgtggcttatgcctgtaatcccaagacttatagtaagtatccttatccttactgtccttatatttgagcaaagactttttgacagagaaggaaactgaggcccagaaaatggttggaattgctgaggtatgtatgtggagtgtatatctgcggtgtgtgtgtggtggaatcaggagtggaggc

SEQ ID NO: 33562 - DNA, 1418 bp, Homo sapiens
tttttttttccttccttccttctttccttccttccttcctttcttttctttcttttctttctttttctttttctttttttttgtaatagagatgaggtcttgctatgttgtccaggctgatctcaaattcccaaactcaagcaattttcctgcctcggccctctaatattgcatttaaacacataaaagagagaaaaatgagttggcttgtgcctataaagttgtttgtgtgatttataatgtaagtacaccgagactccccagaatggatgctgttgctgccctgtccagatcccctttcccagctgccatgatgtagactactaacagtcacagctgcccgcttcttttgagaattgttctcagccaaatagaagcttcccatctcccccaccctagtccttgacagtcctgggaagaaactagtaaggggtataaaaggctggtcctcttgcctcaatgtgagactgactctgtggagtaattggctgggacctgttcatctttcctccttcctttctctctctctcttttaaaaattattattattatttttagatacaggatctcactatattgaccaggctggttttgaactcctgacctcaagcaatcctcctgcttcagcctcccaaagtgctgggattacaggtgtgagccactgcatctggccagatgatgaccttgacctctgattgctgccacataactggaactcagagaccttcttgcacatctgtggaaaggggagtttgctttgaactgcatttcctcaccagcgtcacccattccttaagagtcaggttgataaacgagtcaatgctgagcccaaaccaggcaggattaatcatttcctcctccacattgctgctgctgctgctgctgcatcctgtgtctgagtcatttcctcatctttaatagctaacatgatgcccagtacaaaataggtatgggggaatatttactgaatgaatgtcattgaatctgacaccgttggatgttggatccactcagtccacttggccacagtttaagcagcgtgagggtagagccaagtttttttgtttgtttgtttgtttgtttgtttttagagacactatgcaaataggtagagctaagttttactctttggtgtgggaagggcaggatggtgcagtgcaagagcatgagctctgcagacactcaggaatcctgtgcttgaattccaactctgtgcctctgggtcttgaaattttaggcaaattatttctcttggaacctgtttcctcatctgtaaaatgggggtgatatcaacaagagttatgtgccaggcaattaggaggattaaatgagataatgcaactaaaatttccatcattggcctaacacaaagtaggagcttggtaaatattaattttctctattctggtattcccata

SEQ ID NO: 33563 - DNA, 1859 bp, Homo sapiens
atagcacattgattttcttcatggtgcagagaaaaaggttgagttttatagcttgcatcttcaagataatggagaaaaactgattctgttttctgcatctcagatctaaaaatccctgggaaaagactcattggcccagcttaggtcaagcctccccttggaccaatcaactggtaatggagtagggagggcactccatcacaacacacacgttagatgacatatgagcaaaactatcccaggcactgttttaaggcttaacatgtgttaactgacttcatcctcataatacaacaatcccatcagagctattattgtctctgttttgaagtgaggaaactgaaaacaagccacagagaggtgaagtaacttgcccaagactacacagctaaaaagaggtgcagccaggacttacaccacagctatctgactccagaatccacccacttaatgaccacagtggtctgcctctcatattgagttcctggggggttccaatagattgaggggtgggcaggatggaggcactccaaggaaatatctggaatgctaactcagagaaggtaagcctctgggggcccttgatctcactgtcttcaggcctctaaatgactctcactaggcaatggcagtggaaggttctggatcacctcagaaaacaaatctaggatcagtgggtggacaccactggaaagtgggtttcaattcgatggtaggaatttcttcagagtcagggatattagtgctcaaagtcacacaacaagctgaactggggtttaaacttatgcctgaaggagtgctgaggctttgctgttaaccactgtgccccatcttcgtttccttctcaaaatgaggaaaagaatattggtggaggtgaggcagggagacacagggcctacatctacccacatttcattaaaggcctgctgtttcccagcagatggaggctgcttatgtgatcatctccagttaccccgtgggtttgccccgcccccttggctggtgtgtaaattccctgtggggagagtcatgtgccctcttaaatgcccagtcttatgctgtcctggctggggcctgtgggatgggggagctgggaggacgcttcctgtagttcctcaggtgcctcccagcatggcttagactttgggggcagggttggaccaggcaggaaggggcagctgggggtttcctctgggtgcgacagcctggctcttgctgggctggaagccaagcctgggaaggaatttcccagtcctgtctgaattctgttttctctttttattttatttttttagagacagagtctccctctgtcacccaggctggagtgcagtgatgcggtcatagctcactataacctcaaacttttgggctcaagtgactctcaccccttagtctcaagagtggctgggactacaggagagtgcccccatgccctgctaattattatttttatttttatattttttgtagtgacgagggtctcactttgttgcccaggctagactcaaactcctggcctcaagtgatccctccaccatagcttcccaaaaccctgggattagagacaaacctgagccactgtgcctggcctgaattctgttttctttgtggagggagggagaatagtgtgagaagatgaatcctgttcctcacctccccagcaactagccttaaggtagaagaggagaattggggtagtctttatttgggaggaggaagcagcactttctcataaggcatcagggtttggtgcttctctgctaggaaaagaataatactctcacacccccaaagctaataggtgcccagggaagtcttggcttagttgggtgaccgtgctgagaaatagaaatata

SEQ ID NO: 33564 - DNA, 851 bp, Homo sapiens
tcattagcatcattaccattatgccgacttgccaagtctaatttgggaaactttgaaggacgggcttcactatatcagtgattgatttgtttacatgaaatagaagcccactccagctagtttaagcaaaaaatgtaattcaatataaggcgttagaactatctcacagatctcaagggcaggcaagtcgcacaaggaccttacactcaggactggtgttgggggaatgcccacctttccgtccacttctctcaaaacaccaatttcctttctgtctttcagacacgtgtcccaagcagccctccttggcaaatctacatttccttacccaaccaggacctgtggcaaacagtctggcctctccttgtcctaattccaaagttcaggaatctgactggcccagcctggcctctagagtggttgcctgtgagtcaggtacctgcttctgccccagttaactggacaaggaggctgggctgcatagaagaaccaaggacccaggagactccctgggcttgtgggctgagcaggtacctactgaagaaacctgaagaaaactgaagaaacctacttcagtttggccggtcctggggactaggagcaggccaggtgggccacgtttctgcccagtcatttcccagtgctgagcttcttcaggggtaaaatggctttctctggcattttagtgtcttagtgcctctagaaactctggaaggttctttttattttttactttattacttttttttttttttttgagacggggtcttgctctgtgcagcggcgccatctcggctcactgcaacctctgcttcccaggttcaagcaattctcccacctcagcctcctga

SEQ ID NO: 33565 - DNA, 682 bp, Homo sapiens
ttttaaaaactcagtcctggccctccctttttaataaaatgctgggctggtactctgtgatattcactccttaggcaggggcaaatttggggactatctcgtctaacatgggcagggctagtagggaagagagaccaagaaggtggcccagttcctccccaaactgcctccagccatgggcttagcactccaagccacaggtgtggctacgctggggtcaaaacaatgctccagggtggcacagccggactcggcgttcctttcctcccgggctgcccaggtcccctgtcagcatgcctggctgctccccagggagcatggcaaacaagcctctattgattctccctcgtggctagaagaatgcccctttgttgagcgtgtcaccctccccctccccgtgtccttgcccttaggagaggagttcaggtaggaagcagcaggccatggctccttccccagggacccaagaggaaagcaggggcagaacactgctccagctcccagaggaggcctccacgtcccacccttttcccttctcctctctgctgtttcccgagcttgggcacccttgcccatcaccctggttacccggtcattactcatgggaggtccagtcccagatctctcagtgctaaaacccacttaaggtcctgctcaaatgcccactgttccacggagccct

SEQ ID NO: 33566 - DNA, 538 bp, Homo sapiens
cagaaaaatggggttcataacaatatctgcttcataagatggacctctgtgagcacagctctcaggacagcacttggcaaagggtggggagttggtaaatactcattgaacagaggcaccatggagttgttgtgagaggtgagatgagatgaggctgatctgtcagatacatgacaaccagttcccaaaatttctgaaagaaggaccagagccaggattccacaacatggcacctgtgtgaacaggagttctgaagagggcattcagagccgggaggaacaaaagggatcatgttgttgacacatgaggtaatcacctggcaggttggtggcagagctggctggaaccatggccatccgtcagttctcaggcagtgcattgcaggggagagaaccaaagaaagtgttcttcaaggccaaggtcccttctgccagcccatggggcctccgattctgttctcatggggagttggggtgaggatgcctgtgtcatccatgggtgaattctccagcctctctggggagctctacatgcccgg

SEQ ID NO: 33567 - DNA, 983 bp, Homo sapiens
ttcaccatgttggccaggctggtctccaactcctgaccccaaatgatccgcccgcctcagcctcccaaagtgctaggattacaggcgtgacccatcacgcccggccatctggtaattttctaaacagttccatgagaacatgaaattgcccatgcttatctccagagacagtgactggacaccaaacctcttgtgcattggattcttctgtcaggatttctttagcctccttgcagaggctcttgacctgggacttggatagctactttctctggttcagctgcttgatccactggtccagctccttggagaacacctcatccatgatgccacctgcccgagctggctgctgcacacgggccacatgcatctgtggccactgacagttgcttggtgctgctgctggcccacagactctccacagtgctcggccaacaactactgtgtctcttccctactcactctggctccagagcttggttctctgaaatcgtgagtatttcgaaatacttgaaacaacaaagttcaattgagttcaaagtccacttacatcattgcaagcaatttcattcattcatgccagaaaagcaagtactgttagagtcttccattaaaatttcaatttcattttaaaattttgcgcaggaattttgtgtagctgtttcagacaaaaaatctaaaaattgatgtgcacagaaggaagctcagatctctaaataaaacttttgaaaagattttatttggaagtatttacaaattcacatttaatatctttgctaattgtttttcaggggtatcccaggcccatgaaattagatgattataatccttggtttatggtacattctttttttttttttttttttttagacagagtattttactgtcacccaggctggagtgcagtggtgcgatctcagctcactgcaacctccgcctcctgggttcaagtgattctcctgcctcagcctcccgagtagctg

SEQ ID NO: 33568 - DNA, 2428 bp, Homo sapiens
gagccgagattgtgccattgcactccagcctgggcaacaagagcaaaactccatctcaaaacaaacaaacaaacaaacaaaaaactcctgctcataccttttgtgtccatttttctttcttactgaattgtagaagttttttgttttttttttttaaggggcttgctctatcccctagactagagtgcagtggtatgatcatggctcactgtagcctcgacctccctgggctcaggagatcctcccacctcagcctcctgagtagctgggaccacaggcagtccacctatattttctactaatagttttaaagttttatttttttaaatttaagtccttaaaacatctagtgcggatctttgtttatgttgtgaagtaatttttccagctctgtttattggcccatcctccctttcttcgctgtgatatgccactcctgccgcatatatataccatatatatgtggatctgattctggtctctctactccttctcaggggtcaatgtgtctgtccctatgtggataccgtactgtcttaatggctgtagcttcatcgtgggtcctgattcctggcaggggtgatgaaccctgccccactccacccccgctactctgcccagtaacagggagaagcaccctctgctggctctgctccttccaaataagtggcctcaggcatactgtctatttcccttttgaatcttggtattcttgtgcgtaaaccagggagtaatgattctacctcataagaatgttctgagcatccaataagactgtacataaataaagcttctggcacagcgcctatttgttgggcctgaatgtttgtgaaatggggtccagagacgttcaatgacgtgctcaaggtcacaggaccagacccataatatgctgtcttctcactgctgagcttcaaagaccatttccagacaagttagccttctcaagagtctttcttccattttcttcccttccaggaaaaaacaaaggtaagaaagaaagaaagaaagaaagaaagaaagaaagaaagaaagaaagaaagaaaggaaggaaggaagaaagcaagcaaagcaaagcaaagcaaagcaaagcaaagcaaagcaaagcaaagcaaagcaaagaaagaaaagaatccatttccaaaagctcacagcataccacagttcccaatgactgcatcttttttggctttttcttatctaatgggaacggaatgaactggatcagggtttctctaacaatgttggagaggaagtcaggtttatttaaaatttaacttcttttggctctgttaccactggccttggctgagccatggctcgagggcatccgaaagcaatgagatccgggcatggtttccaggagagtccctgggagcaagttcagtgtccctgaacttgtcatcatgaaaattgcagtggccttgagggttaatcactgaagttagcatgtaaagctgggtctgcatctgtgttgttccctctgtctctcctgatcccacacagccaagacacagagcaggtgcgcagtgtggaataaacaaaggaaagtgggcggaaagatttacagtcaccttgaggagactgtttggcctcattgtagagacattaacagagccaaagaaagggtgtgcagcttctcaggagatttgttgctattatagtgagaaaggtttggaaaagattatgagcatgttcaaagttacgataattaaagcgtgttagctcagaaactgaagacaaagaagtaaagtggaattgaattcacaaatagacctaaacacataagaaaatctggtgtatgataagggtggcatttcacatatgtaaggggaaactacatgttgatgagccatctggaaaaaaaccaaactgaatctctaacttactgcatgcactgaaataaattccagatggattaagtatgcattggtaaaaaacaaaaccataaacatgctagaagaaaatatcagagaatgttttcctaatcatggagtggagaaaatctttctaaaatatgacacaaatcccagaagttatcaaggaaaagatggacagatcttactacataaatatttttaaacttctgtagggggaaaaaacatatgcaaggcaaatgacaaacactaaattataaaaaatactgatttgctttccacatggcagatgagagctaataacctgatatgcaaagacctcctacaaatcaacttaaaaaaaaaaagtacaggctgggtgcagttgctgacgcttgtaatcccagcactttgggaggccaaggtgggcagatcacaaggtcaggagtttgagaccagcctggccaacatggtgaaaccccatctctactgaagttacaaaaaatgagcccagtgtagtggcacacacctgtgaccccagctacttggatgggtgaggcaggagaatcact

SEQ ID NO: 33569 - DNA, 1192 bp, Homo sapiens
aacatggtgaaaccccatttctactaaaaatacaaaaattagctaggcatggttgcgcacacctgtaatcccagctactcgggaggctgaagcagaattgcttgaacccgggaggcagaagttgcagtggaccgagctcccaccactgcactccagcctgggcagtagagcaagtcttcgtgtcaaaaaaaaaaaaaaaattattttaactgatgttatggttactaaaagtcggcctggaaggacagatgactcccagactgctaacaaatagggttttctcccggacagcgtttccctcccccggctattagaggtttcccaccaagactcctggcttccttttcagagccaagagagccaaaggggcccttgtgttgcccagggctcactggggcatagtaaacatgccctaaatacagtgcagtcccacccttaacagtaaagctaccctatccagcagccctttcgcagagtgcgggaatagcagcctccccttcccaccccatactgtgagcttccctagggcagacaccagggctaactgttgtctgtattcctagcagccagcacagataatattactcgaactaatttattaacacaaacacagactaacacaactcgcccaccaggcagatggcgaagcctggctataaaactggcacaaggaagagagaaaattgattagcaatgagtcatgaatggcaggaaagcatgaaggagaaaaggcagatacacgaagtctgtctaccagctggtccttttttaaaaagggaggaggcagacagtgccccctacagggctaatggaaatggcatctgccctttttaggaagaagggcagaggtaggtagggttggaggggtggggaggtgggtgcgggctatgctgtattctatcctgcaatgccagtgagtgagactgtagatcatgttgccactaatgacatctggtggaaacggcatttgtggtggagataacttaataacatagcatgtgcggcactgtgctacagcccacaagaaatggaaagaatggcaagaagtacttgtttgtccctgtgtccccagcaccaggggcctggcacagagcaggggctcactagaagcttgagaaggaaggaagccagggagtgaggtaaggagggagggcaaagggaggagatagggaaaatgacgcaaggaccaagg

SEQ ID NO: 33570 - DNA, 1303 bp, Homo sapiens
cttgaacctgggaggcagaggttgtggtgagccgagatcatgccattgcactccagcctgggcaacaagagcgaaactttgtctcaaaaaaagaaaaaatttaaatttctttagagttgctctttttcagagccttgctctgttgcccagcctgtagtgctgtggtgccatcacagctcactgtaactacaaactcttgggctcaagccatccttctgcctcagcttcccaagtacccgagactacaggactacaggcatgcaccaccatgcctggctaatttttagtgtttttgcagagacagagtcttgctatgttgcccaggctagtcttgaattccaggcctcaagtgatcctcttacctcagcctcccaaagtactcggattacaagtgagagtcaccaggcccagtctgtttgcagtttcctaaacagactgagcctcctgcctctgtgactcagcacatgatcacccctccctctattgtaccccccaaacccctaccctgccagcctggcctcccttcttccctatattgatgcctgccgatccttagagacagttctctgggaagctttttctggtgctgtgggtgtgttaggtgccctttctatgagtcctaaagcaccccaccactttcctccactactgtactgctcctttctcagtactgtaattgtctttgtaaccctggtgtctgcaacaatgcctggaatatgagcaatgccaataaatatttggtaaatgaatcaacgaaaaagatacccgttctgcagactcctttgctttgtttgcataatgagaatcagaggaagataatgtttacctaaaaaggaagaggatctggcatgcaggagggagagaggaaacatgtacaacttaaaggagccaagtaaaatgttgtgaattttactattcttaaatgattctcagctgggcgcagtgactcacacctgtaatcccagcactttgggagacagaggcagaggcatgcggatcacaaggtcaggagcctggccaatatagtgaaaccccgtctctactaaaaatacaaaaattagccaggcgtggtggtatgcgcctgtagttccggctactcgagaggctgaggcagaatcacttgaacccgggaggcgaaggttgcagtgagccaggattgtgccactgcactccagcctgggcgacagagcgagactccatcccccatcacccccccaaaaaagattctcagaactttaatagatgaccatactattctaagtttagctgtaaaaagagccttgagaaaactaatctatggtat

SEQ ID NO: 33571 - DNA, 2858 bp, Homo sapiens
cgcctgcctcggcctcccaaaatgttgggattacaggtgtgagccactgcgcccggcctactattattatttttataagaaacggggtctcgctatgttacccaagttggtctcgaactgttgggctcaagcatgtctcactttcttatccccgcctctccctttcccatctttgccgtctacttaggtctctgcttcaaagttactttttcagggcgggcttcccgcctgaattcccaatcaccaccggacttgggtcagtccccgcgctgggcactcactgccccggcaccagcatctctgcagcaagcacccataacaaccataaagtgtaatgagctgctcagtgtgcctccctacatcgttagtccgaggagagggtccctcggtgcccagcacagtgcgtggcacagtcggtgctcagggagcgatagctagatgaaaccgtacttttcgggatcctagtccatccaaagcagccgccttcggggcaggtgtggggaggagggaggccgacgaggagccaacgccgcgcgaccctccgcacttccgtcttggaggccagggtggcgctgccgccgtccctcgcccggaggcagagatgcgctggcgcatcaccgccaggagcccacagtgaaagaccatcggatggaaggcgacgcccagaactccaggagaccgctgtgggaggacgcgaggccaggtgacgaataggccaggcgtgagttcccaaacagcctcctccccttcaagagagtaagcttgggccacaggctgggacggaagcagaggggcagacacgccaccacccgcccggcctcgaacctacggcggcacagttcagcggaggcggcccagcggtcctgtcccgcgcctgcgcactccaggccccgccccgccccgcgccctccaggcccggcccgccctccaacctctgcgtgcgcacagcctagagcccgcctccgtgaaagactgccgggcgcatgcggtcggggttgttcactggctgtccggggctccgcgcgcgtcgccggcccagctctgtcgctgacgggaggatctgaagccggccgcaggtaggctgactccagggatcccgggggggatctgttctcccgcgcaggagtcagcggcgcgagctgagcccggcgccgaatagccccgccgccgcggtgacggacgtcgctcctaccaatcaggggcgaggtgactcggcgtcctgcccaatgggctgtgtgcctaacgggagtggggcgggcgccccggccggcgagctgccggctcccgcgcgcgggcctcgtggccgggcggcgctggggagaggggccaagcggggcgcggggcggcttcagaggctgcggggcctgcgctgccgcgctgggccgcgccgaatcagctcggccgggctcgtcggacggagaaggccgtaggggagtggagcggcgcccccccccacaccctccgcccttgctcttcgtctgcgaggaagcccggcagtcgcccatccattcaagcagtgcgggcctcgggcctccggcctcggcgcgggctcagccgcccggggctgggcgcggcagctccgcgccgtaggacgagggggcctgcgaactcgccggccctgggccccgcggctggcctttgggcctcacggcttcctcccttcccggcggccgggggtcggggcgctggcggtgtatagagctcaccacgtttgcgtggcgcccttccgtccacgctcgttacagtttcgaatcctcagcggccctgtgacgcgggcggcgcagagattctcacccccattcccctaggtgagaacccgcgttgcaggcagctcaagtgacatgattgaggtctgcacactagtgatgggggctggcacttcatctcataacattgaaagaaaaagcatttcccccctcagtctttgttgaatttctctgatgcgtcttgatttacgttacttctgtgccggaaaaccttcttgcgccttccgtcaccttcaggattaagttcagattgggcatgccagtttgcacatgatctggcccttgcctacctttccagtttatcttccactgtatatccctgcttccccgccttccccctcacggccttacctctgttctctgtagctgccctgcacctgcctgttcaccctgttccctttcctgtgctctgagtcgtgcagtcagtccttcaaggcccattgcaagtcatatctacaaaacaggagccgcctggatccgcccactacccccaggacttgtctcaccttcctctgatggccatggtactgaaagcgtctgctctcatcgtccccctttatagtctaaacatgttttctgtctgcttccaccgtcactgaattactcatttatttgttaatgtttcatctctccaactggactgccagaaagttgagatatgggcccaaatctgattaatgtttgcagtccccaagcacagtagctgtcatgtaagtcagtagcccataaggatgaatgaatgagcctcccgcctgatctttatgtacactggcatatgtattgccaggcactgagactgcaagaatctaaagagagaaactaaagaacgtaaagagagatgttaaactcttagagtaaaattgggacaaatcaaatgtaattggatgagatgaatcttttgtagaagtaactcactcggtggcagaggaatttctaggatcatccaaaacttagggagaccagggtatagtctcagtaaggtatatgtctggttagaacatatctaaaatgtacctaagactgattttcatgtgtcaataaggaactgtaaagtgagagacttagggtcagataagcttggagacaccgcat
